United States Patent Application Publication US 2008/0113351 A1 - sequence listing, part 27

SEQ ID NO: 658762 - DNA, 19 bp, Mus musculus
  siRNA target sequence for Mrps22 (NM_025485.1,722-740).
ccagattccgctgagtata

SEQ ID NO: 658763 - DNA, 19 bp, Mus musculus
  siRNA target sequence for Mrps22 (NM_025485.1,723-741).
cagattccgctgagtatat

SEQ ID NO: 658764 - DNA, 19 bp, Mus musculus
  siRNA target sequence for Mrps22 (NM_025485.1,725-743).
gattccgctgagtatatca

SEQ ID NO: 658765 - DNA, 19 bp, Mus musculus
  siRNA target sequence for Mrps22 (NM_025485.1,736-754).
gtatatcaaggttcatcat

SEQ ID NO: 658766 - DNA, 19 bp, Mus musculus
  siRNA target sequence for Mrps22 (NM_025485.1,791-809).
gagcttttacgttcaacaa

SEQ ID NO: 658767 - DNA, 19 bp, Mus musculus
  siRNA target sequence for Mrps22 (NM_025485.1,793-811).
gcttttacgttcaacaaga

SEQ ID NO: 658768 - DNA, 19 bp, Mus musculus
  siRNA target sequence for Mrps22 (NM_025485.1,853-871).
gattgatggtttgcttatt

SEQ ID NO: 658769 - DNA, 19 bp, Mus musculus
  siRNA target sequence for Mrps22 (NM_025485.1,977-995).
gctgagggagtcgacttaa

SEQ ID NO: 658770 - DNA, 19 bp, Mus musculus
  siRNA target sequence for Mrps22 (NM_025485.1,978-996).
ctgagggagtcgacttaat

SEQ ID NO: 658771 - DNA, 19 bp, Mus musculus
  siRNA target sequence for Mrps22 (NM_025485.1,984-1002).
gagtcgacttaattaaggt

SEQ ID NO: 658772 - DNA, 19 bp, Mus musculus
  siRNA target sequence for Mrps22 (NM_025485.1,1047-1065).
cacttcaaacttatcaaga

SEQ ID NO: 658773 - DNA, 19 bp, Mus musculus
  siRNA target sequence for Mrps22 (NM_025485.1,1064-1082).
gaaatagttaccagtcatt

SEQ ID NO: 658774 - DNA, 19 bp, Mus musculus
  siRNA target sequence for Mrps23 (NM_024174.4,65-83).
cccggacgagggatctgat

SEQ ID NO: 658775 - DNA, 19 bp, Mus musculus
  siRNA target sequence for Mrps23 (NM_024174.4,109-127).
ccactgtggtatgacatat

SEQ ID NO: 658776 - DNA, 19 bp, Mus musculus
  siRNA target sequence for Mrps23 (NM_024174.4,110-128).
cactgtggtatgacatata

SEQ ID NO: 658777 - DNA, 19 bp, Mus musculus
  siRNA target sequence for Mrps23 (NM_024174.4,112-130).
ctgtggtatgacatatata

SEQ ID NO: 658778 - DNA, 19 bp, Mus musculus
  siRNA target sequence for Mrps23 (NM_024174.4,229-247).
cagattcgagcgaaattct

SEQ ID NO: 658779 - DNA, 19 bp, Mus musculus
  siRNA target sequence for Mrps23 (NM_024174.4,231-249).
gattcgagcgaaattcttt

SEQ ID NO: 658780 - DNA, 19 bp, Mus musculus
  siRNA target sequence for Mrps23 (NM_024174.4,235-253).
cgagcgaaattctttgcaa

SEQ ID NO: 658781 - DNA, 19 bp, Mus musculus
  siRNA target sequence for Mrps23 (NM_024174.4,240-258).
gaaattctttgcaacctat

SEQ ID NO: 658782 - DNA, 19 bp, Mus musculus
  siRNA target sequence for Mrps23 (NM_024174.4,255-273).
ctatggatctggtcagaaa

SEQ ID NO: 658783 - DNA, 19 bp, Mus musculus
  siRNA target sequence for Mrps23 (NM_024174.4,411-429).
catcattttaagaagagtt

SEQ ID NO: 658784 - DNA, 19 bp, Mus musculus
  siRNA target sequence for Mrps25 (NM_025578.2,158-176).
ggcgaaggcgccaggaaat

SEQ ID NO: 658785 - DNA, 19 bp, Mus musculus
  siRNA target sequence for Mrps25 (NM_025578.2,164-182).
ggcgccaggaaatttgtgt

SEQ ID NO: 658786 - DNA, 19 bp, Mus musculus
  siRNA target sequence for Mrps25 (NM_025578.2,165-183).
gcgccaggaaatttgtgtt

SEQ ID NO: 658787 - DNA, 19 bp, Mus musculus
  siRNA target sequence for Mrps25 (NM_025578.2,166-184).
cgccaggaaatttgtgttt

SEQ ID NO: 658788 - DNA, 19 bp, Mus musculus
  siRNA target sequence for Mrps25 (NM_025578.2,167-185).
gccaggaaatttgtgtttt

SEQ ID NO: 658789 - DNA, 19 bp, Mus musculus
  siRNA target sequence for Mrps25 (NM_025578.2,168-186).
ccaggaaatttgtgttttt

SEQ ID NO: 658790 - DNA, 19 bp, Mus musculus
  siRNA target sequence for Mrps25 (NM_025578.2,194-212).
cctcagatccagtataaga

SEQ ID NO: 658791 - DNA, 19 bp, Mus musculus
  siRNA target sequence for Mrps25 (NM_025578.2,195-213).
ctcagatccagtataagaa

SEQ ID NO: 658792 - DNA, 19 bp, Mus musculus
  siRNA target sequence for Mrps25 (NM_025578.2,219-237).
gggtgcagatcatgatgtt

SEQ ID NO: 658793 - DNA, 19 bp, Mus musculus
  siRNA target sequence for Mrps25 (NM_025578.2,221-239).
gtgcagatcatgatgttta

SEQ ID NO: 658794 - DNA, 19 bp, Mus musculus
  siRNA target sequence for Mrps25 (NM_025578.2,259-277).
cttcctgcggttctatcta

SEQ ID NO: 658795 - DNA, 19 bp, Mus musculus
  siRNA target sequence for Mrps25 (NM_025578.2,262-280).
cctgcggttctatctagat

SEQ ID NO: 658796 - DNA, 19 bp, Mus musculus
  siRNA target sequence for Mrps25 (NM_025578.2,263-281).
ctgcggttctatctagatt

SEQ ID NO: 658797 - DNA, 19 bp, Mus musculus
  siRNA target sequence for Mrps25 (NM_025578.2,265-283).
gcggttctatctagattct

SEQ ID NO: 658798 - DNA, 19 bp, Mus musculus
  siRNA target sequence for Mrps25 (NM_025578.2,302-320).
gacgtggagacgaagagta

SEQ ID NO: 658799 - DNA, 19 bp, Mus musculus
  siRNA target sequence for Mrps25 (NM_025578.2,304-322).
cgtggagacgaagagtaat

SEQ ID NO: 658800 - DNA, 19 bp, Mus musculus
  siRNA target sequence for Mrps25 (NM_025578.2,305-323).
gtggagacgaagagtaata

SEQ ID NO: 658801 - DNA, 19 bp, Mus musculus
  siRNA target sequence for Mrps25 (NM_025578.2,511-529).
gatgacagggaagtacaaa

SEQ ID NO: 658802 - DNA, 19 bp, Mus musculus
  siRNA target sequence for Mrps30 (NM_021556.2,252-270).
gagaagatacggattctca

SEQ ID NO: 658803 - DNA, 19 bp, Mus musculus
  siRNA target sequence for Mrps30 (NM_021556.2,592-610).
ctgccgctctcgattgtaa

SEQ ID NO: 658804 - DNA, 19 bp, Mus musculus
  siRNA target sequence for Mrps30 (NM_021556.2,607-625).
gtaaacgctctgttgactt

SEQ ID NO: 658805 - DNA, 19 bp, Mus musculus
  siRNA target sequence for Mrps30 (NM_021556.2,629-647).
ctggttgcgtggtgaagaa

SEQ ID NO: 658806 - DNA, 19 bp, Mus musculus
  siRNA target sequence for Mrps30 (NM_021556.2,674-692).
ccatattgatgctttacga

SEQ ID NO: 658807 - DNA, 19 bp, Mus musculus
  siRNA target sequence for Mrps30 (NM_021556.2,675-693).
catattgatgctttacgat

SEQ ID NO: 658808 - DNA, 19 bp, Mus musculus
  siRNA target sequence for Mrps30 (NM_021556.2,681-699).
gatgctttacgataccaaa

SEQ ID NO: 658809 - DNA, 19 bp, Mus musculus
  siRNA target sequence for Mrps30 (NM_021556.2,684-702).
gctttacgataccaaataa

SEQ ID NO: 658810 - DNA, 19 bp, Mus musculus
  siRNA target sequence for Mrps30 (NM_021556.2,685-703).
ctttacgataccaaataaa

SEQ ID NO: 658811 - DNA, 19 bp, Mus musculus
  siRNA target sequence for Mrps30 (NM_021556.2,691-709).
gataccaaataaatgacaa

SEQ ID NO: 658812 - DNA, 19 bp, Mus musculus
  siRNA target sequence for Mrps30 (NM_021556.2,712-730).
cacacaaccagattcgaat

SEQ ID NO: 658813 - DNA, 19 bp, Mus musculus
  siRNA target sequence for Mrps30 (NM_021556.2,714-732).
cacaaccagattcgaatat

SEQ ID NO: 658814 - DNA, 19 bp, Mus musculus
  siRNA target sequence for Mrps30 (NM_021556.2,716-734).
caaccagattcgaatatct

SEQ ID NO: 658815 - DNA, 19 bp, Mus musculus
  siRNA target sequence for Mrps30 (NM_021556.2,722-740).
gattcgaatatctaagcaa

SEQ ID NO: 658816 - DNA, 19 bp, Mus musculus
  siRNA target sequence for Mrps30 (NM_021556.2,778-796).
cagaaatccctgtgatgaa

SEQ ID NO: 658817 - DNA, 19 bp, Mus musculus
  siRNA target sequence for Mrps30 (NM_021556.2,780-798).
gaaatccctgtgatgaaat

SEQ ID NO: 658818 - DNA, 19 bp, Mus musculus
  siRNA target sequence for Mrps30 (NM_021556.2,828-846).
cggcagtatgaaaacagta

SEQ ID NO: 658819 - DNA, 19 bp, Mus musculus
  siRNA target sequence for Mrps30 (NM_021556.2,829-847).
ggcagtatgaaaacagtat

SEQ ID NO: 658820 - DNA, 19 bp, Mus musculus
  siRNA target sequence for Mrps30 (NM_021556.2,830-848).
gcagtatgaaaacagtata

SEQ ID NO: 658821 - DNA, 19 bp, Mus musculus
  siRNA target sequence for Mrps30 (NM_021556.2,831-849).
cagtatgaaaacagtatat

SEQ ID NO: 658822 - DNA, 19 bp, Mus musculus
  siRNA target sequence for Mrps30 (NM_021556.2,1006-1024).
ggactggagcacaagctat

SEQ ID NO: 658823 - DNA, 19 bp, Mus musculus
  siRNA target sequence for Mrps30 (NM_021556.2,1009-1027).
ctggagcacaagctatgta

SEQ ID NO: 658824 - DNA, 19 bp, Mus musculus
  siRNA target sequence for Mrps30 (NM_021556.2,1053-1071).
gttactcgaccttttgtct

SEQ ID NO: 658825 - DNA, 19 bp, Mus musculus
  siRNA target sequence for Mrps30 (NM_021556.2,1089-1107).
gacggaaaatacttttctt

SEQ ID NO: 658826 - DNA, 19 bp, Mus musculus
  siRNA target sequence for Mrps30 (NM_021556.2,1112-1130).
ctgctaccagttaaatact

SEQ ID NO: 658827 - DNA, 19 bp, Mus musculus
  siRNA target sequence for Mrps30 (NM_021556.2,1155-1173).
caaaataacccccgtaaaa

SEQ ID NO: 658828 - DNA, 19 bp, Mus musculus
  siRNA target sequence for Mrps30 (NM_021556.2,1163-1181).
cccccgtaaaaatctatgt

SEQ ID NO: 658829 - DNA, 19 bp, Mus musculus
  siRNA target sequence for Mrps30 (NM_021556.2,1164-1182).
ccccgtaaaaatctatgtt

SEQ ID NO: 658830 - DNA, 19 bp, Mus musculus
  siRNA target sequence for Mrps30 (NM_021556.2,1211-1229).
gaccgtggaggataatgat

SEQ ID NO: 658831 - DNA, 19 bp, Mus musculus
  siRNA target sequence for Mrps30 (NM_021556.2,1213-1231).
ccgtggaggataatgatgt

SEQ ID NO: 658832 - DNA, 19 bp, Mus musculus
  siRNA target sequence for Mrps30 (NM_021556.2,1217-1235).
ggaggataatgatgtgaaa

SEQ ID NO: 658833 - DNA, 19 bp, Mus musculus
  siRNA target sequence for Mrps30 (NM_021556.2,1249-1267).
gtactctcctgcagatagt

SEQ ID NO: 658834 - DNA, 19 bp, Mus musculus
  siRNA target sequence for Mrps30 (NM_021556.2,1266-1284).
gttcactttctgctaaata

SEQ ID NO: 658835 - DNA, 19 bp, Mus musculus
  siRNA target sequence for Mrps31 (NM_020560.1,206-224).
caatctgtagcaagaaagt

SEQ ID NO: 658836 - DNA, 19 bp, Mus musculus
  siRNA target sequence for Mrps31 (NM_020560.1,304-322).
gacctgctggacattatta

SEQ ID NO: 658837 - DNA, 19 bp, Mus musculus
  siRNA target sequence for Mrps31 (NM_020560.1,369-387).
gccacgtggcagaaaacct

SEQ ID NO: 658838 - DNA, 19 bp, Mus musculus
  siRNA target sequence for Mrps31 (NM_020560.1,370-388).
ccacgtggcagaaaacctt

SEQ ID NO: 658839 - DNA, 19 bp, Mus musculus
  siRNA target sequence for Mrps31 (NM_020560.1,407-425).
ccgttgacaggcttcagaa

SEQ ID NO: 658840 - DNA, 19 bp, Mus musculus
  siRNA target sequence for Mrps31 (NM_020560.1,502-520).
gattccctaccttttgaca

SEQ ID NO: 658841 - DNA, 19 bp, Mus musculus
  siRNA target sequence for Mrps31 (NM_020560.1,606-624).
gatcagcttcactcacata

SEQ ID NO: 658842 - DNA, 19 bp, Mus musculus
  siRNA target sequence for Mrps31 (NM_020560.1,612-630).
cttcactcacataatatca

SEQ ID NO: 658843 - DNA, 19 bp, Mus musculus
  siRNA target sequence for Mrps31 (NM_020560.1,617-635).
ctcacataatatcaaatat

SEQ ID NO: 658844 - DNA, 19 bp, Mus musculus
  siRNA target sequence for Mrps31 (NM_020560.1,674-692).
ggccacagcaccagattca

SEQ ID NO: 658845 - DNA, 19 bp, Mus musculus
  siRNA target sequence for Mrps31 (NM_020560.1,703-721).
gacatggacagttctctta

SEQ ID NO: 658846 - DNA, 19 bp, Mus musculus
  siRNA target sequence for Mrps31 (NM_020560.1,724-742).
caggagaagccaactgatt

SEQ ID NO: 658847 - DNA, 19 bp, Mus musculus
  siRNA target sequence for Mrps31 (NM_020560.1,729-747).
gaagccaactgatttcaga

SEQ ID NO: 658848 - DNA, 19 bp, Mus musculus
  siRNA target sequence for Mrps31 (NM_020560.1,845-863).
gggagatagagtttgctaa

SEQ ID NO: 658849 - DNA, 19 bp, Mus musculus
  siRNA target sequence for Mrps31 (NM_020560.1,880-898).
gctgaccagccctttgaga

SEQ ID NO: 658850 - DNA, 19 bp, Mus musculus
  siRNA target sequence for Mrps31 (NM_020560.1,902-920).
gatttgaggagatgataca

SEQ ID NO: 658851 - DNA, 19 bp, Mus musculus
  siRNA target sequence for Mrps31 (NM_020560.1,945-963).
ggagttcccagtcaacaat

SEQ ID NO: 658852 - DNA, 19 bp, Mus musculus
  siRNA target sequence for Mrps31 (NM_020560.1,948-966).
gttcccagtcaacaatgaa

SEQ ID NO: 658853 - DNA, 19 bp, Mus musculus
  siRNA target sequence for Mrps31 (NM_020560.1,957-975).
caacaatgaagcaggttta

SEQ ID NO: 658854 - DNA, 19 bp, Mus musculus
  siRNA target sequence for Mrps31 (NM_020560.1,981-999).
cgatggctccgaattccat

SEQ ID NO: 658855 - DNA, 19 bp, Mus musculus
  siRNA target sequence for Mrps31 (NM_020560.1,989-1007).
ccgaattccatgagcatat

SEQ ID NO: 658856 - DNA, 19 bp, Mus musculus
  siRNA target sequence for Mrps31 (NM_020560.1,990-1008).
cgaattccatgagcatata

SEQ ID NO: 658857 - DNA, 19 bp, Mus musculus
  siRNA target sequence for Mrps31 (NM_020560.1,1000-1018).
gagcatatatttttggata

SEQ ID NO: 658858 - DNA, 19 bp, Mus musculus
  siRNA target sequence for Mrps31 (NM_020560.1,1046-1064).
gaccaatccgtctgttcat

SEQ ID NO: 658859 - DNA, 19 bp, Mus musculus
  siRNA target sequence for Mrps31 (NM_020560.1,1097-1115).
catatctgagtgttaaaca

SEQ ID NO: 658860 - DNA, 19 bp, Mus musculus
  siRNA target sequence for Mrps31 (NM_020560.1,1125-1143).
gcacatagagtggtttaga

SEQ ID NO: 658861 - DNA, 19 bp, Mus musculus
  siRNA target sequence for Mrps31 (NM_020560.1,1126-1144).
cacatagagtggtttagaa

SEQ ID NO: 658862 - DNA, 19 bp, Mus musculus
  siRNA target sequence for Mrps34 (NM_023260.1,434-452).
gggaaatcgagcaagtcat

SEQ ID NO: 658863 - DNA, 19 bp, Mus musculus
  siRNA target sequence for Mrps34 (NM_023260.1,456-474).
ccacgattggcgtttggta

SEQ ID NO: 658864 - DNA, 19 bp, Mus musculus
  siRNA target sequence for Mrps34 (NM_023260.1,571-589).
ctcgctgaacggcagaaaa

SEQ ID NO: 658865 - DNA, 19 bp, Mus musculus
  siRNA target sequence for Mrps34 (NM_023260.1,648-666).
ctgggactaccctgcaaaa

SEQ ID NO: 658866 - DNA, 19 bp, Mus musculus
  siRNA target sequence for Mrps34 (NM_023260.1,650-668).
gggactaccctgcaaaaca

SEQ ID NO: 658867 - DNA, 19 bp, Mus musculus
  siRNA target sequence for Mrps35 (NM_145573.1,285-303).
ggcgaaggaagggaatcta

SEQ ID NO: 658868 - DNA, 19 bp, Mus musculus
  siRNA target sequence for Mrps35 (NM_145573.1,287-305).
cgaaggaagggaatctaga

SEQ ID NO: 658869 - DNA, 19 bp, Mus musculus
  siRNA target sequence for Mrps35 (NM_145573.1,295-313).
gggaatctagagcttttaa

SEQ ID NO: 658870 - DNA, 19 bp, Mus musculus
  siRNA target sequence for Mrps35 (NM_145573.1,319-337).
ccaaattttctgcatttga

SEQ ID NO: 658871 - DNA, 19 bp, Mus musculus
  siRNA target sequence for Mrps35 (NM_145573.1,362-380).
gtgcagcgctgaaagattt

SEQ ID NO: 658872 - DNA, 19 bp, Mus musculus
  siRNA target sequence for Mrps35 (NM_145573.1,401-419).
cactcgacagtgatgagaa

SEQ ID NO: 658873 - DNA, 19 bp, Mus musculus
  siRNA target sequence for Mrps35 (NM_145573.1,444-462).
gattgatacagcggattat

SEQ ID NO: 658874 - DNA, 19 bp, Mus musculus
  siRNA target sequence for Mrps35 (NM_145573.1,448-466).
gatacagcggattatgtgt

SEQ ID NO: 658875 - DNA, 19 bp, Mus musculus
  siRNA target sequence for Mrps35 (NM_145573.1,470-488).
cgggaccatctattcgaaa

SEQ ID NO: 658876 - DNA, 19 bp, Mus musculus
  siRNA target sequence for Mrps35 (NM_145573.1,496-514).
gcccgagccgtaacgttaa

SEQ ID NO: 658877 - DNA, 19 bp, Mus musculus
  siRNA target sequence for Mrps35 (NM_145573.1,504-522).
cgtaacgttaagggttaaa

SEQ ID NO: 658878 - DNA, 19 bp, Mus musculus
  siRNA target sequence for Mrps35 (NM_145573.1,528-546).
cagtttgaatttagacaat

SEQ ID NO: 658879 - DNA, 19 bp, Mus musculus
  siRNA target sequence for Mrps35 (NM_145573.1,530-548).
gtttgaatttagacaatca

SEQ ID NO: 658880 - DNA, 19 bp, Mus musculus
  siRNA target sequence for Mrps35 (NM_145573.1,596-614).
ccaccgatgtgctcactat

SEQ ID NO: 658881 - DNA, 19 bp, Mus musculus
  siRNA target sequence for Mrps35 (NM_145573.1,632-650).
ctttgaagcggcagaacta

SEQ ID NO: 658882 - DNA, 19 bp, Mus musculus
  siRNA target sequence for Mrps35 (NM_145573.1,676-694).
gtcctgtaccacgaatctt

SEQ ID NO: 658883 - DNA, 19 bp, Mus musculus
  siRNA target sequence for Mrps35 (NM_145573.1,681-699).
gtaccacgaatcttggaaa

SEQ ID NO: 658884 - DNA, 19 bp, Mus musculus
  siRNA target sequence for Mrps35 (NM_145573.1,687-705).
cgaatcttggaaaactgaa

SEQ ID NO: 658885 - DNA, 19 bp, Mus musculus
  siRNA target sequence for Mrps35 (NM_145573.1,706-724).
gactgggaaaacagtaaga

SEQ ID NO: 658886 - DNA, 19 bp, Mus musculus
  siRNA target sequence for Mrps35 (NM_145573.1,851-869).
ccaaagaggtcgaggatta

SEQ ID NO: 658887 - DNA, 19 bp, Mus musculus
  siRNA target sequence for Mrps35 (NM_145573.1,852-870).
caaagaggtcgaggattat

SEQ ID NO: 658888 - DNA, 19 bp, Mus musculus
  siRNA target sequence for Mrps35 (NM_145573.1,856-874).
gaggtcgaggattatcaga

SEQ ID NO: 658889 - DNA, 19 bp, Mus musculus
  siRNA target sequence for Mrps5 (NM_029963.2,71-89).
gtctaggcaactctcttta

SEQ ID NO: 658890 - DNA, 19 bp, Mus musculus
  siRNA target sequence for Mrps5 (NM_029963.2,73-91).
ctaggcaactctctttaaa

SEQ ID NO: 658891 - DNA, 19 bp, Mus musculus
  siRNA target sequence for Mrps5 (NM_029963.2,138-156).
cttagccacggctcattgt

SEQ ID NO: 658892 - DNA, 19 bp, Mus musculus
  siRNA target sequence for Mrps5 (NM_029963.2,762-780).
ggagctgcaggttttgcta

SEQ ID NO: 658893 - DNA, 19 bp, Mus musculus
  siRNA target sequence for Mrps5 (NM_029963.2,763-781).
gagctgcaggttttgctat

SEQ ID NO: 658894 - DNA, 19 bp, Mus musculus
  siRNA target sequence for Mrps5 (NM_029963.2,824-842).
gaaccgagcgattcattat

SEQ ID NO: 658895 - DNA, 19 bp, Mus musculus
  siRNA target sequence for Mrps5 (NM_029963.2,829-847).
gagcgattcattatttgca

SEQ ID NO: 658896 - DNA, 19 bp, Mus musculus
  siRNA target sequence for Mrps5 (NM_029963.2,831-849).
gcgattcattatttgcatt

SEQ ID NO: 658897 - DNA, 19 bp, Mus musculus
  siRNA target sequence for Mrps5 (NM_029963.2,832-850).
cgattcattatttgcatta

SEQ ID NO: 658898 - DNA, 19 bp, Mus musculus
  siRNA target sequence for Mrps5 (NM_029963.2,858-876).
cgatacgaaggacatacaa

SEQ ID NO: 658899 - DNA, 19 bp, Mus musculus
  siRNA target sequence for Mrps5 (NM_029963.2,885-903).
gacatttccctaagattca

SEQ ID NO: 658900 - DNA, 19 bp, Mus musculus
  siRNA target sequence for Mrps6 (NM_080456.1,108-126).
gctacgagttggctttgat

SEQ ID NO: 658901 - DNA, 19 bp, Mus musculus
  siRNA target sequence for Mrps6 (NM_080456.1,109-127).
ctacgagttggctttgatt

SEQ ID NO: 658902 - DNA, 19 bp, Mus musculus
  siRNA target sequence for Mrps6 (NM_080456.1,151-169).
gaccgctgctgctttgaaa

SEQ ID NO: 658903 - DNA, 19 bp, Mus musculus
  siRNA target sequence for Mrps6 (NM_080456.1,155-173).
gctgctgctttgaaacgta

SEQ ID NO: 658904 - DNA, 19 bp, Mus musculus
  siRNA target sequence for Mrps6 (NM_080456.1,191-209).
gaccgaggagccatagtga

SEQ ID NO: 658905 - DNA, 19 bp, Mus musculus
  siRNA target sequence for Mrps6 (NM_080456.1,359-377).
gacgtggttagaccaaata

SEQ ID NO: 658906 - DNA, 19 bp, Mus musculus
  siRNA target sequence for Mrps7 (NM_025305.1,140-158).
cccttgattgacaaggaat

SEQ ID NO: 658907 - DNA, 19 bp, Mus musculus
  siRNA target sequence for Mrps7 (NM_025305.1,142-160).
cttgattgacaaggaatat

SEQ ID NO: 658908 - DNA, 19 bp, Mus musculus
  siRNA target sequence for Mrps7 (NM_025305.1,272-290).
gacccggtcatcagcaaat

SEQ ID NO: 658909 - DNA, 19 bp, Mus musculus
  siRNA target sequence for Mrps7 (NM_025305.1,285-303).
gcaaattcaccaacatgat

SEQ ID NO: 658910 - DNA, 19 bp, Mus musculus
  siRNA target sequence for Mrps7 (NM_025305.1,446-464).
cacgaggcactcaaaaact

SEQ ID NO: 658911 - DNA, 19 bp, Mus musculus
  siRNA target sequence for Mrps7 (NM_025305.1,448-466).
cgaggcactcaaaaactgt

SEQ ID NO: 658912 - DNA, 19 bp, Mus musculus
  siRNA target sequence for Mrps7 (NM_025305.1,606-624).
cacttatgccagagaaact

SEQ ID NO: 658913 - DNA, 19 bp, Mus musculus
  siRNA target sequence for Mrps7 (NM_025305.1,656-674).
cggggtcccgtgatcaaga

SEQ ID NO: 658914 - DNA, 19 bp, Mus musculus
  siRNA target sequence for Mrps7 (NM_025305.1,675-693).
ggaagcacaatatgcataa

SEQ ID NO: 658915 - DNA, 19 bp, Mus musculus
  siRNA target sequence for Mrps9 (NM_023514.2,134-152).
ccaggttccagctatcaaa

SEQ ID NO: 658916 - DNA, 19 bp, Mus musculus
  siRNA target sequence for Mrps9 (NM_023514.2,138-156).
gttccagctatcaaagcta

SEQ ID NO: 658917 - DNA, 19 bp, Mus musculus
  siRNA target sequence for Mrps9 (NM_023514.2,141-159).
ccagctatcaaagctaata

SEQ ID NO: 658918 - DNA, 19 bp, Mus musculus
  siRNA target sequence for Mrps9 (NM_023514.2,144-162).
gctatcaaagctaatacat

SEQ ID NO: 658919 - DNA, 19 bp, Mus musculus
  siRNA target sequence for Mrps9 (NM_023514.2,145-163).
ctatcaaagctaatacata

SEQ ID NO: 658920 - DNA, 19 bp, Mus musculus
  siRNA target sequence for Mrps9 (NM_023514.2,160-178).
cataccacagttgtaacaa

SEQ ID NO: 658921 - DNA, 19 bp, Mus musculus
  siRNA target sequence for Mrps9 (NM_023514.2,203-221).
gacaggaatcatatacaga

SEQ ID NO: 658922 - DNA, 19 bp, Mus musculus
  siRNA target sequence for Mrps9 (NM_023514.2,208-226).
gaatcatatacagaagatt

SEQ ID NO: 658923 - DNA, 19 bp, Mus musculus
  siRNA target sequence for Mrps9 (NM_023514.2,240-258).
gattgaagaattcaatata

SEQ ID NO: 658924 - DNA, 19 bp, Mus musculus
  siRNA target sequence for Mrps9 (NM_023514.2,266-284).
ggcacttagccaacatgat

SEQ ID NO: 658925 - DNA, 19 bp, Mus musculus
  siRNA target sequence for Mrps9 (NM_023514.2,286-304).
ggagaagacccggaaactt

SEQ ID NO: 658926 - DNA, 19 bp, Mus musculus
  siRNA target sequence for Mrps9 (NM_023514.2,367-385).
cgagccaggccaatgatga

SEQ ID NO: 658927 - DNA, 19 bp, Mus musculus
  siRNA target sequence for Mrps9 (NM_023514.2,384-402).
gaagcatcctgaacatatt

SEQ ID NO: 658928 - DNA, 19 bp, Mus musculus
  siRNA target sequence for Mrps9 (NM_023514.2,391-409).
cctgaacatatttttccaa

SEQ ID NO: 658929 - DNA, 19 bp, Mus musculus
  siRNA target sequence for Mrps9 (NM_023514.2,459-477).
cttctatactggcaaacaa

SEQ ID NO: 658930 - DNA, 19 bp, Mus musculus
  siRNA target sequence for Mrps9 (NM_023514.2,469-487).
ggcaaacaatcgtactatt

SEQ ID NO: 658931 - DNA, 19 bp, Mus musculus
  siRNA target sequence for Mrps9 (NM_023514.2,471-489).
caaacaatcgtactattca

SEQ ID NO: 658932 - DNA, 19 bp, Mus musculus
  siRNA target sequence for Mrps9 (NM_023514.2,658-676).
cgactgctcgagaagctat

SEQ ID NO: 658933 - DNA, 19 bp, Mus musculus
  siRNA target sequence for Mrps9 (NM_023514.2,720-738).
gttccgcagaagtgtaact

SEQ ID NO: 658934 - DNA, 19 bp, Mus musculus
  siRNA target sequence for Mrps9 (NM_023514.2,723-741).
ccgcagaagtgtaactatt

SEQ ID NO: 658935 - DNA, 19 bp, Mus musculus
  siRNA target sequence for Mrps9 (NM_023514.2,733-751).
gtaactattcaatcaaaaa

SEQ ID NO: 658936 - DNA, 19 bp, Mus musculus
  siRNA target sequence for Mrps9 (NM_023514.2,746-764).
caaaaaagcaactgattga

SEQ ID NO: 658937 - DNA, 19 bp, Mus musculus
  siRNA target sequence for Mrps9 (NM_023514.2,830-848).
cggcacaggcggtcgttta

SEQ ID NO: 658938 - DNA, 19 bp, Mus musculus
  siRNA target sequence for Mrps9 (NM_023514.2,833-851).
cacaggcggtcgtttatga

SEQ ID NO: 658939 - DNA, 19 bp, Mus musculus
  siRNA target sequence for Mrps9 (NM_023514.2,879-897).
cggagttgattatctaatt

SEQ ID NO: 658940 - DNA, 19 bp, Mus musculus
  siRNA target sequence for Mrps9 (NM_023514.2,1144-1162).
gagggtgctcgaagaaagt

SEQ ID NO: 658941 - DNA, 19 bp, Mus musculus
  siRNA target sequence for Mrps9 (NM_023514.2,1147-1165).
ggtgctcgaagaaagttca

SEQ ID NO: 658942 - DNA, 19 bp, Mus musculus
  siRNA target sequence for Rpl23 (NM_022891.1,324-342).
ggggtcatagtaaacaata

SEQ ID NO: 658943 - DNA, 19 bp, Mus musculus
  siRNA target sequence for Rpl23 (NM_022891.1,325-343).
gggtcatagtaaacaataa

SEQ ID NO: 658944 - DNA, 19 bp, Mus musculus
  siRNA target sequence for Rpl23 (NM_022891.1,326-344).
ggtcatagtaaacaataaa

SEQ ID NO: 658945 - DNA, 19 bp, Mus musculus
  siRNA target sequence for Rpl3l (NM_025425.1,358-376).
gccagagtgaggttattga

SEQ ID NO: 658946 - DNA, 19 bp, Mus musculus
  siRNA target sequence for Rpl3l (NM_025425.1,359-377).
ccagagtgaggttattgat

SEQ ID NO: 658947 - DNA, 19 bp, Mus musculus
  siRNA target sequence for Rpl3l (NM_025425.1,364-382).
gtgaggttattgatgtcat

SEQ ID NO: 658948 - DNA, 19 bp, Mus musculus
  siRNA target sequence for Rpl3l (NM_025425.1,552-570).
cgtacagagctgaacaaga

SEQ ID NO: 658949 - DNA, 19 bp, Mus musculus
  siRNA target sequence for Rpl3l (NM_025425.1,637-655).
ccagctacgacgtaactga

SEQ ID NO: 658950 - DNA, 19 bp, Mus musculus
  siRNA target sequence for Rpl3l (NM_025425.1,645-663).
gacgtaactgacaagtcaa

SEQ ID NO: 658951 - DNA, 19 bp, Mus musculus
  siRNA target sequence for Rpl3l (NM_025425.1,685-703).
cccactatggggaagtgaa

SEQ ID NO: 658952 - DNA, 19 bp, Mus musculus
  siRNA target sequence for Rpl3l (NM_025425.1,792-810).
cgcagggccctggagaata

SEQ ID NO: 658953 - DNA, 19 bp, Mus musculus
  siRNA target sequence for Rpl3l (NM_025425.1,793-811).
gcagggccctggagaatat

SEQ ID NO: 658954 - DNA, 19 bp, Mus musculus
  siRNA target sequence for Rpl3l (NM_025425.1,842-860).
gtttggccacggatgtttt

SEQ ID NO: 658955 - DNA, 19 bp, Mus musculus
  siRNA target sequence for Rpl3l (NM_025425.1,925-943).
cggagaccttgggaaacat

SEQ ID NO: 658956 - DNA, 19 bp, Mus musculus
  siRNA target sequence for Rpl6 (NM_011290.1,92-110).
ccaaagtagccaaaaaggt

SEQ ID NO: 658957 - DNA, 19 bp, Mus musculus
  siRNA target sequence for Rps5 (NM_009095.1,139-157).
ctgatgacgtgcagatcaa

SEQ ID NO: 658958 - DNA, 19 bp, Mus musculus
  siRNA target sequence for Rps5 (NM_009095.1,245-263).
cttccgcaaagcacaatgt

SEQ ID NO: 658959 - DNA, 19 bp, Mus musculus
  siRNA target sequence for Rps5 (NM_009095.1,279-297).
cttactaactccatgatga

SEQ ID NO: 658960 - DNA, 19 bp, Mus musculus
  siRNA target sequence for Rps5 (NM_009095.1,399-417).
ctggtgaatgctatcatca

SEQ ID NO: 658961 - DNA, 19 bp, Mus musculus
  siRNA target sequence for Rps5 (NM_009095.1,491-509).
cccactgcgtcgagtgaat

SEQ ID NO: 658962 - DNA, 19 bp, Mus musculus
  siRNA target sequence for Rps5 (NM_009095.1,493-511).
cactgcgtcgagtgaatca

SEQ ID NO: 658963 - DNA, 19 bp, Mus musculus
  siRNA target sequence for Rps5 (NM_009095.1,549-567).
gctttccggaacatcaaga

SEQ ID NO: 658964 - DNA, 19 bp, Mus musculus
  siRNA target sequence for Rps5 (NM_009095.1,550-568).
ctttccggaacatcaagaa

SEQ ID NO: 658965 - DNA, 19 bp, Mus musculus
  siRNA target sequence for 1700029I08Rik (NM_183282.1,812-830).
ggagaacatcaaacatcat

SEQ ID NO: 658966 - DNA, 19 bp, Mus musculus
  siRNA target sequence for 1700029I08Rik (NM_183282.1,813-831).
gagaacatcaaacatcatt

SEQ ID NO: 658967 - DNA, 19 bp, Mus musculus
  siRNA target sequence for 1700029I08Rik (NM_183282.1,876-894).
gatgaggagtgcaagcaat

SEQ ID NO: 658968 - DNA, 19 bp, Mus musculus
  siRNA target sequence for 4732495G21Rik (NM_175497.2,139-157).
gactgctttggtagtagat

SEQ ID NO: 658969 - DNA, 19 bp, Mus musculus
  siRNA target sequence for 4732495G21Rik (NM_175497.2,265-283).
gggccagaaggactgttat

SEQ ID NO: 658970 - DNA, 19 bp, Mus musculus
  siRNA target sequence for 4732495G21Rik (NM_175497.2,313-331).
catcttgaccttgaagtat

SEQ ID NO: 658971 - DNA, 19 bp, Mus musculus
  siRNA target sequence for 4732495G21Rik (NM_175497.2,408-426).
gggtagcaccggatgaaca

SEQ ID NO: 658972 - DNA, 19 bp, Mus musculus
  siRNA target sequence for 4732495G21Rik (NM_175497.2,409-427).
ggtagcaccggatgaacat

SEQ ID NO: 658973 - DNA, 19 bp, Mus musculus
  siRNA target sequence for 4732495G21Rik (NM_175497.2,414-432).
caccggatgaacatcctat

SEQ ID NO: 658974 - DNA, 19 bp, Mus musculus
  siRNA target sequence for 4732495G21Rik (NM_175497.2,418-436).
ggatgaacatcctattctt

SEQ ID NO: 658975 - DNA, 19 bp, Mus musculus
  siRNA target sequence for 4732495G21Rik (NM_175497.2,505-523).
caacacacctgccatgtat

SEQ ID NO: 658976 - DNA, 19 bp, Mus musculus
  siRNA target sequence for 4732495G21Rik (NM_175497.2,645-663).
ccattctacgactagatct

SEQ ID NO: 658977 - DNA, 19 bp, Mus musculus
  siRNA target sequence for 4732495G21Rik (NM_175497.2,669-687).
gtagggacctgactgatta

SEQ ID NO: 658978 - DNA, 19 bp, Mus musculus
  siRNA target sequence for 4732495G21Rik (NM_175497.2,705-723).
cagaacgaggctataactt

SEQ ID NO: 658979 - DNA, 19 bp, Mus musculus
  siRNA target sequence for 4732495G21Rik (NM_175497.2,707-725).
gaacgaggctataacttca

SEQ ID NO: 658980 - DNA, 19 bp, Mus musculus
  siRNA target sequence for 4732495G21Rik (NM_175497.2,745-763).
gatcgtgcgggatgtcaaa

SEQ ID NO: 658981 - DNA, 19 bp, Mus musculus
  siRNA target sequence for 4732495G21Rik (NM_175497.2,748-766).
cgtgcgggatgtcaaagaa

SEQ ID NO: 658982 - DNA, 19 bp, Mus musculus
  siRNA target sequence for 4732495G21Rik (NM_175497.2,749-767).
gtgcgggatgtcaaagaaa

SEQ ID NO: 658983 - DNA, 19 bp, Mus musculus
  siRNA target sequence for 4732495G21Rik (NM_175497.2,752-770).
cgggatgtcaaagaaaagt

SEQ ID NO: 658984 - DNA, 19 bp, Mus musculus
  siRNA target sequence for 4732495G21Rik (NM_175497.2,826-844).
ctcactagagagaagctat

SEQ ID NO: 658985 - DNA, 19 bp, Mus musculus
  siRNA target sequence for 4732495G21Rik (NM_175497.2,978-996).
gtgatgtagatattcgtaa

SEQ ID NO: 658986 - DNA, 19 bp, Mus musculus
  siRNA target sequence for 4732495G21Rik (NM_175497.2,1084-1102).
ggcaccaagtaccatgaaa

SEQ ID NO: 658987 - DNA, 19 bp, Mus musculus
  siRNA target sequence for 4732495G21Rik (NM_175497.2,1088-1106).
ccaagtaccatgaaaatta

SEQ ID NO: 658988 - DNA, 19 bp, Mus musculus
  siRNA target sequence for 4732495G21Rik (NM_175497.2,1128-1146).
gcaagtattcggtttggat

SEQ ID NO: 658989 - DNA, 19 bp, Mus musculus
  siRNA target sequence for 4732495G21Rik (NM_175497.2,1129-1147).
caagtattcggtttggatt

SEQ ID NO: 658990 - DNA, 19 bp, Mus musculus
  siRNA target sequence for 4732495G21Rik (NM_175497.2,1223-1241).
cctcccattgttcatagaa

SEQ ID NO: 658991 - DNA, 19 bp, Mus musculus
  siRNA target sequence for 4921517D21Rik (NM_026338.1,89-107).
gctaacgggtggcttcaaa

SEQ ID NO: 658992 - DNA, 19 bp, Mus musculus
  siRNA target sequence for 4921517D21Rik (NM_026338.1,1008-1026).
gagtaccctgcaaagaagt

SEQ ID NO: 658993 - DNA, 19 bp, Mus musculus
  siRNA target sequence for 4921517D21Rik (NM_026338.1,1037-1055).
caggctagacaccttaaca

SEQ ID NO: 658994 - DNA, 19 bp, Mus musculus
  siRNA target sequence for 4921517D21Rik (NM_026338.1,1040-1058).
gctagacaccttaacatca

SEQ ID NO: 658995 - DNA, 19 bp, Mus musculus
  siRNA target sequence for 4921517D21Rik (NM_026338.1,1065-1083).
gagcctctagactctttca

SEQ ID NO: 658996 - DNA, 19 bp, Mus musculus
  siRNA target sequence for 4921517D21Rik (NM_026338.1,1137-1155).
cccaatgcctgcaacaaca

SEQ ID NO: 658997 - DNA, 19 bp, Mus musculus
  siRNA target sequence for 4921517D21Rik (NM_026338.1,1393-1411).
gccacccatcaaatcatgt

SEQ ID NO: 658998 - DNA, 19 bp, Mus musculus
  siRNA target sequence for 4921517D21Rik (NM_026338.1,1394-1412).
ccacccatcaaatcatgtt

SEQ ID NO: 658999 - DNA, 19 bp, Mus musculus
  siRNA target sequence for 4921517D21Rik (NM_026338.1,1395-1413).
cacccatcaaatcatgttt

SEQ ID NO: 659000 - DNA, 19 bp, Mus musculus
  siRNA target sequence for 4921517D21Rik (NM_026338.1,1397-1415).
cccatcaaatcatgtttct

SEQ ID NO: 659001 - DNA, 19 bp, Mus musculus
  siRNA target sequence for 4921517D21Rik (NM_026338.1,1399-1417).
catcaaatcatgtttctga

SEQ ID NO: 659002 - DNA, 19 bp, Mus musculus
  siRNA target sequence for 4921517D21Rik (NM_026338.1,1438-1456).
cattatccaggccaattct

SEQ ID NO: 659003 - DNA, 19 bp, Mus musculus
  siRNA target sequence for 4921517D21Rik (NM_026338.1,1568-1586).
ggaggccaaacataatcta

SEQ ID NO: 659004 - DNA, 19 bp, Mus musculus
  siRNA target sequence for 4921517D21Rik (NM_026338.1,1647-1665).
ccggggacacccatccaat

SEQ ID NO: 659005 - DNA, 19 bp, Mus musculus
  siRNA target sequence for 4921517D21Rik (NM_026338.1,1648-1666).
cggggacacccatccaata

SEQ ID NO: 659006 - DNA, 19 bp, Mus musculus
  siRNA target sequence for 4921517D21Rik (NM_026338.1,1649-1667).
ggggacacccatccaatat

SEQ ID NO: 659007 - DNA, 19 bp, Mus musculus
  siRNA target sequence for 4921517D21Rik (NM_026338.1,1652-1670).
gacacccatccaatatggt

SEQ ID NO: 659008 - DNA, 19 bp, Mus musculus
  siRNA target sequence for 4921517D21Rik (NM_026338.1,1699-1717).
ctagctggcccaaatctga

SEQ ID NO: 659009 - DNA, 19 bp, Mus musculus
  siRNA target sequence for 4921517D21Rik (NM_026338.1,1780-1798).
ggaagttgcagtggataaa

SEQ ID NO: 659010 - DNA, 19 bp, Mus musculus
  siRNA target sequence for 4921517D21Rik (NM_026338.1,2042-2060).
ctgtgcgcctcatctcaat

SEQ ID NO: 659011 - DNA, 19 bp, Mus musculus
  siRNA target sequence for 4921517D21Rik (NM_026338.1,2047-2065).
cgcctcatctcaatgaaca

SEQ ID NO: 659012 - DNA, 19 bp, Mus musculus
  siRNA target sequence for 4921517D21Rik (NM_026338.1,2165-2183).
ccagcctcaagagaatgaa

SEQ ID NO: 659013 - DNA, 19 bp, Mus musculus
  siRNA target sequence for 4921517D21Rik (NM_026338.1,2181-2199).
gaacctttgtgcaatgcta

SEQ ID NO: 659014 - DNA, 19 bp, Mus musculus
  siRNA target sequence for 4921517D21Rik (NM_026338.1,2247-2265).
ctttacgtgaatagagata

SEQ ID NO: 659015 - DNA, 19 bp, Mus musculus
  siRNA target sequence for 4921517D21Rik (NM_026338.1,2271-2289).
gaaaacaatagggttcaaa

SEQ ID NO: 659016 - DNA, 19 bp, Mus musculus
  siRNA target sequence for 4921517D21Rik (NM_026338.1,2283-2301).
gttcaaaggtccagcataa

SEQ ID NO: 659017 - DNA, 19 bp, Mus musculus
  siRNA target sequence for 4921517D21Rik (NM_026338.1,2312-2330).
gtcctggcaacctagcaat

SEQ ID NO: 659018 - DNA, 19 bp, Mus musculus
  siRNA target sequence for 4921517D21Rik (NM_026338.1,2355-2373).
ctttctttgatcacgttta

SEQ ID NO: 659019 - DNA, 19 bp, Mus musculus
  siRNA target sequence for 4921517D21Rik (NM_026338.1,2408-2426).
cactgagtccacaaatgga

SEQ ID NO: 659020 - DNA, 19 bp, Mus musculus
  siRNA target sequence for 4921517D21Rik (NM_026338.1,2495-2513).
cgggaactgctatgagtta

SEQ ID NO: 659021 - DNA, 19 bp, Mus musculus
  siRNA target sequence for 4921517D21Rik (NM_026338.1,2591-2609).
ggccatcgtgatagatact

SEQ ID NO: 659022 - DNA, 19 bp, Mus musculus
  siRNA target sequence for 4921517D21Rik (NM_026338.1,2604-2622).
gatactggcacaggattta

SEQ ID NO: 659023 - DNA, 19 bp, Mus musculus
  siRNA target sequence for 4921517D21Rik (NM_026338.1,2608-2626).
ctggcacaggatttaccaa

SEQ ID NO: 659024 - DNA, 19 bp, Mus musculus
  siRNA target sequence for 4921517D21Rik (NM_026338.1,2610-2628).
ggcacaggatttaccaaat

SEQ ID NO: 659025 - DNA, 19 bp, Mus musculus
  siRNA target sequence for 4921517D21Rik (NM_026338.1,2740-2758).
gctcctactcagtactgaa

SEQ ID NO: 659026 - DNA, 19 bp, Mus musculus
  siRNA target sequence for 4921517D21Rik (NM_026338.1,2802-2820).
caacacctgttctactgta

SEQ ID NO: 659027 - DNA, 19 bp, Mus musculus
  siRNA target sequence for 4921517D21Rik (NM_026338.1,2897-2915).
ggtggccgaaatactcttt

SEQ ID NO: 659028 - DNA, 19 bp, Mus musculus
  siRNA target sequence for 4921517D21Rik (NM_026338.1,2935-2953).
ctatgcagacagttcatca

SEQ ID NO: 659029 - DNA, 19 bp, Mus musculus
  siRNA target sequence for 4921517D21Rik (NM_026338.1,2946-2964).
gttcatcaggctctgttaa

SEQ ID NO: 659030 - DNA, 19 bp, Mus musculus
  siRNA target sequence for 4921517D21Rik (NM_026338.1,2958-2976).
ctgttaacgctctatgctt

SEQ ID NO: 659031 - DNA, 19 bp, Mus musculus
  siRNA target sequence for 4921517D21Rik (NM_026338.1,2960-2978).
gttaacgctctatgcttat

SEQ ID NO: 659032 - DNA, 19 bp, Mus musculus
  siRNA target sequence for 4921517D21Rik (NM_026338.1,3088-3106).
gtgctgacctcactgatta

SEQ ID NO: 659033 - DNA, 19 bp, Mus musculus
  siRNA target sequence for 4921517D21Rik (NM_026338.1,3091-3109).
ctgacctcactgattacct

SEQ ID NO: 659034 - DNA, 19 bp, Mus musculus
  siRNA target sequence for 4921517D21Rik (NM_026338.1,3153-3171).
gggatcatcagacagatta

SEQ ID NO: 659035 - DNA, 19 bp, Mus musculus
  siRNA target sequence for 4921517D21Rik (NM_026338.1,3154-3172).
ggatcatcagacagattaa

SEQ ID NO: 659036 - DNA, 19 bp, Mus musculus
  siRNA target sequence for 4921517D21Rik (NM_026338.1,3155-3173).
gatcatcagacagattaaa

SEQ ID NO: 659037 - DNA, 19 bp, Mus musculus
  siRNA target sequence for 4921517D21Rik (NM_026338.1,3279-3297).
ggctccgagcgcttctgtt

SEQ ID NO: 659038 - DNA, 19 bp, Mus musculus
  siRNA target sequence for 4921517D21Rik (NM_026338.1,3298-3316).
gccccgaggctctctttca

SEQ ID NO: 659039 - DNA, 19 bp, Mus musculus
  siRNA target sequence for 4921517D21Rik (NM_026338.1,3359-3377).
ggccctgctaagcatcaat

SEQ ID NO: 659040 - DNA, 19 bp, Mus musculus
  siRNA target sequence for 4921517D21Rik (NM_026338.1,3581-3599).
cactcgcagggaatatgaa

SEQ ID NO: 659041 - DNA, 19 bp, Mus musculus
  siRNA target sequence for 4921517D21Rik (NM_026338.1,3583-3601).
ctcgcagggaatatgaaga

SEQ ID NO: 659042 - DNA, 19 bp, Mus musculus
  siRNA target sequence for 4921517D21Rik (NM_026338.1,3607-3625).
gcccgtgggctgtctacaa

SEQ ID NO: 659043 - DNA, 19 bp, Mus musculus
  siRNA target sequence for 4921517D21Rik (NM_026338.1,3608-3626).
cccgtgggctgtctacaaa

SEQ ID NO: 659044 - DNA, 19 bp, Mus musculus
  siRNA target sequence for 4921517D21Rik (NM_026338.1,3609-3627).
ccgtgggctgtctacaaat

SEQ ID NO: 659045 - DNA, 19 bp, Mus musculus
  siRNA target sequence for 4921517D21Rik (NM_026338.1,3610-3628).
cgtgggctgtctacaaata

SEQ ID NO: 659046 - DNA, 19 bp, Mus musculus
  siRNA target sequence for Acta2 (NM_007392.2,133-151).
cggcttcgctggtgatgat

SEQ ID NO: 659047 - DNA, 19 bp, Mus musculus
  siRNA target sequence for Acta2 (NM_007392.2,513-531).
gacgtacaactggtattgt

SEQ ID NO: 659048 - DNA, 19 bp, Mus musculus
  siRNA target sequence for Acta2 (NM_007392.2,684-702).
ctgccgagcgtgagattgt

SEQ ID NO: 659049 - DNA, 19 bp, Mus musculus
  siRNA target sequence for Actc1 (NM_009608.1,104-122).
cgctttggtgtgtgacaat

SEQ ID NO: 659050 - DNA, 19 bp, Mus musculus
  siRNA target sequence for Actc1 (NM_009608.1,552-570).
ggcgatggtgtaactcata

SEQ ID NO: 659051 - DNA, 19 bp, Mus musculus
  siRNA target sequence for Actc1 (NM_009608.1,553-571).
gcgatggtgtaactcataa

SEQ ID NO: 659052 - DNA, 19 bp, Mus musculus
  siRNA target sequence for Actc1 (NM_009608.1,554-572).
cgatggtgtaactcataat

SEQ ID NO: 659053 - DNA, 19 bp, Mus musculus
  siRNA target sequence for Actc1 (NM_009608.1,711-729).
gtccgtgacataaaagaaa

SEQ ID NO: 659054 - DNA, 19 bp, Mus musculus
  siRNA target sequence for Actc1 (NM_009608.1,736-754).
gttacgtcgccctggattt

SEQ ID NO: 659055 - DNA, 19 bp, Mus musculus
  siRNA target sequence for Actc1 (NM_009608.1,878-896).
ctctttcattggtatggaa

SEQ ID NO: 659056 - DNA, 19 bp, Mus musculus
  siRNA target sequence for Actc1 (NM_009608.1,893-911).
ggaatctgctggcattcat

SEQ ID NO: 659057 - DNA, 19 bp, Mus musculus
  siRNA target sequence for Actc1 (NM_009608.1,1006-1024).
ctggtattgccgatcgtat

SEQ ID NO: 659058 - DNA, 19 bp, Mus musculus
  siRNA target sequence for Actc1 (NM_009608.1,1015-1033).
ccgatcgtatgcaaaagga

SEQ ID NO: 659059 - DNA, 19 bp, Mus musculus
  siRNA target sequence for Actc1 (NM_009608.1,1016-1034).
cgatcgtatgcaaaaggaa

SEQ ID NO: 659060 - DNA, 19 bp, Mus musculus
  siRNA target sequence for Actc1 (NM_009608.1,1017-1035).
gatcgtatgcaaaaggaaa

SEQ ID NO: 659061 - DNA, 19 bp, Mus musculus
  siRNA target sequence for Actc1 (NM_009608.1,1082-1100).
ccctgagcgtaaatactct

SEQ ID NO: 659062 - DNA, 19 bp, Mus musculus
  siRNA target sequence for Actg2 (NM_009610.1,237-255).
ggatcctaactctcaagta

SEQ ID NO: 659063 - DNA, 19 bp, Mus musculus
  siRNA target sequence for Actg2 (NM_009610.1,464-482).
gtgctctcactctatgcat

SEQ ID NO: 659064 - DNA, 19 bp, Mus musculus
  siRNA target sequence for Actg2 (NM_009610.1,859-877).
gtcagctggaattcatgaa

SEQ ID NO: 659065 - DNA, 19 bp, Mus musculus
  siRNA target sequence for Actg2 (NM_009610.1,917-935).
cgcaaagatttgtatgcta

SEQ ID NO: 659066 - DNA, 19 bp, Mus musculus
  siRNA target sequence for Actg2 (NM_009610.1,1009-1027).
ggctcccagcaccatatta

SEQ ID NO: 659067 - DNA, 19 bp, Mus musculus
  siRNA target sequence for Actg2 (NM_009610.1,1010-1028).
gctcccagcaccatattat

SEQ ID NO: 659068 - DNA, 19 bp, Mus musculus
  siRNA target sequence for Actl7a (NM_009611.1,73-91).
ggacggacctgccaagaaa

SEQ ID NO: 659069 - DNA, 19 bp, Mus musculus
  siRNA target sequence for Actl7a (NM_009611.1,200-218).
gaccctgttaagtcaacta

SEQ ID NO: 659070 - DNA, 19 bp, Mus musculus
  siRNA target sequence for Actl7a (NM_009611.1,203-221).
cctgttaagtcaactatgt

SEQ ID NO: 659071 - DNA, 19 bp, Mus musculus
  siRNA target sequence for Actl7a (NM_009611.1,305-323).
ctgccaaagcccactcata

SEQ ID NO: 659072 - DNA, 19 bp, Mus musculus
  siRNA target sequence for Actl7a (NM_009611.1,308-326).
ccaaagcccactcataaga

SEQ ID NO: 659073 - DNA, 19 bp, Mus musculus
  siRNA target sequence for Actl7a (NM_009611.1,309-327).
caaagcccactcataagat

SEQ ID NO: 659074 - DNA, 19 bp, Mus musculus
  siRNA target sequence for Actl7a (NM_009611.1,371-389).
ggggataatcgcaaagaga

SEQ ID NO: 659075 - DNA, 19 bp, Mus musculus
  siRNA target sequence for Actl7a (NM_009611.1,395-413).
gtggggcacgagctcttta

SEQ ID NO: 659076 - DNA, 19 bp, Mus musculus
  siRNA target sequence for Actl7a (NM_009611.1,445-463).
cctgcgccatggcatcatt

SEQ ID NO: 659077 - DNA, 19 bp, Mus musculus
  siRNA target sequence for Actl7a (NM_009611.1,561-579).
ccctgagtcctcataccaa

SEQ ID NO: 659078 - DNA, 19 bp, Mus musculus
  siRNA target sequence for Actl7a (NM_009611.1,715-733).
ctatgtggtccccatctat

SEQ ID NO: 659079 - DNA, 19 bp, Mus musculus
  siRNA target sequence for Actl7a (NM_009611.1,926-944).
cctgaacatgagatccatt

SEQ ID NO: 659080 - DNA, 19 bp, Mus musculus
  siRNA target sequence for Actl7a (NM_009611.1,927-945).
ctgaacatgagatccatta

SEQ ID NO: 659081 - DNA, 19 bp, Mus musculus
  siRNA target sequence for Actl7a (NM_009611.1,929-947).
gaacatgagatccattata

SEQ ID NO: 659082 - DNA, 19 bp, Mus musculus
  siRNA target sequence for Actl7a (NM_009611.1,992-1010).
ctctgctcggagatgttct

SEQ ID NO: 659083 - DNA, 19 bp, Mus musculus
  siRNA target sequence for Actl7a (NM_009611.1,1061-1079).
gtgtcctgccttaacaaat

SEQ ID NO: 659084 - DNA, 19 bp, Mus musculus
  siRNA target sequence for Actl7a (NM_009611.1,1264-1282).
ctcactccagggctttcaa

SEQ ID NO: 659085 - DNA, 19 bp, Mus musculus
  siRNA target sequence for Actl7b (NM_025271.1,227-245).
ggttcccagtactgtaagt

SEQ ID NO: 659086 - DNA, 19 bp, Mus musculus
  siRNA target sequence for Actl7b (NM_025271.1,263-281).
ccgaggcccacctatttca

SEQ ID NO: 659087 - DNA, 19 bp, Mus musculus
  siRNA target sequence for Actl7b (NM_025271.1,264-282).
cgaggcccacctatttcat

SEQ ID NO: 659088 - DNA, 19 bp, Mus musculus
  siRNA target sequence for Actl7b (NM_025271.1,419-437).
gtggtggactgggattgta

SEQ ID NO: 659089 - DNA, 19 bp, Mus musculus
  siRNA target sequence for Actl7b (NM_025271.1,429-447).
gggattgtatccagaacat

SEQ ID NO: 659090 - DNA, 19 bp, Mus musculus
  siRNA target sequence for Actl7b (NM_025271.1,431-449).
gattgtatccagaacatct

SEQ ID NO: 659091 - DNA, 19 bp, Mus musculus
  siRNA target sequence for Actl7b (NM_025271.1,464-482).
cacaccgctatgaagatca

SEQ ID NO: 659092 - DNA, 19 bp, Mus musculus
  siRNA target sequence for Actl7b (NM_025271.1,610-628).
gctgtccatctactcatat

SEQ ID NO: 659093 - DNA, 19 bp, Mus musculus
  siRNA target sequence for Actl7b (NM_025271.1,715-733).
gcccagccgtgtagactat

SEQ ID NO: 659094 - DNA, 19 bp, Mus musculus
  siRNA target sequence for Actl7b (NM_025271.1,776-794).
gaggcaggccacaagtttt

SEQ ID NO: 659095 - DNA, 19 bp, Mus musculus
  siRNA target sequence for Actl7b (NM_025271.1,778-796).
ggcaggccacaagttttca

SEQ ID NO: 659096 - DNA, 19 bp, Mus musculus
  siRNA target sequence for Actl7b (NM_025271.1,802-820).
ccacctgcacatcatagaa

SEQ ID NO: 659097 - DNA, 19 bp, Mus musculus
  siRNA target sequence for Actl7b (NM_025271.1,1280-1298).
ggctgtgcagccatctaca

SEQ ID NO: 659098 - DNA, 19 bp, Mus musculus
  siRNA target sequence for Actr1a (NM_016860.1,103-121).
caacggatccggtgtgatt

SEQ ID NO: 659099 - DNA, 19 bp, Mus musculus
  siRNA target sequence for Actr1a (NM_016860.1,106-124).
cggatccggtgtgattaaa

SEQ ID NO: 659100 - DNA, 19 bp, Mus musculus
  siRNA target sequence for Actr1a (NM_016860.1,175-193).
gggcagacccaaacatgtt

SEQ ID NO: 659101 - DNA, 19 bp, Mus musculus
  siRNA target sequence for Actr1a (NM_016860.1,386-404).
ctaacggaggcacctttaa

SEQ ID NO: 659102 - DNA, 19 bp, Mus musculus
  siRNA target sequence for Actr1a (NM_016860.1,399-417).
ctttaaaccctcggaaaaa

SEQ ID NO: 659103 - DNA, 19 bp, Mus musculus
  siRNA target sequence for Actr1a (NM_016860.1,552-570).
cccatgcagtcccgattta

SEQ ID NO: 659104 - DNA, 19 bp, Mus musculus
  siRNA target sequence for Actr1a (NM_016860.1,553-571).
ccatgcagtcccgatttat

SEQ ID NO: 659105 - DNA, 19 bp, Mus musculus
  siRNA target sequence for Actr1a (NM_016860.1,929-947).
cggcgtacactgttttcca

SEQ ID NO: 659106 - DNA, 19 bp, Mus musculus
  siRNA target sequence for Actr1a (NM_016860.1,930-948).
ggcgtacactgttttccaa

SEQ ID NO: 659107 - DNA, 19 bp, Mus musculus
  siRNA target sequence for Actr1a (NM_016860.1,963-981).
gaggttctaccctgttcaa

SEQ ID NO: 659108 - DNA, 19 bp, Mus musculus
  siRNA target sequence for Actr1a (NM_016860.1,1055-1073).
ccccaggagagactgtatt

SEQ ID NO: 659109 - DNA, 19 bp, Mus musculus
  siRNA target sequence for Actr1a (NM_016860.1,1081-1099).
gattggaggttctatcctt

SEQ ID NO: 659110 - DNA, 19 bp, Mus musculus
  siRNA target sequence for Actr1a (NM_016860.1,1123-1141).
gatgtgggtctctaagaaa

SEQ ID NO: 659111 - DNA, 19 bp, Mus musculus
  siRNA target sequence for Actr1a (NM_016860.1,1128-1146).
gggtctctaagaaagaata

SEQ ID NO: 659112 - DNA, 19 bp, Mus musculus
  siRNA target sequence for Actr1b (NM_146107.1,152-170).
gagaccagattcctaagta

SEQ ID NO: 659113 - DNA, 19 bp, Mus musculus
  siRNA target sequence for Actr1b (NM_146107.1,154-172).
gaccagattcctaagtact

SEQ ID NO: 659114 - DNA, 19 bp, Mus musculus
  siRNA target sequence for Actr1b (NM_146107.1,228-246).
ggagggggacctgttcatt

SEQ ID NO: 659115 - DNA, 19 bp, Mus musculus
  siRNA target sequence for Actr1b (NM_146107.1,305-323).
gtgtggtacgggattggaa

SEQ ID NO: 659116 - DNA, 19 bp, Mus musculus
  siRNA target sequence for Actr1b (NM_146107.1,310-328).
gtacgggattggaatgaca

SEQ ID NO: 659117 - DNA, 19 bp, Mus musculus
  siRNA target sequence for Actr1b (NM_146107.1,413-431).
cactgaaccccagtaagaa

SEQ ID NO: 659118 - DNA, 19 bp, Mus musculus
  siRNA target sequence for Actr1b (NM_146107.1,441-459).
ggcggcagaggtcttcttt

SEQ ID NO: 659119 - DNA, 19 bp, Mus musculus
  siRNA target sequence for Actr1b (NM_146107.1,443-461).
cggcagaggtcttctttga

SEQ ID NO: 659120 - DNA, 19 bp, Mus musculus
  siRNA target sequence for Actr1b (NM_146107.1,472-490).
gttcctgcactgtttatct

SEQ ID NO: 659121 - DNA, 19 bp, Mus musculus
  siRNA target sequence for Actr1b (NM_146107.1,528-546).
caccacaggagtggtttta

SEQ ID NO: 659122 - DNA, 19 bp, Mus musculus
  siRNA target sequence for Actr1b (NM_146107.1,635-653).
gggacgtctctcgatatct

SEQ ID NO: 659123 - DNA, 19 bp, Mus musculus
  siRNA target sequence for Actr1b (NM_146107.1,637-655).
gacgtctctcgatatctga

SEQ ID NO: 659124 - DNA, 19 bp, Mus musculus
  siRNA target sequence for Actr1b (NM_146107.1,708-726).
ggtggtccggaccatcaaa

SEQ ID NO: 659125 - DNA, 19 bp, Mus musculus
  siRNA target sequence for Actr1b (NM_146107.1,723-741).
caaagagcgagcttgctat

SEQ ID NO: 659126 - DNA, 19 bp, Mus musculus
  siRNA target sequence for Actr1b (NM_146107.1,727-745).
gagcgagcttgctatctgt

SEQ ID NO: 659127 - DNA, 19 bp, Mus musculus
  siRNA target sequence for Actr1b (NM_146107.1,946-964).
cggacactcttctccaata

SEQ ID NO: 659128 - DNA, 19 bp, Mus musculus
  siRNA target sequence for Actr1b (NM_146107.1,950-968).
cactcttctccaatatcgt

SEQ ID NO: 659129 - DNA, 19 bp, Mus musculus
  siRNA target sequence for Actr1b (NM_146107.1,977-995).
ggggctcaacactcttcaa

SEQ ID NO: 659130 - DNA, 19 bp, Mus musculus
  siRNA target sequence for Actr1b (NM_146107.1,1008-1026).
caggttactaagtgaagta

SEQ ID NO: 659131 - DNA, 19 bp, Mus musculus
  siRNA target sequence for Actr1b (NM_146107.1,1033-1051).
cttgccccgaaggatgtta

SEQ ID NO: 659132 - DNA, 19 bp, Mus musculus
  siRNA target sequence for Actr1b (NM_146107.1,1036-1054).
gccccgaaggatgttaaaa

SEQ ID NO: 659133 - DNA, 19 bp, Mus musculus
  siRNA target sequence for Actr1b (NM_146107.1,1037-1055).
ccccgaaggatgttaaaat

SEQ ID NO: 659134 - DNA, 19 bp, Mus musculus
  siRNA target sequence for Actr1b (NM_146107.1,1039-1057).
ccgaaggatgttaaaatca

SEQ ID NO: 659135 - DNA, 19 bp, Mus musculus
  siRNA target sequence for Actr1b (NM_146107.1,1040-1058).
cgaaggatgttaaaatcaa

SEQ ID NO: 659136 - DNA, 19 bp, Mus musculus
  siRNA target sequence for Actr1b (NM_146107.1,1045-1063).
gatgttaaaatcaagatct

SEQ ID NO: 659137 - DNA, 19 bp, Mus musculus
  siRNA target sequence for Actr1b (NM_146107.1,1143-1161).
ggtatccaaaaaggaatat

SEQ ID NO: 659138 - DNA, 19 bp, Mus musculus
  siRNA target sequence for Actr1b (NM_146107.1,1180-1198).
gcgattcatcgcaaaacct

SEQ ID NO: 659139 - DNA, 19 bp, Mus musculus
  siRNA target sequence for Actr1b (NM_146107.1,1181-1199).
cgattcatcgcaaaacctt

SEQ ID NO: 659140 - DNA, 19 bp, Mus musculus
  siRNA target sequence for Actr2 (NM_146243.1,144-162).
ggatatgcaggctctaatt

SEQ ID NO: 659141 - DNA, 19 bp, Mus musculus
  siRNA target sequence for Actr2 (NM_146243.1,189-207).
gttggaagacctattatca

SEQ ID NO: 659142 - DNA, 19 bp, Mus musculus
  siRNA target sequence for Actr2 (NM_146243.1,192-210).
ggaagacctattatcagat

SEQ ID NO: 659143 - DNA, 19 bp, Mus musculus
  siRNA target sequence for Actr2 (NM_146243.1,217-235).
ccaaagtgggaaacattga

SEQ ID NO: 659144 - DNA, 19 bp, Mus musculus
  siRNA target sequence for Actr2 (NM_146243.1,277-295).
gttccatgttggaagtgaa

SEQ ID NO: 659145 - DNA, 19 bp, Mus musculus
  siRNA target sequence for Actr2 (NM_146243.1,280-298).
ccatgttggaagtgaacta

SEQ ID NO: 659146 - DNA, 19 bp, Mus musculus
  siRNA target sequence for Actr2 (NM_146243.1,322-340).
ggaattgggatgacatgaa

SEQ ID NO: 659147 - DNA, 19 bp, Mus musculus
  siRNA target sequence for Actr2 (NM_146243.1,344-362).
cctgtgggactacacattt

SEQ ID NO: 659148 - DNA, 19 bp, Mus musculus
  siRNA target sequence for Actr2 (NM_146243.1,363-381).
ggaccagagaaactcaata

SEQ ID NO: 659149 - DNA, 19 bp, Mus musculus
  siRNA target sequence for Actr2 (NM_146243.1,364-382).
gaccagagaaactcaatat

SEQ ID NO: 659150 - DNA, 19 bp, Mus musculus
  siRNA target sequence for Actr2 (NM_146243.1,386-404).
caccagaaactgcaagatt

SEQ ID NO: 659151 - DNA, 19 bp, Mus musculus
  siRNA target sequence for Actr2 (NM_146243.1,391-409).
gaaactgcaagattttact

SEQ ID NO: 659152 - DNA, 19 bp, Mus musculus
  siRNA target sequence for Actr2 (NM_146243.1,506-524).
ggcagttctgactttgtat

SEQ ID NO: 659153 - DNA, 19 bp, Mus musculus
  siRNA target sequence for Actr2 (NM_146243.1,517-535).
ctttgtatgctcaaggttt

SEQ ID NO: 659154 - DNA, 19 bp, Mus musculus
  siRNA target sequence for Actr2 (NM_146243.1,564-582).
gatggcgtcactcacattt

SEQ ID NO: 659155 - DNA, 19 bp, Mus musculus
  siRNA target sequence for Actr2 (NM_146243.1,574-592).
ctcacatttgcccagtata

SEQ ID NO: 659156 - DNA, 19 bp, Mus musculus
  siRNA target sequence for Actr2 (NM_146243.1,636-654).
gctgggagggatattacca

SEQ ID NO: 659157 - DNA, 19 bp, Mus musculus
  siRNA target sequence for Actr2 (NM_146243.1,645-663).
gatattaccaggtatctta

SEQ ID NO: 659158 - DNA, 19 bp, Mus musculus
  siRNA target sequence for Actr2 (NM_146243.1,671-689).
gctgctgttgcgaggatat

SEQ ID NO: 659159 - DNA, 19 bp, Mus musculus
  siRNA target sequence for Actr2 (NM_146243.1,684-702).
ggatatgccttcaaccatt

SEQ ID NO: 659160 - DNA, 19 bp, Mus musculus
  siRNA target sequence for Actr2 (NM_146243.1,695-713).
caaccattctgctgatttt

SEQ ID NO: 659161 - DNA, 19 bp, Mus musculus
  siRNA target sequence for Actr2 (NM_146243.1,720-738).
gttcgcatgattaaggaaa

SEQ ID NO: 659162 - DNA, 19 bp, Mus musculus
  siRNA target sequence for Actr2 (NM_146243.1,785-803).
cttagagaccacagtgtta

SEQ ID NO: 659163 - DNA, 19 bp, Mus musculus
  siRNA target sequence for Actr2 (NM_146243.1,798-816).
gtgttagttgagtcatata

SEQ ID NO: 659164 - DNA, 19 bp, Mus musculus
  siRNA target sequence for Actr2 (NM_146243.1,800-818).
gttagttgagtcatataca

SEQ ID NO: 659165 - DNA, 19 bp, Mus musculus
  siRNA target sequence for Actr2 (NM_146243.1,822-840).
ccagatggacgtatcatta

SEQ ID NO: 659166 - DNA, 19 bp, Mus musculus
  siRNA target sequence for Actr2 (NM_146243.1,823-841).
cagatggacgtatcattaa

SEQ ID NO: 659167 - DNA, 19 bp, Mus musculus
  siRNA target sequence for Actr2 (NM_146243.1,842-860).
ggttggaggagaacgattt

SEQ ID NO: 659168 - DNA, 19 bp, Mus musculus
  siRNA target sequence for Actr2 (NM_146243.1,941-959).
ccaggcagccgacattgat

SEQ ID NO: 659169 - DNA, 19 bp, Mus musculus
  siRNA target sequence for Actr2 (NM_146243.1,942-960).
caggcagccgacattgata

SEQ ID NO: 659170 - DNA, 19 bp, Mus musculus
  siRNA target sequence for Actr2 (NM_146243.1,957-975).
gataccagatctgaatttt

SEQ ID NO: 659171 - DNA, 19 bp, Mus musculus
  siRNA target sequence for Actr2 (NM_146243.1,1030-1048).
ggttggaacgagagcttaa

SEQ ID NO: 659172 - DNA, 19 bp, Mus musculus
  siRNA target sequence for Actr2 (NM_146243.1,1031-1049).
gttggaacgagagcttaaa

SEQ ID NO: 659173 - DNA, 19 bp, Mus musculus
  siRNA target sequence for Actr2 (NM_146243.1,1039-1057).
gagagcttaaacagcttta

SEQ ID NO: 659174 - DNA, 19 bp, Mus musculus
  siRNA target sequence for Actr2 (NM_146243.1,1041-1059).
gagcttaaacagctttact

SEQ ID NO: 659175 - DNA, 19 bp, Mus musculus
  siRNA target sequence for Actr2 (NM_146243.1,1085-1103).
ggaaaaactttcaaaattt

SEQ ID NO: 659176 - DNA, 19 bp, Mus musculus
  siRNA target sequence for Actr8 (NM_027493.1,215-233).
caacttcattgttgtcata

SEQ ID NO: 659177 - DNA, 19 bp, Mus musculus
  siRNA target sequence for Actr8 (NM_027493.1,262-280).
gccgagccacagatacact

SEQ ID NO: 659178 - DNA, 19 bp, Mus musculus
  siRNA target sequence for Actr8 (NM_027493.1,263-281).
ccgagccacagatacactt

SEQ ID NO: 659179 - DNA, 19 bp, Mus musculus
  siRNA target sequence for Actr8 (NM_027493.1,356-374).
cctaagggaaggactaaat

SEQ ID NO: 659180 - DNA, 19 bp, Mus musculus
  siRNA target sequence for Actr8 (NM_027493.1,357-375).
ctaagggaaggactaaata

SEQ ID NO: 659181 - DNA, 19 bp, Mus musculus
  siRNA target sequence for Actr8 (NM_027493.1,417-435).
gtggaccaggcaatatggt

SEQ ID NO: 659182 - DNA, 19 bp, Mus musculus
  siRNA target sequence for Actr8 (NM_027493.1,422-440).
ccaggcaatatggtctaaa

SEQ ID NO: 659183 - DNA, 19 bp, Mus musculus
  siRNA target sequence for Actr8 (NM_027493.1,433-451).
ggtctaaaaagatgtcaaa

SEQ ID NO: 659184 - DNA, 19 bp, Mus musculus
  siRNA target sequence for Actr8 (NM_027493.1,483-501).
cagacacgctcctacaaca

SEQ ID NO: 659185 - DNA, 19 bp, Mus musculus
  siRNA target sequence for Actr8 (NM_027493.1,506-524).
gatgcgacctgccattcta

SEQ ID NO: 659186 - DNA, 19 bp, Mus musculus
  siRNA target sequence for Actr8 (NM_027493.1,509-527).
gcgacctgccattctagat

SEQ ID NO: 659187 - DNA, 19 bp, Mus musculus
  siRNA target sequence for Actr8 (NM_027493.1,511-529).
gacctgccattctagatca

SEQ ID NO: 659188 - DNA, 19 bp, Mus musculus
  siRNA target sequence for Actr8 (NM_027493.1,606-624).
cccctggactgttacaaca

SEQ ID NO: 659189 - DNA, 19 bp, Mus musculus
  siRNA target sequence for Actr8 (NM_027493.1,608-626).
cctggactgttacaacatt

SEQ ID NO: 659190 - DNA, 19 bp, Mus musculus
  siRNA target sequence for Actr8 (NM_027493.1,715-733).
ggtctcatgcaatacaaaa

SEQ ID NO: 659191 - DNA, 19 bp, Mus musculus
  siRNA target sequence for Actr8 (NM_027493.1,773-791).
gtgcatcttgttaattcca

SEQ ID NO: 659192 - DNA, 19 bp, Mus musculus
  siRNA target sequence for Actr8 (NM_027493.1,878-896).
gtctgtgtgcgctacgttt

SEQ ID NO: 659193 - DNA, 19 bp, Mus musculus
  siRNA target sequence for Actr8 (NM_027493.1,910-928).
gcagcacctgtgttgtaga

SEQ ID NO: 659194 - DNA, 19 bp, Mus musculus
  siRNA target sequence for Actr8 (NM_027493.1,913-931).
gcacctgtgttgtagatgt

SEQ ID NO: 659195 - DNA, 19 bp, Mus musculus
  siRNA target sequence for Actr8 (NM_027493.1,930-948).
gttggggaccagaaaacaa

SEQ ID NO: 659196 - DNA, 19 bp, Mus musculus
  siRNA target sequence for Actr8 (NM_027493.1,1017-1035).
gacgtgtcgaggtgttttt

SEQ ID NO: 659197 - DNA, 19 bp, Mus musculus
  siRNA target sequence for Actr8 (NM_027493.1,1020-1038).
gtgtcgaggtgtttttact

SEQ ID NO: 659198 - DNA, 19 bp, Mus musculus
  siRNA target sequence for Actr8 (NM_027493.1,1079-1097).
gctgacaaataaaatggat

SEQ ID NO: 659199 - DNA, 19 bp, Mus musculus
  siRNA target sequence for Actr8 (NM_027493.1,1103-1121).
cctcttgcagcaccttaaa

SEQ ID NO: 659200 - DNA, 19 bp, Mus musculus
  siRNA target sequence for Actr8 (NM_027493.1,1115-1133).
ccttaaagaaaccttttgt

SEQ ID NO: 659201 - DNA, 19 bp, Mus musculus
  siRNA target sequence for Actr8 (NM_027493.1,1126-1144).
ccttttgtcatttagatca

SEQ ID NO: 659202 - DNA, 19 bp, Mus musculus
  siRNA target sequence for Actr8 (NM_027493.1,1132-1150).
gtcatttagatcaggatat

SEQ ID NO: 659203 - DNA, 19 bp, Mus musculus
  siRNA target sequence for Actr8 (NM_027493.1,1195-1213).
cccctgccctgctttacca

SEQ ID NO: 659204 - DNA, 19 bp, Mus musculus
  siRNA target sequence for Actr8 (NM_027493.1,1205-1223).
gctttaccagtttcgatta

SEQ ID NO: 659205 - DNA, 19 bp, Mus musculus
  siRNA target sequence for Actr8 (NM_027493.1,1214-1232).
gtttcgattaggagatgaa

SEQ ID NO: 659206 - DNA, 19 bp, Mus musculus
  siRNA target sequence for Actr8 (NM_027493.1,1219-1237).
gattaggagatgaaaagct

SEQ ID NO: 659207 - DNA, 19 bp, Mus musculus
  siRNA target sequence for Actr8 (NM_027493.1,1645-1663).
gctcatctgatgataccaa

SEQ ID NO: 659208 - DNA, 19 bp, Mus musculus
  siRNA target sequence for Actr8 (NM_027493.1,1696-1714).
gaggcggtttgatgtttca

SEQ ID NO: 659209 - DNA, 19 bp, Mus musculus
  siRNA target sequence for Actr8 (NM_027493.1,1698-1716).
ggcggtttgatgtttcata

SEQ ID NO: 659210 - DNA, 19 bp, Mus musculus
  siRNA target sequence for Actr8 (NM_027493.1,1699-1717).
gcggtttgatgtttcataa

SEQ ID NO: 659211 - DNA, 19 bp, Mus musculus
  siRNA target sequence for Actr8 (NM_027493.1,1765-1783).
cattcaggcgaattattga

SEQ ID NO: 659212 - DNA, 19 bp, Mus musculus
  siRNA target sequence for Actr8 (NM_027493.1,1771-1789).
ggcgaattattgaaaacgt

SEQ ID NO: 659213 - DNA, 19 bp, Mus musculus
  siRNA target sequence for Actr8 (NM_027493.1,1909-1927).
gctttggtgtccgaatgtt

SEQ ID NO: 659214 - DNA, 19 bp, Mus musculus
  siRNA target sequence for Actr8 (NM_027493.1,1910-1928).
ctttggtgtccgaatgtta

SEQ ID NO: 659215 - DNA, 19 bp, Mus musculus
  siRNA target sequence for Actr8 (NM_027493.1,1932-1950).
gaacgagctgcctttgtgt

SEQ ID NO: 659216 - DNA, 19 bp, Mus musculus
  siRNA target sequence for Arpc4 (NM_026552.1,322-340).
gaagcaggccgatgaaatt

SEQ ID NO: 659217 - DNA, 19 bp, Mus musculus
  siRNA target sequence for Arpc4 (NM_026552.1,326-344).
caggccgatgaaattgaga

SEQ ID NO: 659218 - DNA, 19 bp, Mus musculus
  siRNA target sequence for Arpc4 (NM_026552.1,383-401).
cgagcagagaacttcttta

SEQ ID NO: 659219 - DNA, 19 bp, Mus musculus
  siRNA target sequence for Arpc4 (NM_026552.1,384-402).
gagcagagaacttctttat

SEQ ID NO: 659220 - DNA, 19 bp, Mus musculus
  siRNA target sequence for B430109J19Rik (NM_175419.2,602-620).
cgttgatcatcccatagtt

SEQ ID NO: 659221 - DNA, 19 bp, Mus musculus
  siRNA target sequence for B430109J19Rik (NM_175419.2,643-661).
ccctctactcccgtcaaat

SEQ ID NO: 659222 - DNA, 19 bp, Mus musculus
  siRNA target sequence for B430109J19Rik (NM_175419.2,645-663).
ctctactcccgtcaaatga

SEQ ID NO: 659223 - DNA, 19 bp, Mus musculus
  siRNA target sequence for B430109J19Rik (NM_175419.2,665-683).
gtcggagctccttttcgaa

SEQ ID NO: 659224 - DNA, 19 bp, Mus musculus
  siRNA target sequence for B430109J19Rik (NM_175419.2,702-720).
gttgcctatgggatagaca

SEQ ID NO: 659225 - DNA, 19 bp, Mus musculus
  siRNA target sequence for B430109J19Rik (NM_175419.2,737-755).
ccacaacgtgcccaagaat

SEQ ID NO: 659226 - DNA, 19 bp, Mus musculus
  siRNA target sequence for B430109J19Rik (NM_175419.2,764-782).
cagcggcctcatcatttca

SEQ ID NO: 659227 - DNA, 19 bp, Mus musculus
  siRNA target sequence for B430109J19Rik (NM_175419.2,791-809).
ccagtgcacacacatctta

SEQ ID NO: 659228 - DNA, 19 bp, Mus musculus
  siRNA target sequence for B430109J19Rik (NM_175419.2,842-860).
ctgcaagcgcatcaatctt

SEQ ID NO: 659229 - DNA, 19 bp, Mus musculus
  siRNA target sequence for B430109J19Rik (NM_175419.2,959-977).
gcaggagcatagctacatt

SEQ ID NO: 659230 - DNA, 19 bp, Mus musculus
  siRNA target sequence for Krt1-16 (NM_008470.1,797-815).
ctggtggggacgtcaatgt

SEQ ID NO: 659231 - DNA, 19 bp, Mus musculus
  siRNA target sequence for Krt1-16 (NM_008470.1,843-861).
cctcagccgcattctgaat

SEQ ID NO: 659232 - DNA, 19 bp, Mus musculus
  siRNA target sequence for Krt1-16 (NM_008470.1,959-977).
cctctaacagtgatctaat

SEQ ID NO: 659233 - DNA, 19 bp, Mus musculus
  siRNA target sequence for Krt1-16 (NM_008470.1,962-980).
ctaacagtgatctaatcca

SEQ ID NO: 659234 - DNA, 19 bp, Mus musculus
  siRNA target sequence for Krt1-16 (NM_008470.1,1299-1317).
ctctggacagtcctattct

SEQ ID NO: 659235 - DNA, 19 bp, Mus musculus
  siRNA target sequence for Col10a1 (NM_009925.1,43-61).
ctggttcatgggatgtttt

SEQ ID NO: 659236 - DNA, 19 bp, Mus musculus
  siRNA target sequence for Col10a1 (NM_009925.1,106-124).
gctagccccaagacacaat

SEQ ID NO: 659237 - DNA, 19 bp, Mus musculus
  siRNA target sequence for Col10a1 (NM_009925.1,107-125).
ctagccccaagacacaata

SEQ ID NO: 659238 - DNA, 19 bp, Mus musculus
  siRNA target sequence for Col10a1 (NM_009925.1,110-128).
gccccaagacacaatactt

SEQ ID NO: 659239 - DNA, 19 bp, Mus musculus
  siRNA target sequence for Col10a1 (NM_009925.1,113-131).
ccaagacacaatacttcat

SEQ ID NO: 659240 - DNA, 19 bp, Mus musculus
  siRNA target sequence for Col10a1 (NM_009925.1,132-150).
cccatacgccataaagagt

SEQ ID NO: 659241 - DNA, 19 bp, Mus musculus
  siRNA target sequence for Col10a1 (NM_009925.1,134-152).
catacgccataaagagtaa

SEQ ID NO: 659242 - DNA, 19 bp, Mus musculus
  siRNA target sequence for Col10a1 (NM_009925.1,354-372).
ggagagaggaccatatgga

SEQ ID NO: 659243 - DNA, 19 bp, Mus musculus
  siRNA target sequence for Col10a1 (NM_009925.1,1068-1086).
cattccaggcgctaaaggt

SEQ ID NO: 659244 - DNA, 19 bp, Mus musculus
  siRNA target sequence for Col10a1 (NM_009925.1,1137-1155).
gggtccacctgggttagat

SEQ ID NO: 659245 - DNA, 19 bp, Mus musculus
  siRNA target sequence for Col10a1 (NM_009925.1,1379-1397).
caggattccctggatctaa

SEQ ID NO: 659246 - DNA, 19 bp, Mus musculus
  siRNA target sequence for Col10a1 (NM_009925.1,1426-1444).
ggcccagctggcatagcaa

SEQ ID NO: 659247 - DNA, 19 bp, Mus musculus
  siRNA target sequence for Col10a1 (NM_009925.1,1430-1448).
cagctggcatagcaactaa

SEQ ID NO: 659248 - DNA, 19 bp, Mus musculus
  siRNA target sequence for Col10a1 (NM_009925.1,1697-1715).
gtgcccccatcccatttga

SEQ ID NO: 659249 - DNA, 19 bp, Mus musculus
  siRNA target sequence for Col10a1 (NM_009925.1,1700-1718).
cccccatcccatttgatga

SEQ ID NO: 659250 - DNA, 19 bp, Mus musculus
  siRNA target sequence for Col10a1 (NM_009925.1,1740-1758).
gcattacgacccaagatct

SEQ ID NO: 659251 - DNA, 19 bp, Mus musculus
  siRNA target sequence for Col10a1 (NM_009925.1,1749-1767).
cccaagatctggtatcttt

SEQ ID NO: 659252 - DNA, 19 bp, Mus musculus
  siRNA target sequence for Col10a1 (NM_009925.1,1750-1768).
ccaagatctggtatcttta

SEQ ID NO: 659253 - DNA, 19 bp, Mus musculus
  siRNA target sequence for Col10a1 (NM_009925.1,1772-1790).
gtaagatcccaggcatata

SEQ ID NO: 659254 - DNA, 19 bp, Mus musculus
  siRNA target sequence for Col10a1 (NM_009925.1,1780-1798).
ccaggcatatactatttct

SEQ ID NO: 659255 - DNA, 19 bp, Mus musculus
  siRNA target sequence for Col10a1 (NM_009925.1,1799-1817).
cctaccacgtgcatgtgaa

SEQ ID NO: 659256 - DNA, 19 bp, Mus musculus
  siRNA target sequence for Col10a1 (NM_009925.1,1800-1818).
ctaccacgtgcatgtgaaa

SEQ ID NO: 659257 - DNA, 19 bp, Mus musculus
  siRNA target sequence for Col10a1 (NM_009925.1,1828-1846).
gtttgggtaggcctgtata

SEQ ID NO: 659258 - DNA, 19 bp, Mus musculus
  siRNA target sequence for Col10a1 (NM_009925.1,1852-1870).
ggcacgcctacgatgtaca

SEQ ID NO: 659259 - DNA, 19 bp, Mus musculus
  siRNA target sequence for Col10a1 (NM_009925.1,1862-1880).
cgatgtacacgtatgatga

SEQ ID NO: 659260 - DNA, 19 bp, Mus musculus
  siRNA target sequence for Col10a1 (NM_009925.1,1907-1925).
cttcagggagtgcaatcat

SEQ ID NO: 659261 - DNA, 19 bp, Mus musculus
  siRNA target sequence for Col11a1 (NM_007729.1,231-249).
caaccctcgccttgacttt

SEQ ID NO: 659262 - DNA, 19 bp, Mus musculus
  siRNA target sequence for Col11a1 (NM_007729.1,281-299).
gctccagttgatatactaa

SEQ ID NO: 659263 - DNA, 19 bp, Mus musculus
  siRNA target sequence for Col11a1 (NM_007729.1,282-300).
ctccagttgatatactaaa

SEQ ID NO: 659264 - DNA, 19 bp, Mus musculus
  siRNA target sequence for Col11a1 (NM_007729.1,302-320).
gcattagattttcacaatt

SEQ ID NO: 659265 - DNA, 19 bp, Mus musculus
  siRNA target sequence for Col11a1 (NM_007729.1,321-339).
ctccagtgggaatatctaa

SEQ ID NO: 659266 - DNA, 19 bp, Mus musculus
  siRNA target sequence for Col11a1 (NM_007729.1,328-346).
gggaatatctaaaacaaca

SEQ ID NO: 659267 - DNA, 19 bp, Mus musculus
  siRNA target sequence for Col11a1 (NM_007729.1,377-395).
gatccagatgttgcttata

SEQ ID NO: 659268 - DNA, 19 bp, Mus musculus
  siRNA target sequence for Col11a1 (NM_007729.1,381-399).
cagatgttgcttatagagt

SEQ ID NO: 659269 - DNA, 19 bp, Mus musculus
  siRNA target sequence for Col11a1 (NM_007729.1,436-454).
gctatttccaggaggaatt

SEQ ID NO: 659270 - DNA, 19 bp, Mus musculus
  siRNA target sequence for Col11a1 (NM_007729.1,459-477).
cacaagatttttcaatact

SEQ ID NO: 659271 - DNA, 19 bp, Mus musculus
  siRNA target sequence for Col11a1 (NM_007729.1,464-482).
gatttttcaatactattta

SEQ ID NO: 659272 - DNA, 19 bp, Mus musculus
  siRNA target sequence for Col11a1 (NM_007729.1,517-535).
cttgtccctctacaatgaa

SEQ ID NO: 659273 - DNA, 19 bp, Mus musculus
  siRNA target sequence for Col11a1 (NM_007729.1,520-538).
gtccctctacaatgaacat

SEQ ID NO: 659274 - DNA, 19 bp, Mus musculus
  siRNA target sequence for Col11a1 (NM_007729.1,567-585).
ggagatcgcccgtttttct

SEQ ID NO: 659275 - DNA, 19 bp, Mus musculus
  siRNA target sequence for Col11a1 (NM_007729.1,568-586).
gagatcgcccgtttttcta

SEQ ID NO: 659276 - DNA, 19 bp, Mus musculus
  siRNA target sequence for Col11a1 (NM_007729.1,570-588).
gatcgcccgtttttctatt

SEQ ID NO: 659277 - DNA, 19 bp, Mus musculus
  siRNA target sequence for Col11a1 (NM_007729.1,573-591).
cgcccgtttttctatttga

SEQ ID NO: 659278 - DNA, 19 bp, Mus musculus
  siRNA target sequence for Col11a1 (NM_007729.1,576-594).
ccgtttttctatttgaaga

SEQ ID NO: 659279 - DNA, 19 bp, Mus musculus
  siRNA target sequence for Col11a1 (NM_007729.1,626-644).
cctctcttctcaacagtta

SEQ ID NO: 659280 - DNA, 19 bp, Mus musculus
  siRNA target sequence for Col11a1 (NM_007729.1,627-645).
ctctcttctcaacagttaa

SEQ ID NO: 659281 - DNA, 19 bp, Mus musculus
  siRNA target sequence for Col11a1 (NM_007729.1,629-647).
ctcttctcaacagttaaca

SEQ ID NO: 659282 - DNA, 19 bp, Mus musculus
  siRNA target sequence for Col11a1 (NM_007729.1,631-649).
cttctcaacagttaacatt

SEQ ID NO: 659283 - DNA, 19 bp, Mus musculus
  siRNA target sequence for Col11a1 (NM_007729.1,664-682).
gcaccgggtcgcaatcagt

SEQ ID NO: 659284 - DNA, 19 bp, Mus musculus
  siRNA target sequence for Col11a1 (NM_007729.1,698-716).
gtgacaatgattgttgatt

SEQ ID NO: 659285 - DNA, 19 bp, Mus musculus
  siRNA target sequence for Col11a1 (NM_007729.1,700-718).
gacaatgattgttgattgt

SEQ ID NO: 659286 - DNA, 19 bp, Mus musculus
  siRNA target sequence for Col11a1 (NM_007729.1,771-789).
ccaatggaatcatggtatt

SEQ ID NO: 659287 - DNA, 19 bp, Mus musculus
  siRNA target sequence for Col11a1 (NM_007729.1,781-799).
catggtatttggaacaaga

SEQ ID NO: 659288 - DNA, 19 bp, Mus musculus
  siRNA target sequence for Col11a1 (NM_007729.1,883-901).
ccattacagtccagattgt

SEQ ID NO: 659289 - DNA, 19 bp, Mus musculus
  siRNA target sequence for Col11a1 (NM_007729.1,893-911).
ccagattgtgacttaacat

SEQ ID NO: 659290 - DNA, 19 bp, Mus musculus
  siRNA target sequence for Col11a1 (NM_007729.1,927-945).
ctcaggagcctcacattga

SEQ ID NO: 659291 - DNA, 19 bp, Mus musculus
  siRNA target sequence for Col11a1 (NM_007729.1,949-967).
gtatgcacctgaggatata

SEQ ID NO: 659292 - DNA, 19 bp, Mus musculus
  siRNA target sequence for Col11a1 (NM_007729.1,954-972).
cacctgaggatataatcga

SEQ ID NO: 659293 - DNA, 19 bp, Mus musculus
  siRNA target sequence for Col11a1 (NM_007729.1,962-980).
gatataatcgagtatgact

SEQ ID NO: 659294 - DNA, 19 bp, Mus musculus
  siRNA target sequence for Col11a1 (NM_007729.1,1068-1086).
caaatattgtggatgattt

SEQ ID NO: 659295 - DNA, 19 bp, Mus musculus
  siRNA target sequence for Col11a1 (NM_007729.1,1088-1106).
caagactacaactatggaa

SEQ ID NO: 659296 - DNA, 19 bp, Mus musculus
  siRNA target sequence for Col11a1 (NM_007729.1,1138-1156).
gcgggtatcaggatcgaat

SEQ ID NO: 659297 - DNA, 19 bp, Mus musculus
  siRNA target sequence for Col11a1 (NM_007729.1,1214-1232).
gatgtccagagaaacactt

SEQ ID NO: 659298 - DNA, 19 bp, Mus musculus
  siRNA target sequence for Col11a1 (NM_007729.1,1230-1248).
cttccgaggatattctgta

SEQ ID NO: 659299 - DNA, 19 bp, Mus musculus
  siRNA target sequence for Col11a1 (NM_007729.1,1347-1365).
ctacgacctcccctaatga

SEQ ID NO: 659300 - DNA, 19 bp, Mus musculus
  siRNA target sequence for Col11a1 (NM_007729.1,1350-1368).
cgacctcccctaatgaaga

SEQ ID NO: 659301 - DNA, 19 bp, Mus musculus
  siRNA target sequence for Col11a1 (NM_007729.1,1351-1369).
gacctcccctaatgaagaa

SEQ ID NO: 659302 - DNA, 19 bp, Mus musculus
  siRNA target sequence for Col11a1 (NM_007729.1,1509-1527).
caggaccagcgggtcttat

SEQ ID NO: 659303 - DNA, 19 bp, Mus musculus
  siRNA target sequence for Col11a1 (NM_007729.1,1711-1729).
ccaagctcaggcgattctt

SEQ ID NO: 659304 - DNA, 19 bp, Mus musculus
  siRNA target sequence for Col11a1 (NM_007729.1,2423-2441).
cctcaggggcctattggtt

SEQ ID NO: 659305 - DNA, 19 bp, Mus musculus
  siRNA target sequence for Col11a1 (NM_007729.1,2424-2442).
ctcaggggcctattggtta

SEQ ID NO: 659306 - DNA, 19 bp, Mus musculus
  siRNA target sequence for Col11a1 (NM_007729.1,2428-2446).
ggggcctattggttatcct

SEQ ID NO: 659307 - DNA, 19 bp, Mus musculus
  siRNA target sequence for Col11a1 (NM_007729.1,2445-2463).
ctggtccccgtggagtaaa

SEQ ID NO: 659308 - DNA, 19 bp, Mus musculus
  siRNA target sequence for Col11a1 (NM_007729.1,3019-3037).
gcgtggtgagactggattt

SEQ ID NO: 659309 - DNA, 19 bp, Mus musculus
  siRNA target sequence for Col11a1 (NM_007729.1,3463-3481).
gggtcctgcaggtagagat

SEQ ID NO: 659310 - DNA, 19 bp, Mus musculus
  siRNA target sequence for Col11a1 (NM_007729.1,4057-4075).
ggggccaccaggtgatgat

SEQ ID NO: 659311 - DNA, 19 bp, Mus musculus
  siRNA target sequence for Col11a1 (NM_007729.1,4533-4551).
ctggtttaattggattgat

SEQ ID NO: 659312 - DNA, 19 bp, Mus musculus
  siRNA target sequence for Col11a1 (NM_007729.1,4695-4713).
ctggcccgaagggtaacaa

SEQ ID NO: 659313 - DNA, 19 bp, Mus musculus
  siRNA target sequence for Col11a1 (NM_007729.1,4705-4723).
gggtaacaaaggatcatct

SEQ ID NO: 659314 - DNA, 19 bp, Mus musculus
  siRNA target sequence for Col11a1 (NM_007729.1,5055-5073).
gttgttcaggtgattcctt

SEQ ID NO: 659315 - DNA, 19 bp, Mus musculus
  siRNA target sequence for Col11a1 (NM_007729.1,5063-5081).
ggtgattccttcaaagttt

SEQ ID NO: 659316 - DNA, 19 bp, Mus musculus
  siRNA target sequence for Col11a1 (NM_007729.1,5112-5130).
gcatctatccggataaaaa

SEQ ID NO: 659317 - DNA, 19 bp, Mus musculus
  siRNA target sequence for Col11a1 (NM_007729.1,5113-5131).
catctatccggataaaaaa

SEQ ID NO: 659318 - DNA, 19 bp, Mus musculus
  siRNA target sequence for Col11a1 (NM_007729.1,5116-5134).
ctatccggataaaaaatct

SEQ ID NO: 659319 - DNA, 19 bp, Mus musculus
  siRNA target sequence for Col11a1 (NM_007729.1,5175-5193).
gaagttggtacagtgaatt

SEQ ID NO: 659320 - DNA, 19 bp, Mus musculus
  siRNA target sequence for Col11a1 (NM_007729.1,5225-5243).
gtggaaggcaattccataa

SEQ ID NO: 659321 - DNA, 19 bp, Mus musculus
  siRNA target sequence for Col11a1 (NM_007729.1,5227-5245).
ggaaggcaattccataaat

SEQ ID NO: 659322 - DNA, 19 bp, Mus musculus
  siRNA target sequence for Col11a1 (NM_007729.1,5232-5250).
gcaattccataaatatggt

SEQ ID NO: 659323 - DNA, 19 bp, Mus musculus
  siRNA target sequence for Col11a1 (NM_007729.1,5233-5251).
caattccataaatatggta

SEQ ID NO: 659324 - DNA, 19 bp, Mus musculus
  siRNA target sequence for Col11a1 (NM_007729.1,5322-5340).
ctgcctggtatgacgtatt

SEQ ID NO: 659325 - DNA, 19 bp, Mus musculus
  siRNA target sequence for Col11a1 (NM_007729.1,5324-5342).
gcctggtatgacgtattat

SEQ ID NO: 659326 - DNA, 19 bp, Mus musculus
  siRNA target sequence for Col11a1 (NM_007729.1,5326-5344).
ctggtatgacgtattatca

SEQ ID NO: 659327 - DNA, 19 bp, Mus musculus
  siRNA target sequence for Col11a1 (NM_007729.1,5335-5353).
cgtattatcaggaagttat

SEQ ID NO: 659328 - DNA, 19 bp, Mus musculus
  siRNA target sequence for Col11a1 (NM_007729.1,5367-5385).
gatttctgggatcaaatga

SEQ ID NO: 659329 - DNA, 19 bp, Mus musculus
  siRNA target sequence for Col11a1 (NM_007729.1,5443-5461).
gtctcgaaaaggctatgaa

SEQ ID NO: 659330 - DNA, 19 bp, Mus musculus
  siRNA target sequence for Col11a1 (NM_007729.1,5447-5465).
cgaaaaggctatgaaaaga

SEQ ID NO: 659331 - DNA, 19 bp, Mus musculus
  siRNA target sequence for Col11a1 (NM_007729.1,5476-5494).
gatcaatactccgaaaatt

SEQ ID NO: 659332 - DNA, 19 bp, Mus musculus
  siRNA target sequence for Col11a1 (NM_007729.1,5500-5518).
ggtacccatcattgatgta

SEQ ID NO: 659333 - DNA, 19 bp, Mus musculus
  siRNA target sequence for Col11a1 (NM_007729.1,5501-5519).
gtacccatcattgatgtaa

SEQ ID NO: 659334 - DNA, 19 bp, Mus musculus
  siRNA target sequence for Col11a1 (NM_007729.1,5566-5584).
cggtccagcttgctttctt

SEQ ID NO: 659335 - DNA, 19 bp, Mus musculus
  siRNA target sequence for Col11a2 (NM_009926.1,351-369).
gatggtgttcggagatcaa

SEQ ID NO: 659336 - DNA, 19 bp, Mus musculus
  siRNA target sequence for Col11a2 (NM_009926.1,510-528).
gctcccctcttgactctat

SEQ ID NO: 659337 - DNA, 19 bp, Mus musculus
  siRNA target sequence for Col11a2 (NM_009926.1,511-529).
ctcccctcttgactctata

SEQ ID NO: 659338 - DNA, 19 bp, Mus musculus
  siRNA target sequence for Col11a2 (NM_009926.1,571-589).
gccctgtccgctttctcta

SEQ ID NO: 659339 - DNA, 19 bp, Mus musculus
  siRNA target sequence for Col11a2 (NM_009926.1,574-592).
ctgtccgctttctctatga

SEQ ID NO: 659340 - DNA, 19 bp, Mus musculus
  siRNA target sequence for Col11a2 (NM_009926.1,705-723).
ctcattgtggactgtaaga

SEQ ID NO: 659341 - DNA, 19 bp, Mus musculus
  siRNA target sequence for Col11a2 (NM_009926.1,772-790).
cccacggggtggtgatctt

SEQ ID NO: 659342 - DNA, 19 bp, Mus musculus
  siRNA target sequence for Col11a2 (NM_009926.1,773-791).
ccacggggtggtgatcttt

SEQ ID NO: 659343 - DNA, 19 bp, Mus musculus
  siRNA target sequence for Col11a2 (NM_009926.1,803-821).
cctcgacgatgaagtcttt

SEQ ID NO: 659344 - DNA, 19 bp, Mus musculus
  siRNA target sequence for Col11a2 (NM_009926.1,806-824).
cgacgatgaagtctttgaa

SEQ ID NO: 659345 - DNA, 19 bp, Mus musculus
  siRNA target sequence for Col11a2 (NM_009926.1,2126-2144).
caagggtgtggatggaatt

SEQ ID NO: 659346 - DNA, 19 bp, Mus musculus
  siRNA target sequence for Col11a2 (NM_009926.1,2602-2620).
ctcaaggccccaatggatt

SEQ ID NO: 659347 - DNA, 19 bp, Mus musculus
  siRNA target sequence for Col11a2 (NM_009926.1,2952-2970).
ggacccggcttgaaaggaa

SEQ ID NO: 659348 - DNA, 19 bp, Mus musculus
  siRNA target sequence for Col11a2 (NM_009926.1,2956-2974).
ccggcttgaaaggaaatga

SEQ ID NO: 659349 - DNA, 19 bp, Mus musculus
  siRNA target sequence for Col11a2 (NM_009926.1,2957-2975).
cggcttgaaaggaaatgaa

SEQ ID NO: 659350 - DNA, 19 bp, Mus musculus
  siRNA target sequence for Col11a2 (NM_009926.1,3113-3131).
cgagaaaggccctattggt

SEQ ID NO: 659351 - DNA, 19 bp, Mus musculus
  siRNA target sequence for Col1a1 (NM_007742.2,230-248).
ggaaacccgaggtatgctt

SEQ ID NO: 659352 - DNA, 19 bp, Mus musculus
  siRNA target sequence for Col1a1 (NM_007742.2,238-256).
gaggtatgcttgatctgta

SEQ ID NO: 659353 - DNA, 19 bp, Mus musculus
  siRNA target sequence for Col1a1 (NM_007742.2,241-259).
gtatgcttgatctgtatct

SEQ ID NO: 659354 - DNA, 19 bp, Mus musculus
  siRNA target sequence for Col1a1 (NM_007742.2,281-299).
gcgatgacgtgcaatgcaa

SEQ ID NO: 659355 - DNA, 19 bp, Mus musculus
  siRNA target sequence for Col1a1 (NM_007742.2,282-300).
cgatgacgtgcaatgcaat

SEQ ID NO: 659356 - DNA, 19 bp, Mus musculus
  siRNA target sequence for Col1a1 (NM_007742.2,288-306).
cgtgcaatgcaatgaagaa

SEQ ID NO: 659357 - DNA, 19 bp, Mus musculus
  siRNA target sequence for Col1a1 (NM_007742.2,354-372).
ctgcccggaagaatacgta

SEQ ID NO: 659358 - DNA, 19 bp, Mus musculus
  siRNA target sequence for Col1a1 (NM_007742.2,1263-1281).
caatggtgctcctggtatt

SEQ ID NO: 659359 - DNA, 19 bp, Mus musculus
  siRNA target sequence for Col1a1 (NM_007742.2,2147-2165).
ctggtccccgaggaaacaa

SEQ ID NO: 659360 - DNA, 19 bp, Mus musculus
  siRNA target sequence for Col1a1 (NM_007742.2,2552-2570).
ctggtgatactggtgttaa

SEQ ID NO: 659361 - DNA, 19 bp, Mus musculus
  siRNA target sequence for Col1a1 (NM_007742.2,2760-2778).
cggtcccgttggcaaagaa

SEQ ID NO: 659362 - DNA, 19 bp, Mus musculus
  siRNA target sequence for Col1a1 (NM_007742.2,3638-3656).
ctcccagtggcggttatga

SEQ ID NO: 659363 - DNA, 19 bp, Mus musculus
  siRNA target sequence for Col1a1 (NM_007742.2,3776-3794).
gcctgagtcagcagattga

SEQ ID NO: 659364 - DNA, 19 bp, Mus musculus
  siRNA target sequence for Col1a1 (NM_007742.2,3839-3857).
catgccgcgacctcaagat

SEQ ID NO: 659365 - DNA, 19 bp, Mus musculus
  siRNA target sequence for Col1a1 (NM_007742.2,3980-3998).
cgtctgtgcctcagaagaa

SEQ ID NO: 659366 - DNA, 19 bp, Mus musculus
  siRNA target sequence for Col1a1 (NM_007742.2,4342-4360).
gtcatcgaatacaaaacca

SEQ ID NO: 659367 - DNA, 19 bp, Mus musculus
  siRNA target sequence for Col1a1 (NM_007742.2,4422-4440).
ggaattcggactagacatt

SEQ ID NO: 659368 - DNA, 19 bp, Mus musculus
  siRNA target sequence for Col1a2 (NM_007743.1,138-156).
caacatgccaatatttgca

SEQ ID NO: 659369 - DNA, 19 bp, Mus musculus
  siRNA target sequence for Col1a2 (NM_007743.1,645-663).
gtggtatggatggattaaa

SEQ ID NO: 659370 - DNA, 19 bp, Mus musculus
  siRNA target sequence for Col1a2 (NM_007743.1,1218-1236).
ccagcggtgaagaaggaaa

SEQ ID NO: 659371 - DNA, 19 bp, Mus musculus
  siRNA target sequence for Col1a2 (NM_007743.1,1900-1918).
cccttctggtcctattgga

SEQ ID NO: 659372 - DNA, 19 bp, Mus musculus
  siRNA target sequence for Col1a2 (NM_007743.1,2296-2314).
ccaacccggtgctaaagga

SEQ ID NO: 659373 - DNA, 19 bp, Mus musculus
  siRNA target sequence for Col1a2 (NM_007743.1,2491-2509).
cggacccagtggtattgct

SEQ ID NO: 659374 - DNA, 19 bp, Mus musculus
  siRNA target sequence for Col1a2 (NM_007743.1,3413-3431).
ggtggctatgactttggtt

SEQ ID NO: 659375 - DNA, 19 bp, Mus musculus
  siRNA target sequence for Col1a2 (NM_007743.1,3414-3432).
gtggctatgactttggttt

SEQ ID NO: 659376 - DNA, 19 bp, Mus musculus
  siRNA target sequence for Col1a2 (NM_007743.1,3483-3501).
gacccaaggactatgaagt

SEQ ID NO: 659377 - DNA, 19 bp, Mus musculus
  siRNA target sequence for Col1a2 (NM_007743.1,3486-3504).
ccaaggactatgaagttga

SEQ ID NO: 659378 - DNA, 19 bp, Mus musculus
  siRNA target sequence for Col1a2 (NM_007743.1,3500-3518).
gttgatgcaactctgaaat

SEQ ID NO: 659379 - DNA, 19 bp, Mus musculus
  siRNA target sequence for Col1a2 (NM_007743.1,3551-3569).
cctgaaggctctagaaaga

SEQ ID NO: 659380 - DNA, 19 bp, Mus musculus
  siRNA target sequence for Col1a2 (NM_007743.1,3585-3603).
cgtgccgggacttaagact

SEQ ID NO: 659381 - DNA, 19 bp, Mus musculus
  siRNA target sequence for Col1a2 (NM_007743.1,3614-3632).
gagtggaacagcgattact

SEQ ID NO: 659382 - DNA, 19 bp, Mus musculus
  siRNA target sequence for Col1a2 (NM_007743.1,3645-3663).
ctaaccaaggatgtactat

SEQ ID NO: 659383 - DNA, 19 bp, Mus musculus
  siRNA target sequence for Col1a2 (NM_007743.1,3732-3750).
ccccagcgaagaactcata

SEQ ID NO: 659384 - DNA, 19 bp, Mus musculus
  siRNA target sequence for Col1a2 (NM_007743.1,3734-3752).
ccagcgaagaactcataca

SEQ ID NO: 659385 - DNA, 19 bp, Mus musculus
  siRNA target sequence for Col1a2 (NM_007743.1,3781-3799).
gttaggagagactatcaat

SEQ ID NO: 659386 - DNA, 19 bp, Mus musculus
  siRNA target sequence for Col1a2 (NM_007743.1,3801-3819).
gtggcagccagtttgaata

SEQ ID NO: 659387 - DNA, 19 bp, Mus musculus
  siRNA target sequence for Col1a2 (NM_007743.1,3803-3821).
ggcagccagtttgaataca

SEQ ID NO: 659388 - DNA, 19 bp, Mus musculus
  siRNA target sequence for Col1a2 (NM_007743.1,3804-3822).
gcagccagtttgaatacaa

SEQ ID NO: 659389 - DNA, 19 bp, Mus musculus
  siRNA target sequence for Col1a2 (NM_007743.1,3944-3962).
gagacgggcagcttgaaca

SEQ ID NO: 659390 - DNA, 19 bp, Mus musculus
  siRNA target sequence for Col1a2 (NM_007743.1,3979-3997).
gggttccaacgatgttgaa

SEQ ID NO: 659391 - DNA, 19 bp, Mus musculus
  siRNA target sequence for Col1a2 (NM_007743.1,3981-3999).
gttccaacgatgttgaact

SEQ ID NO: 659392 - DNA, 19 bp, Mus musculus
  siRNA target sequence for Col1a2 (NM_007743.1,3984-4002).
ccaacgatgttgaacttgt

SEQ ID NO: 659393 - DNA, 19 bp, Mus musculus
  siRNA target sequence for Col1a2 (NM_007743.1,4040-4058).
gtcgatggctgctccaaaa

SEQ ID NO: 659394 - DNA, 19 bp, Mus musculus
  siRNA target sequence for Col1a2 (NM_007743.1,4043-4061).
gatggctgctccaaaaaga

SEQ ID NO: 659395 - DNA, 19 bp, Mus musculus
  siRNA target sequence for Col1a2 (NM_007743.1,4067-4085).
gaatggggcaagacaatca

SEQ ID NO: 659396 - DNA, 19 bp, Mus musculus
  siRNA target sequence for Col1a2 (NM_007743.1,4113-4131).
gcctgccgttccttgacat

SEQ ID NO: 659397 - DNA, 19 bp, Mus musculus
  siRNA target sequence for Col1a2 (NM_007743.1,4114-4132).
cctgccgttccttgacatt

SEQ ID NO: 659398 - DNA, 19 bp, Mus musculus
  siRNA target sequence for Col27a1 (NM_025685.2,71-89).
cctggatcttggtctcatt

SEQ ID NO: 659399 - DNA, 19 bp, Mus musculus
  siRNA target sequence for Col27a1 (NM_025685.2,306-324).
gttgagcctctgttcacat

SEQ ID NO: 659400 - DNA, 19 bp, Mus musculus
  siRNA target sequence for Col27a1 (NM_025685.2,494-512).
gtggccgcacagtcacaat

SEQ ID NO: 659401 - DNA, 19 bp, Mus musculus
  siRNA target sequence for Col27a1 (NM_025685.2,615-633).
ccgtgctgtccagtttgaa

SEQ ID NO: 659402 - DNA, 19 bp, Mus musculus
  siRNA target sequence for Col27a1 (NM_025685.2,666-684).
ggcgcaggtcgctcacaat

SEQ ID NO: 659403 - DNA, 19 bp, Mus musculus
  siRNA target sequence for Col27a1 (NM_025685.2,667-685).
gcgcaggtcgctcacaatt

SEQ ID NO: 659404 - DNA, 19 bp, Mus musculus
  siRNA target sequence for Col27a1 (NM_025685.2,668-686).
cgcaggtcgctcacaatta

SEQ ID NO: 659405 - DNA, 19 bp, Mus musculus
  siRNA target sequence for Col27a1 (NM_025685.2,672-690).
ggtcgctcacaattactgt

SEQ ID NO: 659406 - DNA, 19 bp, Mus musculus
  siRNA target sequence for Col27a1 (NM_025685.2,710-728).
gccgacaggtggacacata

SEQ ID NO: 659407 - DNA, 19 bp, Mus musculus
  siRNA target sequence for Col27a1 (NM_025685.2,711-729).
ccgacaggtggacacatat

SEQ ID NO: 659408 - DNA, 19 bp, Mus musculus
  siRNA target sequence for Col27a1 (NM_025685.2,712-730).
cgacaggtggacacatata

SEQ ID NO: 659409 - DNA, 19 bp, Mus musculus
  siRNA target sequence for Col27a1 (NM_025685.2,1141-1159).
ccccatgcaacccagaaaa

SEQ ID NO: 659410 - DNA, 19 bp, Mus musculus
  siRNA target sequence for Col27a1 (NM_025685.2,1221-1239).
ctacctagcaccttccaaa

SEQ ID NO: 659411 - DNA, 19 bp, Mus musculus
  siRNA target sequence for Col27a1 (NM_025685.2,1311-1329).
gcccctgcgccctactact

SEQ ID NO: 659412 - DNA, 19 bp, Mus musculus
  siRNA target sequence for Col27a1 (NM_025685.2,1414-1432).
cgctccagtgtccctaaaa

SEQ ID NO: 659413 - DNA, 19 bp, Mus musculus
  siRNA target sequence for Col27a1 (NM_025685.2,1433-1451).
cgcttcagcaaactgtttt

SEQ ID NO: 659414 - DNA, 19 bp, Mus musculus
  siRNA target sequence for Col27a1 (NM_025685.2,1542-1560).
cacacgtgactctgcttta

SEQ ID NO: 659415 - DNA, 19 bp, Mus musculus
  siRNA target sequence for Col27a1 (NM_025685.2,2147-2165).
gtccaggggccaaaggtta

SEQ ID NO: 659416 - DNA, 19 bp, Mus musculus
  siRNA target sequence for Col27a1 (NM_025685.2,2934-2952).
ggggcttatgggattcatt

SEQ ID NO: 659417 - DNA, 19 bp, Mus musculus
  siRNA target sequence for Col27a1 (NM_025685.2,3868-3886).
ccaggattggccggttata

SEQ ID NO: 659418 - DNA, 19 bp, Mus musculus
  siRNA target sequence for Col27a1 (NM_025685.2,3869-3887).
caggattggccggttataa

SEQ ID NO: 659419 - DNA, 19 bp, Mus musculus
  siRNA target sequence for Col27a1 (NM_025685.2,3879-3897).
cggttataatggacacaaa

SEQ ID NO: 659420 - DNA, 19 bp, Mus musculus
  siRNA target sequence for Col27a1 (NM_025685.2,4933-4951).
ggggagatcttcaaaacct

SEQ ID NO: 659421 - DNA, 19 bp, Mus musculus
  siRNA target sequence for Col27a1 (NM_025685.2,4934-4952).
gggagatcttcaaaacctt

SEQ ID NO: 659422 - DNA, 19 bp, Mus musculus
  siRNA target sequence for Col27a1 (NM_025685.2,4935-4953).
ggagatcttcaaaacctta

SEQ ID NO: 659423 - DNA, 19 bp, Mus musculus
  siRNA target sequence for Col27a1 (NM_025685.2,4969-4987).
ctcatccagagcattaaga

SEQ ID NO: 659424 - DNA, 19 bp, Mus musculus
  siRNA target sequence for Col27a1 (NM_025685.2,5187-5205).
gagtcgggtccagatgaat

SEQ ID NO: 659425 - DNA, 19 bp, Mus musculus
  siRNA target sequence for Col27a1 (NM_025685.2,5189-5207).
gtcgggtccagatgaattt

SEQ ID NO: 659426 - DNA, 19 bp, Mus musculus
  siRNA target sequence for Col2a1 (NM_031163.1,108-126).
gaatgggcagaggtataaa

SEQ ID NO: 659427 - DNA, 19 bp, Mus musculus
  siRNA target sequence for Col2a1 (NM_031163.1,136-154).
gtatggaagccctcatctt

SEQ ID NO: 659428 - DNA, 19 bp, Mus musculus
  siRNA target sequence for Col2a1 (NM_031163.1,279-297).
cactgccagtggtcgaaaa

SEQ ID NO: 659429 - DNA, 19 bp, Mus musculus
  siRNA target sequence for Col2a1 (NM_031163.1,281-299).
ctgccagtggtcgaaaatt

SEQ ID NO: 659430 - DNA, 19 bp, Mus musculus
  siRNA target sequence for Col2a1 (NM_031163.1,3563-3581).
ccgaccccatgcagtacat

SEQ ID NO: 659431 - DNA, 19 bp, Mus musculus
  siRNA target sequence for Col2a1 (NM_031163.1,3638-3656).
cactcaagtcactgaacaa

SEQ ID NO: 659432 - DNA, 19 bp, Mus musculus
  siRNA target sequence for Col2a1 (NM_031163.1,3710-3728).
cttgccaagacctgaaact

SEQ ID NO: 659433 - DNA, 19 bp, Mus musculus
  siRNA target sequence for Col2a1 (NM_031163.1,3750-3768).
cggagactactggattgat

SEQ ID NO: 659434 - DNA, 19 bp, Mus musculus
  siRNA target sequence for Col2a1 (NM_031163.1,3785-3803).
ccttggacgccatgaaagt

SEQ ID NO: 659435 - DNA, 19 bp, Mus musculus
  siRNA target sequence for Col2a1 (NM_031163.1,3786-3804).
cttggacgccatgaaagtt

SEQ ID NO: 659436 - DNA, 19 bp, Mus musculus
  siRNA target sequence for Col2a1 (NM_031163.1,3851-3869).
cgactgtccctcggaaaaa

SEQ ID NO: 659437 - DNA, 19 bp, Mus musculus
  siRNA target sequence for Col2a1 (NM_031163.1,3976-3994).
gctaacgtccagatgactt

SEQ ID NO: 659438 - DNA, 19 bp, Mus musculus
  siRNA target sequence for Col2a1 (NM_031163.1,4104-4122).
ccagggctccaatgatgta

SEQ ID NO: 659439 - DNA, 19 bp, Mus musculus
  siRNA target sequence for Col2a1 (NM_031163.1,4109-4127).
gctccaatgatgtagagat

SEQ ID NO: 659440 - DNA, 19 bp, Mus musculus
  siRNA target sequence for Col2a1 (NM_031163.1,4236-4254).
ctcccgccttcccattatt

SEQ ID NO: 659441 - DNA, 19 bp, Mus musculus
  siRNA target sequence for Col2a1 (NM_031163.1,4238-4256).
cccgccttcccattattga

SEQ ID NO: 659442 - DNA, 19 bp, Mus musculus
  siRNA target sequence for Col2a1 (NM_031163.1,4240-4258).
cgccttcccattattgaca

SEQ ID NO: 659443 - DNA, 19 bp, Mus musculus
  siRNA target sequence for Col2a1 (NM_031163.1,4241-4259).
gccttcccattattgacat

SEQ ID NO: 659444 - DNA, 19 bp, Mus musculus
  siRNA target sequence for Col3a1 (NM_009930.1,148-166).
cttcatcccactcttattt

SEQ ID NO: 659445 - DNA, 19 bp, Mus musculus
  siRNA target sequence for Col3a1 (NM_009930.1,174-192).
gcagtccaacgtagatgaa

SEQ ID NO: 659446 - DNA, 19 bp, Mus musculus
  siRNA target sequence for Col3a1 (NM_009930.1,175-193).
cagtccaacgtagatgaat

SEQ ID NO: 659447 - DNA, 19 bp, Mus musculus
  siRNA target sequence for Col3a1 (NM_009930.1,208-226).
cttggtcagtcctatgagt

SEQ ID NO: 659448 - DNA, 19 bp, Mus musculus
  siRNA target sequence for Col3a1 (NM_009930.1,244-262).
ccagaaccatgtcaaatat

SEQ ID NO: 659449 - DNA, 19 bp, Mus musculus
  siRNA target sequence for Col3a1 (NM_009930.1,539-557).
caactggtggccaaaatta

SEQ ID NO: 659450 - DNA, 19 bp, Mus musculus
  siRNA target sequence for Col3a1 (NM_009930.1,560-578).
ctccccaattcgactcata

SEQ ID NO: 659451 - DNA, 19 bp, Mus musculus
  siRNA target sequence for Col3a1 (NM_009930.1,563-581).
cccaattcgactcatatga

SEQ ID NO: 659452 - DNA, 19 bp, Mus musculus
  siRNA target sequence for Col3a1 (NM_009930.1,564-582).
ccaattcgactcatatgat

SEQ ID NO: 659453 - DNA, 19 bp, Mus musculus
  siRNA target sequence for Col3a1 (NM_009930.1,869-887).
ctggattccctggtatgaa

SEQ ID NO: 659454 - DNA, 19 bp, Mus musculus
  siRNA target sequence for Col3a1 (NM_009930.1,1247-1265).
ctggccctcccgggaataa

SEQ ID NO: 659455 - DNA, 19 bp, Mus musculus
  siRNA target sequence for Col3a1 (NM_009930.1,1274-1292).
ctggtggaaagggtgaaat

SEQ ID NO: 659456 - DNA, 19 bp, Mus musculus
  siRNA target sequence for Col3a1 (NM_009930.1,3192-3210).
gggtgatcgtggtgaaaat

SEQ ID NO: 659457 - DNA, 19 bp, Mus musculus
  siRNA target sequence for Col3a1 (NM_009930.1,3196-3214).
gatcgtggtgaaaatggtt

SEQ ID NO: 659458 - DNA, 19 bp, Mus musculus
  siRNA target sequence for Col3a1 (NM_009930.1,3475-3493).
caccagggtgcaattggta

SEQ ID NO: 659459 - DNA, 19 bp, Mus musculus
  siRNA target sequence for Col3a1 (NM_009930.1,3737-3755).
gtggcttttcaccctatta

SEQ ID NO: 659460 - DNA, 19 bp, Mus musculus
  siRNA target sequence for Col3a1 (NM_009930.1,3741-3759).
cttttcaccctattatgga

SEQ ID NO: 659461 - DNA, 19 bp, Mus musculus
  siRNA target sequence for Col3a1 (NM_009930.1,3757-3775).
ggagacgatccaatggatt

SEQ ID NO: 659462 - DNA, 19 bp, Mus musculus
  siRNA target sequence for Col3a1 (NM_009930.1,3758-3776).
gagacgatccaatggattt

SEQ ID NO: 659463 - DNA, 19 bp, Mus musculus
  siRNA target sequence for Col3a1 (NM_009930.1,3817-3835).
gttaatggacaaatagaga

SEQ ID NO: 659464 - DNA, 19 bp, Mus musculus
  siRNA target sequence for Col3a1 (NM_009930.1,3823-3841).
ggacaaatagagagtctta

SEQ ID NO: 659465 - DNA, 19 bp, Mus musculus
  siRNA target sequence for Col3a1 (NM_009930.1,3824-3842).
gacaaatagagagtcttat

SEQ ID NO: 659466 - DNA, 19 bp, Mus musculus
  siRNA target sequence for Col3a1 (NM_009930.1,3826-3844).
caaatagagagtcttataa

SEQ ID NO: 659467 - DNA, 19 bp, Mus musculus
  siRNA target sequence for Col3a1 (NM_009930.1,3848-3866).
ctgatggttctcgaaaaaa

SEQ ID NO: 659468 - DNA, 19 bp, Mus musculus
  siRNA target sequence for Col3a1 (NM_009930.1,3947-3965).
gctgcaagatggatgctat

SEQ ID NO: 659469 - DNA, 19 bp, Mus musculus
  siRNA target sequence for Col3a1 (NM_009930.1,3948-3966).
ctgcaagatggatgctata

SEQ ID NO: 659470 - DNA, 19 bp, Mus musculus
  siRNA target sequence for Col3a1 (NM_009930.1,3950-3968).
gcaagatggatgctataaa

SEQ ID NO: 659471 - DNA, 19 bp, Mus musculus
  siRNA target sequence for Col3a1 (NM_009930.1,3958-3976).
gatgctataaaagtattct

SEQ ID NO: 659472 - DNA, 19 bp, Mus musculus
  siRNA target sequence for Col3a1 (NM_009930.1,4035-4053).
gcactggtggacagattct

SEQ ID NO: 659473 - DNA, 19 bp, Mus musculus
  siRNA target sequence for Col3a1 (NM_009930.1,4218-4236).
cagtattgcctatatggat

SEQ ID NO: 659474 - DNA, 19 bp, Mus musculus
  siRNA target sequence for Col4a1 (NM_009931.1,299-317).
gcaaggtgtcattggattt

SEQ ID NO: 659475 - DNA, 19 bp, Mus musculus
  siRNA target sequence for Col4a1 (NM_009931.1,499-517).
caggatgcaacggtacaaa

SEQ ID NO: 659476 - DNA, 19 bp, Mus musculus
  siRNA target sequence for Col4a1 (NM_009931.1,717-735).
gtgggtcctccgggattta

SEQ ID NO: 659477 - DNA, 19 bp, Mus musculus
  siRNA target sequence for Col4a1 (NM_009931.1,858-876).
cctggacaggcacaagtta

SEQ ID NO: 659478 - DNA, 19 bp, Mus musculus
  siRNA target sequence for Col4a1 (NM_009931.1,859-877).
ctggacaggcacaagttaa

SEQ ID NO: 659479 - DNA, 19 bp, Mus musculus
  siRNA target sequence for Col4a1 (NM_009931.1,917-935).
gaaaggtgaacctggattt

SEQ ID NO: 659480 - DNA, 19 bp, Mus musculus
  siRNA target sequence for Col4a1 (NM_009931.1,1321-1339).
gatttccaggcgtgtcatt

SEQ ID NO: 659481 - DNA, 19 bp, Mus musculus
  siRNA target sequence for Col4a1 (NM_009931.1,1577-1595).
ggggcctccgggagagatt

SEQ ID NO: 659482 - DNA, 19 bp, Mus musculus
  siRNA target sequence for Col4a1 (NM_009931.1,1581-1599).
cctccgggagagattggtt

SEQ ID NO: 659483 - DNA, 19 bp, Mus musculus
  siRNA target sequence for Col4a1 (NM_009931.1,1582-1600).
ctccgggagagattggttt

SEQ ID NO: 659484 - DNA, 19 bp, Mus musculus
  siRNA target sequence for Col4a1 (NM_009931.1,1640-1658).
cggcagagatggtcttgaa

SEQ ID NO: 659485 - DNA, 19 bp, Mus musculus
  siRNA target sequence for Col4a1 (NM_009931.1,1645-1663).
gagatggtcttgaaggatt

SEQ ID NO: 659486 - DNA, 19 bp, Mus musculus
  siRNA target sequence for Col4a1 (NM_009931.1,1855-1873).
ctccgggttcaataggatt

SEQ ID NO: 659487 - DNA, 19 bp, Mus musculus
  siRNA target sequence for Col4a1 (NM_009931.1,1859-1877).
gggttcaataggattgaaa

SEQ ID NO: 659488 - DNA, 19 bp, Mus musculus
  siRNA target sequence for Col4a1 (NM_009931.1,2183-2201).
gggccagccaggaattgga

SEQ ID NO: 659489 - DNA, 19 bp, Mus musculus
  siRNA target sequence for Col4a1 (NM_009931.1,2184-2202).
ggccagccaggaattggat

SEQ ID NO: 659490 - DNA, 19 bp, Mus musculus
  siRNA target sequence for Col4a1 (NM_009931.1,2587-2605).
caggtccacctggaattaa

SEQ ID NO: 659491 - DNA, 19 bp, Mus musculus
  siRNA target sequence for Col4a1 (NM_009931.1,2626-2644).
gattccccggactggatat

SEQ ID NO: 659492 - DNA, 19 bp, Mus musculus
  siRNA target sequence for Col4a1 (NM_009931.1,3008-3026).
cggacccactggtgataaa

SEQ ID NO: 659493 - DNA, 19 bp, Mus musculus
  siRNA target sequence for Col4a1 (NM_009931.1,4033-4051).
caggttcaaagggagatat

SEQ ID NO: 659494 - DNA, 19 bp, Mus musculus
  siRNA target sequence for Col4a1 (NM_009931.1,4061-4079).
cggagttccaggatttcaa

SEQ ID NO: 659495 - DNA, 19 bp, Mus musculus
  siRNA target sequence for Col4a1 (NM_009931.1,4180-4198).
gtccctacgatgtcatcaa

SEQ ID NO: 659496 - DNA, 19 bp, Mus musculus
  siRNA target sequence for Col4a1 (NM_009931.1,4510-4528).
gtcccccagggaccaaaat

SEQ ID NO: 659497 - DNA, 19 bp, Mus musculus
  siRNA target sequence for Col4a1 (NM_009931.1,4516-4534).
cagggaccaaaattcttta

SEQ ID NO: 659498 - DNA, 19 bp, Mus musculus
  siRNA target sequence for Col4a1 (NM_009931.1,4603-4621).
gcagctgcctgcgtaagtt

SEQ ID NO: 659499 - DNA, 19 bp, Mus musculus
  siRNA target sequence for Col4a1 (NM_009931.1,4624-4642).
gcaccatgccctttctctt

SEQ ID NO: 659500 - DNA, 19 bp, Mus musculus
  siRNA target sequence for Col4a1 (NM_009931.1,4940-4958).
ctgtctggaagagtttaga

SEQ ID NO: 659501 - DNA, 19 bp, Mus musculus
  siRNA target sequence for Col4a1 (NM_009931.1,4983-5001).
ggcagaggaacgtgcaatt

SEQ ID NO: 659502 - DNA, 19 bp, Mus musculus
  siRNA target sequence for Col4a1 (NM_009931.1,4997-5015).
caattactacgcaaatgct

SEQ ID NO: 659503 - DNA, 19 bp, Mus musculus
  siRNA target sequence for Col4a1 (NM_009931.1,5040-5058).
gagagaagcgagatgttca

SEQ ID NO: 659504 - DNA, 19 bp, Mus musculus
  siRNA target sequence for Col4a2 (NM_009932.2,139-157).
ggaccgagtgcggttcaaa

SEQ ID NO: 659505 - DNA, 19 bp, Mus musculus
  siRNA target sequence for Col4a2 (NM_009932.2,357-375).
ccccagggttgcaaggatt

SEQ ID NO: 659506 - DNA, 19 bp, Mus musculus
  siRNA target sequence for Col4a2 (NM_009932.2,475-493).
ccccggtgcagatggaatt

SEQ ID NO: 659507 - DNA, 19 bp, Mus musculus
  siRNA target sequence for Col4a2 (NM_009932.2,478-496).
cggtgcagatggaattcct

SEQ ID NO: 659508 - DNA, 19 bp, Mus musculus
  siRNA target sequence for Col4a2 (NM_009932.2,911-929).
cttgttgggcccacaacat

SEQ ID NO: 659509 - DNA, 19 bp, Mus musculus
  siRNA target sequence for Col4a2 (NM_009932.2,1021-1039).
catggggttcccaggaata

SEQ ID NO: 659510 - DNA, 19 bp, Mus musculus
  siRNA target sequence for Col4a2 (NM_009932.2,1300-1318).
cccatccgtcggagatgaa

SEQ ID NO: 659511 - DNA, 19 bp, Mus musculus
  siRNA target sequence for Col4a2 (NM_009932.2,1302-1320).
catccgtcggagatgaaga

SEQ ID NO: 659512 - DNA, 19 bp, Mus musculus
  siRNA target sequence for Col4a2 (NM_009932.2,1306-1324).
cgtcggagatgaagattca

SEQ ID NO: 659513 - DNA, 19 bp, Mus musculus
  siRNA target sequence for Col4a2 (NM_009932.2,1378-1396).
gtcccctgcacgctatctt

SEQ ID NO: 659514 - DNA, 19 bp, Mus musculus
  siRNA target sequence for Col4a2 (NM_009932.2,1743-1761).
ctggacccaaaggaataaa

SEQ ID NO: 659515 - DNA, 19 bp, Mus musculus
  siRNA target sequence for Col4a2 (NM_009932.2,2563-2581).
cgggatgccagggcttaaa

SEQ ID NO: 659516 - DNA, 19 bp, Mus musculus
  siRNA target sequence for Col4a2 (NM_009932.2,3448-3466).
gggcatcacgggaattcca

SEQ ID NO: 659517 - DNA, 19 bp, Mus musculus
  siRNA target sequence for Col4a2 (NM_009932.2,3497-3515).
gctgcgggtgacattggat

SEQ ID NO: 659518 - DNA, 19 bp, Mus musculus
  siRNA target sequence for Col4a2 (NM_009932.2,3498-3516).
ctgcgggtgacattggatt

SEQ ID NO: 659519 - DNA, 19 bp, Mus musculus
  siRNA target sequence for Col4a2 (NM_009932.2,3636-3654).
ccggtgacaagggtgattt

SEQ ID NO: 659520 - DNA, 19 bp, Mus musculus
  siRNA target sequence for Col4a2 (NM_009932.2,3916-3934).
gggtttccctggtatctct

SEQ ID NO: 659521 - DNA, 19 bp, Mus musculus
  siRNA target sequence for Col4a2 (NM_009932.2,3968-3986).
gtaggcgcaccaggaatat

SEQ ID NO: 659522 - DNA, 19 bp, Mus musculus
  siRNA target sequence for Col4a2 (NM_009932.2,4033-4051).
cgcacttcctggaatcaaa

SEQ ID NO: 659523 - DNA, 19 bp, Mus musculus
  siRNA target sequence for Col4a2 (NM_009932.2,4236-4254).
ccaaaggcgaccaaggatt

SEQ ID NO: 659524 - DNA, 19 bp, Mus musculus
  siRNA target sequence for Col4a2 (NM_009932.2,4276-4294).
ggggtccccaggaattcct

SEQ ID NO: 659525 - DNA, 19 bp, Mus musculus
  siRNA target sequence for Col4a2 (NM_009932.2,4661-4679).
gggtacagcctgctatatt

SEQ ID NO: 659526 - DNA, 19 bp, Mus musculus
  siRNA target sequence for Col4a2 (NM_009932.2,4662-4680).
ggtacagcctgctatattt

SEQ ID NO: 659527 - DNA, 19 bp, Mus musculus
  siRNA target sequence for Col4a2 (NM_009932.2,4663-4681).
gtacagcctgctatatttt

SEQ ID NO: 659528 - DNA, 19 bp, Mus musculus
  siRNA target sequence for Col4a2 (NM_009932.2,4774-4792).
gggtgacgtctgctactat

SEQ ID NO: 659529 - DNA, 19 bp, Mus musculus
  siRNA target sequence for Col4a2 (NM_009932.2,4851-4869).
ccgtggctgaggaggaaat

SEQ ID NO: 659530 - DNA, 19 bp, Mus musculus
  siRNA target sequence for Col4a2 (NM_009932.2,4865-4883).
gaaatcaagccctacatca

SEQ ID NO: 659531 - DNA, 19 bp, Mus musculus
  siRNA target sequence for Col4a2 (NM_009932.2,4930-4948).
cagccaggatacctctata

SEQ ID NO: 659532 - DNA, 19 bp, Mus musculus
  siRNA target sequence for Col4a2 (NM_009932.2,5073-5091).
gtgcaacgccatttatcga

SEQ ID NO: 659533 - DNA, 19 bp, Mus musculus
  siRNA target sequence for Col4a2 (NM_009932.2,5079-5097).
cgccatttatcgagtgtaa

SEQ ID NO: 659534 - DNA, 19 bp, Mus musculus
  siRNA target sequence for Col4a4 (NM_007735.1,332-350).
cagccccctggtcactaat

SEQ ID NO: 659535 - DNA, 19 bp, Mus musculus
  siRNA target sequence for Col4a4 (NM_007735.1,334-352).
gccccctggtcactaatat

SEQ ID NO: 659536 - DNA, 19 bp, Mus musculus
  siRNA target sequence for Col4a4 (NM_007735.1,336-354).
cccctggtcactaatattt

SEQ ID NO: 659537 - DNA, 19 bp, Mus musculus
  siRNA target sequence for Col4a4 (NM_007735.1,341-359).
ggtcactaatatttatcct

SEQ ID NO: 659538 - DNA, 19 bp, Mus musculus
  siRNA target sequence for Col4a4 (NM_007735.1,480-498).
gggaccacagggaccaata

SEQ ID NO: 659539 - DNA, 19 bp, Mus musculus
  siRNA target sequence for Col4a4 (NM_007735.1,801-819).
cattactggtggcgttaaa

SEQ ID NO: 659540 - DNA, 19 bp, Mus musculus
  siRNA target sequence for Col4a4 (NM_007735.1,806-824).
ctggtggcgttaaaggtat

SEQ ID NO: 659541 - DNA, 19 bp, Mus musculus
  siRNA target sequence for Col4a4 (NM_007735.1,921-939).
gctagcaggacctataggt

SEQ ID NO: 659542 - DNA, 19 bp, Mus musculus
  siRNA target sequence for Col4a4 (NM_007735.1,1051-1069).
cagccgcctgatttgagta

SEQ ID NO: 659543 - DNA, 19 bp, Mus musculus
  siRNA target sequence for Col4a4 (NM_007735.1,1055-1073).
cgcctgatttgagtatcta

SEQ ID NO: 659544 - DNA, 19 bp, Mus musculus
  siRNA target sequence for Col4a4 (NM_007735.1,1056-1074).
gcctgatttgagtatctat

SEQ ID NO: 659545 - DNA, 19 bp, Mus musculus
  siRNA target sequence for Col4a4 (NM_007735.1,1057-1075).
cctgatttgagtatctata

SEQ ID NO: 659546 - DNA, 19 bp, Mus musculus
  siRNA target sequence for Col4a4 (NM_007735.1,1215-1233).
gcatgggcctccaggtttt

SEQ ID NO: 659547 - DNA, 19 bp, Mus musculus
  siRNA target sequence for Col4a4 (NM_007735.1,1325-1343).
cgggaccaccaggcatttt

SEQ ID NO: 659548 - DNA, 19 bp, Mus musculus
  siRNA target sequence for Col4a4 (NM_007735.1,1410-1428).
gattggagatgttggatta

SEQ ID NO: 659549 - DNA, 19 bp, Mus musculus
  siRNA target sequence for Col4a4 (NM_007735.1,1450-1468).
ggcagaccaggggaaactt

SEQ ID NO: 659550 - DNA, 19 bp, Mus musculus
  siRNA target sequence for Col4a4 (NM_007735.1,1452-1470).
cagaccaggggaaacttgt

SEQ ID NO: 659551 - DNA, 19 bp, Mus musculus
  siRNA target sequence for Col4a4 (NM_007735.1,1625-1643).
cccctggatcagatgtgat

SEQ ID NO: 659552 - DNA, 19 bp, Mus musculus
  siRNA target sequence for Col4a4 (NM_007735.1,1626-1644).
ccctggatcagatgtgata

SEQ ID NO: 659553 - DNA, 19 bp, Mus musculus
  siRNA target sequence for Col4a4 (NM_007735.1,1628-1646).
ctggatcagatgtgatata

SEQ ID NO: 659554 - DNA, 19 bp, Mus musculus
  siRNA target sequence for Col4a4 (NM_007735.1,1938-1956).
gggtgacatggtcatatca

SEQ ID NO: 659555 - DNA, 19 bp, Mus musculus
  siRNA target sequence for Col4a4 (NM_007735.1,1939-1957).
ggtgacatggtcatatcaa

SEQ ID NO: 659556 - DNA, 19 bp, Mus musculus
  siRNA target sequence for Col4a4 (NM_007735.1,1947-1965).
ggtcatatcaagagtgaaa

SEQ ID NO: 659557 - DNA, 19 bp, Mus musculus
  siRNA target sequence for Col4a4 (NM_007735.1,1989-2007).
ggatgggccaccaggattt

SEQ ID NO: 659558 - DNA, 19 bp, Mus musculus
  siRNA target sequence for Col4a4 (NM_007735.1,2066-2084).
ggccacgaggggaccataa

SEQ ID NO: 659559 - DNA, 19 bp, Mus musculus
  siRNA target sequence for Col4a4 (NM_007735.1,2220-2238).
gggcaccagaggctttgat

SEQ ID NO: 659560 - DNA, 19 bp, Mus musculus
  siRNA target sequence for Col4a4 (NM_007735.1,2258-2276).
gtgactccattctgtgtaa

SEQ ID NO: 659561 - DNA, 19 bp, Mus musculus
  siRNA target sequence for Col4a4 (NM_007735.1,2397-2415).
gggcaaaccgggaatgtct

SEQ ID NO: 659562 - DNA, 19 bp, Mus musculus
  siRNA target sequence for Col4a4 (NM_007735.1,2478-2496).
ggggacctcccctattgga

SEQ ID NO: 659563 - DNA, 19 bp, Mus musculus
  siRNA target sequence for Col4a4 (NM_007735.1,3376-3394).
ctgagaggagtcattggtt

SEQ ID NO: 659564 - DNA, 19 bp, Mus musculus
  siRNA target sequence for Col4a4 (NM_007735.1,3839-3857).
cctcaggtttgctcgaaat

SEQ ID NO: 659565 - DNA, 19 bp, Mus musculus
  siRNA target sequence for Col4a4 (NM_007735.1,4736-4754).
cagggtacagcttgttgta

SEQ ID NO: 659566 - DNA, 19 bp, Mus musculus
  siRNA target sequence for Col4a4 (NM_007735.1,4738-4756).
gggtacagcttgttgtaca

SEQ ID NO: 659567 - DNA, 19 bp, Mus musculus
  siRNA target sequence for Col4a4 (NM_007735.1,4739-4757).
ggtacagcttgttgtacat

SEQ ID NO: 659568 - DNA, 19 bp, Mus musculus
  siRNA target sequence for Col4a4 (NM_007735.1,4767-4785).
ggagaaggcgcacaatcaa

SEQ ID NO: 659569 - DNA, 19 bp, Mus musculus
  siRNA target sequence for Col4a4 (NM_007735.1,4770-4788).
gaaggcgcacaatcaagat

SEQ ID NO: 659570 - DNA, 19 bp, Mus musculus
  siRNA target sequence for Col4a4 (NM_007735.1,4939-4957).
gaagagatccgctcttaca

SEQ ID NO: 659571 - DNA, 19 bp, Mus musculus
  siRNA target sequence for Col4a4 (NM_007735.1,5053-5071).
ctctggattgggtactcat

SEQ ID NO: 659572 - DNA, 19 bp, Mus musculus
  siRNA target sequence for Col4a4 (NM_007735.1,5057-5075).
ggattgggtactcatttct

SEQ ID NO: 659573 - DNA, 19 bp, Mus musculus
  siRNA target sequence for Col4a4 (NM_007735.1,5152-5170).
gctgcaccgttcgttgaat

SEQ ID NO: 659574 - DNA, 19 bp, Mus musculus
  siRNA target sequence for Col4a4 (NM_007735.1,5267-5285).
caccagacaccttgaaaga

SEQ ID NO: 659575 - DNA, 19 bp, Mus musculus
  siRNA target sequence for Col4a5 (NM_007736.1,198-216).
ggctgccggctggttctta

SEQ ID NO: 659576 - DNA, 19 bp, Mus musculus
  siRNA target sequence for Col4a5 (NM_007736.1,200-218).
ctgccggctggttcttact

SEQ ID NO: 659577 - DNA, 19 bp, Mus musculus
  siRNA target sequence for Col4a5 (NM_007736.1,287-305).
gtgactgcagtggtataaa

SEQ ID NO: 659578 - DNA, 19 bp, Mus musculus
  siRNA target sequence for Col4a5 (NM_007736.1,405-423).
gggtgatgatggaattcca

SEQ ID NO: 659579 - DNA, 19 bp, Mus musculus
  siRNA target sequence for Col4a5 (NM_007736.1,585-603).
gggctttcctggtttacaa

SEQ ID NO: 659580 - DNA, 19 bp, Mus musculus
  siRNA target sequence for Col4a5 (NM_007736.1,639-657).
gggggaaccaggcagtata

SEQ ID NO: 659581 - DNA, 19 bp, Mus musculus
  siRNA target sequence for Col4a5 (NM_007736.1,809-827).
cgggaccaaaggggaatat

SEQ ID NO: 659582 - DNA, 19 bp, Mus musculus
  siRNA target sequence for Col4a5 (NM_007736.1,819-837).
ggggaatatgggcttaaat

SEQ ID NO: 659583 - DNA, 19 bp, Mus musculus
  siRNA target sequence for Col4a5 (NM_007736.1,899-917).
ggcagatcagcgaacagaa

SEQ ID NO: 659584 - DNA, 19 bp, Mus musculus
  siRNA target sequence for Col4a5 (NM_007736.1,901-919).
cagatcagcgaacagaaaa

SEQ ID NO: 659585 - DNA, 19 bp, Mus musculus
  siRNA target sequence for Col4a5 (NM_007736.1,903-921).
gatcagcgaacagaaaaga

SEQ ID NO: 659586 - DNA, 19 bp, Mus musculus
  siRNA target sequence for Col4a5 (NM_007736.1,909-927).
cgaacagaaaagaccaatt

SEQ ID NO: 659587 - DNA, 19 bp, Mus musculus
  siRNA target sequence for Col4a5 (NM_007736.1,1192-1210).
ggacctcccggacttgtaa

SEQ ID NO: 659588 - DNA, 19 bp, Mus musculus
  siRNA target sequence for Col4a5 (NM_007736.1,1193-1211).
gacctcccggacttgtaat

SEQ ID NO: 659589 - DNA, 19 bp, Mus musculus
  siRNA target sequence for Col4a5 (NM_007736.1,1290-1308).
gcgaggatttcctggaata

SEQ ID NO: 659590 - DNA, 19 bp, Mus musculus
  siRNA target sequence for Col4a5 (NM_007736.1,1389-1407).
gggccagaaaggtgatgaa

SEQ ID NO: 659591 - DNA, 19 bp, Mus musculus
  siRNA target sequence for Col4a5 (NM_007736.1,1503-1521).
gttgccatccagagatgaa

SEQ ID NO: 659592 - DNA, 19 bp, Mus musculus
  siRNA target sequence for Col4a5 (NM_007736.1,1507-1525).
ccatccagagatgaaatct

SEQ ID NO: 659593 - DNA, 19 bp, Mus musculus
  siRNA target sequence for Col4a5 (NM_007736.1,1606-1624).
ggtgatacttgcttcaact

SEQ ID NO: 659594 - DNA, 19 bp, Mus musculus
  siRNA target sequence for Col4a5 (NM_007736.1,1948-1966).
gagcctggtggaattactt

SEQ ID NO: 659595 - DNA, 19 bp, Mus musculus
  siRNA target sequence for Col4a5 (NM_007736.1,3081-3099).
cggcttaccaggtattcct

SEQ ID NO: 659596 - DNA, 19 bp, Mus musculus
  siRNA target sequence for Col4a5 (NM_007736.1,3563-3581).
ctggaccaaaaggtatgaa

SEQ ID NO: 659597 - DNA, 19 bp, Mus musculus
  siRNA target sequence for Col4a5 (NM_007736.1,3727-3745).
ggtcaaccaggctttggaa

SEQ ID NO: 659598 - DNA, 19 bp, Mus musculus
  siRNA target sequence for Col4a5 (NM_007736.1,3728-3746).
gtcaaccaggctttggaat

SEQ ID NO: 659599 - DNA, 19 bp, Mus musculus
  siRNA target sequence for Col4a5 (NM_007736.1,3896-3914).
gttctcctggtcaagcttt

SEQ ID NO: 659600 - DNA, 19 bp, Mus musculus
  siRNA target sequence for Col4a5 (NM_007736.1,4286-4304).
caggacagagtattgtaat

SEQ ID NO: 659601 - DNA, 19 bp, Mus musculus
  siRNA target sequence for Col4a5 (NM_007736.1,4289-4307).
gacagagtattgtaatcaa

SEQ ID NO: 659602 - DNA, 19 bp, Mus musculus
  siRNA target sequence for Col4a5 (NM_007736.1,4622-4640).
cacggggaacagttcatat

SEQ ID NO: 659603 - DNA, 19 bp, Mus musculus
  siRNA target sequence for Col4a5 (NM_007736.1,4625-4643).
ggggaacagttcatatcta

SEQ ID NO: 659604 - DNA, 19 bp, Mus musculus
  siRNA target sequence for Col4a5 (NM_007736.1,4626-4644).
gggaacagttcatatctat

SEQ ID NO: 659605 - DNA, 19 bp, Mus musculus
  siRNA target sequence for Col4a5 (NM_007736.1,4649-4667).
gcttttctctcctgtatgt

SEQ ID NO: 659606 - DNA, 19 bp, Mus musculus
  siRNA target sequence for Col4a5 (NM_007736.1,4659-4677).
cctgtatgtacaaggaaat

SEQ ID NO: 659607 - DNA, 19 bp, Mus musculus
  siRNA target sequence for Col4a5 (NM_007736.1,4857-4875).
gagcatccagccattcatt

SEQ ID NO: 659608 - DNA, 19 bp, Mus musculus
  siRNA target sequence for Col4a5 (NM_007736.1,4986-5004).
cttcatgatgcatacaagt

SEQ ID NO: 659609 - DNA, 19 bp, Mus musculus
  siRNA target sequence for Col4a5 (NM_007736.1,5049-5067).
ctgtttggaagaatttcgt

SEQ ID NO: 659610 - DNA, 19 bp, Mus musculus
  siRNA target sequence for Col4a5 (NM_007736.1,5092-5110).
gggcgagggacatgcaatt

SEQ ID NO: 659611 - DNA, 19 bp, Mus musculus
  siRNA target sequence for Col4a5 (NM_007736.1,5093-5111).
ggcgagggacatgcaatta

SEQ ID NO: 659612 - DNA, 19 bp, Mus musculus
  siRNA target sequence for Col4a5 (NM_007736.1,5116-5134).
gccaattcgtacagctttt

SEQ ID NO: 659613 - DNA, 19 bp, Mus musculus
  siRNA target sequence for Col4a5 (NM_007736.1,5135-5153).
ggctggccactgttgatat

SEQ ID NO: 659614 - DNA, 19 bp, Mus musculus
  siRNA target sequence for Col4a5 (NM_007736.1,5139-5157).
ggccactgttgatatgtca

SEQ ID NO: 659615 - DNA, 19 bp, Mus musculus
  siRNA target sequence for Col4a5 (NM_007736.1,5200-5218).
gacttgaggacgcgtatta

SEQ ID NO: 659616 - DNA, 19 bp, Mus musculus
  siRNA target sequence for Col4a5 (NM_007736.1,5211-5229).
gcgtattagccgatgtcaa

SEQ ID NO: 659617 - DNA, 19 bp, Mus musculus
  siRNA target sequence for Col4a5 (NM_007736.1,5219-5237).
gccgatgtcaagtatgcat

SEQ ID NO: 659618 - DNA, 19 bp, Mus musculus
  siRNA target sequence for Col4a6 (NM_053185.1,290-308).
cttatgcttgaccaaagaa

SEQ ID NO: 659619 - DNA, 19 bp, Mus musculus
  siRNA target sequence for Col4a6 (NM_053185.1,313-331).
cagaatcgggacagaagat

SEQ ID NO: 659620 - DNA, 19 bp, Mus musculus
  siRNA target sequence for Col4a6 (NM_053185.1,408-426).
caccctggaccaattggaa

SEQ ID NO: 659621 - DNA, 19 bp, Mus musculus
  siRNA target sequence for Col4a6 (NM_053185.1,440-458).
cggtccggaagggtttact

SEQ ID NO: 659622 - DNA, 19 bp, Mus musculus
  siRNA target sequence for Col4a6 (NM_053185.1,466-484).
ctggtttatcaggtttgaa

SEQ ID NO: 659623 - DNA, 19 bp, Mus musculus
  siRNA target sequence for Col4a6 (NM_053185.1,507-525).
cctctgggaccatatggat

SEQ ID NO: 659624 - DNA, 19 bp, Mus musculus
  siRNA target sequence for Col4a6 (NM_053185.1,623-641).
cccagatggctgtaatgga

SEQ ID NO: 659625 - DNA, 19 bp, Mus musculus
  siRNA target sequence for Col4a6 (NM_053185.1,624-642).
ccagatggctgtaatggaa

SEQ ID NO: 659626 - DNA, 19 bp, Mus musculus
  siRNA target sequence for Col4a6 (NM_053185.1,677-695).
ctaccctgggattttagga

SEQ ID NO: 659627 - DNA, 19 bp, Mus musculus
  siRNA target sequence for Col4a6 (NM_053185.1,894-912).
cccggtcctgagggaaata

SEQ ID NO: 659628 - DNA, 19 bp, Mus musculus
  siRNA target sequence for Col4a6 (NM_053185.1,895-913).
ccggtcctgagggaaatat

SEQ ID NO: 659629 - DNA, 19 bp, Mus musculus
  siRNA target sequence for Col4a6 (NM_053185.1,985-1003).
catctactggggaactaga

SEQ ID NO: 659630 - DNA, 19 bp, Mus musculus
  siRNA target sequence for Col4a6 (NM_053185.1,1086-1104).
ggtgtcccggaatttggat

SEQ ID NO: 659631 - DNA, 19 bp, Mus musculus
  siRNA target sequence for Col4a6 (NM_053185.1,1154-1172).
gggtcccatgggttcagaa

SEQ ID NO: 659632 - DNA, 19 bp, Mus musculus
  siRNA target sequence for Col4a6 (NM_053185.1,1159-1177).
ccatgggttcagaaggaat

SEQ ID NO: 659633 - DNA, 19 bp, Mus musculus
  siRNA target sequence for Col4a6 (NM_053185.1,1205-1223).
gaaggggacttcaggtttt

SEQ ID NO: 659634 - DNA, 19 bp, Mus musculus
  siRNA target sequence for Col4a6 (NM_053185.1,1410-1428).
cctggcctcccatcattaa

SEQ ID NO: 659635 - DNA, 19 bp, Mus musculus
  siRNA target sequence for Col4a6 (NM_053185.1,1532-1550).
ggttggtttaccaggttta

SEQ ID NO: 659636 - DNA, 19 bp, Mus musculus
  siRNA target sequence for Col4a6 (NM_053185.1,1574-1592).
cccacctggtcgcacattt

SEQ ID NO: 659637 - DNA, 19 bp, Mus musculus
  siRNA target sequence for Col4a6 (NM_053185.1,1576-1594).
cacctggtcgcacatttga

SEQ ID NO: 659638 - DNA, 19 bp, Mus musculus
  siRNA target sequence for Col4a6 (NM_053185.1,1578-1596).
cctggtcgcacatttgaga

SEQ ID NO: 659639 - DNA, 19 bp, Mus musculus
  siRNA target sequence for Col4a6 (NM_053185.1,1600-1618).
gacatctgtccaacataga

SEQ ID NO: 659640 - DNA, 19 bp, Mus musculus
  siRNA target sequence for Col4a6 (NM_053185.1,1784-1802).
gggttttaaggggactaaa

SEQ ID NO: 659641 - DNA, 19 bp, Mus musculus
  siRNA target sequence for Col4a6 (NM_053185.1,1841-1859).
gacgccagggctatttgga

SEQ ID NO: 659642 - DNA, 19 bp, Mus musculus
  siRNA target sequence for Col4a6 (NM_053185.1,1903-1921).
ctgtcagtagaggatcaaa

SEQ ID NO: 659643 - DNA, 19 bp, Mus musculus
  siRNA target sequence for Col4a6 (NM_053185.1,1905-1923).
gtcagtagaggatcaaaaa

SEQ ID NO: 659644 - DNA, 19 bp, Mus musculus
  siRNA target sequence for Col4a6 (NM_053185.1,2090-2108).
ccatgatggtccaattgga

SEQ ID NO: 659645 - DNA, 19 bp, Mus musculus
  siRNA target sequence for Col4a6 (NM_053185.1,2216-2234).
caccttgccttgtatcatt

SEQ ID NO: 659646 - DNA, 19 bp, Mus musculus
  siRNA target sequence for Col4a6 (NM_053185.1,2231-2249).
cattcctgggtcatatggt

SEQ ID NO: 659647 - DNA, 19 bp, Mus musculus
  siRNA target sequence for Col4a6 (NM_053185.1,2357-2375).
gagtccagggttaatgcat

SEQ ID NO: 659648 - DNA, 19 bp, Mus musculus
  siRNA target sequence for Col4a6 (NM_053185.1,2564-2582).
gccaggggacaaaggattt

SEQ ID NO: 659649 - DNA, 19 bp, Mus musculus
  siRNA target sequence for Col4a6 (NM_053185.1,2657-2675).
gggcaaccctggaacatca

SEQ ID NO: 659650 - DNA, 19 bp, Mus musculus
  siRNA target sequence for Col4a6 (NM_053185.1,2836-2854).
gaggtctacctgggataaa

SEQ ID NO: 659651 - DNA, 19 bp, Mus musculus
  siRNA target sequence for Col4a6 (NM_053185.1,3108-3126).
gggccagttggcatatcta

SEQ ID NO: 659652 - DNA, 19 bp, Mus musculus
  siRNA target sequence for Col4a6 (NM_053185.1,3110-3128).
gccagttggcatatctagt

SEQ ID NO: 659653 - DNA, 19 bp, Mus musculus
  siRNA target sequence for Col4a6 (NM_053185.1,3133-3151).
gacctccaatgctaaacct

SEQ ID NO: 659654 - DNA, 19 bp, Mus musculus
  siRNA target sequence for Col4a6 (NM_053185.1,3143-3161).
gctaaacctttggttcaaa

SEQ ID NO: 659655 - DNA, 19 bp, Mus musculus
  siRNA target sequence for Col4a6 (NM_053185.1,3184-3202).
ctgctggatcggatggatt

SEQ ID NO: 659656 - DNA, 19 bp, Mus musculus
  siRNA target sequence for Col4a6 (NM_053185.1,3262-3280).
gagctactggacaaaccaa

SEQ ID NO: 659657 - DNA, 19 bp, Mus musculus
  siRNA target sequence for Col4a6 (NM_053185.1,3264-3282).
gctactggacaaaccaata

SEQ ID NO: 659658 - DNA, 19 bp, Mus musculus
  siRNA target sequence for Col4a6 (NM_053185.1,3268-3286).
ctggacaaaccaataccat

SEQ ID NO: 659659 - DNA, 19 bp, Mus musculus
  siRNA target sequence for Col4a6 (NM_053185.1,3463-3481).
gagatcaaggccaaacact

SEQ ID NO: 659660 - DNA, 19 bp, Mus musculus
  siRNA target sequence for Col4a6 (NM_053185.1,3724-3742).
ctggaccctcaggcttaat

SEQ ID NO: 659661 - DNA, 19 bp, Mus musculus
  siRNA target sequence for Col4a6 (NM_053185.1,3886-3904).
gagtgccaggaattgtcat

SEQ ID NO: 659662 - DNA, 19 bp, Mus musculus
  siRNA target sequence for Col4a6 (NM_053185.1,3905-3923).
cggagatccagggaaacaa

SEQ ID NO: 659663 - DNA, 19 bp, Mus musculus
  siRNA target sequence for Col4a6 (NM_053185.1,4001-4019).
ctccttgccctcagtcata

SEQ ID NO: 659664 - DNA, 19 bp, Mus musculus
  siRNA target sequence for Col4a6 (NM_053185.1,4363-4381).
caccaattgctgaagctat

SEQ ID NO: 659665 - DNA, 19 bp, Mus musculus
  siRNA target sequence for Col4a6 (NM_053185.1,4466-4484).
gggtctgcaaggttccaaa

SEQ ID NO: 659666 - DNA, 19 bp, Mus musculus
  siRNA target sequence for Col4a6 (NM_053185.1,4653-4671).
gtgggctacacactagtaa

SEQ ID NO: 659667 - DNA, 19 bp, Mus musculus
  siRNA target sequence for Col4a6 (NM_053185.1,4816-4834).
gcaccatgcccttcatata

SEQ ID NO: 659668 - DNA, 19 bp, Mus musculus
  siRNA target sequence for Col4a6 (NM_053185.1,4867-4885).
gacgcaatgataaatctta

SEQ ID NO: 659669 - DNA, 19 bp, Mus musculus
  siRNA target sequence for Col4a6 (NM_053185.1,4869-4887).
cgcaatgataaatcttact

SEQ ID NO: 659670 - DNA, 19 bp, Mus musculus
  siRNA target sequence for Col4a6 (NM_053185.1,4933-4951).
cccagattccccagtatat

SEQ ID NO: 659671 - DNA, 19 bp, Mus musculus
  siRNA target sequence for Col4a6 (NM_053185.1,5259-5277).
gtgtctgagacgctgaaaa

SEQ ID NO: 659672 - DNA, 19 bp, Mus musculus
  siRNA target sequence for Col5a1 (NM_015734.1,261-279).
gagatgctagattttcaca

SEQ ID NO: 659673 - DNA, 19 bp, Mus musculus
  siRNA target sequence for Col5a1 (NM_015734.1,299-317).
gaaaaccacaggtttctgt

SEQ ID NO: 659674 - DNA, 19 bp, Mus musculus
  siRNA target sequence for Col5a1 (NM_015734.1,314-332).
ctgtgctactcgaagatct

SEQ ID NO: 659675 - DNA, 19 bp, Mus musculus
  siRNA target sequence for Col5a1 (NM_015734.1,352-370).
cctaccgagtctctaaaga

SEQ ID NO: 659676 - DNA, 19 bp, Mus musculus
  siRNA target sequence for Col5a1 (NM_015734.1,353-371).
ctaccgagtctctaaagat

SEQ ID NO: 659677 - DNA, 19 bp, Mus musculus
  siRNA target sequence for Col5a1 (NM_015734.1,401-419).
gtaccctgagtctggtttt

SEQ ID NO: 659678 - DNA, 19 bp, Mus musculus
  siRNA target sequence for Col5a1 (NM_015734.1,472-490).
ccttcctagtctccattta

SEQ ID NO: 659679 - DNA, 19 bp, Mus musculus
  siRNA target sequence for Col5a1 (NM_015734.1,476-494).
cctagtctccatttacaat

SEQ ID NO: 659680 - DNA, 19 bp, Mus musculus
  siRNA target sequence for Col5a1 (NM_015734.1,620-638).
caagtggcaccgaattgct

SEQ ID NO: 659681 - DNA, 19 bp, Mus musculus
  siRNA target sequence for Col5a1 (NM_015734.1,636-654).
gctctcagtgtctacaaga

SEQ ID NO: 659682 - DNA, 19 bp, Mus musculus
  siRNA target sequence for Col5a1 (NM_015734.1,664-682).
ccttgatcctcgactgtaa

SEQ ID NO: 659683 - DNA, 19 bp, Mus musculus
  siRNA target sequence for Col5a1 (NM_015734.1,674-692).
cgactgtaagaagaagatt

SEQ ID NO: 659684 - DNA, 19 bp, Mus musculus
  siRNA target sequence for Col5a1 (NM_015734.1,675-693).
gactgtaagaagaagatta

SEQ ID NO: 659685 - DNA, 19 bp, Mus musculus
  siRNA target sequence for Col5a1 (NM_015734.1,679-697).
gtaagaagaagattacgaa

SEQ ID NO: 659686 - DNA, 19 bp, Mus musculus
  siRNA target sequence for Col5a1 (NM_015734.1,709-727).
gcagtgaccaccccataat

SEQ ID NO: 659687 - DNA, 19 bp, Mus musculus
  siRNA target sequence for Col5a1 (NM_015734.1,714-732).
gaccaccccataatagaca

SEQ ID NO: 659688 - DNA, 19 bp, Mus musculus
  siRNA target sequence for Col5a1 (NM_015734.1,729-747).
gacaccaatgggattgtca

SEQ ID NO: 659689 - DNA, 19 bp, Mus musculus
  siRNA target sequence for Col5a1 (NM_015734.1,757-775).
cccggattctggatgatga

SEQ ID NO: 659690 - DNA, 19 bp, Mus musculus
  siRNA target sequence for Col5a1 (NM_015734.1,758-776).
ccggattctggatgatgaa

SEQ ID NO: 659691 - DNA, 19 bp, Mus musculus
  siRNA target sequence for Col5a1 (NM_015734.1,789-807).
gacatccaacagttgcttt

SEQ ID NO: 659692 - DNA, 19 bp, Mus musculus
  siRNA target sequence for Col5a1 (NM_015734.1,927-945).
ggagagggtgagacctatt

SEQ ID NO: 659693 - DNA, 19 bp, Mus musculus
  siRNA target sequence for Col5a1 (NM_015734.1,928-946).
gagagggtgagacctatta

SEQ ID NO: 659694 - DNA, 19 bp, Mus musculus
  siRNA target sequence for Col5a1 (NM_015734.1,932-950).
gggtgagacctattactat

SEQ ID NO: 659695 - DNA, 19 bp, Mus musculus
  siRNA target sequence for Col5a1 (NM_015734.1,936-954).
gagacctattactatgagt

SEQ ID NO: 659696 - DNA, 19 bp, Mus musculus
  siRNA target sequence for Col5a1 (NM_015734.1,938-956).
gacctattactatgagtat

SEQ ID NO: 659697 - DNA, 19 bp, Mus musculus
  siRNA target sequence for Col5a1 (NM_015734.1,947-965).
ctatgagtatccatattat

SEQ ID NO: 659698 - DNA, 19 bp, Mus musculus
  siRNA target sequence for Col5a1 (NM_015734.1,1125-1143).
gggatcggggactatgact

SEQ ID NO: 659699 - DNA, 19 bp, Mus musculus
  siRNA target sequence for Col5a1 (NM_015734.1,1146-1164).
gtgcccccagatgactatt

SEQ ID NO: 659700 - DNA, 19 bp, Mus musculus
  siRNA target sequence for Col5a1 (NM_015734.1,1151-1169).
cccagatgactattacact

SEQ ID NO: 659701 - DNA, 19 bp, Mus musculus
  siRNA target sequence for Col5a1 (NM_015734.1,1166-1184).
cactccacccccatatgaa

SEQ ID NO: 659702 - DNA, 19 bp, Mus musculus
  siRNA target sequence for Col5a1 (NM_015734.1,1337-1355).
ggaaaccatcaagaatcta

SEQ ID NO: 659703 - DNA, 19 bp, Mus musculus
  siRNA target sequence for Col5a1 (NM_015734.1,1364-1382).
ctactatgacccgtacttt

SEQ ID NO: 659704 - DNA, 19 bp, Mus musculus
  siRNA target sequence for Col5a1 (NM_015734.1,1717-1735).
gtggcgatgccggttctaa

SEQ ID NO: 659705 - DNA, 19 bp, Mus musculus
  siRNA target sequence for Col5a1 (NM_015734.1,2120-2138).
gggtgacgatggagaagtt

SEQ ID NO: 659706 - DNA, 19 bp, Mus musculus
  siRNA target sequence for Col5a1 (NM_015734.1,3335-3353).
gggagcccttggactcaaa

SEQ ID NO: 659707 - DNA, 19 bp, Mus musculus
  siRNA target sequence for Col5a1 (NM_015734.1,4208-4226).
cggcccacctggtgacaaa

SEQ ID NO: 659708 - DNA, 19 bp, Mus musculus
  siRNA target sequence for Col5a1 (NM_015734.1,4658-4676).
gggttcatctggtcctaaa

SEQ ID NO: 659709 - DNA, 19 bp, Mus musculus
  siRNA target sequence for Col5a1 (NM_015734.1,4874-4892).
caggactcggcggaacatt

SEQ ID NO: 659710 - DNA, 19 bp, Mus musculus
  siRNA target sequence for Col5a1 (NM_015734.1,4876-4894).
ggactcggcggaacattga

SEQ ID NO: 659711 - DNA, 19 bp, Mus musculus
  siRNA target sequence for Col5a1 (NM_015734.1,4877-4895).
gactcggcggaacattgat

SEQ ID NO: 659712 - DNA, 19 bp, Mus musculus
  siRNA target sequence for Col5a1 (NM_015734.1,4925-4943).
ggagagctacgtggattat

SEQ ID NO: 659713 - DNA, 19 bp, Mus musculus
  siRNA target sequence for Col5a1 (NM_015734.1,4928-4946).
gagctacgtggattatgca

SEQ ID NO: 659714 - DNA, 19 bp, Mus musculus
  siRNA target sequence for Col5a1 (NM_015734.1,5122-5140).
gggactccttcaaagtcta

SEQ ID NO: 659715 - DNA, 19 bp, Mus musculus
  siRNA target sequence for Col5a1 (NM_015734.1,5193-5211).
gagggagccagaatcactt

SEQ ID NO: 659716 - DNA, 19 bp, Mus musculus
  siRNA target sequence for Col5a1 (NM_015734.1,5232-5250).
ggttcctggttcagtgaat

SEQ ID NO: 659717 - DNA, 19 bp, Mus musculus
  siRNA target sequence for Col5a1 (NM_015734.1,5233-5251).
gttcctggttcagtgaatt

SEQ ID NO: 659718 - DNA, 19 bp, Mus musculus
  siRNA target sequence for Col5a1 (NM_015734.1,5295-5313).
cccgtgggcgtggtacaaa

SEQ ID NO: 659719 - DNA, 19 bp, Mus musculus
  siRNA target sequence for Col5a1 (NM_015734.1,5296-5314).
ccgtgggcgtggtacaaat

SEQ ID NO: 659720 - DNA, 19 bp, Mus musculus
  siRNA target sequence for Col5a1 (NM_015734.1,5396-5414).
cgccacaggcagctatgat

SEQ ID NO: 659721 - DNA, 19 bp, Mus musculus
  siRNA target sequence for Col5a1 (NM_015734.1,5534-5552).
gatcgacacgcccaaagta

SEQ ID NO: 659722 - DNA, 19 bp, Mus musculus
  siRNA target sequence for Col5a1 (NM_015734.1,5592-5610).
ggcgaagcctcacagaaat

SEQ ID NO: 659723 - DNA, 19 bp, Mus musculus
  siRNA target sequence for Col5a1 (NM_015734.1,5593-5611).
gcgaagcctcacagaaatt

SEQ ID NO: 659724 - DNA, 19 bp, Mus musculus
  siRNA target sequence for Col5a1 (NM_015734.1,5594-5612).
cgaagcctcacagaaattt

SEQ ID NO: 659725 - DNA, 19 bp, Mus musculus
  siRNA target sequence for Col5a1 (NM_015734.1,5598-5616).
gcctcacagaaatttggat

SEQ ID NO: 659726 - DNA, 19 bp, Mus musculus
  siRNA target sequence for Col5a1 (NM_015734.1,5599-5617).
cctcacagaaatttggatt

SEQ ID NO: 659727 - DNA, 19 bp, Mus musculus
  siRNA target sequence for Col5a2 (NM_007737.1,55-73).
gggtactgtgtctcaataa

SEQ ID NO: 659728 - DNA, 19 bp, Mus musculus
  siRNA target sequence for Col5a2 (NM_007737.1,190-208).
gacaatggtgccattcttt

SEQ ID NO: 659729 - DNA, 19 bp, Mus musculus
  siRNA target sequence for Col5a2 (NM_007737.1,237-255).
caactgtgccaatcctata

SEQ ID NO: 659730 - DNA, 19 bp, Mus musculus
  siRNA target sequence for Col5a2 (NM_007737.1,240-258).
ctgtgccaatcctataaca

SEQ ID NO: 659731 - DNA, 19 bp, Mus musculus
  siRNA target sequence for Col5a2 (NM_007737.1,296-314).
gaggtggagatactagttt

SEQ ID NO: 659732 - DNA, 19 bp, Mus musculus
  siRNA target sequence for Col5a2 (NM_007737.1,301-319).
ggagatactagttttggta

SEQ ID NO: 659733 - DNA, 19 bp, Mus musculus
  siRNA target sequence for Col5a2 (NM_007737.1,349-367).
ggattagtgcctgttgtaa

SEQ ID NO: 659734 - DNA, 19 bp, Mus musculus
  siRNA target sequence for Col5a2 (NM_007737.1,357-375).
gcctgttgtaacaggtata

SEQ ID NO: 659735 - DNA, 19 bp, Mus musculus
  siRNA target sequence for Col5a2 (NM_007737.1,550-568).
ggcatgagcaggccttttt

SEQ ID NO: 659736 - DNA, 19 bp, Mus musculus
  siRNA target sequence for Col5a2 (NM_007737.1,552-570).
catgagcaggcctttttca

SEQ ID NO: 659737 - DNA, 19 bp, Mus musculus
  siRNA target sequence for Col5a2 (NM_007737.1,1068-1086).
ccacggtatgcctggaaaa

SEQ ID NO: 659738 - DNA, 19 bp, Mus musculus
  siRNA target sequence for Col5a2 (NM_007737.1,1710-1728).
gggtctgacaggaaatcct

SEQ ID NO: 659739 - DNA, 19 bp, Mus musculus
  siRNA target sequence for Col5a2 (NM_007737.1,2516-2534).
caactggagctgttggttt

SEQ ID NO: 659740 - DNA, 19 bp, Mus musculus
  siRNA target sequence for Col5a2 (NM_007737.1,3032-3050).
cgggtacaccaggaaaagt

SEQ ID NO: 659741 - DNA, 19 bp, Mus musculus
  siRNA target sequence for Col5a2 (NM_007737.1,3033-3051).
gggtacaccaggaaaagta

SEQ ID NO: 659742 - DNA, 19 bp, Mus musculus
  siRNA target sequence for Col5a2 (NM_007737.1,3567-3585).
gccacttggaccaattgga

SEQ ID NO: 659743 - DNA, 19 bp, Mus musculus
  siRNA target sequence for Col5a2 (NM_007737.1,3664-3682).
ggtccccctggccatctta

SEQ ID NO: 659744 - DNA, 19 bp, Mus musculus
  siRNA target sequence for Col5a2 (NM_007737.1,3730-3748).
gatccacttccagagttta

SEQ ID NO: 659745 - DNA, 19 bp, Mus musculus
  siRNA target sequence for Col5a2 (NM_007737.1,3763-3781).
gctccagatgacacaaaca

SEQ ID NO: 659746 - DNA, 19 bp, Mus musculus
  siRNA target sequence for Col5a2 (NM_007737.1,3846-3864).
ccctgatggttccaagaaa

SEQ ID NO: 659747 - DNA, 19 bp, Mus musculus
  siRNA target sequence for Col5a2 (NM_007737.1,3867-3885).
cccagcccgcacttgtgat

SEQ ID NO: 659748 - DNA, 19 bp, Mus musculus
  siRNA target sequence for Col5a2 (NM_007737.1,3915-3933).
gagcggtgaatattggatt

SEQ ID NO: 659749 - DNA, 19 bp, Mus musculus
  siRNA target sequence for Col5a2 (NM_007737.1,3950-3968).
cagctgaagatgcaatcaa

SEQ ID NO: 659750 - DNA, 19 bp, Mus musculus
  siRNA target sequence for Col5a2 (NM_007737.1,3970-3988).
gtttactgcaatatggaaa

SEQ ID NO: 659751 - DNA, 19 bp, Mus musculus
  siRNA target sequence for Col5a2 (NM_007737.1,3985-4003).
gaaacaggagagacatgta

SEQ ID NO: 659752 - DNA, 19 bp, Mus musculus
  siRNA target sequence for Col5a2 (NM_007737.1,4018-4036).
gccagtgttccacgtaaaa

SEQ ID NO: 659753 - DNA, 19 bp, Mus musculus
  siRNA target sequence for Col5a2 (NM_007737.1,4047-4065).
cagcaaatcccctgacaat

SEQ ID NO: 659754 - DNA, 19 bp, Mus musculus
  siRNA target sequence for Col5a2 (NM_007737.1,4076-4094).
ggtacggtcttgacatgaa

SEQ ID NO: 659755 - DNA, 19 bp, Mus musculus
  siRNA target sequence for Col5a2 (NM_007737.1,4077-4095).
gtacggtcttgacatgaat

SEQ ID NO: 659756 - DNA, 19 bp, Mus musculus
  siRNA target sequence for Col5a2 (NM_007737.1,4080-4098).
cggtcttgacatgaataga

SEQ ID NO: 659757 - DNA, 19 bp, Mus musculus
  siRNA target sequence for Col5a2 (NM_007737.1,4097-4115).
gaggatctcagttcacata

SEQ ID NO: 659758 - DNA, 19 bp, Mus musculus
  siRNA target sequence for Col5a2 (NM_007737.1,4211-4229).
ggaacactgttggatatat

SEQ ID NO: 659759 - DNA, 19 bp, Mus musculus
  siRNA target sequence for Col5a2 (NM_007737.1,4273-4291).
gggtcaaacgacttagaaa

SEQ ID NO: 659760 - DNA, 19 bp, Mus musculus
  siRNA target sequence for Col5a2 (NM_007737.1,4274-4292).
ggtcaaacgacttagaaat

SEQ ID NO: 659761 - DNA, 19 bp, Mus musculus
  siRNA target sequence for Col5a2 (NM_007737.1,4275-4293).
gtcaaacgacttagaaata

SEQ ID NO: 659762 - DNA, 19 bp, Mus musculus
  siRNA target sequence for Col5a2 (NM_007737.1,4281-4299).
cgacttagaaataaaagga

SEQ ID NO: 659763 - DNA, 19 bp, Mus musculus
  siRNA target sequence for Col5a2 (NM_007737.1,4304-4322).
gaaacatcagattcagata

SEQ ID NO: 659764 - DNA, 19 bp, Mus musculus
  siRNA target sequence for Col5a2 (NM_007737.1,4341-4359).
ctgctctaagcgaaatgga

SEQ ID NO: 659765 - DNA, 19 bp, Mus musculus
  siRNA target sequence for Col5a2 (NM_007737.1,4343-4361).
gctctaagcgaaatggaaa

SEQ ID NO: 659766 - DNA, 19 bp, Mus musculus
  siRNA target sequence for Col5a2 (NM_007737.1,4474-4492).
gggccagtttgtttcatgt

SEQ ID NO: 659767 - DNA, 19 bp, Mus musculus
  siRNA target sequence for Col5a3 (NM_016919.1,335-353).
ggcattttcctgagaactt

SEQ ID NO: 659768 - DNA, 19 bp, Mus musculus
  siRNA target sequence for Col5a3 (NM_016919.1,336-354).
gcattttcctgagaacttt

SEQ ID NO: 659769 - DNA, 19 bp, Mus musculus
  siRNA target sequence for Col5a3 (NM_016919.1,498-516).
gcaagtcaacattatggat

SEQ ID NO: 659770 - DNA, 19 bp, Mus musculus
  siRNA target sequence for Col5a3 (NM_016919.1,585-603).
gcagcccccaacatttggt

SEQ ID NO: 659771 - DNA, 19 bp, Mus musculus
  siRNA target sequence for Col5a3 (NM_016919.1,602-620).
gtcaggggcctcggtttat

SEQ ID NO: 659772 - DNA, 19 bp, Mus musculus
  siRNA target sequence for Col5a3 (NM_016919.1,604-622).
caggggcctcggtttataa

SEQ ID NO: 659773 - DNA, 19 bp, Mus musculus
  siRNA target sequence for Col5a3 (NM_016919.1,609-627).
gcctcggtttataagtaca

SEQ ID NO: 659774 - DNA, 19 bp, Mus musculus
  siRNA target sequence for Col5a3 (NM_016919.1,657-675).
caccagggaagagtctttt

SEQ ID NO: 659775 - DNA, 19 bp, Mus musculus
  siRNA target sequence for Col5a3 (NM_016919.1,1013-1031).
ctgtcacgattggacaaaa

SEQ ID NO: 659776 - DNA, 19 bp, Mus musculus
  siRNA target sequence for Col5a3 (NM_016919.1,1410-1428).
gatgccgttccattttgca

SEQ ID NO: 659777 - DNA, 19 bp, Mus musculus
  siRNA target sequence for Col5a3 (NM_016919.1,1872-1890).
gggtccccgaggtctgatt

SEQ ID NO: 659778 - DNA, 19 bp, Mus musculus
  siRNA target sequence for Col5a3 (NM_016919.1,2016-2034).
cggctcccagggaattcca

SEQ ID NO: 659779 - DNA, 19 bp, Mus musculus
  siRNA target sequence for Col5a3 (NM_016919.1,2474-2492).
caggacctaagggatctat

SEQ ID NO: 659780 - DNA, 19 bp, Mus musculus
  siRNA target sequence for Col5a3 (NM_016919.1,2480-2498).
ctaagggatctattggatt

SEQ ID NO: 659781 - DNA, 19 bp, Mus musculus
  siRNA target sequence for Col5a3 (NM_016919.1,2682-2700).
gggtctacccggtcttcaa

SEQ ID NO: 659782 - DNA, 19 bp, Mus musculus
  siRNA target sequence for Col5a3 (NM_016919.1,3483-3501).
cggagttcgaggctttgta

SEQ ID NO: 659783 - DNA, 19 bp, Mus musculus
  siRNA target sequence for Col5a3 (NM_016919.1,3491-3509).
gaggctttgtaggtgtaat

SEQ ID NO: 659784 - DNA, 19 bp, Mus musculus
  siRNA target sequence for Col5a3 (NM_016919.1,3495-3513).
ctttgtaggtgtaattggt

SEQ ID NO: 659785 - DNA, 19 bp, Mus musculus
  siRNA target sequence for Col5a3 (NM_016919.1,4284-4302).
gggccacattgggctaata

SEQ ID NO: 659786 - DNA, 19 bp, Mus musculus
  siRNA target sequence for Col5a3 (NM_016919.1,4611-4629).
ggtgatggcctcactgaat

SEQ ID NO: 659787 - DNA, 19 bp, Mus musculus
  siRNA target sequence for Col5a3 (NM_016919.1,4612-4630).
gtgatggcctcactgaatt

SEQ ID NO: 659788 - DNA, 19 bp, Mus musculus
  siRNA target sequence for Col5a3 (NM_016919.1,4771-4789).
cgtgacgccttcaaggttt

SEQ ID NO: 659789 - DNA, 19 bp, Mus musculus
  siRNA target sequence for Col5a3 (NM_016919.1,4824-4842).
ctatccagacaagaagttt

SEQ ID NO: 659790 - DNA, 19 bp, Mus musculus
  siRNA target sequence for Col5a3 (NM_016919.1,4993-5011).
gcccatcagaggttcactt

SEQ ID NO: 659791 - DNA, 19 bp, Mus musculus
  siRNA target sequence for Col5a3 (NM_016919.1,4994-5012).
cccatcagaggttcactta

SEQ ID NO: 659792 - DNA, 19 bp, Mus musculus
  siRNA target sequence for Col5a3 (NM_016919.1,5173-5191).
gcgaagaccctctttgaat

SEQ ID NO: 659793 - DNA, 19 bp, Mus musculus
  siRNA target sequence for Col5a3 (NM_016919.1,5174-5192).
cgaagaccctctttgaatt

SEQ ID NO: 659794 - DNA, 19 bp, Mus musculus
  siRNA target sequence for Col6a2 (NM_146007.1,253-271).
cagtcaacgtgtatttcgt

SEQ ID NO: 659795 - DNA, 19 bp, Mus musculus
  siRNA target sequence for Col6a2 (NM_146007.1,316-334).
gcctgctctatcatatgca

SEQ ID NO: 659796 - DNA, 19 bp, Mus musculus
  siRNA target sequence for Col6a2 (NM_146007.1,336-354).
cagttcgtaccgcagttta

SEQ ID NO: 659797 - DNA, 19 bp, Mus musculus
  siRNA target sequence for Col6a2 (NM_146007.1,627-645).
ccgtgtgggggcatcaaga

SEQ ID NO: 659798 - DNA, 19 bp, Mus musculus
  siRNA target sequence for Col6a2 (NM_146007.1,628-646).
cgtgtgggggcatcaagat

SEQ ID NO: 659799 - DNA, 19 bp, Mus musculus
  siRNA target sequence for Col6a2 (NM_146007.1,697-715).
ctaacaggaacctaaacga

SEQ ID NO: 659800 - DNA, 19 bp, Mus musculus
  siRNA target sequence for Col6a2 (NM_146007.1,725-743).
gagggacatcgctaactct

SEQ ID NO: 659801 - DNA, 19 bp, Mus musculus
  siRNA target sequence for Col6a2 (NM_146007.1,750-768).
gagctctaccgtaacaact

SEQ ID NO: 659802 - DNA, 19 bp, Mus musculus
  siRNA target sequence for Col6a2 (NM_146007.1,784-802).
ccgactctaccgagattga

SEQ ID NO: 659803 - DNA, 19 bp, Mus musculus
  siRNA target sequence for Col6a2 (NM_146007.1,824-842).
catcaaggtcatgaaacat

SEQ ID NO: 659804 - DNA, 19 bp, Mus musculus
  siRNA target sequence for Col6a2 (NM_146007.1,1684-1702).
gagggacacccggtgaaaa

SEQ ID NO: 659805 - DNA, 19 bp, Mus musculus
  siRNA target sequence for Col6a2 (NM_146007.1,1765-1783).
ccggacggaagggagataa

SEQ ID NO: 659806 - DNA, 19 bp, Mus musculus
  siRNA target sequence for Col6a2 (NM_146007.1,1766-1784).
cggacggaagggagataaa

SEQ ID NO: 659807 - DNA, 19 bp, Mus musculus
  siRNA target sequence for Col6a2 (NM_146007.1,1899-1917).
gatgtcatgacctatgtga

SEQ ID NO: 659808 - DNA, 19 bp, Mus musculus
  siRNA target sequence for Col6a2 (NM_146007.1,2190-2208).
gctgtcaaaaaccttgaat

SEQ ID NO: 659809 - DNA, 19 bp, Mus musculus
  siRNA target sequence for Col6a2 (NM_146007.1,2230-2248).
cgccctctgccctcaagtt

SEQ ID NO: 659810 - DNA, 19 bp, Mus musculus
  siRNA target sequence for Col6a2 (NM_146007.1,2231-2249).
gccctctgccctcaagttt

SEQ ID NO: 659811 - DNA, 19 bp, Mus musculus
  siRNA target sequence for Col6a2 (NM_146007.1,2239-2257).
ccctcaagtttgcctataa

SEQ ID NO: 659812 - DNA, 19 bp, Mus musculus
  siRNA target sequence for Col6a2 (NM_146007.1,2240-2258).
cctcaagtttgcctataat

SEQ ID NO: 659813 - DNA, 19 bp, Mus musculus
  siRNA target sequence for Col6a2 (NM_146007.1,2463-2481).
cagcaagtgcgcaacatga

SEQ ID NO: 659814 - DNA, 19 bp, Mus musculus
  siRNA target sequence for Col6a2 (NM_146007.1,2575-2593).
gccaaacagagctctatgt

SEQ ID NO: 659815 - DNA, 19 bp, Mus musculus
  siRNA target sequence for Col6a2 (NM_146007.1,2650-2668).
ggctgggcgagcagaactt

SEQ ID NO: 659816 - DNA, 19 bp, Mus musculus
  siRNA target sequence for Col6a2 (NM_146007.1,2748-2766).
cgcatggctctgttgcaat

SEQ ID NO: 659817 - DNA, 19 bp, Mus musculus
  siRNA target sequence for Col6a2 (NM_146007.1,2750-2768).
catggctctgttgcaatat

SEQ ID NO: 659818 - DNA, 19 bp, Mus musculus
  siRNA target sequence for Col6a2 (NM_146007.1,2844-2862).
gccacctacctcaattcct

SEQ ID NO: 659819 - DNA, 19 bp, Mus musculus
  siRNA target sequence for Col6a2 (NM_146007.1,3063-3081).
gacatggatgtgcttacta

SEQ ID NO: 659820 - DNA, 19 bp, Mus musculus
  siRNA target sequence for Col6a2 (NM_146007.1,3069-3087).
gatgtgcttactaagatca

SEQ ID NO: 659821 - DNA, 19 bp, Mus musculus
  siRNA target sequence for Col6a2 (NM_146007.1,3110-3128).
cttccgggagaaagacttt

SEQ ID NO: 659822 - DNA, 19 bp, Mus musculus
  siRNA target sequence for Col8a1 (NM_007739.1,57-75).
gaactctgtcagactcatt

SEQ ID NO: 659823 - DNA, 19 bp, Mus musculus
  siRNA target sequence for Col8a1 (NM_007739.1,79-97).
gccggtgcctactatggaa

SEQ ID NO: 659824 - DNA, 19 bp, Mus musculus
  siRNA target sequence for Col8a1 (NM_007739.1,80-98).
ccggtgcctactatggaat

SEQ ID NO: 659825 - DNA, 19 bp, Mus musculus
  siRNA target sequence for Col8a1 (NM_007739.1,180-198).
catgcctttgggcaaagat

SEQ ID NO: 659826 - DNA, 19 bp, Mus musculus
  siRNA target sequence for Col8a1 (NM_007739.1,303-321).
ggaagtggtgcccaaaaaa

SEQ ID NO: 659827 - DNA, 19 bp, Mus musculus
  siRNA target sequence for Col8a1 (NM_007739.1,342-360).
cagtttgcgcggagaacaa

SEQ ID NO: 659828 - DNA, 19 bp, Mus musculus
  siRNA target sequence for Col8a1 (NM_007739.1,456-474).
gggatatccaggaattgga

SEQ ID NO: 659829 - DNA, 19 bp, Mus musculus
  siRNA target sequence for Col8a1 (NM_007739.1,528-546).
ggcaaaaggcgaaattgga

SEQ ID NO: 659830 - DNA, 19 bp, Mus musculus
  siRNA target sequence for Col8a1 (NM_007739.1,800-818).
gactaccgggagtaggaaa

SEQ ID NO: 659831 - DNA, 19 bp, Mus musculus
  siRNA target sequence for Col8a1 (NM_007739.1,995-1013).
gtaaaggggaacaaggatt

SEQ ID NO: 659832 - DNA, 19 bp, Mus musculus
  siRNA target sequence for Col8a1 (NM_007739.1,1206-1224).
ccctccaggtgctattggt

SEQ ID NO: 659833 - DNA, 19 bp, Mus musculus
  siRNA target sequence for Col8a1 (NM_007739.1,1207-1225).
cctccaggtgctattggtt

SEQ ID NO: 659834 - DNA, 19 bp, Mus musculus
  siRNA target sequence for Col8a1 (NM_007739.1,1754-1772).
cagatatgggactaggaat

SEQ ID NO: 659835 - DNA, 19 bp, Mus musculus
  siRNA target sequence for Col8a1 (NM_007739.1,1823-1841).
gagggccagcctatgagat

SEQ ID NO: 659836 - DNA, 19 bp, Mus musculus
  siRNA target sequence for Col8a1 (NM_007739.1,1856-1874).
ccgagctgactgtaccttt

SEQ ID NO: 659837 - DNA, 19 bp, Mus musculus
  siRNA target sequence for Col8a1 (NM_007739.1,2021-2039).
gggttgctctcttcaagaa

SEQ ID NO: 659838 - DNA, 19 bp, Mus musculus
  siRNA target sequence for Col9a1 (NM_007740.2,214-232).
gggtatccgcaactcttaa

SEQ ID NO: 659839 - DNA, 19 bp, Mus musculus
  siRNA target sequence for Col9a1 (NM_007740.2,318-336).
ccagggtttgacctgattt

SEQ ID NO: 659840 - DNA, 19 bp, Mus musculus
  siRNA target sequence for Col9a1 (NM_007740.2,391-409).
gatccacagccttacaagt

SEQ ID NO: 659841 - DNA, 19 bp, Mus musculus
  siRNA target sequence for Col9a1 (NM_007740.2,400-418).
ccttacaagtggcttacaa

SEQ ID NO: 659842 - DNA, 19 bp, Mus musculus
  siRNA target sequence for Col9a1 (NM_007740.2,432-450).
gtagacttcaggattccaa

SEQ ID NO: 659843 - DNA, 19 bp, Mus musculus
  siRNA target sequence for Col9a1 (NM_007740.2,471-489).
ggactgcctgaagaatatt

SEQ ID NO: 659844 - DNA, 19 bp, Mus musculus
  siRNA target sequence for Col9a1 (NM_007740.2,575-593).
gcaagttggcgtgaagata

SEQ ID NO: 659845 - DNA, 19 bp, Mus musculus
  siRNA target sequence for Col9a1 (NM_007740.2,576-594).
caagttggcgtgaagataa

SEQ ID NO: 659846 - DNA, 19 bp, Mus musculus
  siRNA target sequence for Col9a1 (NM_007740.2,610-628).
ctgtcgcattttcatacaa

SEQ ID NO: 659847 - DNA, 19 bp, Mus musculus
  siRNA target sequence for Col9a1 (NM_007740.2,648-666).
caaacggctgccttcttga

SEQ ID NO: 659848 - DNA, 19 bp, Mus musculus
  siRNA target sequence for Col9a1 (NM_007740.2,652-670).
cggctgccttcttgaattt

SEQ ID NO: 659849 - DNA, 19 bp, Mus musculus
  siRNA target sequence for Col9a1 (NM_007740.2,691-709).
ggtggcataagctcatgat

SEQ ID NO: 659850 - DNA, 19 bp, Mus musculus
  siRNA target sequence for Col9a1 (NM_007740.2,692-710).
gtggcataagctcatgatt

SEQ ID NO: 659851 - DNA, 19 bp, Mus musculus
  siRNA target sequence for Col9a1 (NM_007740.2,707-725).
gattggcgtggaaagaaca

SEQ ID NO: 659852 - DNA, 19 bp, Mus musculus
  siRNA target sequence for Col9a1 (NM_007740.2,721-739).
gaacaagcgccactctttt

SEQ ID NO: 659853 - DNA, 19 bp, Mus musculus
  siRNA target sequence for Col9a1 (NM_007740.2,724-742).
caagcgccactctttttat

SEQ ID NO: 659854 - DNA, 19 bp, Mus musculus
  siRNA target sequence for Col9a1 (NM_007740.2,727-745).
gcgccactctttttattga

SEQ ID NO: 659855 - DNA, 19 bp, Mus musculus
  siRNA target sequence for Col9a1 (NM_007740.2,744-762).
gactgcatcaggatcgaat

SEQ ID NO: 659856 - DNA, 19 bp, Mus musculus
  siRNA target sequence for Col9a1 (NM_007740.2,749-767).
catcaggatcgaatcttta

SEQ ID NO: 659857 - DNA, 19 bp, Mus musculus
  siRNA target sequence for Col9a1 (NM_007740.2,754-772).
ggatcgaatctttacctat

SEQ ID NO: 659858 - DNA, 19 bp, Mus musculus
  siRNA target sequence for Col9a1 (NM_007740.2,755-773).
gatcgaatctttacctata

SEQ ID NO: 659859 - DNA, 19 bp, Mus musculus
  siRNA target sequence for Col9a1 (NM_007740.2,915-933).
gagctgccaatcagaatca

SEQ ID NO: 659860 - DNA, 19 bp, Mus musculus
  siRNA target sequence for Col9a1 (NM_007740.2,1013-1031).
gggcatagatggcattgat

SEQ ID NO: 659861 - DNA, 19 bp, Mus musculus
  siRNA target sequence for Col9a1 (NM_007740.2,1347-1365).
cccagtggaacaattggat

SEQ ID NO: 659862 - DNA, 19 bp, Mus musculus
  siRNA target sequence for Col9a1 (NM_007740.2,1351-1369).
gtggaacaattggatttca

SEQ ID NO: 659863 - DNA, 19 bp, Mus musculus
  siRNA target sequence for Col9a1 (NM_007740.2,1604-1622).
gggtgctcggggatttgat

SEQ ID NO: 659864 - DNA, 19 bp, Mus musculus
  siRNA target sequence for Col9a1 (NM_007740.2,1766-1784).
gggcttgccaggtgtagat

SEQ ID NO: 659865 - DNA, 19 bp, Mus musculus
  siRNA target sequence for Col9a1 (NM_007740.2,1946-1964).
cggtcagttgggaagttca

SEQ ID NO: 659866 - DNA, 19 bp, Mus musculus
  siRNA target sequence for Col9a1 (NM_007740.2,2425-2443).
cgaccgaccagcacatcaa

SEQ ID NO: 659867 - DNA, 19 bp, Mus musculus
  siRNA target sequence for Col9a1 (NM_007740.2,2458-2476).
gagtcgtgcaagagcattt

SEQ ID NO: 659868 - DNA, 19 bp, Mus musculus
  siRNA target sequence for Col9a1 (NM_007740.2,2602-2620).
gtggtctcccaggcattaa

SEQ ID NO: 659869 - DNA, 19 bp, Mus musculus
  siRNA target sequence for Col9a1 (NM_007740.2,2749-2767).
ctgccagctatgggaaaaa

SEQ ID NO: 659870 - DNA, 19 bp, Mus musculus
  siRNA target sequence for Col9a1 (NM_007740.2,2882-2900).
gtctggtcaaagagcattt

SEQ ID NO: 659871 - DNA, 19 bp, Mus musculus
  siRNA target sequence for Col9a1 (NM_007740.2,2886-2904).
ggtcaaagagcatttagca

SEQ ID NO: 659872 - DNA, 19 bp, Mus musculus
  siRNA target sequence for Col9a2 (NM_007741.1,929-947).
gggtcctcagggtttgcaa

SEQ ID NO: 659873 - DNA, 19 bp, Mus musculus
  siRNA target sequence for Col9a2 (NM_007741.1,1280-1298).
cggtccaccaggcattgat

SEQ ID NO: 659874 - DNA, 19 bp, Mus musculus
  siRNA target sequence for Col9a2 (NM_007741.1,2135-2153).
gggagcagtgggtcagatt

SEQ ID NO: 659875 - DNA, 19 bp, Mus musculus
  siRNA target sequence for Col9a2 (NM_007741.1,2354-2372).
ggggctaccaggtttctgt

SEQ ID NO: 659876 - DNA, 19 bp, Mus musculus
  siRNA target sequence for Eln (NM_007925.2,138-156).
gttcccggtggagtctatt

SEQ ID NO: 659877 - DNA, 19 bp, Mus musculus
  siRNA target sequence for Eln (NM_007925.2,236-254).
cggacttctgggaacgttt

SEQ ID NO: 659878 - DNA, 19 bp, Mus musculus
  siRNA target sequence for Eln (NM_007925.2,363-381).
ggggctgctgcggcttata

SEQ ID NO: 659879 - DNA, 19 bp, Mus musculus
  siRNA target sequence for Eln (NM_007925.2,364-382).
gggctgctgcggcttataa

SEQ ID NO: 659880 - DNA, 19 bp, Mus musculus
  siRNA target sequence for Eln (NM_007925.2,713-731).
cactggcacaggagtcaaa

SEQ ID NO: 659881 - DNA, 19 bp, Mus musculus
  siRNA target sequence for Eln (NM_007925.2,854-872).
cggactgccctataccaat

SEQ ID NO: 659882 - DNA, 19 bp, Mus musculus
  siRNA target sequence for Tectb (NM_009348.2,170-188).
gaagcctcagcgaaatcat

SEQ ID NO: 659883 - DNA, 19 bp, Mus musculus
  siRNA target sequence for Tectb (NM_009348.2,264-282).
cctatggatgggaagtaca

SEQ ID NO: 659884 - DNA, 19 bp, Mus musculus
  siRNA target sequence for Tectb (NM_009348.2,327-345).
gtggctattaccagtttgt

SEQ ID NO: 659885 - DNA, 19 bp, Mus musculus
  siRNA target sequence for Tectb (NM_009348.2,384-402).
gaacccagtcagagtacaa

SEQ ID NO: 659886 - DNA, 19 bp, Mus musculus
  siRNA target sequence for Tectb (NM_009348.2,565-583).
cgggagcatgggcacattt

SEQ ID NO: 659887 - DNA, 19 bp, Mus musculus
  siRNA target sequence for Tectb (NM_009348.2,568-586).
gagcatgggcacatttgaa

SEQ ID NO: 659888 - DNA, 19 bp, Mus musculus
  siRNA target sequence for Tectb (NM_009348.2,588-606).
gccagttgtccctcaactt

SEQ ID NO: 659889 - DNA, 19 bp, Mus musculus
  siRNA target sequence for Tectb (NM_009348.2,597-615).
ccctcaacttctacactaa

SEQ ID NO: 659890 - DNA, 19 bp, Mus musculus
  siRNA target sequence for Tectb (NM_009348.2,607-625).
ctacactaatgccaagttt

SEQ ID NO: 659891 - DNA, 19 bp, Mus musculus
  siRNA target sequence for Tectb (NM_009348.2,750-768).
ccccctcggctgacttcat

SEQ ID NO: 659892 - DNA, 19 bp, Mus musculus
  siRNA target sequence for Tectb (NM_009348.2,752-770).
ccctcggctgacttcatgt

SEQ ID NO: 659893 - DNA, 19 bp, Mus musculus
  siRNA target sequence for Tectb (NM_009348.2,753-771).
cctcggctgacttcatgta

SEQ ID NO: 659894 - DNA, 19 bp, Mus musculus
  siRNA target sequence for Tectb (NM_009348.2,779-797).
cagtggcagctcatcaata

SEQ ID NO: 659895 - DNA, 19 bp, Mus musculus
  siRNA target sequence for Tectb (NM_009348.2,853-871).
ggccactttccaattcaat

SEQ ID NO: 659896 - DNA, 19 bp, Mus musculus
  siRNA target sequence for Tectb (NM_009348.2,884-902).
cagaacatccccaaacttt

SEQ ID NO: 659897 - DNA, 19 bp, Mus musculus
  siRNA target sequence for Tectb (NM_009348.2,917-935).
cactgtgagacgttcatct

SEQ ID NO: 659898 - DNA, 19 bp, Mus musculus
  siRNA target sequence for Tectb (NM_009348.2,958-976).
ccccgtgaactgtgacaaa

SEQ ID NO: 659899 - DNA, 19 bp, Mus musculus
  siRNA target sequence for Cryaa (NM_013501.1,129-147).
cttcggcgagggccttttt

SEQ ID NO: 659900 - DNA, 19 bp, Mus musculus
  siRNA target sequence for Cryaa (NM_013501.1,134-152).
gcgagggcctttttgagta

SEQ ID NO: 659901 - DNA, 19 bp, Mus musculus
  siRNA target sequence for Cryaa (NM_013501.1,314-332).
gatctgaccgggacaagtt

SEQ ID NO: 659902 - DNA, 19 bp, Mus musculus
  siRNA target sequence for Cryaa (NM_013501.1,317-335).
ctgaccgggacaagtttgt

SEQ ID NO: 659903 - DNA, 19 bp, Mus musculus
  siRNA target sequence for Cryaa (NM_013501.1,403-421).
gagattcacggcaaacaca

SEQ ID NO: 659904 - DNA, 19 bp, Mus musculus
  siRNA target sequence for Cryaa (NM_013501.1,443-461).
gctacatttcccgtgaatt

SEQ ID NO: 659905 - DNA, 19 bp, Mus musculus
  siRNA target sequence for Cryaa (NM_013501.1,471-489).
ctaccgtctgccttccaat

SEQ ID NO: 659906 - DNA, 19 bp, Mus musculus
  siRNA target sequence for Cryaa (NM_013501.1,555-573).
ggtccagtccggtttggat

SEQ ID NO: 659907 - DNA, 19 bp, Mus musculus
  siRNA target sequence for Cryab (NM_009964.1,688-706).
gcacccagctggattgaca

SEQ ID NO: 659908 - DNA, 19 bp, Mus musculus
  siRNA target sequence for Cryab (NM_009964.1,735-753).
ggacagattctctgtgaat

SEQ ID NO: 659909 - DNA, 19 bp, Mus musculus
  siRNA target sequence for Cryab (NM_009964.1,998-1016).
ccatcacccgtgaagagaa

SEQ ID NO: 659910 - DNA, 19 bp, Mus musculus
  siRNA target sequence for Cryba1 (NM_009965.1,33-51).
gcgggagttggaaactctt

SEQ ID NO: 659911 - DNA, 19 bp, Mus musculus
  siRNA target sequence for Cryba1 (NM_009965.1,221-239).
gtggcgcctggattggtta

SEQ ID NO: 659912 - DNA, 19 bp, Mus musculus
  siRNA target sequence for Cryba1 (NM_009965.1,224-242).
gcgcctggattggttatga

SEQ ID NO: 659913 - DNA, 19 bp, Mus musculus
  siRNA target sequence for Cryba1 (NM_009965.1,312-330).
cgggagcaatgcctatcat

SEQ ID NO: 659914 - DNA, 19 bp, Mus musculus
  siRNA target sequence for Cryba1 (NM_009965.1,313-331).
gggagcaatgcctatcata

SEQ ID NO: 659915 - DNA, 19 bp, Mus musculus
  siRNA target sequence for Cryba1 (NM_009965.1,314-332).
ggagcaatgcctatcatat

SEQ ID NO: 659916 - DNA, 19 bp, Mus musculus
  siRNA target sequence for Cryba1 (NM_009965.1,315-333).
gagcaatgcctatcatatt

SEQ ID NO: 659917 - DNA, 19 bp, Mus musculus
  siRNA target sequence for Cryba1 (NM_009965.1,317-335).
gcaatgcctatcatattga

SEQ ID NO: 659918 - DNA, 19 bp, Mus musculus
  siRNA target sequence for Cryba1 (NM_009965.1,356-374).
ccatctgttccgctaatca

SEQ ID NO: 659919 - DNA, 19 bp, Mus musculus
  siRNA target sequence for Cryba1 (NM_009965.1,357-375).
catctgttccgctaatcat

SEQ ID NO: 659920 - DNA, 19 bp, Mus musculus
  siRNA target sequence for Cryba1 (NM_009965.1,360-378).
ctgttccgctaatcataaa

SEQ ID NO: 659921 - DNA, 19 bp, Mus musculus
  siRNA target sequence for Cryba1 (NM_009965.1,362-380).
gttccgctaatcataaaga

SEQ ID NO: 659922 - DNA, 19 bp, Mus musculus
  siRNA target sequence for Cryba1 (NM_009965.1,638-656).
caattcgccgaatacaaca

SEQ ID NO: 659923 - DNA, 19 bp, Mus musculus
  siRNA target sequence for Cryba2 (NM_021541.1,255-273).
gggacagcagttcattcta

SEQ ID NO: 659924 - DNA, 19 bp, Mus musculus
  siRNA target sequence for Cryba2 (NM_021541.1,274-292).
gagaagggagactatcctt

SEQ ID NO: 659925 - DNA, 19 bp, Mus musculus
  siRNA target sequence for Cryba2 (NM_021541.1,378-396).
cagccgcgtgacactgttt

SEQ ID NO: 659926 - DNA, 19 bp, Mus musculus
  siRNA target sequence for Cryba2 (NM_021541.1,411-429).
ccagggctgcaagtttgaa

SEQ ID NO: 659927 - DNA, 19 bp, Mus musculus
  siRNA target sequence for Cryba2 (NM_021541.1,464-482).
gctggaccagcaaagatgt

SEQ ID NO: 659928 - DNA, 19 bp, Mus musculus
  siRNA target sequence for Cryba2 (NM_021541.1,538-556).
cgaggttaccagtatgtct

SEQ ID NO: 659929 - DNA, 19 bp, Mus musculus
  siRNA target sequence for Cryba2 (NM_021541.1,542-560).
gttaccagtatgtcttaga

SEQ ID NO: 659930 - DNA, 19 bp, Mus musculus
  siRNA target sequence for Cryba2 (NM_021541.1,571-589).
cacagcggggagtttcgaa

SEQ ID NO: 659931 - DNA, 19 bp, Mus musculus
  siRNA target sequence for Crybb2 (NM_007773.1,202-220).
ggctacgagcaggctaatt

SEQ ID NO: 659932 - DNA, 19 bp, Mus musculus
  siRNA target sequence for Crybb2 (NM_007773.1,221-239).
gcaagggcgagcagtttgt

SEQ ID NO: 659933 - DNA, 19 bp, Mus musculus
  siRNA target sequence for Crybb2 (NM_007773.1,332-350).
gccaagagcacaagatcat

SEQ ID NO: 659934 - DNA, 19 bp, Mus musculus
  siRNA target sequence for Crybb2 (NM_007773.1,337-355).
gagcacaagatcatcttat

SEQ ID NO: 659935 - DNA, 19 bp, Mus musculus
  siRNA target sequence for Crybb2 (NM_007773.1,339-357).
gcacaagatcatcttatat

SEQ ID NO: 659936 - DNA, 19 bp, Mus musculus
  siRNA target sequence for Crybb3 (NM_021352.1,189-207).
cggtgtacgagttagagaa

SEQ ID NO: 659937 - DNA, 19 bp, Mus musculus
  siRNA target sequence for Crybb3 (NM_021352.1,393-411).
gccgacgtagtgacattct

SEQ ID NO: 659938 - DNA, 19 bp, Mus musculus
  siRNA target sequence for Crygc (NM_007775.1,266-284).
gaatgcggctgtatgagaa

SEQ ID NO: 659939 - DNA, 19 bp, Mus musculus
  siRNA target sequence for Crygc (NM_007775.1,465-483).
ggactggggctctgtagat

SEQ ID NO: 659940 - DNA, 19 bp, Mus musculus
  siRNA target sequence for Crygc (NM_007775.1,470-488).
ggggctctgtagatgctaa

SEQ ID NO: 659941 - DNA, 19 bp, Mus musculus
  siRNA target sequence for Crygc (NM_007775.1,501-519).
gcggagggtggtagattta

SEQ ID NO: 659942 - DNA, 19 bp, Mus musculus
  siRNA target sequence for Crygc (NM_007775.1,502-520).
cggagggtggtagatttat

SEQ ID NO: 659943 - DNA, 19 bp, Mus musculus
  siRNA target sequence for Crygc (NM_007775.1,503-521).
ggagggtggtagatttata

SEQ ID NO: 659944 - DNA, 19 bp, Mus musculus
  siRNA target sequence for Crygf (NM_027010.1,473-491).
ctgaggccaggggagtata

SEQ ID NO: 659945 - DNA, 19 bp, Mus musculus
  siRNA target sequence for Crygs (NM_009967.1,65-83).
gaggcaagattagtttcta

SEQ ID NO: 659946 - DNA, 19 bp, Mus musculus
  siRNA target sequence for Crygs (NM_009967.1,81-99).
ctacgaagaccgaaatttt

SEQ ID NO: 659947 - DNA, 19 bp, Mus musculus
  siRNA target sequence for Crygs (NM_009967.1,84-102).
cgaagaccgaaattttcaa

SEQ ID NO: 659948 - DNA, 19 bp, Mus musculus
  siRNA target sequence for Crygs (NM_009967.1,136-154).
gacttccgctcgtacctaa

SEQ ID NO: 659949 - DNA, 19 bp, Mus musculus
  siRNA target sequence for Crygs (NM_009967.1,159-177).
ctgcaactccattagagta

SEQ ID NO: 659950 - DNA, 19 bp, Mus musculus
  siRNA target sequence for Crygs (NM_009967.1,218-236).
ccgggcacatgtacatctt

SEQ ID NO: 659951 - DNA, 19 bp, Mus musculus
  siRNA target sequence for Crygs (NM_009967.1,219-237).
cgggcacatgtacatctta

SEQ ID NO: 659952 - DNA, 19 bp, Mus musculus
  siRNA target sequence for Crygs (NM_009967.1,266-284).
gttggatgggccttaatga

SEQ ID NO: 659953 - DNA, 19 bp, Mus musculus
  siRNA target sequence for Crygs (NM_009967.1,294-312).
ctcttgccgagctgttcat

SEQ ID NO: 659954 - DNA, 19 bp, Mus musculus
  siRNA target sequence for Crygs (NM_009967.1,296-314).
cttgccgagctgttcatct

SEQ ID NO: 659955 - DNA, 19 bp, Mus musculus
  siRNA target sequence for Crygs (NM_009967.1,320-338).
gcggaggccaggctaagat

SEQ ID NO: 659956 - DNA, 19 bp, Mus musculus
  siRNA target sequence for Crygs (NM_009967.1,332-350).
ctaagattcaggtctttga

SEQ ID NO: 659957 - DNA, 19 bp, Mus musculus
  siRNA target sequence for Crygs (NM_009967.1,414-432).
gtttcacctgcgagagatt

SEQ ID NO: 659958 - DNA, 19 bp, Mus musculus
  siRNA target sequence for Crygs (NM_009967.1,418-436).
cacctgcgagagattcatt

SEQ ID NO: 659959 - DNA, 19 bp, Mus musculus
  siRNA target sequence for Crygs (NM_009967.1,448-466).
gtagaaggcacctggattt

SEQ ID NO: 659960 - DNA, 19 bp, Mus musculus
  siRNA target sequence for Crygs (NM_009967.1,483-501).
ctaccgtggcagacagtat

SEQ ID NO: 659961 - DNA, 19 bp, Mus musculus
  siRNA target sequence for Crygs (NM_009967.1,486-504).
ccgtggcagacagtatctt

SEQ ID NO: 659962 - DNA, 19 bp, Mus musculus
  siRNA target sequence for Lim2 (NM_177693.2,229-247).
gagagcatcgcatattgga

SEQ ID NO: 659963 - DNA, 19 bp, Mus musculus
  siRNA target sequence for Lim2 (NM_177693.2,231-249).
gagcatcgcatattggaat

SEQ ID NO: 659964 - DNA, 19 bp, Mus musculus
  siRNA target sequence for Lim2 (NM_177693.2,466-484).
cgcttttcatggtcttaca

SEQ ID NO: 659965 - DNA, 19 bp, Mus musculus
  siRNA target sequence for Ankrd2 (NM_020033.1,161-179).
cagagtcctgctttacaaa

SEQ ID NO: 659966 - DNA, 19 bp, Mus musculus
  siRNA target sequence for Ankrd2 (NM_020033.1,194-212).
gagcgcgtgcgcaagacat

SEQ ID NO: 659967 - DNA, 19 bp, Mus musculus
  siRNA target sequence for Ankrd2 (NM_020033.1,225-243).
gacgtgagatcattgatgt

SEQ ID NO: 659968 - DNA, 19 bp, Mus musculus
  siRNA target sequence for Ankrd2 (NM_020033.1,438-456).
cggacacctgtgatgagtt

SEQ ID NO: 659969 - DNA, 19 bp, Mus musculus
  siRNA target sequence for Ankrd2 (NM_020033.1,687-705).
ctggacacgtggagattgt

SEQ ID NO: 659970 - DNA, 19 bp, Mus musculus
  siRNA target sequence for Ankrd2 (NM_020033.1,716-734).
ctttccctgggcttggata

SEQ ID NO: 659971 - DNA, 19 bp, Mus musculus
  siRNA target sequence for Ankrd2 (NM_020033.1,720-738).
ccctgggcttggatatcaa

SEQ ID NO: 659972 - DNA, 19 bp, Mus musculus
  siRNA target sequence for Ankrd2 (NM_020033.1,756-774).
gggacagtgccctacatga

SEQ ID NO: 659973 - DNA, 19 bp, Mus musculus
  siRNA target sequence for Ankrd2 (NM_020033.1,757-775).
ggacagtgccctacatgat

SEQ ID NO: 659974 - DNA, 19 bp, Mus musculus
  siRNA target sequence for Ankrd2 (NM_020033.1,781-799).
gagactcaaccgctacaaa

SEQ ID NO: 659975 - DNA, 19 bp, Mus musculus
  siRNA target sequence for Ankrd2 (NM_020033.1,785-803).
ctcaaccgctacaaaatca

SEQ ID NO: 659976 - DNA, 19 bp, Mus musculus
  siRNA target sequence for Ankrd2 (NM_020033.1,790-808).
ccgctacaaaatcatcaaa

SEQ ID NO: 659977 - DNA, 19 bp, Mus musculus
  siRNA target sequence for Ankrd2 (NM_020033.1,792-810).
gctacaaaatcatcaaact

SEQ ID NO: 659978 - DNA, 19 bp, Mus musculus
  siRNA target sequence for Ankrd2 (NM_020033.1,828-846).
cggacatgatggctaagaa

SEQ ID NO: 659979 - DNA, 19 bp, Mus musculus
  siRNA target sequence for Ankrd2 (NM_020033.1,913-931).
gcatcccgagccagaatca

SEQ ID NO: 659980 - DNA, 19 bp, Mus musculus
  siRNA target sequence for Ankrd2 (NM_020033.1,970-988).
gacacctcagcctatacca

SEQ ID NO: 659981 - DNA, 19 bp, Mus musculus
  siRNA target sequence for Jph1 (NM_020604.1,972-990).
ggtgacgtcgactgtgatt

SEQ ID NO: 659982 - DNA, 19 bp, Mus musculus
  siRNA target sequence for Jph1 (NM_020604.1,1139-1157).
gtacggctgcactgtgttt

SEQ ID NO: 659983 - DNA, 19 bp, Mus musculus
  siRNA target sequence for Jph1 (NM_020604.1,1200-1218).
ctggtccgtgggataagga

SEQ ID NO: 659984 - DNA, 19 bp, Mus musculus
  siRNA target sequence for Jph1 (NM_020604.1,1211-1229).
gataaggaagcagcttata

SEQ ID NO: 659985 - DNA, 19 bp, Mus musculus
  siRNA target sequence for Jph1 (NM_020604.1,1216-1234).
ggaagcagcttataccaat

SEQ ID NO: 659986 - DNA, 19 bp, Mus musculus
  siRNA target sequence for Jph1 (NM_020604.1,1217-1235).
gaagcagcttataccaata

SEQ ID NO: 659987 - DNA, 19 bp, Mus musculus
  siRNA target sequence for Jph1 (NM_020604.1,1224-1242).
cttataccaataagaaata

SEQ ID NO: 659988 - DNA, 19 bp, Mus musculus
  siRNA target sequence for Jph1 (NM_020604.1,1392-1410).
caggagtgcgacatagcaa

SEQ ID NO: 659989 - DNA, 19 bp, Mus musculus
  siRNA target sequence for Jph1 (NM_020604.1,1457-1475).
cgattatatcaaacaaaga

SEQ ID NO: 659990 - DNA, 19 bp, Mus musculus
  siRNA target sequence for Jph1 (NM_020604.1,1671-1689).
gcaagactcagtcaagata

SEQ ID NO: 659991 - DNA, 19 bp, Mus musculus
  siRNA target sequence for Jph1 (NM_020604.1,1675-1693).
gactcagtcaagataaaca

SEQ ID NO: 659992 - DNA, 19 bp, Mus musculus
  siRNA target sequence for Jph1 (NM_020604.1,1696-1714).
gcctagctgaggaacaagt

SEQ ID NO: 659993 - DNA, 19 bp, Mus musculus
  siRNA target sequence for Jph1 (NM_020604.1,1713-1731).
gtgacagcctttgtcaata

SEQ ID NO: 659994 - DNA, 19 bp, Mus musculus
  siRNA target sequence for Jph1 (NM_020604.1,1715-1733).
gacagcctttgtcaataaa

SEQ ID NO: 659995 - DNA, 19 bp, Mus musculus
  siRNA target sequence for Jph1 (NM_020604.1,1725-1743).
gtcaataaaccctctatgt

SEQ ID NO: 659996 - DNA, 19 bp, Mus musculus
  siRNA target sequence for Jph1 (NM_020604.1,1727-1745).
caataaaccctctatgtca

SEQ ID NO: 659997 - DNA, 19 bp, Mus musculus
  siRNA target sequence for Jph1 (NM_020604.1,1957-1975).
ggggtccccctaaatctgt

SEQ ID NO: 659998 - DNA, 19 bp, Mus musculus
  siRNA target sequence for Jph1 (NM_020604.1,1964-1982).
ccctaaatctgtgacaaaa

SEQ ID NO: 659999 - DNA, 19 bp, Mus musculus
  siRNA target sequence for Jph1 (NM_020604.1,2024-2042).
gtctgaacttgctatacca

SEQ ID NO: 660000 - DNA, 19 bp, Mus musculus
  siRNA target sequence for Jph1 (NM_020604.1,2026-2044).
ctgaacttgctataccaaa

SEQ ID NO: 660001 - DNA, 19 bp, Mus musculus
  siRNA target sequence for Jph1 (NM_020604.1,2097-2115).
ggccctaattccatcatga

SEQ ID NO: 660002 - DNA, 19 bp, Mus musculus
  siRNA target sequence for Jph1 (NM_020604.1,2098-2116).
gccctaattccatcatgat

SEQ ID NO: 660003 - DNA, 19 bp, Mus musculus
  siRNA target sequence for Jph1 (NM_020604.1,2101-2119).
ctaattccatcatgattgt

SEQ ID NO: 660004 - DNA, 19 bp, Mus musculus
  siRNA target sequence for Ambn (NM_009664.1,89-107).
catctaagattccactttt

SEQ ID NO: 660005 - DNA, 19 bp, Mus musculus
  siRNA target sequence for Ambn (NM_009664.1,156-174).
cgccgtgccggcatttcct

SEQ ID NO: 660006 - DNA, 19 bp, Mus musculus
  siRNA target sequence for Ambn (NM_009664.1,162-180).
gccggcatttcctcaacaa

SEQ ID NO: 660007 - DNA, 19 bp, Mus musculus
  siRNA target sequence for Ambn (NM_009664.1,203-221).
ctcctggcatggctagttt

SEQ ID NO: 660008 - DNA, 19 bp, Mus musculus
  siRNA target sequence for Ambn (NM_009664.1,205-223).
cctggcatggctagtttga

SEQ ID NO: 660009 - DNA, 19 bp, Mus musculus
  siRNA target sequence for Ambn (NM_009664.1,218-236).
gtttgagccttgagacaat

SEQ ID NO: 660010 - DNA, 19 bp, Mus musculus
  siRNA target sequence for Ambn (NM_009664.1,260-278).
gactcaacgcactttctca

SEQ ID NO: 660011 - DNA, 19 bp, Mus musculus
  siRNA target sequence for Ambn (NM_009664.1,267-285).
cgcactttctcagtattct

SEQ ID NO: 660012 - DNA, 19 bp, Mus musculus
  siRNA target sequence for Ambn (NM_009664.1,268-286).
gcactttctcagtattcta

SEQ ID NO: 660013 - DNA, 19 bp, Mus musculus
  siRNA target sequence for Ambn (NM_009664.1,298-316).
ggaaaagcacttaatagtt

SEQ ID NO: 660014 - DNA, 19 bp, Mus musculus
  siRNA target sequence for Ambn (NM_009664.1,304-322).
gcacttaatagtttatggt

SEQ ID NO: 660015 - DNA, 19 bp, Mus musculus
  siRNA target sequence for Ambn (NM_009664.1,305-323).
cacttaatagtttatggtt

SEQ ID NO: 660016 - DNA, 19 bp, Mus musculus
  siRNA target sequence for Ambn (NM_009664.1,334-352).
ctcccaccgcataactctt

SEQ ID NO: 660017 - DNA, 19 bp, Mus musculus
  siRNA target sequence for Ambn (NM_009664.1,575-593).
caacacctgaggtaccaat

SEQ ID NO: 660018 - DNA, 19 bp, Mus musculus
  siRNA target sequence for Ambn (NM_009664.1,578-596).
cacctgaggtaccaataat

SEQ ID NO: 660019 - DNA, 19 bp, Mus musculus
  siRNA target sequence for Ambn (NM_009664.1,581-599).
ctgaggtaccaataatgga

SEQ ID NO: 660020 - DNA, 19 bp, Mus musculus
  siRNA target sequence for Ambn (NM_009664.1,583-601).
gaggtaccaataatggatt

SEQ ID NO: 660021 - DNA, 19 bp, Mus musculus
  siRNA target sequence for Ambn (NM_009664.1,604-622).
gctgatccacaatttccaa

SEQ ID NO: 660022 - DNA, 19 bp, Mus musculus
  siRNA target sequence for Ambn (NM_009664.1,630-648).
ccagatcgcccgttcaata

SEQ ID NO: 660023 - DNA, 19 bp, Mus musculus
  siRNA target sequence for Ambn (NM_009664.1,631-649).
cagatcgcccgttcaatat

SEQ ID NO: 660024 - DNA, 19 bp, Mus musculus
  siRNA target sequence for Ambn (NM_009664.1,633-651).
gatcgcccgttcaatatct

SEQ ID NO: 660025 - DNA, 19 bp, Mus musculus
  siRNA target sequence for Ambn (NM_009664.1,699-717).
gttttacatgtcttatgga

SEQ ID NO: 660026 - DNA, 19 bp, Mus musculus
  siRNA target sequence for Ambn (NM_009664.1,708-726).
gtcttatggagcaaaccaa

SEQ ID NO: 660027 - DNA, 19 bp, Mus musculus
  siRNA target sequence for Ambn (NM_009664.1,710-728).
cttatggagcaaaccaatt

SEQ ID NO: 660028 - DNA, 19 bp, Mus musculus
  siRNA target sequence for Ambn (NM_009664.1,879-897).
ctttactgtggaagtagat

SEQ ID NO: 660029 - DNA, 19 bp, Mus musculus
  siRNA target sequence for Ambn (NM_009664.1,895-913).
gattccccagtatctgtta

SEQ ID NO: 660030 - DNA, 19 bp, Mus musculus
  siRNA target sequence for Ambn (NM_009664.1,899-917).
ccccagtatctgttaccaa

SEQ ID NO: 660031 - DNA, 19 bp, Mus musculus
  siRNA target sequence for Ambn (NM_009664.1,1125-1143).
gatcacccctgaattagca

SEQ ID NO: 660032 - DNA, 19 bp, Mus musculus
  siRNA target sequence for Ambn (NM_009664.1,1131-1149).
ccctgaattagcagaagtt

SEQ ID NO: 660033 - DNA, 19 bp, Mus musculus
  siRNA target sequence for Ambn (NM_009664.1,1133-1151).
ctgaattagcagaagttta

SEQ ID NO: 660034 - DNA, 19 bp, Mus musculus
  siRNA target sequence for Ambn (NM_009664.1,1195-1213).
gaagcaaccatggatatca

SEQ ID NO: 660035 - DNA, 19 bp, Mus musculus
  siRNA target sequence for Ambn (NM_009664.1,1278-1296).
caacgcatggcgtttccaa

SEQ ID NO: 660036 - DNA, 19 bp, Mus musculus
  siRNA target sequence for Amelx (NM_009666.1,142-160).
ggaagccctggttatatca

SEQ ID NO: 660037 - DNA, 19 bp, Mus musculus
  siRNA target sequence for Amelx (NM_009666.1,143-161).
gaagccctggttatatcaa

SEQ ID NO: 660038 - DNA, 19 bp, Mus musculus
  siRNA target sequence for Amelx (NM_009666.1,146-164).
gccctggttatatcaactt

SEQ ID NO: 660039 - DNA, 19 bp, Mus musculus
  siRNA target sequence for Amelx (NM_009666.1,147-165).
ccctggttatatcaactta

SEQ ID NO: 660040 - DNA, 19 bp, Mus musculus
  siRNA target sequence for Amelx (NM_009666.1,148-166).
cctggttatatcaacttaa

SEQ ID NO: 660041 - DNA, 19 bp, Mus musculus
  siRNA target sequence for Amelx (NM_009666.1,151-169).
ggttatatcaacttaagct

SEQ ID NO: 660042 - DNA, 19 bp, Mus musculus
  siRNA target sequence for Amelx (NM_009666.1,152-170).
gttatatcaacttaagcta

SEQ ID NO: 660043 - DNA, 19 bp, Mus musculus
  siRNA target sequence for Amelx (NM_009666.1,175-193).
gtgcttacccctttgaagt

SEQ ID NO: 660044 - DNA, 19 bp, Mus musculus
  siRNA target sequence for Amelx (NM_009666.1,213-231).
gcagccgtatccttcctat

SEQ ID NO: 660045 - DNA, 19 bp, Mus musculus
  siRNA target sequence for Amelx (NM_009666.1,251-269).
gatggctgcaccaccaaat

SEQ ID NO: 660046 - DNA, 19 bp, Mus musculus
  siRNA target sequence for Enam (NM_017468.1,347-365).
gtggcctggtaccaaatgt

SEQ ID NO: 660047 - DNA, 19 bp, Mus musculus
  siRNA target sequence for Enam (NM_017468.1,349-367).
ggcctggtaccaaatgtaa

SEQ ID NO: 660048 - DNA, 19 bp, Mus musculus
  siRNA target sequence for Enam (NM_017468.1,435-453).
gccccgaatgcctggattt

SEQ ID NO: 660049 - DNA, 19 bp, Mus musculus
  siRNA target sequence for Enam (NM_017468.1,436-454).
ccccgaatgcctggattta

SEQ ID NO: 660050 - DNA, 19 bp, Mus musculus
  siRNA target sequence for Enam (NM_017468.1,439-457).
cgaatgcctggatttagca

SEQ ID NO: 660051 - DNA, 19 bp, Mus musculus
  siRNA target sequence for Enam (NM_017468.1,449-467).
gatttagcagtaaaagtga

SEQ ID NO: 660052 - DNA, 19 bp, Mus musculus
  siRNA target sequence for Enam (NM_017468.1,466-484).
gaagagatgatgcgatata

SEQ ID NO: 660053 - DNA, 19 bp, Mus musculus
  siRNA target sequence for Enam (NM_017468.1,471-489).
gatgatgcgatataatcaa

SEQ ID NO: 660054 - DNA, 19 bp, Mus musculus
  siRNA target sequence for Enam (NM_017468.1,478-496).
cgatataatcaattcaact

SEQ ID NO: 660055 - DNA, 19 bp, Mus musculus
  siRNA target sequence for Enam (NM_017468.1,521-539).
ctatgggcccatatggaaa

SEQ ID NO: 660056 - DNA, 19 bp, Mus musculus
  siRNA target sequence for Enam (NM_017468.1,525-543).
gggcccatatggaaatggt

SEQ ID NO: 660057 - DNA, 19 bp, Mus musculus
  siRNA target sequence for Enam (NM_017468.1,526-544).
ggcccatatggaaatggta

SEQ ID NO: 660058 - DNA, 19 bp, Mus musculus
  siRNA target sequence for Enam (NM_017468.1,527-545).
gcccatatggaaatggtat

SEQ ID NO: 660059 - DNA, 19 bp, Mus musculus
  siRNA target sequence for Enam (NM_017468.1,648-666).
cccaagcaagactgatcaa

SEQ ID NO: 660060 - DNA, 19 bp, Mus musculus
  siRNA target sequence for Enam (NM_017468.1,752-770).
cagcacgggccaaagatga

SEQ ID NO: 660061 - DNA, 19 bp, Mus musculus
  siRNA target sequence for Enam (NM_017468.1,797-815).
catttggcaatggacttta

SEQ ID NO: 660062 - DNA, 19 bp, Mus musculus
  siRNA target sequence for Enam (NM_017468.1,866-884).
cgtttggacggccaaagtt

SEQ ID NO: 660063 - DNA, 19 bp, Mus musculus
  siRNA target sequence for Enam (NM_017468.1,876-894).
gccaaagttcagcaatgaa

SEQ ID NO: 660064 - DNA, 19 bp, Mus musculus
  siRNA target sequence for Enam (NM_017468.1,898-916).
ggaaatccttactatgcat

SEQ ID NO: 660065 - DNA, 19 bp, Mus musculus
  siRNA target sequence for Enam (NM_017468.1,933-951).
ctttgggggtcgtccttat

SEQ ID NO: 660066 - DNA, 19 bp, Mus musculus
  siRNA target sequence for Enam (NM_017468.1,939-957).
gggtcgtccttattactca

SEQ ID NO: 660067 - DNA, 19 bp, Mus musculus
  siRNA target sequence for Enam (NM_017468.1,947-965).
cttattactcagaagagat

SEQ ID NO: 660068 - DNA, 19 bp, Mus musculus
  siRNA target sequence for Enam (NM_017468.1,1042-1060).
gaggcctctacaaactcaa

SEQ ID NO: 660069 - DNA, 19 bp, Mus musculus
  siRNA target sequence for Enam (NM_017468.1,1072-1090).
gctaatgccactcaatcaa

SEQ ID NO: 660070 - DNA, 19 bp, Mus musculus
  siRNA target sequence for Enam (NM_017468.1,1073-1091).
ctaatgccactcaatcaat

SEQ ID NO: 660071 - DNA, 19 bp, Mus musculus
  siRNA target sequence for Enam (NM_017468.1,1108-1126).
gacactagcccaataggaa

SEQ ID NO: 660072 - DNA, 19 bp, Mus musculus
  siRNA target sequence for Enam (NM_017468.1,1140-1158).
gccgaacgctgggaacaat

SEQ ID NO: 660073 - DNA, 19 bp, Mus musculus
  siRNA target sequence for Enam (NM_017468.1,1152-1170).
gaacaatcctacagttcaa

SEQ ID NO: 660074 - DNA, 19 bp, Mus musculus
  siRNA target sequence for Enam (NM_017468.1,1188-1206).
ccctaaagttaatgtttca

SEQ ID NO: 660075 - DNA, 19 bp, Mus musculus
  siRNA target sequence for Enam (NM_017468.1,1243-1261).
ccaagtcagccaaatattt

SEQ ID NO: 660076 - DNA, 19 bp, Mus musculus
  siRNA target sequence for Enam (NM_017468.1,1244-1262).
caagtcagccaaatattta

SEQ ID NO: 660077 - DNA, 19 bp, Mus musculus
  siRNA target sequence for Enam (NM_017468.1,1273-1291).
ccttacccaaattatcctt

SEQ ID NO: 660078 - DNA, 19 bp, Mus musculus
  siRNA target sequence for Enam (NM_017468.1,1418-1436).
gtccaggaaacccaactta

SEQ ID NO: 660079 - DNA, 19 bp, Mus musculus
  siRNA target sequence for Enam (NM_017468.1,1428-1446).
cccaacttacggtaaacct

SEQ ID NO: 660080 - DNA, 19 bp, Mus musculus
  siRNA target sequence for Enam (NM_017468.1,1453-1471).
cctacctccggggttaatt

SEQ ID NO: 660081 - DNA, 19 bp, Mus musculus
  siRNA target sequence for Enam (NM_017468.1,1454-1472).
ctacctccggggttaatta

SEQ ID NO: 660082 - DNA, 19 bp, Mus musculus
  siRNA target sequence for Enam (NM_017468.1,1458-1476).
ctccggggttaattatgca

SEQ ID NO: 660083 - DNA, 19 bp, Mus musculus
  siRNA target sequence for Enam (NM_017468.1,1484-1502).
cagtccatttcggaagaaa

SEQ ID NO: 660084 - DNA, 19 bp, Mus musculus
  siRNA target sequence for Enam (NM_017468.1,1821-1839).
ctttgtgagaaacaatgta

SEQ ID NO: 660085 - DNA, 19 bp, Mus musculus
  siRNA target sequence for Enam (NM_017468.1,1833-1851).
caatgtaggtgcaaataaa

SEQ ID NO: 660086 - DNA, 19 bp, Mus musculus
  siRNA target sequence for Enam (NM_017468.1,1971-1989).
ggcctcagtgggtcctaaa

SEQ ID NO: 660087 - DNA, 19 bp, Mus musculus
  siRNA target sequence for Enam (NM_017468.1,1973-1991).
cctcagtgggtcctaaaca

SEQ ID NO: 660088 - DNA, 19 bp, Mus musculus
  siRNA target sequence for Enam (NM_017468.1,1997-2015).
ctgttagccacaatatgaa

SEQ ID NO: 660089 - DNA, 19 bp, Mus musculus
  siRNA target sequence for Enam (NM_017468.1,2088-2106).
cccctggagaagtgctaaa

SEQ ID NO: 660090 - DNA, 19 bp, Mus musculus
  siRNA target sequence for Enam (NM_017468.1,2099-2117).
gtgctaaacaatatggaat

SEQ ID NO: 660091 - DNA, 19 bp, Mus musculus
  siRNA target sequence for Enam (NM_017468.1,2114-2132).
gaattaacaatccaaacta

SEQ ID NO: 660092 - DNA, 19 bp, Mus musculus
  siRNA target sequence for Enam (NM_017468.1,2156-2174).
gcatggtaggcccaaattt

SEQ ID NO: 660093 - DNA, 19 bp, Mus musculus
  siRNA target sequence for Enam (NM_017468.1,2157-2175).
catggtaggcccaaatttt

SEQ ID NO: 660094 - DNA, 19 bp, Mus musculus
  siRNA target sequence for Enam (NM_017468.1,2160-2178).
ggtaggcccaaattttaat

SEQ ID NO: 660095 - DNA, 19 bp, Mus musculus
  siRNA target sequence for Enam (NM_017468.1,2199-2217).
ctcctacttctcaaaagga

SEQ ID NO: 660096 - DNA, 19 bp, Mus musculus
  siRNA target sequence for Enam (NM_017468.1,2233-2251).
ccaagtcctaatatacaaa

SEQ ID NO: 660097 - DNA, 19 bp, Mus musculus
  siRNA target sequence for Enam (NM_017468.1,2234-2252).
caagtcctaatatacaaat

SEQ ID NO: 660098 - DNA, 19 bp, Mus musculus
  siRNA target sequence for Enam (NM_017468.1,2237-2255).
gtcctaatatacaaatcca

SEQ ID NO: 660099 - DNA, 19 bp, Mus musculus
  siRNA target sequence for Enam (NM_017468.1,2262-2280).
gaatttgcccaaaggaatt

SEQ ID NO: 660100 - DNA, 19 bp, Mus musculus
  siRNA target sequence for Enam (NM_017468.1,2291-2309).
caagaagaaccccatttca

SEQ ID NO: 660101 - DNA, 19 bp, Mus musculus
  siRNA target sequence for Enam (NM_017468.1,2297-2315).
gaaccccatttcaatcaga

SEQ ID NO: 660102 - DNA, 19 bp, Mus musculus
  siRNA target sequence for Enam (NM_017468.1,2301-2319).
cccatttcaatcagaaact

SEQ ID NO: 660103 - DNA, 19 bp, Mus musculus
  siRNA target sequence for Enam (NM_017468.1,2302-2320).
ccatttcaatcagaaacta

SEQ ID NO: 660104 - DNA, 19 bp, Mus musculus
  siRNA target sequence for Enam (NM_017468.1,2375-2393).
cttctcctacaagaaaaca

SEQ ID NO: 660105 - DNA, 19 bp, Mus musculus
  siRNA target sequence for Enam (NM_017468.1,2417-2435).
ggaatcgtcaaaaaatcct

SEQ ID NO: 660106 - DNA, 19 bp, Mus musculus
  siRNA target sequence for Enam (NM_017468.1,2418-2436).
gaatcgtcaaaaaatcctt

SEQ ID NO: 660107 - DNA, 19 bp, Mus musculus
  siRNA target sequence for Enam (NM_017468.1,2458-2476).
gggaggcaagacgaaaatt

SEQ ID NO: 660108 - DNA, 19 bp, Mus musculus
  siRNA target sequence for Enam (NM_017468.1,2459-2477).
ggaggcaagacgaaaattt

SEQ ID NO: 660109 - DNA, 19 bp, Mus musculus
  siRNA target sequence for Enam (NM_017468.1,2463-2481).
gcaagacgaaaatttacgt

SEQ ID NO: 660110 - DNA, 19 bp, Mus musculus
  siRNA target sequence for Enam (NM_017468.1,2528-2546).
ccaatccttatcataatga

SEQ ID NO: 660111 - DNA, 19 bp, Mus musculus
  siRNA target sequence for Enam (NM_017468.1,2552-2570).
cacagtacattaaaagcaa

SEQ ID NO: 660112 - DNA, 19 bp, Mus musculus
  siRNA target sequence for Enam (NM_017468.1,2585-2603).
gctctcccagtactatgat

SEQ ID NO: 660113 - DNA, 19 bp, Mus musculus
  siRNA target sequence for Enam (NM_017468.1,2597-2615).
ctatgatgcggccagaaaa

SEQ ID NO: 660114 - DNA, 19 bp, Mus musculus
  siRNA target sequence for Enam (NM_017468.1,2673-2691).
ggatccaattgatccaaat

SEQ ID NO: 660115 - DNA, 19 bp, Mus musculus
  siRNA target sequence for Enam (NM_017468.1,2725-2743).
ggggatgaagagatgaact

SEQ ID NO: 660116 - DNA, 19 bp, Mus musculus
  siRNA target sequence for Enam (NM_017468.1,2726-2744).
gggatgaagagatgaactt

SEQ ID NO: 660117 - DNA, 19 bp, Mus musculus
  siRNA target sequence for Enam (NM_017468.1,2796-2814).
cctagcgaaggaatacctt

SEQ ID NO: 660118 - DNA, 19 bp, Mus musculus
  siRNA target sequence for Enam (NM_017468.1,2836-2854).
ccaaaacccagtgaagatt

SEQ ID NO: 660119 - DNA, 19 bp, Mus musculus
  siRNA target sequence for Enam (NM_017468.1,2879-2897).
ggaacccacaggaaacgtt

SEQ ID NO: 660120 - DNA, 19 bp, Mus musculus
  siRNA target sequence for Enam (NM_017468.1,2885-2903).
cacaggaaacgtttccaat

SEQ ID NO: 660121 - DNA, 19 bp, Mus musculus
  siRNA target sequence for Enam (NM_017468.1,2934-2952).
cgtggaccccagaagttat

SEQ ID NO: 660122 - DNA, 19 bp, Mus musculus
  siRNA target sequence for Enam (NM_017468.1,2940-2958).
ccccagaagttattatgtt

SEQ ID NO: 660123 - DNA, 19 bp, Mus musculus
  siRNA target sequence for Enam (NM_017468.1,3070-3088).
gtctgggatcagtcaataa

SEQ ID NO: 660124 - DNA, 19 bp, Mus musculus
  siRNA target sequence for Enam (NM_017468.1,3072-3090).
ctgggatcagtcaataaat

SEQ ID NO: 660125 - DNA, 19 bp, Mus musculus
  siRNA target sequence for Enam (NM_017468.1,3074-3092).
gggatcagtcaataaattt

SEQ ID NO: 660126 - DNA, 19 bp, Mus musculus
  siRNA target sequence for Enam (NM_017468.1,3075-3093).
ggatcagtcaataaattta

SEQ ID NO: 660127 - DNA, 19 bp, Mus musculus
  siRNA target sequence for Enam (NM_017468.1,3094-3112).
cacaaatctaatataccaa

SEQ ID NO: 660128 - DNA, 19 bp, Mus musculus
  siRNA target sequence for Enam (NM_017468.1,3186-3204).
ctatgatttgcaaattact

SEQ ID NO: 660129 - DNA, 19 bp, Mus musculus
  siRNA target sequence for Enam (NM_017468.1,3195-3213).
gcaaattactagtttaagt

SEQ ID NO: 660130 - DNA, 19 bp, Mus musculus
  siRNA target sequence for Enam (NM_017468.1,3329-3347).
gctccacaggacataaaga

SEQ ID NO: 660131 - DNA, 19 bp, Mus musculus
  siRNA target sequence for Enam (NM_017468.1,3332-3350).
ccacaggacataaagacaa

SEQ ID NO: 660132 - DNA, 19 bp, Mus musculus
  siRNA target sequence for Enam (NM_017468.1,3333-3351).
cacaggacataaagacaat

SEQ ID NO: 660133 - DNA, 19 bp, Mus musculus
  siRNA target sequence for Enam (NM_017468.1,3335-3353).
caggacataaagacaatgt

SEQ ID NO: 660134 - DNA, 19 bp, Mus musculus
  siRNA target sequence for Enam (NM_017468.1,3447-3465).
gtatgcaagacctaacgtt

SEQ ID NO: 660135 - DNA, 19 bp, Mus musculus
  siRNA target sequence for Enam (NM_017468.1,3477-3495).
catcctacctagtcaaaga

SEQ ID NO: 660136 - DNA, 19 bp, Mus musculus
  siRNA target sequence for Enam (NM_017468.1,3501-3519).
ctcagagaacaaactaact

SEQ ID NO: 660137 - DNA, 19 bp, Mus musculus
  siRNA target sequence for Enam (NM_017468.1,3654-3672).
cacgccctgtcttaaaagt

SEQ ID NO: 660138 - DNA, 19 bp, Mus musculus
  siRNA target sequence for Enam (NM_017468.1,3656-3674).
cgccctgtcttaaaagtga

SEQ ID NO: 660139 - DNA, 19 bp, Mus musculus
  siRNA target sequence for Enam (NM_017468.1,3694-3712).
gatgttctgaaacaatttt

SEQ ID NO: 660140 - DNA, 19 bp, Mus musculus
  siRNA target sequence for Enam (NM_017468.1,3762-3780).
gctcgtcattggtattcct

SEQ ID NO: 660141 - DNA, 19 bp, Mus musculus
  siRNA target sequence for Enam (NM_017468.1,3793-3811).
ggcccagatagcatacaaa

SEQ ID NO: 660142 - DNA, 19 bp, Mus musculus
  siRNA target sequence for Enam (NM_017468.1,3832-3850).
ggtgagatgcagcaacaaa

SEQ ID NO: 660143 - DNA, 19 bp, Mus musculus
  siRNA target sequence for Enam (NM_017468.1,3851-3869).
ggccacctaccatcatgaa

SEQ ID NO: 660144 - DNA, 19 bp, Mus musculus
  siRNA target sequence for Enam (NM_017468.1,3874-3892).
ccatgctttggctccaatt

SEQ ID NO: 660145 - DNA, 19 bp, Mus musculus
  siRNA target sequence for Enam (NM_017468.1,3878-3896).
gctttggctccaattcaaa

SEQ ID NO: 660146 - DNA, 19 bp, Mus musculus
  siRNA target sequence for Enam (NM_017468.1,3884-3902).
gctccaattcaaaatttca

SEQ ID NO: 660147 - DNA, 19 bp, Mus musculus
  siRNA target sequence for Enam (NM_017468.1,3911-3929).
ccactggacctccaattaa

SEQ ID NO: 660148 - DNA, 19 bp, Mus musculus
  siRNA target sequence for Enam (NM_017468.1,3916-3934).
ggacctccaattaacaaca

SEQ ID NO: 660149 - DNA, 19 bp, Mus musculus
  siRNA target sequence for Enam (NM_017468.1,3974-3992).
ctgaaagtcctaacacatt

SEQ ID NO: 660150 - DNA, 19 bp, Mus musculus
  siRNA target sequence for Enam (NM_017468.1,4003-4021).
gctactagggaacaactta

SEQ ID NO: 660151 - DNA, 19 bp, Mus musculus
  siRNA target sequence for Enam (NM_017468.1,4025-4043).
gtataaacgtagataaact

SEQ ID NO: 660152 - DNA, 19 bp, Mus musculus
  siRNA target sequence for Enam (NM_017468.1,4032-4050).
cgtagataaacttaatgca

SEQ ID NO: 660153 - DNA, 19 bp, Mus musculus
  siRNA target sequence for Enam (NM_017468.1,4057-4075).
cacactacactcgaatctt

SEQ ID NO: 660154 - DNA, 19 bp, Mus musculus
  siRNA target sequence for Enam (NM_017468.1,4059-4077).
cactacactcgaatctttt

SEQ ID NO: 660155 - DNA, 19 bp, Mus musculus
  siRNA target sequence for Enam (NM_017468.1,4061-4079).
ctacactcgaatcttttca

SEQ ID NO: 660156 - DNA, 19 bp, Mus musculus
  siRNA target sequence for Tuft1 (NM_011656.1,755-773).
gccttactggtgaaagtca

SEQ ID NO: 660157 - DNA, 19 bp, Mus musculus
  siRNA target sequence for Tuft1 (NM_011656.1,814-832).
cgctgactgtcaaacagaa

SEQ ID NO: 660158 - DNA, 19 bp, Mus musculus
  siRNA target sequence for Tuft1 (NM_011656.1,815-833).
gctgactgtcaaacagaaa

SEQ ID NO: 660159 - DNA, 19 bp, Mus musculus
  siRNA target sequence for Tuft1 (NM_011656.1,941-959).
gagcagctccagaattcaa

SEQ ID NO: 660160 - DNA, 19 bp, Mus musculus
  siRNA target sequence for Tuft1 (NM_011656.1,1022-1040).
gaggctgagaacttagaga

SEQ ID NO: 660161 - DNA, 19 bp, Mus musculus
  siRNA target sequence for Tuft1 (NM_011656.1,1046-1064).
gaccgcatggagcatctaa

SEQ ID NO: 660162 - DNA, 19 bp, Mus musculus
  siRNA target sequence for Tuft1 (NM_011656.1,1048-1066).
ccgcatggagcatctaata

SEQ ID NO: 660163 - DNA, 19 bp, Mus musculus
  siRNA target sequence for Tuft1 (NM_011656.1,1050-1068).
gcatggagcatctaataga

SEQ ID NO: 660164 - DNA, 19 bp, Mus musculus
  siRNA target sequence for Tuft1 (NM_011656.1,1124-1142).
ctgggcagtgtcaggatat

SEQ ID NO: 660165 - DNA, 19 bp, Mus musculus
  siRNA target sequence for Tuft1 (NM_011656.1,1127-1145).
ggcagtgtcaggatatcga

SEQ ID NO: 660166 - DNA, 19 bp, Mus musculus
  siRNA target sequence for Mobp (NM_008614.2,277-295).
ctgcaagagcggttgcttt

SEQ ID NO: 660167 - DNA, 19 bp, Mus musculus
  siRNA target sequence for 1190005J19Rik (NM_030037.1,579-597).
gcacagcacctgccaaata

SEQ ID NO: 660168 - DNA, 19 bp, Mus musculus
  siRNA target sequence for 1190005J19Rik (NM_030037.1,591-609).
ccaaatacacggtattcga

SEQ ID NO: 660169 - DNA, 19 bp, Mus musculus
  siRNA target sequence for 1190005J19Rik (NM_030037.1,592-610).
caaatacacggtattcgat

SEQ ID NO: 660170 - DNA, 19 bp, Mus musculus
  siRNA target sequence for 1190005J19Rik (NM_030037.1,630-648).
ctcagtcctgcattgacat

SEQ ID NO: 660171 - DNA, 19 bp, Mus musculus
  siRNA target sequence for 1190005J19Rik (NM_030037.1,636-654).
cctgcattgacattgtgat

SEQ ID NO: 660172 - DNA, 19 bp, Mus musculus
  siRNA target sequence for 1190005J19Rik (NM_030037.1,669-687).
ccgtccccagccactatga

SEQ ID NO: 660173 - DNA, 19 bp, Mus musculus
  siRNA target sequence for 1190005J19Rik (NM_030037.1,735-753).
gacgagtggttggaagaaa

SEQ ID NO: 660174 - DNA, 19 bp, Mus musculus
  siRNA target sequence for 1190005J19Rik (NM_030037.1,855-873).
ccccagccagacatcttca

SEQ ID NO: 660175 - DNA, 19 bp, Mus musculus
  siRNA target sequence for 2310014B08Rik (NM_027998.2,256-274).
cctgcgggttgctgcttaa

SEQ ID NO: 660176 - DNA, 19 bp, Mus musculus
  siRNA target sequence for 2310014B08Rik (NM_027998.2,257-275).
ctgcgggttgctgcttaat

SEQ ID NO: 660177 - DNA, 19 bp, Mus musculus
  siRNA target sequence for 2310014B08Rik (NM_027998.2,259-277).
gcgggttgctgcttaatct

SEQ ID NO: 660178 - DNA, 19 bp, Mus musculus
  siRNA target sequence for 2310014B08Rik (NM_027998.2,408-426).
cccgacgagtggaactact

SEQ ID NO: 660179 - DNA, 19 bp, Mus musculus
  siRNA target sequence for 2310014B08Rik (NM_027998.2,409-427).
ccgacgagtggaactactt

SEQ ID NO: 660180 - DNA, 19 bp, Mus musculus
  siRNA target sequence for 2310014B08Rik (NM_027998.2,604-622).
cggtctcctggtataacca

SEQ ID NO: 660181 - DNA, 19 bp, Mus musculus
  siRNA target sequence for 2310014B08Rik (NM_027998.2,610-628).
cctggtataaccacttctt

SEQ ID NO: 660182 - DNA, 19 bp, Mus musculus
  siRNA target sequence for 2310014B08Rik (NM_027998.2,865-883).
cacctgccatcaagtacta

SEQ ID NO: 660183 - DNA, 19 bp, Mus musculus
  siRNA target sequence for 2310014B08Rik (NM_027998.2,867-885).
cctgccatcaagtactaca

SEQ ID NO: 660184 - DNA, 19 bp, Mus musculus
  siRNA target sequence for 3110045G13Rik (NM_028460.1,528-546).
cccagcctacggttgtcta

SEQ ID NO: 660185 - DNA, 19 bp, Mus musculus
  siRNA target sequence for 3110045G13Rik (NM_028460.1,776-794).
cactgtggcaacaacagtt

SEQ ID NO: 660186 - DNA, 19 bp, Mus musculus
  siRNA target sequence for 3110045G13Rik (NM_028460.1,882-900).
gtcctgcctgccagtttga

SEQ ID NO: 660187 - DNA, 19 bp, Mus musculus
  siRNA target sequence for 3110045G13Rik (NM_028460.1,966-984).
caggacccagctgtaatgt

SEQ ID NO: 660188 - DNA, 19 bp, Mus musculus
  siRNA target sequence for 3110045G13Rik (NM_028460.1,1087-1105).
gggctggatgggtgtcatt

SEQ ID NO: 660189 - DNA, 19 bp, Mus musculus
  siRNA target sequence for 3110045G13Rik (NM_028460.1,1088-1106).
ggctggatgggtgtcattt

SEQ ID NO: 660190 - DNA, 19 bp, Mus musculus
  siRNA target sequence for 3110045G13Rik (NM_028460.1,1090-1108).
ctggatgggtgtcatttgt

SEQ ID NO: 660191 - DNA, 19 bp, Mus musculus
  siRNA target sequence for 3110045G13Rik (NM_028460.1,1625-1643).
cctcactgcgctaacctat

SEQ ID NO: 660192 - DNA, 19 bp, Mus musculus
  siRNA target sequence for 3110045G13Rik (NM_028460.1,1652-1670).
gacacttacgggatcaact

SEQ ID NO: 660193 - DNA, 19 bp, Mus musculus
  siRNA target sequence for 3110045G13Rik (NM_028460.1,2048-2066).
ggagccaactgcagtaaca

SEQ ID NO: 660194 - DNA, 19 bp, Mus musculus
  siRNA target sequence for 3110045G13Rik (NM_028460.1,2065-2083).
cacctgtacctgcaagaat

SEQ ID NO: 660195 - DNA, 19 bp, Mus musculus
  siRNA target sequence for 3110045G13Rik (NM_028460.1,2189-2207).
gtgcaatgcaagtgtaaca

SEQ ID NO: 660196 - DNA, 19 bp, Mus musculus
  siRNA target sequence for 3110045G13Rik (NM_028460.1,2360-2378).
caggatgggagctgtatct

SEQ ID NO: 660197 - DNA, 19 bp, Mus musculus
  siRNA target sequence for 3110045G13Rik (NM_028460.1,2523-2541).
gtggtgcagactgcaaaat

SEQ ID NO: 660198 - DNA, 19 bp, Mus musculus
  siRNA target sequence for 3110045G13Rik (NM_028460.1,2549-2567).
caggagtccttcaccataa

SEQ ID NO: 660199 - DNA, 19 bp, Mus musculus
  siRNA target sequence for 3110045G13Rik (NM_028460.1,2756-2774).
gatgtctctccgagctata

SEQ ID NO: 660200 - DNA, 19 bp, Mus musculus
  siRNA target sequence for 3110045G13Rik (NM_028460.1,2766-2784).
cgagctatagtcactacta

SEQ ID NO: 660201 - DNA, 19 bp, Mus musculus
  siRNA target sequence for 3110045G13Rik (NM_028460.1,2977-2995).
ccacctggaccgaagctat

SEQ ID NO: 660202 - DNA, 19 bp, Mus musculus
  siRNA target sequence for 3110045G13Rik (NM_028460.1,2978-2996).
cacctggaccgaagctata

SEQ ID NO: 660203 - DNA, 19 bp, Mus musculus
  siRNA target sequence for 3110045G13Rik (NM_028460.1,3024-3042).
cgggaccattctgtcataa

SEQ ID NO: 660204 - DNA, 19 bp, Mus musculus
  siRNA target sequence for 3110045G13Rik (NM_028460.1,3025-3043).
gggaccattctgtcataaa

SEQ ID NO: 660205 - DNA, 19 bp, Mus musculus
  siRNA target sequence for 3110045G13Rik (NM_028460.1,3065-3083).
ctaggggcaagcgttatgt

SEQ ID NO: 660206 - DNA, 19 bp, Mus musculus
  siRNA target sequence for 3110045G13Rik (NM_028460.1,3274-3292).
cagccccttgagccataat

SEQ ID NO: 660207 - DNA, 19 bp, Mus musculus
  siRNA target sequence for 3110045G13Rik (NM_028460.1,3276-3294).
gccccttgagccataatga

SEQ ID NO: 660208 - DNA, 19 bp, Mus musculus
  siRNA target sequence for 3110045G13Rik (NM_028460.1,3277-3295).
ccccttgagccataatgaa

SEQ ID NO: 660209 - DNA, 19 bp, Mus musculus
  siRNA target sequence for 3110045G13Rik (NM_028460.1,3367-3385).
ccatatccctggacactat

SEQ ID NO: 660210 - DNA, 19 bp, Mus musculus
  siRNA target sequence for 4632419I22Rik (NM_175205.2,500-518).
cccttcccctggtactgta

SEQ ID NO: 660211 - DNA, 19 bp, Mus musculus
  siRNA target sequence for 4632419I22Rik (NM_175205.2,501-519).
ccttcccctggtactgtat

SEQ ID NO: 660212 - DNA, 19 bp, Mus musculus
  siRNA target sequence for 4632419I22Rik (NM_175205.2,559-577).
caccagccacgcaacctaa

SEQ ID NO: 660213 - DNA, 19 bp, Mus musculus
  siRNA target sequence for 4632419I22Rik (NM_175205.2,574-592).
ctaacgtggcaggtgatat

SEQ ID NO: 660214 - DNA, 19 bp, Mus musculus
  siRNA target sequence for 4632419I22Rik (NM_175205.2,604-622).
gacactatttggagtctat

SEQ ID NO: 660215 - DNA, 19 bp, Mus musculus
  siRNA target sequence for 4632419I22Rik (NM_175205.2,672-690).
ctgtaagttggctatagga

SEQ ID NO: 660216 - DNA, 19 bp, Mus musculus
  siRNA target sequence for 4632419I22Rik (NM_175205.2,746-764).
caccccctccgtatgtaga

SEQ ID NO: 660217 - DNA, 19 bp, Mus musculus
  siRNA target sequence for 4632419I22Rik (NM_175205.2,748-766).
ccccctccgtatgtagaaa

SEQ ID NO: 660218 - DNA, 19 bp, Mus musculus
  siRNA target sequence for 4632419I22Rik (NM_175205.2,749-767).
cccctccgtatgtagaaaa

SEQ ID NO: 660219 - DNA, 19 bp, Mus musculus
  siRNA target sequence for 4632419I22Rik (NM_175205.2,750-768).
ccctccgtatgtagaaaaa

SEQ ID NO: 660220 - DNA, 19 bp, Mus musculus
  siRNA target sequence for 4632419I22Rik (NM_175205.2,1093-1111).
ctagaatggacaaaaggat

SEQ ID NO: 660221 - DNA, 19 bp, Mus musculus
  siRNA target sequence for 4632419I22Rik (NM_175205.2,1199-1217).
ctttaggccccaacaaagt

SEQ ID NO: 660222 - DNA, 19 bp, Mus musculus
  siRNA target sequence for 4632419I22Rik (NM_175205.2,1218-1236).
cttggccccagatgagata

SEQ ID NO: 660223 - DNA, 19 bp, Mus musculus
  siRNA target sequence for 4632419I22Rik (NM_175205.2,1221-1239).
ggccccagatgagataaat

SEQ ID NO: 660224 - DNA, 19 bp, Mus musculus
  siRNA target sequence for 4632419I22Rik (NM_175205.2,1246-1264).
ccaacacccccctctagtt

SEQ ID NO: 660225 - DNA, 19 bp, Mus musculus
  siRNA target sequence for 4632419I22Rik (NM_175205.2,1295-1313).
gtactgtggctccttcaaa

SEQ ID NO: 660226 - DNA, 19 bp, Mus musculus
  siRNA target sequence for 4930517I18Rik (NM_175214.3,95-113).
cgaatacccagcagattat

SEQ ID NO: 660227 - DNA, 19 bp, Mus musculus
  siRNA target sequence for 4930517I18Rik (NM_175214.3,114-132).
cattgggagagatagagtt

SEQ ID NO: 660228 - DNA, 19 bp, Mus musculus
  siRNA target sequence for 4930517I18Rik (NM_175214.3,118-136).
gggagagatagagttttca

SEQ ID NO: 660229 - DNA, 19 bp, Mus musculus
  siRNA target sequence for 4930517I18Rik (NM_175214.3,164-182).
ccactcaggatgaagttta

SEQ ID NO: 660230 - DNA, 19 bp, Mus musculus
  siRNA target sequence for 4930517I18Rik (NM_175214.3,171-189).
ggatgaagtttataacaca

SEQ ID NO: 660231 - DNA, 19 bp, Mus musculus
  siRNA target sequence for 4930517I18Rik (NM_175214.3,213-231).
gctcatcgagggctataat

SEQ ID NO: 660232 - DNA, 19 bp, Mus musculus
  siRNA target sequence for 4930517I18Rik (NM_175214.3,222-240).
gggctataatgcaactgtt

SEQ ID NO: 660233 - DNA, 19 bp, Mus musculus
  siRNA target sequence for 4930517I18Rik (NM_175214.3,223-241).
ggctataatgcaactgttt

SEQ ID NO: 660234 - DNA, 19 bp, Mus musculus
  siRNA target sequence for 4930517I18Rik (NM_175214.3,224-242).
gctataatgcaactgtttt

SEQ ID NO: 660235 - DNA, 19 bp, Mus musculus
  siRNA target sequence for 4930517I18Rik (NM_175214.3,302-320).
cagttgtggagggtcaaaa

SEQ ID NO: 660236 - DNA, 19 bp, Mus musculus
  siRNA target sequence for 4930517I18Rik (NM_175214.3,334-352).
cgagctatccaagaaatat

SEQ ID NO: 660237 - DNA, 19 bp, Mus musculus
  siRNA target sequence for 4930517I18Rik (NM_175214.3,335-353).
gagctatccaagaaatatt

SEQ ID NO: 660238 - DNA, 19 bp, Mus musculus
  siRNA target sequence for 4930517I18Rik (NM_175214.3,367-385).
gaaaatcctagcattgact

SEQ ID NO: 660239 - DNA, 19 bp, Mus musculus
  siRNA target sequence for 4930517I18Rik (NM_175214.3,397-415).
gtgtcgtatatagaagttt

SEQ ID NO: 660240 - DNA, 19 bp, Mus musculus
  siRNA target sequence for 4930517I18Rik (NM_175214.3,442-460).
gagttggagacgtctatga

SEQ ID NO: 660241 - DNA, 19 bp, Mus musculus
  siRNA target sequence for 4930517I18Rik (NM_175214.3,465-483).
ccttcacatccgagaagat

SEQ ID NO: 660242 - DNA, 19 bp, Mus musculus
  siRNA target sequence for 4930517I18Rik (NM_175214.3,614-632).
gtagatcccacgctatttt

SEQ ID NO: 660243 - DNA, 19 bp, Mus musculus
  siRNA target sequence for 4930517I18Rik (NM_175214.3,620-638).
cccacgctattttcacaat

SEQ ID NO: 660244 - DNA, 19 bp, Mus musculus
  siRNA target sequence for 4930517I18Rik (NM_175214.3,621-639).
ccacgctattttcacaata

SEQ ID NO: 660245 - DNA, 19 bp, Mus musculus
  siRNA target sequence for 4930517I18Rik (NM_175214.3,622-640).
cacgctattttcacaataa

SEQ ID NO: 660246 - DNA, 19 bp, Mus musculus
  siRNA target sequence for 4930517I18Rik (NM_175214.3,690-708).
gtactcacatcggcatatt

SEQ ID NO: 660247 - DNA, 19 bp, Mus musculus
  siRNA target sequence for 4930517I18Rik (NM_175214.3,700-718).
cggcatattgtctccaaat

SEQ ID NO: 660248 - DNA, 19 bp, Mus musculus
  siRNA target sequence for 4930517I18Rik (NM_175214.3,764-782).
ggaacactggtgaacgatt

SEQ ID NO: 660249 - DNA, 19 bp, Mus musculus
  siRNA target sequence for 4930517I18Rik (NM_175214.3,768-786).
cactggtgaacgattcaaa

SEQ ID NO: 660250 - DNA, 19 bp, Mus musculus
  siRNA target sequence for 4930517I18Rik (NM_175214.3,770-788).
ctggtgaacgattcaaaga

SEQ ID NO: 660251 - DNA, 19 bp, Mus musculus
  siRNA target sequence for 4930517I18Rik (NM_175214.3,772-790).
ggtgaacgattcaaagagt

SEQ ID NO: 660252 - DNA, 19 bp, Mus musculus
  siRNA target sequence for 4930517I18Rik (NM_175214.3,813-831).
gcttgctctaggaaacgta

SEQ ID NO: 660253 - DNA, 19 bp, Mus musculus
  siRNA target sequence for 4930517I18Rik (NM_175214.3,814-832).
cttgctctaggaaacgtaa

SEQ ID NO: 660254 - DNA, 19 bp, Mus musculus
  siRNA target sequence for 4930517I18Rik (NM_175214.3,853-871).
cgcaggaagagctctcata

SEQ ID NO: 660255 - DNA, 19 bp, Mus musculus
  siRNA target sequence for 4930517I18Rik (NM_175214.3,854-872).
gcaggaagagctctcatat

SEQ ID NO: 660256 - DNA, 19 bp, Mus musculus
  siRNA target sequence for 4930517I18Rik (NM_175214.3,891-909).
gattacccggcttctgaaa

SEQ ID NO: 660257 - DNA, 19 bp, Mus musculus
  siRNA target sequence for 4930517I18Rik (NM_175214.3,957-975).
cccgtcctcctcggatttt

SEQ ID NO: 660258 - DNA, 19 bp, Mus musculus
  siRNA target sequence for 4930517I18Rik (NM_175214.3,960-978).
gtcctcctcggattttgat

SEQ ID NO: 660259 - DNA, 19 bp, Mus musculus
  siRNA target sequence for 4930517I18Rik (NM_175214.3,962-980).
cctcctcggattttgatga

SEQ ID NO: 660260 - DNA, 19 bp, Mus musculus
  siRNA target sequence for 4930517I18Rik (NM_175214.3,1004-1022).
cgaacagagcacggaatat

SEQ ID NO: 660261 - DNA, 19 bp, Mus musculus
  siRNA target sequence for 4930517I18Rik (NM_175214.3,1005-1023).
gaacagagcacggaatatt

SEQ ID NO: 660262 - DNA, 19 bp, Mus musculus
  siRNA target sequence for 4930517I18Rik (NM_175214.3,1008-1026).
cagagcacggaatattaga

SEQ ID NO: 660263 - DNA, 19 bp, Mus musculus
  siRNA target sequence for 4930517I18Rik (NM_175214.3,1010-1028).
gagcacggaatattagaaa

SEQ ID NO: 660264 - DNA, 19 bp, Mus musculus
  siRNA target sequence for 4930517I18Rik (NM_175214.3,1053-1071).
ccaggcagaccgaatggat

SEQ ID NO: 660265 - DNA, 19 bp, Mus musculus
  siRNA target sequence for 4930517I18Rik (NM_175214.3,1063-1081).
cgaatggatgaaatggaat

SEQ ID NO: 660266 - DNA, 19 bp, Mus musculus
  siRNA target sequence for 4930517I18Rik (NM_175214.3,1168-1186).
gaccagaatcgaatccatt

SEQ ID NO: 660267 - DNA, 19 bp, Mus musculus
  siRNA target sequence for 4930517I18Rik (NM_175214.3,1239-1257).
ctgcatagagcaagcattt

SEQ ID NO: 660268 - DNA, 19 bp, Mus musculus
  siRNA target sequence for 4930517I18Rik (NM_175214.3,1259-1277).
cctttctggtggacttaaa

SEQ ID NO: 660269 - DNA, 19 bp, Mus musculus
  siRNA target sequence for 4930517I18Rik (NM_175214.3,1260-1278).
ctttctggtggacttaaaa

SEQ ID NO: 660270 - DNA, 19 bp, Mus musculus
  siRNA target sequence for 4930517I18Rik (NM_175214.3,1283-1301).
ctgtcaaactaaatcagaa

SEQ ID NO: 660271 - DNA, 19 bp, Mus musculus
  siRNA target sequence for 4930517I18Rik (NM_175214.3,1315-1333).
ctacaggagtggtttagca

SEQ ID NO: 660272 - DNA, 19 bp, Mus musculus
  siRNA target sequence for 4930517I18Rik (NM_175214.3,1439-1457).
gagaacttaagaaatacca

SEQ ID NO: 660273 - DNA, 19 bp, Mus musculus
  siRNA target sequence for 4930517I18Rik (NM_175214.3,1520-1538).
ggacccaagtgcagctaat

SEQ ID NO: 660274 - DNA, 19 bp, Mus musculus
  siRNA target sequence for 4930517I18Rik (NM_175214.3,1523-1541).
cccaagtgcagctaatgat

SEQ ID NO: 660275 - DNA, 19 bp, Mus musculus
  siRNA target sequence for 4930517I18Rik (NM_175214.3,1739-1757).
ctcatacggctccatttga

SEQ ID NO: 660276 - DNA, 19 bp, Mus musculus
  siRNA target sequence for 4930517I18Rik (NM_175214.3,1766-1784).
ggggacactatgtttacat

SEQ ID NO: 660277 - DNA, 19 bp, Mus musculus
  siRNA target sequence for 4930517I18Rik (NM_175214.3,1846-1864).
gtattcgctgggttcagaa

SEQ ID NO: 660278 - DNA, 19 bp, Mus musculus
  siRNA target sequence for 4930517I18Rik (NM_175214.3,1962-1980).
ggagaagcccagagttaga

SEQ ID NO: 660279 - DNA, 19 bp, Mus musculus
  siRNA target sequence for 4930517I18Rik (NM_175214.3,1963-1981).
gagaagcccagagttagat

SEQ ID NO: 660280 - DNA, 19 bp, Mus musculus
  siRNA target sequence for 4930517I18Rik (NM_175214.3,1965-1983).
gaagcccagagttagatct

SEQ ID NO: 660281 - DNA, 19 bp, Mus musculus
  siRNA target sequence for 4930517I18Rik (NM_175214.3,1968-1986).
gcccagagttagatctaga

SEQ ID NO: 660282 - DNA, 19 bp, Mus musculus
  siRNA target sequence for 4930517I18Rik (NM_175214.3,1969-1987).
cccagagttagatctagaa

SEQ ID NO: 660283 - DNA, 19 bp, Mus musculus
  siRNA target sequence for 4930517I18Rik (NM_175214.3,1988-2006).
gtcactcatgggccaaaaa

SEQ ID NO: 660284 - DNA, 19 bp, Mus musculus
  siRNA target sequence for 4930517I18Rik (NM_175214.3,2071-2089).
ctggggaatggagatttga

SEQ ID NO: 660285 - DNA, 19 bp, Mus musculus
  siRNA target sequence for 4930517I18Rik (NM_175214.3,2106-2124).
ggagagtcaagagataaat

SEQ ID NO: 660286 - DNA, 19 bp, Mus musculus
  siRNA target sequence for 4930517I18Rik (NM_175214.3,2107-2125).
gagagtcaagagataaatt

SEQ ID NO: 660287 - DNA, 19 bp, Mus musculus
  siRNA target sequence for 4930517I18Rik (NM_175214.3,2141-2159).
cttcagaactcatacttaa

SEQ ID NO: 660288 - DNA, 19 bp, Mus musculus
  siRNA target sequence for 4930517I18Rik (NM_175214.3,2144-2162).
cagaactcatacttaataa

SEQ ID NO: 660289 - DNA, 19 bp, Mus musculus
  siRNA target sequence for 4930517I18Rik (NM_175214.3,2201-2219).
ggatgaaagaagatctgat

SEQ ID NO: 660290 - DNA, 19 bp, Mus musculus
  siRNA target sequence for 4930517I18Rik (NM_175214.3,2257-2275).
gtaagcagacagtattctt

SEQ ID NO: 660291 - DNA, 19 bp, Mus musculus
  siRNA target sequence for 4930517I18Rik (NM_175214.3,2262-2280).
cagacagtattctttgaaa

SEQ ID NO: 660292 - DNA, 19 bp, Mus musculus
  siRNA target sequence for 4930517I18Rik (NM_175214.3,2381-2399).
ctttgaaggtaaaattaca

SEQ ID NO: 660293 - DNA, 19 bp, Mus musculus
  siRNA target sequence for 4930517I18Rik (NM_175214.3,2389-2407).
gtaaaattacagaaagagt

SEQ ID NO: 660294 - DNA, 19 bp, Mus musculus
  siRNA target sequence for 4930517I18Rik (NM_175214.3,2438-2456).
gagttcaggtcttacaaaa

SEQ ID NO: 660295 - DNA, 19 bp, Mus musculus
  siRNA target sequence for 4930517I18Rik (NM_175214.3,2440-2458).
gttcaggtcttacaaaaga

SEQ ID NO: 660296 - DNA, 19 bp, Mus musculus
  siRNA target sequence for 4930517I18Rik (NM_175214.3,2516-2534).
gtgagctggagcacaatgt

SEQ ID NO: 660297 - DNA, 19 bp, Mus musculus
  siRNA target sequence for 4930517I18Rik (NM_175214.3,2704-2722).
ggatttaacctgaacagaa

SEQ ID NO: 660298 - DNA, 19 bp, Mus musculus
  siRNA target sequence for 4930517I18Rik (NM_175214.3,2738-2756).
gaagtggggaccaattcca

SEQ ID NO: 660299 - DNA, 19 bp, Mus musculus
  siRNA target sequence for 4930517I18Rik (NM_175214.3,2774-2792).
ggaagtggttggatgaaga

SEQ ID NO: 660300 - DNA, 19 bp, Mus musculus
  siRNA target sequence for 4930517I18Rik (NM_175214.3,2942-2960).
gcacagatggtctcaaaat

SEQ ID NO: 660301 - DNA, 19 bp, Mus musculus
  siRNA target sequence for 4930517I18Rik (NM_175214.3,3193-3211).
ctggaagctgcgattgaat

SEQ ID NO: 660302 - DNA, 19 bp, Mus musculus
  siRNA target sequence for 4930517I18Rik (NM_175214.3,3199-3217).
gctgcgattgaattcaaga

SEQ ID NO: 660303 - DNA, 19 bp, Mus musculus
  siRNA target sequence for 4930517I18Rik (NM_175214.3,3261-3279).
ccagaacctctctcaaagt

SEQ ID NO: 660304 - DNA, 19 bp, Mus musculus
  siRNA target sequence for 4930517I18Rik (NM_175214.3,3369-3387).
gcgagaaacggaacgtaaa

SEQ ID NO: 660305 - DNA, 19 bp, Mus musculus
  siRNA target sequence for 4930517I18Rik (NM_175214.3,3371-3389).
gagaaacggaacgtaaaca

SEQ ID NO: 660306 - DNA, 19 bp, Mus musculus
  siRNA target sequence for 4930517I18Rik (NM_175214.3,3377-3395).
cggaacgtaaacaacagtt

SEQ ID NO: 660307 - DNA, 19 bp, Mus musculus
  siRNA target sequence for 4930517I18Rik (NM_175214.3,3420-3438).
ggttctagaacgggataat

SEQ ID NO: 660308 - DNA, 19 bp, Mus musculus
  siRNA target sequence for 4930517I18Rik (NM_175214.3,3439-3457).
gtggtccatgagttggaat

SEQ ID NO: 660309 - DNA, 19 bp, Mus musculus
  siRNA target sequence for 4930517I18Rik (NM_175214.3,3537-3555).
gctgttgcagcatttcaaa

SEQ ID NO: 660310 - DNA, 19 bp, Mus musculus
  siRNA target sequence for 4930517I18Rik (NM_175214.3,3565-3583).
ggagacagcattatagaaa

SEQ ID NO: 660311 - DNA, 19 bp, Mus musculus
  siRNA target sequence for 4930517I18Rik (NM_175214.3,3619-3637).
gaaaaggatctctacttct

SEQ ID NO: 660312 - DNA, 19 bp, Mus musculus
  siRNA target sequence for 4930517I18Rik (NM_175214.3,3764-3782).
ctgtgctttctgaagaact

SEQ ID NO: 660313 - DNA, 19 bp, Mus musculus
  siRNA target sequence for 4930517I18Rik (NM_175214.3,3788-3806).
gggcatctagaactgaaaa

SEQ ID NO: 660314 - DNA, 19 bp, Mus musculus
  siRNA target sequence for 4930517I18Rik (NM_175214.3,3825-3843).
cgaaagagaagtagacaat

SEQ ID NO: 660315 - DNA, 19 bp, Mus musculus
  siRNA target sequence for 4930517I18Rik (NM_175214.3,3832-3850).
gaagtagacaattcttcaa

SEQ ID NO: 660316 - DNA, 19 bp, Mus musculus
  siRNA target sequence for 4930517I18Rik (NM_175214.3,3948-3966).
gcagagcattgccgataaa

SEQ ID NO: 660317 - DNA, 19 bp, Mus musculus
  siRNA target sequence for 4930517I18Rik (NM_175214.3,3949-3967).
cagagcattgccgataaaa

SEQ ID NO: 660318 - DNA, 19 bp, Mus musculus
  siRNA target sequence for 4930517I18Rik (NM_175214.3,3951-3969).
gagcattgccgataaaaca

SEQ ID NO: 660319 - DNA, 19 bp, Mus musculus
  siRNA target sequence for 4930517I18Rik (NM_175214.3,4017-4035).
ccagcctgtgagaagtata

SEQ ID NO: 660320 - DNA, 19 bp, Mus musculus
  siRNA target sequence for 4930517I18Rik (NM_175214.3,4020-4038).
gcctgtgagaagtatagga

SEQ ID NO: 660321 - DNA, 19 bp, Mus musculus
  siRNA target sequence for 4930517I18Rik (NM_175214.3,4047-4065).
gggggtcaagcctgtcaaa

SEQ ID NO: 660322 - DNA, 19 bp, Mus musculus
  siRNA target sequence for 4930517I18Rik (NM_175214.3,4049-4067).
gggtcaagcctgtcaaact

SEQ ID NO: 660323 - DNA, 19 bp, Mus musculus
  siRNA target sequence for 4930517I18Rik (NM_175214.3,4051-4069).
gtcaagcctgtcaaactgt

SEQ ID NO: 660324 - DNA, 19 bp, Mus musculus
  siRNA target sequence for 4930517I18Rik (NM_175214.3,4068-4086).
gtgtcgcagagaattacgt

SEQ ID NO: 660325 - DNA, 19 bp, Mus musculus
  siRNA target sequence for Ap2a2 (NM_007459.2,154-172).
gaggcctagcggtcttcat

SEQ ID NO: 660326 - DNA, 19 bp, Mus musculus
  siRNA target sequence for Ap2a2 (NM_007459.2,156-174).
ggcctagcggtcttcatct

SEQ ID NO: 660327 - DNA, 19 bp, Mus musculus
  siRNA target sequence for Ap2a2 (NM_007459.2,176-194).
cgacatccgcaactgtaaa

SEQ ID NO: 660328 - DNA, 19 bp, Mus musculus
  siRNA target sequence for Ap2a2 (NM_007459.2,179-197).
catccgcaactgtaaaagt

SEQ ID NO: 660329 - DNA, 19 bp, Mus musculus
  siRNA target sequence for Ap2a2 (NM_007459.2,182-200).
ccgcaactgtaaaagtaaa

SEQ ID NO: 660330 - DNA, 19 bp, Mus musculus
  siRNA target sequence for Ap2a2 (NM_007459.2,228-246).
gaactggcaaatattagat

SEQ ID NO: 660331 - DNA, 19 bp, Mus musculus
  siRNA target sequence for Ap2a2 (NM_007459.2,235-253).
caaatattagatccaaatt

SEQ ID NO: 660332 - DNA, 19 bp, Mus musculus
  siRNA target sequence for Ap2a2 (NM_007459.2,267-285).
gctcttgatggctacagta

SEQ ID NO: 660333 - DNA, 19 bp, Mus musculus
  siRNA target sequence for Ap2a2 (NM_007459.2,268-286).
ctcttgatggctacagtaa

SEQ ID NO: 660334 - DNA, 19 bp, Mus musculus
  siRNA target sequence for Ap2a2 (NM_007459.2,425-443).
ggtgaactcgaatagtgaa

SEQ ID NO: 660335 - DNA, 19 bp, Mus musculus
  siRNA target sequence for Ap2a2 (NM_007459.2,441-459).
gaactgatccggttgatta

SEQ ID NO: 660336 - DNA, 19 bp, Mus musculus
  siRNA target sequence for Ap2a2 (NM_007459.2,1373-1391).
ctccatccgagaggaaatt

SEQ ID NO: 660337 - DNA, 19 bp, Mus musculus
  siRNA target sequence for Ap2a2 (NM_007459.2,1509-1527).
cgcgtcatccagattgtca

SEQ ID NO: 660338 - DNA, 19 bp, Mus musculus
  siRNA target sequence for Ap2a2 (NM_007459.2,1510-1528).
gcgtcatccagattgtcat

SEQ ID NO: 660339 - DNA, 19 bp, Mus musculus
  siRNA target sequence for Ap2a2 (NM_007459.2,2021-2039).
gcgaagcatcgatgtgaat

SEQ ID NO: 660340 - DNA, 19 bp, Mus musculus
  siRNA target sequence for Ap2a2 (NM_007459.2,2471-2489).
gcaacaagtggtcaacatt

SEQ ID NO: 660341 - DNA, 19 bp, Mus musculus
  siRNA target sequence for B930011D01Rik (NM_145467.1,531-549).
gtgacctgaccaaaaaaat

SEQ ID NO: 660342 - DNA, 19 bp, Mus musculus
  siRNA target sequence for B930011D01Rik (NM_145467.1,564-582).
gcaagaactcccaagatgt

SEQ ID NO: 660343 - DNA, 19 bp, Mus musculus
  siRNA target sequence for B930011D01Rik (NM_145467.1,608-626).
cactgtggcaggtgtaagt

SEQ ID NO: 660344 - DNA, 19 bp, Mus musculus
  siRNA target sequence for B930011D01Rik (NM_145467.1,610-628).
ctgtggcaggtgtaagtgt

SEQ ID NO: 660345 - DNA, 19 bp, Mus musculus
  siRNA target sequence for B930011D01Rik (NM_145467.1,616-634).
caggtgtaagtgtgataat

SEQ ID NO: 660346 - DNA, 19 bp, Mus musculus
  siRNA target sequence for B930011D01Rik (NM_145467.1,619-637).
gtgtaagtgtgataattca

SEQ ID NO: 660347 - DNA, 19 bp, Mus musculus
  siRNA target sequence for B930011D01Rik (NM_145467.1,644-662).
catggactcatttatggta

SEQ ID NO: 660348 - DNA, 19 bp, Mus musculus
  siRNA target sequence for B930011D01Rik (NM_145467.1,647-665).
ggactcatttatggtaaat

SEQ ID NO: 660349 - DNA, 19 bp, Mus musculus
  siRNA target sequence for B930011D01Rik (NM_145467.1,648-666).
gactcatttatggtaaatt

SEQ ID NO: 660350 - DNA, 19 bp, Mus musculus
  siRNA target sequence for B930011D01Rik (NM_145467.1,660-678).
gtaaattttgtgaatgtga

SEQ ID NO: 660351 - DNA, 19 bp, Mus musculus
  siRNA target sequence for B930011D01Rik (NM_145467.1,719-737).
ggaggccatgggaagtgtt

SEQ ID NO: 660352 - DNA, 19 bp, Mus musculus
  siRNA target sequence for B930011D01Rik (NM_145467.1,720-738).
gaggccatgggaagtgtta

SEQ ID NO: 660353 - DNA, 19 bp, Mus musculus
  siRNA target sequence for B930011D01Rik (NM_145467.1,764-782).
ggttggcatggcgataaat

SEQ ID NO: 660354 - DNA, 19 bp, Mus musculus
  siRNA target sequence for B930011D01Rik (NM_145467.1,856-874).
caacagaggaacatgtgta

SEQ ID NO: 660355 - DNA, 19 bp, Mus musculus
  siRNA target sequence for B930011D01Rik (NM_145467.1,859-877).
cagaggaacatgtgtatgt

SEQ ID NO: 660356 - DNA, 19 bp, Mus musculus
  siRNA target sequence for B930011D01Rik (NM_145467.1,913-931).
ggactggggagacattcat

SEQ ID NO: 660357 - DNA, 19 bp, Mus musculus
  siRNA target sequence for B930011D01Rik (NM_145467.1,977-995).
gatcgatactctgatgatt

SEQ ID NO: 660358 - DNA, 19 bp, Mus musculus
  siRNA target sequence for B930011D01Rik (NM_145467.1,980-998).
cgatactctgatgatttct

SEQ ID NO: 660359 - DNA, 19 bp, Mus musculus
  siRNA target sequence for B930011D01Rik (NM_145467.1,1002-1020).
caggtcatgggcagtgtaa

SEQ ID NO: 660360 - DNA, 19 bp, Mus musculus
  siRNA target sequence for B930011D01Rik (NM_145467.1,1114-1132).
gtgccagggtagttctgat

SEQ ID NO: 660361 - DNA, 19 bp, Mus musculus
  siRNA target sequence for B930011D01Rik (NM_145467.1,1117-1135).
ccagggtagttctgatctt

SEQ ID NO: 660362 - DNA, 19 bp, Mus musculus
  siRNA target sequence for B930011D01Rik (NM_145467.1,1164-1182).
gtggcagatgcacttgtta

SEQ ID NO: 660363 - DNA, 19 bp, Mus musculus
  siRNA target sequence for B930011D01Rik (NM_145467.1,1331-1349).
caacacctgcggaagtgta

SEQ ID NO: 660364 - DNA, 19 bp, Mus musculus
  siRNA target sequence for B930011D01Rik (NM_145467.1,1334-1352).
cacctgcggaagtgtaata

SEQ ID NO: 660365 - DNA, 19 bp, Mus musculus
  siRNA target sequence for B930011D01Rik (NM_145467.1,1337-1355).
ctgcggaagtgtaatatga

SEQ ID NO: 660366 - DNA, 19 bp, Mus musculus
  siRNA target sequence for B930011D01Rik (NM_145467.1,1339-1357).
gcggaagtgtaatatgaca

SEQ ID NO: 660367 - DNA, 19 bp, Mus musculus
  siRNA target sequence for B930011D01Rik (NM_145467.1,1409-1427).
gggaagggttcttgtcatt

SEQ ID NO: 660368 - DNA, 19 bp, Mus musculus
  siRNA target sequence for B930011D01Rik (NM_145467.1,1446-1464).
ctggagaagagtggtatat

SEQ ID NO: 660369 - DNA, 19 bp, Mus musculus
  siRNA target sequence for B930011D01Rik (NM_145467.1,1525-1543).
cacagggaatggaatctgt

SEQ ID NO: 660370 - DNA, 19 bp, Mus musculus
  siRNA target sequence for B930011D01Rik (NM_145467.1,1571-1589).
ggatggaatggaaatgcat

SEQ ID NO: 660371 - DNA, 19 bp, Mus musculus
  siRNA target sequence for B930011D01Rik (NM_145467.1,1597-1615).
ctggcttggtaccgaatat

SEQ ID NO: 660372 - DNA, 19 bp, Mus musculus
  siRNA target sequence for B930011D01Rik (NM_145467.1,1601-1619).
cttggtaccgaatatcctt

SEQ ID NO: 660373 - DNA, 19 bp, Mus musculus
  siRNA target sequence for BC035947 (NM_178117.2,505-523).
gccctggaaaggactacta

SEQ ID NO: 660374 - DNA, 19 bp, Mus musculus
  siRNA target sequence for BC035947 (NM_178117.2,697-715).
gttagctgcaggatctctt

SEQ ID NO: 660375 - DNA, 19 bp, Mus musculus
  siRNA target sequence for BC035947 (NM_178117.2,873-891).
gcagaaggcttcgacaaaa

SEQ ID NO: 660376 - DNA, 19 bp, Mus musculus
  siRNA target sequence for BC035947 (NM_178117.2,1311-1329).
ccaaatccctgactcaaat

SEQ ID NO: 660377 - DNA, 19 bp, Mus musculus
  siRNA target sequence for BC035947 (NM_178117.2,1668-1686).
ctcctacccacaaacattt

SEQ ID NO: 660378 - DNA, 19 bp, Mus musculus
  siRNA target sequence for C230069C04 (NM_172929.1,1350-1368).
gcatactacaaccctattt

SEQ ID NO: 660379 - DNA, 19 bp, Mus musculus
  siRNA target sequence for C330046G03Rik (NM_145855.1,111-129).
gaaccccgtaccacaagtt

SEQ ID NO: 660380 - DNA, 19 bp, Mus musculus
  siRNA target sequence for C330046G03Rik (NM_145855.1,209-227).
ccttccacccaagaagaat

SEQ ID NO: 660381 - DNA, 19 bp, Mus musculus
  siRNA target sequence for C330046G03Rik (NM_145855.1,455-473).
ggacataatggctgatgtt

SEQ ID NO: 660382 - DNA, 19 bp, Mus musculus
  siRNA target sequence for C330046G03Rik (NM_145855.1,456-474).
gacataatggctgatgttt

SEQ ID NO: 660383 - DNA, 19 bp, Mus musculus
  siRNA target sequence for C330046G03Rik (NM_145855.1,480-498).
ccacccaccctatcagtaa

SEQ ID NO: 660384 - DNA, 19 bp, Mus musculus
  siRNA target sequence for C330046G03Rik (NM_145855.1,499-517).
gaggagcccggttcttcat

SEQ ID NO: 660385 - DNA, 19 bp, Mus musculus
  siRNA target sequence for C330046G03Rik (NM_145855.1,521-539).
cagccggaaaagaaccaaa

SEQ ID NO: 660386 - DNA, 19 bp, Mus musculus
  siRNA target sequence for C330046G03Rik (NM_145855.1,542-560).
cctattcacaggtgtgata

SEQ ID NO: 660387 - DNA, 19 bp, Mus musculus
  siRNA target sequence for C330046G03Rik (NM_145855.1,667-685).
cagggaagcctgatgataa

SEQ ID NO: 660388 - DNA, 19 bp, Mus musculus
  siRNA target sequence for C330046G03Rik (NM_145855.1,703-721).
cctatgaagctgacatgaa

SEQ ID NO: 660389 - DNA, 19 bp, Mus musculus
  siRNA target sequence for C330046G03Rik (NM_145855.1,787-805).
cccaaaaggggctatacct

SEQ ID NO: 660390 - DNA, 19 bp, Mus musculus
  siRNA target sequence for C330046G03Rik (NM_145855.1,851-869).
gctggactacgttgaagaa

SEQ ID NO: 660391 - DNA, 19 bp, Mus musculus
  siRNA target sequence for C330046G03Rik (NM_145855.1,953-971).
caaccggaaggctagatca

SEQ ID NO: 660392 - DNA, 19 bp, Mus musculus
  siRNA target sequence for C330046G03Rik (NM_145855.1,962-980).
ggctagatcagccatctat

SEQ ID NO: 660393 - DNA, 19 bp, Mus musculus
  siRNA target sequence for C330046G03Rik (NM_145855.1,963-981).
gctagatcagccatctata

SEQ ID NO: 660394 - DNA, 19 bp, Mus musculus
  siRNA target sequence for C330046G03Rik (NM_145855.1,1035-1053).
cagtcatggcgacatttca

SEQ ID NO: 660395 - DNA, 19 bp, Mus musculus
  siRNA target sequence for C330046G03Rik (NM_145855.1,1082-1100).
caactttgggccaaatgaa

SEQ ID NO: 660396 - DNA, 19 bp, Mus musculus
  siRNA target sequence for C330046G03Rik (NM_145855.1,1532-1550).
ccttgcagtggcaaacagt

SEQ ID NO: 660397 - DNA, 19 bp, Mus musculus
  siRNA target sequence for C330046G03Rik (NM_145855.1,1627-1645).
ccgctcagacctttgtcaa

SEQ ID NO: 660398 - DNA, 19 bp, Mus musculus
  siRNA target sequence for Catna1 (NM_009818.1,81-99).
cgtccacgcaggcaacata

SEQ ID NO: 660399 - DNA, 19 bp, Mus musculus
  siRNA target sequence for Catna1 (NM_009818.1,82-100).
gtccacgcaggcaacataa

SEQ ID NO: 660400 - DNA, 19 bp, Mus musculus
  siRNA target sequence for Catna1 (NM_009818.1,506-524).
cagatgtctacaaattact

SEQ ID NO: 660401 - DNA, 19 bp, Mus musculus
  siRNA target sequence for Catna1 (NM_009818.1,538-556).
gttgtggaagatggtatat

SEQ ID NO: 660402 - DNA, 19 bp, Mus musculus
  siRNA target sequence for Catna1 (NM_009818.1,541-559).
gtggaagatggtatattga

SEQ ID NO: 660403 - DNA, 19 bp, Mus musculus
  siRNA target sequence for Catna1 (NM_009818.1,547-565).
gatggtatattgaaactga

SEQ ID NO: 660404 - DNA, 19 bp, Mus musculus
  siRNA target sequence for Catna1 (NM_009818.1,583-601).
caagacttagggatacagt

SEQ ID NO: 660405 - DNA, 19 bp, Mus musculus
  siRNA target sequence for Catna1 (NM_009818.1,622-640).
gtagataagctgaacatca

SEQ ID NO: 660406 - DNA, 19 bp, Mus musculus
  siRNA target sequence for Catna1 (NM_009818.1,786-804).
ggccaaccgggacttgata

SEQ ID NO: 660407 - DNA, 19 bp, Mus musculus
  siRNA target sequence for Catna1 (NM_009818.1,787-805).
gccaaccgggacttgatat

SEQ ID NO: 660408 - DNA, 19 bp, Mus musculus
  siRNA target sequence for Catna1 (NM_009818.1,819-837).
gcaggccgtcacaggaatt

SEQ ID NO: 660409 - DNA, 19 bp, Mus musculus
  siRNA target sequence for Catna1 (NM_009818.1,823-841).
gccgtcacaggaatttcta

SEQ ID NO: 660410 - DNA, 19 bp, Mus musculus
  siRNA target sequence for Catna1 (NM_009818.1,825-843).
cgtcacaggaatttctaat

SEQ ID NO: 660411 - DNA, 19 bp, Mus musculus
  siRNA target sequence for Catna1 (NM_009818.1,852-870).
ggctactgcatcagatgat

SEQ ID NO: 660412 - DNA, 19 bp, Mus musculus
  siRNA target sequence for Catna1 (NM_009818.1,907-925).
gcatacgctctcaacaact

SEQ ID NO: 660413 - DNA, 19 bp, Mus musculus
  siRNA target sequence for Catna1 (NM_009818.1,908-926).
catacgctctcaacaactt

SEQ ID NO: 660414 - DNA, 19 bp, Mus musculus
  siRNA target sequence for Catna1 (NM_009818.1,913-931).
gctctcaacaactttgata

SEQ ID NO: 660415 - DNA, 19 bp, Mus musculus
  siRNA target sequence for Catna1 (NM_009818.1,918-936).
caacaactttgataaacaa

SEQ ID NO: 660416 - DNA, 19 bp, Mus musculus
  siRNA target sequence for Catna1 (NM_009818.1,990-1008).
ggagcgcctggaaagcatt

SEQ ID NO: 660417 - DNA, 19 bp, Mus musculus
  siRNA target sequence for Catna1 (NM_009818.1,991-1009).
gagcgcctggaaagcatta

SEQ ID NO: 660418 - DNA, 19 bp, Mus musculus
  siRNA target sequence for Catna1 (NM_009818.1,994-1012).
cgcctggaaagcattatta

SEQ ID NO: 660419 - DNA, 19 bp, Mus musculus
  siRNA target sequence for Catna1 (NM_009818.1,1068-1086).
cattgtggcagagtgtaat

SEQ ID NO: 660420 - DNA, 19 bp, Mus musculus
  siRNA target sequence for Catna1 (NM_009818.1,1130-1148).
gcaacgctggacgtaaaga

SEQ ID NO: 660421 - DNA, 19 bp, Mus musculus
  siRNA target sequence for Catna1 (NM_009818.1,1131-1149).
caacgctggacgtaaagaa

SEQ ID NO: 660422 - DNA, 19 bp, Mus musculus
  siRNA target sequence for Catna1 (NM_009818.1,1134-1152).
cgctggacgtaaagaaaga

SEQ ID NO: 660423 - DNA, 19 bp, Mus musculus
  siRNA target sequence for Catna1 (NM_009818.1,1135-1153).
gctggacgtaaagaaagaa

SEQ ID NO: 660424 - DNA, 19 bp, Mus musculus
  siRNA target sequence for Catna1 (NM_009818.1,1160-1178).
cactcaactctgcaataga

SEQ ID NO: 660425 - DNA, 19 bp, Mus musculus
  siRNA target sequence for Catna1 (NM_009818.1,1233-1251).
ggaccacgtatcagattct

SEQ ID NO: 660426 - DNA, 19 bp, Mus musculus
  siRNA target sequence for Catna1 (NM_009818.1,1260-1278).
gaccaatgtccctctatta

SEQ ID NO: 660427 - DNA, 19 bp, Mus musculus
  siRNA target sequence for Catna1 (NM_009818.1,1262-1280).
ccaatgtccctctattagt

SEQ ID NO: 660428 - DNA, 19 bp, Mus musculus
  siRNA target sequence for Catna1 (NM_009818.1,1271-1289).
ctctattagtactgattga

SEQ ID NO: 660429 - DNA, 19 bp, Mus musculus
  siRNA target sequence for Catna1 (NM_009818.1,1373-1391).
ccaacctggcctgttcaat

SEQ ID NO: 660430 - DNA, 19 bp, Mus musculus
  siRNA target sequence for Catna1 (NM_009818.1,1413-1431).
gaagcttgtccgaatgtct

SEQ ID NO: 660431 - DNA, 19 bp, Mus musculus
  siRNA target sequence for Catna1 (NM_009818.1,1452-1470).
gtgtcctcaggttatcaat

SEQ ID NO: 660432 - DNA, 19 bp, Mus musculus
  siRNA target sequence for Catna1 (NM_009818.1,1487-1505).
cagcaaagccgcagagtaa

SEQ ID NO: 660433 - DNA, 19 bp, Mus musculus
  siRNA target sequence for Catna1 (NM_009818.1,1490-1508).
caaagccgcagagtaaact

SEQ ID NO: 660434 - DNA, 19 bp, Mus musculus
  siRNA target sequence for Catna1 (NM_009818.1,1573-1591).
gctgttgatgacattactt

SEQ ID NO: 660435 - DNA, 19 bp, Mus musculus
  siRNA target sequence for Catna1 (NM_009818.1,1761-1779).
cgagccaggagtttacaca

SEQ ID NO: 660436 - DNA, 19 bp, Mus musculus
  siRNA target sequence for Catna1 (NM_009818.1,2106-2124).
ggagcaaaaagcaaagatt

SEQ ID NO: 660437 - DNA, 19 bp, Mus musculus
  siRNA target sequence for Catna1 (NM_009818.1,2706-2724).
gcagaccaagattaaacga

SEQ ID NO: 660438 - DNA, 19 bp, Mus musculus
  siRNA target sequence for Catna1 (NM_009818.1,2757-2775).
ggccctgagcgagttcaaa

SEQ ID NO: 660439 - DNA, 19 bp, Mus musculus
  siRNA target sequence for Catna2 (NM_009819.1,190-208).
cggcaacttcacctattat

SEQ ID NO: 660440 - DNA, 19 bp, Mus musculus
  siRNA target sequence for Catna2 (NM_009819.1,246-264).
ctcacagtggaaagactat

SEQ ID NO: 660441 - DNA, 19 bp, Mus musculus
  siRNA target sequence for Catna2 (NM_009819.1,250-268).
cagtggaaagactattgga

SEQ ID NO: 660442 - DNA, 19 bp, Mus musculus
  siRNA target sequence for Catna2 (NM_009819.1,311-329).
caaaggtccgtctggtaaa

SEQ ID NO: 660443 - DNA, 19 bp, Mus musculus
  siRNA target sequence for Catna2 (NM_009819.1,315-333).
ggtccgtctggtaaaaaga

SEQ ID NO: 660444 - DNA, 19 bp, Mus musculus
  siRNA target sequence for Catna2 (NM_009819.1,316-334).
gtccgtctggtaaaaagaa

SEQ ID NO: 660445 - DNA, 19 bp, Mus musculus
  siRNA target sequence for Catna2 (NM_009819.1,615-633).
gatgtcatgaggcttttat

SEQ ID NO: 660446 - DNA, 19 bp, Mus musculus
  siRNA target sequence for Catna2 (NM_009819.1,659-677).
cttggaagcagtcaaaaat

SEQ ID NO: 660447 - DNA, 19 bp, Mus musculus
  siRNA target sequence for Catna2 (NM_009819.1,671-689).
caaaaatgccacaaatgaa

SEQ ID NO: 660448 - DNA, 19 bp, Mus musculus
  siRNA target sequence for Catna2 (NM_009819.1,693-711).
gaccttgcaaaccgattta

SEQ ID NO: 660449 - DNA, 19 bp, Mus musculus
  siRNA target sequence for Catna2 (NM_009819.1,695-713).
ccttgcaaaccgatttaaa

SEQ ID NO: 660450 - DNA, 19 bp, Mus musculus
  siRNA target sequence for Catna2 (NM_009819.1,808-826).
cccgtggagccctgaagaa

SEQ ID NO: 660451 - DNA, 19 bp, Mus musculus
  siRNA target sequence for Catna2 (NM_009819.1,892-910).
gagccaaccgagattatgt

SEQ ID NO: 660452 - DNA, 19 bp, Mus musculus
  siRNA target sequence for Catna2 (NM_009819.1,894-912).
gccaaccgagattatgtat

SEQ ID NO: 660453 - DNA, 19 bp, Mus musculus
  siRNA target sequence for Catna2 (NM_009819.1,895-913).
ccaaccgagattatgtatt

SEQ ID NO: 660454 - DNA, 19 bp, Mus musculus
  siRNA target sequence for Catna2 (NM_009819.1,896-914).
caaccgagattatgtattt

SEQ ID NO: 660455 - DNA, 19 bp, Mus musculus
  siRNA target sequence for Catna2 (NM_009819.1,1018-1036).
ccctgaatgagtttgataa

SEQ ID NO: 660456 - DNA, 19 bp, Mus musculus
  siRNA target sequence for Catna2 (NM_009819.1,1266-1284).
ctcaacattgcgattgaca

SEQ ID NO: 660457 - DNA, 19 bp, Mus musculus
  siRNA target sequence for Catna2 (NM_009819.1,1399-1417).
cgaagagcgggaatgagaa

SEQ ID NO: 660458 - DNA, 19 bp, Mus musculus
  siRNA target sequence for Catna2 (NM_009819.1,1509-1527).
gaaggggtgaaattagtca

SEQ ID NO: 660459 - DNA, 19 bp, Mus musculus
  siRNA target sequence for Catna2 (NM_009819.1,1513-1531).
gggtgaaattagtcagaat

SEQ ID NO: 660460 - DNA, 19 bp, Mus musculus
  siRNA target sequence for Catna2 (NM_009819.1,1533-1551).
gcagccacccagattgaca

SEQ ID NO: 660461 - DNA, 19 bp, Mus musculus
  siRNA target sequence for Catna2 (NM_009819.1,1552-1570).
gcctgtgtccccaagtcat

SEQ ID NO: 660462 - DNA, 19 bp, Mus musculus
  siRNA target sequence for Catna2 (NM_009819.1,1828-1846).
gggtcattcacatcatcaa

SEQ ID NO: 660463 - DNA, 19 bp, Mus musculus
  siRNA target sequence for Catna2 (NM_009819.1,1890-1908).
gtgctggaagccacaaaat

SEQ ID NO: 660464 - DNA, 19 bp, Mus musculus
  siRNA target sequence for Catna2 (NM_009819.1,2037-2055).
ggtgttcgggacatcagaa

SEQ ID NO: 660465 - DNA, 19 bp, Mus musculus
  siRNA target sequence for Catna2 (NM_009819.1,2038-2056).
gtgttcgggacatcagaaa

SEQ ID NO: 660466 - DNA, 19 bp, Mus musculus
  siRNA target sequence for Catna2 (NM_009819.1,2232-2250).
gctgaacaggtggagattt

SEQ ID NO: 660467 - DNA, 19 bp, Mus musculus
  siRNA target sequence for Catna2 (NM_009819.1,2233-2251).
ctgaacaggtggagatttt

SEQ ID NO: 660468 - DNA, 19 bp, Mus musculus
  siRNA target sequence for Catna2 (NM_009819.1,2375-2393).
caaaggcccactgaaaaat

SEQ ID NO: 660469 - DNA, 19 bp, Mus musculus
  siRNA target sequence for Catna2 (NM_009819.1,2379-2397).
ggcccactgaaaaatacat

SEQ ID NO: 660470 - DNA, 19 bp, Mus musculus
  siRNA target sequence for Catna2 (NM_009819.1,2436-2454).
ggctctcgaatggacaaat

SEQ ID NO: 660471 - DNA, 19 bp, Mus musculus
  siRNA target sequence for Catna2 (NM_009819.1,2437-2455).
gctctcgaatggacaaatt

SEQ ID NO: 660472 - DNA, 19 bp, Mus musculus
  siRNA target sequence for Catna2 (NM_009819.1,2490-2508).
gcatgtaagcaggatttat

SEQ ID NO: 660473 - DNA, 19 bp, Mus musculus
  siRNA target sequence for Catna2 (NM_009819.1,2491-2509).
catgtaagcaggatttatt

SEQ ID NO: 660474 - DNA, 19 bp, Mus musculus
  siRNA target sequence for Catna2 (NM_009819.1,2520-2538).
cagcggattgctttgtact

SEQ ID NO: 660475 - DNA, 19 bp, Mus musculus
  siRNA target sequence for Catna2 (NM_009819.1,2589-2607).
ggaggagagctcattgtgt

SEQ ID NO: 660476 - DNA, 19 bp, Mus musculus
  siRNA target sequence for Catna2 (NM_009819.1,2639-2657).
cttttatgaggtagattgt

SEQ ID NO: 660477 - DNA, 19 bp, Mus musculus
  siRNA target sequence for Catna2 (NM_009819.1,2672-2690).
gggcagggctagtcaactt

SEQ ID NO: 660478 - DNA, 19 bp, Mus musculus
  siRNA target sequence for Catna2 (NM_009819.1,2816-2834).
cacggtgaaagcgtcttat

SEQ ID NO: 660479 - DNA, 19 bp, Mus musculus
  siRNA target sequence for Catna2 (NM_009819.1,2818-2836).
cggtgaaagcgtcttatgt

SEQ ID NO: 660480 - DNA, 19 bp, Mus musculus
  siRNA target sequence for Catna2 (NM_009819.1,2819-2837).
ggtgaaagcgtcttatgta

SEQ ID NO: 660481 - DNA, 19 bp, Mus musculus
  siRNA target sequence for Catna2 (NM_009819.1,2967-2985).
gttagacgggggtctcaaa

SEQ ID NO: 660482 - DNA, 19 bp, Mus musculus
  siRNA target sequence for Catna2 (NM_009819.1,3018-3036).
gaattcaaggcaatggatt

SEQ ID NO: 660483 - DNA, 19 bp, Mus musculus
  siRNA target sequence for Catnd2 (NM_008729.1,696-714).
cgtcaaagaacaggaatta

SEQ ID NO: 660484 - DNA, 19 bp, Mus musculus
  siRNA target sequence for Catnd2 (NM_008729.1,849-867).
gacacaagatggccaaaaa

SEQ ID NO: 660485 - DNA, 19 bp, Mus musculus
  siRNA target sequence for Catnd2 (NM_008729.1,2674-2692).
gggtgcctaaggaatgtaa

SEQ ID NO: 660486 - DNA, 19 bp, Mus musculus
  siRNA target sequence for Catnd2 (NM_008729.1,2676-2694).
gtgcctaaggaatgtaagt

SEQ ID NO: 660487 - DNA, 19 bp, Mus musculus
  siRNA target sequence for Catnd2 (NM_008729.1,3232-3250).
ccacagtggtccgtgtata

SEQ ID NO: 660488 - DNA, 19 bp, Mus musculus
  siRNA target sequence for Catnd2 (NM_008729.1,3233-3251).
cacagtggtccgtgtatat

SEQ ID NO: 660489 - DNA, 19 bp, Mus musculus
  siRNA target sequence for Catnd2 (NM_008729.1,3567-3585).
gttggtcggcatctctaaa

SEQ ID NO: 660490 - DNA, 19 bp, Mus musculus
  siRNA target sequence for Catnd2 (NM_008729.1,3823-3841).
gcttcacctcgggaaatga

SEQ ID NO: 660491 - DNA, 19 bp, Mus musculus
  siRNA target sequence for Catnd2 (NM_008729.1,3824-3842).
cttcacctcgggaaatgat

SEQ ID NO: 660492 - DNA, 19 bp, Mus musculus
  siRNA target sequence for Catnd2 (NM_008729.1,4072-4090).
cagccctttccgaattcca

SEQ ID NO: 660493 - DNA, 19 bp, Mus musculus
  siRNA target sequence for Catnd2 (NM_008729.1,4081-4099).
ccgaattccacacgaaatt

SEQ ID NO: 660494 - DNA, 19 bp, Mus musculus
  siRNA target sequence for Catnd2 (NM_008729.1,4082-4100).
cgaattccacacgaaatta

SEQ ID NO: 660495 - DNA, 19 bp, Mus musculus
  siRNA target sequence for Catnd2 (NM_008729.1,4083-4101).
gaattccacacgaaattat

SEQ ID NO: 660496 - DNA, 19 bp, Mus musculus
  siRNA target sequence for Catnd2 (NM_008729.1,4088-4106).
ccacacgaaattatgatga

SEQ ID NO: 660497 - DNA, 19 bp, Mus musculus
  siRNA target sequence for Catnd2 (NM_008729.1,4214-4232).
gtccttacagtgaactgaa

SEQ ID NO: 660498 - DNA, 19 bp, Mus musculus
  siRNA target sequence for Catns (NM_007615.1,474-492).
ccgggtctcaccacaagat

SEQ ID NO: 660499 - DNA, 19 bp, Mus musculus
  siRNA target sequence for Catns (NM_007615.1,659-677).
gacagattgtggaaaccta

SEQ ID NO: 660500 - DNA, 19 bp, Mus musculus
  siRNA target sequence for Catns (NM_007615.1,697-715).
ggagccatgtctgttgttt

SEQ ID NO: 660501 - DNA, 19 bp, Mus musculus
  siRNA target sequence for Catns (NM_007615.1,753-771).
ggagaccacagtcaaaaaa

SEQ ID NO: 660502 - DNA, 19 bp, Mus musculus
  siRNA target sequence for Catns (NM_007615.1,841-859).
gcctcagcagtctccaata

SEQ ID NO: 660503 - DNA, 19 bp, Mus musculus
  siRNA target sequence for Catns (NM_007615.1,847-865).
gcagtctccaataactata

SEQ ID NO: 660504 - DNA, 19 bp, Mus musculus
  siRNA target sequence for Catns (NM_007615.1,848-866).
cagtctccaataactatat

SEQ ID NO: 660505 - DNA, 19 bp, Mus musculus
  siRNA target sequence for Catns (NM_007615.1,870-888).
gaccttgggccgtgatttt

SEQ ID NO: 660506 - DNA, 19 bp, Mus musculus
  siRNA target sequence for Catns (NM_007615.1,879-897).
ccgtgattttcgcaagaat

SEQ ID NO: 660507 - DNA, 19 bp, Mus musculus
  siRNA target sequence for Catns (NM_007615.1,986-1004).
gacactatgaagatggtta

SEQ ID NO: 660508 - DNA, 19 bp, Mus musculus
  siRNA target sequence for Catns (NM_007615.1,1086-1104).
ccgggcacccagtagacaa

SEQ ID NO: 660509 - DNA, 19 bp, Mus musculus
  siRNA target sequence for Catns (NM_007615.1,1089-1107).
ggcacccagtagacaagat

SEQ ID NO: 660510 - DNA, 19 bp, Mus musculus
  siRNA target sequence for Catns (NM_007615.1,1148-1166).
gtgtggacctgcatcgttt

SEQ ID NO: 660511 - DNA, 19 bp, Mus musculus
  siRNA target sequence for Catns (NM_007615.1,1152-1170).
ggacctgcatcgttttcat

SEQ ID NO: 660512 - DNA, 19 bp, Mus musculus
  siRNA target sequence for Catns (NM_007615.1,1200-1218).
gcgcagcatgggctatgat

SEQ ID NO: 660513 - DNA, 19 bp, Mus musculus
  siRNA target sequence for Catns (NM_007615.1,1222-1240).
ctcgattacggcatgatgt

SEQ ID NO: 660514 - DNA, 19 bp, Mus musculus
  siRNA target sequence for Catns (NM_007615.1,1230-1248).
cggcatgatgtctgattat

SEQ ID NO: 660515 - DNA, 19 bp, Mus musculus
  siRNA target sequence for Catns (NM_007615.1,1292-1310).
gcctcaggagctatgaaga

SEQ ID NO: 660516 - DNA, 19 bp, Mus musculus
  siRNA target sequence for Catns (NM_007615.1,1298-1316).
ggagctatgaagacatgat

SEQ ID NO: 660517 - DNA, 19 bp, Mus musculus
  siRNA target sequence for Catns (NM_007615.1,1330-1348).
ccgcctgatcagtactatt

SEQ ID NO: 660518 - DNA, 19 bp, Mus musculus
  siRNA target sequence for Catns (NM_007615.1,1341-1359).
gtactattgggctccttta

SEQ ID NO: 660519 - DNA, 19 bp, Mus musculus
  siRNA target sequence for Catns (NM_007615.1,1344-1362).
ctattgggctcctttagct

SEQ ID NO: 660520 - DNA, 19 bp, Mus musculus
  siRNA target sequence for Catns (NM_007615.1,1474-1492).
cgcttggatgctgttaagt

SEQ ID NO: 660521 - DNA, 19 bp, Mus musculus
  siRNA target sequence for Catns (NM_007615.1,1504-1522).
gcatacctgcagcacttat

SEQ ID NO: 660522 - DNA, 19 bp, Mus musculus
  siRNA target sequence for Catns (NM_007615.1,1566-1584).
gggtatcccgatattggta

SEQ ID NO: 660523 - DNA, 19 bp, Mus musculus
  siRNA target sequence for Catns (NM_007615.1,1574-1592).
cgatattggtaggattgtt

SEQ ID NO: 660524 - DNA, 19 bp, Mus musculus
  siRNA target sequence for Catns (NM_007615.1,1575-1593).
gatattggtaggattgtta

SEQ ID NO: 660525 - DNA, 19 bp, Mus musculus
  siRNA target sequence for Catns (NM_007615.1,1626-1644).
ctgtggagctctcaagaat

SEQ ID NO: 660526 - DNA, 19 bp, Mus musculus
  siRNA target sequence for Catns (NM_007615.1,1628-1646).
gtggagctctcaagaatat

SEQ ID NO: 660527 - DNA, 19 bp, Mus musculus
  siRNA target sequence for Catns (NM_007615.1,1654-1672).
ggacgtgaccaagataaca

SEQ ID NO: 660528 - DNA, 19 bp, Mus musculus
  siRNA target sequence for Catns (NM_007615.1,1655-1673).
gacgtgaccaagataacaa

SEQ ID NO: 660529 - DNA, 19 bp, Mus musculus
  siRNA target sequence for Catns (NM_007615.1,1657-1675).
cgtgaccaagataacaaga

SEQ ID NO: 660530 - DNA, 19 bp, Mus musculus
  siRNA target sequence for Catns (NM_007615.1,1658-1676).
gtgaccaagataacaagat

SEQ ID NO: 660531 - DNA, 19 bp, Mus musculus
  siRNA target sequence for Catns (NM_007615.1,1674-1692).
gatcgccataaaaaactgt

SEQ ID NO: 660532 - DNA, 19 bp, Mus musculus
  siRNA target sequence for Catns (NM_007615.1,1724-1742).
gaaaggctcgtgatatgga

SEQ ID NO: 660533 - DNA, 19 bp, Mus musculus
  siRNA target sequence for Catns (NM_007615.1,1740-1758).
ggacctgactgaagtgatt

SEQ ID NO: 660534 - DNA, 19 bp, Mus musculus
  siRNA target sequence for Catns (NM_007615.1,1741-1759).
gacctgactgaagtgatta

SEQ ID NO: 660535 - DNA, 19 bp, Mus musculus
  siRNA target sequence for Catns (NM_007615.1,1743-1761).
cctgactgaagtgattact

SEQ ID NO: 660536 - DNA, 19 bp, Mus musculus
  siRNA target sequence for Catns (NM_007615.1,1828-1846).
gccttgacagatgaagtta

SEQ ID NO: 660537 - DNA, 19 bp, Mus musculus
  siRNA target sequence for Catns (NM_007615.1,1865-1883).
gggagagagaacctaatga

SEQ ID NO: 660538 - DNA, 19 bp, Mus musculus
  siRNA target sequence for Catns (NM_007615.1,1866-1884).
ggagagagaacctaatgaa

SEQ ID NO: 660539 - DNA, 19 bp, Mus musculus
  siRNA target sequence for Catns (NM_007615.1,1887-1905).
ctgtaagccacggcatatt

SEQ ID NO: 660540 - DNA, 19 bp, Mus musculus
  siRNA target sequence for Catns (NM_007615.1,1889-1907).
gtaagccacggcatattga

SEQ ID NO: 660541 - DNA, 19 bp, Mus musculus
  siRNA target sequence for Catns (NM_007615.1,1936-1954).
ggctgccttcggaacgtaa

SEQ ID NO: 660542 - DNA, 19 bp, Mus musculus
  siRNA target sequence for Catns (NM_007615.1,2049-2067).
ggattcagacagtaagctt

SEQ ID NO: 660543 - DNA, 19 bp, Mus musculus
  siRNA target sequence for Catns (NM_007615.1,2085-2103).
cctcctccggaacttatca

SEQ ID NO: 660544 - DNA, 19 bp, Mus musculus
  siRNA target sequence for Catns (NM_007615.1,2086-2104).
ctcctccggaacttatcat

SEQ ID NO: 660545 - DNA, 19 bp, Mus musculus
  siRNA target sequence for Catns (NM_007615.1,2091-2109).
ccggaacttatcataccaa

SEQ ID NO: 660546 - DNA, 19 bp, Mus musculus
  siRNA target sequence for Catns (NM_007615.1,2233-2251).
gaggatccagcaaatgata

SEQ ID NO: 660547 - DNA, 19 bp, Mus musculus
  siRNA target sequence for Catns (NM_007615.1,2235-2253).
ggatccagcaaatgataca

SEQ ID NO: 660548 - DNA, 19 bp, Mus musculus
  siRNA target sequence for Catns (NM_007615.1,2256-2274).
ggatttccctaaaagaact

SEQ ID NO: 660549 - DNA, 19 bp, Mus musculus
  siRNA target sequence for Catns (NM_007615.1,2284-2302).
cgaggctatgaactcttat

SEQ ID NO: 660550 - DNA, 19 bp, Mus musculus
  siRNA target sequence for Catns (NM_007615.1,2308-2326).
ccagaagtggtgcgaatat

SEQ ID NO: 660551 - DNA, 19 bp, Mus musculus
  siRNA target sequence for Catns (NM_007615.1,2309-2327).
cagaagtggtgcgaatata

SEQ ID NO: 660552 - DNA, 19 bp, Mus musculus
  siRNA target sequence for Catns (NM_007615.1,2311-2329).
gaagtggtgcgaatataca

SEQ ID NO: 660553 - DNA, 19 bp, Mus musculus
  siRNA target sequence for Catns (NM_007615.1,2314-2332).
gtggtgcgaatatacattt

SEQ ID NO: 660554 - DNA, 19 bp, Mus musculus
  siRNA target sequence for Catns (NM_007615.1,2316-2334).
ggtgcgaatatacatttca

SEQ ID NO: 660555 - DNA, 19 bp, Mus musculus
  siRNA target sequence for Catns (NM_007615.1,2380-2398).
ggagctatccagaacttgt

SEQ ID NO: 660556 - DNA, 19 bp, Mus musculus
  siRNA target sequence for Catns (NM_007615.1,2411-2429).
ggacatatggcagatacat

SEQ ID NO: 660557 - DNA, 19 bp, Mus musculus
  siRNA target sequence for Catns (NM_007615.1,2488-2506).
gagcatgagcgagtagtaa

SEQ ID NO: 660558 - DNA, 19 bp, Mus musculus
  siRNA target sequence for Catns (NM_007615.1,2545-2563).
gctcggaacaaagagttaa

SEQ ID NO: 660559 - DNA, 19 bp, Mus musculus
  siRNA target sequence for Catns (NM_007615.1,2546-2564).
ctcggaacaaagagttaat

SEQ ID NO: 660560 - DNA, 19 bp, Mus musculus
  siRNA target sequence for Catns (NM_007615.1,2616-2634).
gaactcctcctggaatttt

SEQ ID NO: 660561 - DNA, 19 bp, Mus musculus
  siRNA target sequence for Catns (NM_007615.1,2716-2734).
gagacgcagggtattgaga

SEQ ID NO: 660562 - DNA, 19 bp, Mus musculus
  siRNA target sequence for Catns (NM_007615.1,2739-2757).
ggtgttgatcaacaaatca

SEQ ID NO: 660563 - DNA, 19 bp, Mus musculus
  siRNA target sequence for Catns (NM_007615.1,2759-2777).
ggaatcgttcagaaaaaga

SEQ ID NO: 660564 - DNA, 19 bp, Mus musculus
  siRNA target sequence for Catns (NM_007615.1,2866-2884).
gacttccaggtgaatctaa

SEQ ID NO: 660565 - DNA, 19 bp, Mus musculus
  siRNA target sequence for Catns (NM_007615.1,2871-2889).
ccaggtgaatctaaacaat

SEQ ID NO: 660566 - DNA, 19 bp, Mus musculus
  siRNA target sequence for Catns (NM_007615.1,2875-2893).
gtgaatctaaacaatgcat

SEQ ID NO: 660567 - DNA, 19 bp, Mus musculus
  siRNA target sequence for Catns (NM_007615.1,2904-2922).
gagcagccattcatatgat

SEQ ID NO: 660568 - DNA, 19 bp, Mus musculus
  siRNA target sequence for Catns (NM_007615.1,2927-2945).
gcactctccccctcattga

SEQ ID NO: 660569 - DNA, 19 bp, Mus musculus
  siRNA target sequence for Catns (NM_007615.1,2937-2955).
cctcattgaccggaatcaa

SEQ ID NO: 660570 - DNA, 19 bp, Mus musculus
  siRNA target sequence for Catns (NM_007615.1,2938-2956).
ctcattgaccggaatcaaa

SEQ ID NO: 660571 - DNA, 19 bp, Mus musculus
  siRNA target sequence for Catns (NM_007615.1,2940-2958).
cattgaccggaatcaaaaa

SEQ ID NO: 660572 - DNA, 19 bp, Mus musculus
  siRNA target sequence for Catns (NM_007615.1,2947-2965).
cggaatcaaaaatcagata

SEQ ID NO: 660573 - DNA, 19 bp, Mus musculus
  siRNA target sequence for Catns (NM_007615.1,2967-2985).
caactattccacactgaat

SEQ ID NO: 660574 - DNA, 19 bp, Mus musculus
  siRNA target sequence for Catns (NM_007615.1,3032-3050).
gtgatatggaaccattgaa

SEQ ID NO: 660575 - DNA, 19 bp, Mus musculus
  siRNA target sequence for Catns (NM_007615.1,3058-3076).
cccttgatgcagaagattt

SEQ ID NO: 660576 - DNA, 19 bp, Mus musculus
  siRNA target sequence for Cldn10 (NM_021386.1,14-32).
ctagcacggccttggaaat

SEQ ID NO: 660577 - DNA, 19 bp, Mus musculus
  siRNA target sequence for Cldn10 (NM_021386.1,17-35).
gcacggccttggaaatcgt

SEQ ID NO: 660578 - DNA, 19 bp, Mus musculus
  siRNA target sequence for Cldn10 (NM_021386.1,148-166).
gccaacctgtggaagatct

SEQ ID NO: 660579 - DNA, 19 bp, Mus musculus
  siRNA target sequence for Cldn10 (NM_021386.1,242-260).
catgtagaggactaatgat

SEQ ID NO: 660580 - DNA, 19 bp, Mus musculus
  siRNA target sequence for Cldn10 (NM_021386.1,265-283).
gcggtcagcctgggatttt

SEQ ID NO: 660581 - DNA, 19 bp, Mus musculus
  siRNA target sequence for Cldn10 (NM_021386.1,266-284).
cggtcagcctgggattttt

SEQ ID NO: 660582 - DNA, 19 bp, Mus musculus
  siRNA target sequence for Cldn10 (NM_021386.1,276-294).
gggatttttcggttccatt

SEQ ID NO: 660583 - DNA, 19 bp, Mus musculus
  siRNA target sequence for Cldn10 (NM_021386.1,277-295).
ggatttttcggttccattt

SEQ ID NO: 660584 - DNA, 19 bp, Mus musculus
  siRNA target sequence for Cldn10 (NM_021386.1,278-296).
gatttttcggttccatttt

SEQ ID NO: 660585 - DNA, 19 bp, Mus musculus
  siRNA target sequence for Cldn10 (NM_021386.1,337-355).
gatcaagccaaagctaaaa

SEQ ID NO: 660586 - DNA, 19 bp, Mus musculus
  siRNA target sequence for Cldn10 (NM_021386.1,533-551).
ggggagtcatattttgctt

SEQ ID NO: 660587 - DNA, 19 bp, Mus musculus
  siRNA target sequence for Cldn10 (NM_021386.1,534-552).
gggagtcatattttgcttt

SEQ ID NO: 660588 - DNA, 19 bp, Mus musculus
  siRNA target sequence for Cldn10 (NM_021386.1,577-595).
cccagaatgggctacacat

SEQ ID NO: 660589 - DNA, 19 bp, Mus musculus
  siRNA target sequence for Cldn10 (NM_021386.1,578-596).
ccagaatgggctacacata

SEQ ID NO: 660590 - DNA, 19 bp, Mus musculus
  siRNA target sequence for Cldn10 (NM_021386.1,581-599).
gaatgggctacacatacaa

SEQ ID NO: 660591 - DNA, 19 bp, Mus musculus
  siRNA target sequence for Cldn10 (NM_021386.1,618-636).
gtcttctcggaccaagtat

SEQ ID NO: 660592 - DNA, 19 bp, Mus musculus
  siRNA target sequence for Cldn10 (NM_023878.1,314-332).
gccaccacatccaacgaat

SEQ ID NO: 660593 - DNA, 19 bp, Mus musculus
  siRNA target sequence for Cldn10 (NM_023878.1,318-336).
ccacatccaacgaatggaa

SEQ ID NO: 660594 - DNA, 19 bp, Mus musculus
  siRNA target sequence for Cldn10 (NM_023878.1,346-364).
ccgagcgtcgtctgtgatt

SEQ ID NO: 660595 - DNA, 19 bp, Mus musculus
  siRNA target sequence for Cldn10 (NM_023878.1,347-365).
cgagcgtcgtctgtgatta

SEQ ID NO: 660596 - DNA, 19 bp, Mus musculus
  siRNA target sequence for Cldn10 (NM_023878.1,366-384).
ccgccacctgggtttacca

SEQ ID NO: 660597 - DNA, 19 bp, Mus musculus
  siRNA target sequence for Cldn10 (NM_023878.1,445-463).
cactatcttcaaagtagaa

SEQ ID NO: 660598 - DNA, 19 bp, Mus musculus
  siRNA target sequence for Cldn10 (NM_023878.1,578-596).
gccaaagctaaaattgctt

SEQ ID NO: 660599 - DNA, 19 bp, Mus musculus
  siRNA target sequence for Cldn10 (NM_023878.1,897-915).
ccacaggcccttcaaaaca

SEQ ID NO: 660600 - DNA, 19 bp, Mus musculus
  siRNA target sequence for Cldn12 (NM_022890.1,328-346).
gtccttcctgtgtggtatt

SEQ ID NO: 660601 - DNA, 19 bp, Mus musculus
  siRNA target sequence for Cldn12 (NM_022890.1,369-387).
cggggactctgcttcctaa

SEQ ID NO: 660602 - DNA, 19 bp, Mus musculus
  siRNA target sequence for Cldn12 (NM_022890.1,401-419).
cggctgatcacattcaaca

SEQ ID NO: 660603 - DNA, 19 bp, Mus musculus
  siRNA target sequence for Cldn12 (NM_022890.1,603-621).
gcctgattggaatgtgtaa

SEQ ID NO: 660604 - DNA, 19 bp, Mus musculus
  siRNA target sequence for Cldn12 (NM_022890.1,616-634).
gtgtaacacggccttcaat

SEQ ID NO: 660605 - DNA, 19 bp, Mus musculus
  siRNA target sequence for Cldn12 (NM_022890.1,639-657).
ccgtgcctaacatcaaact

SEQ ID NO: 660606 - DNA, 19 bp, Mus musculus
  siRNA target sequence for Cldn12 (NM_022890.1,697-715).
ggccggactcctgtttttt

SEQ ID NO: 660607 - DNA, 19 bp, Mus musculus
  siRNA target sequence for Cldn12 (NM_022890.1,699-717).
ccggactcctgttttttct

SEQ ID NO: 660608 - DNA, 19 bp, Mus musculus
  siRNA target sequence for Cldn12 (NM_022890.1,791-809).
ccggtctttacctttgact

SEQ ID NO: 660609 - DNA, 19 bp, Mus musculus
  siRNA target sequence for Cldn12 (NM_022890.1,806-824).
gactatgcagtatttgtca

SEQ ID NO: 660610 - DNA, 19 bp, Mus musculus
  siRNA target sequence for Cldn12 (NM_022890.1,815-833).
gtatttgtcactattgcta

SEQ ID NO: 660611 - DNA, 19 bp, Mus musculus
  siRNA target sequence for Cldn12 (NM_022890.1,834-852).
gctcagggggtctgtttat

SEQ ID NO: 660612 - DNA, 19 bp, Mus musculus
  siRNA target sequence for Cldn12 (NM_022890.1,857-875).
gctctcctgctgttcgttt

SEQ ID NO: 660613 - DNA, 19 bp, Mus musculus
  siRNA target sequence for Cldn12 (NM_022890.1,862-880).
cctgctgttcgtttggtat

SEQ ID NO: 660614 - DNA, 19 bp, Mus musculus
  siRNA target sequence for Cldn12 (NM_022890.1,977-995).
cgcctctctgccattgaaa

SEQ ID NO: 660615 - DNA, 19 bp, Mus musculus
  siRNA target sequence for Cldn13 (NM_020504.2,290-308).
ggtgacctttccagatgat

SEQ ID NO: 660616 - DNA, 19 bp, Mus musculus
  siRNA target sequence for Cldn13 (NM_020504.2,366-384).
gaaaacaggtggatacagt

SEQ ID NO: 660617 - DNA, 19 bp, Mus musculus
  siRNA target sequence for Cldn13 (NM_020504.2,498-516).
gattggcgcatcaattgtt

SEQ ID NO: 660618 - DNA, 19 bp, Mus musculus
  siRNA target sequence for Cldn13 (NM_020504.2,504-522).
cgcatcaattgtttcatga

SEQ ID NO: 660619 - DNA, 19 bp, Mus musculus
  siRNA target sequence for Cldn13 (NM_020504.2,604-622).
cctgggtaacacacaacat

SEQ ID NO: 660620 - DNA, 19 bp, Mus musculus
  siRNA target sequence for Cldn13 (NM_020504.2,607-625).
gggtaacacacaacatcat

SEQ ID NO: 660621 - DNA, 19 bp, Mus musculus
  siRNA target sequence for Cldn13 (NM_020504.2,632-650).
cttctttaacccattgctt

SEQ ID NO: 660622 - DNA, 19 bp, Mus musculus
  siRNA target sequence for Cldn13 (NM_020504.2,652-670).
gcttctcgaagaaagtaca

SEQ ID NO: 660623 - DNA, 19 bp, Mus musculus
  siRNA target sequence for Cldn13 (NM_020504.2,809-827).
caacaacgataccttagat

SEQ ID NO: 660624 - DNA, 19 bp, Mus musculus
  siRNA target sequence for Cldn13 (NM_020504.2,812-830).
caacgataccttagatgtt

SEQ ID NO: 660625 - DNA, 19 bp, Mus musculus
  siRNA target sequence for Cldn14 (NM_019500.3,956-974).
gacgtggtgcagaattttt

SEQ ID NO: 660626 - DNA, 19 bp, Mus musculus
  siRNA target sequence for Cldn14 (NM_019500.3,1226-1244).
gggtacaggctgaatgact

SEQ ID NO: 660627 - DNA, 19 bp, Mus musculus
  siRNA target sequence for Cldn14 (NM_019500.3,1227-1245).
ggtacaggctgaatgacta

SEQ ID NO: 660628 - DNA, 19 bp, Mus musculus
  siRNA target sequence for Cldn15 (NM_021719.1,598-616).
cagggaccctccacatact

SEQ ID NO: 660629 - DNA, 19 bp, Mus musculus
  siRNA target sequence for Cldn15 (NM_021719.1,646-664).
cgtggtacgccgtcaacat

SEQ ID NO: 660630 - DNA, 19 bp, Mus musculus
  siRNA target sequence for Cldn15 (NM_021719.1,689-707).
gtatgctggaaccaagtat

SEQ ID NO: 660631 - DNA, 19 bp, Mus musculus
  siRNA target sequence for Cldn15 (NM_021719.1,882-900).
gacatcagcttcggtaaat

SEQ ID NO: 660632 - DNA, 19 bp, Mus musculus
  siRNA target sequence for Cldn15 (NM_021719.1,884-902).
catcagcttcggtaaatat

SEQ ID NO: 660633 - DNA, 19 bp, Mus musculus
  siRNA target sequence for Cldn17 (NM_181490.2,162-180).
gatcgctggactagttctt

SEQ ID NO: 660634 - DNA, 19 bp, Mus musculus
  siRNA target sequence for Cldn17 (NM_181490.2,167-185).
ctggactagttcttggatt

SEQ ID NO: 660635 - DNA, 19 bp, Mus musculus
  siRNA target sequence for Cldn17 (NM_181490.2,201-219).
gacgattgggacaacactt

SEQ ID NO: 660636 - DNA, 19 bp, Mus musculus
  siRNA target sequence for Cldn17 (NM_181490.2,246-264).
catcggcagcaacattatt

SEQ ID NO: 660637 - DNA, 19 bp, Mus musculus
  siRNA target sequence for Cldn17 (NM_181490.2,251-269).
gcagcaacattattatctt

SEQ ID NO: 660638 - DNA, 19 bp, Mus musculus
  siRNA target sequence for Cldn17 (NM_181490.2,254-272).
gcaacattattatctttga

SEQ ID NO: 660639 - DNA, 19 bp, Mus musculus
  siRNA target sequence for Cldn17 (NM_181490.2,319-337).
gtcaccttgcagtgcaaat

SEQ ID NO: 660640 - DNA, 19 bp, Mus musculus
  siRNA target sequence for Cldn17 (NM_181490.2,323-341).
ccttgcagtgcaaattcta

SEQ ID NO: 660641 - DNA, 19 bp, Mus musculus
  siRNA target sequence for Cldn17 (NM_181490.2,324-342).
cttgcagtgcaaattctat

SEQ ID NO: 660642 - DNA, 19 bp, Mus musculus
  siRNA target sequence for Cldn17 (NM_181490.2,527-545).
ctggtatcttcgttctgat

SEQ ID NO: 660643 - DNA, 19 bp, Mus musculus
  siRNA target sequence for Cldn17 (NM_181490.2,682-700).
ctgctctgcggatattgct

SEQ ID NO: 660644 - DNA, 19 bp, Mus musculus
  siRNA target sequence for Cldn17 (NM_181490.2,748-766).
cgcgtgccacagaaggata

SEQ ID NO: 660645 - DNA, 19 bp, Mus musculus
  siRNA target sequence for Cldn17 (NM_181490.2,749-767).
gcgtgccacagaaggataa

SEQ ID NO: 660646 - DNA, 19 bp, Mus musculus
  siRNA target sequence for Cldn17 (NM_181490.2,753-771).
gccacagaaggataaccaa

SEQ ID NO: 660647 - DNA, 19 bp, Mus musculus
  siRNA target sequence for Cldn17 (NM_181490.2,754-772).
ccacagaaggataaccaaa

SEQ ID NO: 660648 - DNA, 19 bp, Mus musculus
  siRNA target sequence for Cldn17 (NM_181490.2,759-777).
gaaggataaccaaaggaat

SEQ ID NO: 660649 - DNA, 19 bp, Mus musculus
  siRNA target sequence for Cldn17 (NM_181490.2,762-780).
ggataaccaaaggaatgtt

SEQ ID NO: 660650 - DNA, 19 bp, Mus musculus
  siRNA target sequence for Cldn17 (NM_181490.2,763-781).
gataaccaaaggaatgtta

SEQ ID NO: 660651 - DNA, 19 bp, Mus musculus
  siRNA target sequence for Cldn17 (NM_181490.2,778-796).
gttactgtgcctagaaaat

SEQ ID NO: 660652 - DNA, 19 bp, Mus musculus
  siRNA target sequence for Cldn18 (NM_019815.1,159-177).
gcactcaagacctgtatga

SEQ ID NO: 660653 - DNA, 19 bp, Mus musculus
  siRNA target sequence for Cldn18 (NM_019815.1,162-180).
ctcaagacctgtatgacaa

SEQ ID NO: 660654 - DNA, 19 bp, Mus musculus
  siRNA target sequence for Cldn18 (NM_019815.1,189-207).
ccgccgtgttccagtatga

SEQ ID NO: 660655 - DNA, 19 bp, Mus musculus
  siRNA target sequence for Cldn18 (NM_019815.1,190-208).
cgccgtgttccagtatgaa

SEQ ID NO: 660656 - DNA, 19 bp, Mus musculus
  siRNA target sequence for Cldn18 (NM_019815.1,300-318).
ctgtacgagccctgatgat

SEQ ID NO: 660657 - DNA, 19 bp, Mus musculus
  siRNA target sequence for Cldn18 (NM_019815.1,450-468).
ccggcatctgtgcaatcat

SEQ ID NO: 660658 - DNA, 19 bp, Mus musculus
  siRNA target sequence for Cldn18 (NM_019815.1,770-788).
gggtccaacaccagaaaca

SEQ ID NO: 660659 - DNA, 19 bp, Mus musculus
  siRNA target sequence for Cldn18 (NM_019815.1,836-854).
catcctaccaagtatgact

SEQ ID NO: 660660 - DNA, 19 bp, Mus musculus
  siRNA target sequence for Cldn19 (NM_153105.3,152-170).
gtggaagcagtcttcctat

SEQ ID NO: 660661 - DNA, 19 bp, Mus musculus
  siRNA target sequence for Cldn19 (NM_153105.3,241-259).
ccgggcaggtgcaatgcaa

SEQ ID NO: 660662 - DNA, 19 bp, Mus musculus
  siRNA target sequence for Cldn19 (NM_153105.3,242-260).
cgggcaggtgcaatgcaaa

SEQ ID NO: 660663 - DNA, 19 bp, Mus musculus
  siRNA target sequence for Cldn19 (NM_153105.3,246-264).
caggtgcaatgcaaactct

SEQ ID NO: 660664 - DNA, 19 bp, Mus musculus
  siRNA target sequence for Cldn19 (NM_153105.3,252-270).
caatgcaaactctacgatt

SEQ ID NO: 660665 - DNA, 19 bp, Mus musculus
  siRNA target sequence for Cldn19 (NM_153105.3,256-274).
gcaaactctacgattcact

SEQ ID NO: 660666 - DNA, 19 bp, Mus musculus
  siRNA target sequence for Cldn19 (NM_153105.3,515-533).
ccccagcactcctgtcaat

SEQ ID NO: 660667 - DNA, 19 bp, Mus musculus
  siRNA target sequence for Cldn19 (NM_153105.3,590-608).
catgctgggcggttccttt

SEQ ID NO: 660668 - DNA, 19 bp, Mus musculus
  siRNA target sequence for Cldn19 (NM_153105.3,594-612).
ctgggcggttcctttctct

SEQ ID NO: 660669 - DNA, 19 bp, Mus musculus
  siRNA target sequence for Cldn2 (NM_016675.2,242-260).
gcgaacgagttcctatgtt

SEQ ID NO: 660670 - DNA, 19 bp, Mus musculus
  siRNA target sequence for Cldn2 (NM_016675.2,277-295).
cggcggttggcttttccaa

SEQ ID NO: 660671 - DNA, 19 bp, Mus musculus
  siRNA target sequence for Cldn2 (NM_016675.2,339-357).
cagtgcgatatctacagta

SEQ ID NO: 660672 - DNA, 19 bp, Mus musculus
  siRNA target sequence for Cldn3 (NM_009902.2,540-558).
gtaccaactgcgtacaaga

SEQ ID NO: 660673 - DNA, 19 bp, Mus musculus
  siRNA target sequence for Cldn4 (NM_009903.1,747-765).
ccctactcggccaagtact

SEQ ID NO: 660674 - DNA, 19 bp, Mus musculus
  siRNA target sequence for Cldn5 (NM_013805.2,156-174).
gtctgcagcgttggaaatt

SEQ ID NO: 660675 - DNA, 19 bp, Mus musculus
  siRNA target sequence for Cldn5 (NM_013805.2,422-440).
cgctggtggcactctttgt

SEQ ID NO: 660676 - DNA, 19 bp, Mus musculus
  siRNA target sequence for Cldn5 (NM_013805.2,423-441).
gctggtggcactctttgtt

SEQ ID NO: 660677 - DNA, 19 bp, Mus musculus
  siRNA target sequence for Cldn5 (NM_013805.2,576-594).
cgttgtccgcgagttctat

SEQ ID NO: 660678 - DNA, 19 bp, Mus musculus
  siRNA target sequence for Cldn5 (NM_013805.2,770-788).
cggccaatggcgattacga

SEQ ID NO: 660679 - DNA, 19 bp, Mus musculus
  siRNA target sequence for Cldn6 (NM_018777.2,129-147).
cctctactggtctgcaaat

SEQ ID NO: 660680 - DNA, 19 bp, Mus musculus
  siRNA target sequence for Cldn6 (NM_018777.2,132-150).
ctactggtctgcaaatctt

SEQ ID NO: 660681 - DNA, 19 bp, Mus musculus
  siRNA target sequence for Cldn6 (NM_018777.2,537-555).
ggactgcccactctatcat

SEQ ID NO: 660682 - DNA, 19 bp, Mus musculus
  siRNA target sequence for Cldn6 (NM_018777.2,712-730).
catggcctgctattctaca

SEQ ID NO: 660683 - DNA, 19 bp, Mus musculus
  siRNA target sequence for Cldn6 (NM_018777.2,715-733).
ggcctgctattctacatct

SEQ ID NO: 660684 - DNA, 19 bp, Mus musculus
  siRNA target sequence for Cldn6 (NM_018777.2,757-775).
cgaatatcccaccaagaat

SEQ ID NO: 660685 - DNA, 19 bp, Mus musculus
  siRNA target sequence for Cldn6 (NM_018777.2,758-776).
gaatatcccaccaagaatt

SEQ ID NO: 660686 - DNA, 19 bp, Mus musculus
  siRNA target sequence for Cldn7 (NM_016887.2,446-464).
caactgctgggcttttcaa

SEQ ID NO: 660687 - DNA, 19 bp, Mus musculus
  siRNA target sequence for Cldn7 (NM_016887.2,552-570).
cagcccaggccatgtacaa

SEQ ID NO: 660688 - DNA, 19 bp, Mus musculus
  siRNA target sequence for Cldn7 (NM_016887.2,605-623).
ggcatgatgagctgcaaaa

SEQ ID NO: 660689 - DNA, 19 bp, Mus musculus
  siRNA target sequence for Cldn7 (NM_016887.2,606-624).
gcatgatgagctgcaaaat

SEQ ID NO: 660690 - DNA, 19 bp, Mus musculus
  siRNA target sequence for Cldn7 (NM_016887.2,789-807).
ctggaggcattgttttcat

SEQ ID NO: 660691 - DNA, 19 bp, Mus musculus
  siRNA target sequence for Cldn7 (NM_016887.2,840-858).
cctggattggtcatcagat

SEQ ID NO: 660692 - DNA, 19 bp, Mus musculus
  siRNA target sequence for Cldn7 (NM_016887.2,841-859).
ctggattggtcatcagatt

SEQ ID NO: 660693 - DNA, 19 bp, Mus musculus
  siRNA target sequence for Cldn7 (NM_016887.2,843-861).
ggattggtcatcagattgt

SEQ ID NO: 660694 - DNA, 19 bp, Mus musculus
  siRNA target sequence for Cldn7 (NM_016887.2,885-903).
cgcccatgaacgttaagta

SEQ ID NO: 660695 - DNA, 19 bp, Mus musculus
  siRNA target sequence for Cldn7 (NM_016887.2,1038-1056).
ccaattcctccaaggaata

SEQ ID NO: 660696 - DNA, 19 bp, Mus musculus
  siRNA target sequence for Cldn8 (NM_018778.2,103-121).
ggcaacctacgctcttcaa

SEQ ID NO: 660697 - DNA, 19 bp, Mus musculus
  siRNA target sequence for Cldn8 (NM_018778.2,104-122).
gcaacctacgctcttcaaa

SEQ ID NO: 660698 - DNA, 19 bp, Mus musculus
  siRNA target sequence for Cldn8 (NM_018778.2,105-123).
caacctacgctcttcaaat

SEQ ID NO: 660699 - DNA, 19 bp, Mus musculus
  siRNA target sequence for Cldn8 (NM_018778.2,162-180).
cggtggctgtgactatcat

SEQ ID NO: 660700 - DNA, 19 bp, Mus musculus
  siRNA target sequence for Cldn8 (NM_018778.2,198-216).
ctgccttcatcgaaagtaa

SEQ ID NO: 660701 - DNA, 19 bp, Mus musculus
  siRNA target sequence for Cldn8 (NM_018778.2,200-218).
gccttcatcgaaagtaaca

SEQ ID NO: 660702 - DNA, 19 bp, Mus musculus
  siRNA target sequence for Cldn8 (NM_018778.2,201-219).
ccttcatcgaaagtaacat

SEQ ID NO: 660703 - DNA, 19 bp, Mus musculus
  siRNA target sequence for Cldn8 (NM_018778.2,202-220).
cttcatcgaaagtaacatt

SEQ ID NO: 660704 - DNA, 19 bp, Mus musculus
  siRNA target sequence for Cldn8 (NM_018778.2,242-260).
gaaggcttgtggatgaatt

SEQ ID NO: 660705 - DNA, 19 bp, Mus musculus
  siRNA target sequence for Cldn8 (NM_018778.2,245-263).
ggcttgtggatgaattgta

SEQ ID NO: 660706 - DNA, 19 bp, Mus musculus
  siRNA target sequence for Cldn8 (NM_018778.2,246-264).
gcttgtggatgaattgtat

SEQ ID NO: 660707 - DNA, 19 bp, Mus musculus
  siRNA target sequence for Cldn8 (NM_018778.2,390-408).
cagccatcctcggaatgaa

SEQ ID NO: 660708 - DNA, 19 bp, Mus musculus
  siRNA target sequence for Cldn8 (NM_018778.2,392-410).
gccatcctcggaatgaagt

SEQ ID NO: 660709 - DNA, 19 bp, Mus musculus
  siRNA target sequence for Cldn8 (NM_018778.2,420-438).
gcacgggggacgatgagaa

SEQ ID NO: 660710 - DNA, 19 bp, Mus musculus
  siRNA target sequence for Cldn8 (NM_018778.2,464-482).
gccggaatcatcttcttca

SEQ ID NO: 660711 - DNA, 19 bp, Mus musculus
  siRNA target sequence for Cldn8 (NM_018778.2,583-601).
gggagaagccctctacata

SEQ ID NO: 660712 - DNA, 19 bp, Mus musculus
  siRNA target sequence for Cldn8 (NM_018778.2,632-650).
ggaggagcactgttctgtt

SEQ ID NO: 660713 - DNA, 19 bp, Mus musculus
  siRNA target sequence for Cldn8 (NM_018778.2,746-764).
ccgagcatatactccaaaa

SEQ ID NO: 660714 - DNA, 19 bp, Mus musculus
  siRNA target sequence for Cldn8 (NM_018778.2,748-766).
gagcatatactccaaaagt

SEQ ID NO: 660715 - DNA, 19 bp, Mus musculus
  siRNA target sequence for Cldn9 (NM_020293.1,424-442).
gccatcatccaggattttt

SEQ ID NO: 660716 - DNA, 19 bp, Mus musculus
  siRNA target sequence for Cldn9 (NM_020293.1,552-570).
gtgtcccccgtcacacttt

SEQ ID NO: 660717 - DNA, 19 bp, Mus musculus
  siRNA target sequence for Cldn9 (NM_020293.1,554-572).
gtcccccgtcacactttga

SEQ ID NO: 660718 - DNA, 19 bp, Mus musculus
  siRNA target sequence for Cldn9 (NM_020293.1,622-640).
gcttcgggactggataaga

SEQ ID NO: 660719 - DNA, 19 bp, Mus musculus
  siRNA target sequence for Col14a1 (NM_181277.1,1405-1423).
caggaaaagtggaaaaata

SEQ ID NO: 660720 - DNA, 19 bp, Mus musculus
  siRNA target sequence for Col14a1 (NM_181277.1,1495-1513).
cagtgttgaaaaacttgat

SEQ ID NO: 660721 - DNA, 19 bp, Mus musculus
  siRNA target sequence for Col14a1 (NM_181277.1,1526-1544).
gtaccagatagcagtgttt

SEQ ID NO: 660722 - DNA, 19 bp, Mus musculus
  siRNA target sequence for Col14a1 (NM_181277.1,1677-1695).
ggagccacaggctatctga

SEQ ID NO: 660723 - DNA, 19 bp, Mus musculus
  siRNA target sequence for Col14a1 (NM_181277.1,1678-1696).
gagccacaggctatctgat

SEQ ID NO: 660724 - DNA, 19 bp, Mus musculus
  siRNA target sequence for Col14a1 (NM_181277.1,1790-1808).
ccccaatacagaatataca

SEQ ID NO: 660725 - DNA, 19 bp, Mus musculus
  siRNA target sequence for Col14a1 (NM_181277.1,1877-1895).
cttaaccccaccaagaaat

SEQ ID NO: 660726 - DNA, 19 bp, Mus musculus
  siRNA target sequence for Col14a1 (NM_181277.1,1963-1981).
gtggttacagaattgtgta

SEQ ID NO: 660727 - DNA, 19 bp, Mus musculus
  siRNA target sequence for Col14a1 (NM_181277.1,1965-1983).
ggttacagaattgtgtata

SEQ ID NO: 660728 - DNA, 19 bp, Mus musculus
  siRNA target sequence for Col14a1 (NM_181277.1,1987-2005).
gtgcagacgggacagaaat

SEQ ID NO: 660729 - DNA, 19 bp, Mus musculus
  siRNA target sequence for Col14a1 (NM_181277.1,2016-2034).
gaagtcgatcctatcacta

SEQ ID NO: 660730 - DNA, 19 bp, Mus musculus
  siRNA target sequence for Col14a1 (NM_181277.1,2019-2037).
gtcgatcctatcactacat

SEQ ID NO: 660731 - DNA, 19 bp, Mus musculus
  siRNA target sequence for Col14a1 (NM_181277.1,2065-2083).
cggagtactccattgcaat

SEQ ID NO: 660732 - DNA, 19 bp, Mus musculus
  siRNA target sequence for Col14a1 (NM_181277.1,2114-2132).
gcccctggttggagagttt

SEQ ID NO: 660733 - DNA, 19 bp, Mus musculus
  siRNA target sequence for Col14a1 (NM_181277.1,2177-2195).
ggtgaagacagacagtttt

SEQ ID NO: 660734 - DNA, 19 bp, Mus musculus
  siRNA target sequence for Col14a1 (NM_181277.1,2276-2294).
ggaggttgacctcaaagaa

SEQ ID NO: 660735 - DNA, 19 bp, Mus musculus
  siRNA target sequence for Col14a1 (NM_181277.1,2529-2547).
cgggtatcgtgggacattt

SEQ ID NO: 660736 - DNA, 19 bp, Mus musculus
  siRNA target sequence for Col14a1 (NM_181277.1,2610-2628).
gaagtgggtaagaacgtta

SEQ ID NO: 660737 - DNA, 19 bp, Mus musculus
  siRNA target sequence for Col14a1 (NM_181277.1,2631-2649).
gtgcctggagtgcaaaaca

SEQ ID NO: 660738 - DNA, 19 bp, Mus musculus
  siRNA target sequence for Col14a1 (NM_181277.1,2633-2651).
gcctggagtgcaaaacagt

SEQ ID NO: 660739 - DNA, 19 bp, Mus musculus
  siRNA target sequence for Col14a1 (NM_181277.1,2654-2672).
ccttctgaaggctctactt

SEQ ID NO: 660740 - DNA, 19 bp, Mus musculus
  siRNA target sequence for Col14a1 (NM_181277.1,2682-2700).
gagtataaagtcacagtaa

SEQ ID NO: 660741 - DNA, 19 bp, Mus musculus
  siRNA target sequence for Col14a1 (NM_181277.1,2693-2711).
cacagtaacccctgtctat

SEQ ID NO: 660742 - DNA, 19 bp, Mus musculus
  siRNA target sequence for Col14a1 (NM_181277.1,2761-2779).
cctctggtcctcaaaacct

SEQ ID NO: 660743 - DNA, 19 bp, Mus musculus
  siRNA target sequence for Col14a1 (NM_181277.1,2777-2795).
cctgagggtctcagaagaa

SEQ ID NO: 660744 - DNA, 19 bp, Mus musculus
  siRNA target sequence for Col14a1 (NM_181277.1,2778-2796).
ctgagggtctcagaagaat

SEQ ID NO: 660745 - DNA, 19 bp, Mus musculus
  siRNA target sequence for Col14a1 (NM_181277.1,2782-2800).
gggtctcagaagaatggta

SEQ ID NO: 660746 - DNA, 19 bp, Mus musculus
  siRNA target sequence for Col14a1 (NM_181277.1,2801-2819).
caaccgggtgcgcattaca

SEQ ID NO: 660747 - DNA, 19 bp, Mus musculus
  siRNA target sequence for Col14a1 (NM_181277.1,2838-2856).
cccgtgaagggctatagga

SEQ ID NO: 660748 - DNA, 19 bp, Mus musculus
  siRNA target sequence for Col14a1 (NM_181277.1,2839-2857).
ccgtgaagggctataggat

SEQ ID NO: 660749 - DNA, 19 bp, Mus musculus
  siRNA target sequence for Col14a1 (NM_181277.1,2840-2858).
cgtgaagggctataggatt

SEQ ID NO: 660750 - DNA, 19 bp, Mus musculus
  siRNA target sequence for Col14a1 (NM_181277.1,2848-2866).
gctataggattgtctacaa

SEQ ID NO: 660751 - DNA, 19 bp, Mus musculus
  siRNA target sequence for Col14a1 (NM_181277.1,2849-2867).
ctataggattgtctacaaa

SEQ ID NO: 660752 - DNA, 19 bp, Mus musculus
  siRNA target sequence for Col14a1 (NM_181277.1,2913-2931).
gacatcaacaccattgtca

SEQ ID NO: 660753 - DNA, 19 bp, Mus musculus
  siRNA target sequence for Col14a1 (NM_181277.1,2921-2939).
caccattgtcatgacaaat

SEQ ID NO: 660754 - DNA, 19 bp, Mus musculus
  siRNA target sequence for Col14a1 (NM_181277.1,2949-2967).
ggaatggactacaatgtga

SEQ ID NO: 660755 - DNA, 19 bp, Mus musculus
  siRNA target sequence for Col14a1 (NM_181277.1,2950-2968).
gaatggactacaatgtgaa

SEQ ID NO: 660756 - DNA, 19 bp, Mus musculus
  siRNA target sequence for Col14a1 (NM_181277.1,3010-3028).
ctggcctcgtgcaaacact

SEQ ID NO: 660757 - DNA, 19 bp, Mus musculus
  siRNA target sequence for Col14a1 (NM_181277.1,3017-3035).
cgtgcaaacactgttctta

SEQ ID NO: 660758 - DNA, 19 bp, Mus musculus
  siRNA target sequence for Col14a1 (NM_181277.1,3056-3074).
caatcaggttgaaatgaca

SEQ ID NO: 660759 - DNA, 19 bp, Mus musculus
  siRNA target sequence for Col14a1 (NM_181277.1,3080-3098).
gtgtgctcggtggcaaata

SEQ ID NO: 660760 - DNA, 19 bp, Mus musculus
  siRNA target sequence for Col14a1 (NM_181277.1,3115-3133).
cctacaggatagttctaga

SEQ ID NO: 660761 - DNA, 19 bp, Mus musculus
  siRNA target sequence for Col14a1 (NM_181277.1,3207-3225).
cagcctgattcagagtata

SEQ ID NO: 660762 - DNA, 19 bp, Mus musculus
  siRNA target sequence for Col14a1 (NM_181277.1,3274-3292).
gcatcatgcagaaaacaca

SEQ ID NO: 660763 - DNA, 19 bp, Mus musculus
  siRNA target sequence for Col14a1 (NM_181277.1,3302-3320).
cacggaaccaccgactttt

SEQ ID NO: 660764 - DNA, 19 bp, Mus musculus
  siRNA target sequence for Col14a1 (NM_181277.1,3333-3351).
ccaccagcaaaggaagtat

SEQ ID NO: 660765 - DNA, 19 bp, Mus musculus
  siRNA target sequence for Col14a1 (NM_181277.1,3336-3354).
ccagcaaaggaagtatgta

SEQ ID NO: 660766 - DNA, 19 bp, Mus musculus
  siRNA target sequence for Col14a1 (NM_181277.1,3419-3437).
caataaaatcatcaatttt

SEQ ID NO: 660767 - DNA, 19 bp, Mus musculus
  siRNA target sequence for Col14a1 (NM_181277.1,3513-3531).
gacccccgaacagaattca

SEQ ID NO: 660768 - DNA, 19 bp, Mus musculus
  siRNA target sequence for Col14a1 (NM_181277.1,3515-3533).
cccccgaacagaattcaaa

SEQ ID NO: 660769 - DNA, 19 bp, Mus musculus
  siRNA target sequence for Col14a1 (NM_181277.1,3518-3536).
ccgaacagaattcaaactt

SEQ ID NO: 660770 - DNA, 19 bp, Mus musculus
  siRNA target sequence for Col14a1 (NM_181277.1,3530-3548).
caaacttgattcttacaaa

SEQ ID NO: 660771 - DNA, 19 bp, Mus musculus
  siRNA target sequence for Col14a1 (NM_181277.1,3557-3575).
gacccttcttgatgcaatt

SEQ ID NO: 660772 - DNA, 19 bp, Mus musculus
  siRNA target sequence for Col14a1 (NM_181277.1,3560-3578).
ccttcttgatgcaattaga

SEQ ID NO: 660773 - DNA, 19 bp, Mus musculus
  siRNA target sequence for Col14a1 (NM_181277.1,3567-3585).
gatgcaattagacacattt

SEQ ID NO: 660774 - DNA, 19 bp, Mus musculus
  siRNA target sequence for Col14a1 (NM_181277.1,3570-3588).
gcaattagacacatttcct

SEQ ID NO: 660775 - DNA, 19 bp, Mus musculus
  siRNA target sequence for Col14a1 (NM_181277.1,3630-3648).
gttcgggataccttattta

SEQ ID NO: 660776 - DNA, 19 bp, Mus musculus
  siRNA target sequence for Col14a1 (NM_181277.1,3683-3701).
ggtcatcgtggtgataact

SEQ ID NO: 660777 - DNA, 19 bp, Mus musculus
  siRNA target sequence for Col14a1 (NM_181277.1,3686-3704).
catcgtggtgataactgat

SEQ ID NO: 660778 - DNA, 19 bp, Mus musculus
  siRNA target sequence for Col14a1 (NM_181277.1,3709-3727).
ggtcacaagatgatgtcaa

SEQ ID NO: 660779 - DNA, 19 bp, Mus musculus
  siRNA target sequence for Col14a1 (NM_181277.1,3832-3850).
cacggcatgtcttctttgt

SEQ ID NO: 660780 - DNA, 19 bp, Mus musculus
  siRNA target sequence for Col14a1 (NM_181277.1,3935-3953).
gcacaaggatggagttgat

SEQ ID NO: 660781 - DNA, 19 bp, Mus musculus
  siRNA target sequence for Col14a1 (NM_181277.1,3954-3972).
cttgcagggtttaagatga

SEQ ID NO: 660782 - DNA, 19 bp, Mus musculus
  siRNA target sequence for Col14a1 (NM_181277.1,3961-3979).
ggtttaagatgatggaaat

SEQ ID NO: 660783 - DNA, 19 bp, Mus musculus
  siRNA target sequence for Col14a1 (NM_181277.1,4043-4061).
caatttgttcccatgctat

SEQ ID NO: 660784 - DNA, 19 bp, Mus musculus
  siRNA target sequence for Col14a1 (NM_181277.1,4052-4070).
cccatgctatcaaatccat

SEQ ID NO: 660785 - DNA, 19 bp, Mus musculus
  siRNA target sequence for Col14a1 (NM_181277.1,4058-4076).
ctatcaaatccataaggat

SEQ ID NO: 660786 - DNA, 19 bp, Mus musculus
  siRNA target sequence for Col14a1 (NM_181277.1,4116-4134).
ggattgccttctgactata

SEQ ID NO: 660787 - DNA, 19 bp, Mus musculus
  siRNA target sequence for Col14a1 (NM_181277.1,4122-4140).
ccttctgactatacaatga

SEQ ID NO: 660788 - DNA, 19 bp, Mus musculus
  siRNA target sequence for Col14a1 (NM_181277.1,4217-4235).
gccgctagttgggatcata

SEQ ID NO: 660789 - DNA, 19 bp, Mus musculus
  siRNA target sequence for Col14a1 (NM_181277.1,4218-4236).
ccgctagttgggatcatat

SEQ ID NO: 660790 - DNA, 19 bp, Mus musculus
  siRNA target sequence for Col14a1 (NM_181277.1,4219-4237).
cgctagttgggatcatatt

SEQ ID NO: 660791 - DNA, 19 bp, Mus musculus
  siRNA target sequence for Col14a1 (NM_181277.1,4238-4256).
ggacaatggtgggaaaact

SEQ ID NO: 660792 - DNA, 19 bp, Mus musculus
  siRNA target sequence for Col14a1 (NM_181277.1,4241-4259).
caatggtgggaaaactcta

SEQ ID NO: 660793 - DNA, 19 bp, Mus musculus
  siRNA target sequence for Col14a1 (NM_181277.1,4245-4263).
ggtgggaaaactctaactt

SEQ ID NO: 660794 - DNA, 19 bp, Mus musculus
  siRNA target sequence for Col14a1 (NM_181277.1,4246-4264).
gtgggaaaactctaactta

SEQ ID NO: 660795 - DNA, 19 bp, Mus musculus
  siRNA target sequence for Col14a1 (NM_181277.1,4311-4329).
ggacccgacatcaggaaaa

SEQ ID NO: 660796 - DNA, 19 bp, Mus musculus
  siRNA target sequence for Col14a1 (NM_181277.1,4312-4330).
gacccgacatcaggaaaat

SEQ ID NO: 660797 - DNA, 19 bp, Mus musculus
  siRNA target sequence for Col14a1 (NM_181277.1,4428-4446).
gcatcagcgaatatcacat

SEQ ID NO: 660798 - DNA, 19 bp, Mus musculus
  siRNA target sequence for Col14a1 (NM_181277.1,4447-4465).
cggatggtgtggaagtact

SEQ ID NO: 660799 - DNA, 19 bp, Mus musculus
  siRNA target sequence for Col14a1 (NM_181277.1,4448-4466).
ggatggtgtggaagtacta

SEQ ID NO: 660800 - DNA, 19 bp, Mus musculus
  siRNA target sequence for Col14a1 (NM_181277.1,4467-4485).
ggaagaatggtcagatcaa

SEQ ID NO: 660801 - DNA, 19 bp, Mus musculus
  siRNA target sequence for Col14a1 (NM_181277.1,4521-4539).
caaatgtttgatatcgttt

SEQ ID NO: 660802 - DNA, 19 bp, Mus musculus
  siRNA target sequence for Col14a1 (NM_181277.1,4582-4600).
ctggtctgcgggatgaaga

SEQ ID NO: 660803 - DNA, 19 bp, Mus musculus
  siRNA target sequence for Col14a1 (NM_181277.1,4628-4646).
ctcttgctcggaaaccaat

SEQ ID NO: 660804 - DNA, 19 bp, Mus musculus
  siRNA target sequence for Col14a1 (NM_181277.1,4825-4843).
ctggaatgccgggtgataa

SEQ ID NO: 660805 - DNA, 19 bp, Mus musculus
  siRNA target sequence for Col14a1 (NM_181277.1,4834-4852).
cgggtgataaaggagataa

SEQ ID NO: 660806 - DNA, 19 bp, Mus musculus
  siRNA target sequence for Col14a1 (NM_181277.1,4835-4853).
gggtgataaaggagataaa

SEQ ID NO: 660807 - DNA, 19 bp, Mus musculus
  siRNA target sequence for Col14a1 (NM_181277.1,5126-5144).
ggcggtggcacgtcaagta

SEQ ID NO: 660808 - DNA, 19 bp, Mus musculus
  siRNA target sequence for Col14a1 (NM_181277.1,5127-5145).
gcggtggcacgtcaagtat

SEQ ID NO: 660809 - DNA, 19 bp, Mus musculus
  siRNA target sequence for Col14a1 (NM_181277.1,5202-5220).
cccagccagtcctcatcta

SEQ ID NO: 660810 - DNA, 19 bp, Mus musculus
  siRNA target sequence for Col14a1 (NM_181277.1,5558-5576).
ctcctcgtgctctgcttat

SEQ ID NO: 660811 - DNA, 19 bp, Mus musculus
  siRNA target sequence for Col15a1 (NM_009928.2,469-487).
ggcgtgctcttcgctatta

SEQ ID NO: 660812 - DNA, 19 bp, Mus musculus
  siRNA target sequence for Col15a1 (NM_009928.2,490-508).
gatgctttccagaaagtca

SEQ ID NO: 660813 - DNA, 19 bp, Mus musculus
  siRNA target sequence for Col15a1 (NM_009928.2,553-571).
cgggttatcctctactaca

SEQ ID NO: 660814 - DNA, 19 bp, Mus musculus
  siRNA target sequence for Col15a1 (NM_009928.2,595-613).
cgtgaagctgcggttttct

SEQ ID NO: 660815 - DNA, 19 bp, Mus musculus
  siRNA target sequence for Col15a1 (NM_009928.2,629-647).
ccaacaggtggaatcgttt

SEQ ID NO: 660816 - DNA, 19 bp, Mus musculus
  siRNA target sequence for Col15a1 (NM_009928.2,630-648).
caacaggtggaatcgtttt

SEQ ID NO: 660817 - DNA, 19 bp, Mus musculus
  siRNA target sequence for Col15a1 (NM_009928.2,633-651).
caggtggaatcgttttgct

SEQ ID NO: 660818 - DNA, 19 bp, Mus musculus
  siRNA target sequence for Col15a1 (NM_009928.2,657-675).
cgtccagggcgaagaagtt

SEQ ID NO: 660819 - DNA, 19 bp, Mus musculus
  siRNA target sequence for Col15a1 (NM_009928.2,667-685).
gaagaagttgctcttttca

SEQ ID NO: 660820 - DNA, 19 bp, Mus musculus
  siRNA target sequence for Col15a1 (NM_009928.2,747-765).
gcccagtgccgggatcttt

SEQ ID NO: 660821 - DNA, 19 bp, Mus musculus
  siRNA target sequence for Col15a1 (NM_009928.2,749-767).
ccagtgccgggatctttgt

SEQ ID NO: 660822 - DNA, 19 bp, Mus musculus
  siRNA target sequence for Col15a1 (NM_009928.2,814-832).
caacagcttaccatctatt

SEQ ID NO: 660823 - DNA, 19 bp, Mus musculus
  siRNA target sequence for Col15a1 (NM_009928.2,913-931).
gatgaagtcgctgaaatca

SEQ ID NO: 660824 - DNA, 19 bp, Mus musculus
  siRNA target sequence for Col15a1 (NM_009928.2,1109-1127).
ctggtgagatcctgaatga

SEQ ID NO: 660825 - DNA, 19 bp, Mus musculus
  siRNA target sequence for Col15a1 (NM_009928.2,1111-1129).
ggtgagatcctgaatgata

SEQ ID NO: 660826 - DNA, 19 bp, Mus musculus
  siRNA target sequence for Col15a1 (NM_009928.2,1484-1502).
cacacggtgaggaatggtt

SEQ ID NO: 660827 - DNA, 19 bp, Mus musculus
  siRNA target sequence for Col15a1 (NM_009928.2,1486-1504).
cacggtgaggaatggttaa

SEQ ID NO: 660828 - DNA, 19 bp, Mus musculus
  siRNA target sequence for Col15a1 (NM_009928.2,1718-1736).
cagtggcccctgagcaaat

SEQ ID NO: 660829 - DNA, 19 bp, Mus musculus
  siRNA target sequence for Col15a1 (NM_009928.2,1720-1738).
gtggcccctgagcaaatgt

SEQ ID NO: 660830 - DNA, 19 bp, Mus musculus
  siRNA target sequence for Col15a1 (NM_009928.2,2020-2038).
ccaggaactgatgttttca

SEQ ID NO: 660831 - DNA, 19 bp, Mus musculus
  siRNA target sequence for Col15a1 (NM_009928.2,2161-2179).
gcaagagggcctaatggtt

SEQ ID NO: 660832 - DNA, 19 bp, Mus musculus
  siRNA target sequence for Col15a1 (NM_009928.2,2307-2325).
gggatgtaccacagaactt

SEQ ID NO: 660833 - DNA, 19 bp, Mus musculus
  siRNA target sequence for Col15a1 (NM_009928.2,2352-2370).
cgtccggctgctgagtaaa

SEQ ID NO: 660834 - DNA, 19 bp, Mus musculus
  siRNA target sequence for Col15a1 (NM_009928.2,2364-2382).
gagtaaacccacaatctca

SEQ ID NO: 660835 - DNA, 19 bp, Mus musculus
  siRNA target sequence for Col15a1 (NM_009928.2,2512-2530).
ctgtccagttctttgatca

SEQ ID NO: 660836 - DNA, 19 bp, Mus musculus
  siRNA target sequence for Col15a1 (NM_009928.2,2516-2534).
ccagttctttgatcaacat

SEQ ID NO: 660837 - DNA, 19 bp, Mus musculus
  siRNA target sequence for Col15a1 (NM_009928.2,2535-2553).
caccaatggatccatgaat

SEQ ID NO: 660838 - DNA, 19 bp, Mus musculus
  siRNA target sequence for Col15a1 (NM_009928.2,2547-2565).
catgaatttctcagacatt

SEQ ID NO: 660839 - DNA, 19 bp, Mus musculus
  siRNA target sequence for Col15a1 (NM_009928.2,2951-2969).
gagctgtggttaacatcaa

SEQ ID NO: 660840 - DNA, 19 bp, Mus musculus
  siRNA target sequence for Col15a1 (NM_009928.2,2964-2982).
catcaaaggcgctgttttt

SEQ ID NO: 660841 - DNA, 19 bp, Mus musculus
  siRNA target sequence for Col15a1 (NM_009928.2,2973-2991).
cgctgtttttccaatacct

SEQ ID NO: 660842 - DNA, 19 bp, Mus musculus
  siRNA target sequence for Col15a1 (NM_009928.2,3231-3249).
caacaacctctttgtatca

SEQ ID NO: 660843 - DNA, 19 bp, Mus musculus
  siRNA target sequence for Col15a1 (NM_009928.2,3544-3562).
gtcatagaagggacattca

SEQ ID NO: 660844 - DNA, 19 bp, Mus musculus
  siRNA target sequence for Col15a1 (NM_009928.2,3553-3571).
gggacattcatctacttga

SEQ ID NO: 660845 - DNA, 19 bp, Mus musculus
  siRNA target sequence for Col15a1 (NM_009928.2,3572-3590).
gagacagtggggagttttt

SEQ ID NO: 660846 - DNA, 19 bp, Mus musculus
  siRNA target sequence for Col15a1 (NM_009928.2,3601-3619).
cgagatggttggaaaaagt

SEQ ID NO: 660847 - DNA, 19 bp, Mus musculus
  siRNA target sequence for Col15a1 (NM_009928.2,3900-3918).
gaggttcggccttccaatt

SEQ ID NO: 660848 - DNA, 19 bp, Mus musculus
  siRNA target sequence for Col15a1 (NM_009928.2,3902-3920).
ggttcggccttccaattgt

SEQ ID NO: 660849 - DNA, 19 bp, Mus musculus
  siRNA target sequence for Col15a1 (NM_009928.2,3906-3924).
cggccttccaattgtgaat

SEQ ID NO: 660850 - DNA, 19 bp, Mus musculus
  siRNA target sequence for Col15a1 (NM_009928.2,3948-3966).
caattgggactcgatattt

SEQ ID NO: 660851 - DNA, 19 bp, Mus musculus
  siRNA target sequence for Col15a1 (NM_009928.2,3968-3986).
ctggtgatggaggtcaatt

SEQ ID NO: 660852 - DNA, 19 bp, Mus musculus
  siRNA target sequence for Col15a1 (NM_009928.2,3970-3988).
ggtgatggaggtcaattca

SEQ ID NO: 660853 - DNA, 19 bp, Mus musculus
  siRNA target sequence for Col15a1 (NM_009928.2,3971-3989).
gtgatggaggtcaattcaa

SEQ ID NO: 660854 - DNA, 19 bp, Mus musculus
  siRNA target sequence for Col15a1 (NM_009928.2,3973-3991).
gatggaggtcaattcaata

SEQ ID NO: 660855 - DNA, 19 bp, Mus musculus
  siRNA target sequence for Col15a1 (NM_009928.2,4216-4234).
gtgctgtgcatcgaaaaca

SEQ ID NO: 660856 - DNA, 19 bp, Mus musculus
  siRNA target sequence for Col15a1 (NM_009928.2,4218-4236).
gctgtgcatcgaaaacagt

SEQ ID NO: 660857 - DNA, 19 bp, Mus musculus
  siRNA target sequence for Col15a1 (NM_009928.2,4219-4237).
ctgtgcatcgaaaacagtt

SEQ ID NO: 660858 - DNA, 19 bp, Mus musculus
  siRNA target sequence for Col15a1 (NM_009928.2,4223-4241).
gcatcgaaaacagtttcat

SEQ ID NO: 660859 - DNA, 19 bp, Mus musculus
  siRNA target sequence for Col16a1 (NM_028266.3,282-300).
cttcagccatgggacaaat

SEQ ID NO: 660860 - DNA, 19 bp, Mus musculus
  siRNA target sequence for Col16a1 (NM_028266.3,285-303).
cagccatgggacaaatata

SEQ ID NO: 660861 - DNA, 19 bp, Mus musculus
  siRNA target sequence for Col16a1 (NM_028266.3,373-391).
gtgactggcttcaacctaa

SEQ ID NO: 660862 - DNA, 19 bp, Mus musculus
  siRNA target sequence for Col16a1 (NM_028266.3,397-415).
cgactgaacctcatgaaga

SEQ ID NO: 660863 - DNA, 19 bp, Mus musculus
  siRNA target sequence for Col16a1 (NM_028266.3,443-461).
ccaaggggccactcatctt

SEQ ID NO: 660864 - DNA, 19 bp, Mus musculus
  siRNA target sequence for Col16a1 (NM_028266.3,562-580).
cacaccttccggaacacat

SEQ ID NO: 660865 - DNA, 19 bp, Mus musculus
  siRNA target sequence for Col16a1 (NM_028266.3,571-589).
cggaacacatggtacttgt

SEQ ID NO: 660866 - DNA, 19 bp, Mus musculus
  siRNA target sequence for Col16a1 (NM_028266.3,572-590).
ggaacacatggtacttgtt

SEQ ID NO: 660867 - DNA, 19 bp, Mus musculus
  siRNA target sequence for Col16a1 (NM_028266.3,591-609).
ccaagtgactgatgcaaat

SEQ ID NO: 660868 - DNA, 19 bp, Mus musculus
  siRNA target sequence for Col16a1 (NM_028266.3,831-849).
ccggcctgggggacatgta

SEQ ID NO: 660869 - DNA, 19 bp, Mus musculus
  siRNA target sequence for Col16a1 (NM_028266.3,836-854).
ctgggggacatgtatttct

SEQ ID NO: 660870 - DNA, 19 bp, Mus musculus
  siRNA target sequence for Col16a1 (NM_028266.3,871-889).
cagggcaagccggtttcat

SEQ ID NO: 660871 - DNA, 19 bp, Mus musculus
  siRNA target sequence for Col16a1 (NM_028266.3,873-891).
gggcaagccggtttcattt

SEQ ID NO: 660872 - DNA, 19 bp, Mus musculus
  siRNA target sequence for Col16a1 (NM_028266.3,875-893).
gcaagccggtttcatttga

SEQ ID NO: 660873 - DNA, 19 bp, Mus musculus
  siRNA target sequence for Col16a1 (NM_028266.3,898-916).
cagcaggcgcacatctact

SEQ ID NO: 660874 - DNA, 19 bp, Mus musculus
  siRNA target sequence for Col16a1 (NM_028266.3,1294-1312).
ggagcacggggcaatgact

SEQ ID NO: 660875 - DNA, 19 bp, Mus musculus
  siRNA target sequence for Col16a1 (NM_028266.3,1781-1799).
ctgaagggtcccagaattt

SEQ ID NO: 660876 - DNA, 19 bp, Mus musculus
  siRNA target sequence for Col16a1 (NM_028266.3,1904-1922).
caggcatccaaggaatgaa

SEQ ID NO: 660877 - DNA, 19 bp, Mus musculus
  siRNA target sequence for Col16a1 (NM_028266.3,2115-2133).
gggaccagctggcatcaaa

SEQ ID NO: 660878 - DNA, 19 bp, Mus musculus
  siRNA target sequence for Col16a1 (NM_028266.3,2885-2903).
gtgctccgggactatggat

SEQ ID NO: 660879 - DNA, 19 bp, Mus musculus
  siRNA target sequence for Col16a1 (NM_028266.3,3044-3062).
ccttacccatcgagaaaca

SEQ ID NO: 660880 - DNA, 19 bp, Mus musculus
  siRNA target sequence for Col16a1 (NM_028266.3,3160-3178).
ggcgtgccaggttttgaca

SEQ ID NO: 660881 - DNA, 19 bp, Mus musculus
  siRNA target sequence for Col16a1 (NM_028266.3,3161-3179).
gcgtgccaggttttgacaa

SEQ ID NO: 660882 - DNA, 19 bp, Mus musculus
  siRNA target sequence for Col16a1 (NM_028266.3,3480-3498).
gggagagcgaggatacact

SEQ ID NO: 660883 - DNA, 19 bp, Mus musculus
  siRNA target sequence for Col16a1 (NM_028266.3,4451-4469).
gagacatggtgaattatga

SEQ ID NO: 660884 - DNA, 19 bp, Mus musculus
  siRNA target sequence for Col16a1 (NM_028266.3,4516-4534).
gagaggatggcttactata

SEQ ID NO: 660885 - DNA, 19 bp, Mus musculus
  siRNA target sequence for Col16a1 (NM_028266.3,4737-4755).
cattgcaggagaaaatggt

SEQ ID NO: 660886 - DNA, 19 bp, Mus musculus
  siRNA target sequence for Col16a1 (NM_028266.3,4821-4839).
gggccagcaaggtattcct

SEQ ID NO: 660887 - DNA, 19 bp, Mus musculus
  siRNA target sequence for Col19a1 (NM_007733.1,176-194).
cagggacaagccagaaaca

SEQ ID NO: 660888 - DNA, 19 bp, Mus musculus
  siRNA target sequence for Col19a1 (NM_007733.1,231-249).
gacagaaacaaatctgaat

SEQ ID NO: 660889 - DNA, 19 bp, Mus musculus
  siRNA target sequence for Col19a1 (NM_007733.1,292-310).
cgttttgcgaaggtgataa

SEQ ID NO: 660890 - DNA, 19 bp, Mus musculus
  siRNA target sequence for Col19a1 (NM_007733.1,293-311).
gttttgcgaaggtgataaa

SEQ ID NO: 660891 - DNA, 19 bp, Mus musculus
  siRNA target sequence for Col19a1 (NM_007733.1,339-357).
cttatcagagacactgtta

SEQ ID NO: 660892 - DNA, 19 bp, Mus musculus
  siRNA target sequence for Col19a1 (NM_007733.1,389-407).
cgctatagctgtcatgttt

SEQ ID NO: 660893 - DNA, 19 bp, Mus musculus
  siRNA target sequence for Col19a1 (NM_007733.1,432-450).
gaacggtggtttttatgga

SEQ ID NO: 660894 - DNA, 19 bp, Mus musculus
  siRNA target sequence for Col19a1 (NM_007733.1,479-497).
gatatctgtagtgattgat

SEQ ID NO: 660895 - DNA, 19 bp, Mus musculus
  siRNA target sequence for Col19a1 (NM_007733.1,502-520).
cgaagaaggtggtagaatt

SEQ ID NO: 660896 - DNA, 19 bp, Mus musculus
  siRNA target sequence for Col19a1 (NM_007733.1,532-550).
gtgctgagggagatctgtt

SEQ ID NO: 660897 - DNA, 19 bp, Mus musculus
  siRNA target sequence for Col19a1 (NM_007733.1,535-553).
ctgagggagatctgttgaa

SEQ ID NO: 660898 - DNA, 19 bp, Mus musculus
  siRNA target sequence for Col19a1 (NM_007733.1,539-557).
gggagatctgttgaactat

SEQ ID NO: 660899 - DNA, 19 bp, Mus musculus
  siRNA target sequence for Col19a1 (NM_007733.1,629-647).
ccgagtcctttctctctat

SEQ ID NO: 660900 - DNA, 19 bp, Mus musculus
  siRNA target sequence for Col19a1 (NM_007733.1,630-648).
cgagtcctttctctctata

SEQ ID NO: 660901 - DNA, 19 bp, Mus musculus
  siRNA target sequence for Col19a1 (NM_007733.1,640-658).
ctctctatatggattgcaa

SEQ ID NO: 660902 - DNA, 19 bp, Mus musculus
  siRNA target sequence for Col19a1 (NM_007733.1,642-660).
ctctatatggattgcaatt

SEQ ID NO: 660903 - DNA, 19 bp, Mus musculus
  siRNA target sequence for Col19a1 (NM_007733.1,651-669).
gattgcaatttaattgcaa

SEQ ID NO: 660904 - DNA, 19 bp, Mus musculus
  siRNA target sequence for Col19a1 (NM_007733.1,670-688).
gtcgacacacggaagaaaa

SEQ ID NO: 660905 - DNA, 19 bp, Mus musculus
  siRNA target sequence for Col19a1 (NM_007733.1,758-776).
cgaacttcaccaacttaga

SEQ ID NO: 660906 - DNA, 19 bp, Mus musculus
  siRNA target sequence for Col19a1 (NM_007733.1,775-793).
gaatctactgcaatgcaaa

SEQ ID NO: 660907 - DNA, 19 bp, Mus musculus
  siRNA target sequence for Col19a1 (NM_007733.1,821-839).
cttatcacctactaagtgt

SEQ ID NO: 660908 - DNA, 19 bp, Mus musculus
  siRNA target sequence for Col19a1 (NM_007733.1,843-861).
gagcaagacgactttggaa

SEQ ID NO: 660909 - DNA, 19 bp, Mus musculus
  siRNA target sequence for Col19a1 (NM_007733.1,849-867).
gacgactttggaagtacta

SEQ ID NO: 660910 - DNA, 19 bp, Mus musculus
  siRNA target sequence for Col19a1 (NM_007733.1,851-869).
cgactttggaagtactact

SEQ ID NO: 660911 - DNA, 19 bp, Mus musculus
  siRNA target sequence for Col19a1 (NM_007733.1,852-870).
gactttggaagtactactt

SEQ ID NO: 660912 - DNA, 19 bp, Mus musculus
  siRNA target sequence for Col19a1 (NM_007733.1,875-893).
ctgggggacctctaacact

SEQ ID NO: 660913 - DNA, 19 bp, Mus musculus
  siRNA target sequence for Col19a1 (NM_007733.1,938-956).
cacatgccagtgtattcca

SEQ ID NO: 660914 - DNA, 19 bp, Mus musculus
  siRNA target sequence for Col19a1 (NM_007733.1,943-961).
gccagtgtattccaaacaa

SEQ ID NO: 660915 - DNA, 19 bp, Mus musculus
  siRNA target sequence for Col19a1 (NM_007733.1,1051-1069).
caggattacctggtcaaaa

SEQ ID NO: 660916 - DNA, 19 bp, Mus musculus
  siRNA target sequence for Col19a1 (NM_007733.1,1367-1385).
cggacctcctgggttacaa

SEQ ID NO: 660917 - DNA, 19 bp, Mus musculus
  siRNA target sequence for Col19a1 (NM_007733.1,1395-1413).
cagccttttggtggatatt

SEQ ID NO: 660918 - DNA, 19 bp, Mus musculus
  siRNA target sequence for Col19a1 (NM_007733.1,1493-1511).
gtctgttggccctaaagga

SEQ ID NO: 660919 - DNA, 19 bp, Mus musculus
  siRNA target sequence for Col19a1 (NM_007733.1,1615-1633).
ctggtccccctggtttact

SEQ ID NO: 660920 - DNA, 19 bp, Mus musculus
  siRNA target sequence for Col19a1 (NM_007733.1,2068-2086).
ctccagggaaggatggaaa

SEQ ID NO: 660921 - DNA, 19 bp, Mus musculus
  siRNA target sequence for Col19a1 (NM_007733.1,2549-2567).
cggcatgagcagtttatat

SEQ ID NO: 660922 - DNA, 19 bp, Mus musculus
  siRNA target sequence for Col19a1 (NM_007733.1,2550-2568).
ggcatgagcagtttatata

SEQ ID NO: 660923 - DNA, 19 bp, Mus musculus
  siRNA target sequence for Col19a1 (NM_007733.1,2552-2570).
catgagcagtttatataaa

SEQ ID NO: 660924 - DNA, 19 bp, Mus musculus
  siRNA target sequence for Col19a1 (NM_007733.1,2573-2591).
ccagggaggggtgaatgtt

SEQ ID NO: 660925 - DNA, 19 bp, Mus musculus
  siRNA target sequence for Col19a1 (NM_007733.1,2672-2690).
gccaggactagaaggattt

SEQ ID NO: 660926 - DNA, 19 bp, Mus musculus
  siRNA target sequence for Col19a1 (NM_007733.1,2846-2864).
ggggaagccaggcataaat

SEQ ID NO: 660927 - DNA, 19 bp, Mus musculus
  siRNA target sequence for Col19a1 (NM_007733.1,2891-2909).
gggcatcatgggtaaacct

SEQ ID NO: 660928 - DNA, 19 bp, Mus musculus
  siRNA target sequence for Col19a1 (NM_007733.1,2936-2954).
cggtgatcagggaattcca

SEQ ID NO: 660929 - DNA, 19 bp, Mus musculus
  siRNA target sequence for Col19a1 (NM_007733.1,3105-3123).
ccggctgatgctgtttcat

SEQ ID NO: 660930 - DNA, 19 bp, Mus musculus
  siRNA target sequence for D130059P03Rik (NM_177185.3,235-253).
gcgcagagtcgcgttcatt

SEQ ID NO: 660931 - DNA, 19 bp, Mus musculus
  siRNA target sequence for D130059P03Rik (NM_177185.3,236-254).
cgcagagtcgcgttcatta

SEQ ID NO: 660932 - DNA, 19 bp, Mus musculus
  siRNA target sequence for D130059P03Rik (NM_177185.3,639-657).
gagaacaacggaagaaact

SEQ ID NO: 660933 - DNA, 19 bp, Mus musculus
  siRNA target sequence for D130059P03Rik (NM_177185.3,647-665).
cggaagaaacttgttcata

SEQ ID NO: 660934 - DNA, 19 bp, Mus musculus
  siRNA target sequence for D130059P03Rik (NM_177185.3,649-667).
gaagaaacttgttcataca

SEQ ID NO: 660935 - DNA, 19 bp, Mus musculus
  siRNA target sequence for D130059P03Rik (NM_177185.3,652-670).
gaaacttgttcatacagaa

SEQ ID NO: 660936 - DNA, 19 bp, Mus musculus
  siRNA target sequence for D130059P03Rik (NM_177185.3,666-684).
cagaagatccatttactga

SEQ ID NO: 660937 - DNA, 19 bp, Mus musculus
  siRNA target sequence for D130059P03Rik (NM_177185.3,765-783).
ggaaggatcggctacaaga

SEQ ID NO: 660938 - DNA, 19 bp, Mus musculus
  siRNA target sequence for D130059P03Rik (NM_177185.3,766-784).
gaaggatcggctacaagat

SEQ ID NO: 660939 - DNA, 19 bp, Mus musculus
  siRNA target sequence for D130059P03Rik (NM_177185.3,770-788).
gatcggctacaagatttaa

SEQ ID NO: 660940 - DNA, 19 bp, Mus musculus
  siRNA target sequence for D130059P03Rik (NM_177185.3,814-832).
gacagatccatttattgat

SEQ ID NO: 660941 - DNA, 19 bp, Mus musculus
  siRNA target sequence for D130059P03Rik (NM_177185.3,816-834).
cagatccatttattgataa

SEQ ID NO: 660942 - DNA, 19 bp, Mus musculus
  siRNA target sequence for D130059P03Rik (NM_177185.3,859-877).
ccctgcttctctaacaaca

SEQ ID NO: 660943 - DNA, 19 bp, Mus musculus
  siRNA target sequence for D130059P03Rik (NM_177185.3,975-993).
cacccaaggttcccaaaat

SEQ ID NO: 660944 - DNA, 19 bp, Mus musculus
  siRNA target sequence for D130059P03Rik (NM_177185.3,977-995).
cccaaggttcccaaaataa

SEQ ID NO: 660945 - DNA, 19 bp, Mus musculus
  siRNA target sequence for D130059P03Rik (NM_177185.3,979-997).
caaggttcccaaaataaaa

SEQ ID NO: 660946 - DNA, 19 bp, Mus musculus
  siRNA target sequence for D130059P03Rik (NM_177185.3,1313-1331).
gacccagacctccctattt

SEQ ID NO: 660947 - DNA, 19 bp, Mus musculus
  siRNA target sequence for D130059P03Rik (NM_177185.3,1317-1335).
cagacctccctatttttgt

SEQ ID NO: 660948 - DNA, 19 bp, Mus musculus
  siRNA target sequence for D130059P03Rik (NM_177185.3,1507-1525).
caaggtggtacctacactt

SEQ ID NO: 660949 - DNA, 19 bp, Mus musculus
  siRNA target sequence for D130059P03Rik (NM_177185.3,1533-1551).
gtctacccgtgcttcttga

SEQ ID NO: 660950 - DNA, 19 bp, Mus musculus
  siRNA target sequence for D130059P03Rik (NM_177185.3,1572-1590).
gtgtagctgccaaactttt

SEQ ID NO: 660951 - DNA, 19 bp, Mus musculus
  siRNA target sequence for D130059P03Rik (NM_177185.3,1624-1642).
ggatatgaataatattctt

SEQ ID NO: 660952 - DNA, 19 bp, Mus musculus
  siRNA target sequence for D130059P03Rik (NM_177185.3,1651-1669).
cgagttacagctacaagaa

SEQ ID NO: 660953 - DNA, 19 bp, Mus musculus
  siRNA target sequence for D130059P03Rik (NM_177185.3,1670-1688).
ctaggtcctgtcattcgta

SEQ ID NO: 660954 - DNA, 19 bp, Mus musculus
  siRNA target sequence for D130059P03Rik (NM_177185.3,1701-1719).
cccatcttgaagcatttgt

SEQ ID NO: 660955 - DNA, 19 bp, Mus musculus
  siRNA target sequence for D130059P03Rik (NM_177185.3,1712-1730).
gcatttgtgccatgcaata

SEQ ID NO: 660956 - DNA, 19 bp, Mus musculus
  siRNA target sequence for D130059P03Rik (NM_177185.3,1737-1755).
cactggtaaaacgtctaaa

SEQ ID NO: 660957 - DNA, 19 bp, Mus musculus
  siRNA target sequence for D130059P03Rik (NM_177185.3,1739-1757).
ctggtaaaacgtctaaaga

SEQ ID NO: 660958 - DNA, 19 bp, Mus musculus
  siRNA target sequence for D130059P03Rik (NM_177185.3,1742-1760).
gtaaaacgtctaaagaagt

SEQ ID NO: 660959 - DNA, 19 bp, Mus musculus
  siRNA target sequence for D130059P03Rik (NM_177185.3,1772-1790).
gttcaggatgatcgtttaa

SEQ ID NO: 660960 - DNA, 19 bp, Mus musculus
  siRNA target sequence for D130059P03Rik (NM_177185.3,1777-1795).
ggatgatcgtttaagagaa

SEQ ID NO: 660961 - DNA, 19 bp, Mus musculus
  siRNA target sequence for D130059P03Rik (NM_177185.3,1894-1912).
caagttgcaagcagatgaa

SEQ ID NO: 660962 - DNA, 19 bp, Mus musculus
  siRNA target sequence for D130059P03Rik (NM_177185.3,1913-1931).
gaacgggaaaaaaatggat

SEQ ID NO: 660963 - DNA, 19 bp, Mus musculus
  siRNA target sequence for D130059P03Rik (NM_177185.3,1974-1992).
gcccacgaaagaaattcca

SEQ ID NO: 660964 - DNA, 19 bp, Mus musculus
  siRNA target sequence for D130059P03Rik (NM_177185.3,2000-2018).
gacaccatcagaactttgt

SEQ ID NO: 660965 - DNA, 19 bp, Mus musculus
  siRNA target sequence for D130059P03Rik (NM_177185.3,2002-2020).
caccatcagaactttgtta

SEQ ID NO: 660966 - DNA, 19 bp, Mus musculus
  siRNA target sequence for D130059P03Rik (NM_177185.3,2005-2023).
catcagaactttgttatgt

SEQ ID NO: 660967 - DNA, 19 bp, Mus musculus
  siRNA target sequence for D130059P03Rik (NM_177185.3,2035-2053).
gatcaaattgggatgctat

SEQ ID NO: 660968 - DNA, 19 bp, Mus musculus
  siRNA target sequence for D130059P03Rik (NM_177185.3,2038-2056).
caaattgggatgctatgaa

SEQ ID NO: 660969 - DNA, 19 bp, Mus musculus
  siRNA target sequence for D130059P03Rik (NM_177185.3,2077-2095).
gtctgctgaggattatctt

SEQ ID NO: 660970 - DNA, 19 bp, Mus musculus
  siRNA target sequence for D130059P03Rik (NM_177185.3,2172-2190).
gccggagtgtgcataatca

SEQ ID NO: 660971 - DNA, 19 bp, Mus musculus
  siRNA target sequence for D130059P03Rik (NM_177185.3,2173-2191).
ccggagtgtgcataatcat

SEQ ID NO: 660972 - DNA, 19 bp, Mus musculus
  siRNA target sequence for D130059P03Rik (NM_177185.3,2175-2193).
ggagtgtgcataatcatct

SEQ ID NO: 660973 - DNA, 19 bp, Mus musculus
  siRNA target sequence for D130059P03Rik (NM_177185.3,2176-2194).
gagtgtgcataatcatctt

SEQ ID NO: 660974 - DNA, 19 bp, Mus musculus
  siRNA target sequence for D130059P03Rik (NM_177185.3,2180-2198).
gtgcataatcatcttactt

SEQ ID NO: 660975 - DNA, 19 bp, Mus musculus
  siRNA target sequence for D130059P03Rik (NM_177185.3,2248-2266).
ggaatgtagccccaaaaaa

SEQ ID NO: 660976 - DNA, 19 bp, Mus musculus
  siRNA target sequence for D130059P03Rik (NM_177185.3,2396-2414).
ctcgatgaagacctttctt

SEQ ID NO: 660977 - DNA, 19 bp, Mus musculus
  siRNA target sequence for D130059P03Rik (NM_177185.3,2423-2441).
gcctcactggatcttgtat

SEQ ID NO: 660978 - DNA, 19 bp, Mus musculus
  siRNA target sequence for D130059P03Rik (NM_177185.3,2497-2515).
gctaaatgtgccaactaca

SEQ ID NO: 660979 - DNA, 19 bp, Mus musculus
  siRNA target sequence for D130059P03Rik (NM_177185.3,2546-2564).
ctagcaagtatcatgagta

SEQ ID NO: 660980 - DNA, 19 bp, Mus musculus
  siRNA target sequence for D130059P03Rik (NM_177185.3,2549-2567).
gcaagtatcatgagtaagt

SEQ ID NO: 660981 - DNA, 19 bp, Mus musculus
  siRNA target sequence for D130059P03Rik (NM_177185.3,2550-2568).
caagtatcatgagtaagtt

SEQ ID NO: 660982 - DNA, 19 bp, Mus musculus
  siRNA target sequence for D130059P03Rik (NM_177185.3,2603-2621).
cagactgctcactcatcaa

SEQ ID NO: 660983 - DNA, 19 bp, Mus musculus
  siRNA target sequence for D130059P03Rik (NM_177185.3,2605-2623).
gactgctcactcatcaagt

SEQ ID NO: 660984 - DNA, 19 bp, Mus musculus
  siRNA target sequence for D130059P03Rik (NM_177185.3,2609-2627).
gctcactcatcaagtctta

SEQ ID NO: 660985 - DNA, 19 bp, Mus musculus
  siRNA target sequence for D130059P03Rik (NM_177185.3,2610-2628).
ctcactcatcaagtcttat

SEQ ID NO: 660986 - DNA, 19 bp, Mus musculus
  siRNA target sequence for D130059P03Rik (NM_177185.3,2614-2632).
ctcatcaagtcttattgct

SEQ ID NO: 660987 - DNA, 19 bp, Mus musculus
  siRNA target sequence for D130059P03Rik (NM_177185.3,2702-2720).
gctggttcttcaattcaga

SEQ ID NO: 660988 - DNA, 19 bp, Mus musculus
  siRNA target sequence for D130059P03Rik (NM_177185.3,2712-2730).
caattcagaaccctaaagt

SEQ ID NO: 660989 - DNA, 19 bp, Mus musculus
  siRNA target sequence for D130059P03Rik (NM_177185.3,2719-2737).
gaaccctaaagtttcctta

SEQ ID NO: 660990 - DNA, 19 bp, Mus musculus
  siRNA target sequence for D130059P03Rik (NM_177185.3,2875-2893).
ccaagatgcttcttcgtta

SEQ ID NO: 660991 - DNA, 19 bp, Mus musculus
  siRNA target sequence for D130059P03Rik (NM_177185.3,2876-2894).
caagatgcttcttcgttaa

SEQ ID NO: 660992 - DNA, 19 bp, Mus musculus
  siRNA target sequence for D130059P03Rik (NM_177185.3,2889-2907).
cgttaacacaagtcacaaa

SEQ ID NO: 660993 - DNA, 19 bp, Mus musculus
  siRNA target sequence for D130059P03Rik (NM_177185.3,2927-2945).
gtccagcagaactatgtgt

SEQ ID NO: 660994 - DNA, 19 bp, Mus musculus
  siRNA target sequence for D130059P03Rik (NM_177185.3,2938-2956).
ctatgtgtctccattgcaa

SEQ ID NO: 660995 - DNA, 19 bp, Mus musculus
  siRNA target sequence for D130059P03Rik (NM_177185.3,2953-2971).
gcaagccaccattagtaaa

SEQ ID NO: 660996 - DNA, 19 bp, Mus musculus
  siRNA target sequence for D130059P03Rik (NM_177185.3,2954-2972).
caagccaccattagtaaat

SEQ ID NO: 660997 - DNA, 19 bp, Mus musculus
  siRNA target sequence for D130059P03Rik (NM_177185.3,2979-2997).
ccaacccagtggtgaaatt

SEQ ID NO: 660998 - DNA, 19 bp, Mus musculus
  siRNA target sequence for D130059P03Rik (NM_177185.3,2980-2998).
caacccagtggtgaaatta

SEQ ID NO: 660999 - DNA, 19 bp, Mus musculus
  siRNA target sequence for D130059P03Rik (NM_177185.3,3021-3039).
gttcgtcccaactactcaa

SEQ ID NO: 661000 - DNA, 19 bp, Mus musculus
  siRNA target sequence for D130059P03Rik (NM_177185.3,3032-3050).
ctactcaagacttcagata

SEQ ID NO: 661001 - DNA, 19 bp, Mus musculus
  siRNA target sequence for D130059P03Rik (NM_177185.3,3045-3063).
cagataagccactgatgta

SEQ ID NO: 661002 - DNA, 19 bp, Mus musculus
  siRNA target sequence for D130059P03Rik (NM_177185.3,3082-3100).
cccatcacctggaaatggt

SEQ ID NO: 661003 - DNA, 19 bp, Mus musculus
  siRNA target sequence for D130059P03Rik (NM_177185.3,3083-3101).
ccatcacctggaaatggtt

SEQ ID NO: 661004 - DNA, 19 bp, Mus musculus
  siRNA target sequence for D130059P03Rik (NM_177185.3,3145-3163).
cactacctccagtaactat

SEQ ID NO: 661005 - DNA, 19 bp, Mus musculus
  siRNA target sequence for D130059P03Rik (NM_177185.3,3190-3208).
ctccacgcagggtttcaaa

SEQ ID NO: 661006 - DNA, 19 bp, Mus musculus
  siRNA target sequence for D130059P03Rik (NM_177185.3,3193-3211).
cacgcagggtttcaaatct

SEQ ID NO: 661007 - DNA, 19 bp, Mus musculus
  siRNA target sequence for D130059P03Rik (NM_177185.3,3283-3301).
ctcacctaagccttctgtt

SEQ ID NO: 661008 - DNA, 19 bp, Mus musculus
  siRNA target sequence for D130059P03Rik (NM_177185.3,3319-3337).
gtcagctaagccttcaata

SEQ ID NO: 661009 - DNA, 19 bp, Mus musculus
  siRNA target sequence for D130059P03Rik (NM_177185.3,3323-3341).
gctaagccttcaatatcta

SEQ ID NO: 661010 - DNA, 19 bp, Mus musculus
  siRNA target sequence for D130059P03Rik (NM_177185.3,3328-3346).
gccttcaatatctactaaa

SEQ ID NO: 661011 - DNA, 19 bp, Mus musculus
  siRNA target sequence for D130059P03Rik (NM_177185.3,3339-3357).
ctactaaacagatttctaa

SEQ ID NO: 661012 - DNA, 19 bp, Mus musculus
  siRNA target sequence for D130059P03Rik (NM_177185.3,3426-3444).
gtagccactccacaagtaa

SEQ ID NO: 661013 - DNA, 19 bp, Mus musculus
  siRNA target sequence for D130059P03Rik (NM_177185.3,3488-3506).
cagtctcccactctgaatt

SEQ ID NO: 661014 - DNA, 19 bp, Mus musculus
  siRNA target sequence for D130059P03Rik (NM_177185.3,3492-3510).
ctcccactctgaatttgtt

SEQ ID NO: 661015 - DNA, 19 bp, Mus musculus
  siRNA target sequence for D130059P03Rik (NM_177185.3,3502-3520).
gaatttgttgccctcaaat

SEQ ID NO: 661016 - DNA, 19 bp, Mus musculus
  siRNA target sequence for D130059P03Rik (NM_177185.3,3528-3546).
ctggccttccgactacaaa

SEQ ID NO: 661017 - DNA, 19 bp, Mus musculus
  siRNA target sequence for D130059P03Rik (NM_177185.3,3530-3548).
ggccttccgactacaaaaa

SEQ ID NO: 661018 - DNA, 19 bp, Mus musculus
  siRNA target sequence for D130059P03Rik (NM_177185.3,3554-3572).
caggccccttctaaactaa

SEQ ID NO: 661019 - DNA, 19 bp, Mus musculus
  siRNA target sequence for D130059P03Rik (NM_177185.3,3556-3574).
ggccccttctaaactaaca

SEQ ID NO: 661020 - DNA, 19 bp, Mus musculus
  siRNA target sequence for D130059P03Rik (NM_177185.3,3558-3576).
ccccttctaaactaacaaa

SEQ ID NO: 661021 - DNA, 19 bp, Mus musculus
  siRNA target sequence for D130059P03Rik (NM_177185.3,3560-3578).
ccttctaaactaacaaact

SEQ ID NO: 661022 - DNA, 19 bp, Mus musculus
  siRNA target sequence for D130059P03Rik (NM_177185.3,3615-3633).
gtggaatcccaatgaatgt

SEQ ID NO: 661023 - DNA, 19 bp, Mus musculus
  siRNA target sequence for D130059P03Rik (NM_177185.3,3642-3660).
gcagaggtagcaaccttaa

SEQ ID NO: 661024 - DNA, 19 bp, Mus musculus
  siRNA target sequence for D130059P03Rik (NM_177185.3,3647-3665).
ggtagcaaccttaactcaa

SEQ ID NO: 661025 - DNA, 19 bp, Mus musculus
  siRNA target sequence for D130059P03Rik (NM_177185.3,3671-3689).
gctaataggactagtctat

SEQ ID NO: 661026 - DNA, 19 bp, Mus musculus
  siRNA target sequence for D130059P03Rik (NM_177185.3,3719-3737).
gctactaaaccgttgtcta

SEQ ID NO: 661027 - DNA, 19 bp, Mus musculus
  siRNA target sequence for D130059P03Rik (NM_177185.3,3730-3748).
gttgtctactccacataga

SEQ ID NO: 661028 - DNA, 19 bp, Mus musculus
  siRNA target sequence for D130059P03Rik (NM_177185.3,3852-3870).
ctttgtctgtaacaaatca

SEQ ID NO: 661029 - DNA, 19 bp, Mus musculus
  siRNA target sequence for D130059P03Rik (NM_177185.3,3858-3876).
ctgtaacaaatcaaactgt

SEQ ID NO: 661030 - DNA, 19 bp, Mus musculus
  siRNA target sequence for D130059P03Rik (NM_177185.3,4012-4030).
cagcctaacccagaattta

SEQ ID NO: 661031 - DNA, 19 bp, Mus musculus
  siRNA target sequence for D130059P03Rik (NM_177185.3,4128-4146).
gtaaaggggacactaagtt

SEQ ID NO: 661032 - DNA, 19 bp, Mus musculus
  siRNA target sequence for D17H6S56E-5 (NM_033075.2,583-601).
gatgaagtctcgatcacta

SEQ ID NO: 661033 - DNA, 19 bp, Mus musculus
  siRNA target sequence for D17H6S56E-5 (NM_033075.2,633-651).
gatcaagactccaatgaca

SEQ ID NO: 661034 - DNA, 19 bp, Mus musculus
  siRNA target sequence for D17H6S56E-5 (NM_033075.2,639-657).
gactccaatgacaaccata

SEQ ID NO: 661035 - DNA, 19 bp, Mus musculus
  siRNA target sequence for D17H6S56E-5 (NM_033075.2,654-672).
cataagattccctaaagct

SEQ ID NO: 661036 - DNA, 19 bp, Mus musculus
  siRNA target sequence for D17H6S56E-5 (NM_033075.2,671-689).
ctaagacactgcagatctt

SEQ ID NO: 661037 - DNA, 19 bp, Mus musculus
  siRNA target sequence for D17H6S56E-5 (NM_033075.2,735-753).
ccatgaaccccataacctt

SEQ ID NO: 661038 - DNA, 19 bp, Mus musculus
  siRNA target sequence for D17H6S56E-5 (NM_033075.2,736-754).
catgaaccccataacctta

SEQ ID NO: 661039 - DNA, 19 bp, Mus musculus
  siRNA target sequence for D17H6S56E-5 (NM_033075.2,739-757).
gaaccccataaccttactt

SEQ ID NO: 661040 - DNA, 19 bp, Mus musculus
  siRNA target sequence for D17H6S56E-5 (NM_033075.2,773-791).
ctgctacggggactgtaat

SEQ ID NO: 661041 - DNA, 19 bp, Mus musculus
  siRNA target sequence for D17H6S56E-5 (NM_033075.2,775-793).
gctacggggactgtaatta

SEQ ID NO: 661042 - DNA, 19 bp, Mus musculus
  siRNA target sequence for D17H6S56E-5 (NM_033075.2,776-794).
ctacggggactgtaattaa

SEQ ID NO: 661043 - DNA, 19 bp, Mus musculus
  siRNA target sequence for D17H6S56E-5 (NM_033075.2,877-895).
gatcccctgggccttgtat

SEQ ID NO: 661044 - DNA, 19 bp, Mus musculus
  siRNA target sequence for D17H6S56E-5 (NM_033075.2,992-1010).
gtggaggaccagagtcata

SEQ ID NO: 661045 - DNA, 19 bp, Mus musculus
  siRNA target sequence for D17H6S56E-5 (NM_033075.2,994-1012).
ggaggaccagagtcatact

SEQ ID NO: 661046 - DNA, 19 bp, Mus musculus
  siRNA target sequence for D17H6S56E-5 (NM_033075.2,995-1013).
gaggaccagagtcatactt

SEQ ID NO: 661047 - DNA, 19 bp, Mus musculus
  siRNA target sequence for D17H6S56E-5 (NM_033075.2,997-1015).
ggaccagagtcatacttct

SEQ ID NO: 661048 - DNA, 19 bp, Mus musculus
  siRNA target sequence for D17H6S56E-5 (NM_033075.2,1052-1070).
cctggacgccaccgataaa

SEQ ID NO: 661049 - DNA, 19 bp, Mus musculus
  siRNA target sequence for D17H6S56E-5 (NM_033075.2,1053-1071).
ctggacgccaccgataaaa

SEQ ID NO: 661050 - DNA, 19 bp, Mus musculus
  siRNA target sequence for D17H6S56E-5 (NM_033075.2,1055-1073).
ggacgccaccgataaaaga

SEQ ID NO: 661051 - DNA, 19 bp, Mus musculus
  siRNA target sequence for D17H6S56E-5 (NM_033075.2,1056-1074).
gacgccaccgataaaagat

SEQ ID NO: 661052 - DNA, 19 bp, Mus musculus
  siRNA target sequence for D17H6S56E-5 (NM_033075.2,1058-1076).
cgccaccgataaaagatga

SEQ ID NO: 661053 - DNA, 19 bp, Mus musculus
  siRNA target sequence for D17H6S56E-5 (NM_033075.2,1114-1132).
caaggatgggggtatggat

SEQ ID NO: 661054 - DNA, 19 bp, Mus musculus
  siRNA target sequence for D17H6S56E-5 (NM_033075.2,1143-1161).
gctggatgcaaatgatctt

SEQ ID NO: 661055 - DNA, 19 bp, Mus musculus
  siRNA target sequence for D17H6S56E-5 (NM_033075.2,1179-1197).
caactgtaaccccattaca

SEQ ID NO: 661056 - DNA, 19 bp, Mus musculus
  siRNA target sequence for D17H6S56E-5 (NM_033075.2,1182-1200).
ctgtaaccccattacagtt

SEQ ID NO: 661057 - DNA, 19 bp, Mus musculus
  siRNA target sequence for D17H6S56E-5 (NM_033075.2,1282-1300).
gactatggagtaatgttta

SEQ ID NO: 661058 - DNA, 19 bp, Mus musculus
  siRNA target sequence for D17H6S56E-5 (NM_033075.2,1363-1381).
ggactcacggtgactcaat

SEQ ID NO: 661059 - DNA, 19 bp, Mus musculus
  siRNA target sequence for D17H6S56E-5 (NM_033075.2,1368-1386).
cacggtgactcaatcacaa

SEQ ID NO: 661060 - DNA, 19 bp, Mus musculus
  siRNA target sequence for D17H6S56E-5 (NM_033075.2,1372-1390).
gtgactcaatcacaaatca

SEQ ID NO: 661061 - DNA, 19 bp, Mus musculus
  siRNA target sequence for D17H6S56E-5 (NM_033075.2,1396-1414).
cccatttctcaggaactta

SEQ ID NO: 661062 - DNA, 19 bp, Mus musculus
  siRNA target sequence for D17H6S56E-5 (NM_033075.2,1427-1445).
ggccatgggacttgcttaa

SEQ ID NO: 661063 - DNA, 19 bp, Mus musculus
  siRNA target sequence for D17H6S56E-5 (NM_033075.2,1447-1465).
gccacttacctggtattga

SEQ ID NO: 661064 - DNA, 19 bp, Mus musculus
  siRNA target sequence for D17H6S56E-5 (NM_033075.2,1449-1467).
cacttacctggtattgaat

SEQ ID NO: 661065 - DNA, 19 bp, Mus musculus
  siRNA target sequence for D17H6S56E-5 (NM_033075.2,1451-1469).
cttacctggtattgaataa

SEQ ID NO: 661066 - DNA, 19 bp, Mus musculus
  siRNA target sequence for D17H6S56E-5 (NM_033075.2,1455-1473).
cctggtattgaataattct

SEQ ID NO: 661067 - DNA, 19 bp, Mus musculus
  siRNA target sequence for D17H6S56E-5 (NM_033075.2,1480-1498).
gagcttacaagtaaatgtt

SEQ ID NO: 661068 - DNA, 19 bp, Mus musculus
  siRNA target sequence for D17H6S56E-5 (NM_033075.2,1514-1532).
cccagccaccctattatga

SEQ ID NO: 661069 - DNA, 19 bp, Mus musculus
  siRNA target sequence for D17H6S56E-5 (NM_033075.2,1515-1533).
ccagccaccctattatgaa

SEQ ID NO: 661070 - DNA, 19 bp, Mus musculus
  siRNA target sequence for D17H6S56E-5 (NM_033075.2,1540-1558).
gccgttcctggaaattata

SEQ ID NO: 661071 - DNA, 19 bp, Mus musculus
  siRNA target sequence for D17H6S56E-5 (NM_033075.2,1601-1619).
gtaaagggagactaacctt

SEQ ID NO: 661072 - DNA, 19 bp, Mus musculus
  siRNA target sequence for D17H6S56E-5 (NM_033075.2,1610-1628).
gactaaccttagagctaat

SEQ ID NO: 661073 - DNA, 19 bp, Mus musculus
  siRNA target sequence for D17H6S56E-5 (NM_033075.2,1623-1641).
gctaattcagggaaaagga

SEQ ID NO: 661074 - DNA, 19 bp, Mus musculus
  siRNA target sequence for D17H6S56E-5 (NM_033075.2,1662-1680).
ccacacccatagacattta

SEQ ID NO: 661075 - DNA, 19 bp, Mus musculus
  siRNA target sequence for D17H6S56E-5 (NM_033075.2,1700-1718).
ccccagacagggatgctta

SEQ ID NO: 661076 - DNA, 19 bp, Mus musculus
  siRNA target sequence for D17H6S56E-5 (NM_033075.2,1705-1723).
gacagggatgcttacatta

SEQ ID NO: 661077 - DNA, 19 bp, Mus musculus
  siRNA target sequence for D17H6S56E-5 (NM_033075.2,1707-1725).
cagggatgcttacattata

SEQ ID NO: 661078 - DNA, 19 bp, Mus musculus
  siRNA target sequence for D17H6S56E-5 (NM_033075.2,1829-1847).
cccctagaattcttcgtta

SEQ ID NO: 661079 - DNA, 19 bp, Mus musculus
  siRNA target sequence for D17H6S56E-5 (NM_033075.2,1855-1873).
gagatggggaccagactat

SEQ ID NO: 661080 - DNA, 19 bp, Mus musculus
  siRNA target sequence for D17H6S56E-5 (NM_033075.2,1857-1875).
gatggggaccagactatct

SEQ ID NO: 661081 - DNA, 19 bp, Mus musculus
  siRNA target sequence for D17H6S56E-5 (NM_033075.2,1934-1952).
ccttcgacttccaagatga

SEQ ID NO: 661082 - DNA, 19 bp, Mus musculus
  siRNA target sequence for D17H6S56E-5 (NM_033075.2,1939-1957).
gacttccaagatgagaatt

SEQ ID NO: 661083 - DNA, 19 bp, Mus musculus
  siRNA target sequence for D17H6S56E-5 (NM_033075.2,1951-1969).
gagaattataaagtgttaa

SEQ ID NO: 661084 - DNA, 19 bp, Mus musculus
  siRNA target sequence for D17H6S56E-5 (NM_033075.2,1965-1983).
gttaagctctgccatagat

SEQ ID NO: 661085 - DNA, 19 bp, Mus musculus
  siRNA target sequence for D17H6S56E-5 (NM_033075.2,1976-1994).
ccatagatgcagatttaat

SEQ ID NO: 661086 - DNA, 19 bp, Mus musculus
  siRNA target sequence for D17H6S56E-5 (NM_033075.2,1995-2013).
ggaactagggaaatcctta

SEQ ID NO: 661087 - DNA, 19 bp, Mus musculus
  siRNA target sequence for D17H6S56E-5 (NM_033075.2,2019-2037).
gtccaaaacctcattaact

SEQ ID NO: 661088 - DNA, 19 bp, Mus musculus
  siRNA target sequence for D17H6S56E-5 (NM_033075.2,2046-2064).
ggaggccacccttcgaaat

SEQ ID NO: 661089 - DNA, 19 bp, Mus musculus
  siRNA target sequence for D17H6S56E-5 (NM_033075.2,2097-2115).
ggatggactgtgtaaacct

SEQ ID NO: 661090 - DNA, 19 bp, Mus musculus
  siRNA target sequence for D17H6S56E-5 (NM_033075.2,2133-2151).
cacctttgtggataactta

SEQ ID NO: 661091 - DNA, 19 bp, Mus musculus
  siRNA target sequence for D17H6S56E-5 (NM_033075.2,2226-2244).
gcctgtttggattacagtt

SEQ ID NO: 661092 - DNA, 19 bp, Mus musculus
  siRNA target sequence for D17H6S56E-5 (NM_033075.2,2268-2286).
gggcctggtcatactcatt

SEQ ID NO: 661093 - DNA, 19 bp, Mus musculus
  siRNA target sequence for D17H6S56E-5 (NM_033075.2,2272-2290).
ctggtcatactcattgtga

SEQ ID NO: 661094 - DNA, 19 bp, Mus musculus
  siRNA target sequence for D17H6S56E-5 (NM_033075.2,2274-2292).
ggtcatactcattgtgata

SEQ ID NO: 661095 - DNA, 19 bp, Mus musculus
  siRNA target sequence for D17H6S56E-5 (NM_033075.2,2275-2293).
gtcatactcattgtgatat

SEQ ID NO: 661096 - DNA, 19 bp, Mus musculus
  siRNA target sequence for D17H6S56E-5 (NM_033075.2,2308-2326).
gttaaccccctgatggatt

SEQ ID NO: 661097 - DNA, 19 bp, Mus musculus
  siRNA target sequence for D17H6S56E-5 (NM_033075.2,2344-2362).
ccaccatccgacacgtatt

SEQ ID NO: 661098 - DNA, 19 bp, Mus musculus
  siRNA target sequence for D930020E02 (NM_173420.1,693-711).
ctacgtgataccaactctt

SEQ ID NO: 661099 - DNA, 19 bp, Mus musculus
  siRNA target sequence for D930020E02 (NM_173420.1,780-798).
ctgtccatttggacagata

SEQ ID NO: 661100 - DNA, 19 bp, Mus musculus
  siRNA target sequence for D930020E02 (NM_173420.1,782-800).
gtccatttggacagataca

SEQ ID NO: 661101 - DNA, 19 bp, Mus musculus
  siRNA target sequence for D930020E02 (NM_173420.1,801-819).
cccatgaagcttcatctta

SEQ ID NO: 661102 - DNA, 19 bp, Mus musculus
  siRNA target sequence for D930020E02 (NM_173420.1,924-942).
gacagaagggcgattgctt

SEQ ID NO: 661103 - DNA, 19 bp, Mus musculus
  siRNA target sequence for D930020E02 (NM_173420.1,926-944).
cagaagggcgattgctttt

SEQ ID NO: 661104 - DNA, 19 bp, Mus musculus
  siRNA target sequence for D930020E02 (NM_173420.1,928-946).
gaagggcgattgcttttct

SEQ ID NO: 661105 - DNA, 19 bp, Mus musculus
  siRNA target sequence for D930020E02 (NM_173420.1,966-984).
ggcatatttcggatcatca

SEQ ID NO: 661106 - DNA, 19 bp, Mus musculus
  siRNA target sequence for D930020E02 (NM_173420.1,986-1004).
ccggataacctctgtgata

SEQ ID NO: 661107 - DNA, 19 bp, Mus musculus
  siRNA target sequence for D930020E02 (NM_173420.1,988-1006).
ggataacctctgtgatata

SEQ ID NO: 661108 - DNA, 19 bp, Mus musculus
  siRNA target sequence for D930020E02 (NM_173420.1,989-1007).
gataacctctgtgatatat

SEQ ID NO: 661109 - DNA, 19 bp, Mus musculus
  siRNA target sequence for D930020E02 (NM_173420.1,1009-1027).
cccataaggaccgtttctt

SEQ ID NO: 661110 - DNA, 19 bp, Mus musculus
  siRNA target sequence for D930020E02 (NM_173420.1,1047-1065).
ctctggggaccactcttta

SEQ ID NO: 661111 - DNA, 19 bp, Mus musculus
  siRNA target sequence for D930020E02 (NM_173420.1,1049-1067).
ctggggaccactctttact

SEQ ID NO: 661112 - DNA, 19 bp, Mus musculus
  siRNA target sequence for D930020E02 (NM_173420.1,1123-1141).
cagcatatgccacttttgt

SEQ ID NO: 661113 - DNA, 19 bp, Mus musculus
  siRNA target sequence for D930020E02 (NM_173420.1,1188-1206).
ccttctaccagtcatgaaa

SEQ ID NO: 661114 - DNA, 19 bp, Mus musculus
  siRNA target sequence for D930020E02 (NM_173420.1,1189-1207).
cttctaccagtcatgaaaa

SEQ ID NO: 661115 - DNA, 19 bp, Mus musculus
  siRNA target sequence for D930020E02 (NM_173420.1,1222-1240).
ccacccatacgttcaaaca

SEQ ID NO: 661116 - DNA, 19 bp, Mus musculus
  siRNA target sequence for D930020E02 (NM_173420.1,1231-1249).
cgttcaaacaggcaatgaa

SEQ ID NO: 661117 - DNA, 19 bp, Mus musculus
  siRNA target sequence for D930020E02 (NM_173420.1,1232-1250).
gttcaaacaggcaatgaaa

SEQ ID NO: 661118 - DNA, 19 bp, Mus musculus
  siRNA target sequence for D930020E02 (NM_173420.1,1252-1270).
gaccggatgccaaatggaa

SEQ ID NO: 661119 - DNA, 19 bp, Mus musculus
  siRNA target sequence for D930020E02 (NM_173420.1,1254-1272).
ccggatgccaaatggaaaa

SEQ ID NO: 661120 - DNA, 19 bp, Mus musculus
  siRNA target sequence for D930020E02 (NM_173420.1,1255-1273).
cggatgccaaatggaaaaa

SEQ ID NO: 661121 - DNA, 19 bp, Mus musculus
  siRNA target sequence for D930020E02 (NM_173420.1,1310-1328).
ctcgaagccggcttactat

SEQ ID NO: 661122 - DNA, 19 bp, Mus musculus
  siRNA target sequence for D930020E02 (NM_173420.1,1330-1348).
cctgcccaacagacatcaa

SEQ ID NO: 661123 - DNA, 19 bp, Mus musculus
  siRNA target sequence for D930020E02 (NM_173420.1,1331-1349).
ctgcccaacagacatcaaa

SEQ ID NO: 661124 - DNA, 19 bp, Mus musculus
  siRNA target sequence for D930020E02 (NM_173420.1,1333-1351).
gcccaacagacatcaaaca

SEQ ID NO: 661125 - DNA, 19 bp, Mus musculus
  siRNA target sequence for D930020E02 (NM_173420.1,1398-1416).
cccttcggcacctgctata

SEQ ID NO: 661126 - DNA, 19 bp, Mus musculus
  siRNA target sequence for D930020E02 (NM_173420.1,1408-1426).
cctgctataacctcacttt

SEQ ID NO: 661127 - DNA, 19 bp, Mus musculus
  siRNA target sequence for D930020E02 (NM_173420.1,1409-1427).
ctgctataacctcacttta

SEQ ID NO: 661128 - DNA, 19 bp, Mus musculus
  siRNA target sequence for D930020E02 (NM_173420.1,1444-1462).
caacccaccctgttaccat

SEQ ID NO: 661129 - DNA, 19 bp, Mus musculus
  siRNA target sequence for D930020E02 (NM_173420.1,1477-1495).
cccacttcaaggtcaaact

SEQ ID NO: 661130 - DNA, 19 bp, Mus musculus
  siRNA target sequence for D930020E02 (NM_173420.1,1608-1626).
gacatcacctccaacattt

SEQ ID NO: 661131 - DNA, 19 bp, Mus musculus
  siRNA target sequence for D930020E02 (NM_173420.1,1690-1708).
gcggaacatcgacttacat

SEQ ID NO: 661132 - DNA, 19 bp, Mus musculus
  siRNA target sequence for D930020E02 (NM_173420.1,1692-1710).
ggaacatcgacttacatct

SEQ ID NO: 661133 - DNA, 19 bp, Mus musculus
  siRNA target sequence for D930020E02 (NM_173420.1,1790-1808).
ggtgcctgttccccttttt

SEQ ID NO: 661134 - DNA, 19 bp, Mus musculus
  siRNA target sequence for D930020E02 (NM_173420.1,1923-1941).
gccacctcgactctctatt

SEQ ID NO: 661135 - DNA, 19 bp, Mus musculus
  siRNA target sequence for D930020E02 (NM_173420.1,1924-1942).
ccacctcgactctctattt

SEQ ID NO: 661136 - DNA, 19 bp, Mus musculus
  siRNA target sequence for D930020E02 (NM_173420.1,1999-2017).
ctaccctccagaaccaaat

SEQ ID NO: 661137 - DNA, 19 bp, Mus musculus
  siRNA target sequence for D930020E02 (NM_173420.1,2002-2020).
ccctccagaaccaaataga

SEQ ID NO: 661138 - DNA, 19 bp, Mus musculus
  siRNA target sequence for D930020E02 (NM_173420.1,2021-2039).
ctcgctcgcaggtgttgtt

SEQ ID NO: 661139 - DNA, 19 bp, Mus musculus
  siRNA target sequence for D930020E02 (NM_173420.1,2023-2041).
cgctcgcaggtgttgttct

SEQ ID NO: 661140 - DNA, 19 bp, Mus musculus
  siRNA target sequence for D930020E02 (NM_173420.1,2024-2042).
gctcgcaggtgttgttcta

SEQ ID NO: 661141 - DNA, 19 bp, Mus musculus
  siRNA target sequence for D930020E02 (NM_173420.1,2027-2045).
cgcaggtgttgttctacaa

SEQ ID NO: 661142 - DNA, 19 bp, Mus musculus
  siRNA target sequence for D930020E02 (NM_173420.1,2028-2046).
gcaggtgttgttctacaaa

SEQ ID NO: 661143 - DNA, 19 bp, Mus musculus
  siRNA target sequence for D930020E02 (NM_173420.1,2029-2047).
caggtgttgttctacaaaa

SEQ ID NO: 661144 - DNA, 19 bp, Mus musculus
  siRNA target sequence for D930020E02 (NM_173420.1,2123-2141).
cgtaaaccagtctggaata

SEQ ID NO: 661145 - DNA, 19 bp, Mus musculus
  siRNA target sequence for D930020E02 (NM_173420.1,2165-2183).
ccaagaacgagcatctgaa

SEQ ID NO: 661146 - DNA, 19 bp, Mus musculus
  siRNA target sequence for D930020E02 (NM_173420.1,2383-2401).
gcatcctccaaaatttcca

SEQ ID NO: 661147 - DNA, 19 bp, Mus musculus
  siRNA target sequence for Egfl3 (NM_172273.1,501-519).
ctgtctctgccgaaatgga

SEQ ID NO: 661148 - DNA, 19 bp, Mus musculus
  siRNA target sequence for Egfl3 (NM_172273.1,627-645).
caactgcagttgccttaat

SEQ ID NO: 661149 - DNA, 19 bp, Mus musculus
  siRNA target sequence for Egfl3 (NM_172273.1,1130-1148).
ggccaggctgtgaacaaat

SEQ ID NO: 661150 - DNA, 19 bp, Mus musculus
  siRNA target sequence for Egfl3 (NM_172273.1,1428-1446).
cctgtgtcatgctaccaat

SEQ ID NO: 661151 - DNA, 19 bp, Mus musculus
  siRNA target sequence for Egfl3 (NM_172273.1,1536-1554).
gtgttcctgtcagaacaat

SEQ ID NO: 661152 - DNA, 19 bp, Mus musculus
  siRNA target sequence for Egfl5 (NM_172694.1,386-404).
cggctccccggagatcatt

SEQ ID NO: 661153 - DNA, 19 bp, Mus musculus
  siRNA target sequence for Egfl5 (NM_172694.1,674-692).
caccgaagcccctacttct

SEQ ID NO: 661154 - DNA, 19 bp, Mus musculus
  siRNA target sequence for Egfl5 (NM_172694.1,691-709).
ctcctcccccagagcatat

SEQ ID NO: 661155 - DNA, 19 bp, Mus musculus
  siRNA target sequence for Egfl5 (NM_172694.1,693-711).
cctcccccagagcatatgt

SEQ ID NO: 661156 - DNA, 19 bp, Mus musculus
  siRNA target sequence for Egfl5 (NM_172694.1,822-840).
ggcttttacctgaatcaca

SEQ ID NO: 661157 - DNA, 19 bp, Mus musculus
  siRNA target sequence for Egfl5 (NM_172694.1,885-903).
gttagcatcctctgtaaca

SEQ ID NO: 661158 - DNA, 19 bp, Mus musculus
  siRNA target sequence for Egfl5 (NM_172694.1,967-985).
gacattatggctttggtaa

SEQ ID NO: 661159 - DNA, 19 bp, Mus musculus
  siRNA target sequence for Egfl5 (NM_172694.1,1010-1028).
caacaaccggtctgatagt

SEQ ID NO: 661160 - DNA, 19 bp, Mus musculus
  siRNA target sequence for Egfl5 (NM_172694.1,1013-1031).
caaccggtctgatagttgt

SEQ ID NO: 661161 - DNA, 19 bp, Mus musculus
  siRNA target sequence for Egfl5 (NM_172694.1,1016-1034).
ccggtctgatagttgtgat

SEQ ID NO: 661162 - DNA, 19 bp, Mus musculus
  siRNA target sequence for Egfl5 (NM_172694.1,1019-1037).
gtctgatagttgtgatgtt

SEQ ID NO: 661163 - DNA, 19 bp, Mus musculus
  siRNA target sequence for Egfl5 (NM_172694.1,1038-1056).
cacacaggtgcttgtctaa

SEQ ID NO: 661164 - DNA, 19 bp, Mus musculus
  siRNA target sequence for Egfl5 (NM_172694.1,1058-1076).
ctgccaggaaaatagtaaa

SEQ ID NO: 661165 - DNA, 19 bp, Mus musculus
  siRNA target sequence for Egfl5 (NM_172694.1,1077-1095).
ggggaacactgtgaagaat

SEQ ID NO: 661166 - DNA, 19 bp, Mus musculus
  siRNA target sequence for Egfl5 (NM_172694.1,1119-1137).
cctgatgccgcaaaacagt

SEQ ID NO: 661167 - DNA, 19 bp, Mus musculus
  siRNA target sequence for Egfl5 (NM_172694.1,1239-1257).
ggccagaactgcaataaat

SEQ ID NO: 661168 - DNA, 19 bp, Mus musculus
  siRNA target sequence for Egfl5 (NM_172694.1,1291-1309).
gcacacagtgcgaatgtca

SEQ ID NO: 661169 - DNA, 19 bp, Mus musculus
  siRNA target sequence for Egfl5 (NM_172694.1,1292-1310).
cacacagtgcgaatgtcat

SEQ ID NO: 661170 - DNA, 19 bp, Mus musculus
  siRNA target sequence for Egfl5 (NM_172694.1,1311-1329).
ggccatgtggacccaatta

SEQ ID NO: 661171 - DNA, 19 bp, Mus musculus
  siRNA target sequence for Egfl5 (NM_172694.1,1312-1330).
gccatgtggacccaattaa

SEQ ID NO: 661172 - DNA, 19 bp, Mus musculus
  siRNA target sequence for Egfl5 (NM_172694.1,1313-1331).
ccatgtggacccaattaaa

SEQ ID NO: 661173 - DNA, 19 bp, Mus musculus
  siRNA target sequence for Egfl5 (NM_172694.1,1451-1469).
caagcaagaagttattgtt

SEQ ID NO: 661174 - DNA, 19 bp, Mus musculus
  siRNA target sequence for Egfl5 (NM_172694.1,1476-1494).
cctgaaggttctaccattt

SEQ ID NO: 661175 - DNA, 19 bp, Mus musculus
  siRNA target sequence for Egfl5 (NM_172694.1,1482-1500).
ggttctaccattttggttt

SEQ ID NO: 661176 - DNA, 19 bp, Mus musculus
  siRNA target sequence for Egfl5 (NM_172694.1,1497-1515).
gtttccaatgcctctttga

SEQ ID NO: 661177 - DNA, 19 bp, Mus musculus
  siRNA target sequence for Egfl5 (NM_172694.1,1522-1540).
cagtgcccacccctgttat

SEQ ID NO: 661178 - DNA, 19 bp, Mus musculus
  siRNA target sequence for Egfl5 (NM_172694.1,1526-1544).
gcccacccctgttataaat

SEQ ID NO: 661179 - DNA, 19 bp, Mus musculus
  siRNA target sequence for Egfl5 (NM_172694.1,1623-1641).
gtatcatggacccagttta

SEQ ID NO: 661180 - DNA, 19 bp, Mus musculus
  siRNA target sequence for Egfl5 (NM_172694.1,1630-1648).
ggacccagtttaacatcat

SEQ ID NO: 661181 - DNA, 19 bp, Mus musculus
  siRNA target sequence for Egfl5 (NM_172694.1,1760-1778).
cgagctgaaagaagacaat

SEQ ID NO: 661182 - DNA, 19 bp, Mus musculus
  siRNA target sequence for Egfl5 (NM_172694.1,1816-1834).
cagatgtgtcgggattgtt

SEQ ID NO: 661183 - DNA, 19 bp, Mus musculus
  siRNA target sequence for Egfl5 (NM_172694.1,1878-1896).
ctgacaacacctattcata

SEQ ID NO: 661184 - DNA, 19 bp, Mus musculus
  siRNA target sequence for Epb4.1l4a (NM_013512.1,65-83).
gcgccgttccggaagaatt

SEQ ID NO: 661185 - DNA, 19 bp, Mus musculus
  siRNA target sequence for Epb4.1l4a (NM_013512.1,66-84).
cgccgttccggaagaattt

SEQ ID NO: 661186 - DNA, 19 bp, Mus musculus
  siRNA target sequence for Epb4.1l4a (NM_013512.1,67-85).
gccgttccggaagaatttt

SEQ ID NO: 661187 - DNA, 19 bp, Mus musculus
  siRNA target sequence for Epb4.1l4a (NM_013512.1,70-88).
gttccggaagaattttact

SEQ ID NO: 661188 - DNA, 19 bp, Mus musculus
  siRNA target sequence for Epb4.1l4a (NM_013512.1,79-97).
gaattttactgcgaagttt

SEQ ID NO: 661189 - DNA, 19 bp, Mus musculus
  siRNA target sequence for Epb4.1l4a (NM_013512.1,139-157).
cagggcatcaagaagtcaa

SEQ ID NO: 661190 - DNA, 19 bp, Mus musculus
  siRNA target sequence for Epb4.1l4a (NM_013512.1,180-198).
ccacgttttccgtcacata

SEQ ID NO: 661191 - DNA, 19 bp, Mus musculus
  siRNA target sequence for Epb4.1l4a (NM_013512.1,181-199).
cacgttttccgtcacataa

SEQ ID NO: 661192 - DNA, 19 bp, Mus musculus
  siRNA target sequence for Epb4.1l4a (NM_013512.1,201-219).
cctcgtggagatagattat

SEQ ID NO: 661193 - DNA, 19 bp, Mus musculus
  siRNA target sequence for Epb4.1l4a (NM_013512.1,204-222).
cgtggagatagattatttt

SEQ ID NO: 661194 - DNA, 19 bp, Mus musculus
  siRNA target sequence for Epb4.1l4a (NM_013512.1,303-321).
caacactggacctccatat

SEQ ID NO: 661195 - DNA, 19 bp, Mus musculus
  siRNA target sequence for Epb4.1l4a (NM_013512.1,310-328).
ggacctccatatactttgt

SEQ ID NO: 661196 - DNA, 19 bp, Mus musculus
  siRNA target sequence for Epb4.1l4a (NM_013512.1,311-329).
gacctccatatactttgta

SEQ ID NO: 661197 - DNA, 19 bp, Mus musculus
  siRNA target sequence for Epb4.1l4a (NM_013512.1,313-331).
cctccatatactttgtatt

SEQ ID NO: 661198 - DNA, 19 bp, Mus musculus
  siRNA target sequence for Epb4.1l4a (NM_013512.1,435-453).
gccttgccctgtcaatatt

SEQ ID NO: 661199 - DNA, 19 bp, Mus musculus
  siRNA target sequence for Epb4.1l4a (NM_013512.1,514-532).
cacactgcggggtatgtgt

SEQ ID NO: 661200 - DNA, 19 bp, Mus musculus
  siRNA target sequence for Epb4.1l4a (NM_013512.1,531-549).
gtcggagtaccggtttgtt

SEQ ID NO: 661201 - DNA, 19 bp, Mus musculus
  siRNA target sequence for Epb4.1l4a (NM_013512.1,577-595).
gccatagaaaggattcata

SEQ ID NO: 661202 - DNA, 19 bp, Mus musculus
  siRNA target sequence for Epb4.1l4a (NM_013512.1,620-638).
ccgaagctgagctgaatta

SEQ ID NO: 661203 - DNA, 19 bp, Mus musculus
  siRNA target sequence for Epb4.1l4a (NM_013512.1,734-752).
cgggagttgtcgtctataa

SEQ ID NO: 661204 - DNA, 19 bp, Mus musculus
  siRNA target sequence for Epb4.1l4a (NM_013512.1,739-757).
gttgtcgtctataagaata

SEQ ID NO: 661205 - DNA, 19 bp, Mus musculus
  siRNA target sequence for Epb4.1l4a (NM_013512.1,742-760).
gtcgtctataagaataaaa

SEQ ID NO: 661206 - DNA, 19 bp, Mus musculus
  siRNA target sequence for Epb4.1l4a (NM_013512.1,763-781).
caagtggggaagtatttct

SEQ ID NO: 661207 - DNA, 19 bp, Mus musculus
  siRNA target sequence for Epb4.1l4a (NM_013512.1,837-855).
gggaaaagactgtaatgaa

SEQ ID NO: 661208 - DNA, 19 bp, Mus musculus
  siRNA target sequence for Epb4.1l4a (NM_013512.1,914-932).
gcgtagagcaccatacgtt

SEQ ID NO: 661209 - DNA, 19 bp, Mus musculus
  siRNA target sequence for Epb4.1l4a (NM_013512.1,916-934).
gtagagcaccatacgtttt

SEQ ID NO: 661210 - DNA, 19 bp, Mus musculus
  siRNA target sequence for Epb4.1l4a (NM_013512.1,922-940).
caccatacgtttttcagaa

SEQ ID NO: 661211 - DNA, 19 bp, Mus musculus
  siRNA target sequence for Epb4.1l4a (NM_013512.1,942-960).
gccggacacagaatcaaat

SEQ ID NO: 661212 - DNA, 19 bp, Mus musculus
  siRNA target sequence for Epb4.1l4a (NM_013512.1,943-961).
ccggacacagaatcaaatt

SEQ ID NO: 661213 - DNA, 19 bp, Mus musculus
  siRNA target sequence for Epb4.1l4a (NM_013512.1,945-963).
ggacacagaatcaaattca

SEQ ID NO: 661214 - DNA, 19 bp, Mus musculus
  siRNA target sequence for Epb4.1l4a (NM_013512.1,981-999).
caagtttgggtccataagt

SEQ ID NO: 661215 - DNA, 19 bp, Mus musculus
  siRNA target sequence for Epb4.1l4a (NM_013512.1,989-1007).
ggtccataagttataaaca

SEQ ID NO: 661216 - DNA, 19 bp, Mus musculus
  siRNA target sequence for Epb4.1l4a (NM_013512.1,1026-1044).
gcaaatgagccgagatctt

SEQ ID NO: 661217 - DNA, 19 bp, Mus musculus
  siRNA target sequence for Epb4.1l4a (NM_013512.1,1027-1045).
caaatgagccgagatcttt

SEQ ID NO: 661218 - DNA, 19 bp, Mus musculus
  siRNA target sequence for Epb4.1l4a (NM_013512.1,1082-1100).
gaagtcgaagcaagactta

SEQ ID NO: 661219 - DNA, 19 bp, Mus musculus
  siRNA target sequence for Epb4.1l4a (NM_013512.1,1123-1141).
cagcccactggatcaaaca

SEQ ID NO: 661220 - DNA, 19 bp, Mus musculus
  siRNA target sequence for Epb4.1l4a (NM_013512.1,1126-1144).
cccactggatcaaacaaca

SEQ ID NO: 661221 - DNA, 19 bp, Mus musculus
  siRNA target sequence for Epb4.1l4a (NM_013512.1,1127-1145).
ccactggatcaaacaacat

SEQ ID NO: 661222 - DNA, 19 bp, Mus musculus
  siRNA target sequence for Epb4.1l4a (NM_013512.1,1166-1184).
cggaaaacggggagaatga

SEQ ID NO: 661223 - DNA, 19 bp, Mus musculus
  siRNA target sequence for Epb4.1l4a (NM_013512.1,1204-1222).
gcgccttccccagtgaaaa

SEQ ID NO: 661224 - DNA, 19 bp, Mus musculus
  siRNA target sequence for Epb4.1l4a (NM_013512.1,1207-1225).
ccttccccagtgaaaagtt

SEQ ID NO: 661225 - DNA, 19 bp, Mus musculus
  siRNA target sequence for Epb4.1l4a (NM_013512.1,1213-1231).
ccagtgaaaagttttaaga

SEQ ID NO: 661226 - DNA, 19 bp, Mus musculus
  siRNA target sequence for Epb4.1l4a (NM_013512.1,1334-1352).
gcactaagtcaccaaagtt

SEQ ID NO: 661227 - DNA, 19 bp, Mus musculus
  siRNA target sequence for Epb4.1l4a (NM_013512.1,1547-1565).
gaacccgccaggagaatga

SEQ ID NO: 661228 - DNA, 19 bp, Mus musculus
  siRNA target sequence for Epb4.1l4a (NM_013512.1,1585-1603).
cagtgggaagccgtgttaa

SEQ ID NO: 661229 - DNA, 19 bp, Mus musculus
  siRNA target sequence for Epb4.1l4a (NM_013512.1,1656-1674).
cagatctcgctcaagaagt

SEQ ID NO: 661230 - DNA, 19 bp, Mus musculus
  siRNA target sequence for Epb4.2 (NM_013513.1,242-260).
gctcccagcaccttacttt

SEQ ID NO: 661231 - DNA, 19 bp, Mus musculus
  siRNA target sequence for Epb4.2 (NM_013513.1,266-284).
ggggacagtccttcactat

SEQ ID NO: 661232 - DNA, 19 bp, Mus musculus
  siRNA target sequence for Epb4.2 (NM_013513.1,268-286).
ggacagtccttcactatca

SEQ ID NO: 661233 - DNA, 19 bp, Mus musculus
  siRNA target sequence for Epb4.2 (NM_013513.1,367-385).
ccttccaagatcaataaga

SEQ ID NO: 661234 - DNA, 19 bp, Mus musculus
  siRNA target sequence for Epb4.2 (NM_013513.1,620-638).
ctgaacgcacagaatatgt

SEQ ID NO: 661235 - DNA, 19 bp, Mus musculus
  siRNA target sequence for Epb4.2 (NM_013513.1,626-644).
gcacagaatatgtgttgaa

SEQ ID NO: 661236 - DNA, 19 bp, Mus musculus
  siRNA target sequence for Epb4.2 (NM_013513.1,752-770).
gtatggacaagcaagtgaa

SEQ ID NO: 661237 - DNA, 19 bp, Mus musculus
  siRNA target sequence for Epb4.2 (NM_013513.1,1022-1040).
gagtcgttaccacatttga

SEQ ID NO: 661238 - DNA, 19 bp, Mus musculus
  siRNA target sequence for Epb4.2 (NM_013513.1,1024-1042).
gtcgttaccacatttgatt

SEQ ID NO: 661239 - DNA, 19 bp, Mus musculus
  siRNA target sequence for Epb4.2 (NM_013513.1,1026-1044).
cgttaccacatttgattca

SEQ ID NO: 661240 - DNA, 19 bp, Mus musculus
  siRNA target sequence for Epb4.2 (NM_013513.1,1114-1132).
ggacagaggggccatatct

SEQ ID NO: 661241 - DNA, 19 bp, Mus musculus
  siRNA target sequence for Epb4.2 (NM_013513.1,1137-1155).
cttccaaacgtctgtagaa

SEQ ID NO: 661242 - DNA, 19 bp, Mus musculus
  siRNA target sequence for Epb4.2 (NM_013513.1,1160-1178).
ggatgaacagacctgattt

SEQ ID NO: 661243 - DNA, 19 bp, Mus musculus
  siRNA target sequence for Epb4.2 (NM_013513.1,1209-1227).
gcacccaagggctcctaat

SEQ ID NO: 661244 - DNA, 19 bp, Mus musculus
  siRNA target sequence for Epb4.2 (NM_013513.1,1212-1230).
cccaagggctcctaatgga

SEQ ID NO: 661245 - DNA, 19 bp, Mus musculus
  siRNA target sequence for Epb4.2 (NM_013513.1,1436-1454).
gtgaccgctgtgaagacat

SEQ ID NO: 661246 - DNA, 19 bp, Mus musculus
  siRNA target sequence for Epb4.2 (NM_013513.1,1475-1493).
ctgcaggatctcttcaaga

SEQ ID NO: 661247 - DNA, 19 bp, Mus musculus
  siRNA target sequence for Epb4.2 (NM_013513.1,1477-1495).
gcaggatctcttcaagaaa

SEQ ID NO: 661248 - DNA, 19 bp, Mus musculus
  siRNA target sequence for Epb4.2 (NM_013513.1,1577-1595).
gggatcctctacacatgtt

SEQ ID NO: 661249 - DNA, 19 bp, Mus musculus
  siRNA target sequence for Epb4.2 (NM_013513.1,1699-1717).
gcccaggctttgtactaca

SEQ ID NO: 661250 - DNA, 19 bp, Mus musculus
  siRNA target sequence for Epb4.2 (NM_013513.1,1700-1718).
cccaggctttgtactacaa

SEQ ID NO: 661251 - DNA, 19 bp, Mus musculus
  siRNA target sequence for Epb4.2 (NM_013513.1,1701-1719).
ccaggctttgtactacaat

SEQ ID NO: 661252 - DNA, 19 bp, Mus musculus
  siRNA target sequence for Epb4.2 (NM_013513.1,1890-1908).
ctgctttgcccaggaaaat

SEQ ID NO: 661253 - DNA, 19 bp, Mus musculus
  siRNA target sequence for Epb4.2 (NM_013513.1,1903-1921).
gaaaatatggccattggta

SEQ ID NO: 661254 - DNA, 19 bp, Mus musculus
  siRNA target sequence for Epb4.2 (NM_013513.1,1919-1937).
gtaaaccggatcttatcat

SEQ ID NO: 661255 - DNA, 19 bp, Mus musculus
  siRNA target sequence for Epb4.2 (NM_013513.1,1935-1953).
catcgagatgccaaagaga

SEQ ID NO: 661256 - DNA, 19 bp, Mus musculus
  siRNA target sequence for Epb4.2 (NM_013513.1,1972-1990).
ctcactgtctccgttagaa

SEQ ID NO: 661257 - DNA, 19 bp, Mus musculus
  siRNA target sequence for Epb4.2 (NM_013513.1,2022-2040).
ctgcatcatctccatcttt

SEQ ID NO: 661258 - DNA, 19 bp, Mus musculus
  siRNA target sequence for Epb4.2 (NM_013513.1,2037-2055).
ctttggaaggggactcatt

SEQ ID NO: 661259 - DNA, 19 bp, Mus musculus
  siRNA target sequence for Epb4.2 (NM_013513.1,2092-2110).
ccaggaagcagcctacata

SEQ ID NO: 661260 - DNA, 19 bp, Mus musculus
  siRNA target sequence for Epb4.2 (NM_013513.1,2154-2172).
cactgtggaagtagattgt

SEQ ID NO: 661261 - DNA, 19 bp, Mus musculus
  siRNA target sequence for Epb4.2 (NM_013513.1,2214-2232).
ggtggcccctgaagtttct

SEQ ID NO: 661262 - DNA, 19 bp, Mus musculus
  siRNA target sequence for Hrc (NM_010473.1,139-157).
gggcaactggaacaacaat

SEQ ID NO: 661263 - DNA, 19 bp, Mus musculus
  siRNA target sequence for Hrc (NM_010473.1,175-193).
ctcagaggacctatcaact

SEQ ID NO: 661264 - DNA, 19 bp, Mus musculus
  siRNA target sequence for Hrc (NM_010473.1,181-199).
ggacctatcaactgagttt

SEQ ID NO: 661265 - DNA, 19 bp, Mus musculus
  siRNA target sequence for Hrc (NM_010473.1,347-365).
gtcttcagagggcatgtta

SEQ ID NO: 661266 - DNA, 19 bp, Mus musculus
  siRNA target sequence for Hrc (NM_010473.1,378-396).
ggcaccgggaacatgacaa

SEQ ID NO: 661267 - DNA, 19 bp, Mus musculus
  siRNA target sequence for Hrc (NM_010473.1,379-397).
gcaccgggaacatgacaat

SEQ ID NO: 661268 - DNA, 19 bp, Mus musculus
  siRNA target sequence for Hrc (NM_010473.1,382-400).
ccgggaacatgacaatgaa

SEQ ID NO: 661269 - DNA, 19 bp, Mus musculus
  siRNA target sequence for Hrc (NM_010473.1,384-402).
gggaacatgacaatgaaga

SEQ ID NO: 661270 - DNA, 19 bp, Mus musculus
  siRNA target sequence for Hrc (NM_010473.1,673-691).
ccaaggccacagtgatgat

SEQ ID NO: 661271 - DNA, 19 bp, Mus musculus
  siRNA target sequence for Hrc (NM_010473.1,836-854).
ggtgactctggtgaataca

SEQ ID NO: 661272 - DNA, 19 bp, Mus musculus
  siRNA target sequence for Hrc (NM_010473.1,1032-1050).
gacgccaaggctatgaaga

SEQ ID NO: 661273 - DNA, 19 bp, Mus musculus
  siRNA target sequence for Hrc (NM_010473.1,1246-1264).
gcaccagtctcctagacat

SEQ ID NO: 661274 - DNA, 19 bp, Mus musculus
  siRNA target sequence for Hrc (NM_010473.1,1260-1278).
gacatgctcaccatgatct

SEQ ID NO: 661275 - DNA, 19 bp, Mus musculus
  siRNA target sequence for Hrc (NM_010473.1,1298-1316).
gaggtagcagtcaagtaca

SEQ ID NO: 661276 - DNA, 19 bp, Mus musculus
  siRNA target sequence for Hrc (NM_010473.1,1363-1381).
ggaggaggactctctagaa

SEQ ID NO: 661277 - DNA, 19 bp, Mus musculus
  siRNA target sequence for Hrc (NM_010473.1,1430-1448).
ggtgatgatgaggacattt

SEQ ID NO: 661278 - DNA, 19 bp, Mus musculus
  siRNA target sequence for Hrc (NM_010473.1,1441-1459).
ggacatttctactgagttt

SEQ ID NO: 661279 - DNA, 19 bp, Mus musculus
  siRNA target sequence for Hrc (NM_010473.1,1476-1494).
gccacaggctacaagatca

SEQ ID NO: 661280 - DNA, 19 bp, Mus musculus
  siRNA target sequence for Hrc (NM_010473.1,1483-1501).
gctacaagatcaagatgaa

SEQ ID NO: 661281 - DNA, 19 bp, Mus musculus
  siRNA target sequence for Hrc (NM_010473.1,1484-1502).
ctacaagatcaagatgaaa

SEQ ID NO: 661282 - DNA, 19 bp, Mus musculus
  siRNA target sequence for Hrc (NM_010473.1,1525-1543).
gcctgttcagggagagatt

SEQ ID NO: 661283 - DNA, 19 bp, Mus musculus
  siRNA target sequence for Hrc (NM_010473.1,1568-1586).
ggacccagttcaagagaat

SEQ ID NO: 661284 - DNA, 19 bp, Mus musculus
  siRNA target sequence for Hrc (NM_010473.1,1770-1788).
cactgagccatcataggaa

SEQ ID NO: 661285 - DNA, 19 bp, Mus musculus
  siRNA target sequence for Hrc (NM_010473.1,1850-1868).
ctactacctttcaccatta

SEQ ID NO: 661286 - DNA, 19 bp, Mus musculus
  siRNA target sequence for Hrc (NM_010473.1,1949-1967).
gatgcccaggagtacgaaa

SEQ ID NO: 661287 - DNA, 19 bp, Mus musculus
  siRNA target sequence for Hrc (NM_010473.1,1953-1971).
cccaggagtacgaaaatta

SEQ ID NO: 661288 - DNA, 19 bp, Mus musculus
  siRNA target sequence for Hrc (NM_010473.1,2011-2029).
ccgatgtaccgaatgtgaa

SEQ ID NO: 661289 - DNA, 19 bp, Mus musculus
  siRNA target sequence for Hrc (NM_010473.1,2012-2030).
cgatgtaccgaatgtgaaa

SEQ ID NO: 661290 - DNA, 19 bp, Mus musculus
  siRNA target sequence for Hrc (NM_010473.1,2072-2090).
cagtgtcagcactgtcaat

SEQ ID NO: 661291 - DNA, 19 bp, Mus musculus
  siRNA target sequence for Hrc (NM_010473.1,2133-2151).
caggaagctacgttgacta

SEQ ID NO: 661292 - DNA, 19 bp, Mus musculus
  siRNA target sequence for Hrc (NM_010473.1,2136-2154).
gaagctacgttgactattt

SEQ ID NO: 661293 - DNA, 19 bp, Mus musculus
  siRNA target sequence for Hspg2 (NM_008305.2,293-311).
ccgggctctggtaaatttt

SEQ ID NO: 661294 - DNA, 19 bp, Mus musculus
  siRNA target sequence for Hspg2 (NM_008305.2,294-312).
cgggctctggtaaatttta

SEQ ID NO: 661295 - DNA, 19 bp, Mus musculus
  siRNA target sequence for Hspg2 (NM_008305.2,420-438).
cccggagaccagattgtca

SEQ ID NO: 661296 - DNA, 19 bp, Mus musculus
  siRNA target sequence for Hspg2 (NM_008305.2,508-526).
cggacggatctcagattca

SEQ ID NO: 661297 - DNA, 19 bp, Mus musculus
  siRNA target sequence for Hspg2 (NM_008305.2,509-527).
ggacggatctcagattcaa

SEQ ID NO: 661298 - DNA, 19 bp, Mus musculus
  siRNA target sequence for Hspg2 (NM_008305.2,580-598).
ccccctgggggttcaagtt

SEQ ID NO: 661299 - DNA, 19 bp, Mus musculus
  siRNA target sequence for Hspg2 (NM_008305.2,716-734).
cagggacatgtctgatgaa

SEQ ID NO: 661300 - DNA, 19 bp, Mus musculus
  siRNA target sequence for Hspg2 (NM_008305.2,788-806).
gaaggtgtcacctttacca

SEQ ID NO: 661301 - DNA, 19 bp, Mus musculus
  siRNA target sequence for Hspg2 (NM_008305.2,845-863).
cacgcatggacctcagttt

SEQ ID NO: 661302 - DNA, 19 bp, Mus musculus
  siRNA target sequence for Hspg2 (NM_008305.2,847-865).
cgcatggacctcagtttct

SEQ ID NO: 661303 - DNA, 19 bp, Mus musculus
  siRNA target sequence for Hspg2 (NM_008305.2,1025-1043).
cgagttcgcctgtgaaaat

SEQ ID NO: 661304 - DNA, 19 bp, Mus musculus
  siRNA target sequence for Hspg2 (NM_008305.2,1045-1063).
ggcactgtgctctcaagtt

SEQ ID NO: 661305 - DNA, 19 bp, Mus musculus
  siRNA target sequence for Hspg2 (NM_008305.2,1067-1085).
gcgctgtgacggtgacttt

SEQ ID NO: 661306 - DNA, 19 bp, Mus musculus
  siRNA target sequence for Hspg2 (NM_008305.2,1100-1118).
gacagatgaggccaattgt

SEQ ID NO: 661307 - DNA, 19 bp, Mus musculus
  siRNA target sequence for Hspg2 (NM_008305.2,1127-1145).
gcagcctggagaagtatgt

SEQ ID NO: 661308 - DNA, 19 bp, Mus musculus
  siRNA target sequence for Hspg2 (NM_008305.2,1225-1243).
ccgaccgcagtgatgagtt

SEQ ID NO: 661309 - DNA, 19 bp, Mus musculus
  siRNA target sequence for Hspg2 (NM_008305.2,1226-1244).
cgaccgcagtgatgagttt

SEQ ID NO: 661310 - DNA, 19 bp, Mus musculus
  siRNA target sequence for Hspg2 (NM_008305.2,1338-1356).
gtccccacacccatcatca

SEQ ID NO: 661311 - DNA, 19 bp, Mus musculus
  siRNA target sequence for Hspg2 (NM_008305.2,1387-1405).
ctcatcccagggtgacaat

SEQ ID NO: 661312 - DNA, 19 bp, Mus musculus
  siRNA target sequence for Hspg2 (NM_008305.2,1420-1438).
ggcgtggcacgctgatcat

SEQ ID NO: 661313 - DNA, 19 bp, Mus musculus
  siRNA target sequence for Hspg2 (NM_008305.2,1831-1849).
ccctacccaagcagtttct

SEQ ID NO: 661314 - DNA, 19 bp, Mus musculus
  siRNA target sequence for Hspg2 (NM_008305.2,1886-1904).
ctacaaggtgcgctatgaa

SEQ ID NO: 661315 - DNA, 19 bp, Mus musculus
  siRNA target sequence for Hspg2 (NM_008305.2,2409-2427).
cctcagtgtgacaagtgta

SEQ ID NO: 661316 - DNA, 19 bp, Mus musculus
  siRNA target sequence for Hspg2 (NM_008305.2,2410-2428).
ctcagtgtgacaagtgtaa

SEQ ID NO: 661317 - DNA, 19 bp, Mus musculus
  siRNA target sequence for Hspg2 (NM_008305.2,2651-2669).
gcccaccacccaggaaatt

SEQ ID NO: 661318 - DNA, 19 bp, Mus musculus
  siRNA target sequence for Hspg2 (NM_008305.2,2653-2671).
ccaccacccaggaaattgt

SEQ ID NO: 661319 - DNA, 19 bp, Mus musculus
  siRNA target sequence for Hspg2 (NM_008305.2,3134-3152).
gttgcagggcaacaacatt

SEQ ID NO: 661320 - DNA, 19 bp, Mus musculus
  siRNA target sequence for Hspg2 (NM_008305.2,3784-3802).
ggtgtgccccaggttacta

SEQ ID NO: 661321 - DNA, 19 bp, Mus musculus
  siRNA target sequence for Hspg2 (NM_008305.2,4231-4249).
ggcagctgccagaaatata

SEQ ID NO: 661322 - DNA, 19 bp, Mus musculus
  siRNA target sequence for Hspg2 (NM_008305.2,4235-4253).
gctgccagaaatataccaa

SEQ ID NO: 661323 - DNA, 19 bp, Mus musculus
  siRNA target sequence for Hspg2 (NM_008305.2,4327-4345).
cactcttggaccctgatat

SEQ ID NO: 661324 - DNA, 19 bp, Mus musculus
  siRNA target sequence for Hspg2 (NM_008305.2,4335-4353).
gaccctgatatccagatta

SEQ ID NO: 661325 - DNA, 19 bp, Mus musculus
  siRNA target sequence for Hspg2 (NM_008305.2,4354-4372).
cgggcaataacatcatgtt

SEQ ID NO: 661326 - DNA, 19 bp, Mus musculus
  siRNA target sequence for Hspg2 (NM_008305.2,4465-4483).
ctgcgacccgagagcattt

SEQ ID NO: 661327 - DNA, 19 bp, Mus musculus
  siRNA target sequence for Hspg2 (NM_008305.2,4468-4486).
cgacccgagagcatttgct

SEQ ID NO: 661328 - DNA, 19 bp, Mus musculus
  siRNA target sequence for Hspg2 (NM_008305.2,4498-4516).
cagatctggatgaacttct

SEQ ID NO: 661329 - DNA, 19 bp, Mus musculus
  siRNA target sequence for Hspg2 (NM_008305.2,4542-4560).
ccacgggcagccagtatca

SEQ ID NO: 661330 - DNA, 19 bp, Mus musculus
  siRNA target sequence for Hspg2 (NM_008305.2,4720-4738).
gcgagttgtgtgaatgcaa

SEQ ID NO: 661331 - DNA, 19 bp, Mus musculus
  siRNA target sequence for Hspg2 (NM_008305.2,5278-5296).
cctgccgaaacctgattca

SEQ ID NO: 661332 - DNA, 19 bp, Mus musculus
  siRNA target sequence for Hspg2 (NM_008305.2,5720-5738).
ccccatgctggaatggata

SEQ ID NO: 661333 - DNA, 19 bp, Mus musculus
  siRNA target sequence for Hspg2 (NM_008305.2,6103-6121).
gccgagccaacaacaacat

SEQ ID NO: 661334 - DNA, 19 bp, Mus musculus
  siRNA target sequence for Hspg2 (NM_008305.2,6104-6122).
ccgagccaacaacaacatt

SEQ ID NO: 661335 - DNA, 19 bp, Mus musculus
  siRNA target sequence for Hspg2 (NM_008305.2,6191-6209).
ccctgcacccatcagaata

SEQ ID NO: 661336 - DNA, 19 bp, Mus musculus
  siRNA target sequence for Hspg2 (NM_008305.2,6195-6213).
gcacccatcagaatagagt

SEQ ID NO: 661337 - DNA, 19 bp, Mus musculus
  siRNA target sequence for Hspg2 (NM_008305.2,6343-6361).
caaggctgcggctatacca

SEQ ID NO: 661338 - DNA, 19 bp, Mus musculus
  siRNA target sequence for Hspg2 (NM_008305.2,6431-6449).
cgtcctggtctcgattaca

SEQ ID NO: 661339 - DNA, 19 bp, Mus musculus
  siRNA target sequence for Hspg2 (NM_008305.2,6823-6841).
ggcagactgtagatctgaa

SEQ ID NO: 661340 - DNA, 19 bp, Mus musculus
  siRNA target sequence for Hspg2 (NM_008305.2,7113-7131).
ggccaagatgccagtttca

SEQ ID NO: 661341 - DNA, 19 bp, Mus musculus
  siRNA target sequence for Hspg2 (NM_008305.2,7114-7132).
gccaagatgccagtttcaa

SEQ ID NO: 661342 - DNA, 19 bp, Mus musculus
  siRNA target sequence for Hspg2 (NM_008305.2,7126-7144).
gtttcaagtgccttattca

SEQ ID NO: 661343 - DNA, 19 bp, Mus musculus
  siRNA target sequence for Hspg2 (NM_008305.2,7217-7235).
ccccaacggctccatcatt

SEQ ID NO: 661344 - DNA, 19 bp, Mus musculus
  siRNA target sequence for Hspg2 (NM_008305.2,7218-7236).
cccaacggctccatcatta

SEQ ID NO: 661345 - DNA, 19 bp, Mus musculus
  siRNA target sequence for Hspg2 (NM_008305.2,7280-7298).
cgtggcttccaatgtctat

SEQ ID NO: 661346 - DNA, 19 bp, Mus musculus
  siRNA target sequence for Hspg2 (NM_008305.2,7284-7302).
gcttccaatgtctatggta

SEQ ID NO: 661347 - DNA, 19 bp, Mus musculus
  siRNA target sequence for Hspg2 (NM_008305.2,7285-7303).
cttccaatgtctatggtat

SEQ ID NO: 661348 - DNA, 19 bp, Mus musculus
  siRNA target sequence for Hspg2 (NM_008305.2,7308-7326).
cagagtgtcgtcaatctca

SEQ ID NO: 661349 - DNA, 19 bp, Mus musculus
  siRNA target sequence for Hspg2 (NM_008305.2,7643-7661).
ggtccaagttgaagaatct

SEQ ID NO: 661350 - DNA, 19 bp, Mus musculus
  siRNA target sequence for Hspg2 (NM_008305.2,7681-7699).
gccacacggccactttaca

SEQ ID NO: 661351 - DNA, 19 bp, Mus musculus
  siRNA target sequence for Hspg2 (NM_008305.2,7763-7781).
ctggcagcaccggatagaa

SEQ ID NO: 661352 - DNA, 19 bp, Mus musculus
  siRNA target sequence for Hspg2 (NM_008305.2,7818-7836).
gactcaggacagtacatct

SEQ ID NO: 661353 - DNA, 19 bp, Mus musculus
  siRNA target sequence for Hspg2 (NM_008305.2,7822-7840).
caggacagtacatctgtaa

SEQ ID NO: 661354 - DNA, 19 bp, Mus musculus
  siRNA target sequence for Hspg2 (NM_008305.2,7897-7915).
ctccatatgccaccataat

SEQ ID NO: 661355 - DNA, 19 bp, Mus musculus
  siRNA target sequence for Hspg2 (NM_008305.2,8150-8168).
ccaaggctcctctagcaat

SEQ ID NO: 661356 - DNA, 19 bp, Mus musculus
  siRNA target sequence for Hspg2 (NM_008305.2,8225-8243).
gctagagacccggaacata

SEQ ID NO: 661357 - DNA, 19 bp, Mus musculus
  siRNA target sequence for Hspg2 (NM_008305.2,8975-8993).
ggtgccagagcgagtgata

SEQ ID NO: 661358 - DNA, 19 bp, Mus musculus
  siRNA target sequence for Hspg2 (NM_008305.2,8985-9003).
cgagtgataccctacttca

SEQ ID NO: 661359 - DNA, 19 bp, Mus musculus
  siRNA target sequence for Hspg2 (NM_008305.2,9048-9066).
gcctacaggaagtttgaga

SEQ ID NO: 661360 - DNA, 19 bp, Mus musculus
  siRNA target sequence for Hspg2 (NM_008305.2,9186-9204).
ggaaggcctgagtttcgat

SEQ ID NO: 661361 - DNA, 19 bp, Mus musculus
  siRNA target sequence for Hspg2 (NM_008305.2,9187-9205).
gaaggcctgagtttcgatt

SEQ ID NO: 661362 - DNA, 19 bp, Mus musculus
  siRNA target sequence for Hspg2 (NM_008305.2,9190-9208).
ggcctgagtttcgatttga

SEQ ID NO: 661363 - DNA, 19 bp, Mus musculus
  siRNA target sequence for Hspg2 (NM_008305.2,9191-9209).
gcctgagtttcgatttgat

SEQ ID NO: 661364 - DNA, 19 bp, Mus musculus
  siRNA target sequence for Hspg2 (NM_008305.2,9295-9313).
ctcaaggatctctgattgt

SEQ ID NO: 661365 - DNA, 19 bp, Mus musculus
  siRNA target sequence for Hspg2 (NM_008305.2,9304-9322).
ctctgattgtgggcaattt

SEQ ID NO: 661366 - DNA, 19 bp, Mus musculus
  siRNA target sequence for Hspg2 (NM_008305.2,9497-9515).
cgtcaacctcacaacacat

SEQ ID NO: 661367 - DNA, 19 bp, Mus musculus
  siRNA target sequence for Hspg2 (NM_008305.2,9622-9640).
cggcagccgctgtgaacat

SEQ ID NO: 661368 - DNA, 19 bp, Mus musculus
  siRNA target sequence for Hspg2 (NM_008305.2,10042-10060).
ctgcggaacgcctgaacaa

SEQ ID NO: 661369 - DNA, 19 bp, Mus musculus
  siRNA target sequence for Hspg2 (NM_008305.2,10045-10063).
cggaacgcctgaacaaaga

SEQ ID NO: 661370 - DNA, 19 bp, Mus musculus
  siRNA target sequence for Hspg2 (NM_008305.2,10046-10064).
ggaacgcctgaacaaagat

SEQ ID NO: 661371 - DNA, 19 bp, Mus musculus
  siRNA target sequence for Hspg2 (NM_008305.2,10184-10202).
cccagccaccaatatgagt

SEQ ID NO: 661372 - DNA, 19 bp, Mus musculus
  siRNA target sequence for Hspg2 (NM_008305.2,10382-10400).
ctgtcaagatggcttcaaa

SEQ ID NO: 661373 - DNA, 19 bp, Mus musculus
  siRNA target sequence for Hspg2 (NM_008305.2,10439-10457).
gcatgaaccatgtctgaat

SEQ ID NO: 661374 - DNA, 19 bp, Mus musculus
  siRNA target sequence for Hspg2 (NM_008305.2,10517-10535).
ccaacaaggcgctggatat

SEQ ID NO: 661375 - DNA, 19 bp, Mus musculus
  siRNA target sequence for Hspg2 (NM_008305.2,10592-10610).
gcaatacggagcctacttt

SEQ ID NO: 661376 - DNA, 19 bp, Mus musculus
  siRNA target sequence for Hspg2 (NM_008305.2,10593-10611).
caatacggagcctactttt

SEQ ID NO: 661377 - DNA, 19 bp, Mus musculus
  siRNA target sequence for Hspg2 (NM_008305.2,10629-10647).
ggcctccctggtaacagtt

SEQ ID NO: 661378 - DNA, 19 bp, Mus musculus
  siRNA target sequence for Hspg2 (NM_008305.2,10750-10768).
gccgcagcaaggacttcat

SEQ ID NO: 661379 - DNA, 19 bp, Mus musculus
  siRNA target sequence for Hspg2 (NM_008305.2,10752-10770).
cgcagcaaggacttcatta

SEQ ID NO: 661380 - DNA, 19 bp, Mus musculus
  siRNA target sequence for Hspg2 (NM_008305.2,10862-10880).
cgagtggcatcggataaca

SEQ ID NO: 661381 - DNA, 19 bp, Mus musculus
  siRNA target sequence for Hspg2 (NM_008305.2,10900-10918).
gaggctccatccaagtaga

SEQ ID NO: 661382 - DNA, 19 bp, Mus musculus
  siRNA target sequence for Hspg2 (NM_008305.2,10973-10991).
caaggacatcatctacatt

SEQ ID NO: 661383 - DNA, 19 bp, Mus musculus
  siRNA target sequence for Hspg2 (NM_008305.2,11041-11059).
ggatcacaggctgtatcaa

SEQ ID NO: 661384 - DNA, 19 bp, Mus musculus
  siRNA target sequence for Hspg2 (NM_008305.2,11047-11065).
caggctgtatcaagaatct

SEQ ID NO: 661385 - DNA, 19 bp, Mus musculus
  siRNA target sequence for Jup (NM_010593.1,191-209).
cactccggcgtcaatacct

SEQ ID NO: 661386 - DNA, 19 bp, Mus musculus
  siRNA target sequence for Jup (NM_010593.1,280-298).
gaagactaccacctataca

SEQ ID NO: 661387 - DNA, 19 bp, Mus musculus
  siRNA target sequence for Jup (NM_010593.1,430-448).
ggaggggcagacaaccaat

SEQ ID NO: 661388 - DNA, 19 bp, Mus musculus
  siRNA target sequence for Jup (NM_010593.1,489-507).
ccatcgtccatctcatcaa

SEQ ID NO: 661389 - DNA, 19 bp, Mus musculus
  siRNA target sequence for Jup (NM_010593.1,764-782).
ggcttgctcgccatattca

SEQ ID NO: 661390 - DNA, 19 bp, Mus musculus
  siRNA target sequence for Jup (NM_010593.1,815-833).
ctcagttcccccgtagaat

SEQ ID NO: 661391 - DNA, 19 bp, Mus musculus
  siRNA target sequence for Jup (NM_010593.1,817-835).
cagttcccccgtagaatct

SEQ ID NO: 661392 - DNA, 19 bp, Mus musculus
  siRNA target sequence for Jup (NM_010593.1,819-837).
gttcccccgtagaatctgt

SEQ ID NO: 661393 - DNA, 19 bp, Mus musculus
  siRNA target sequence for Jup (NM_010593.1,935-953).
cccctactcaacaagaaca

SEQ ID NO: 661394 - DNA, 19 bp, Mus musculus
  siRNA target sequence for Jup (NM_010593.1,1303-1321).
caaccaactgagtgtagat

SEQ ID NO: 661395 - DNA, 19 bp, Mus musculus
  siRNA target sequence for Jup (NM_010593.1,1534-1552).
ctctgtgcgcctcaactat

SEQ ID NO: 661396 - DNA, 19 bp, Mus musculus
  siRNA target sequence for Jup (NM_010593.1,1538-1556).
gtgcgcctcaactatggaa

SEQ ID NO: 661397 - DNA, 19 bp, Mus musculus
  siRNA target sequence for Jup (NM_010593.1,1960-1978).
ggctgccgacgccattgat

SEQ ID NO: 661398 - DNA, 19 bp, Mus musculus
  siRNA target sequence for Jup (NM_010593.1,2151-2169).
gggaggctgcccagagtat

SEQ ID NO: 661399 - DNA, 19 bp, Mus musculus
  siRNA target sequence for Lama2 (NM_008481.1,141-159).
gcatcaacagagaggttta

SEQ ID NO: 661400 - DNA, 19 bp, Mus musculus
  siRNA target sequence for Lama2 (NM_008481.1,171-189).
cctgaatcttgcttcgaat

SEQ ID NO: 661401 - DNA, 19 bp, Mus musculus
  siRNA target sequence for Lama2 (NM_008481.1,193-211).
ctcatcacaaccaatgcta

SEQ ID NO: 661402 - DNA, 19 bp, Mus musculus
  siRNA target sequence for Lama2 (NM_008481.1,325-343).
cagaggcacccgattacga

SEQ ID NO: 661403 - DNA, 19 bp, Mus musculus
  siRNA target sequence for Lama2 (NM_008481.1,331-349).
cacccgattacgaatgcta

SEQ ID NO: 661404 - DNA, 19 bp, Mus musculus
  siRNA target sequence for Lama2 (NM_008481.1,333-351).
cccgattacgaatgctatt

SEQ ID NO: 661405 - DNA, 19 bp, Mus musculus
  siRNA target sequence for Lama2 (NM_008481.1,335-353).
cgattacgaatgctattga

SEQ ID NO: 661406 - DNA, 19 bp, Mus musculus
  siRNA target sequence for Lama2 (NM_008481.1,336-354).
gattacgaatgctattgat

SEQ ID NO: 661407 - DNA, 19 bp, Mus musculus
  siRNA target sequence for Lama2 (NM_008481.1,346-364).
gctattgatggcaagaaca

SEQ ID NO: 661408 - DNA, 19 bp, Mus musculus
  siRNA target sequence for Lama2 (NM_008481.1,405-423).
ccattatgtgacaattact

SEQ ID NO: 661409 - DNA, 19 bp, Mus musculus
  siRNA target sequence for Lama2 (NM_008481.1,414-432).
gacaattactctggattta

SEQ ID NO: 661410 - DNA, 19 bp, Mus musculus
  siRNA target sequence for Lama2 (NM_008481.1,416-434).
caattactctggatttaca

SEQ ID NO: 661411 - DNA, 19 bp, Mus musculus
  siRNA target sequence for Lama2 (NM_008481.1,444-462).
ccagattgcctacgtaatt

SEQ ID NO: 661412 - DNA, 19 bp, Mus musculus
  siRNA target sequence for Lama2 (NM_008481.1,567-585).
gtgcctgaccctctacaat

SEQ ID NO: 661413 - DNA, 19 bp, Mus musculus
  siRNA target sequence for Lama2 (NM_008481.1,608-626).
catcctacgccaaagatga

SEQ ID NO: 661414 - DNA, 19 bp, Mus musculus
  siRNA target sequence for Lama2 (NM_008481.1,611-629).
cctacgccaaagatgatga

SEQ ID NO: 661415 - DNA, 19 bp, Mus musculus
  siRNA target sequence for Lama2 (NM_008481.1,628-646).
gaggtcatctgcacttcat

SEQ ID NO: 661416 - DNA, 19 bp, Mus musculus
  siRNA target sequence for Lama2 (NM_008481.1,638-656).
gcacttcattttattcgaa

SEQ ID NO: 661417 - DNA, 19 bp, Mus musculus
  siRNA target sequence for Lama2 (NM_008481.1,653-671).
cgaagatccaccctttaga

SEQ ID NO: 661418 - DNA, 19 bp, Mus musculus
  siRNA target sequence for Lama2 (NM_008481.1,654-672).
gaagatccaccctttagaa

SEQ ID NO: 661419 - DNA, 19 bp, Mus musculus
  siRNA target sequence for Lama2 (NM_008481.1,657-675).
gatccaccctttagaaaat

SEQ ID NO: 661420 - DNA, 19 bp, Mus musculus
  siRNA target sequence for Lama2 (NM_008481.1,758-776).
gctacattcgcctgagatt

SEQ ID NO: 661421 - DNA, 19 bp, Mus musculus
  siRNA target sequence for Lama2 (NM_008481.1,780-798).
gaggatccgcaccttgaat

SEQ ID NO: 661422 - DNA, 19 bp, Mus musculus
  siRNA target sequence for Lama2 (NM_008481.1,835-853).
gaaatcgatcccattgtca

SEQ ID NO: 661423 - DNA, 19 bp, Mus musculus
  siRNA target sequence for Lama2 (NM_008481.1,846-864).
cattgtcacacgaagatat

SEQ ID NO: 661424 - DNA, 19 bp, Mus musculus
  siRNA target sequence for Lama2 (NM_008481.1,850-868).
gtcacacgaagatattact

SEQ ID NO: 661425 - DNA, 19 bp, Mus musculus
  siRNA target sequence for Lama2 (NM_008481.1,852-870).
cacacgaagatattactat

SEQ ID NO: 661426 - DNA, 19 bp, Mus musculus
  siRNA target sequence for Lama2 (NM_008481.1,893-911).
gcgggatgtgcatctgtta

SEQ ID NO: 661427 - DNA, 19 bp, Mus musculus
  siRNA target sequence for Lama2 (NM_008481.1,894-912).
cgggatgtgcatctgttat

SEQ ID NO: 661428 - DNA, 19 bp, Mus musculus
  siRNA target sequence for Lama2 (NM_008481.1,939-957).
ccctgcaacaaataaatca

SEQ ID NO: 661429 - DNA, 19 bp, Mus musculus
  siRNA target sequence for Lama2 (NM_008481.1,959-977).
gctgtgagtgtgaacataa

SEQ ID NO: 661430 - DNA, 19 bp, Mus musculus
  siRNA target sequence for Lama2 (NM_008481.1,1007-1025).
gtccaggattccatcagaa

SEQ ID NO: 661431 - DNA, 19 bp, Mus musculus
  siRNA target sequence for Lama2 (NM_008481.1,1064-1082).
gtgaagcatgcaattgtca

SEQ ID NO: 661432 - DNA, 19 bp, Mus musculus
  siRNA target sequence for Lama2 (NM_008481.1,1074-1092).
caattgtcacggaaaagct

SEQ ID NO: 661433 - DNA, 19 bp, Mus musculus
  siRNA target sequence for Lama2 (NM_008481.1,1095-1113).
ggaatgctattatgatgaa

SEQ ID NO: 661434 - DNA, 19 bp, Mus musculus
  siRNA target sequence for Lama2 (NM_008481.1,1117-1135).
gttgctagcagaaatctaa

SEQ ID NO: 661435 - DNA, 19 bp, Mus musculus
  siRNA target sequence for Lama2 (NM_008481.1,1120-1138).
gctagcagaaatctaagtt

SEQ ID NO: 661436 - DNA, 19 bp, Mus musculus
  siRNA target sequence for Lama2 (NM_008481.1,1175-1193).
gcatcaactgcacacataa

SEQ ID NO: 661437 - DNA, 19 bp, Mus musculus
  siRNA target sequence for Lama2 (NM_008481.1,1194-1212).
cacggctgggataaattgt

SEQ ID NO: 661438 - DNA, 19 bp, Mus musculus
  siRNA target sequence for Lama2 (NM_008481.1,1319-1337).
gtgtcaaagatgagaaata

SEQ ID NO: 661439 - DNA, 19 bp, Mus musculus
  siRNA target sequence for Lama2 (NM_008481.1,1530-1548).
ctgtagtcgttgcaaatct

SEQ ID NO: 661440 - DNA, 19 bp, Mus musculus
  siRNA target sequence for Lama2 (NM_008481.1,1554-1572).
cttcaacttgcaagaagat

SEQ ID NO: 661441 - DNA, 19 bp, Mus musculus
  siRNA target sequence for Lama2 (NM_008481.1,1640-1658).
cctatgggaatattcaaga

SEQ ID NO: 661442 - DNA, 19 bp, Mus musculus
  siRNA target sequence for Lama2 (NM_008481.1,1738-1756).
cagatcagcatcagtaact

SEQ ID NO: 661443 - DNA, 19 bp, Mus musculus
  siRNA target sequence for Lama2 (NM_008481.1,1774-1792).
ctgcttgatggttactact

SEQ ID NO: 661444 - DNA, 19 bp, Mus musculus
  siRNA target sequence for Lama2 (NM_008481.1,1794-1812).
gagtgcaccgcctccatat

SEQ ID NO: 661445 - DNA, 19 bp, Mus musculus
  siRNA target sequence for Lama2 (NM_008481.1,1796-1814).
gtgcaccgcctccatatct

SEQ ID NO: 661446 - DNA, 19 bp, Mus musculus
  siRNA target sequence for Lama2 (NM_008481.1,1848-1866).
gtcatttaccatctcatat

SEQ ID NO: 661447 - DNA, 19 bp, Mus musculus
  siRNA target sequence for Lama2 (NM_008481.1,1927-1945).
ggaaatgacttaagaatca

SEQ ID NO: 661448 - DNA, 19 bp, Mus musculus
  siRNA target sequence for Lama2 (NM_008481.1,1952-1970).
cgtataaggaggtgtactt

SEQ ID NO: 661449 - DNA, 19 bp, Mus musculus
  siRNA target sequence for Lama2 (NM_008481.1,1953-1971).
gtataaggaggtgtactta

SEQ ID NO: 661450 - DNA, 19 bp, Mus musculus
  siRNA target sequence for Lama2 (NM_008481.1,2043-2061).
gccagtcactagaaaagat

SEQ ID NO: 661451 - DNA, 19 bp, Mus musculus
  siRNA target sequence for Lama2 (NM_008481.1,2044-2062).
ccagtcactagaaaagatt

SEQ ID NO: 661452 - DNA, 19 bp, Mus musculus
  siRNA target sequence for Lama2 (NM_008481.1,2167-2185).
gtcccttatcctactgata

SEQ ID NO: 661453 - DNA, 19 bp, Mus musculus
  siRNA target sequence for Lama2 (NM_008481.1,2169-2187).
cccttatcctactgataga

SEQ ID NO: 661454 - DNA, 19 bp, Mus musculus
  siRNA target sequence for Lama2 (NM_008481.1,2236-2254).
ggcagctcttgtgaaacat

SEQ ID NO: 661455 - DNA, 19 bp, Mus musculus
  siRNA target sequence for Lama2 (NM_008481.1,2259-2277).
gcctaggcaccgaagagtt

SEQ ID NO: 661456 - DNA, 19 bp, Mus musculus
  siRNA target sequence for Lama2 (NM_008481.1,2260-2278).
cctaggcaccgaagagtta

SEQ ID NO: 661457 - DNA, 19 bp, Mus musculus
  siRNA target sequence for Lama2 (NM_008481.1,2261-2279).
ctaggcaccgaagagttaa

SEQ ID NO: 661458 - DNA, 19 bp, Mus musculus
  siRNA target sequence for Lama2 (NM_008481.1,2273-2291).
gagttaacggcaccatttt

SEQ ID NO: 661459 - DNA, 19 bp, Mus musculus
  siRNA target sequence for Lama2 (NM_008481.1,2386-2404).
gggccgtactgcaatgaat

SEQ ID NO: 661460 - DNA, 19 bp, Mus musculus
  siRNA target sequence for Lama2 (NM_008481.1,2388-2406).
gccgtactgcaatgaatgt

SEQ ID NO: 661461 - DNA, 19 bp, Mus musculus
  siRNA target sequence for Lama2 (NM_008481.1,2390-2408).
cgtactgcaatgaatgtct

SEQ ID NO: 661462 - DNA, 19 bp, Mus musculus
  siRNA target sequence for Lama2 (NM_008481.1,2462-2480).
gtgcctgtccactcaatat

SEQ ID NO: 661463 - DNA, 19 bp, Mus musculus
  siRNA target sequence for Lama2 (NM_008481.1,2473-2491).
ctcaatatcccatcaaata

SEQ ID NO: 661464 - DNA, 19 bp, Mus musculus
  siRNA target sequence for Lama2 (NM_008481.1,2481-2499).
cccatcaaataactttagt

SEQ ID NO: 661465 - DNA, 19 bp, Mus musculus
  siRNA target sequence for Lama2 (NM_008481.1,2498-2516).
gtccaacatgccatttaga

SEQ ID NO: 661466 - DNA, 19 bp, Mus musculus
  siRNA target sequence for Lama2 (NM_008481.1,2518-2536).
cggagtctgggattgatct

SEQ ID NO: 661467 - DNA, 19 bp, Mus musculus
  siRNA target sequence for Lama2 (NM_008481.1,2535-2553).
ctgtgacgagtgtcctatt

SEQ ID NO: 661468 - DNA, 19 bp, Mus musculus
  siRNA target sequence for Lama2 (NM_008481.1,2642-2660).
gcaatgacaaccttgacta

SEQ ID NO: 661469 - DNA, 19 bp, Mus musculus
  siRNA target sequence for Lama2 (NM_008481.1,2692-2710).
ggctcctgtctgatttgta

SEQ ID NO: 661470 - DNA, 19 bp, Mus musculus
  siRNA target sequence for Lama2 (NM_008481.1,2693-2711).
gctcctgtctgatttgtaa

SEQ ID NO: 661471 - DNA, 19 bp, Mus musculus
  siRNA target sequence for Lama2 (NM_008481.1,2742-2760).
ctgtgctgatgggtatttt

SEQ ID NO: 661472 - DNA, 19 bp, Mus musculus
  siRNA target sequence for Lama2 (NM_008481.1,2879-2897).
ggcactgtgacgagtgtaa

SEQ ID NO: 661473 - DNA, 19 bp, Mus musculus
  siRNA target sequence for Lama2 (NM_008481.1,2939-2957).
cctgcaactgcaattcttt

SEQ ID NO: 661474 - DNA, 19 bp, Mus musculus
  siRNA target sequence for Lama2 (NM_008481.1,3038-3056).
gtgcccatggctacttcaa

SEQ ID NO: 661475 - DNA, 19 bp, Mus musculus
  siRNA target sequence for Lama2 (NM_008481.1,3143-3161).
ccaataccactggagaaaa

SEQ ID NO: 661476 - DNA, 19 bp, Mus musculus
  siRNA target sequence for Lama2 (NM_008481.1,3248-3266).
cttctcagtgcaatgtaaa

SEQ ID NO: 661477 - DNA, 19 bp, Mus musculus
  siRNA target sequence for Lama2 (NM_008481.1,3278-3296).
gcagctgtcatccaaaatt

SEQ ID NO: 661478 - DNA, 19 bp, Mus musculus
  siRNA target sequence for Lama2 (NM_008481.1,3324-3342).
ccgaggtcactggaactat

SEQ ID NO: 661479 - DNA, 19 bp, Mus musculus
  siRNA target sequence for Lama2 (NM_008481.1,3411-3429).
gaaatgctcctgtagtgat

SEQ ID NO: 661480 - DNA, 19 bp, Mus musculus
  siRNA target sequence for Lama2 (NM_008481.1,3597-3615).
ggtgactttgagtgatgaa

SEQ ID NO: 661481 - DNA, 19 bp, Mus musculus
  siRNA target sequence for Lama2 (NM_008481.1,3648-3666).
gcagcacacgactaccaaa

SEQ ID NO: 661482 - DNA, 19 bp, Mus musculus
  siRNA target sequence for Lama2 (NM_008481.1,3678-3696).
ccagaaaccagagattgtt

SEQ ID NO: 661483 - DNA, 19 bp, Mus musculus
  siRNA target sequence for Lama2 (NM_008481.1,3801-3819).
caagtatgccatctatttt

SEQ ID NO: 661484 - DNA, 19 bp, Mus musculus
  siRNA target sequence for Lama2 (NM_008481.1,3836-3854).
caggctttgccacatataa

SEQ ID NO: 661485 - DNA, 19 bp, Mus musculus
  siRNA target sequence for Lama2 (NM_008481.1,3846-3864).
cacatataaacctcaagtt

SEQ ID NO: 661486 - DNA, 19 bp, Mus musculus
  siRNA target sequence for Lama2 (NM_008481.1,3883-3901).
cctactcatgctagaatta

SEQ ID NO: 661487 - DNA, 19 bp, Mus musculus
  siRNA target sequence for Lama2 (NM_008481.1,3889-3907).
catgctagaattattacca

SEQ ID NO: 661488 - DNA, 19 bp, Mus musculus
  siRNA target sequence for Lama2 (NM_008481.1,3934-3952).
cagttgacacggcatgaaa

SEQ ID NO: 661489 - DNA, 19 bp, Mus musculus
  siRNA target sequence for Lama2 (NM_008481.1,3936-3954).
gttgacacggcatgaaata

SEQ ID NO: 661490 - DNA, 19 bp, Mus musculus
  siRNA target sequence for Lama2 (NM_008481.1,3939-3957).
gacacggcatgaaatagaa

SEQ ID NO: 661491 - DNA, 19 bp, Mus musculus
  siRNA target sequence for Lama2 (NM_008481.1,3975-3993).
gaaatattatggtgatgat

SEQ ID NO: 661492 - DNA, 19 bp, Mus musculus
  siRNA target sequence for Lama2 (NM_008481.1,3988-4006).
gatgatcctcgaatcagta

SEQ ID NO: 661493 - DNA, 19 bp, Mus musculus
  siRNA target sequence for Lama2 (NM_008481.1,3991-4009).
gatcctcgaatcagtagaa

SEQ ID NO: 661494 - DNA, 19 bp, Mus musculus
  siRNA target sequence for Lama2 (NM_008481.1,4024-4042).
gacttcttggatatactat

SEQ ID NO: 661495 - DNA, 19 bp, Mus musculus
  siRNA target sequence for Lama2 (NM_008481.1,4026-4044).
cttcttggatatactatat

SEQ ID NO: 661496 - DNA, 19 bp, Mus musculus
  siRNA target sequence for Lama2 (NM_008481.1,4039-4057).
ctatatgatattcactata

SEQ ID NO: 661497 - DNA, 19 bp, Mus musculus
  siRNA target sequence for Lama2 (NM_008481.1,4068-4086).
ggctacttatggaaacgtt

SEQ ID NO: 661498 - DNA, 19 bp, Mus musculus
  siRNA target sequence for Lama2 (NM_008481.1,4089-4107).
gagacaaagccgcatttct

SEQ ID NO: 661499 - DNA, 19 bp, Mus musculus
  siRNA target sequence for Lama2 (NM_008481.1,4093-4111).
caaagccgcatttctgaaa

SEQ ID NO: 661500 - DNA, 19 bp, Mus musculus
  siRNA target sequence for Lama2 (NM_008481.1,4155-4173).
cccaccagcacacttgata

SEQ ID NO: 661501 - DNA, 19 bp, Mus musculus
  siRNA target sequence for Lama2 (NM_008481.1,4157-4175).
caccagcacacttgataga

SEQ ID NO: 661502 - DNA, 19 bp, Mus musculus
  siRNA target sequence for Lama2 (NM_008481.1,4162-4180).
gcacacttgatagaaagat

SEQ ID NO: 661503 - DNA, 19 bp, Mus musculus
  siRNA target sequence for Lama2 (NM_008481.1,4461-4479).
gatttcgcccagcaacaat

SEQ ID NO: 661504 - DNA, 19 bp, Mus musculus
  siRNA target sequence for Lama2 (NM_008481.1,4484-4502).
gcccctcttgtgtattgga

SEQ ID NO: 661505 - DNA, 19 bp, Mus musculus
  siRNA target sequence for Lama2 (NM_008481.1,4603-4621).
ggaggctcctgccaagaat

SEQ ID NO: 661506 - DNA, 19 bp, Mus musculus
  siRNA target sequence for Lama2 (NM_008481.1,4743-4761).
gggtgcagagtgtgtcttt

SEQ ID NO: 661507 - DNA, 19 bp, Mus musculus
  siRNA target sequence for Lama2 (NM_008481.1,4744-4762).
ggtgcagagtgtgtctttt

SEQ ID NO: 661508 - DNA, 19 bp, Mus musculus
  siRNA target sequence for Lama2 (NM_008481.1,4843-4861).
ccactgcctgctccatata

SEQ ID NO: 661509 - DNA, 19 bp, Mus musculus
  siRNA target sequence for Lama2 (NM_008481.1,4928-4946).
cagagaggctcattcagtt

SEQ ID NO: 661510 - DNA, 19 bp, Mus musculus
  siRNA target sequence for Lama2 (NM_008481.1,4992-5010).
gctaaccagagcaaccaaa

SEQ ID NO: 661511 - DNA, 19 bp, Mus musculus
  siRNA target sequence for Lama2 (NM_008481.1,5068-5086).
gaatccttggaagaattca

SEQ ID NO: 661512 - DNA, 19 bp, Mus musculus
  siRNA target sequence for Lama2 (NM_008481.1,5103-5121).
ggatgctgaagccataaat

SEQ ID NO: 661513 - DNA, 19 bp, Mus musculus
  siRNA target sequence for Lama2 (NM_008481.1,5147-5165).
ccttaggaaatcaagataa

SEQ ID NO: 661514 - DNA, 19 bp, Mus musculus
  siRNA target sequence for Lama2 (NM_008481.1,5327-5345).
gagcccagaatgaagatat

SEQ ID NO: 661515 - DNA, 19 bp, Mus musculus
  siRNA target sequence for Lama2 (NM_008481.1,5395-5413).
gatgcttgggatctattga

SEQ ID NO: 661516 - DNA, 19 bp, Mus musculus
  siRNA target sequence for Lama2 (NM_008481.1,5456-5474).
ctgccaatcaaaaaaacat

SEQ ID NO: 661517 - DNA, 19 bp, Mus musculus
  siRNA target sequence for Lama2 (NM_008481.1,5489-5507).
caaagaaggaggctattga

SEQ ID NO: 661518 - DNA, 19 bp, Mus musculus
  siRNA target sequence for Lama2 (NM_008481.1,5499-5517).
ggctattgaaggtagcaaa

SEQ ID NO: 661519 - DNA, 19 bp, Mus musculus
  siRNA target sequence for Lama2 (NM_008481.1,5513-5531).
gcaaacgacaaatagagaa

SEQ ID NO: 661520 - DNA, 19 bp, Mus musculus
  siRNA target sequence for Lama2 (NM_008481.1,5518-5536).
cgacaaatagagaacactt

SEQ ID NO: 661521 - DNA, 19 bp, Mus musculus
  siRNA target sequence for Lama2 (NM_008481.1,5589-5607).
caactcagtcatagattat

SEQ ID NO: 661522 - DNA, 19 bp, Mus musculus
  siRNA target sequence for Lama2 (NM_008481.1,5602-5620).
gattatgtcgacgacatta

SEQ ID NO: 661523 - DNA, 19 bp, Mus musculus
  siRNA target sequence for Lama2 (NM_008481.1,5608-5626).
gtcgacgacattaaaacta

SEQ ID NO: 661524 - DNA, 19 bp, Mus musculus
  siRNA target sequence for Lama2 (NM_008481.1,5646-5664).
ggagctgagtgacaaaata

SEQ ID NO: 661525 - DNA, 19 bp, Mus musculus
  siRNA target sequence for Lama2 (NM_008481.1,5668-5686).
gacctcgcccaggaaataa

SEQ ID NO: 661526 - DNA, 19 bp, Mus musculus
  siRNA target sequence for Lama2 (NM_008481.1,5748-5766).
ctcgtctgctgtacttgat

SEQ ID NO: 661527 - DNA, 19 bp, Mus musculus
  siRNA target sequence for Lama2 (NM_008481.1,5819-5837).
gagcttacagtaatattaa

SEQ ID NO: 661528 - DNA, 19 bp, Mus musculus
  siRNA target sequence for Lama2 (NM_008481.1,5888-5906).
cccaaggggctacaaaact

SEQ ID NO: 661529 - DNA, 19 bp, Mus musculus
  siRNA target sequence for Lama2 (NM_008481.1,5915-5933).
gtcctcagggcttattaaa

SEQ ID NO: 661530 - DNA, 19 bp, Mus musculus
  siRNA target sequence for Lama2 (NM_008481.1,5918-5936).
ctcagggcttattaaaaga

SEQ ID NO: 661531 - DNA, 19 bp, Mus musculus
  siRNA target sequence for Lama2 (NM_008481.1,5963-5981).
gcttcaggatcctcaatga

SEQ ID NO: 661532 - DNA, 19 bp, Mus musculus
  siRNA target sequence for Lama2 (NM_008481.1,5985-6003).
caagaagctagcaaacgat

SEQ ID NO: 661533 - DNA, 19 bp, Mus musculus
  siRNA target sequence for Lama2 (NM_008481.1,5991-6009).
gctagcaaacgatgtgaaa

SEQ ID NO: 661534 - DNA, 19 bp, Mus musculus
  siRNA target sequence for Lama2 (NM_008481.1,5996-6014).
caaacgatgtgaaaggaaa

SEQ ID NO: 661535 - DNA, 19 bp, Mus musculus
  siRNA target sequence for Lama2 (NM_008481.1,6010-6028).
ggaaatcacaatgatctaa

SEQ ID NO: 661536 - DNA, 19 bp, Mus musculus
  siRNA target sequence for Lama2 (NM_008481.1,6074-6092).
gacttctaggagctctaaa

SEQ ID NO: 661537 - DNA, 19 bp, Mus musculus
  siRNA target sequence for Lama2 (NM_008481.1,6094-6112).
gacaccatggacaagttat

SEQ ID NO: 661538 - DNA, 19 bp, Mus musculus
  siRNA target sequence for Lama2 (NM_008481.1,6105-6123).
caagttatcagccattaca

SEQ ID NO: 661539 - DNA, 19 bp, Mus musculus
  siRNA target sequence for Lama2 (NM_008481.1,6108-6126).
gttatcagccattacaaat

SEQ ID NO: 661540 - DNA, 19 bp, Mus musculus
  siRNA target sequence for Lama2 (NM_008481.1,6191-6209).
ctgtcctggcccaggttaa

SEQ ID NO: 661541 - DNA, 19 bp, Mus musculus
  siRNA target sequence for Lama2 (NM_008481.1,6262-6280).
gacagcgtggccaaaacga

SEQ ID NO: 661542 - DNA, 19 bp, Mus musculus
  siRNA target sequence for Lama2 (NM_008481.1,6278-6296).
cgaacgctgtggtgaaaga

SEQ ID NO: 661543 - DNA, 19 bp, Mus musculus
  siRNA target sequence for Lama2 (NM_008481.1,6332-6350).
cttccgtgagaaatctaga

SEQ ID NO: 661544 - DNA, 19 bp, Mus musculus
  siRNA target sequence for Lama2 (NM_008481.1,6335-6353).
ccgtgagaaatctagaaca

SEQ ID NO: 661545 - DNA, 19 bp, Mus musculus
  siRNA target sequence for Lama2 (NM_008481.1,6364-6382).
cggctaatcgacaaactca

SEQ ID NO: 661546 - DNA, 19 bp, Mus musculus
  siRNA target sequence for Lama2 (NM_008481.1,6365-6383).
ggctaatcgacaaactcaa

SEQ ID NO: 661547 - DNA, 19 bp, Mus musculus
  siRNA target sequence for Lama2 (NM_008481.1,6394-6412).
gagcttgaggacaacctaa

SEQ ID NO: 661548 - DNA, 19 bp, Mus musculus
  siRNA target sequence for Lama2 (NM_008481.1,6512-6530).
catacaggccagaaatcaa

SEQ ID NO: 661549 - DNA, 19 bp, Mus musculus
  siRNA target sequence for Lama2 (NM_008481.1,6579-6597).
cgacaacctccttttttat

SEQ ID NO: 661550 - DNA, 19 bp, Mus musculus
  siRNA target sequence for Lama2 (NM_008481.1,6608-6626).
ccaaatttattgactttct

SEQ ID NO: 661551 - DNA, 19 bp, Mus musculus
  siRNA target sequence for Lama2 (NM_008481.1,6722-6740).
cctattggtaccgtattga

SEQ ID NO: 661552 - DNA, 19 bp, Mus musculus
  siRNA target sequence for Lama2 (NM_008481.1,6723-6741).
ctattggtaccgtattgaa

SEQ ID NO: 661553 - DNA, 19 bp, Mus musculus
  siRNA target sequence for Lama2 (NM_008481.1,6732-6750).
ccgtattgaagcatcaaga

SEQ ID NO: 661554 - DNA, 19 bp, Mus musculus
  siRNA target sequence for Lama2 (NM_008481.1,6733-6751).
cgtattgaagcatcaagaa

SEQ ID NO: 661555 - DNA, 19 bp, Mus musculus
  siRNA target sequence for Lama2 (NM_008481.1,6808-6826).
gtacccagcacctaccatt

SEQ ID NO: 661556 - DNA, 19 bp, Mus musculus
  siRNA target sequence for Lama2 (NM_008481.1,6886-6904).
ggtggcctgaccggaaaaa

SEQ ID NO: 661557 - DNA, 19 bp, Mus musculus
  siRNA target sequence for Lama2 (NM_008481.1,6887-6905).
gtggcctgaccggaaaaat

SEQ ID NO: 661558 - DNA, 19 bp, Mus musculus
  siRNA target sequence for Lama2 (NM_008481.1,6944-6962).
gctgtatgggagaaacata

SEQ ID NO: 661559 - DNA, 19 bp, Mus musculus
  siRNA target sequence for Lama2 (NM_008481.1,6963-6981).
ctttgacaacaaacctata

SEQ ID NO: 661560 - DNA, 19 bp, Mus musculus
  siRNA target sequence for Lama2 (NM_008481.1,6967-6985).
gacaacaaacctataggtt

SEQ ID NO: 661561 - DNA, 19 bp, Mus musculus
  siRNA target sequence for Lama2 (NM_008481.1,7011-7029).
cgactgtaagggatgtact

SEQ ID NO: 661562 - DNA, 19 bp, Mus musculus
  siRNA target sequence for Lama2 (NM_008481.1,7035-7053).
cccacaagtggaagatagt

SEQ ID NO: 661563 - DNA, 19 bp, Mus musculus
  siRNA target sequence for Lama2 (NM_008481.1,7076-7094).
gtgaaggctatgcattagt

SEQ ID NO: 661564 - DNA, 19 bp, Mus musculus
  siRNA target sequence for Lama2 (NM_008481.1,7078-7096).
gaaggctatgcattagtga

SEQ ID NO: 661565 - DNA, 19 bp, Mus musculus
  siRNA target sequence for Lama2 (NM_008481.1,7146-7164).
ccggacattttcatcaagt

SEQ ID NO: 661566 - DNA, 19 bp, Mus musculus
  siRNA target sequence for Lama2 (NM_008481.1,7160-7178).
caagtgctctcctgatgta

SEQ ID NO: 661567 - DNA, 19 bp, Mus musculus
  siRNA target sequence for Lama2 (NM_008481.1,7185-7203).
cacacgagacctgaaagat

SEQ ID NO: 661568 - DNA, 19 bp, Mus musculus
  siRNA target sequence for Lama2 (NM_008481.1,7189-7207).
cgagacctgaaagatttca

SEQ ID NO: 661569 - DNA, 19 bp, Mus musculus
  siRNA target sequence for Lama2 (NM_008481.1,7271-7289).
ccgttgtcagcaatcaaaa

SEQ ID NO: 661570 - DNA, 19 bp, Mus musculus
  siRNA target sequence for Lama2 (NM_008481.1,7276-7294).
gtcagcaatcaaaaccata

SEQ ID NO: 661571 - DNA, 19 bp, Mus musculus
  siRNA target sequence for Lama2 (NM_008481.1,7278-7296).
cagcaatcaaaaccataat

SEQ ID NO: 661572 - DNA, 19 bp, Mus musculus
  siRNA target sequence for Lama2 (NM_008481.1,7319-7337).
cgctgtcgcggattcagaa

SEQ ID NO: 661573 - DNA, 19 bp, Mus musculus
  siRNA target sequence for Lama2 (NM_008481.1,7320-7338).
gctgtcgcggattcagaaa

SEQ ID NO: 661574 - DNA, 19 bp, Mus musculus
  siRNA target sequence for Lama2 (NM_008481.1,7323-7341).
gtcgcggattcagaaacaa

SEQ ID NO: 661575 - DNA, 19 bp, Mus musculus
  siRNA target sequence for Lama2 (NM_008481.1,7333-7351).
cagaaacaagccaacatat

SEQ ID NO: 661576 - DNA, 19 bp, Mus musculus
  siRNA target sequence for Lama2 (NM_008481.1,7381-7399).
gagaatgtagctacttcat

SEQ ID NO: 661577 - DNA, 19 bp, Mus musculus
  siRNA target sequence for Lama2 (NM_008481.1,7518-7536).
ctccggctgcctcaaagat

SEQ ID NO: 661578 - DNA, 19 bp, Mus musculus
  siRNA target sequence for Lama2 (NM_008481.1,7520-7538).
ccggctgcctcaaagatat

SEQ ID NO: 661579 - DNA, 19 bp, Mus musculus
  siRNA target sequence for Lama2 (NM_008481.1,7528-7546).
ctcaaagatattgaaattt

SEQ ID NO: 661580 - DNA, 19 bp, Mus musculus
  siRNA target sequence for Lama2 (NM_008481.1,7550-7568).
gaacaccttacaatatact

SEQ ID NO: 661581 - DNA, 19 bp, Mus musculus
  siRNA target sequence for Lama2 (NM_008481.1,7656-7674).
gcttgccgctgtgtctatt

SEQ ID NO: 661582 - DNA, 19 bp, Mus musculus
  siRNA target sequence for Lama2 (NM_008481.1,7661-7679).
ccgctgtgtctattgatgt

SEQ ID NO: 661583 - DNA, 19 bp, Mus musculus
  siRNA target sequence for Lama2 (NM_008481.1,7662-7680).
cgctgtgtctattgatgtt

SEQ ID NO: 661584 - DNA, 19 bp, Mus musculus
  siRNA target sequence for Lama2 (NM_008481.1,7713-7731).
gaacgagtctgggatcatt

SEQ ID NO: 661585 - DNA, 19 bp, Mus musculus
  siRNA target sequence for Lama2 (NM_008481.1,7717-7735).
gagtctgggatcattctct

SEQ ID NO: 661586 - DNA, 19 bp, Mus musculus
  siRNA target sequence for Lama2 (NM_008481.1,7793-7811).
cttattatgccatattcct

SEQ ID NO: 661587 - DNA, 19 bp, Mus musculus
  siRNA target sequence for Lama2 (NM_008481.1,7850-7868).
cacggacaatgaggaaaat

SEQ ID NO: 661588 - DNA, 19 bp, Mus musculus
  siRNA target sequence for Lama2 (NM_008481.1,7856-7874).
caatgaggaaaattgtcat

SEQ ID NO: 661589 - DNA, 19 bp, Mus musculus
  siRNA target sequence for Lama2 (NM_008481.1,7884-7902).
gccaaatttgtttcatgat

SEQ ID NO: 661590 - DNA, 19 bp, Mus musculus
  siRNA target sequence for Lama2 (NM_008481.1,7912-7930).
cattctgtccacgtagaaa

SEQ ID NO: 661591 - DNA, 19 bp, Mus musculus
  siRNA target sequence for Lama2 (NM_008481.1,7940-7958).
gcatcttcactgttcaaat

SEQ ID NO: 661592 - DNA, 19 bp, Mus musculus
  siRNA target sequence for Lama2 (NM_008481.1,7944-7962).
cttcactgttcaaattgat

SEQ ID NO: 661593 - DNA, 19 bp, Mus musculus
  siRNA target sequence for Lama2 (NM_008481.1,8054-8072).
cctccccactcaggaatat

SEQ ID NO: 661594 - DNA, 19 bp, Mus musculus
  siRNA target sequence for Lama2 (NM_008481.1,8055-8073).
ctccccactcaggaatatt

SEQ ID NO: 661595 - DNA, 19 bp, Mus musculus
  siRNA target sequence for Lama2 (NM_008481.1,8133-8151).
gcagcctatagccttcaaa

SEQ ID NO: 661596 - DNA, 19 bp, Mus musculus
  siRNA target sequence for Lama2 (NM_008481.1,8134-8152).
cagcctatagccttcaaaa

SEQ ID NO: 661597 - DNA, 19 bp, Mus musculus
  siRNA target sequence for Lama2 (NM_008481.1,8136-8154).
gcctatagccttcaaaaat

SEQ ID NO: 661598 - DNA, 19 bp, Mus musculus
  siRNA target sequence for Lama2 (NM_008481.1,8206-8224).
gcagttccagctgaagtta

SEQ ID NO: 661599 - DNA, 19 bp, Mus musculus
  siRNA target sequence for Lama2 (NM_008481.1,8289-8307).
cccttgtgttgcagaatca

SEQ ID NO: 661600 - DNA, 19 bp, Mus musculus
  siRNA target sequence for Lama2 (NM_008481.1,8412-8430).
gctggaggtacgaactgaa

SEQ ID NO: 661601 - DNA, 19 bp, Mus musculus
  siRNA target sequence for Lama2 (NM_008481.1,8549-8567).
ccatgatccccacaaaaat

SEQ ID NO: 661602 - DNA, 19 bp, Mus musculus
  siRNA target sequence for Lama2 (NM_008481.1,8578-8596).
cagtggcacaagattaaga

SEQ ID NO: 661603 - DNA, 19 bp, Mus musculus
  siRNA target sequence for Lama2 (NM_008481.1,8580-8598).
gtggcacaagattaagatt

SEQ ID NO: 661604 - DNA, 19 bp, Mus musculus
  siRNA target sequence for Lama2 (NM_008481.1,8582-8600).
ggcacaagattaagattgt

SEQ ID NO: 661605 - DNA, 19 bp, Mus musculus
  siRNA target sequence for Lama2 (NM_008481.1,8584-8602).
cacaagattaagattgtga

SEQ ID NO: 661606 - DNA, 19 bp, Mus musculus
  siRNA target sequence for Lama2 (NM_008481.1,8610-8628).
gcaggagggaattctttat

SEQ ID NO: 661607 - DNA, 19 bp, Mus musculus
  siRNA target sequence for Lama2 (NM_008481.1,8704-8722).
ggtggattgccgatcaact

SEQ ID NO: 661608 - DNA, 19 bp, Mus musculus
  siRNA target sequence for Lama2 (NM_008481.1,8705-8723).
gtggattgccgatcaacta

SEQ ID NO: 661609 - DNA, 19 bp, Mus musculus
  siRNA target sequence for Lama2 (NM_008481.1,8707-8725).
ggattgccgatcaactata

SEQ ID NO: 661610 - DNA, 19 bp, Mus musculus
  siRNA target sequence for Lama2 (NM_008481.1,8735-8753).
gaattggtccagtgactta

SEQ ID NO: 661611 - DNA, 19 bp, Mus musculus
  siRNA target sequence for Lamb1-1 (NM_008482.1,394-412).
gacaagaaatgcttcatat

SEQ ID NO: 661612 - DNA, 19 bp, Mus musculus
  siRNA target sequence for Lamb1-1 (NM_008482.1,449-467).
ccgacagccatctcattga

SEQ ID NO: 661613 - DNA, 19 bp, Mus musculus
  siRNA target sequence for Lamb1-1 (NM_008482.1,451-469).
gacagccatctcattgaga

SEQ ID NO: 661614 - DNA, 19 bp, Mus musculus
  siRNA target sequence for Lamb1-1 (NM_008482.1,468-486).
gaacgtggtcaccacattt

SEQ ID NO: 661615 - DNA, 19 bp, Mus musculus
  siRNA target sequence for Lamb1-1 (NM_008482.1,471-489).
cgtggtcaccacatttgct

SEQ ID NO: 661616 - DNA, 19 bp, Mus musculus
  siRNA target sequence for Lamb1-1 (NM_008482.1,487-505).
gctccaaaccgccttaaga

SEQ ID NO: 661617 - DNA, 19 bp, Mus musculus
  siRNA target sequence for Lamb1-1 (NM_008482.1,488-506).
ctccaaaccgccttaagat

SEQ ID NO: 661618 - DNA, 19 bp, Mus musculus
  siRNA target sequence for Lamb1-1 (NM_008482.1,490-508).
ccaaaccgccttaagatct

SEQ ID NO: 661619 - DNA, 19 bp, Mus musculus
  siRNA target sequence for Lamb1-1 (NM_008482.1,510-528).
gtggcaatcggaaaatggt

SEQ ID NO: 661620 - DNA, 19 bp, Mus musculus
  siRNA target sequence for Lamb1-1 (NM_008482.1,653-671).
cttggggcgtgtacagata

SEQ ID NO: 661621 - DNA, 19 bp, Mus musculus
  siRNA target sequence for Lamb1-1 (NM_008482.1,656-674).
ggggcgtgtacagatactt

SEQ ID NO: 661622 - DNA, 19 bp, Mus musculus
  siRNA target sequence for Lamb1-1 (NM_008482.1,746-764).
gtgactctcgatattctga

SEQ ID NO: 661623 - DNA, 19 bp, Mus musculus
  siRNA target sequence for Lamb1-1 (NM_008482.1,750-768).
ctctcgatattctgacatt

SEQ ID NO: 661624 - DNA, 19 bp, Mus musculus
  siRNA target sequence for Lamb1-1 (NM_008482.1,752-770).
ctcgatattctgacattga

SEQ ID NO: 661625 - DNA, 19 bp, Mus musculus
  siRNA target sequence for Lamb1-1 (NM_008482.1,776-794).
cgacagaaggagaggtaat

SEQ ID NO: 661626 - DNA, 19 bp, Mus musculus
  siRNA target sequence for Lamb1-1 (NM_008482.1,789-807).
ggtaatatttcgtgcttta

SEQ ID NO: 661627 - DNA, 19 bp, Mus musculus
  siRNA target sequence for Lamb1-1 (NM_008482.1,831-849).
cccttatagtccaaggata

SEQ ID NO: 661628 - DNA, 19 bp, Mus musculus
  siRNA target sequence for Lamb1-1 (NM_008482.1,845-863).
ggatacagaatctattaaa

SEQ ID NO: 661629 - DNA, 19 bp, Mus musculus
  siRNA target sequence for Lamb1-1 (NM_008482.1,869-887).
ccaacttgagaatcaagtt

SEQ ID NO: 661630 - DNA, 19 bp, Mus musculus
  siRNA target sequence for Lamb1-1 (NM_008482.1,902-920).
ccttgggggataacctttt

SEQ ID NO: 661631 - DNA, 19 bp, Mus musculus
  siRNA target sequence for Lamb1-1 (NM_008482.1,948-966).
gtactattacgctgtttat

SEQ ID NO: 661632 - DNA, 19 bp, Mus musculus
  siRNA target sequence for Lamb1-1 (NM_008482.1,951-969).
ctattacgctgtttatgat

SEQ ID NO: 661633 - DNA, 19 bp, Mus musculus
  siRNA target sequence for Lamb1-1 (NM_008482.1,1105-1123).
gagctgtgcatggatttct

SEQ ID NO: 661634 - DNA, 19 bp, Mus musculus
  siRNA target sequence for Lamb1-1 (NM_008482.1,1168-1186).
gcctgcaaaaaatgtaact

SEQ ID NO: 661635 - DNA, 19 bp, Mus musculus
  siRNA target sequence for Lamb1-1 (NM_008482.1,1199-1217).
ccagctcgtgtcactttga

SEQ ID NO: 661636 - DNA, 19 bp, Mus musculus
  siRNA target sequence for Lamb1-1 (NM_008482.1,1409-1427).
gtgatgggtacactgattt

SEQ ID NO: 661637 - DNA, 19 bp, Mus musculus
  siRNA target sequence for Lamb1-1 (NM_008482.1,1447-1465).
ggtcagtgtcggtgcaaat

SEQ ID NO: 661638 - DNA, 19 bp, Mus musculus
  siRNA target sequence for Lamb1-1 (NM_008482.1,1477-1495).
ggagagcgctgtgatgttt

SEQ ID NO: 661639 - DNA, 19 bp, Mus musculus
  siRNA target sequence for Lamb1-1 (NM_008482.1,1482-1500).
gcgctgtgatgtttgtaaa

SEQ ID NO: 661640 - DNA, 19 bp, Mus musculus
  siRNA target sequence for Lamb1-1 (NM_008482.1,1501-1519).
gaaggcttctacgacttaa

SEQ ID NO: 661641 - DNA, 19 bp, Mus musculus
  siRNA target sequence for Lamb1-1 (NM_008482.1,1522-1540).
gctgaagacccgtatggtt

SEQ ID NO: 661642 - DNA, 19 bp, Mus musculus
  siRNA target sequence for Lamb1-1 (NM_008482.1,1528-1546).
gacccgtatggttgtaaat

SEQ ID NO: 661643 - DNA, 19 bp, Mus musculus
  siRNA target sequence for Lamb1-1 (NM_008482.1,1530-1548).
cccgtatggttgtaaatca

SEQ ID NO: 661644 - DNA, 19 bp, Mus musculus
  siRNA target sequence for Lamb1-1 (NM_008482.1,1531-1549).
ccgtatggttgtaaatcat

SEQ ID NO: 661645 - DNA, 19 bp, Mus musculus
  siRNA target sequence for Lamb1-1 (NM_008482.1,1556-1574).
gcaatcctctgggaacaat

SEQ ID NO: 661646 - DNA, 19 bp, Mus musculus
  siRNA target sequence for Lamb1-1 (NM_008482.1,1557-1575).
caatcctctgggaacaatt

SEQ ID NO: 661647 - DNA, 19 bp, Mus musculus
  siRNA target sequence for Lamb1-1 (NM_008482.1,1579-1597).
ggtgggaatccttgtgatt

SEQ ID NO: 661648 - DNA, 19 bp, Mus musculus
  siRNA target sequence for Lamb1-1 (NM_008482.1,1660-1678).
ccgcagcactggggtttaa

SEQ ID NO: 661649 - DNA, 19 bp, Mus musculus
  siRNA target sequence for Lamb1-1 (NM_008482.1,1665-1683).
gcactggggtttaagcaat

SEQ ID NO: 661650 - DNA, 19 bp, Mus musculus
  siRNA target sequence for Lamb1-1 (NM_008482.1,1670-1688).
ggggtttaagcaatgattt

SEQ ID NO: 661651 - DNA, 19 bp, Mus musculus
  siRNA target sequence for Lamb1-1 (NM_008482.1,1673-1691).
gtttaagcaatgatttgga

SEQ ID NO: 661652 - DNA, 19 bp, Mus musculus
  siRNA target sequence for Lamb1-1 (NM_008482.1,1807-1825).
gagtccggttactacttca

SEQ ID NO: 661653 - DNA, 19 bp, Mus musculus
  siRNA target sequence for Lamb1-1 (NM_008482.1,1829-1847).
ccctggaccactacatcta

SEQ ID NO: 661654 - DNA, 19 bp, Mus musculus
  siRNA target sequence for Lamb1-1 (NM_008482.1,1887-1905).
ggtggaaaggcagtacatt

SEQ ID NO: 661655 - DNA, 19 bp, Mus musculus
  siRNA target sequence for Lamb1-1 (NM_008482.1,1948-1966).
gtgcctgaaggggcttatt

SEQ ID NO: 661656 - DNA, 19 bp, Mus musculus
  siRNA target sequence for Lamb1-1 (NM_008482.1,1957-1975).
ggggcttatttggagtttt

SEQ ID NO: 661657 - DNA, 19 bp, Mus musculus
  siRNA target sequence for Lamb1-1 (NM_008482.1,2114-2132).
ccgttcccgatgatgacaa

SEQ ID NO: 661658 - DNA, 19 bp, Mus musculus
  siRNA target sequence for Lamb1-1 (NM_008482.1,2290-2308).
gttctcatgccctactgta

SEQ ID NO: 661659 - DNA, 19 bp, Mus musculus
  siRNA target sequence for Lamb1-1 (NM_008482.1,2293-2311).
ctcatgccctactgtaaat

SEQ ID NO: 661660 - DNA, 19 bp, Mus musculus
  siRNA target sequence for Lamb1-1 (NM_008482.1,2306-2324).
gtaaatcgctggacatctt

SEQ ID NO: 661661 - DNA, 19 bp, Mus musculus
  siRNA target sequence for Lamb1-1 (NM_008482.1,2344-2362).
gatggggaggtcaccaata

SEQ ID NO: 661662 - DNA, 19 bp, Mus musculus
  siRNA target sequence for Lamb1-1 (NM_008482.1,2406-2424).
caggagtgtggtaaaaaca

SEQ ID NO: 661663 - DNA, 19 bp, Mus musculus
  siRNA target sequence for Lamb1-1 (NM_008482.1,2481-2499).
gacgggccttgcttgtgaa

SEQ ID NO: 661664 - DNA, 19 bp, Mus musculus
  siRNA target sequence for Lamb1-1 (NM_008482.1,2484-2502).
gggccttgcttgtgaatgt

SEQ ID NO: 661665 - DNA, 19 bp, Mus musculus
  siRNA target sequence for Lamb1-1 (NM_008482.1,2486-2504).
gccttgcttgtgaatgtga

SEQ ID NO: 661666 - DNA, 19 bp, Mus musculus
  siRNA target sequence for Lamb1-1 (NM_008482.1,2550-2568).
gtgccagtgccgtcctaat

SEQ ID NO: 661667 - DNA, 19 bp, Mus musculus
  siRNA target sequence for Lamb1-1 (NM_008482.1,2620-2638).
cccaacggatgcaaacctt

SEQ ID NO: 661668 - DNA, 19 bp, Mus musculus
  siRNA target sequence for Lamb1-1 (NM_008482.1,2687-2705).
ctggccagtgccactgttt

SEQ ID NO: 661669 - DNA, 19 bp, Mus musculus
  siRNA target sequence for Lamb1-1 (NM_008482.1,2772-2790).
gccctgccagtgtaatggt

SEQ ID NO: 661670 - DNA, 19 bp, Mus musculus
  siRNA target sequence for Lamb1-1 (NM_008482.1,2961-2979).
gtttgccaggagctgttat

SEQ ID NO: 661671 - DNA, 19 bp, Mus musculus
  siRNA target sequence for Lamb1-1 (NM_008482.1,3238-3256).
cttcggcaagactgtagaa

SEQ ID NO: 661672 - DNA, 19 bp, Mus musculus
  siRNA target sequence for Lamb1-1 (NM_008482.1,3241-3259).
cggcaagactgtagaaagt

SEQ ID NO: 661673 - DNA, 19 bp, Mus musculus
  siRNA target sequence for Lamb1-1 (NM_008482.1,3279-3297).
cacggtgaaggaacattgt

SEQ ID NO: 661674 - DNA, 19 bp, Mus musculus
  siRNA target sequence for Lamb1-1 (NM_008482.1,3341-3359).
cgtgccttcccaatgtgat

SEQ ID NO: 661675 - DNA, 19 bp, Mus musculus
  siRNA target sequence for Lamb1-1 (NM_008482.1,3434-3452).
gcaatgctgcgcattcctt

SEQ ID NO: 661676 - DNA, 19 bp, Mus musculus
  siRNA target sequence for Lamb1-1 (NM_008482.1,3435-3453).
caatgctgcgcattccttt

SEQ ID NO: 661677 - DNA, 19 bp, Mus musculus
  siRNA target sequence for Lamb1-1 (NM_008482.1,3728-3746).
ctctctgggatgctatcat

SEQ ID NO: 661678 - DNA, 19 bp, Mus musculus
  siRNA target sequence for Lamb1-1 (NM_008482.1,3833-3851).
ccgtggactctgtagagaa

SEQ ID NO: 661679 - DNA, 19 bp, Mus musculus
  siRNA target sequence for Lamb1-1 (NM_008482.1,3895-3913).
gcggaaccactgaaaaaca

SEQ ID NO: 661680 - DNA, 19 bp, Mus musculus
  siRNA target sequence for Lamb1-1 (NM_008482.1,3896-3914).
cggaaccactgaaaaacat

SEQ ID NO: 661681 - DNA, 19 bp, Mus musculus
  siRNA target sequence for Lamb1-1 (NM_008482.1,3969-3987).
ggcgcaggtagaagtgaaa

SEQ ID NO: 661682 - DNA, 19 bp, Mus musculus
  siRNA target sequence for Lamb1-1 (NM_008482.1,3970-3988).
gcgcaggtagaagtgaaat

SEQ ID NO: 661683 - DNA, 19 bp, Mus musculus
  siRNA target sequence for Lamb1-1 (NM_008482.1,3971-3989).
cgcaggtagaagtgaaatt

SEQ ID NO: 661684 - DNA, 19 bp, Mus musculus
  siRNA target sequence for Lamb1-1 (NM_008482.1,3972-3990).
gcaggtagaagtgaaatta

SEQ ID NO: 661685 - DNA, 19 bp, Mus musculus
  siRNA target sequence for Lamb1-1 (NM_008482.1,3973-3991).
caggtagaagtgaaattaa

SEQ ID NO: 661686 - DNA, 19 bp, Mus musculus
  siRNA target sequence for Lamb1-1 (NM_008482.1,3975-3993).
ggtagaagtgaaattaact

SEQ ID NO: 661687 - DNA, 19 bp, Mus musculus
  siRNA target sequence for Lamb1-1 (NM_008482.1,4084-4102).
gcagaacagctggagttta

SEQ ID NO: 661688 - DNA, 19 bp, Mus musculus
  siRNA target sequence for Lamb1-1 (NM_008482.1,4131-4149).
ggatagcatcaccaagtat

SEQ ID NO: 661689 - DNA, 19 bp, Mus musculus
  siRNA target sequence for Lamb1-1 (NM_008482.1,4230-4248).
cacgcgagacagagtagaa

SEQ ID NO: 661690 - DNA, 19 bp, Mus musculus
  siRNA target sequence for Lamb1-1 (NM_008482.1,4232-4250).
cgcgagacagagtagaaga

SEQ ID NO: 661691 - DNA, 19 bp, Mus musculus
  siRNA target sequence for Lamb1-1 (NM_008482.1,4233-4251).
gcgagacagagtagaagat

SEQ ID NO: 661692 - DNA, 19 bp, Mus musculus
  siRNA target sequence for Lamb1-1 (NM_008482.1,4384-4402).
ggggctgactgttctgaaa

SEQ ID NO: 661693 - DNA, 19 bp, Mus musculus
  siRNA target sequence for Lamb1-1 (NM_008482.1,4386-4404).
ggctgactgttctgaaagt

SEQ ID NO: 661694 - DNA, 19 bp, Mus musculus
  siRNA target sequence for Lamb1-1 (NM_008482.1,4612-4630).
gcgcaggatgtcctgttaa

SEQ ID NO: 661695 - DNA, 19 bp, Mus musculus
  siRNA target sequence for Lamb1-1 (NM_008482.1,4613-4631).
cgcaggatgtcctgttaaa

SEQ ID NO: 661696 - DNA, 19 bp, Mus musculus
  siRNA target sequence for Lamb1-1 (NM_008482.1,4614-4632).
gcaggatgtcctgttaaaa

SEQ ID NO: 661697 - DNA, 19 bp, Mus musculus
  siRNA target sequence for Lamb1-1 (NM_008482.1,4615-4633).
caggatgtcctgttaaaaa

SEQ ID NO: 661698 - DNA, 19 bp, Mus musculus
  siRNA target sequence for Lamb1-1 (NM_008482.1,4617-4635).
ggatgtcctgttaaaaaca

SEQ ID NO: 661699 - DNA, 19 bp, Mus musculus
  siRNA target sequence for Lamb1-1 (NM_008482.1,4721-4739).
gtgctgatctagacagtat

SEQ ID NO: 661700 - DNA, 19 bp, Mus musculus
  siRNA target sequence for Lamb1-1 (NM_008482.1,4745-4763).
cagttgctaatgaagtact

SEQ ID NO: 661701 - DNA, 19 bp, Mus musculus
  siRNA target sequence for Lamb1-1 (NM_008482.1,4784-4802).
cgccacagcagttacagaa

SEQ ID NO: 661702 - DNA, 19 bp, Mus musculus
  siRNA target sequence for Lamb1-1 (NM_008482.1,4794-4812).
gttacagaacctaacagaa

SEQ ID NO: 661703 - DNA, 19 bp, Mus musculus
  siRNA target sequence for Lamb1-1 (NM_008482.1,4839-4857).
ctctcaagtagaggttatt

SEQ ID NO: 661704 - DNA, 19 bp, Mus musculus
  siRNA target sequence for Lamb1-1 (NM_008482.1,4841-4859).
ctcaagtagaggttatttt

SEQ ID NO: 661705 - DNA, 19 bp, Mus musculus
  siRNA target sequence for Lamb1-1 (NM_008482.1,5003-5021).
cagagaaggcgattaaaca

SEQ ID NO: 661706 - DNA, 19 bp, Mus musculus
  siRNA target sequence for Lamb1-1 (NM_008482.1,5052-5070).
cctgctaacatcgattgaa

SEQ ID NO: 661707 - DNA, 19 bp, Mus musculus
  siRNA target sequence for Lamb1-1 (NM_008482.1,5055-5073).
gctaacatcgattgaatct

SEQ ID NO: 661708 - DNA, 19 bp, Mus musculus
  siRNA target sequence for Lamb1-1 (NM_008482.1,5135-5153).
ggaacgtggaagagcttaa

SEQ ID NO: 661709 - DNA, 19 bp, Mus musculus
  siRNA target sequence for Lamb1-1 (NM_008482.1,5174-5192).
ctggggaggcagaatatat

SEQ ID NO: 661710 - DNA, 19 bp, Mus musculus
  siRNA target sequence for Lamb1-1 (NM_008482.1,5177-5195).
gggaggcagaatatatcga

SEQ ID NO: 661711 - DNA, 19 bp, Mus musculus
  siRNA target sequence for Lamb1-1 (NM_008482.1,5178-5196).
ggaggcagaatatatcgaa

SEQ ID NO: 661712 - DNA, 19 bp, Mus musculus
  siRNA target sequence for Lamb1-1 (NM_008482.1,5183-5201).
cagaatatatcgaaaaagt

SEQ ID NO: 661713 - DNA, 19 bp, Mus musculus
  siRNA target sequence for Lamb1-1 (NM_008482.1,5193-5211).
cgaaaaagtagtatattct

SEQ ID NO: 661714 - DNA, 19 bp, Mus musculus
  siRNA target sequence for Lamb1-1 (NM_008482.1,5218-5236).
cagaatgcagacgatgtta

SEQ ID NO: 661715 - DNA, 19 bp, Mus musculus
  siRNA target sequence for Lamb1-1 (NM_008482.1,5243-5261).
ctctagatggcgaacttga

SEQ ID NO: 661716 - DNA, 19 bp, Mus musculus
  siRNA target sequence for Lamb1-1 (NM_008482.1,5251-5269).
ggcgaacttgatgaaaagt

SEQ ID NO: 661717 - DNA, 19 bp, Mus musculus
  siRNA target sequence for Lamb1-1 (NM_008482.1,5252-5270).
gcgaacttgatgaaaagta

SEQ ID NO: 661718 - DNA, 19 bp, Mus musculus
  siRNA target sequence for Lamb1-1 (NM_008482.1,5268-5286).
gtataagaaggtagaaagt

SEQ ID NO: 661719 - DNA, 19 bp, Mus musculus
  siRNA target sequence for Lamb1-1 (NM_008482.1,5419-5437).
gaggacaatcaaaaatact

SEQ ID NO: 661720 - DNA, 19 bp, Mus musculus
  siRNA target sequence for Lamb1-1 (NM_008482.1,5428-5446).
caaaaatacttagaagata

SEQ ID NO: 661721 - DNA, 19 bp, Mus musculus
  siRNA target sequence for Lamb1-1 (NM_008482.1,5506-5524).
gagaaagttgcggtttaca

SEQ ID NO: 661722 - DNA, 19 bp, Mus musculus
  siRNA target sequence for Lamc1 (NM_010683.1,387-405).
ctgcatgccggagtttgtt

SEQ ID NO: 661723 - DNA, 19 bp, Mus musculus
  siRNA target sequence for Lamc1 (NM_010683.1,389-407).
gcatgccggagtttgttaa

SEQ ID NO: 661724 - DNA, 19 bp, Mus musculus
  siRNA target sequence for Lamc1 (NM_010683.1,390-408).
catgccggagtttgttaat

SEQ ID NO: 661725 - DNA, 19 bp, Mus musculus
  siRNA target sequence for Lamc1 (NM_010683.1,482-500).
gggtgaccggagtcactaa

SEQ ID NO: 661726 - DNA, 19 bp, Mus musculus
  siRNA target sequence for Lamc1 (NM_010683.1,484-502).
gtgaccggagtcactaagt

SEQ ID NO: 661727 - DNA, 19 bp, Mus musculus
  siRNA target sequence for Lamc1 (NM_010683.1,677-695).
cttacgtgcgcctcaagtt

SEQ ID NO: 661728 - DNA, 19 bp, Mus musculus
  siRNA target sequence for Lamc1 (NM_010683.1,712-730).
gagagcttcgccatctata

SEQ ID NO: 661729 - DNA, 19 bp, Mus musculus
  siRNA target sequence for Lamc1 (NM_010683.1,785-803).
gtgagaacacgtactcaaa

SEQ ID NO: 661730 - DNA, 19 bp, Mus musculus
  siRNA target sequence for Lamc1 (NM_010683.1,805-823).
gctaaccgtggcttcatca

SEQ ID NO: 661731 - DNA, 19 bp, Mus musculus
  siRNA target sequence for Lamc1 (NM_010683.1,843-861).
gcaggccttgtgtactgat

SEQ ID NO: 661732 - DNA, 19 bp, Mus musculus
  siRNA target sequence for Lamc1 (NM_010683.1,847-865).
gccttgtgtactgatgaat

SEQ ID NO: 661733 - DNA, 19 bp, Mus musculus
  siRNA target sequence for Lamc1 (NM_010683.1,1019-1037).
gagatgaagtgtttaacga

SEQ ID NO: 661734 - DNA, 19 bp, Mus musculus
  siRNA target sequence for Lamc1 (NM_010683.1,1045-1063).
gttctcaagtcttactatt

SEQ ID NO: 661735 - DNA, 19 bp, Mus musculus
  siRNA target sequence for Lamc1 (NM_010683.1,1111-1129).
catgccagcgagtgtgtaa

SEQ ID NO: 661736 - DNA, 19 bp, Mus musculus
  siRNA target sequence for Lamc1 (NM_010683.1,1115-1133).
ccagcgagtgtgtaaagaa

SEQ ID NO: 661737 - DNA, 19 bp, Mus musculus
  siRNA target sequence for Lamc1 (NM_010683.1,1124-1142).
gtgtaaagaacgagtttga

SEQ ID NO: 661738 - DNA, 19 bp, Mus musculus
  siRNA target sequence for Lamc1 (NM_010683.1,1592-1610).
gcagcacagacgagtgtaa

SEQ ID NO: 661739 - DNA, 19 bp, Mus musculus
  siRNA target sequence for Lamc1 (NM_010683.1,1593-1611).
cagcacagacgagtgtaat

SEQ ID NO: 661740 - DNA, 19 bp, Mus musculus
  siRNA target sequence for Lamc1 (NM_010683.1,1602-1620).
cgagtgtaatgttgaaaca

SEQ ID NO: 661741 - DNA, 19 bp, Mus musculus
  siRNA target sequence for Lamc1 (NM_010683.1,1628-1646).
gcgtttgcaaagacaatgt

SEQ ID NO: 661742 - DNA, 19 bp, Mus musculus
  siRNA target sequence for Lamc1 (NM_010683.1,1629-1647).
cgtttgcaaagacaatgtt

SEQ ID NO: 661743 - DNA, 19 bp, Mus musculus
  siRNA target sequence for Lamc1 (NM_010683.1,1765-1783).
ggctacagtgtttatgaca

SEQ ID NO: 661744 - DNA, 19 bp, Mus musculus
  siRNA target sequence for Lamc1 (NM_010683.1,1787-1805).
cctccacctttcagattga

SEQ ID NO: 661745 - DNA, 19 bp, Mus musculus
  siRNA target sequence for Lamc1 (NM_010683.1,1788-1806).
ctccacctttcagattgat

SEQ ID NO: 661746 - DNA, 19 bp, Mus musculus
  siRNA target sequence for Lamc1 (NM_010683.1,1790-1808).
ccacctttcagattgatga

SEQ ID NO: 661747 - DNA, 19 bp, Mus musculus
  siRNA target sequence for Lamc1 (NM_010683.1,1862-1880).
cctcagacaggcaagatat

SEQ ID NO: 661748 - DNA, 19 bp, Mus musculus
  siRNA target sequence for Lamc1 (NM_010683.1,1873-1891).
caagatattgccgtaatct

SEQ ID NO: 661749 - DNA, 19 bp, Mus musculus
  siRNA target sequence for Lamc1 (NM_010683.1,1898-1916).
gttactttcctagatactt

SEQ ID NO: 661750 - DNA, 19 bp, Mus musculus
  siRNA target sequence for Lamc1 (NM_010683.1,2096-2114).
ccactgtgaagtacatctt

SEQ ID NO: 661751 - DNA, 19 bp, Mus musculus
  siRNA target sequence for Lamc1 (NM_010683.1,2151-2169).
cgctctctccccgtttgaa

SEQ ID NO: 661752 - DNA, 19 bp, Mus musculus
  siRNA target sequence for Lamc1 (NM_010683.1,2152-2170).
gctctctccccgtttgaat

SEQ ID NO: 661753 - DNA, 19 bp, Mus musculus
  siRNA target sequence for Lamc1 (NM_010683.1,2153-2171).
ctctctccccgtttgaatt

SEQ ID NO: 661754 - DNA, 19 bp, Mus musculus
  siRNA target sequence for Lamc1 (NM_010683.1,2377-2395).
ccaagccttggaccttata

SEQ ID NO: 661755 - DNA, 19 bp, Mus musculus
  siRNA target sequence for Lamc1 (NM_010683.1,2485-2503).
ccccactgtgagaaatgta

SEQ ID NO: 661756 - DNA, 19 bp, Mus musculus
  siRNA target sequence for Lamc1 (NM_010683.1,2632-2650).
ggcactgccggcaagagat

SEQ ID NO: 661757 - DNA, 19 bp, Mus musculus
  siRNA target sequence for Lamc1 (NM_010683.1,2658-2676).
ctgtgatgacggctacttt

SEQ ID NO: 661758 - DNA, 19 bp, Mus musculus
  siRNA target sequence for Lamc1 (NM_010683.1,2724-2742).
ccagtgtaacgacaacata

SEQ ID NO: 661759 - DNA, 19 bp, Mus musculus
  siRNA target sequence for Lamc1 (NM_010683.1,2786-2804).
gcctgaagtgcatctataa

SEQ ID NO: 661760 - DNA, 19 bp, Mus musculus
  siRNA target sequence for Lamc1 (NM_010683.1,2788-2806).
ctgaagtgcatctataaca

SEQ ID NO: 661761 - DNA, 19 bp, Mus musculus
  siRNA target sequence for Lamc1 (NM_010683.1,2828-2846).
ggtgcaaggaagggttttt

SEQ ID NO: 661762 - DNA, 19 bp, Mus musculus
  siRNA target sequence for Lamc1 (NM_010683.1,3368-3386).
ctgagcatcgagtgaaact

SEQ ID NO: 661763 - DNA, 19 bp, Mus musculus
  siRNA target sequence for Lamc1 (NM_010683.1,3514-3532).
gtcaaagatgtagatcaaa

SEQ ID NO: 661764 - DNA, 19 bp, Mus musculus
  siRNA target sequence for Lamc1 (NM_010683.1,3544-3562).
cgccttcagagagtaaata

SEQ ID NO: 661765 - DNA, 19 bp, Mus musculus
  siRNA target sequence for Lamc1 (NM_010683.1,3547-3565).
cttcagagagtaaatagca

SEQ ID NO: 661766 - DNA, 19 bp, Mus musculus
  siRNA target sequence for Lamc1 (NM_010683.1,3592-3610).
cagaatatccggaatacta

SEQ ID NO: 661767 - DNA, 19 bp, Mus musculus
  siRNA target sequence for Lamc1 (NM_010683.1,3691-3709).
gagctcgagaaagcaaaaa

SEQ ID NO: 661768 - DNA, 19 bp, Mus musculus
  siRNA target sequence for Lamc1 (NM_010683.1,3713-3731).
ctgccgccaatgtgtcaat

SEQ ID NO: 661769 - DNA, 19 bp, Mus musculus
  siRNA target sequence for Lamc1 (NM_010683.1,3717-3735).
cgccaatgtgtcaatcact

SEQ ID NO: 661770 - DNA, 19 bp, Mus musculus
  siRNA target sequence for Lamc1 (NM_010683.1,3795-3813).
gcttgcagagcgtcataaa

SEQ ID NO: 661771 - DNA, 19 bp, Mus musculus
  siRNA target sequence for Lamc1 (NM_010683.1,3860-3878).
cttcagctgaggcatataa

SEQ ID NO: 661772 - DNA, 19 bp, Mus musculus
  siRNA target sequence for Lamc1 (NM_010683.1,3863-3881).
cagctgaggcatataatct

SEQ ID NO: 661773 - DNA, 19 bp, Mus musculus
  siRNA target sequence for Lamc1 (NM_010683.1,4026-4044).
caaagccgtagagatctat

SEQ ID NO: 661774 - DNA, 19 bp, Mus musculus
  siRNA target sequence for Lamc1 (NM_010683.1,4084-4102).
ctggagaatgaagcaaata

SEQ ID NO: 661775 - DNA, 19 bp, Mus musculus
  siRNA target sequence for Lamc1 (NM_010683.1,4302-4320).
gaagggacgcagtacctta

SEQ ID NO: 661776 - DNA, 19 bp, Mus musculus
  siRNA target sequence for Lamc1 (NM_010683.1,4305-4323).
gggacgcagtaccttacaa

SEQ ID NO: 661777 - DNA, 19 bp, Mus musculus
  siRNA target sequence for Lamc1 (NM_010683.1,4307-4325).
gacgcagtaccttacaaga

SEQ ID NO: 661778 - DNA, 19 bp, Mus musculus
  siRNA target sequence for Lamc1 (NM_010683.1,4341-4359).
caacaacctgaaagatttt

SEQ ID NO: 661779 - DNA, 19 bp, Mus musculus
  siRNA target sequence for Lamc1 (NM_010683.1,4538-4556).
ccagcgccgtgcagaagaa

SEQ ID NO: 661780 - DNA, 19 bp, Mus musculus
  siRNA target sequence for Lamc1 (NM_010683.1,4539-4557).
cagcgccgtgcagaagaat

SEQ ID NO: 661781 - DNA, 19 bp, Mus musculus
  siRNA target sequence for Lamc1 (NM_010683.1,4589-4607).
ccttcggggaagttacaga

SEQ ID NO: 661782 - DNA, 19 bp, Mus musculus
  siRNA target sequence for Lamc1 (NM_010683.1,4590-4608).
cttcggggaagttacagat

SEQ ID NO: 661783 - DNA, 19 bp, Mus musculus
  siRNA target sequence for Lamc1 (NM_010683.1,4685-4703).
ccgaccaggacatgatgat

SEQ ID NO: 661784 - DNA, 19 bp, Mus musculus
  siRNA target sequence for Lamc1 (NM_010683.1,4854-4872).
cgaaggctccctgaacaaa

SEQ ID NO: 661785 - DNA, 19 bp, Mus musculus
  siRNA target sequence for Lamc1 (NM_010683.1,4948-4966).
gcagccatcatggactata

SEQ ID NO: 661786 - DNA, 19 bp, Mus musculus
  siRNA target sequence for Mbp (NM_010777.1,468-486).
gcagacccaaagaataact

SEQ ID NO: 661787 - DNA, 19 bp, Mus musculus
  siRNA target sequence for Mbp (NM_010777.1,906-924).
gtagtccatttcttcaaga

SEQ ID NO: 661788 - DNA, 19 bp, Mus musculus
  siRNA target sequence for Mpz (NM_008623.1,726-744).
gtctcgcaaggataagaaa

SEQ ID NO: 661789 - DNA, 19 bp, Mus musculus
  siRNA target sequence for Msn (NM_010833.1,58-76).
gaccaggtggtgaaaacta

SEQ ID NO: 661790 - DNA, 19 bp, Mus musculus
  siRNA target sequence for Msn (NM_010833.1,108-126).
gcagtaccaggacacaaaa

SEQ ID NO: 661791 - DNA, 19 bp, Mus musculus
  siRNA target sequence for Msn (NM_010833.1,134-152).
ctacttggctgaaactcaa

SEQ ID NO: 661792 - DNA, 19 bp, Mus musculus
  siRNA target sequence for Msn (NM_010833.1,140-158).
ggctgaaactcaataagaa

SEQ ID NO: 661793 - DNA, 19 bp, Mus musculus
  siRNA target sequence for Msn (NM_010833.1,169-187).
caggatgtgcggaaggaaa

SEQ ID NO: 661794 - DNA, 19 bp, Mus musculus
  siRNA target sequence for Msn (NM_010833.1,219-237).
ctacccagaggatgtatct

SEQ ID NO: 661795 - DNA, 19 bp, Mus musculus
  siRNA target sequence for Msn (NM_010833.1,298-316).
ctcaatgacgacatttact

SEQ ID NO: 661796 - DNA, 19 bp, Mus musculus
  siRNA target sequence for Msn (NM_010833.1,300-318).
caatgacgacatttactgt

SEQ ID NO: 661797 - DNA, 19 bp, Mus musculus
  siRNA target sequence for Msn (NM_010833.1,332-350).
cggtcctgttggcttctta

SEQ ID NO: 661798 - DNA, 19 bp, Mus musculus
  siRNA target sequence for Msn (NM_010833.1,333-351).
ggtcctgttggcttcttat

SEQ ID NO: 661799 - DNA, 19 bp, Mus musculus
  siRNA target sequence for Msn (NM_010833.1,347-365).
cttatgccgtccagtctaa

SEQ ID NO: 661800 - DNA, 19 bp, Mus musculus
  siRNA target sequence for Msn (NM_010833.1,531-549).
cctggaatatctcaagatt

SEQ ID NO: 661801 - DNA, 19 bp, Mus musculus
  siRNA target sequence for Msn (NM_010833.1,705-723).
gaatatctctttcaatgat

SEQ ID NO: 661802 - DNA, 19 bp, Mus musculus
  siRNA target sequence for Msn (NM_010833.1,735-753).
catcaagcccattgacaaa

SEQ ID NO: 661803 - DNA, 19 bp, Mus musculus
  siRNA target sequence for Msn (NM_010833.1,812-830).
ccctgtgcatgggaaatca

SEQ ID NO: 661804 - DNA, 19 bp, Mus musculus
  siRNA target sequence for Msn (NM_010833.1,813-831).
cctgtgcatgggaaatcat

SEQ ID NO: 661805 - DNA, 19 bp, Mus musculus
  siRNA target sequence for Msn (NM_010833.1,924-942).
gcgtgctctcctggaaaat

SEQ ID NO: 661806 - DNA, 19 bp, Mus musculus
  siRNA target sequence for Msn (NM_010833.1,1116-1134).
gagtgaggccgaaaagcta

SEQ ID NO: 661807 - DNA, 19 bp, Mus musculus
  siRNA target sequence for Msn (NM_010833.1,1184-1202).
cttctcgggaccagaagaa

SEQ ID NO: 661808 - DNA, 19 bp, Mus musculus
  siRNA target sequence for Msn (NM_010833.1,1246-1264).
cggatctcccagttggaaa

SEQ ID NO: 661809 - DNA, 19 bp, Mus musculus
  siRNA target sequence for Msn (NM_010833.1,1614-1632).
gcgactgggacgagacaaa

SEQ ID NO: 661810 - DNA, 19 bp, Mus musculus
  siRNA target sequence for Msn (NM_010833.1,1615-1633).
cgactgggacgagacaaat

SEQ ID NO: 661811 - DNA, 19 bp, Mus musculus
  siRNA target sequence for Msn (NM_010833.1,1616-1634).
gactgggacgagacaaata

SEQ ID NO: 661812 - DNA, 19 bp, Mus musculus
  siRNA target sequence for Msn (NM_010833.1,1618-1636).
ctgggacgagacaaataca

SEQ ID NO: 661813 - DNA, 19 bp, Mus musculus
  siRNA target sequence for Msn (NM_010833.1,1621-1639).
ggacgagacaaatacaaga

SEQ ID NO: 661814 - DNA, 19 bp, Mus musculus
  siRNA target sequence for Mtap6 (NM_010837.1,73-91).
gcggtgccgctggttttca

SEQ ID NO: 661815 - DNA, 19 bp, Mus musculus
  siRNA target sequence for Mtap6 (NM_010837.1,175-193).
cgtgctgtcgccatagaga

SEQ ID NO: 661816 - DNA, 19 bp, Mus musculus
  siRNA target sequence for Mtap6 (NM_010837.1,1260-1278).
ggaggtggcgagtacagta

SEQ ID NO: 661817 - DNA, 19 bp, Mus musculus
  siRNA target sequence for Mtap6 (NM_010837.1,1281-1299).
cagctcttacaggaatgaa

SEQ ID NO: 661818 - DNA, 19 bp, Mus musculus
  siRNA target sequence for Mtap6 (NM_010837.1,1304-1322).
gagcatggactgacatcaa

SEQ ID NO: 661819 - DNA, 19 bp, Mus musculus
  siRNA target sequence for Mtap6 (NM_010837.1,1391-1409).
gctacagcgcccagttcaa

SEQ ID NO: 661820 - DNA, 19 bp, Mus musculus
  siRNA target sequence for Mtap6 (NM_010837.1,1448-1466).
ccatggatcgcagaagaat

SEQ ID NO: 661821 - DNA, 19 bp, Mus musculus
  siRNA target sequence for Mtap6 (NM_010837.1,1449-1467).
catggatcgcagaagaata

SEQ ID NO: 661822 - DNA, 19 bp, Mus musculus
  siRNA target sequence for Mtap6 (NM_010837.1,1501-1519).
ccgaaggtagagaaaccta

SEQ ID NO: 661823 - DNA, 19 bp, Mus musculus
  siRNA target sequence for Mtap6 (NM_010837.1,1506-1524).
ggtagagaaacctagtgtt

SEQ ID NO: 661824 - DNA, 19 bp, Mus musculus
  siRNA target sequence for Mtap6 (NM_010837.1,1653-1671).
cgacaaggagcaaagcaaa

SEQ ID NO: 661825 - DNA, 19 bp, Mus musculus
  siRNA target sequence for Mtap6 (NM_010837.1,1721-1739).
ccagtgatgcatctaagaa

SEQ ID NO: 661826 - DNA, 19 bp, Mus musculus
  siRNA target sequence for Mtap6 (NM_010837.1,1740-1758).
ccgaggtcctgtaaccaaa

SEQ ID NO: 661827 - DNA, 19 bp, Mus musculus
  siRNA target sequence for Mtap6 (NM_010837.1,1841-1859).
caggactgccaaaagatca

SEQ ID NO: 661828 - DNA, 19 bp, Mus musculus
  siRNA target sequence for Mtap6 (NM_010837.1,1844-1862).
gactgccaaaagatcaagt

SEQ ID NO: 661829 - DNA, 19 bp, Mus musculus
  siRNA target sequence for Mtap6 (NM_010837.1,1867-1885).
gtagtcccagggtccttaa

SEQ ID NO: 661830 - DNA, 19 bp, Mus musculus
  siRNA target sequence for Mtap6 (NM_010837.1,2003-2021).
catctgagcttttaaagaa

SEQ ID NO: 661831 - DNA, 19 bp, Mus musculus
  siRNA target sequence for Mtap6 (NM_010837.1,2107-2125).
gcaagcactaaggatcaaa

SEQ ID NO: 661832 - DNA, 19 bp, Mus musculus
  siRNA target sequence for Mtap6 (NM_010837.1,2271-2289).
cgagtctgtgaagaatcaa

SEQ ID NO: 661833 - DNA, 19 bp, Mus musculus
  siRNA target sequence for Mtap6 (NM_010837.1,2300-2318).
gcccagagctagttaaaga

SEQ ID NO: 661834 - DNA, 19 bp, Mus musculus
  siRNA target sequence for Mtap6 (NM_010837.1,2301-2319).
cccagagctagttaaagat

SEQ ID NO: 661835 - DNA, 19 bp, Mus musculus
  siRNA target sequence for Mtap6 (NM_010837.1,2302-2320).
ccagagctagttaaagata

SEQ ID NO: 661836 - DNA, 19 bp, Mus musculus
  siRNA target sequence for Mtap6 (NM_010837.1,2346-2364).
gtatctgaagggacatgat

SEQ ID NO: 661837 - DNA, 19 bp, Mus musculus
  siRNA target sequence for Mtap6 (NM_010837.1,2355-2373).
gggacatgattctgtgttt

SEQ ID NO: 661838 - DNA, 19 bp, Mus musculus
  siRNA target sequence for Mtap6 (NM_010837.1,2500-2518).
gtggttcttgggcctataa

SEQ ID NO: 661839 - DNA, 19 bp, Mus musculus
  siRNA target sequence for Mtap6 (NM_010837.1,2503-2521).
gttcttgggcctataaaga

SEQ ID NO: 661840 - DNA, 19 bp, Mus musculus
  siRNA target sequence for Mtap6 (NM_010837.1,2510-2528).
ggcctataaagaatcaaga

SEQ ID NO: 661841 - DNA, 19 bp, Mus musculus
  siRNA target sequence for Mtap6 (NM_010837.1,2660-2678).
cttcacccccagtcatgat

SEQ ID NO: 661842 - DNA, 19 bp, Mus musculus
  siRNA target sequence for Mtap6 (NM_010837.1,2686-2704).
gttccccatacggaatata

SEQ ID NO: 661843 - DNA, 19 bp, Mus musculus
  siRNA target sequence for Mtap6 (NM_010837.1,2690-2708).
cccatacggaatatattga

SEQ ID NO: 661844 - DNA, 19 bp, Mus musculus
  siRNA target sequence for Nf2 (NM_010898.2,667-685).
gccgagatggagttcaact

SEQ ID NO: 661845 - DNA, 19 bp, Mus musculus
  siRNA target sequence for Nf2 (NM_010898.2,678-696).
gttcaactgcgagatgaaa

SEQ ID NO: 661846 - DNA, 19 bp, Mus musculus
  siRNA target sequence for Nf2 (NM_010898.2,788-806).
cggtggcctggctcaaaat

SEQ ID NO: 661847 - DNA, 19 bp, Mus musculus
  siRNA target sequence for Nf2 (NM_010898.2,813-831).
gaaggtgttggatcatgat

SEQ ID NO: 661848 - DNA, 19 bp, Mus musculus
  siRNA target sequence for Nf2 (NM_010898.2,816-834).
ggtgttggatcatgatgtt

SEQ ID NO: 661849 - DNA, 19 bp, Mus musculus
  siRNA target sequence for Nf2 (NM_010898.2,844-862).
gaaccagttacctttcact

SEQ ID NO: 661850 - DNA, 19 bp, Mus musculus
  siRNA target sequence for Nf2 (NM_010898.2,859-877).
cacttcctggccaaatttt

SEQ ID NO: 661851 - DNA, 19 bp, Mus musculus
  siRNA target sequence for Nf2 (NM_010898.2,861-879).
cttcctggccaaattttat

SEQ ID NO: 661852 - DNA, 19 bp, Mus musculus
  siRNA target sequence for Nf2 (NM_010898.2,864-882).
cctggccaaattttatcct

SEQ ID NO: 661853 - DNA, 19 bp, Mus musculus
  siRNA target sequence for Nf2 (NM_010898.2,910-928).
gagatcacgcaacacttat

SEQ ID NO: 661854 - DNA, 19 bp, Mus musculus
  siRNA target sequence for Nf2 (NM_010898.2,912-930).
gatcacgcaacacttattt

SEQ ID NO: 661855 - DNA, 19 bp, Mus musculus
  siRNA target sequence for Nf2 (NM_010898.2,917-935).
cgcaacacttatttttctt

SEQ ID NO: 661856 - DNA, 19 bp, Mus musculus
  siRNA target sequence for Nf2 (NM_010898.2,990-1008).
cgtgctcttggcgtcatat

SEQ ID NO: 661857 - DNA, 19 bp, Mus musculus
  siRNA target sequence for Nf2 (NM_010898.2,993-1011).
gctcttggcgtcatatgct

SEQ ID NO: 661858 - DNA, 19 bp, Mus musculus
  siRNA target sequence for Nf2 (NM_010898.2,1045-1063).
gtgcacaagcggggatttt

SEQ ID NO: 661859 - DNA, 19 bp, Mus musculus
  siRNA target sequence for Nf2 (NM_010898.2,1047-1065).
gcacaagcggggattttta

SEQ ID NO: 661860 - DNA, 19 bp, Mus musculus
  siRNA target sequence for Nf2 (NM_010898.2,1081-1099).
ctcccgaaaagggtgataa

SEQ ID NO: 661861 - DNA, 19 bp, Mus musculus
  siRNA target sequence for Nf2 (NM_010898.2,1091-1109).
gggtgataaatctctatca

SEQ ID NO: 661862 - DNA, 19 bp, Mus musculus
  siRNA target sequence for Nf2 (NM_010898.2,1093-1111).
gtgataaatctctatcaga

SEQ ID NO: 661863 - DNA, 19 bp, Mus musculus
  siRNA target sequence for Nf2 (NM_010898.2,1134-1152).
gagaattacggcttggtat

SEQ ID NO: 661864 - DNA, 19 bp, Mus musculus
  siRNA target sequence for Nf2 (NM_010898.2,1180-1198).
gaagctgaaatggagtatt

SEQ ID NO: 661865 - DNA, 19 bp, Mus musculus
  siRNA target sequence for Nf2 (NM_010898.2,1184-1202).
ctgaaatggagtatttgaa

SEQ ID NO: 661866 - DNA, 19 bp, Mus musculus
  siRNA target sequence for Nf2 (NM_010898.2,1228-1246).
ggtgtgaactactttacaa

SEQ ID NO: 661867 - DNA, 19 bp, Mus musculus
  siRNA target sequence for Nf2 (NM_010898.2,1289-1307).
ctcttgggcttcatatcta

SEQ ID NO: 661868 - DNA, 19 bp, Mus musculus
  siRNA target sequence for Nf2 (NM_010898.2,1338-1356).
ctccttcccatggaatgaa

SEQ ID NO: 661869 - DNA, 19 bp, Mus musculus
  siRNA target sequence for Nf2 (NM_010898.2,1349-1367).
ggaatgaaatccgaaacat

SEQ ID NO: 661870 - DNA, 19 bp, Mus musculus
  siRNA target sequence for Nf2 (NM_010898.2,1374-1392).
cagcgacaaggagtttact

SEQ ID NO: 661871 - DNA, 19 bp, Mus musculus
  siRNA target sequence for Nf2 (NM_010898.2,1376-1394).
gcgacaaggagtttactat

SEQ ID NO: 661872 - DNA, 19 bp, Mus musculus
  siRNA target sequence for Nf2 (NM_010898.2,1377-1395).
cgacaaggagtttactatt

SEQ ID NO: 661873 - DNA, 19 bp, Mus musculus
  siRNA target sequence for Nf2 (NM_010898.2,1378-1396).
gacaaggagtttactatta

SEQ ID NO: 661874 - DNA, 19 bp, Mus musculus
  siRNA target sequence for Nf2 (NM_010898.2,1391-1409).
ctattaaaccactggataa

SEQ ID NO: 661875 - DNA, 19 bp, Mus musculus
  siRNA target sequence for Nf2 (NM_010898.2,1439-1457).
caaagcttcgtgttaataa

SEQ ID NO: 661876 - DNA, 19 bp, Mus musculus
  siRNA target sequence for Nf2 (NM_010898.2,1459-1477).
ctgattcttcagctatgta

SEQ ID NO: 661877 - DNA, 19 bp, Mus musculus
  siRNA target sequence for Nf2 (NM_010898.2,1505-1523).
gacggaaagctgactcttt

SEQ ID NO: 661878 - DNA, 19 bp, Mus musculus
  siRNA target sequence for Nf2 (NM_010898.2,1508-1526).
ggaaagctgactctttaga

SEQ ID NO: 661879 - DNA, 19 bp, Mus musculus
  siRNA target sequence for Nf2 (NM_010898.2,1620-1638).
ggccgagcgtacaagagat

SEQ ID NO: 661880 - DNA, 19 bp, Mus musculus
  siRNA target sequence for Nf2 (NM_010898.2,1626-1644).
gcgtacaagagatgagtta

SEQ ID NO: 661881 - DNA, 19 bp, Mus musculus
  siRNA target sequence for Nf2 (NM_010898.2,1718-1736).
ctgatctgttggctgaaaa

SEQ ID NO: 661882 - DNA, 19 bp, Mus musculus
  siRNA target sequence for Nf2 (NM_010898.2,1926-1944).
ggctgatcagttaaagcaa

SEQ ID NO: 661883 - DNA, 19 bp, Mus musculus
  siRNA target sequence for Nf2 (NM_010898.2,2214-2232).
cgaggccttgaaactcaaa

SEQ ID NO: 661884 - DNA, 19 bp, Mus musculus
  siRNA target sequence for Nf2 (NM_010898.2,2286-2304).
ccccagcagcaagcataat

SEQ ID NO: 661885 - DNA, 19 bp, Mus musculus
  siRNA target sequence for Nf2 (NM_010898.2,2287-2305).
cccagcagcaagcataata

SEQ ID NO: 661886 - DNA, 19 bp, Mus musculus
  siRNA target sequence for Nf2 (NM_010898.2,2292-2310).
cagcaagcataataccatt

SEQ ID NO: 661887 - DNA, 19 bp, Mus musculus
  siRNA target sequence for Ntn4 (NM_021320.2,470-488).
cggcagcccaagtgtgata

SEQ ID NO: 661888 - DNA, 19 bp, Mus musculus
  siRNA target sequence for Ntn4 (NM_021320.2,471-489).
ggcagcccaagtgtgataa

SEQ ID NO: 661889 - DNA, 19 bp, Mus musculus
  siRNA target sequence for Ntn4 (NM_021320.2,472-490).
gcagcccaagtgtgataaa

SEQ ID NO: 661890 - DNA, 19 bp, Mus musculus
  siRNA target sequence for Ntn4 (NM_021320.2,476-494).
cccaagtgtgataaatgca

SEQ ID NO: 661891 - DNA, 19 bp, Mus musculus
  siRNA target sequence for Ntn4 (NM_021320.2,711-729).
cctggaagccttacaagta

SEQ ID NO: 661892 - DNA, 19 bp, Mus musculus
  siRNA target sequence for Ntn4 (NM_021320.2,714-732).
ggaagccttacaagtactt

SEQ ID NO: 661893 - DNA, 19 bp, Mus musculus
  siRNA target sequence for Ntn4 (NM_021320.2,738-756).
caaactgctcggctacttt

SEQ ID NO: 661894 - DNA, 19 bp, Mus musculus
  siRNA target sequence for Ntn4 (NM_021320.2,788-806).
gctatttgcacgtctagat

SEQ ID NO: 661895 - DNA, 19 bp, Mus musculus
  siRNA target sequence for Ntn4 (NM_021320.2,795-813).
gcacgtctagatactcaaa

SEQ ID NO: 661896 - DNA, 19 bp, Mus musculus
  siRNA target sequence for Ntn4 (NM_021320.2,796-814).
cacgtctagatactcaaat

SEQ ID NO: 661897 - DNA, 19 bp, Mus musculus
  siRNA target sequence for Ntn4 (NM_021320.2,799-817).
gtctagatactcaaatcct

SEQ ID NO: 661898 - DNA, 19 bp, Mus musculus
  siRNA target sequence for Ntn4 (NM_021320.2,826-844).
caccggaggagaggttatt

SEQ ID NO: 661899 - DNA, 19 bp, Mus musculus
  siRNA target sequence for Ntn4 (NM_021320.2,828-846).
ccggaggagaggttatttt

SEQ ID NO: 661900 - DNA, 19 bp, Mus musculus
  siRNA target sequence for Ntn4 (NM_021320.2,830-848).
ggaggagaggttattttca

SEQ ID NO: 661901 - DNA, 19 bp, Mus musculus
  siRNA target sequence for Ntn4 (NM_021320.2,858-876).
caccaccatacgacataga

SEQ ID NO: 661902 - DNA, 19 bp, Mus musculus
  siRNA target sequence for Ntn4 (NM_021320.2,861-879).
caccatacgacatagaaaa

SEQ ID NO: 661903 - DNA, 19 bp, Mus musculus
  siRNA target sequence for Ntn4 (NM_021320.2,949-967).
gtcctgcccttgtcagata

SEQ ID NO: 661904 - DNA, 19 bp, Mus musculus
  siRNA target sequence for Ntn4 (NM_021320.2,954-972).
gcccttgtcagataaacga

SEQ ID NO: 661905 - DNA, 19 bp, Mus musculus
  siRNA target sequence for Ntn4 (NM_021320.2,979-997).
cgcaaaacctcaccatttt

SEQ ID NO: 661906 - DNA, 19 bp, Mus musculus
  siRNA target sequence for Ntn4 (NM_021320.2,980-998).
gcaaaacctcaccatttta

SEQ ID NO: 661907 - DNA, 19 bp, Mus musculus
  siRNA target sequence for Ntn4 (NM_021320.2,1001-1019).
cactacgcagtctatgact

SEQ ID NO: 661908 - DNA, 19 bp, Mus musculus
  siRNA target sequence for Ntn4 (NM_021320.2,1118-1136).
gtccacgggaggtgtatgt

SEQ ID NO: 661909 - DNA, 19 bp, Mus musculus
  siRNA target sequence for Ntn4 (NM_021320.2,1121-1139).
cacgggaggtgtatgtgta

SEQ ID NO: 661910 - DNA, 19 bp, Mus musculus
  siRNA target sequence for Ntn4 (NM_021320.2,1173-1191).
gtgcaccattgtacaatga

SEQ ID NO: 661911 - DNA, 19 bp, Mus musculus
  siRNA target sequence for Ntn4 (NM_021320.2,1229-1247).
cctaacgaatgcagaactt

SEQ ID NO: 661912 - DNA, 19 bp, Mus musculus
  siRNA target sequence for Ntn4 (NM_021320.2,1371-1389).
gctgtaagcccggtttcta

SEQ ID NO: 661913 - DNA, 19 bp, Mus musculus
  siRNA target sequence for Ntn4 (NM_021320.2,1642-1660).
cagcagtaacgctgatgta

SEQ ID NO: 661914 - DNA, 19 bp, Mus musculus
  siRNA target sequence for Ntn4 (NM_021320.2,1688-1706).
cactcgatgcacaataaga

SEQ ID NO: 661915 - DNA, 19 bp, Mus musculus
  siRNA target sequence for Ntn4 (NM_021320.2,1690-1708).
ctcgatgcacaataagagt

SEQ ID NO: 661916 - DNA, 19 bp, Mus musculus
  siRNA target sequence for Ntn4 (NM_021320.2,1751-1769).
ctccgacactcaggtaaat

SEQ ID NO: 661917 - DNA, 19 bp, Mus musculus
  siRNA target sequence for Ntn4 (NM_021320.2,1753-1771).
ccgacactcaggtaaatgt

SEQ ID NO: 661918 - DNA, 19 bp, Mus musculus
  siRNA target sequence for Ntn4 (NM_021320.2,1805-1823).
gccttctgtggaatgaagt

SEQ ID NO: 661919 - DNA, 19 bp, Mus musculus
  siRNA target sequence for Ntn4 (NM_021320.2,1872-1890).
cccatgccgaagtcaatgt

SEQ ID NO: 661920 - DNA, 19 bp, Mus musculus
  siRNA target sequence for Ntn4 (NM_021320.2,1874-1892).
catgccgaagtcaatgtga

SEQ ID NO: 661921 - DNA, 19 bp, Mus musculus
  siRNA target sequence for Ntn4 (NM_021320.2,1915-1933).
caccaaactgaagatctta

SEQ ID NO: 661922 - DNA, 19 bp, Mus musculus
  siRNA target sequence for Ntn4 (NM_021320.2,2106-2124).
gagtcatgcacatcttaaa

SEQ ID NO: 661923 - DNA, 19 bp, Mus musculus
  siRNA target sequence for Ntn4 (NM_021320.2,2108-2126).
gtcatgcacatcttaaaaa

SEQ ID NO: 661924 - DNA, 19 bp, Mus musculus
  siRNA target sequence for Ntng1 (NM_030699.1,927-945).
gtgatgcagccctaccttt

SEQ ID NO: 661925 - DNA, 19 bp, Mus musculus
  siRNA target sequence for Ntng1 (NM_030699.1,953-971).
gggacattatgatgtatgt

SEQ ID NO: 661926 - DNA, 19 bp, Mus musculus
  siRNA target sequence for Ntng1 (NM_030699.1,966-984).
gtatgtaagagcctgattt

SEQ ID NO: 661927 - DNA, 19 bp, Mus musculus
  siRNA target sequence for Ntng1 (NM_030699.1,996-1014).
ggcaaagtttgggattaca

SEQ ID NO: 661928 - DNA, 19 bp, Mus musculus
  siRNA target sequence for Ntng1 (NM_030699.1,1034-1052).
cacggacatgaccaagtat

SEQ ID NO: 661929 - DNA, 19 bp, Mus musculus
  siRNA target sequence for Ntng1 (NM_030699.1,1036-1054).
cggacatgaccaagtatct

SEQ ID NO: 661930 - DNA, 19 bp, Mus musculus
  siRNA target sequence for Ntng1 (NM_030699.1,1065-1083).
ctggaccctccggatatta

SEQ ID NO: 661931 - DNA, 19 bp, Mus musculus
  siRNA target sequence for Ntng1 (NM_030699.1,1068-1086).
gaccctccggatattacct

SEQ ID NO: 661932 - DNA, 19 bp, Mus musculus
  siRNA target sequence for Ntng1 (NM_030699.1,1114-1132).
caatgggcaacccttacat

SEQ ID NO: 661933 - DNA, 19 bp, Mus musculus
  siRNA target sequence for Ntng1 (NM_030699.1,1124-1142).
cccttacatgtgcaataat

SEQ ID NO: 661934 - DNA, 19 bp, Mus musculus
  siRNA target sequence for Ntng1 (NM_030699.1,1177-1195).
ctcctgagctgatgtttga

SEQ ID NO: 661935 - DNA, 19 bp, Mus musculus
  siRNA target sequence for Ntng1 (NM_030699.1,1180-1198).
ctgagctgatgtttgattt

SEQ ID NO: 661936 - DNA, 19 bp, Mus musculus
  siRNA target sequence for Ntng1 (NM_030699.1,1252-1270).
ccaaacctctccaggttaa

SEQ ID NO: 661937 - DNA, 19 bp, Mus musculus
  siRNA target sequence for Ntng1 (NM_030699.1,1257-1275).
cctctccaggttaacatca

SEQ ID NO: 661938 - DNA, 19 bp, Mus musculus
  siRNA target sequence for Ntng1 (NM_030699.1,1285-1303).
ggagcaaaaccattgaact

SEQ ID NO: 661939 - DNA, 19 bp, Mus musculus
  siRNA target sequence for Ntng1 (NM_030699.1,1308-1326).
gacaacatagttattacct

SEQ ID NO: 661940 - DNA, 19 bp, Mus musculus
  siRNA target sequence for Ntng1 (NM_030699.1,1310-1328).
caacatagttattaccttt

SEQ ID NO: 661941 - DNA, 19 bp, Mus musculus
  siRNA target sequence for Ntng1 (NM_030699.1,1313-1331).
catagttattacctttgaa

SEQ ID NO: 661942 - DNA, 19 bp, Mus musculus
  siRNA target sequence for Ntng1 (NM_030699.1,1336-1354).
ggcgtccagaccaaatgat

SEQ ID NO: 661943 - DNA, 19 bp, Mus musculus
  siRNA target sequence for Ntng1 (NM_030699.1,1384-1402).
catggcagccctatcagta

SEQ ID NO: 661944 - DNA, 19 bp, Mus musculus
  siRNA target sequence for Ntng1 (NM_030699.1,1388-1406).
gcagccctatcagtattat

SEQ ID NO: 661945 - DNA, 19 bp, Mus musculus
  siRNA target sequence for Ntng1 (NM_030699.1,1440-1458).
ccgaaatccgtgaaggatt

SEQ ID NO: 661946 - DNA, 19 bp, Mus musculus
  siRNA target sequence for Ntng1 (NM_030699.1,1441-1459).
cgaaatccgtgaaggattt

SEQ ID NO: 661947 - DNA, 19 bp, Mus musculus
  siRNA target sequence for Ntng1 (NM_030699.1,1447-1465).
ccgtgaaggatttatctca

SEQ ID NO: 661948 - DNA, 19 bp, Mus musculus
  siRNA target sequence for Ntng1 (NM_030699.1,1467-1485).
cacacggtcttggaaatca

SEQ ID NO: 661949 - DNA, 19 bp, Mus musculus
  siRNA target sequence for Ntng1 (NM_030699.1,1473-1491).
gtcttggaaatcatttgca

SEQ ID NO: 661950 - DNA, 19 bp, Mus musculus
  siRNA target sequence for Ntng1 (NM_030699.1,1510-1528).
ggtactccacgaatagcaa

SEQ ID NO: 661951 - DNA, 19 bp, Mus musculus
  siRNA target sequence for Ntng1 (NM_030699.1,1511-1529).
gtactccacgaatagcaaa

SEQ ID NO: 661952 - DNA, 19 bp, Mus musculus
  siRNA target sequence for Ntng1 (NM_030699.1,1514-1532).
ctccacgaatagcaaaata

SEQ ID NO: 661953 - DNA, 19 bp, Mus musculus
  siRNA target sequence for Ntng1 (NM_030699.1,1516-1534).
ccacgaatagcaaaataat

SEQ ID NO: 661954 - DNA, 19 bp, Mus musculus
  siRNA target sequence for Ntng1 (NM_030699.1,1572-1590).
ggacctcggctacgaaata

SEQ ID NO: 661955 - DNA, 19 bp, Mus musculus
  siRNA target sequence for Ntng1 (NM_030699.1,1573-1591).
gacctcggctacgaaatat

SEQ ID NO: 661956 - DNA, 19 bp, Mus musculus
  siRNA target sequence for Ntng1 (NM_030699.1,1610-1628).
gctggatacaaccaagaaa

SEQ ID NO: 661957 - DNA, 19 bp, Mus musculus
  siRNA target sequence for Ntng1 (NM_030699.1,1681-1699).
ccgttggggaaatatttgt

SEQ ID NO: 661958 - DNA, 19 bp, Mus musculus
  siRNA target sequence for Ntng1 (NM_030699.1,1682-1700).
cgttggggaaatatttgta

SEQ ID NO: 661959 - DNA, 19 bp, Mus musculus
  siRNA target sequence for Ntng1 (NM_030699.1,1710-1728).
catttggcacgttactttt

SEQ ID NO: 661960 - DNA, 19 bp, Mus musculus
  siRNA target sequence for Ntng1 (NM_030699.1,1732-1750).
cgatctcagacataaaggt

SEQ ID NO: 661961 - DNA, 19 bp, Mus musculus
  siRNA target sequence for Ntng1 (NM_030699.1,1780-1798).
ccacttcgtgtttgtatga

SEQ ID NO: 661962 - DNA, 19 bp, Mus musculus
  siRNA target sequence for Ntng1 (NM_030699.1,1818-1836).
gaatgtgagcacaacacta

SEQ ID NO: 661963 - DNA, 19 bp, Mus musculus
  siRNA target sequence for Ntng1 (NM_030699.1,1842-1860).
cccgactgtgggaaatgca

SEQ ID NO: 661964 - DNA, 19 bp, Mus musculus
  siRNA target sequence for Ntng1 (NM_030699.1,1979-1997).
ctccaatcggtgcagttat

SEQ ID NO: 661965 - DNA, 19 bp, Mus musculus
  siRNA target sequence for Ntng1 (NM_030699.1,1981-1999).
ccaatcggtgcagttatat

SEQ ID NO: 661966 - DNA, 19 bp, Mus musculus
  siRNA target sequence for Ntng1 (NM_030699.1,1993-2011).
gttatatcgatctgctaaa

SEQ ID NO: 661967 - DNA, 19 bp, Mus musculus
  siRNA target sequence for Ntng1 (NM_030699.1,2018-2036).
catttgcgtgagctgtaaa

SEQ ID NO: 661968 - DNA, 19 bp, Mus musculus
  siRNA target sequence for Ntng1 (NM_030699.1,2049-2067).
gggcagcactgtgagttat

SEQ ID NO: 661969 - DNA, 19 bp, Mus musculus
  siRNA target sequence for Ntng1 (NM_030699.1,2052-2070).
cagcactgtgagttatgca

SEQ ID NO: 661970 - DNA, 19 bp, Mus musculus
  siRNA target sequence for Ntng1 (NM_030699.1,2103-2121).
ctggacgatgagaatgtgt

SEQ ID NO: 661971 - DNA, 19 bp, Mus musculus
  siRNA target sequence for Ntng1 (NM_030699.1,2118-2136).
gtgtgcatagagtgttatt

SEQ ID NO: 661972 - DNA, 19 bp, Mus musculus
  siRNA target sequence for Ntng1 (NM_030699.1,2120-2138).
gtgcatagagtgttattgt

SEQ ID NO: 661973 - DNA, 19 bp, Mus musculus
  siRNA target sequence for Ntng1 (NM_030699.1,2122-2140).
gcatagagtgttattgtaa

SEQ ID NO: 661974 - DNA, 19 bp, Mus musculus
  siRNA target sequence for Ntng1 (NM_030699.1,2178-2196).
ggattttgtgagtgtaaga

SEQ ID NO: 661975 - DNA, 19 bp, Mus musculus
  siRNA target sequence for Ntng1 (NM_030699.1,2203-2221).
caacagggcctaaatgtga

SEQ ID NO: 661976 - DNA, 19 bp, Mus musculus
  siRNA target sequence for Ntng1 (NM_030699.1,2223-2241).
gagtgtctgccaggaaatt

SEQ ID NO: 661977 - DNA, 19 bp, Mus musculus
  siRNA target sequence for Ntng1 (NM_030699.1,2249-2267).
ctacggctgtcaacctaat

SEQ ID NO: 661978 - DNA, 19 bp, Mus musculus
  siRNA target sequence for Ntng1 (NM_030699.1,2263-2281).
ctaatgtctgcgacaatga

SEQ ID NO: 661979 - DNA, 19 bp, Mus musculus
  siRNA target sequence for Ntng1 (NM_030699.1,2305-2323).
ggacctgccagaacaatgt

SEQ ID NO: 661980 - DNA, 19 bp, Mus musculus
  siRNA target sequence for Ntng2 (NM_133500.1,127-145).
gtgatgcgcctgaaggatt

SEQ ID NO: 661981 - DNA, 19 bp, Mus musculus
  siRNA target sequence for Ntng2 (NM_133500.1,129-147).
gatgcgcctgaaggattat

SEQ ID NO: 661982 - DNA, 19 bp, Mus musculus
  siRNA target sequence for Ntng2 (NM_133500.1,133-151).
cgcctgaaggattatgtca

SEQ ID NO: 661983 - DNA, 19 bp, Mus musculus
  siRNA target sequence for Ntng2 (NM_133500.1,134-152).
gcctgaaggattatgtcaa

SEQ ID NO: 661984 - DNA, 19 bp, Mus musculus
  siRNA target sequence for Ntng2 (NM_133500.1,190-208).
ccccctgaaaggttctgtt

SEQ ID NO: 661985 - DNA, 19 bp, Mus musculus
  siRNA target sequence for Ntng2 (NM_133500.1,219-237).
cccctacctgtgcagtaat

SEQ ID NO: 661986 - DNA, 19 bp, Mus musculus
  siRNA target sequence for Ntng2 (NM_133500.1,411-429).
ggtggtgacttttgagtat

SEQ ID NO: 661987 - DNA, 19 bp, Mus musculus
  siRNA target sequence for Ntng2 (NM_133500.1,483-501).
gcagccctaccagttctat

SEQ ID NO: 661988 - DNA, 19 bp, Mus musculus
  siRNA target sequence for Ntng2 (NM_133500.1,605-623).
gggcagggtccaagaaaga

SEQ ID NO: 661989 - DNA, 19 bp, Mus musculus
  siRNA target sequence for Ntng2 (NM_133500.1,671-689).
gccctgacctgcgtaacat

SEQ ID NO: 661990 - DNA, 19 bp, Mus musculus
  siRNA target sequence for Ntng2 (NM_133500.1,834-852).
ctccaatatcgaagtcatt

SEQ ID NO: 661991 - DNA, 19 bp, Mus musculus
  siRNA target sequence for Ntng2 (NM_133500.1,949-967).
ggcaggtgcaagaagaact

SEQ ID NO: 661992 - DNA, 19 bp, Mus musculus
  siRNA target sequence for Ntng2 (NM_133500.1,1080-1098).
caaccgttgcagctacatt

SEQ ID NO: 661993 - DNA, 19 bp, Mus musculus
  siRNA target sequence for Ntng2 (NM_133500.1,1084-1102).
cgttgcagctacattgact

SEQ ID NO: 661994 - DNA, 19 bp, Mus musculus
  siRNA target sequence for Ntng2 (NM_133500.1,1118-1136).
cctgcgtcagctgtaaaca

SEQ ID NO: 661995 - DNA, 19 bp, Mus musculus
  siRNA target sequence for Ntng2 (NM_133500.1,1210-1228).
gagaacgtctgcattgaat

SEQ ID NO: 661996 - DNA, 19 bp, Mus musculus
  siRNA target sequence for Ntng2 (NM_133500.1,1216-1234).
gtctgcattgaatgtaact

SEQ ID NO: 661997 - DNA, 19 bp, Mus musculus
  siRNA target sequence for Ntng2 (NM_133500.1,1220-1238).
gcattgaatgtaactgtaa

SEQ ID NO: 661998 - DNA, 19 bp, Mus musculus
  siRNA target sequence for Ntng2 (NM_133500.1,1255-1273).
cacgatcgatgcaatgaga

SEQ ID NO: 661999 - DNA, 19 bp, Mus musculus
  siRNA target sequence for Odz2 (NM_011856.2,128-146).
cggcgacatcgctctttga

SEQ ID NO: 662000 - DNA, 19 bp, Mus musculus
  siRNA target sequence for Odz2 (NM_011856.2,505-523).
gtggggacgagggataaaa

SEQ ID NO: 662001 - DNA, 19 bp, Mus musculus
  siRNA target sequence for Odz2 (NM_011856.2,509-527).
ggacgagggataaaatcca

SEQ ID NO: 662002 - DNA, 19 bp, Mus musculus
  siRNA target sequence for Odz2 (NM_011856.2,578-596).
gactctgacaatgaaaata

SEQ ID NO: 662003 - DNA, 19 bp, Mus musculus
  siRNA target sequence for Odz2 (NM_011856.2,667-685).
gcctagctcccataatcct

SEQ ID NO: 662004 - DNA, 19 bp, Mus musculus
  siRNA target sequence for Odz2 (NM_011856.2,697-715).
ctgccagatgccattgcta

SEQ ID NO: 662005 - DNA, 19 bp, Mus musculus
  siRNA target sequence for Odz2 (NM_011856.2,747-765).
ccaaccctgatgaggaatt

SEQ ID NO: 662006 - DNA, 19 bp, Mus musculus
  siRNA target sequence for Odz2 (NM_011856.2,864-882).
ctctgccaccccctcataa

SEQ ID NO: 662007 - DNA, 19 bp, Mus musculus
  siRNA target sequence for Odz2 (NM_011856.2,1162-1180).
cctgctgccacggaataca

SEQ ID NO: 662008 - DNA, 19 bp, Mus musculus
  siRNA target sequence for Odz2 (NM_011856.2,1163-1181).
ctgctgccacggaatacat

SEQ ID NO: 662009 - DNA, 19 bp, Mus musculus
  siRNA target sequence for Odz2 (NM_011856.2,1166-1184).
ctgccacggaatacattct

SEQ ID NO: 662010 - DNA, 19 bp, Mus musculus
  siRNA target sequence for Odz2 (NM_011856.2,1274-1292).
gccattttgctggcatatt

SEQ ID NO: 662011 - DNA, 19 bp, Mus musculus
  siRNA target sequence for Odz2 (NM_011856.2,1283-1301).
ctggcatatttcatagcaa

SEQ ID NO: 662012 - DNA, 19 bp, Mus musculus
  siRNA target sequence for Odz2 (NM_011856.2,1303-1321).
gcatctgctcggactcaat

SEQ ID NO: 662013 - DNA, 19 bp, Mus musculus
  siRNA target sequence for Odz2 (NM_011856.2,1304-1322).
catctgctcggactcaatt

SEQ ID NO: 662014 - DNA, 19 bp, Mus musculus
  siRNA target sequence for Odz2 (NM_011856.2,1372-1390).
cggcttaccaggaaacgat

SEQ ID NO: 662015 - DNA, 19 bp, Mus musculus
  siRNA target sequence for Odz2 (NM_011856.2,1424-1442).
ccctggtcattgaaaaaca

SEQ ID NO: 662016 - DNA, 19 bp, Mus musculus
  siRNA target sequence for Odz2 (NM_011856.2,1496-1514).
ccaccaggggtgttttgga

SEQ ID NO: 662017 - DNA, 19 bp, Mus musculus
  siRNA target sequence for Odz2 (NM_011856.2,1512-1530).
ggaggtcccagattcacat

SEQ ID NO: 662018 - DNA, 19 bp, Mus musculus
  siRNA target sequence for Odz2 (NM_011856.2,1533-1551).
gtcagcctcaattcttaaa

SEQ ID NO: 662019 - DNA, 19 bp, Mus musculus
  siRNA target sequence for Odz2 (NM_011856.2,1577-1595).
gccctcttcggtgtctata

SEQ ID NO: 662020 - DNA, 19 bp, Mus musculus
  siRNA target sequence for Odz2 (NM_011856.2,1580-1598).
ctcttcggtgtctatataa

SEQ ID NO: 662021 - DNA, 19 bp, Mus musculus
  siRNA target sequence for Odz2 (NM_011856.2,1614-1632).
cgtctcatgcccagtatga

SEQ ID NO: 662022 - DNA, 19 bp, Mus musculus
  siRNA target sequence for Odz2 (NM_011856.2,1617-1635).
ctcatgcccagtatgactt

SEQ ID NO: 662023 - DNA, 19 bp, Mus musculus
  siRNA target sequence for Odz2 (NM_011856.2,1804-1822).
cttcaacactgttgtctta

SEQ ID NO: 662024 - DNA, 19 bp, Mus musculus
  siRNA target sequence for Odz2 (NM_011856.2,1807-1825).
caacactgttgtcttagat

SEQ ID NO: 662025 - DNA, 19 bp, Mus musculus
  siRNA target sequence for Odz2 (NM_011856.2,1955-1973).
ggacagtattctaaaggaa

SEQ ID NO: 662026 - DNA, 19 bp, Mus musculus
  siRNA target sequence for Odz2 (NM_011856.2,2012-2030).
gatgtgcctatgaaccaat

SEQ ID NO: 662027 - DNA, 19 bp, Mus musculus
  siRNA target sequence for Odz2 (NM_011856.2,2015-2033).
gtgcctatgaaccaatgta

SEQ ID NO: 662028 - DNA, 19 bp, Mus musculus
  siRNA target sequence for Odz2 (NM_011856.2,2108-2126).
cactgtgaggaagttgatt

SEQ ID NO: 662029 - DNA, 19 bp, Mus musculus
  siRNA target sequence for Odz2 (NM_011856.2,2437-2455).
gcacgggacctgtaaagat

SEQ ID NO: 662030 - DNA, 19 bp, Mus musculus
  siRNA target sequence for Odz2 (NM_011856.2,2625-2643).
gcgctgataacaaggataa

SEQ ID NO: 662031 - DNA, 19 bp, Mus musculus
  siRNA target sequence for Odz2 (NM_011856.2,2626-2644).
cgctgataacaaggataat

SEQ ID NO: 662032 - DNA, 19 bp, Mus musculus
  siRNA target sequence for Odz2 (NM_011856.2,2730-2748).
gggaccccttggacatcat

SEQ ID NO: 662033 - DNA, 19 bp, Mus musculus
  siRNA target sequence for Odz2 (NM_011856.2,2731-2749).
ggaccccttggacatcatt

SEQ ID NO: 662034 - DNA, 19 bp, Mus musculus
  siRNA target sequence for Odz2 (NM_011856.2,2880-2898).
gaggccaagtagtaaccat

SEQ ID NO: 662035 - DNA, 19 bp, Mus musculus
  siRNA target sequence for Odz2 (NM_011856.2,3012-3030).
ccttgactcttcactttga

SEQ ID NO: 662036 - DNA, 19 bp, Mus musculus
  siRNA target sequence for Odz2 (NM_011856.2,3070-3088).
gccatggaacagcttctat

SEQ ID NO: 662037 - DNA, 19 bp, Mus musculus
  siRNA target sequence for Odz2 (NM_011856.2,3158-3176).
cggccagatccaatcatca

SEQ ID NO: 662038 - DNA, 19 bp, Mus musculus
  siRNA target sequence for Odz2 (NM_011856.2,3159-3177).
ggccagatccaatcatcat

SEQ ID NO: 662039 - DNA, 19 bp, Mus musculus
  siRNA target sequence for Odz2 (NM_011856.2,3234-3252).
ctgagacccaggttcttca

SEQ ID NO: 662040 - DNA, 19 bp, Mus musculus
  siRNA target sequence for Odz2 (NM_011856.2,3281-3299).
gtgaagctccgttatctca

SEQ ID NO: 662041 - DNA, 19 bp, Mus musculus
  siRNA target sequence for Odz2 (NM_011856.2,3290-3308).
cgttatctcagctctagaa

SEQ ID NO: 662042 - DNA, 19 bp, Mus musculus
  siRNA target sequence for Odz2 (NM_011856.2,3632-3650).
caccacaccctcaatgtga

SEQ ID NO: 662043 - DNA, 19 bp, Mus musculus
  siRNA target sequence for Odz2 (NM_011856.2,3823-3841).
cgatgggagcctctttgtt

SEQ ID NO: 662044 - DNA, 19 bp, Mus musculus
  siRNA target sequence for Odz2 (NM_011856.2,3891-3909).
gtatcttggagttacgaaa

SEQ ID NO: 662045 - DNA, 19 bp, Mus musculus
  siRNA target sequence for Odz2 (NM_011856.2,3901-3919).
gttacgaaataaagagttt

SEQ ID NO: 662046 - DNA, 19 bp, Mus musculus
  siRNA target sequence for Odz2 (NM_011856.2,3996-4014).
ccaacagtcgccgaatcta

SEQ ID NO: 662047 - DNA, 19 bp, Mus musculus
  siRNA target sequence for Odz2 (NM_011856.2,4172-4190).
gacaagaatgggcttatgt

SEQ ID NO: 662048 - DNA, 19 bp, Mus musculus
  siRNA target sequence for Odz2 (NM_011856.2,4177-4195).
gaatgggcttatgtacttt

SEQ ID NO: 662049 - DNA, 19 bp, Mus musculus
  siRNA target sequence for Odz2 (NM_011856.2,4182-4200).
ggcttatgtactttgttga

SEQ ID NO: 662050 - DNA, 19 bp, Mus musculus
  siRNA target sequence for Odz2 (NM_011856.2,4183-4201).
gcttatgtactttgttgat

SEQ ID NO: 662051 - DNA, 19 bp, Mus musculus
  siRNA target sequence for Odz2 (NM_011856.2,4309-4327).
ggcccaggtccgtctagaa

SEQ ID NO: 662052 - DNA, 19 bp, Mus musculus
  siRNA target sequence for Odz2 (NM_011856.2,4310-4328).
gcccaggtccgtctagaat

SEQ ID NO: 662053 - DNA, 19 bp, Mus musculus
  siRNA target sequence for Odz2 (NM_011856.2,4783-4801).
cagggcggtcagcaaaaat

SEQ ID NO: 662054 - DNA, 19 bp, Mus musculus
  siRNA target sequence for Odz2 (NM_011856.2,4785-4803).
gggcggtcagcaaaaataa

SEQ ID NO: 662055 - DNA, 19 bp, Mus musculus
  siRNA target sequence for Odz2 (NM_011856.2,4786-4804).
ggcggtcagcaaaaataaa

SEQ ID NO: 662056 - DNA, 19 bp, Mus musculus
  siRNA target sequence for Odz2 (NM_011856.2,4842-4860).
ctccgggagaacaggaatt

SEQ ID NO: 662057 - DNA, 19 bp, Mus musculus
  siRNA target sequence for Odz2 (NM_011856.2,4844-4862).
ccgggagaacaggaattgt

SEQ ID NO: 662058 - DNA, 19 bp, Mus musculus
  siRNA target sequence for Odz2 (NM_011856.2,4845-4863).
cgggagaacaggaattgta

SEQ ID NO: 662059 - DNA, 19 bp, Mus musculus
  siRNA target sequence for Odz2 (NM_011856.2,4870-4888).
caacgctgatggtatccat

SEQ ID NO: 662060 - DNA, 19 bp, Mus musculus
  siRNA target sequence for Odz2 (NM_011856.2,4907-4925).
gtgactggggagtacttgt

SEQ ID NO: 662061 - DNA, 19 bp, Mus musculus
  siRNA target sequence for Odz2 (NM_011856.2,4911-4929).
ctggggagtacttgtacaa

SEQ ID NO: 662062 - DNA, 19 bp, Mus musculus
  siRNA target sequence for Odz2 (NM_011856.2,4933-4951).
cacatacagcgctgacaat

SEQ ID NO: 662063 - DNA, 19 bp, Mus musculus
  siRNA target sequence for Odz2 (NM_011856.2,4935-4953).
catacagcgctgacaatga

SEQ ID NO: 662064 - DNA, 19 bp, Mus musculus
  siRNA target sequence for Odz2 (NM_011856.2,4955-4973).
gtcaccgagttgattgaca

SEQ ID NO: 662065 - DNA, 19 bp, Mus musculus
  siRNA target sequence for Odz2 (NM_011856.2,5204-5222).
ggccgtctgaccaatgtga

SEQ ID NO: 662066 - DNA, 19 bp, Mus musculus
  siRNA target sequence for Odz2 (NM_011856.2,5271-5289).
ctatcaccattgacattga

SEQ ID NO: 662067 - DNA, 19 bp, Mus musculus
  siRNA target sequence for Odz2 (NM_011856.2,5338-5356).
cgtggaggcctcctataca

SEQ ID NO: 662068 - DNA, 19 bp, Mus musculus
  siRNA target sequence for Odz2 (NM_011856.2,5349-5367).
cctatacagtggtacaaga

SEQ ID NO: 662069 - DNA, 19 bp, Mus musculus
  siRNA target sequence for Odz2 (NM_011856.2,5386-5404).
ccagctctgcaataatgga

SEQ ID NO: 662070 - DNA, 19 bp, Mus musculus
  siRNA target sequence for Odz2 (NM_011856.2,5403-5421).
gaaccctgcgggtgatgta

SEQ ID NO: 662071 - DNA, 19 bp, Mus musculus
  siRNA target sequence for Odz2 (NM_011856.2,5742-5760).
ggctggcagccgtcaatgt

SEQ ID NO: 662072 - DNA, 19 bp, Mus musculus
  siRNA target sequence for Odz2 (NM_011856.2,5809-5827).
gagcgagaggacagacatt

SEQ ID NO: 662073 - DNA, 19 bp, Mus musculus
  siRNA target sequence for Odz2 (NM_011856.2,5811-5829).
gcgagaggacagacattga

SEQ ID NO: 662074 - DNA, 19 bp, Mus musculus
  siRNA target sequence for Odz2 (NM_011856.2,5920-5938).
gagccaacgtcagtacata

SEQ ID NO: 662075 - DNA, 19 bp, Mus musculus
  siRNA target sequence for Odz2 (NM_011856.2,5961-5979).
gcctccacgcagtcactat

SEQ ID NO: 662076 - DNA, 19 bp, Mus musculus
  siRNA target sequence for Odz2 (NM_011856.2,6023-6041).
ggttacatccgaaacattt

SEQ ID NO: 662077 - DNA, 19 bp, Mus musculus
  siRNA target sequence for Odz2 (NM_011856.2,6024-6042).
gttacatccgaaacattta

SEQ ID NO: 662078 - DNA, 19 bp, Mus musculus
  siRNA target sequence for Odz2 (NM_011856.2,6047-6065).
ccacccgaaagcaatgcat

SEQ ID NO: 662079 - DNA, 19 bp, Mus musculus
  siRNA target sequence for Odz2 (NM_011856.2,6096-6114).
gcatcctaaagacatcttt

SEQ ID NO: 662080 - DNA, 19 bp, Mus musculus
  siRNA target sequence for Odz2 (NM_011856.2,6130-6148).
ccaggtgttctacaagtat

SEQ ID NO: 662081 - DNA, 19 bp, Mus musculus
  siRNA target sequence for Odz2 (NM_011856.2,6268-6286).
catcaggtaccgaaaggtt

SEQ ID NO: 662082 - DNA, 19 bp, Mus musculus
  siRNA target sequence for Odz2 (NM_011856.2,6296-6314).
gtggacaagcagatttaca

SEQ ID NO: 662083 - DNA, 19 bp, Mus musculus
  siRNA target sequence for Odz2 (NM_011856.2,6334-6352).
gatcaacgccaggtttgat

SEQ ID NO: 662084 - DNA, 19 bp, Mus musculus
  siRNA target sequence for Odz2 (NM_011856.2,6337-6355).
caacgccaggtttgattat

SEQ ID NO: 662085 - DNA, 19 bp, Mus musculus
  siRNA target sequence for Odz2 (NM_011856.2,6341-6359).
gccaggtttgattatacct

SEQ ID NO: 662086 - DNA, 19 bp, Mus musculus
  siRNA target sequence for Odz2 (NM_011856.2,6342-6360).
ccaggtttgattataccta

SEQ ID NO: 662087 - DNA, 19 bp, Mus musculus
  siRNA target sequence for Odz2 (NM_011856.2,6343-6361).
caggtttgattatacctat

SEQ ID NO: 662088 - DNA, 19 bp, Mus musculus
  siRNA target sequence for Odz2 (NM_011856.2,6357-6375).
cctatcacgacaatagctt

SEQ ID NO: 662089 - DNA, 19 bp, Mus musculus
  siRNA target sequence for Odz2 (NM_011856.2,6450-6468).
ccggcaaggtggaacactt

SEQ ID NO: 662090 - DNA, 19 bp, Mus musculus
  siRNA target sequence for Odz2 (NM_011856.2,6519-6537).
ccgtcatgacgcttagcaa

SEQ ID NO: 662091 - DNA, 19 bp, Mus musculus
  siRNA target sequence for Odz2 (NM_011856.2,6528-6546).
cgcttagcaagcactttga

SEQ ID NO: 662092 - DNA, 19 bp, Mus musculus
  siRNA target sequence for Odz2 (NM_011856.2,6558-6576).
gcatcaaggaagtgcaata

SEQ ID NO: 662093 - DNA, 19 bp, Mus musculus
  siRNA target sequence for Odz2 (NM_011856.2,6559-6577).
catcaaggaagtgcaatat

SEQ ID NO: 662094 - DNA, 19 bp, Mus musculus
  siRNA target sequence for Odz2 (NM_011856.2,6668-6686).
gccaacaccacaaagtaca

SEQ ID NO: 662095 - DNA, 19 bp, Mus musculus
  siRNA target sequence for Odz2 (NM_011856.2,6740-6758).
cctacctggcgctatagct

SEQ ID NO: 662096 - DNA, 19 bp, Mus musculus
  siRNA target sequence for Odz2 (NM_011856.2,6741-6759).
ctacctggcgctatagcta

SEQ ID NO: 662097 - DNA, 19 bp, Mus musculus
  siRNA target sequence for Odz2 (NM_011856.2,6770-6788).
gggaacctgcaccttctaa

SEQ ID NO: 662098 - DNA, 19 bp, Mus musculus
  siRNA target sequence for Odz2 (NM_011856.2,6771-6789).
ggaacctgcaccttctaaa

SEQ ID NO: 662099 - DNA, 19 bp, Mus musculus
  siRNA target sequence for Odz2 (NM_011856.2,6830-6848).
ctccgtgaccggataacca

SEQ ID NO: 662100 - DNA, 19 bp, Mus musculus
  siRNA target sequence for Odz2 (NM_011856.2,6854-6872).
ggggacgtgcagtacaaaa

SEQ ID NO: 662101 - DNA, 19 bp, Mus musculus
  siRNA target sequence for Odz2 (NM_011856.2,6855-6873).
gggacgtgcagtacaaaat

SEQ ID NO: 662102 - DNA, 19 bp, Mus musculus
  siRNA target sequence for Odz2 (NM_011856.2,6902-6920).
gggtcagacatctttgaat

SEQ ID NO: 662103 - DNA, 19 bp, Mus musculus
  siRNA target sequence for Odz2 (NM_011856.2,6903-6921).
ggtcagacatctttgaata

SEQ ID NO: 662104 - DNA, 19 bp, Mus musculus
  siRNA target sequence for Odz2 (NM_011856.2,7034-7052).
cacctacagtacttctact

SEQ ID NO: 662105 - DNA, 19 bp, Mus musculus
  siRNA target sequence for Odz2 (NM_011856.2,7071-7089).
cacgtatcacccatgttta

SEQ ID NO: 662106 - DNA, 19 bp, Mus musculus
  siRNA target sequence for Odz2 (NM_011856.2,7073-7091).
cgtatcacccatgtttaca

SEQ ID NO: 662107 - DNA, 19 bp, Mus musculus
  siRNA target sequence for Odz2 (NM_011856.2,7108-7126).
gatcacctcgctctactat

SEQ ID NO: 662108 - DNA, 19 bp, Mus musculus
  siRNA target sequence for Odz2 (NM_011856.2,7158-7176).
gcagtagtggtgaagaata

SEQ ID NO: 662109 - DNA, 19 bp, Mus musculus
  siRNA target sequence for Odz2 (NM_011856.2,7161-7179).
gtagtggtgaagaatacta

SEQ ID NO: 662110 - DNA, 19 bp, Mus musculus
  siRNA target sequence for Odz2 (NM_011856.2,7342-7360).
caagctcgtccactttact

SEQ ID NO: 662111 - DNA, 19 bp, Mus musculus
  siRNA target sequence for Odz2 (NM_011856.2,7522-7540).
gagctggcttgtgatgttt

SEQ ID NO: 662112 - DNA, 19 bp, Mus musculus
  siRNA target sequence for Odz2 (NM_011856.2,7569-7587).
gattcccgagagccaaaat

SEQ ID NO: 662113 - DNA, 19 bp, Mus musculus
  siRNA target sequence for Odz2 (NM_011856.2,7575-7593).
cgagagccaaaatgtattt

SEQ ID NO: 662114 - DNA, 19 bp, Mus musculus
  siRNA target sequence for Odz2 (NM_011856.2,7706-7724).
ggacaggtcatcactaaaa

SEQ ID NO: 662115 - DNA, 19 bp, Mus musculus
  siRNA target sequence for Odz2 (NM_011856.2,7707-7725).
gacaggtcatcactaaaaa

SEQ ID NO: 662116 - DNA, 19 bp, Mus musculus
  siRNA target sequence for Odz2 (NM_011856.2,7751-7769).
gcaggccactggtttgcta

SEQ ID NO: 662117 - DNA, 19 bp, Mus musculus
  siRNA target sequence for Odz2 (NM_011856.2,7868-7886).
gtagcatccgtgttgaaca

SEQ ID NO: 662118 - DNA, 19 bp, Mus musculus
  siRNA target sequence for Odz2 (NM_011856.2,7882-7900).
gaacaatgcctactactta

SEQ ID NO: 662119 - DNA, 19 bp, Mus musculus
  siRNA target sequence for Odz2 (NM_011856.2,7890-7908).
cctactacttagacaagat

SEQ ID NO: 662120 - DNA, 19 bp, Mus musculus
  siRNA target sequence for Odz2 (NM_011856.2,7935-7953).
cacactactttgtgaagat

SEQ ID NO: 662121 - DNA, 19 bp, Mus musculus
  siRNA target sequence for Odz2 (NM_011856.2,8289-8307).
cgggacgggtacaaggtta

SEQ ID NO: 662122 - DNA, 19 bp, Mus musculus
  siRNA target sequence for Odz2 (NM_011856.2,8290-8308).
gggacgggtacaaggttat

SEQ ID NO: 662123 - DNA, 19 bp, Mus musculus
  siRNA target sequence for Odz2 (NM_011856.2,8292-8310).
gacgggtacaaggttatga

SEQ ID NO: 662124 - DNA, 19 bp, Mus musculus
  siRNA target sequence for Odz2 (NM_011856.2,8304-8322).
gttatgagggctattacgt

SEQ ID NO: 662125 - DNA, 19 bp, Mus musculus
  siRNA target sequence for Plp (NM_011123.1,208-226).
gccactggattgtgtttct

SEQ ID NO: 662126 - DNA, 19 bp, Mus musculus
  siRNA target sequence for Plp (NM_011123.1,209-227).
ccactggattgtgtttctt

SEQ ID NO: 662127 - DNA, 19 bp, Mus musculus
  siRNA target sequence for Plp (NM_011123.1,283-301).
ctaattgagacctatttct

SEQ ID NO: 662128 - DNA, 19 bp, Mus musculus
  siRNA target sequence for Plp (NM_011123.1,315-333).
ggactatgagtatctcatt

SEQ ID NO: 662129 - DNA, 19 bp, Mus musculus
  siRNA target sequence for Plp (NM_011123.1,318-336).
ctatgagtatctcattaat

SEQ ID NO: 662130 - DNA, 19 bp, Mus musculus
  siRNA target sequence for Plp (NM_011123.1,531-549).
ccaacatcaagctcattct

SEQ ID NO: 662131 - DNA, 19 bp, Mus musculus
  siRNA target sequence for Plp (NM_011123.1,615-633).
ctatgccctgactgttgta

SEQ ID NO: 662132 - DNA, 19 bp, Mus musculus
  siRNA target sequence for Plp (NM_011123.1,657-675).
ggctgtacctgtgtacatt

SEQ ID NO: 662133 - DNA, 19 bp, Mus musculus
  siRNA target sequence for Plp (NM_011123.1,665-683).
ctgtgtacatttacttcaa

SEQ ID NO: 662134 - DNA, 19 bp, Mus musculus
  siRNA target sequence for Plp (NM_011123.1,689-707).
ggaccacctgtcagtctat

SEQ ID NO: 662135 - DNA, 19 bp, Mus musculus
  siRNA target sequence for Plp (NM_011123.1,690-708).
gaccacctgtcagtctatt

SEQ ID NO: 662136 - DNA, 19 bp, Mus musculus
  siRNA target sequence for Plp (NM_011123.1,749-767).
gcgctgatgccagaatgta

SEQ ID NO: 662137 - DNA, 19 bp, Mus musculus
  siRNA target sequence for Plp (NM_011123.1,750-768).
cgctgatgccagaatgtat

SEQ ID NO: 662138 - DNA, 19 bp, Mus musculus
  siRNA target sequence for Plp (NM_011123.1,817-835).
cttctgtccatctgcaaaa

SEQ ID NO: 662139 - DNA, 19 bp, Mus musculus
  siRNA target sequence for Plp (NM_011123.1,855-873).
cttccacctgtttattgct

SEQ ID NO: 662140 - DNA, 19 bp, Mus musculus
  siRNA target sequence for Plp (NM_011123.1,886-904).
gctgcggccacactagttt

SEQ ID NO: 662141 - DNA, 19 bp, Mus musculus
  siRNA target sequence for Plp (NM_011123.1,936-954).
caacttcgccgtccttaaa

SEQ ID NO: 662142 - DNA, 19 bp, Mus musculus
  siRNA target sequence for Ppl (NM_008909.1,710-728).
gctcgctgcaggattacat

SEQ ID NO: 662143 - DNA, 19 bp, Mus musculus
  siRNA target sequence for Ppl (NM_008909.1,1029-1047).
ggaagactaccaccaattt

SEQ ID NO: 662144 - DNA, 19 bp, Mus musculus
  siRNA target sequence for Ppl (NM_008909.1,1033-1051).
gactaccaccaatttcaca

SEQ ID NO: 662145 - DNA, 19 bp, Mus musculus
  siRNA target sequence for Ppl (NM_008909.1,1039-1057).
caccaatttcacaaagaca

SEQ ID NO: 662146 - DNA, 19 bp, Mus musculus
  siRNA target sequence for Ppl (NM_008909.1,1125-1143).
caaagaccggtatcagata

SEQ ID NO: 662147 - DNA, 19 bp, Mus musculus
  siRNA target sequence for Ppl (NM_008909.1,1857-1875).
gaaatatgagcgactagta

SEQ ID NO: 662148 - DNA, 19 bp, Mus musculus
  siRNA target sequence for Ppl (NM_008909.1,1986-2004).
cgacacaatgcctgaaagt

SEQ ID NO: 662149 - DNA, 19 bp, Mus musculus
  siRNA target sequence for Ppl (NM_008909.1,2258-2276).
gggctgcctacgatgaata

SEQ ID NO: 662150 - DNA, 19 bp, Mus musculus
  siRNA target sequence for Ppl (NM_008909.1,2260-2278).
gctgcctacgatgaatact

SEQ ID NO: 662151 - DNA, 19 bp, Mus musculus
  siRNA target sequence for Ppl (NM_008909.1,2310-2328).
ggccaagactcccagttat

SEQ ID NO: 662152 - DNA, 19 bp, Mus musculus
  siRNA target sequence for Ppl (NM_008909.1,2312-2330).
ccaagactcccagttatga

SEQ ID NO: 662153 - DNA, 19 bp, Mus musculus
  siRNA target sequence for Ppl (NM_008909.1,2462-2480).
cggtgaaggactatgaact

SEQ ID NO: 662154 - DNA, 19 bp, Mus musculus
  siRNA target sequence for Ppl (NM_008909.1,2463-2481).
ggtgaaggactatgaactt

SEQ ID NO: 662155 - DNA, 19 bp, Mus musculus
  siRNA target sequence for Ppl (NM_008909.1,2522-2540).
gacggaacagccatgtgaa

SEQ ID NO: 662156 - DNA, 19 bp, Mus musculus
  siRNA target sequence for Ppl (NM_008909.1,2604-2622).
caagttcacagaggttaat

SEQ ID NO: 662157 - DNA, 19 bp, Mus musculus
  siRNA target sequence for Ppl (NM_008909.1,2709-2727).
cctacaagggggaaagcta

SEQ ID NO: 662158 - DNA, 19 bp, Mus musculus
  siRNA target sequence for Ppl (NM_008909.1,2710-2728).
ctacaagggggaaagctaa

SEQ ID NO: 662159 - DNA, 19 bp, Mus musculus
  siRNA target sequence for Ppl (NM_008909.1,3156-3174).
ggctgaagtgctactctta

SEQ ID NO: 662160 - DNA, 19 bp, Mus musculus
  siRNA target sequence for Ppl (NM_008909.1,3158-3176).
ctgaagtgctactcttaca

SEQ ID NO: 662161 - DNA, 19 bp, Mus musculus
  siRNA target sequence for Ppl (NM_008909.1,3263-3281).
cccaactggaggcagaata

SEQ ID NO: 662162 - DNA, 19 bp, Mus musculus
  siRNA target sequence for Ppl (NM_008909.1,3740-3758).
gaccacaggtagaagtcaa

SEQ ID NO: 662163 - DNA, 19 bp, Mus musculus
  siRNA target sequence for Ppl (NM_008909.1,3743-3761).
cacaggtagaagtcaaaga

SEQ ID NO: 662164 - DNA, 19 bp, Mus musculus
  siRNA target sequence for Ppl (NM_008909.1,3767-3785).
ccaaagaggtcattaaata

SEQ ID NO: 662165 - DNA, 19 bp, Mus musculus
  siRNA target sequence for Ppl (NM_008909.1,3774-3792).
ggtcattaaatatacaact

SEQ ID NO: 662166 - DNA, 19 bp, Mus musculus
  siRNA target sequence for Ppl (NM_008909.1,3840-3858).
ggacaagaccaggttaata

SEQ ID NO: 662167 - DNA, 19 bp, Mus musculus
  siRNA target sequence for Ppl (NM_008909.1,3863-3881).
ggtgtgacctagagattta

SEQ ID NO: 662168 - DNA, 19 bp, Mus musculus
  siRNA target sequence for Ppl (NM_008909.1,3866-3884).
gtgacctagagatttacca

SEQ ID NO: 662169 - DNA, 19 bp, Mus musculus
  siRNA target sequence for Ppl (NM_008909.1,4131-4149).
ccaggaggtagtacagtat

SEQ ID NO: 662170 - DNA, 19 bp, Mus musculus
  siRNA target sequence for Ppl (NM_008909.1,4137-4155).
ggtagtacagtatgaagat

SEQ ID NO: 662171 - DNA, 19 bp, Mus musculus
  siRNA target sequence for Ppl (NM_008909.1,4185-4203).
cttcacaaacagcattgat

SEQ ID NO: 662172 - DNA, 19 bp, Mus musculus
  siRNA target sequence for Ppl (NM_008909.1,4209-4227).
gctgcggcagattgataaa

SEQ ID NO: 662173 - DNA, 19 bp, Mus musculus
  siRNA target sequence for Ppl (NM_008909.1,4516-4534).
gagccgctgcgtagaaagt

SEQ ID NO: 662174 - DNA, 19 bp, Mus musculus
  siRNA target sequence for Ppl (NM_008909.1,4582-4600).
gagagtgtccaggtagaaa

SEQ ID NO: 662175 - DNA, 19 bp, Mus musculus
  siRNA target sequence for Ppl (NM_008909.1,4689-4707).
ccggctagaagccaagtta

SEQ ID NO: 662176 - DNA, 19 bp, Mus musculus
  siRNA target sequence for Ppl (NM_008909.1,4690-4708).
cggctagaagccaagttat

SEQ ID NO: 662177 - DNA, 19 bp, Mus musculus
  siRNA target sequence for Ppl (NM_008909.1,4709-4727).
ctgagctagaattctataa

SEQ ID NO: 662178 - DNA, 19 bp, Mus musculus
  siRNA target sequence for Ppl (NM_008909.1,4711-4729).
gagctagaattctataatt

SEQ ID NO: 662179 - DNA, 19 bp, Mus musculus
  siRNA target sequence for Ppl (NM_008909.1,4811-4829).
cccggagactccaatcaga

SEQ ID NO: 662180 - DNA, 19 bp, Mus musculus
  siRNA target sequence for Ppl (NM_008909.1,4853-4871).
ctcgagatctgaagaacat

SEQ ID NO: 662181 - DNA, 19 bp, Mus musculus
  siRNA target sequence for Ppl (NM_008909.1,4858-4876).
gatctgaagaacataacca

SEQ ID NO: 662182 - DNA, 19 bp, Mus musculus
  siRNA target sequence for Ppl (NM_008909.1,4888-4906).
gggacccacctaaactcta

SEQ ID NO: 662183 - DNA, 19 bp, Mus musculus
  siRNA target sequence for Ppl (NM_008909.1,4907-4925).
ggctgtggtccctagagaa

SEQ ID NO: 662184 - DNA, 19 bp, Mus musculus
  siRNA target sequence for Ppl (NM_008909.1,5108-5126).
ggcttatcgactggaaaat

SEQ ID NO: 662185 - DNA, 19 bp, Mus musculus
  siRNA target sequence for Ppl (NM_008909.1,5110-5128).
cttatcgactggaaaatgt

SEQ ID NO: 662186 - DNA, 19 bp, Mus musculus
  siRNA target sequence for Ppl (NM_008909.1,5154-5172).
cgactgggaggagatatca

SEQ ID NO: 662187 - DNA, 19 bp, Mus musculus
  siRNA target sequence for Ppl (NM_008909.1,5189-5207).
gggagtcatcagtaattca

SEQ ID NO: 662188 - DNA, 19 bp, Mus musculus
  siRNA target sequence for Ppl (NM_008909.1,5190-5208).
ggagtcatcagtaattcat

SEQ ID NO: 662189 - DNA, 19 bp, Mus musculus
  siRNA target sequence for Ppl (NM_008909.1,5261-5279).
ggctaaccgctgctcaata

SEQ ID NO: 662190 - DNA, 19 bp, Mus musculus
  siRNA target sequence for Ppl (NM_008909.1,5262-5280).
gctaaccgctgctcaatat

SEQ ID NO: 662191 - DNA, 19 bp, Mus musculus
  siRNA target sequence for Ppl (NM_008909.1,5275-5293).
caatatgaccgctatgtca

SEQ ID NO: 662192 - DNA, 19 bp, Mus musculus
  siRNA target sequence for Ppl (NM_008909.1,5284-5302).
cgctatgtcaacaaggata

SEQ ID NO: 662193 - DNA, 19 bp, Mus musculus
  siRNA target sequence for Ppl (NM_008909.1,5285-5303).
gctatgtcaacaaggatat

SEQ ID NO: 662194 - DNA, 19 bp, Mus musculus
  siRNA target sequence for Tekt1 (NM_011569.1,132-150).
cttcctgaggagtggtata

SEQ ID NO: 662195 - DNA, 19 bp, Mus musculus
  siRNA target sequence for Tekt1 (NM_011569.1,143-161).
gtggtatattgctaacaaa

SEQ ID NO: 662196 - DNA, 19 bp, Mus musculus
  siRNA target sequence for Tekt1 (NM_011569.1,184-202).
cccaaaggtcccaatctga

SEQ ID NO: 662197 - DNA, 19 bp, Mus musculus
  siRNA target sequence for Tekt1 (NM_011569.1,185-203).
ccaaaggtcccaatctgaa

SEQ ID NO: 662198 - DNA, 19 bp, Mus musculus
  siRNA target sequence for Tekt1 (NM_011569.1,262-280).
ctcagagcgatgtgaacaa

SEQ ID NO: 662199 - DNA, 19 bp, Mus musculus
  siRNA target sequence for Tekt1 (NM_011569.1,264-282).
cagagcgatgtgaacaaga

SEQ ID NO: 662200 - DNA, 19 bp, Mus musculus
  siRNA target sequence for Tekt1 (NM_011569.1,268-286).
gcgatgtgaacaagaaact

SEQ ID NO: 662201 - DNA, 19 bp, Mus musculus
  siRNA target sequence for Tekt1 (NM_011569.1,269-287).
cgatgtgaacaagaaactt

SEQ ID NO: 662202 - DNA, 19 bp, Mus musculus
  siRNA target sequence for Tekt1 (NM_011569.1,323-341).
ggagttagatgacaaactt

SEQ ID NO: 662203 - DNA, 19 bp, Mus musculus
  siRNA target sequence for Tekt1 (NM_011569.1,361-379).
cggatgacctgcttacgta

SEQ ID NO: 662204 - DNA, 19 bp, Mus musculus
  siRNA target sequence for Tekt1 (NM_011569.1,433-451).
cggagaagtgcttggaata

SEQ ID NO: 662205 - DNA, 19 bp, Mus musculus
  siRNA target sequence for Tekt1 (NM_011569.1,463-481).
gtgtgggcatcgatttggt

SEQ ID NO: 662206 - DNA, 19 bp, Mus musculus
  siRNA target sequence for Tekt1 (NM_011569.1,590-608).
ccgctctgccaagtacaat

SEQ ID NO: 662207 - DNA, 19 bp, Mus musculus
  siRNA target sequence for Tekt1 (NM_011569.1,592-610).
gctctgccaagtacaatct

SEQ ID NO: 662208 - DNA, 19 bp, Mus musculus
  siRNA target sequence for Tekt1 (NM_011569.1,618-636).
gatttgagggataagttca

SEQ ID NO: 662209 - DNA, 19 bp, Mus musculus
  siRNA target sequence for Tekt1 (NM_011569.1,635-653).
cacggccataactatcgat

SEQ ID NO: 662210 - DNA, 19 bp, Mus musculus
  siRNA target sequence for Tekt1 (NM_011569.1,665-683).
ctcactcaacaataactca

SEQ ID NO: 662211 - DNA, 19 bp, Mus musculus
  siRNA target sequence for Tekt1 (NM_011569.1,875-893).
ggtagacgaggcattcata

SEQ ID NO: 662212 - DNA, 19 bp, Mus musculus
  siRNA target sequence for Tekt1 (NM_011569.1,923-941).
gaacaagctggctgatcat

SEQ ID NO: 662213 - DNA, 19 bp, Mus musculus
  siRNA target sequence for Tekt1 (NM_011569.1,1076-1094).
ggagctgtgtcgagatatt

SEQ ID NO: 662214 - DNA, 19 bp, Mus musculus
  siRNA target sequence for Tekt2 (NM_011902.1,168-186).
cgcaccaacagctacctat

SEQ ID NO: 662215 - DNA, 19 bp, Mus musculus
  siRNA target sequence for Tekt2 (NM_011902.1,169-187).
gcaccaacagctacctatt

SEQ ID NO: 662216 - DNA, 19 bp, Mus musculus
  siRNA target sequence for Tekt2 (NM_011902.1,243-261).
cggatccttcgcaatgaga

SEQ ID NO: 662217 - DNA, 19 bp, Mus musculus
  siRNA target sequence for Tekt2 (NM_011902.1,249-267).
cttcgcaatgagacaaaca

SEQ ID NO: 662218 - DNA, 19 bp, Mus musculus
  siRNA target sequence for Tekt2 (NM_011902.1,272-290).
gattgtatgggatgaacat

SEQ ID NO: 662219 - DNA, 19 bp, Mus musculus
  siRNA target sequence for Tekt2 (NM_011902.1,282-300).
gatgaacatgacaatagga

SEQ ID NO: 662220 - DNA, 19 bp, Mus musculus
  siRNA target sequence for Tekt2 (NM_011902.1,351-369).
gacaagtgtctgacagatt

SEQ ID NO: 662221 - DNA, 19 bp, Mus musculus
  siRNA target sequence for Tekt2 (NM_011902.1,704-722).
cccaaacatctctctgaaa

SEQ ID NO: 662222 - DNA, 19 bp, Mus musculus
  siRNA target sequence for Tekt2 (NM_011902.1,764-782).
gcagtgggatgaatttact

SEQ ID NO: 662223 - DNA, 19 bp, Mus musculus
  siRNA target sequence for Tekt2 (NM_011902.1,774-792).
gaatttactcgattcaaca

SEQ ID NO: 662224 - DNA, 19 bp, Mus musculus
  siRNA target sequence for Tekt2 (NM_011902.1,798-816).
cgggcagaggccgaaatga

SEQ ID NO: 662225 - DNA, 19 bp, Mus musculus
  siRNA target sequence for Tekt2 (NM_011902.1,842-860).
cattgccctagctattgct

SEQ ID NO: 662226 - DNA, 19 bp, Mus musculus
  siRNA target sequence for Tekt2 (NM_011902.1,951-969).
ctcaagtggcaagagaaaa

SEQ ID NO: 662227 - DNA, 19 bp, Mus musculus
  siRNA target sequence for Tekt2 (NM_011902.1,1020-1038).
gaggacctgcgtagaaaga

SEQ ID NO: 662228 - DNA, 19 bp, Mus musculus
  siRNA target sequence for Tekt2 (NM_011902.1,1106-1124).
ccgggaccagacacagtat

SEQ ID NO: 662229 - DNA, 19 bp, Mus musculus
  siRNA target sequence for Tekt2 (NM_011902.1,1117-1135).
cacagtatggcctcattga

SEQ ID NO: 662230 - DNA, 19 bp, Mus musculus
  siRNA target sequence for Tekt2 (NM_011902.1,1121-1139).
gtatggcctcattgatgaa

SEQ ID NO: 662231 - DNA, 19 bp, Mus musculus
  siRNA target sequence for Tekt2 (NM_011902.1,1148-1166).
gttagaggcaaccatcaat

SEQ ID NO: 662232 - DNA, 19 bp, Mus musculus
  siRNA target sequence for Tekt2 (NM_011902.1,1152-1170).
gaggcaaccatcaatacca

SEQ ID NO: 662233 - DNA, 19 bp, Mus musculus
  siRNA target sequence for Tekt2 (NM_011902.1,1307-1325).
gacggtgccggctgagaaa

SEQ ID NO: 662234 - DNA, 19 bp, Mus musculus
  siRNA target sequence for Tekt2 (NM_011902.1,1309-1327).
cggtgccggctgagaaatt

SEQ ID NO: 662235 - DNA, 19 bp, Mus musculus
  siRNA target sequence for Tekt2 (NM_011902.1,1371-1389).
ctgagtccactcaaaatct

SEQ ID NO: 662236 - DNA, 19 bp, Mus musculus
  siRNA target sequence for Tnc (NM_011607.1,224-242).
gagagagtgggctaaacat

SEQ ID NO: 662237 - DNA, 19 bp, Mus musculus
  siRNA target sequence for Tnc (NM_011607.1,243-261).
gaccctgccagaagagaat

SEQ ID NO: 662238 - DNA, 19 bp, Mus musculus
  siRNA target sequence for Tnc (NM_011607.1,265-283).
ccagtggtgttcaaccata

SEQ ID NO: 662239 - DNA, 19 bp, Mus musculus
  siRNA target sequence for Tnc (NM_011607.1,978-996).
cctcaacaactgctacaat

SEQ ID NO: 662240 - DNA, 19 bp, Mus musculus
  siRNA target sequence for Tnc (NM_011607.1,1089-1107).
ccgcggtcgctgcatcaat

SEQ ID NO: 662241 - DNA, 19 bp, Mus musculus
  siRNA target sequence for Tnc (NM_011607.1,1435-1453).
cggcgatgccccaatgact

SEQ ID NO: 662242 - DNA, 19 bp, Mus musculus
  siRNA target sequence for Tnc (NM_011607.1,1474-1492).
gtacagggcaagtgcatat

SEQ ID NO: 662243 - DNA, 19 bp, Mus musculus
  siRNA target sequence for Tnc (NM_011607.1,1479-1497).
gggcaagtgcatatgtgaa

SEQ ID NO: 662244 - DNA, 19 bp, Mus musculus
  siRNA target sequence for Tnc (NM_011607.1,1998-2016).
ccctcccaaagaccttatt

SEQ ID NO: 662245 - DNA, 19 bp, Mus musculus
  siRNA target sequence for Tnc (NM_011607.1,2011-2029).
cttattgtgacagaagtaa

SEQ ID NO: 662246 - DNA, 19 bp, Mus musculus
  siRNA target sequence for Tnc (NM_011607.1,2026-2044).
gtaacagaggagactgtaa

SEQ ID NO: 662247 - DNA, 19 bp, Mus musculus
  siRNA target sequence for Tnc (NM_011607.1,2071-2089).
gtcactgagtacctcatta

SEQ ID NO: 662248 - DNA, 19 bp, Mus musculus
  siRNA target sequence for Tnc (NM_011607.1,2267-2285).
cacctgaaggtctaaaatt

SEQ ID NO: 662249 - DNA, 19 bp, Mus musculus
  siRNA target sequence for Tnc (NM_011607.1,2269-2287).
cctgaaggtctaaaattca

SEQ ID NO: 662250 - DNA, 19 bp, Mus musculus
  siRNA target sequence for Tnc (NM_011607.1,2272-2290).
gaaggtctaaaattcaagt

SEQ ID NO: 662251 - DNA, 19 bp, Mus musculus
  siRNA target sequence for Tnc (NM_011607.1,2275-2293).
ggtctaaaattcaagtcta

SEQ ID NO: 662252 - DNA, 19 bp, Mus musculus
  siRNA target sequence for Tnc (NM_011607.1,2276-2294).
gtctaaaattcaagtctat

SEQ ID NO: 662253 - DNA, 19 bp, Mus musculus
  siRNA target sequence for Tnc (NM_011607.1,2332-2350).
gacattgctttcgaaacat

SEQ ID NO: 662254 - DNA, 19 bp, Mus musculus
  siRNA target sequence for Tnc (NM_011607.1,2343-2361).
cgaaacatgggagatcatt

SEQ ID NO: 662255 - DNA, 19 bp, Mus musculus
  siRNA target sequence for Tnc (NM_011607.1,2364-2382).
ccgaaatatgaacaaagaa

SEQ ID NO: 662256 - DNA, 19 bp, Mus musculus
  siRNA target sequence for Tnc (NM_011607.1,2547-2565).
ccatattgaggtgaaagat

SEQ ID NO: 662257 - DNA, 19 bp, Mus musculus
  siRNA target sequence for Tnc (NM_011607.1,2598-2616).
caagcccttggctgaaatt

SEQ ID NO: 662258 - DNA, 19 bp, Mus musculus
  siRNA target sequence for Tnc (NM_011607.1,2717-2735).
gacctgacacggagtatga

SEQ ID NO: 662259 - DNA, 19 bp, Mus musculus
  siRNA target sequence for Tnc (NM_011607.1,2881-2899).
gacatcgacagttacagaa

SEQ ID NO: 662260 - DNA, 19 bp, Mus musculus
  siRNA target sequence for Tnc (NM_011607.1,2883-2901).
catcgacagttacagaatt

SEQ ID NO: 662261 - DNA, 19 bp, Mus musculus
  siRNA target sequence for Tnc (NM_011607.1,2887-2905).
gacagttacagaattaagt

SEQ ID NO: 662262 - DNA, 19 bp, Mus musculus
  siRNA target sequence for Tnc (NM_011607.1,2928-2946).
ccatgctgagatagatgtt

SEQ ID NO: 662263 - DNA, 19 bp, Mus musculus
  siRNA target sequence for Tnc (NM_011607.1,2956-2974).
cagcaagccacaaccaaaa

SEQ ID NO: 662264 - DNA, 19 bp, Mus musculus
  siRNA target sequence for Tnc (NM_011607.1,3063-3081).
caatgcggccacagaaatt

SEQ ID NO: 662265 - DNA, 19 bp, Mus musculus
  siRNA target sequence for Tnc (NM_011607.1,3146-3164).
cacccctggccaagtttga

SEQ ID NO: 662266 - DNA, 19 bp, Mus musculus
  siRNA target sequence for Tnc (NM_011607.1,3426-3444).
ctatgagtactttgtcatt

SEQ ID NO: 662267 - DNA, 19 bp, Mus musculus
  siRNA target sequence for Tnc (NM_011607.1,3531-3549).
ggttgccacttcttataga

SEQ ID NO: 662268 - DNA, 19 bp, Mus musculus
  siRNA target sequence for Tnc (NM_011607.1,3688-3706).
ccagaaggagcctataaga

SEQ ID NO: 662269 - DNA, 19 bp, Mus musculus
  siRNA target sequence for Tnc (NM_011607.1,3697-3715).
gcctataagaactttttca

SEQ ID NO: 662270 - DNA, 19 bp, Mus musculus
  siRNA target sequence for Tnc (NM_011607.1,3806-3824).
cagccacccgctactacat

SEQ ID NO: 662271 - DNA, 19 bp, Mus musculus
  siRNA target sequence for Tnc (NM_011607.1,3808-3826).
gccacccgctactacatca

SEQ ID NO: 662272 - DNA, 19 bp, Mus musculus
  siRNA target sequence for Tnc (NM_011607.1,4077-4095).
ggccgacaccccttataga

SEQ ID NO: 662273 - DNA, 19 bp, Mus musculus
  siRNA target sequence for Tnc (NM_011607.1,4202-4220).
ctcctaagagcttcaatct

SEQ ID NO: 662274 - DNA, 19 bp, Mus musculus
  siRNA target sequence for Tnc (NM_011607.1,4204-4222).
cctaagagcttcaatctct

SEQ ID NO: 662275 - DNA, 19 bp, Mus musculus
  siRNA target sequence for Tnc (NM_011607.1,4239-4257).
cgggatcttcgacatgttt

SEQ ID NO: 662276 - DNA, 19 bp, Mus musculus
  siRNA target sequence for Tnc (NM_011607.1,4248-4266).
cgacatgtttactattgaa

SEQ ID NO: 662277 - DNA, 19 bp, Mus musculus
  siRNA target sequence for Tnc (NM_011607.1,4291-4309).
caaacagcagaacataata

SEQ ID NO: 662278 - DNA, 19 bp, Mus musculus
  siRNA target sequence for Tnc (NM_011607.1,4371-4389).
ctacctctctggaattgct

SEQ ID NO: 662279 - DNA, 19 bp, Mus musculus
  siRNA target sequence for Tnc (NM_011607.1,4390-4408).
cccagcatccgtaccaaaa

SEQ ID NO: 662280 - DNA, 19 bp, Mus musculus
  siRNA target sequence for Tnc (NM_011607.1,4399-4417).
cgtaccaaaaccatcagta

SEQ ID NO: 662281 - DNA, 19 bp, Mus musculus
  siRNA target sequence for Tnc (NM_011607.1,4452-4470).
caaccttctagtttcagat

SEQ ID NO: 662282 - DNA, 19 bp, Mus musculus
  siRNA target sequence for Tnc (NM_011607.1,4502-4520).
ctgctgatgaagggatatt

SEQ ID NO: 662283 - DNA, 19 bp, Mus musculus
  siRNA target sequence for Tnc (NM_011607.1,4505-4523).
ctgatgaagggatattcga

SEQ ID NO: 662284 - DNA, 19 bp, Mus musculus
  siRNA target sequence for Tnc (NM_011607.1,4514-4532).
ggatattcgacagttttgt

SEQ ID NO: 662285 - DNA, 19 bp, Mus musculus
  siRNA target sequence for Tnc (NM_011607.1,4515-4533).
gatattcgacagttttgtt

SEQ ID NO: 662286 - DNA, 19 bp, Mus musculus
  siRNA target sequence for Tnc (NM_011607.1,4536-4554).
caggatcagagataccaaa

SEQ ID NO: 662287 - DNA, 19 bp, Mus musculus
  siRNA target sequence for Tnc (NM_011607.1,4538-4556).
ggatcagagataccaaaaa

SEQ ID NO: 662288 - DNA, 19 bp, Mus musculus
  siRNA target sequence for Tnc (NM_011607.1,4557-4575).
gcaatctgagccacaagaa

SEQ ID NO: 662289 - DNA, 19 bp, Mus musculus
  siRNA target sequence for Tnc (NM_011607.1,4594-4612).
gaacgtaccagggacataa

SEQ ID NO: 662290 - DNA, 19 bp, Mus musculus
  siRNA target sequence for Tnc (NM_011607.1,4628-4646).
ccactgagtacgaaattga

SEQ ID NO: 662291 - DNA, 19 bp, Mus musculus
  siRNA target sequence for Tnc (NM_011607.1,4629-4647).
cactgagtacgaaattgaa

SEQ ID NO: 662292 - DNA, 19 bp, Mus musculus
  siRNA target sequence for Tnc (NM_011607.1,4631-4649).
ctgagtacgaaattgaact

SEQ ID NO: 662293 - DNA, 19 bp, Mus musculus
  siRNA target sequence for Tnc (NM_011607.1,4635-4653).
gtacgaaattgaactctat

SEQ ID NO: 662294 - DNA, 19 bp, Mus musculus
  siRNA target sequence for Tnc (NM_011607.1,4686-4704).
cagtgccatagcaacaaca

SEQ ID NO: 662295 - DNA, 19 bp, Mus musculus
  siRNA target sequence for Tnc (NM_011607.1,4711-4729).
ggttctccgaaggaaatca

SEQ ID NO: 662296 - DNA, 19 bp, Mus musculus
  siRNA target sequence for Tnc (NM_011607.1,4712-4730).
gttctccgaaggaaatcat

SEQ ID NO: 662297 - DNA, 19 bp, Mus musculus
  siRNA target sequence for Tnc (NM_011607.1,4781-4799).
ctgctcaggtggagagttt

SEQ ID NO: 662298 - DNA, 19 bp, Mus musculus
  siRNA target sequence for Tnc (NM_011607.1,4794-4812).
gagtttccggatcacttat

SEQ ID NO: 662299 - DNA, 19 bp, Mus musculus
  siRNA target sequence for Tnc (NM_011607.1,4802-4820).
ggatcacttatgtacctat

SEQ ID NO: 662300 - DNA, 19 bp, Mus musculus
  siRNA target sequence for Tnc (NM_011607.1,4806-4824).
cacttatgtacctatgaca

SEQ ID NO: 662301 - DNA, 19 bp, Mus musculus
  siRNA target sequence for Tnc (NM_011607.1,4902-4920).
gtaccgcgtcagtgtgatt

SEQ ID NO: 662302 - DNA, 19 bp, Mus musculus
  siRNA target sequence for Tnc (NM_011607.1,4953-4971).
ctcggggactctaatcaca

SEQ ID NO: 662303 - DNA, 19 bp, Mus musculus
  siRNA target sequence for Tnc (NM_011607.1,4982-5000).
gtccatctggtcttctgat

SEQ ID NO: 662304 - DNA, 19 bp, Mus musculus
  siRNA target sequence for Tnc (NM_011607.1,5085-5103).
ggagagagtgccagaagtt

SEQ ID NO: 662305 - DNA, 19 bp, Mus musculus
  siRNA target sequence for Tnc (NM_011607.1,5107-5125).
cgcacagtgtctggaaata

SEQ ID NO: 662306 - DNA, 19 bp, Mus musculus
  siRNA target sequence for Tnc (NM_011607.1,5162-5180).
cagagtacatcctgagtat

SEQ ID NO: 662307 - DNA, 19 bp, Mus musculus
  siRNA target sequence for Tnc (NM_011607.1,5238-5256).
cctcgattccccaagagaa

SEQ ID NO: 662308 - DNA, 19 bp, Mus musculus
  siRNA target sequence for Tnc (NM_011607.1,5239-5257).
ctcgattccccaagagaat

SEQ ID NO: 662309 - DNA, 19 bp, Mus musculus
  siRNA target sequence for Tnc (NM_011607.1,5241-5259).
cgattccccaagagaattt

SEQ ID NO: 662310 - DNA, 19 bp, Mus musculus
  siRNA target sequence for Tnc (NM_011607.1,5242-5260).
gattccccaagagaattta

SEQ ID NO: 662311 - DNA, 19 bp, Mus musculus
  siRNA target sequence for Tnc (NM_011607.1,5327-5345).
gatacctcctggtctatga

SEQ ID NO: 662312 - DNA, 19 bp, Mus musculus
  siRNA target sequence for Tnc (NM_011607.1,5331-5349).
cctcctggtctatgaatct

SEQ ID NO: 662313 - DNA, 19 bp, Mus musculus
  siRNA target sequence for Tnc (NM_011607.1,5357-5375).
gtacagtcaaggaagtcat

SEQ ID NO: 662314 - DNA, 19 bp, Mus musculus
  siRNA target sequence for Tnc (NM_011607.1,5525-5543).
gggactgctctcaagcaat

SEQ ID NO: 662315 - DNA, 19 bp, Mus musculus
  siRNA target sequence for Tnc (NM_011607.1,5532-5550).
ctctcaagcaatgttgaat

SEQ ID NO: 662316 - DNA, 19 bp, Mus musculus
  siRNA target sequence for Tnc (NM_011607.1,5568-5586).
cctctacaccatctatata

SEQ ID NO: 662317 - DNA, 19 bp, Mus musculus
  siRNA target sequence for Tnc (NM_011607.1,5569-5587).
ctctacaccatctatataa

SEQ ID NO: 662318 - DNA, 19 bp, Mus musculus
  siRNA target sequence for Tnc (NM_011607.1,5571-5589).
ctacaccatctatataaat

SEQ ID NO: 662319 - DNA, 19 bp, Mus musculus
  siRNA target sequence for Tnc (NM_011607.1,5600-5618).
ctcaagcactggaagtcta

SEQ ID NO: 662320 - DNA, 19 bp, Mus musculus
  siRNA target sequence for Tnc (NM_011607.1,5608-5626).
ctggaagtctactgtgata

SEQ ID NO: 662321 - DNA, 19 bp, Mus musculus
  siRNA target sequence for Tnc (NM_011607.1,5639-5657).
gaggtggatggattgtttt

SEQ ID NO: 662322 - DNA, 19 bp, Mus musculus
  siRNA target sequence for Tnc (NM_011607.1,5642-5660).
gtggatggattgttttcct

SEQ ID NO: 662323 - DNA, 19 bp, Mus musculus
  siRNA target sequence for Tnc (NM_011607.1,5725-5743).
gaccgcagagaagaatttt

SEQ ID NO: 662324 - DNA, 19 bp, Mus musculus
  siRNA target sequence for Tnc (NM_011607.1,5774-5792).
cagcccaagggcagtatga

SEQ ID NO: 662325 - DNA, 19 bp, Mus musculus
  siRNA target sequence for Tnc (NM_011607.1,5833-5851).
gctgtgtacgacagattca

SEQ ID NO: 662326 - DNA, 19 bp, Mus musculus
  siRNA target sequence for Tnc (NM_011607.1,5908-5926).
gcaggtgactccatgaact

SEQ ID NO: 662327 - DNA, 19 bp, Mus musculus
  siRNA target sequence for Tnc (NM_011607.1,5914-5932).
gactccatgaactatcaca

SEQ ID NO: 662328 - DNA, 19 bp, Mus musculus
  siRNA target sequence for Tnc (NM_011607.1,6004-6022).
ggagctttctggtataaga

SEQ ID NO: 662329 - DNA, 19 bp, Mus musculus
  siRNA target sequence for Tnc (NM_011607.1,6005-6023).
gagctttctggtataagaa

SEQ ID NO: 662330 - DNA, 19 bp, Mus musculus
  siRNA target sequence for Tnc (NM_011607.1,6046-6064).
ggcagatatggggacaata

SEQ ID NO: 662331 - DNA, 19 bp, Mus musculus
  siRNA target sequence for Tnc (NM_011607.1,6047-6065).
gcagatatggggacaataa

SEQ ID NO: 662332 - DNA, 19 bp, Mus musculus
  siRNA target sequence for Tnc (NM_011607.1,6050-6068).
gatatggggacaataacca

SEQ ID NO: 662333 - DNA, 19 bp, Mus musculus
  siRNA target sequence for Tnc (NM_011607.1,6067-6085).
cacagtcagggcgttaact

SEQ ID NO: 662334 - DNA, 19 bp, Mus musculus
  siRNA target sequence for Tnc (NM_011607.1,6076-6094).
ggcgttaactggttccatt

SEQ ID NO: 662335 - DNA, 19 bp, Mus musculus
  siRNA target sequence for Tnc (NM_011607.1,6143-6161).
ccagcaacttccgaaatct

SEQ ID NO: 662336 - DNA, 19 bp, Mus musculus
  siRNA target sequence for Ush2a (NM_021408.1,275-293).
cattgatccttgcctattt

SEQ ID NO: 662337 - DNA, 19 bp, Mus musculus
  siRNA target sequence for Ush2a (NM_021408.1,458-476).
gtacggagaggctgtgtat

SEQ ID NO: 662338 - DNA, 19 bp, Mus musculus
  siRNA target sequence for Ush2a (NM_021408.1,726-744).
cgggcagattgtgttcaaa

SEQ ID NO: 662339 - DNA, 19 bp, Mus musculus
  siRNA target sequence for Ush2a (NM_021408.1,728-746).
ggcagattgtgttcaaagt

SEQ ID NO: 662340 - DNA, 19 bp, Mus musculus
  siRNA target sequence for Ush2a (NM_021408.1,732-750).
gattgtgttcaaagttaca

SEQ ID NO: 662341 - DNA, 19 bp, Mus musculus
  siRNA target sequence for Ush2a (NM_021408.1,736-754).
gtgttcaaagttacaatat

SEQ ID NO: 662342 - DNA, 19 bp, Mus musculus
  siRNA target sequence for Ush2a (NM_021408.1,738-756).
gttcaaagttacaatatct

SEQ ID NO: 662343 - DNA, 19 bp, Mus musculus
  siRNA target sequence for Ush2a (NM_021408.1,793-811).
ggtttgcagcctccaataa

SEQ ID NO: 662344 - DNA, 19 bp, Mus musculus
  siRNA target sequence for Ush2a (NM_021408.1,794-812).
gtttgcagcctccaataaa

SEQ ID NO: 662345 - DNA, 19 bp, Mus musculus
  siRNA target sequence for Ush2a (NM_021408.1,798-816).
gcagcctccaataaaagta

SEQ ID NO: 662346 - DNA, 19 bp, Mus musculus
  siRNA target sequence for Ush2a (NM_021408.1,823-841).
ccagggagaattcttatga

SEQ ID NO: 662347 - DNA, 19 bp, Mus musculus
  siRNA target sequence for Ush2a (NM_021408.1,876-894).
gacggcaatcagcttcttt

SEQ ID NO: 662348 - DNA, 19 bp, Mus musculus
  siRNA target sequence for Ush2a (NM_021408.1,878-896).
cggcaatcagcttctttgt

SEQ ID NO: 662349 - DNA, 19 bp, Mus musculus
  siRNA target sequence for Ush2a (NM_021408.1,901-919).
ggtctggaggagaacagta

SEQ ID NO: 662350 - DNA, 19 bp, Mus musculus
  siRNA target sequence for Ush2a (NM_021408.1,912-930).
gaacagtactgcatttgat

SEQ ID NO: 662351 - DNA, 19 bp, Mus musculus
  siRNA target sequence for Ush2a (NM_021408.1,935-953).
gaactctccatgattcagt

SEQ ID NO: 662352 - DNA, 19 bp, Mus musculus
  siRNA target sequence for Ush2a (NM_021408.1,962-980).
cagtctccagcgtgataca

SEQ ID NO: 662353 - DNA, 19 bp, Mus musculus
  siRNA target sequence for Ush2a (NM_021408.1,966-984).
ctccagcgtgatacaagta

SEQ ID NO: 662354 - DNA, 19 bp, Mus musculus
  siRNA target sequence for Ush2a (NM_021408.1,979-997).
caagtaggacagagtttaa

SEQ ID NO: 662355 - DNA, 19 bp, Mus musculus
  siRNA target sequence for Ush2a (NM_021408.1,985-1003).
ggacagagtttaaatggtt

SEQ ID NO: 662356 - DNA, 19 bp, Mus musculus
  siRNA target sequence for Ush2a (NM_021408.1,1011-1029).
gtttgttggaagaatgcaa

SEQ ID NO: 662357 - DNA, 19 bp, Mus musculus
  siRNA target sequence for Ush2a (NM_021408.1,1022-1040).
gaatgcaagattttcgatt

SEQ ID NO: 662358 - DNA, 19 bp, Mus musculus
  siRNA target sequence for Ush2a (NM_021408.1,1027-1045).
caagattttcgattgtaca

SEQ ID NO: 662359 - DNA, 19 bp, Mus musculus
  siRNA target sequence for Ush2a (NM_021408.1,1041-1059).
gtacaatgtgtcacttaca

SEQ ID NO: 662360 - DNA, 19 bp, Mus musculus
  siRNA target sequence for Ush2a (NM_021408.1,1197-1215).
gcccgagcatcgaatgtca

SEQ ID NO: 662361 - DNA, 19 bp, Mus musculus
  siRNA target sequence for Ush2a (NM_021408.1,1258-1276).
gacgacgttgctacttcat

SEQ ID NO: 662362 - DNA, 19 bp, Mus musculus
  siRNA target sequence for Ush2a (NM_021408.1,1278-1296).
gatctctcatgtgtttaca

SEQ ID NO: 662363 - DNA, 19 bp, Mus musculus
  siRNA target sequence for Ush2a (NM_021408.1,1299-1317).
cattacgcagctctatgaa

SEQ ID NO: 662364 - DNA, 19 bp, Mus musculus
  siRNA target sequence for Ush2a (NM_021408.1,1319-1337).
gagtggctatttctataga

SEQ ID NO: 662365 - DNA, 19 bp, Mus musculus
  siRNA target sequence for Ush2a (NM_021408.1,1321-1339).
gtggctatttctatagact

SEQ ID NO: 662366 - DNA, 19 bp, Mus musculus
  siRNA target sequence for Ush2a (NM_021408.1,1442-1460).
gggaggactggcagtattt

SEQ ID NO: 662367 - DNA, 19 bp, Mus musculus
  siRNA target sequence for Ush2a (NM_021408.1,1443-1461).
ggaggactggcagtatttt

SEQ ID NO: 662368 - DNA, 19 bp, Mus musculus
  siRNA target sequence for Ush2a (NM_021408.1,1452-1470).
gcagtattttgccagaaat

SEQ ID NO: 662369 - DNA, 19 bp, Mus musculus
  siRNA target sequence for Ush2a (NM_021408.1,1453-1471).
cagtattttgccagaaatt

SEQ ID NO: 662370 - DNA, 19 bp, Mus musculus
  siRNA target sequence for Ush2a (NM_021408.1,1462-1480).
gccagaaattgcagtgttt

SEQ ID NO: 662371 - DNA, 19 bp, Mus musculus
  siRNA target sequence for Ush2a (NM_021408.1,1553-1571).
cgttttcccatggtaatgt

SEQ ID NO: 662372 - DNA, 19 bp, Mus musculus
  siRNA target sequence for Ush2a (NM_021408.1,1609-1627).
cctgggtacaacgactttt

SEQ ID NO: 662373 - DNA, 19 bp, Mus musculus
  siRNA target sequence for Ush2a (NM_021408.1,1610-1628).
ctgggtacaacgactttta

SEQ ID NO: 662374 - DNA, 19 bp, Mus musculus
  siRNA target sequence for Ush2a (NM_021408.1,1612-1630).
gggtacaacgacttttaca

SEQ ID NO: 662375 - DNA, 19 bp, Mus musculus
  siRNA target sequence for Ush2a (NM_021408.1,1613-1631).
ggtacaacgacttttacaa

SEQ ID NO: 662376 - DNA, 19 bp, Mus musculus
  siRNA target sequence for Ush2a (NM_021408.1,1632-1650).
cagctcagtgcttcaagaa

SEQ ID NO: 662377 - DNA, 19 bp, Mus musculus
  siRNA target sequence for Ush2a (NM_021408.1,1653-1671).
catgagagccactcaaata

SEQ ID NO: 662378 - DNA, 19 bp, Mus musculus
  siRNA target sequence for Ush2a (NM_021408.1,1803-1821).
gaccagacggccttacaga

SEQ ID NO: 662379 - DNA, 19 bp, Mus musculus
  siRNA target sequence for Ush2a (NM_021408.1,1871-1889).
gctcccctctttataatga

SEQ ID NO: 662380 - DNA, 19 bp, Mus musculus
  siRNA target sequence for Ush2a (NM_021408.1,1874-1892).
cccctctttataatgacaa

SEQ ID NO: 662381 - DNA, 19 bp, Mus musculus
  siRNA target sequence for Ush2a (NM_021408.1,1899-1917).
ccgcagtggtgacaatgtt

SEQ ID NO: 662382 - DNA, 19 bp, Mus musculus
  siRNA target sequence for Ush2a (NM_021408.1,1900-1918).
cgcagtggtgacaatgtta

SEQ ID NO: 662383 - DNA, 19 bp, Mus musculus
  siRNA target sequence for Ush2a (NM_021408.1,1902-1920).
cagtggtgacaatgttaat

SEQ ID NO: 662384 - DNA, 19 bp, Mus musculus
  siRNA target sequence for Ush2a (NM_021408.1,1991-2009).
catttcccctggaacacaa

SEQ ID NO: 662385 - DNA, 19 bp, Mus musculus
  siRNA target sequence for Ush2a (NM_021408.1,2035-2053).
gactgtcagcatcatacaa

SEQ ID NO: 662386 - DNA, 19 bp, Mus musculus
  siRNA target sequence for Ush2a (NM_021408.1,2037-2055).
ctgtcagcatcatacaaca

SEQ ID NO: 662387 - DNA, 19 bp, Mus musculus
  siRNA target sequence for Ush2a (NM_021408.1,2068-2086).
gagtcgtgccaggattact

SEQ ID NO: 662388 - DNA, 19 bp, Mus musculus
  siRNA target sequence for Ush2a (NM_021408.1,2070-2088).
gtcgtgccaggattacttt

SEQ ID NO: 662389 - DNA, 19 bp, Mus musculus
  siRNA target sequence for Ush2a (NM_021408.1,2072-2090).
cgtgccaggattactttta

SEQ ID NO: 662390 - DNA, 19 bp, Mus musculus
  siRNA target sequence for Ush2a (NM_021408.1,2129-2147).
gcaagctctgtgactgtaa

SEQ ID NO: 662391 - DNA, 19 bp, Mus musculus
  siRNA target sequence for Ush2a (NM_021408.1,2186-2204).
cgattggaggccaatgtga

SEQ ID NO: 662392 - DNA, 19 bp, Mus musculus
  siRNA target sequence for Ush2a (NM_021408.1,2191-2209).
ggaggccaatgtgattgta

SEQ ID NO: 662393 - DNA, 19 bp, Mus musculus
  siRNA target sequence for Ush2a (NM_021408.1,2194-2212).
ggccaatgtgattgtaaga

SEQ ID NO: 662394 - DNA, 19 bp, Mus musculus
  siRNA target sequence for Ush2a (NM_021408.1,2316-2334).
gaccgtggatggagacatt

SEQ ID NO: 662395 - DNA, 19 bp, Mus musculus
  siRNA target sequence for Ush2a (NM_021408.1,2331-2349).
cattacctgtcaccaaaat

SEQ ID NO: 662396 - DNA, 19 bp, Mus musculus
  siRNA target sequence for Ush2a (NM_021408.1,2363-2381).
cgtgcaaagcgaatgttat

SEQ ID NO: 662397 - DNA, 19 bp, Mus musculus
  siRNA target sequence for Ush2a (NM_021408.1,2399-2417).
gctgcaatttcggatttaa

SEQ ID NO: 662398 - DNA, 19 bp, Mus musculus
  siRNA target sequence for Ush2a (NM_021408.1,2400-2418).
ctgcaatttcggatttaaa

SEQ ID NO: 662399 - DNA, 19 bp, Mus musculus
  siRNA target sequence for Ush2a (NM_021408.1,2402-2420).
gcaatttcggatttaaatt

SEQ ID NO: 662400 - DNA, 19 bp, Mus musculus
  siRNA target sequence for Ush2a (NM_021408.1,2651-2669).
cagggcagtgcgtttgtaa

SEQ ID NO: 662401 - DNA, 19 bp, Mus musculus
  siRNA target sequence for Ush2a (NM_021408.1,2661-2679).
cgtttgtaagcccaatgtt

SEQ ID NO: 662402 - DNA, 19 bp, Mus musculus
  siRNA target sequence for Ush2a (NM_021408.1,2702-2720).
gtaaggcaggctacttcaa

SEQ ID NO: 662403 - DNA, 19 bp, Mus musculus
  siRNA target sequence for Ush2a (NM_021408.1,2707-2725).
gcaggctacttcaacctat

SEQ ID NO: 662404 - DNA, 19 bp, Mus musculus
  siRNA target sequence for Ush2a (NM_021408.1,2708-2726).
caggctacttcaacctata

SEQ ID NO: 662405 - DNA, 19 bp, Mus musculus
  siRNA target sequence for Ush2a (NM_021408.1,2711-2729).
gctacttcaacctatatca

SEQ ID NO: 662406 - DNA, 19 bp, Mus musculus
  siRNA target sequence for Ush2a (NM_021408.1,2715-2733).
cttcaacctatatcagaat

SEQ ID NO: 662407 - DNA, 19 bp, Mus musculus
  siRNA target sequence for Ush2a (NM_021408.1,2743-2761).
ctctgtttgacttgtaact

SEQ ID NO: 662408 - DNA, 19 bp, Mus musculus
  siRNA target sequence for Ush2a (NM_021408.1,2791-2809).
ctaaggtgtgacaagtcaa

SEQ ID NO: 662409 - DNA, 19 bp, Mus musculus
  siRNA target sequence for Ush2a (NM_021408.1,2925-2943).
ctcgttggggacattacct

SEQ ID NO: 662410 - DNA, 19 bp, Mus musculus
  siRNA target sequence for Ush2a (NM_021408.1,3095-3113).
gccacatctgtaatagtgt

SEQ ID NO: 662411 - DNA, 19 bp, Mus musculus
  siRNA target sequence for Ush2a (NM_021408.1,3163-3181).
caccagtgtcaagaaagtt

SEQ ID NO: 662412 - DNA, 19 bp, Mus musculus
  siRNA target sequence for Ush2a (NM_021408.1,3235-3253).
gcaggagcctcgaatggaa

SEQ ID NO: 662413 - DNA, 19 bp, Mus musculus
  siRNA target sequence for Ush2a (NM_021408.1,3243-3261).
ctcgaatggaacttgtgat

SEQ ID NO: 662414 - DNA, 19 bp, Mus musculus
  siRNA target sequence for Ush2a (NM_021408.1,3336-3354).
ccacttggacgtcaacaat

SEQ ID NO: 662415 - DNA, 19 bp, Mus musculus
  siRNA target sequence for Ush2a (NM_021408.1,3339-3357).
cttggacgtcaacaatcta

SEQ ID NO: 662416 - DNA, 19 bp, Mus musculus
  siRNA target sequence for Ush2a (NM_021408.1,3342-3360).
ggacgtcaacaatctatta

SEQ ID NO: 662417 - DNA, 19 bp, Mus musculus
  siRNA target sequence for Ush2a (NM_021408.1,3413-3431).
gttcttctaccatcaatgt

SEQ ID NO: 662418 - DNA, 19 bp, Mus musculus
  siRNA target sequence for Ush2a (NM_021408.1,3493-3511).
ggctctgagatctacacaa

SEQ ID NO: 662419 - DNA, 19 bp, Mus musculus
  siRNA target sequence for Ush2a (NM_021408.1,3517-3535).
gatgaacacccgtactata

SEQ ID NO: 662420 - DNA, 19 bp, Mus musculus
  siRNA target sequence for Ush2a (NM_021408.1,3527-3545).
cgtactatactcagtactt

SEQ ID NO: 662421 - DNA, 19 bp, Mus musculus
  siRNA target sequence for Ush2a (NM_021408.1,3570-3588).
cacagcatattcatattat

SEQ ID NO: 662422 - DNA, 19 bp, Mus musculus
  siRNA target sequence for Ush2a (NM_021408.1,3620-3638).
ggagcatacctgtcattta

SEQ ID NO: 662423 - DNA, 19 bp, Mus musculus
  siRNA target sequence for Ush2a (NM_021408.1,3621-3639).
gagcatacctgtcatttat

SEQ ID NO: 662424 - DNA, 19 bp, Mus musculus
  siRNA target sequence for Ush2a (NM_021408.1,3623-3641).
gcatacctgtcatttatga

SEQ ID NO: 662425 - DNA, 19 bp, Mus musculus
  siRNA target sequence for Ush2a (NM_021408.1,3629-3647).
ctgtcatttatgagacaaa

SEQ ID NO: 662426 - DNA, 19 bp, Mus musculus
  siRNA target sequence for Ush2a (NM_021408.1,3672-3690).
gaacttgactcacatcatt

SEQ ID NO: 662427 - DNA, 19 bp, Mus musculus
  siRNA target sequence for Ush2a (NM_021408.1,3694-3712).
gtgggctcggactccatta

SEQ ID NO: 662428 - DNA, 19 bp, Mus musculus
  siRNA target sequence for Ush2a (NM_021408.1,3696-3714).
gggctcggactccattaca

SEQ ID NO: 662429 - DNA, 19 bp, Mus musculus
  siRNA target sequence for Ush2a (NM_021408.1,3698-3716).
gctcggactccattacact

SEQ ID NO: 662430 - DNA, 19 bp, Mus musculus
  siRNA target sequence for Ush2a (NM_021408.1,3699-3717).
ctcggactccattacactt

SEQ ID NO: 662431 - DNA, 19 bp, Mus musculus
  siRNA target sequence for Ush2a (NM_021408.1,3850-3868).
ccattcacccagtactgtt

SEQ ID NO: 662432 - DNA, 19 bp, Mus musculus
  siRNA target sequence for Ush2a (NM_021408.1,3855-3873).
cacccagtactgtttttct

SEQ ID NO: 662433 - DNA, 19 bp, Mus musculus
  siRNA target sequence for Ush2a (NM_021408.1,3857-3875).
cccagtactgtttttctgt

SEQ ID NO: 662434 - DNA, 19 bp, Mus musculus
  siRNA target sequence for Ush2a (NM_021408.1,3877-3895).
cagggctgtactaatgaga

SEQ ID NO: 662435 - DNA, 19 bp, Mus musculus
  siRNA target sequence for Ush2a (NM_021408.1,3906-3924).
cagcttgcctattatagta

SEQ ID NO: 662436 - DNA, 19 bp, Mus musculus
  siRNA target sequence for Ush2a (NM_021408.1,3952-3970).
caggggccacctacagtat

SEQ ID NO: 662437 - DNA, 19 bp, Mus musculus
  siRNA target sequence for Ush2a (NM_021408.1,3961-3979).
cctacagtatggaaaatca

SEQ ID NO: 662438 - DNA, 19 bp, Mus musculus
  siRNA target sequence for Ush2a (NM_021408.1,4007-4025).
ctcctccagtggactcaaa

SEQ ID NO: 662439 - DNA, 19 bp, Mus musculus
  siRNA target sequence for Ush2a (NM_021408.1,4012-4030).
ccagtggactcaaatggta

SEQ ID NO: 662440 - DNA, 19 bp, Mus musculus
  siRNA target sequence for Ush2a (NM_021408.1,4015-4033).
gtggactcaaatggtataa

SEQ ID NO: 662441 - DNA, 19 bp, Mus musculus
  siRNA target sequence for Ush2a (NM_021408.1,4020-4038).
ctcaaatggtataattata

SEQ ID NO: 662442 - DNA, 19 bp, Mus musculus
  siRNA target sequence for Ush2a (NM_021408.1,4073-4091).
ccgaagaaagcctagtgtt

SEQ ID NO: 662443 - DNA, 19 bp, Mus musculus
  siRNA target sequence for Ush2a (NM_021408.1,4074-4092).
cgaagaaagcctagtgttt

SEQ ID NO: 662444 - DNA, 19 bp, Mus musculus
  siRNA target sequence for Ush2a (NM_021408.1,4133-4151).
cggtcaatccgagtaagaa

SEQ ID NO: 662445 - DNA, 19 bp, Mus musculus
  siRNA target sequence for Ush2a (NM_021408.1,4168-4186).
caagccagcacgttcatct

SEQ ID NO: 662446 - DNA, 19 bp, Mus musculus
  siRNA target sequence for Ush2a (NM_021408.1,4220-4238).
gggtcttggctgtgaatat

SEQ ID NO: 662447 - DNA, 19 bp, Mus musculus
  siRNA target sequence for Ush2a (NM_021408.1,4282-4300).
gaatcagtacccgtattca

SEQ ID NO: 662448 - DNA, 19 bp, Mus musculus
  siRNA target sequence for Ush2a (NM_021408.1,4478-4496).
cccaagaccagtcttacat

SEQ ID NO: 662449 - DNA, 19 bp, Mus musculus
  siRNA target sequence for Ush2a (NM_021408.1,4504-4522).
ggactcgagccttatagga

SEQ ID NO: 662450 - DNA, 19 bp, Mus musculus
  siRNA target sequence for Ush2a (NM_021408.1,4578-4596).
gggatcaggacaaacctta

SEQ ID NO: 662451 - DNA, 19 bp, Mus musculus
  siRNA target sequence for Vapa (NM_013933.2,340-358).
gtcactacaaatcttaaat

SEQ ID NO: 662452 - DNA, 19 bp, Mus musculus
  siRNA target sequence for Vapa (NM_013933.2,352-370).
cttaaattgcaaaatccat

SEQ ID NO: 662453 - DNA, 19 bp, Mus musculus
  siRNA target sequence for Vapa (NM_013933.2,361-379).
caaaatccatcggatagaa

SEQ ID NO: 662454 - DNA, 19 bp, Mus musculus
  siRNA target sequence for Vapa (NM_013933.2,367-385).
ccatcggatagaaaagtgt

SEQ ID NO: 662455 - DNA, 19 bp, Mus musculus
  siRNA target sequence for Vapa (NM_013933.2,454-472).
gggtcaattgtgactgttt

SEQ ID NO: 662456 - DNA, 19 bp, Mus musculus
  siRNA target sequence for Vapa (NM_013933.2,458-476).
caattgtgactgtttcagt

SEQ ID NO: 662457 - DNA, 19 bp, Mus musculus
  siRNA target sequence for Vapa (NM_013933.2,499-517).
gatccgaatgaaaagagta

SEQ ID NO: 662458 - DNA, 19 bp, Mus musculus
  siRNA target sequence for Vapa (NM_013933.2,508-526).
gaaaagagtaaacataagt

SEQ ID NO: 662459 - DNA, 19 bp, Mus musculus
  siRNA target sequence for Vapa (NM_013933.2,525-543).
gttcatggtacagacaatt

SEQ ID NO: 662460 - DNA, 19 bp, Mus musculus
  siRNA target sequence for Vapa (NM_013933.2,589-607).
gcaaaacctgatgaattaa

SEQ ID NO: 662461 - DNA, 19 bp, Mus musculus
  siRNA target sequence for Vapa (NM_013933.2,590-608).
caaaacctgatgaattaat

SEQ ID NO: 662462 - DNA, 19 bp, Mus musculus
  siRNA target sequence for Vapa (NM_013933.2,630-648).
gtttgaaatgccgaatgaa

SEQ ID NO: 662463 - DNA, 19 bp, Mus musculus
  siRNA target sequence for Vapa (NM_013933.2,742-760).
ctcaatgatacggaaacaa

SEQ ID NO: 662464 - DNA, 19 bp, Mus musculus
  siRNA target sequence for Vapa (NM_013933.2,858-876).
ggtagcacattcggataaa

SEQ ID NO: 662465 - DNA, 19 bp, Mus musculus
  siRNA target sequence for Vapa (NM_013933.2,892-910).
gccgtgtccttcagagata

SEQ ID NO: 662466 - DNA, 19 bp, Mus musculus
  siRNA target sequence for Vapa (NM_013933.2,893-911).
ccgtgtccttcagagataa

SEQ ID NO: 662467 - DNA, 19 bp, Mus musculus
  siRNA target sequence for Vapa (NM_013933.2,929-947).
cttctcttctggttgtaat

SEQ ID NO: 662468 - DNA, 19 bp, Mus musculus
  siRNA target sequence for Vapa (NM_013933.2,949-967).
gcagccattttcattggat

SEQ ID NO: 662469 - DNA, 19 bp, Mus musculus
  siRNA target sequence for Vapb (NM_019806.3,157-175).
cacaacacgagctcaagtt

SEQ ID NO: 662470 - DNA, 19 bp, Mus musculus
  siRNA target sequence for Vapb (NM_019806.3,225-243).
ccaacagaccgaaatgtgt

SEQ ID NO: 662471 - DNA, 19 bp, Mus musculus
  siRNA target sequence for Vapb (NM_019806.3,229-247).
cagaccgaaatgtgtgttt

SEQ ID NO: 662472 - DNA, 19 bp, Mus musculus
  siRNA target sequence for Vapb (NM_019806.3,231-249).
gaccgaaatgtgtgtttta

SEQ ID NO: 662473 - DNA, 19 bp, Mus musculus
  siRNA target sequence for Vapb (NM_019806.3,335-353).
gatgttacagcctttcgat

SEQ ID NO: 662474 - DNA, 19 bp, Mus musculus
  siRNA target sequence for Vapb (NM_019806.3,338-356).
gttacagcctttcgattat

SEQ ID NO: 662475 - DNA, 19 bp, Mus musculus
  siRNA target sequence for Vapb (NM_019806.3,408-426).
ccgcctgacacttctgata

SEQ ID NO: 662476 - DNA, 19 bp, Mus musculus
  siRNA target sequence for Vapb (NM_019806.3,409-427).
cgcctgacacttctgatat

SEQ ID NO: 662477 - DNA, 19 bp, Mus musculus
  siRNA target sequence for Vapb (NM_019806.3,453-471).
ccggaagaccttatggatt

SEQ ID NO: 662478 - DNA, 19 bp, Mus musculus
  siRNA target sequence for Vapb (NM_019806.3,462-480).
cttatggattcaaaactta

SEQ ID NO: 662479 - DNA, 19 bp, Mus musculus
  siRNA target sequence for Vapb (NM_019806.3,516-534).
ccacatgatgtagaaataa

SEQ ID NO: 662480 - DNA, 19 bp, Mus musculus
  siRNA target sequence for Vapb (NM_019806.3,806-824).
ggttctgttctttatcgtt

SEQ ID NO: 662481 - DNA, 19 bp, Mus musculus
  siRNA target sequence for Vil2 (NM_009510.1,266-284).
ctggctgaaacttgataaa

SEQ ID NO: 662482 - DNA, 19 bp, Mus musculus
  siRNA target sequence for Vil2 (NM_009510.1,268-286).
ggctgaaacttgataaaaa

SEQ ID NO: 662483 - DNA, 19 bp, Mus musculus
  siRNA target sequence for Vil2 (NM_009510.1,841-859).
ctttcaacgacaagaagtt

SEQ ID NO: 662484 - DNA, 19 bp, Mus musculus
  siRNA target sequence for Vil2 (NM_009510.1,1314-1332).
gcgcaggatcagataaaga

SEQ ID NO: 662485 - DNA, 19 bp, Mus musculus
  siRNA target sequence for Vil2 (NM_009510.1,1430-1448).
gcagcaccgggctaaagaa

SEQ ID NO: 662486 - DNA, 19 bp, Mus musculus
  siRNA target sequence for Vil2 (NM_009510.1,1689-1707).
ctgaccctgagcaatgagt

SEQ ID NO: 662487 - DNA, 19 bp, Mus musculus
  siRNA target sequence for Vil2 (NM_009510.1,1773-1791).
caaggcagggacaagtata

SEQ ID NO: 662488 - DNA, 19 bp, Mus musculus
  siRNA target sequence for 1600023A02Rik (NM_026323.1,249-267).
gagctctcagggacagata

SEQ ID NO: 662489 - DNA, 19 bp, Mus musculus
  siRNA target sequence for 1600023A02Rik (NM_026323.1,252-270).
ctctcagggacagatacta

SEQ ID NO: 662490 - DNA, 19 bp, Mus musculus
  siRNA target sequence for 1600023A02Rik (NM_026323.1,254-272).
ctcagggacagatactaaa

SEQ ID NO: 662491 - DNA, 19 bp, Mus musculus
  siRNA target sequence for 1600023A02Rik (NM_026323.1,258-276).
gggacagatactaaactct

SEQ ID NO: 662492 - DNA, 19 bp, Mus musculus
  siRNA target sequence for 1600023A02Rik (NM_026323.1,376-394).
gcttaggtgtccgagaaaa

SEQ ID NO: 662493 - DNA, 19 bp, Mus musculus
  siRNA target sequence for 1700007F22Rik (NM_183284.1,140-158).
cgactcttccgattctcaa

SEQ ID NO: 662494 - DNA, 19 bp, Mus musculus
  siRNA target sequence for 1700007F22Rik (NM_183284.1,141-159).
gactcttccgattctcaaa

SEQ ID NO: 662495 - DNA, 19 bp, Mus musculus
  siRNA target sequence for 1700007F22Rik (NM_183284.1,148-166).
ccgattctcaaatcatgaa

SEQ ID NO: 662496 - DNA, 19 bp, Mus musculus
  siRNA target sequence for 1700007F22Rik (NM_183284.1,189-207).
gactgtggtcattttgact

SEQ ID NO: 662497 - DNA, 19 bp, Mus musculus
  siRNA target sequence for 1700007F22Rik (NM_183284.1,237-255).
gtgtgcggaacggatatga

SEQ ID NO: 662498 - DNA, 19 bp, Mus musculus
  siRNA target sequence for 1700007F22Rik (NM_183284.1,243-261).
ggaacggatatgaacactt

SEQ ID NO: 662499 - DNA, 19 bp, Mus musculus
  siRNA target sequence for 1700007F22Rik (NM_183284.1,244-262).
gaacggatatgaacactta

SEQ ID NO: 662500 - DNA, 19 bp, Mus musculus
  siRNA target sequence for 1700007F22Rik (NM_183284.1,296-314).
ggaggacggtagccatatt

SEQ ID NO: 662501 - DNA, 19 bp, Mus musculus
  siRNA target sequence for 1700007F22Rik (NM_183284.1,297-315).
gaggacggtagccatatta

SEQ ID NO: 662502 - DNA, 19 bp, Mus musculus
  siRNA target sequence for 1700007F22Rik (NM_183284.1,299-317).
ggacggtagccatattaat

SEQ ID NO: 662503 - DNA, 19 bp, Mus musculus
  siRNA target sequence for 1700007F22Rik (NM_183284.1,303-321).
ggtagccatattaatatca

SEQ ID NO: 662504 - DNA, 19 bp, Mus musculus
  siRNA target sequence for 2310046M08Rik (NM_025867.1,79-97).
ccacagcgagtactgaatt

SEQ ID NO: 662505 - DNA, 19 bp, Mus musculus
  siRNA target sequence for 2310046M08Rik (NM_025867.1,80-98).
cacagcgagtactgaattt

SEQ ID NO: 662506 - DNA, 19 bp, Mus musculus
  siRNA target sequence for 2310046M08Rik (NM_025867.1,91-109).
ctgaattttgccttgatgt

SEQ ID NO: 662507 - DNA, 19 bp, Mus musculus
  siRNA target sequence for 2310046M08Rik (NM_025867.1,127-145).
gtaacaacgtgggagaaaa

SEQ ID NO: 662508 - DNA, 19 bp, Mus musculus
  siRNA target sequence for 2310046M08Rik (NM_025867.1,157-175).
ctccgctgactacgtttta

SEQ ID NO: 662509 - DNA, 19 bp, Mus musculus
  siRNA target sequence for 2310046M08Rik (NM_025867.1,161-179).
gctgactacgttttatgct

SEQ ID NO: 662510 - DNA, 19 bp, Mus musculus
  siRNA target sequence for 2310046M08Rik (NM_025867.1,169-187).
cgttttatgctctaagcat

SEQ ID NO: 662511 - DNA, 19 bp, Mus musculus
  siRNA target sequence for 2310046M08Rik (NM_025867.1,197-215).
gggtaccaggggaaagagt

SEQ ID NO: 662512 - DNA, 19 bp, Mus musculus
  siRNA target sequence for 2310046M08Rik (NM_025867.1,237-255).
ctccactatgacagctttt

SEQ ID NO: 662513 - DNA, 19 bp, Mus musculus
  siRNA target sequence for 2310046M08Rik (NM_025867.1,248-266).
cagcttttcaggagtctta

SEQ ID NO: 662514 - DNA, 19 bp, Mus musculus
  siRNA target sequence for 2310046M08Rik (NM_025867.1,251-269).
cttttcaggagtcttaaaa

SEQ ID NO: 662515 - DNA, 19 bp, Mus musculus
  siRNA target sequence for 2310046M08Rik (NM_025867.1,270-288).
gcaaagacgaaaaattctt

SEQ ID NO: 662516 - DNA, 19 bp, Mus musculus
  siRNA target sequence for 2310046M08Rik (NM_025867.1,311-329).
gatgcatcctgatttcaga

SEQ ID NO: 662517 - DNA, 19 bp, Mus musculus
  siRNA target sequence for 2310046M08Rik (NM_025867.1,335-353).
gatttcccacattaaccaa

SEQ ID NO: 662518 - DNA, 19 bp, Mus musculus
  siRNA target sequence for 2310046M08Rik (NM_025867.1,362-380).
cctcagcgttgctaacaga

SEQ ID NO: 662519 - DNA, 19 bp, Mus musculus
  siRNA target sequence for 2310046M08Rik (NM_025867.1,363-381).
ctcagcgttgctaacagaa

SEQ ID NO: 662520 - DNA, 19 bp, Mus musculus
  siRNA target sequence for 2310046M08Rik (NM_025867.1,367-385).
gcgttgctaacagaatcta

SEQ ID NO: 662521 - DNA, 19 bp, Mus musculus
  siRNA target sequence for 2310046M08Rik (NM_025867.1,383-401).
ctacgggacgaggtcaata

SEQ ID NO: 662522 - DNA, 19 bp, Mus musculus
  siRNA target sequence for 2310046M08Rik (NM_025867.1,386-404).
cgggacgaggtcaatatca

SEQ ID NO: 662523 - DNA, 19 bp, Mus musculus
  siRNA target sequence for 2310046M08Rik (NM_025867.1,387-405).
gggacgaggtcaatatcat

SEQ ID NO: 662524 - DNA, 19 bp, Mus musculus
  siRNA target sequence for 2310046M08Rik (NM_025867.1,388-406).
ggacgaggtcaatatcatt

SEQ ID NO: 662525 - DNA, 19 bp, Mus musculus
  siRNA target sequence for 2310046M08Rik (NM_025867.1,403-421).
cattccacaagcaatatgt

SEQ ID NO: 662526 - DNA, 19 bp, Mus musculus
  siRNA target sequence for 2310046M08Rik (NM_025867.1,408-426).
cacaagcaatatgtaagat

SEQ ID NO: 662527 - DNA, 19 bp, Mus musculus
  siRNA target sequence for 2310046M08Rik (NM_025867.1,424-442).
gatgttgtgagaaactgta

SEQ ID NO: 662528 - DNA, 19 bp, Mus musculus
  siRNA target sequence for 2310046M08Rik (NM_025867.1,452-470).
gctgcaaactgttgatttt

SEQ ID NO: 662529 - DNA, 19 bp, Mus musculus
  siRNA target sequence for 2310046M08Rik (NM_025867.1,587-605).
cctagtgagtgccatatat

SEQ ID NO: 662530 - DNA, 19 bp, Mus musculus
  siRNA target sequence for 2310046M08Rik (NM_025867.1,648-666).
gtgaaagccccctttcaca

SEQ ID NO: 662531 - DNA, 19 bp, Mus musculus
  siRNA target sequence for 2310046M08Rik (NM_025867.1,663-681).
cacatgggtgtgggtaaaa

SEQ ID NO: 662532 - DNA, 19 bp, Mus musculus
  siRNA target sequence for 2310046M08Rik (NM_025867.1,701-719).
gtatcagactggaacattt

SEQ ID NO: 662533 - DNA, 19 bp, Mus musculus
  siRNA target sequence for 2310046M08Rik (NM_025867.1,818-836).
cagcgtgagccagatagaa

SEQ ID NO: 662534 - DNA, 19 bp, Mus musculus
  siRNA target sequence for 2310046M08Rik (NM_025867.1,868-886).
ggactaacccttctaacat

SEQ ID NO: 662535 - DNA, 19 bp, Mus musculus
  siRNA target sequence for 2310046M08Rik (NM_025867.1,914-932).
ccctaaattcagtctttca

SEQ ID NO: 662536 - DNA, 19 bp, Mus musculus
  siRNA target sequence for 2310046M08Rik (NM_025867.1,933-951).
gtaaaatacgacctaaaca

SEQ ID NO: 662537 - DNA, 19 bp, Mus musculus
  siRNA target sequence for 2310046M08Rik (NM_025867.1,942-960).
gacctaaacaccctattga

SEQ ID NO: 662538 - DNA, 19 bp, Mus musculus
  siRNA target sequence for 2310046M08Rik (NM_025867.1,945-963).
ctaaacaccctattgaaat

SEQ ID NO: 662539 - DNA, 19 bp, Mus musculus
  siRNA target sequence for 2310046M08Rik (NM_025867.1,1020-1038).
ccggacaagggcctatatt

SEQ ID NO: 662540 - DNA, 19 bp, Mus musculus
  siRNA target sequence for 2310046M08Rik (NM_025867.1,1021-1039).
cggacaagggcctatattt

SEQ ID NO: 662541 - DNA, 19 bp, Mus musculus
  siRNA target sequence for 2310046M08Rik (NM_025867.1,1022-1040).
ggacaagggcctatattta

SEQ ID NO: 662542 - DNA, 19 bp, Mus musculus
  siRNA target sequence for 2310046M08Rik (NM_025867.1,1101-1119).
gccactggggagagtattt

SEQ ID NO: 662543 - DNA, 19 bp, Mus musculus
  siRNA target sequence for 2310046M08Rik (NM_025867.1,1103-1121).
cactggggagagtatttct

SEQ ID NO: 662544 - DNA, 19 bp, Mus musculus
  siRNA target sequence for 2310046M08Rik (NM_025867.1,1183-1201).
gggatgagtctggcaatat

SEQ ID NO: 662545 - DNA, 19 bp, Mus musculus
  siRNA target sequence for 5430417G24 (NM_172852.1,88-106).
ccacacagttcctgtttga

SEQ ID NO: 662546 - DNA, 19 bp, Mus musculus
  siRNA target sequence for 5430417G24 (NM_172852.1,135-153).
gatggcaacgtcttctttt

SEQ ID NO: 662547 - DNA, 19 bp, Mus musculus
  siRNA target sequence for 5430417G24 (NM_172852.1,172-190).
cagccattggcatgatcat

SEQ ID NO: 662548 - DNA, 19 bp, Mus musculus
  siRNA target sequence for 5430417G24 (NM_172852.1,230-248).
ggtactttacactgaacaa

SEQ ID NO: 662549 - DNA, 19 bp, Mus musculus
  siRNA target sequence for 5430417G24 (NM_172852.1,253-271).
cagaaagctcgagaattaa

SEQ ID NO: 662550 - DNA, 19 bp, Mus musculus
  siRNA target sequence for 5430417G24 (NM_172852.1,255-273).
gaaagctcgagaattaagt

SEQ ID NO: 662551 - DNA, 19 bp, Mus musculus
  siRNA target sequence for 5430417G24 (NM_172852.1,356-374).
cgattatgacctgatcata

SEQ ID NO: 662552 - DNA, 19 bp, Mus musculus
  siRNA target sequence for 5430417G24 (NM_172852.1,400-418).
catacctcttccttcaaaa

SEQ ID NO: 662553 - DNA, 19 bp, Mus musculus
  siRNA target sequence for 5430417G24 (NM_172852.1,407-425).
cttccttcaaaaatacata

SEQ ID NO: 662554 - DNA, 19 bp, Mus musculus
  siRNA target sequence for 5430417G24 (NM_172852.1,422-440).
catagattatgttgaaaaa

SEQ ID NO: 662555 - DNA, 19 bp, Mus musculus
  siRNA target sequence for 5430417G24 (NM_172852.1,486-504).
gacgaaagtcgaaagaaga

SEQ ID NO: 662556 - DNA, 19 bp, Mus musculus
  siRNA target sequence for 5430417G24 (NM_172852.1,488-506).
cgaaagtcgaaagaagatt

SEQ ID NO: 662557 - DNA, 19 bp, Mus musculus
  siRNA target sequence for 5430417G24 (NM_172852.1,577-595).
ccaccaagctggtgctaat

SEQ ID NO: 662558 - DNA, 19 bp, Mus musculus
  siRNA target sequence for 5430417G24 (NM_172852.1,581-599).
caagctggtgctaataaat

SEQ ID NO: 662559 - DNA, 19 bp, Mus musculus
  siRNA target sequence for 5430417G24 (NM_172852.1,587-605).
ggtgctaataaatacagtt

SEQ ID NO: 662560 - DNA, 19 bp, Mus musculus
  siRNA target sequence for 5430417G24 (NM_172852.1,588-606).
gtgctaataaatacagttt

SEQ ID NO: 662561 - DNA, 19 bp, Mus musculus
  siRNA target sequence for 5430417G24 (NM_172852.1,759-777).
gtggggattccatataaaa

SEQ ID NO: 662562 - DNA, 19 bp, Mus musculus
  siRNA target sequence for 5430417G24 (NM_172852.1,762-780).
gggattccatataaaaaca

SEQ ID NO: 662563 - DNA, 19 bp, Mus musculus
  siRNA target sequence for 5430417G24 (NM_172852.1,1145-1163).
gcttgtgcactgtaaccat

SEQ ID NO: 662564 - DNA, 19 bp, Mus musculus
  siRNA target sequence for 9230105I15Rik (NM_030058.1,58-76).
ccactaagctgggatttct

SEQ ID NO: 662565 - DNA, 19 bp, Mus musculus
  siRNA target sequence for 9230105I15Rik (NM_030058.1,124-142).
gtgttgagaggctagctaa

SEQ ID NO: 662566 - DNA, 19 bp, Mus musculus
  siRNA target sequence for 9230105I15Rik (NM_030058.1,194-212).
cagctgctatgaagtacat

SEQ ID NO: 662567 - DNA, 19 bp, Mus musculus
  siRNA target sequence for 9230105I15Rik (NM_030058.1,237-255).
gccaaacagtgtcagattt

SEQ ID NO: 662568 - DNA, 19 bp, Mus musculus
  siRNA target sequence for 9230105I15Rik (NM_030058.1,238-256).
ccaaacagtgtcagatttt

SEQ ID NO: 662569 - DNA, 19 bp, Mus musculus
  siRNA target sequence for 9230105I15Rik (NM_030058.1,268-286).
gctgcaatggcaaccttaa

SEQ ID NO: 662570 - DNA, 19 bp, Mus musculus
  siRNA target sequence for 9230105I15Rik (NM_030058.1,276-294).
ggcaaccttaataacttca

SEQ ID NO: 662571 - DNA, 19 bp, Mus musculus
  siRNA target sequence for 9230105I15Rik (NM_030058.1,277-295).
gcaaccttaataacttcaa

SEQ ID NO: 662572 - DNA, 19 bp, Mus musculus
  siRNA target sequence for 9230105I15Rik (NM_030058.1,348-366).
ctgccgagcggcgataaga

SEQ ID NO: 662573 - DNA, 19 bp, Mus musculus
  siRNA target sequence for 9230105I15Rik (NM_030058.1,405-423).
gctacggattggagattga

SEQ ID NO: 662574 - DNA, 19 bp, Mus musculus
  siRNA target sequence for 9230105I15Rik (NM_030058.1,415-433).
ggagattgaccactttaca

SEQ ID NO: 662575 - DNA, 19 bp, Mus musculus
  siRNA target sequence for 9230117E20Rik (NM_030061.1,38-56).
gttcaacgcccctaacatt

SEQ ID NO: 662576 - DNA, 19 bp, Mus musculus
  siRNA target sequence for 9230117E20Rik (NM_030061.1,176-194).
ggctttttgcagcaactat

SEQ ID NO: 662577 - DNA, 19 bp, Mus musculus
  siRNA target sequence for 9230117E20Rik (NM_030061.1,206-224).
ggccccagatggaaaatca

SEQ ID NO: 662578 - DNA, 19 bp, Mus musculus
  siRNA target sequence for 9230117E20Rik (NM_030061.1,258-276).
gatggaaaaacctaccaaa

SEQ ID NO: 662579 - DNA, 19 bp, Mus musculus
  siRNA target sequence for 9230117E20Rik (NM_030061.1,319-337).
ggaaacttggtttcaaaca

SEQ ID NO: 662580 - DNA, 19 bp, Mus musculus
  siRNA target sequence for A030003A19 (NM_173024.1,158-176).
cagatggcacactaggaat

SEQ ID NO: 662581 - DNA, 19 bp, Mus musculus
  siRNA target sequence for A030003A19 (NM_173024.1,695-713).
catctatggtgatagtgaa

SEQ ID NO: 662582 - DNA, 19 bp, Mus musculus
  siRNA target sequence for A030003A19 (NM_173024.1,709-727).
gtgaatgatctctttttta

SEQ ID NO: 662583 - DNA, 19 bp, Mus musculus
  siRNA target sequence for A030003A19 (NM_173024.1,738-756).
gatggtgccttttaactct

SEQ ID NO: 662584 - DNA, 19 bp, Mus musculus
  siRNA target sequence for A030003A19 (NM_173024.1,1130-1148).
gagtgaagaacataacagt

SEQ ID NO: 662585 - DNA, 19 bp, Mus musculus
  siRNA target sequence for A030003A19 (NM_173024.1,1198-1216).
gaaggagatgcaatcacaa

SEQ ID NO: 662586 - DNA, 19 bp, Mus musculus
  siRNA target sequence for A030003A19 (NM_173024.1,1202-1220).
gagatgcaatcacaatagt

SEQ ID NO: 662587 - DNA, 19 bp, Mus musculus
  siRNA target sequence for A030003A19 (NM_173024.1,1219-1237).
gtcggatacaacttcatgt

SEQ ID NO: 662588 - DNA, 19 bp, Mus musculus
  siRNA target sequence for A030003A19 (NM_173024.1,1233-1251).
catgtctgcaaaacttaaa

SEQ ID NO: 662589 - DNA, 19 bp, Mus musculus
  siRNA target sequence for A030003A19 (NM_173024.1,1246-1264).
cttaaacctgtgtttgtta

SEQ ID NO: 662590 - DNA, 19 bp, Mus musculus
  siRNA target sequence for A030003A19 (NM_173024.1,1306-1324).
gatttgtggatccatgtaa

SEQ ID NO: 662591 - DNA, 19 bp, Mus musculus
  siRNA target sequence for A230091H23 (NM_177829.2,307-325).
gctgaaactgccttcctat

SEQ ID NO: 662592 - DNA, 19 bp, Mus musculus
  siRNA target sequence for A230091H23 (NM_177829.2,321-339).
cctatcagcacccaaactt

SEQ ID NO: 662593 - DNA, 19 bp, Mus musculus
  siRNA target sequence for A230091H23 (NM_177829.2,322-340).
ctatcagcacccaaactta

SEQ ID NO: 662594 - DNA, 19 bp, Mus musculus
  siRNA target sequence for A230091H23 (NM_177829.2,329-347).
cacccaaacttaaaataga

SEQ ID NO: 662595 - DNA, 19 bp, Mus musculus
  siRNA target sequence for A230091H23 (NM_177829.2,353-371).
gaccatatctggattctaa

SEQ ID NO: 662596 - DNA, 19 bp, Mus musculus
  siRNA target sequence for A230091H23 (NM_177829.2,375-393).
caagtgtaccagagagtat

SEQ ID NO: 662597 - DNA, 19 bp, Mus musculus
  siRNA target sequence for A230091H23 (NM_177829.2,378-396).
gtgtaccagagagtatcat

SEQ ID NO: 662598 - DNA, 19 bp, Mus musculus
  siRNA target sequence for A230091H23 (NM_177829.2,407-425).
caactagcggaaaaactta

SEQ ID NO: 662599 - DNA, 19 bp, Mus musculus
  siRNA target sequence for A230091H23 (NM_177829.2,450-468).
ggcactgagacttgataca

SEQ ID NO: 662600 - DNA, 19 bp, Mus musculus
  siRNA target sequence for A230091H23 (NM_177829.2,451-469).
gcactgagacttgatacaa

SEQ ID NO: 662601 - DNA, 19 bp, Mus musculus
  siRNA target sequence for A230091H23 (NM_177829.2,454-472).
ctgagacttgatacaatgt

SEQ ID NO: 662602 - DNA, 19 bp, Mus musculus
  siRNA target sequence for A230091H23 (NM_177829.2,456-474).
gagacttgatacaatgtct

SEQ ID NO: 662603 - DNA, 19 bp, Mus musculus
  siRNA target sequence for A230091H23 (NM_177829.2,477-495).
ctctctattatggatcaaa

SEQ ID NO: 662604 - DNA, 19 bp, Mus musculus
  siRNA target sequence for A230091H23 (NM_177829.2,479-497).
ctctattatggatcaaaat

SEQ ID NO: 662605 - DNA, 19 bp, Mus musculus
  siRNA target sequence for A230091H23 (NM_177829.2,512-530).
ccttggtggtcccctttta

SEQ ID NO: 662606 - DNA, 19 bp, Mus musculus
  siRNA target sequence for A230091H23 (NM_177829.2,516-534).
ggtggtccccttttactat

SEQ ID NO: 662607 - DNA, 19 bp, Mus musculus
  siRNA target sequence for A230091H23 (NM_177829.2,525-543).
cttttactatggaactact

SEQ ID NO: 662608 - DNA, 19 bp, Mus musculus
  siRNA target sequence for A230091H23 (NM_177829.2,539-557).
ctacttttgcattttccaa

SEQ ID NO: 662609 - DNA, 19 bp, Mus musculus
  siRNA target sequence for A230091H23 (NM_177829.2,574-592).
ccagattgcgacaagtaca

SEQ ID NO: 662610 - DNA, 19 bp, Mus musculus
  siRNA target sequence for A230091H23 (NM_177829.2,577-595).
gattgcgacaagtacagaa

SEQ ID NO: 662611 - DNA, 19 bp, Mus musculus
  siRNA target sequence for A230091H23 (NM_177829.2,581-599).
gcgacaagtacagaacatt

SEQ ID NO: 662612 - DNA, 19 bp, Mus musculus
  siRNA target sequence for A230091H23 (NM_177829.2,631-649).
gtctgtgggactaatggat

SEQ ID NO: 662613 - DNA, 19 bp, Mus musculus
  siRNA target sequence for A230091H23 (NM_177829.2,637-655).
gggactaatggattcactt

SEQ ID NO: 662614 - DNA, 19 bp, Mus musculus
  siRNA target sequence for A230091H23 (NM_177829.2,638-656).
ggactaatggattcactta

SEQ ID NO: 662615 - DNA, 19 bp, Mus musculus
  siRNA target sequence for A230091H23 (NM_177829.2,683-701).
caaagatagctgctaaaga

SEQ ID NO: 662616 - DNA, 19 bp, Mus musculus
  siRNA target sequence for A230091H23 (NM_177829.2,687-705).
gatagctgctaaagaaaaa

SEQ ID NO: 662617 - DNA, 19 bp, Mus musculus
  siRNA target sequence for Agt (NM_007428.2,105-123).
gctggggaccgcgtataca

SEQ ID NO: 662618 - DNA, 19 bp, Mus musculus
  siRNA target sequence for Agt (NM_007428.2,106-124).
ctggggaccgcgtatacat

SEQ ID NO: 662619 - DNA, 19 bp, Mus musculus
  siRNA target sequence for Agt (NM_007428.2,518-536).
ctgcacctcccgactagat

SEQ ID NO: 662620 - DNA, 19 bp, Mus musculus
  siRNA target sequence for Agt (NM_007428.2,661-679).
gtctaaagcactcatttgt

SEQ ID NO: 662621 - DNA, 19 bp, Mus musculus
  siRNA target sequence for Agt (NM_007428.2,744-762).
gttcttgccactgagaaaa

SEQ ID NO: 662622 - DNA, 19 bp, Mus musculus
  siRNA target sequence for Agt (NM_007428.2,758-776).
gaaaatcaacaggttcata

SEQ ID NO: 662623 - DNA, 19 bp, Mus musculus
  siRNA target sequence for Agt (NM_007428.2,787-805).
cagggtggaagatgaactt

SEQ ID NO: 662624 - DNA, 19 bp, Mus musculus
  siRNA target sequence for Agt (NM_007428.2,826-844).
cagacagcaccctactttt

SEQ ID NO: 662625 - DNA, 19 bp, Mus musculus
  siRNA target sequence for Agt (NM_007428.2,828-846).
gacagcaccctacttttca

SEQ ID NO: 662626 - DNA, 19 bp, Mus musculus
  siRNA target sequence for Agt (NM_007428.2,1227-1245).
ggtgcggaggcaaatctga

SEQ ID NO: 662627 - DNA, 19 bp, Mus musculus
  siRNA target sequence for Agt (NM_007428.2,1228-1246).
gtgcggaggcaaatctgaa

SEQ ID NO: 662628 - DNA, 19 bp, Mus musculus
  siRNA target sequence for Agt (NM_007428.2,1231-1249).
cggaggcaaatctgaacaa

SEQ ID NO: 662629 - DNA, 19 bp, Mus musculus
  siRNA target sequence for Agt (NM_007428.2,1270-1288).
gagtgggagaggttctcaa

SEQ ID NO: 662630 - DNA, 19 bp, Mus musculus
  siRNA target sequence for Agt (NM_007428.2,1272-1290).
gtgggagaggttctcaata

SEQ ID NO: 662631 - DNA, 19 bp, Mus musculus
  siRNA target sequence for Agt (NM_007428.2,1420-1438).
caggcacgctgcactttct

SEQ ID NO: 662632 - DNA, 19 bp, Mus musculus
  siRNA target sequence for B230375D17Rik (NM_175434.2,444-462).
ctcgccaggctgactttca

SEQ ID NO: 662633 - DNA, 19 bp, Mus musculus
  siRNA target sequence for B230375D17Rik (NM_175434.2,589-607).
ggaatgctgtcggttcttt

SEQ ID NO: 662634 - DNA, 19 bp, Mus musculus
  siRNA target sequence for B230375D17Rik (NM_175434.2,613-631).
caatggcttgactctgaaa

SEQ ID NO: 662635 - DNA, 19 bp, Mus musculus
  siRNA target sequence for B230375D17Rik (NM_175434.2,617-635).
ggcttgactctgaaagtgt

SEQ ID NO: 662636 - DNA, 19 bp, Mus musculus
  siRNA target sequence for B230375D17Rik (NM_175434.2,736-754).
gttctgctgcaacaaatca

SEQ ID NO: 662637 - DNA, 19 bp, Mus musculus
  siRNA target sequence for B230375D17Rik (NM_175434.2,924-942).
ccctttacaaggttctgtt

SEQ ID NO: 662638 - DNA, 19 bp, Mus musculus
  siRNA target sequence for B230375D17Rik (NM_175434.2,972-990).
gagaagcggccttattcct

SEQ ID NO: 662639 - DNA, 19 bp, Mus musculus
  siRNA target sequence for B230375D17Rik (NM_175434.2,993-1011).
ccatcttgggtgtgttcaa

SEQ ID NO: 662640 - DNA, 19 bp, Mus musculus
  siRNA target sequence for B230375D17Rik (NM_175434.2,1118-1136).
ctcttattgacattcaata

SEQ ID NO: 662641 - DNA, 19 bp, Mus musculus
  siRNA target sequence for B230375D17Rik (NM_175434.2,1126-1144).
gacattcaatattgtatta

SEQ ID NO: 662642 - DNA, 19 bp, Mus musculus
  siRNA target sequence for B230375D17Rik (NM_175434.2,1233-1251).
ccagtcagatagtcttcaa

SEQ ID NO: 662643 - DNA, 19 bp, Mus musculus
  siRNA target sequence for B230375D17Rik (NM_175434.2,1259-1277).
cgggtcatcgccatcatca

SEQ ID NO: 662644 - DNA, 19 bp, Mus musculus
  siRNA target sequence for B230375D17Rik (NM_175434.2,1343-1361).
ctcacccgcctcaaagtga

SEQ ID NO: 662645 - DNA, 19 bp, Mus musculus
  siRNA target sequence for C730040N12 (NM_177920.2,33-51).
catgtcactggtctttagt

SEQ ID NO: 662646 - DNA, 19 bp, Mus musculus
  siRNA target sequence for C730040N12 (NM_177920.2,59-77).
gagactactgctccttatt

SEQ ID NO: 662647 - DNA, 19 bp, Mus musculus
  siRNA target sequence for C730040N12 (NM_177920.2,168-186).
ggaaaattgtaggcttaat

SEQ ID NO: 662648 - DNA, 19 bp, Mus musculus
  siRNA target sequence for C730040N12 (NM_177920.2,211-229).
catgattctggtgaactat

SEQ ID NO: 662649 - DNA, 19 bp, Mus musculus
  siRNA target sequence for C730040N12 (NM_177920.2,214-232).
gattctggtgaactatatt

SEQ ID NO: 662650 - DNA, 19 bp, Mus musculus
  siRNA target sequence for C730040N12 (NM_177920.2,242-260).
gcccagtgggcaaatcctt

SEQ ID NO: 662651 - DNA, 19 bp, Mus musculus
  siRNA target sequence for C730040N12 (NM_177920.2,257-275).
cctttccgtgtatctaaaa

SEQ ID NO: 662652 - DNA, 19 bp, Mus musculus
  siRNA target sequence for C730040N12 (NM_177920.2,340-358).
gctagaacaatactatcat

SEQ ID NO: 662653 - DNA, 19 bp, Mus musculus
  siRNA target sequence for C730040N12 (NM_177920.2,364-382).
ggatatggagctgaattgt

SEQ ID NO: 662654 - DNA, 19 bp, Mus musculus
  siRNA target sequence for C730040N12 (NM_177920.2,381-399).
gtacagtacttcaaatgga

SEQ ID NO: 662655 - DNA, 19 bp, Mus musculus
  siRNA target sequence for C730040N12 (NM_177920.2,386-404).
gtacttcaaatggactata

SEQ ID NO: 662656 - DNA, 19 bp, Mus musculus
  siRNA target sequence for C730040N12 (NM_177920.2,546-564).
ctatttctgccacatatga

SEQ ID NO: 662657 - DNA, 19 bp, Mus musculus
  siRNA target sequence for C730040N12 (NM_177920.2,636-654).
cagaagacagtggtctaaa

SEQ ID NO: 662658 - DNA, 19 bp, Mus musculus
  siRNA target sequence for C730040N12 (NM_177920.2,641-659).
gacagtggtctaaaacttt

SEQ ID NO: 662659 - DNA, 19 bp, Mus musculus
  siRNA target sequence for C730040N12 (NM_177920.2,766-784).
ccctgttatccgattggat

SEQ ID NO: 662660 - DNA, 19 bp, Mus musculus
  siRNA target sequence for C730040N12 (NM_177920.2,767-785).
cctgttatccgattggata

SEQ ID NO: 662661 - DNA, 19 bp, Mus musculus
  siRNA target sequence for C730040N12 (NM_177920.2,777-795).
gattggatagagcattctt

SEQ ID NO: 662662 - DNA, 19 bp, Mus musculus
  siRNA target sequence for C730040N12 (NM_177920.2,848-866).
gttaacccaacaaaacagt

SEQ ID NO: 662663 - DNA, 19 bp, Mus musculus
  siRNA target sequence for Col7a1 (NM_007738.1,90-108).
gacctgcacacgcctttat

SEQ ID NO: 662664 - DNA, 19 bp, Mus musculus
  siRNA target sequence for Col7a1 (NM_007738.1,110-128).
ctgctgacatcgtgttctt

SEQ ID NO: 662665 - DNA, 19 bp, Mus musculus
  siRNA target sequence for Col7a1 (NM_007738.1,113-131).
ctgacatcgtgttcttact

SEQ ID NO: 662666 - DNA, 19 bp, Mus musculus
  siRNA target sequence for Col7a1 (NM_007738.1,147-165).
cattggccgcagcaacttt

SEQ ID NO: 662667 - DNA, 19 bp, Mus musculus
  siRNA target sequence for Col7a1 (NM_007738.1,259-277).
gatgatccacagacagaat

SEQ ID NO: 662668 - DNA, 19 bp, Mus musculus
  siRNA target sequence for Col7a1 (NM_007738.1,324-342).
ccgtgagctcagctataaa

SEQ ID NO: 662669 - DNA, 19 bp, Mus musculus
  siRNA target sequence for Col7a1 (NM_007738.1,571-589).
ccaaccagcgatttcttct

SEQ ID NO: 662670 - DNA, 19 bp, Mus musculus
  siRNA target sequence for Col7a1 (NM_007738.1,572-590).
caaccagcgatttcttctt

SEQ ID NO: 662671 - DNA, 19 bp, Mus musculus
  siRNA target sequence for Col7a1 (NM_007738.1,782-800).
ctggctacaaggttcagta

SEQ ID NO: 662672 - DNA, 19 bp, Mus musculus
  siRNA target sequence for Col7a1 (NM_007738.1,1047-1065).
gagggtaccaggtgctaat

SEQ ID NO: 662673 - DNA, 19 bp, Mus musculus
  siRNA target sequence for Col7a1 (NM_007738.1,1182-1200).
gaccgtgagcgccctattt

SEQ ID NO: 662674 - DNA, 19 bp, Mus musculus
  siRNA target sequence for Col7a1 (NM_007738.1,1236-1254).
ccgcaccgcatcttctgtt

SEQ ID NO: 662675 - DNA, 19 bp, Mus musculus
  siRNA target sequence for Col7a1 (NM_007738.1,1406-1424).
gccatcagctggatggttt

SEQ ID NO: 662676 - DNA, 19 bp, Mus musculus
  siRNA target sequence for Col7a1 (NM_007738.1,1445-1463).
gtctcacgctgtatactct

SEQ ID NO: 662677 - DNA, 19 bp, Mus musculus
  siRNA target sequence for Col7a1 (NM_007738.1,1525-1543).
gtgagcccggtgatgaatt

SEQ ID NO: 662678 - DNA, 19 bp, Mus musculus
  siRNA target sequence for Col7a1 (NM_007738.1,1527-1545).
gagcccggtgatgaattta

SEQ ID NO: 662679 - DNA, 19 bp, Mus musculus
  siRNA target sequence for Col7a1 (NM_007738.1,1529-1547).
gcccggtgatgaatttaca

SEQ ID NO: 662680 - DNA, 19 bp, Mus musculus
  siRNA target sequence for Col7a1 (NM_007738.1,1530-1548).
cccggtgatgaatttacaa

SEQ ID NO: 662681 - DNA, 19 bp, Mus musculus
  siRNA target sequence for Col7a1 (NM_007738.1,1539-1557).
gaatttacaagccatagaa

SEQ ID NO: 662682 - DNA, 19 bp, Mus musculus
  siRNA target sequence for Col7a1 (NM_007738.1,1639-1657).
ggggtcgagcggactctat

SEQ ID NO: 662683 - DNA, 19 bp, Mus musculus
  siRNA target sequence for Col7a1 (NM_007738.1,1640-1658).
gggtcgagcggactctatt

SEQ ID NO: 662684 - DNA, 19 bp, Mus musculus
  siRNA target sequence for Col7a1 (NM_007738.1,1644-1662).
cgagcggactctattgctt

SEQ ID NO: 662685 - DNA, 19 bp, Mus musculus
  siRNA target sequence for Col7a1 (NM_007738.1,1670-1688).
gccagacaacctttgactt

SEQ ID NO: 662686 - DNA, 19 bp, Mus musculus
  siRNA target sequence for Col7a1 (NM_007738.1,1676-1694).
caacctttgacttagatga

SEQ ID NO: 662687 - DNA, 19 bp, Mus musculus
  siRNA target sequence for Col7a1 (NM_007738.1,1753-1771).
ggtgatgccagcatcctaa

SEQ ID NO: 662688 - DNA, 19 bp, Mus musculus
  siRNA target sequence for Col7a1 (NM_007738.1,1815-1833).
gcgggttgtcgcatcagat

SEQ ID NO: 662689 - DNA, 19 bp, Mus musculus
  siRNA target sequence for Col7a1 (NM_007738.1,1824-1842).
cgcatcagatgcaacaaga

SEQ ID NO: 662690 - DNA, 19 bp, Mus musculus
  siRNA target sequence for Col7a1 (NM_007738.1,2034-2052).
ggtcatcgtggctagaact

SEQ ID NO: 662691 - DNA, 19 bp, Mus musculus
  siRNA target sequence for Col7a1 (NM_007738.1,2207-2225).
ccacggtggctgaaataga

SEQ ID NO: 662692 - DNA, 19 bp, Mus musculus
  siRNA target sequence for Col7a1 (NM_007738.1,2208-2226).
cacggtggctgaaatagat

SEQ ID NO: 662693 - DNA, 19 bp, Mus musculus
  siRNA target sequence for Col7a1 (NM_007738.1,2233-2251).
gagccggacacagagtata

SEQ ID NO: 662694 - DNA, 19 bp, Mus musculus
  siRNA target sequence for Col7a1 (NM_007738.1,2235-2253).
gccggacacagagtatata

SEQ ID NO: 662695 - DNA, 19 bp, Mus musculus
  siRNA target sequence for Col7a1 (NM_007738.1,2237-2255).
cggacacagagtatatagt

SEQ ID NO: 662696 - DNA, 19 bp, Mus musculus
  siRNA target sequence for Col7a1 (NM_007738.1,2342-2360).
cgaaactgcaaatccttaa

SEQ ID NO: 662697 - DNA, 19 bp, Mus musculus
  siRNA target sequence for Col7a1 (NM_007738.1,2343-2361).
gaaactgcaaatccttaat

SEQ ID NO: 662698 - DNA, 19 bp, Mus musculus
  siRNA target sequence for Col7a1 (NM_007738.1,2401-2419).
cctggggccacatcctata

SEQ ID NO: 662699 - DNA, 19 bp, Mus musculus
  siRNA target sequence for Col7a1 (NM_007738.1,2424-2442).
ggcgtggggacgtagtgaa

SEQ ID NO: 662700 - DNA, 19 bp, Mus musculus
  siRNA target sequence for Col7a1 (NM_007738.1,2462-2480).
ggatactcccaggaaacaa

SEQ ID NO: 662701 - DNA, 19 bp, Mus musculus
  siRNA target sequence for Col7a1 (NM_007738.1,2563-2581).
gcaccggtgtccattgtca

SEQ ID NO: 662702 - DNA, 19 bp, Mus musculus
  siRNA target sequence for Col7a1 (NM_007738.1,2564-2582).
caccggtgtccattgtcat

SEQ ID NO: 662703 - DNA, 19 bp, Mus musculus
  siRNA target sequence for Col7a1 (NM_007738.1,2735-2753).
ccttgggacctgagtctaa

SEQ ID NO: 662704 - DNA, 19 bp, Mus musculus
  siRNA target sequence for Col7a1 (NM_007738.1,2942-2960).
ctggggcatccagttatat

SEQ ID NO: 662705 - DNA, 19 bp, Mus musculus
  siRNA target sequence for Col7a1 (NM_007738.1,2947-2965).
gcatccagttatatcttgt

SEQ ID NO: 662706 - DNA, 19 bp, Mus musculus
  siRNA target sequence for Col7a1 (NM_007738.1,3052-3070).
gggctggaacctggtattt

SEQ ID NO: 662707 - DNA, 19 bp, Mus musculus
  siRNA target sequence for Col7a1 (NM_007738.1,3180-3198).
gcatgccactcgagacaat

SEQ ID NO: 662708 - DNA, 19 bp, Mus musculus
  siRNA target sequence for Col7a1 (NM_007738.1,3313-3331).
ccactgttcccactgaata

SEQ ID NO: 662709 - DNA, 19 bp, Mus musculus
  siRNA target sequence for Col7a1 (NM_007738.1,3327-3345).
gaatagttcccatgatctt

SEQ ID NO: 662710 - DNA, 19 bp, Mus musculus
  siRNA target sequence for Col7a1 (NM_007738.1,3347-3365).
gcatcatcttgcgaaagat

SEQ ID NO: 662711 - DNA, 19 bp, Mus musculus
  siRNA target sequence for Col7a1 (NM_007738.1,3427-3445).
cacagatacctcttagcat

SEQ ID NO: 662712 - DNA, 19 bp, Mus musculus
  siRNA target sequence for Col7a1 (NM_007738.1,3479-3497).
gcgtgatggtcctgttagt

SEQ ID NO: 662713 - DNA, 19 bp, Mus musculus
  siRNA target sequence for Col7a1 (NM_007738.1,3506-3524).
ctctgagaggggacatact

SEQ ID NO: 662714 - DNA, 19 bp, Mus musculus
  siRNA target sequence for Col7a1 (NM_007738.1,3508-3526).
ctgagaggggacatactca

SEQ ID NO: 662715 - DNA, 19 bp, Mus musculus
  siRNA target sequence for Col7a1 (NM_007738.1,4042-4060).
ggtgagcctgggcaaatca

SEQ ID NO: 662716 - DNA, 19 bp, Mus musculus
  siRNA target sequence for Col7a1 (NM_007738.1,5115-5133).
ggtggatgcaggcattgaa

SEQ ID NO: 662717 - DNA, 19 bp, Mus musculus
  siRNA target sequence for Col7a1 (NM_007738.1,5116-5134).
gtggatgcaggcattgaat

SEQ ID NO: 662718 - DNA, 19 bp, Mus musculus
  siRNA target sequence for Col7a1 (NM_007738.1,6366-6384).
gggtgtaccaggcatcaaa

SEQ ID NO: 662719 - DNA, 19 bp, Mus musculus
  siRNA target sequence for Col7a1 (NM_007738.1,6977-6995).
ctggaccacggggtgaaaa

SEQ ID NO: 662720 - DNA, 19 bp, Mus musculus
  siRNA target sequence for Col7a1 (NM_007738.1,8381-8399).
cctgccagggccagtttat

SEQ ID NO: 662721 - DNA, 19 bp, Mus musculus
  siRNA target sequence for Col7a1 (NM_007738.1,8472-8490).
gctccgggtctctcatgtt

SEQ ID NO: 662722 - DNA, 19 bp, Mus musculus
  siRNA target sequence for Col7a1 (NM_007738.1,8532-8550).
ctctgagtactctgtgtat

SEQ ID NO: 662723 - DNA, 19 bp, Mus musculus
  siRNA target sequence for Col7a1 (NM_007738.1,8562-8580).
ctaccaggagcctgaagtt

SEQ ID NO: 662724 - DNA, 19 bp, Mus musculus
  siRNA target sequence for Col7a1 (NM_007738.1,8743-8761).
ggagggaatgccaatcgtt

SEQ ID NO: 662725 - DNA, 19 bp, Mus musculus
  siRNA target sequence for Col7a1 (NM_007738.1,8744-8762).
gagggaatgccaatcgttt

SEQ ID NO: 662726 - DNA, 19 bp, Mus musculus
  siRNA target sequence for Itih2 (NM_010582.1,157-175).
ccttcgaaatccccataaa

SEQ ID NO: 662727 - DNA, 19 bp, Mus musculus
  siRNA target sequence for Itih2 (NM_010582.1,167-185).
ccccataaacggaaactca

SEQ ID NO: 662728 - DNA, 19 bp, Mus musculus
  siRNA target sequence for Itih2 (NM_010582.1,223-241).
cagataaactcccatttgt

SEQ ID NO: 662729 - DNA, 19 bp, Mus musculus
  siRNA target sequence for Itih2 (NM_010582.1,303-321).
gttgatccagtgactcttt

SEQ ID NO: 662730 - DNA, 19 bp, Mus musculus
  siRNA target sequence for Itih2 (NM_010582.1,306-324).
gatccagtgactctttata

SEQ ID NO: 662731 - DNA, 19 bp, Mus musculus
  siRNA target sequence for Itih2 (NM_010582.1,316-334).
ctctttatagctacaaagt

SEQ ID NO: 662732 - DNA, 19 bp, Mus musculus
  siRNA target sequence for Itih2 (NM_010582.1,329-347).
caaagtccagtccactatt

SEQ ID NO: 662733 - DNA, 19 bp, Mus musculus
  siRNA target sequence for Itih2 (NM_010582.1,333-351).
gtccagtccactattactt

SEQ ID NO: 662734 - DNA, 19 bp, Mus musculus
  siRNA target sequence for Itih2 (NM_010582.1,335-353).
ccagtccactattacttct

SEQ ID NO: 662735 - DNA, 19 bp, Mus musculus
  siRNA target sequence for Itih2 (NM_010582.1,412-430).
gtgtcgtgttcgatgttca

SEQ ID NO: 662736 - DNA, 19 bp, Mus musculus
  siRNA target sequence for Itih2 (NM_010582.1,416-434).
cgtgttcgatgttcagatt

SEQ ID NO: 662737 - DNA, 19 bp, Mus musculus
  siRNA target sequence for Itih2 (NM_010582.1,511-529).
ctgtgggccgagctcttta

SEQ ID NO: 662738 - DNA, 19 bp, Mus musculus
  siRNA target sequence for Itih2 (NM_010582.1,515-533).
gggccgagctctttattca

SEQ ID NO: 662739 - DNA, 19 bp, Mus musculus
  siRNA target sequence for Itih2 (NM_010582.1,517-535).
gccgagctctttattcaca

SEQ ID NO: 662740 - DNA, 19 bp, Mus musculus
  siRNA target sequence for Itih2 (NM_010582.1,571-589).
ggagcagaactctggatat

SEQ ID NO: 662741 - DNA, 19 bp, Mus musculus
  siRNA target sequence for Itih2 (NM_010582.1,580-598).
ctctggatatggagaactt

SEQ ID NO: 662742 - DNA, 19 bp, Mus musculus
  siRNA target sequence for Itih2 (NM_010582.1,629-647).
caaggtgcagtttgaactt

SEQ ID NO: 662743 - DNA, 19 bp, Mus musculus
  siRNA target sequence for Itih2 (NM_010582.1,633-651).
gtgcagtttgaacttcatt

SEQ ID NO: 662744 - DNA, 19 bp, Mus musculus
  siRNA target sequence for Itih2 (NM_010582.1,668-686).
gaggaagctgggatcctat

SEQ ID NO: 662745 - DNA, 19 bp, Mus musculus
  siRNA target sequence for Itih2 (NM_010582.1,682-700).
cctatgagcacaagattca

SEQ ID NO: 662746 - DNA, 19 bp, Mus musculus
  siRNA target sequence for Itih2 (NM_010582.1,752-770).
cgaaccccaaggaatgaga

SEQ ID NO: 662747 - DNA, 19 bp, Mus musculus
  siRNA target sequence for Itih2 (NM_010582.1,753-771).
gaaccccaaggaatgagat

SEQ ID NO: 662748 - DNA, 19 bp, Mus musculus
  siRNA target sequence for Itih2 (NM_010582.1,763-781).
gaatgagatttcttcatgt

SEQ ID NO: 662749 - DNA, 19 bp, Mus musculus
  siRNA target sequence for Itih2 (NM_010582.1,806-824).
ccaaggcgtccctgtcata

SEQ ID NO: 662750 - DNA, 19 bp, Mus musculus
  siRNA target sequence for Itih2 (NM_010582.1,807-825).
caaggcgtccctgtcatat

SEQ ID NO: 662751 - DNA, 19 bp, Mus musculus
  siRNA target sequence for Itih2 (NM_010582.1,810-828).
ggcgtccctgtcatatcta

SEQ ID NO: 662752 - DNA, 19 bp, Mus musculus
  siRNA target sequence for Itih2 (NM_010582.1,811-829).
gcgtccctgtcatatctaa

SEQ ID NO: 662753 - DNA, 19 bp, Mus musculus
  siRNA target sequence for Itih2 (NM_010582.1,971-989).
ggtgtttaatggatatttt

SEQ ID NO: 662754 - DNA, 19 bp, Mus musculus
  siRNA target sequence for Itih2 (NM_010582.1,1027-1045).
ccaagaacatcctttttgt

SEQ ID NO: 662755 - DNA, 19 bp, Mus musculus
  siRNA target sequence for Itih2 (NM_010582.1,1060-1078).
gctccatgtgggggattaa

SEQ ID NO: 662756 - DNA, 19 bp, Mus musculus
  siRNA target sequence for Itih2 (NM_010582.1,1063-1081).
ccatgtgggggattaagat

SEQ ID NO: 662757 - DNA, 19 bp, Mus musculus
  siRNA target sequence for Itih2 (NM_010582.1,1095-1113).
gaggcaatgaagacgatat

SEQ ID NO: 662758 - DNA, 19 bp, Mus musculus
  siRNA target sequence for Itih2 (NM_010582.1,1137-1155).
caattctctgtggttgatt

SEQ ID NO: 662759 - DNA, 19 bp, Mus musculus
  siRNA target sequence for Itih2 (NM_010582.1,1148-1166).
ggttgatttcaaccataat

SEQ ID NO: 662760 - DNA, 19 bp, Mus musculus
  siRNA target sequence for Itih2 (NM_010582.1,1170-1188).
cgaacctggagaaatgatt

SEQ ID NO: 662761 - DNA, 19 bp, Mus musculus
  siRNA target sequence for Itih2 (NM_010582.1,1171-1189).
gaacctggagaaatgattt

SEQ ID NO: 662762 - DNA, 19 bp, Mus musculus
  siRNA target sequence for Itih2 (NM_010582.1,1178-1196).
gagaaatgatttagtttca

SEQ ID NO: 662763 - DNA, 19 bp, Mus musculus
  siRNA target sequence for Itih2 (NM_010582.1,1248-1266).
cctagtggaggcacgaata

SEQ ID NO: 662764 - DNA, 19 bp, Mus musculus
  siRNA target sequence for Itih2 (NM_010582.1,1249-1267).
ctagtggaggcacgaatat

SEQ ID NO: 662765 - DNA, 19 bp, Mus musculus
  siRNA target sequence for Itih2 (NM_010582.1,1274-1292).
ggcactgcttcgagcaatt

SEQ ID NO: 662766 - DNA, 19 bp, Mus musculus
  siRNA target sequence for Itih2 (NM_010582.1,1275-1293).
gcactgcttcgagcaattt

SEQ ID NO: 662767 - DNA, 19 bp, Mus musculus
  siRNA target sequence for Itih2 (NM_010582.1,1278-1296).
ctgcttcgagcaattttca

SEQ ID NO: 662768 - DNA, 19 bp, Mus musculus
  siRNA target sequence for Itih2 (NM_010582.1,1280-1298).
gcttcgagcaattttcatt

SEQ ID NO: 662769 - DNA, 19 bp, Mus musculus
  siRNA target sequence for Itih2 (NM_010582.1,1284-1302).
cgagcaattttcattttga

SEQ ID NO: 662770 - DNA, 19 bp, Mus musculus
  siRNA target sequence for Itih2 (NM_010582.1,1285-1303).
gagcaattttcattttgaa

SEQ ID NO: 662771 - DNA, 19 bp, Mus musculus
  siRNA target sequence for Itih2 (NM_010582.1,1337-1355).
ctcagtctctctgatcatt

SEQ ID NO: 662772 - DNA, 19 bp, Mus musculus
  siRNA target sequence for Itih2 (NM_010582.1,1374-1392).
ccaaccgtaggggaactaa

SEQ ID NO: 662773 - DNA, 19 bp, Mus musculus
  siRNA target sequence for Itih2 (NM_010582.1,1375-1393).
caaccgtaggggaactaaa

SEQ ID NO: 662774 - DNA, 19 bp, Mus musculus
  siRNA target sequence for Itih2 (NM_010582.1,1378-1396).
ccgtaggggaactaaaatt

SEQ ID NO: 662775 - DNA, 19 bp, Mus musculus
  siRNA target sequence for Itih2 (NM_010582.1,1434-1452).
gataacatctccctgttta

SEQ ID NO: 662776 - DNA, 19 bp, Mus musculus
  siRNA target sequence for Itih2 (NM_010582.1,1453-1471).
gtttgggaatcggatttga

SEQ ID NO: 662777 - DNA, 19 bp, Mus musculus
  siRNA target sequence for Itih2 (NM_010582.1,1473-1491).
gtcgactatgattttttga

SEQ ID NO: 662778 - DNA, 19 bp, Mus musculus
  siRNA target sequence for Itih2 (NM_010582.1,1476-1494).
gactatgattttttgaaga

SEQ ID NO: 662779 - DNA, 19 bp, Mus musculus
  siRNA target sequence for Itih2 (NM_010582.1,1493-1511).
gaggctgtccaatgaaaat

SEQ ID NO: 662780 - DNA, 19 bp, Mus musculus
  siRNA target sequence for Itih2 (NM_010582.1,1496-1514).
gctgtccaatgaaaatcgt

SEQ ID NO: 662781 - DNA, 19 bp, Mus musculus
  siRNA target sequence for Itih2 (NM_010582.1,1549-1567).
catcctctcagctcaagaa

SEQ ID NO: 662782 - DNA, 19 bp, Mus musculus
  siRNA target sequence for Itih2 (NM_010582.1,1557-1575).
cagctcaagaaattttaca

SEQ ID NO: 662783 - DNA, 19 bp, Mus musculus
  siRNA target sequence for Itih2 (NM_010582.1,1595-1613).
gctcagaaatgttcagttt

SEQ ID NO: 662784 - DNA, 19 bp, Mus musculus
  siRNA target sequence for Itih2 (NM_010582.1,1616-1634).
ctacccgcaggcatcagta

SEQ ID NO: 662785 - DNA, 19 bp, Mus musculus
  siRNA target sequence for Itih2 (NM_010582.1,1638-1656).
gatgtcacccaaaacaatt

SEQ ID NO: 662786 - DNA, 19 bp, Mus musculus
  siRNA target sequence for Itih2 (NM_010582.1,1685-1703).
cgtggtggcagggaaattt

SEQ ID NO: 662787 - DNA, 19 bp, Mus musculus
  siRNA target sequence for Itih2 (NM_010582.1,1688-1706).
ggtggcagggaaatttgat

SEQ ID NO: 662788 - DNA, 19 bp, Mus musculus
  siRNA target sequence for Itih2 (NM_010582.1,1742-1760).
ggcaacttcggctaacaca

SEQ ID NO: 662789 - DNA, 19 bp, Mus musculus
  siRNA target sequence for Itih2 (NM_010582.1,1747-1765).
cttcggctaacacagaatt

SEQ ID NO: 662790 - DNA, 19 bp, Mus musculus
  siRNA target sequence for Itih2 (NM_010582.1,1750-1768).
cggctaacacagaattggt

SEQ ID NO: 662791 - DNA, 19 bp, Mus musculus
  siRNA target sequence for Itih2 (NM_010582.1,2054-2072).
ctgctcaggcgcactgtat

SEQ ID NO: 662792 - DNA, 19 bp, Mus musculus
  siRNA target sequence for Itih2 (NM_010582.1,2056-2074).
gctcaggcgcactgtatta

SEQ ID NO: 662793 - DNA, 19 bp, Mus musculus
  siRNA target sequence for Itih2 (NM_010582.1,2057-2075).
ctcaggcgcactgtattat

SEQ ID NO: 662794 - DNA, 19 bp, Mus musculus
  siRNA target sequence for Itih2 (NM_010582.1,2173-2191).
ctactccacctactcattt

SEQ ID NO: 662795 - DNA, 19 bp, Mus musculus
  siRNA target sequence for Itih2 (NM_010582.1,2179-2197).
cacctactcatttgaatca

SEQ ID NO: 662796 - DNA, 19 bp, Mus musculus
  siRNA target sequence for Itih2 (NM_010582.1,2212-2230).
cccacttcatcatttacct

SEQ ID NO: 662797 - DNA, 19 bp, Mus musculus
  siRNA target sequence for Itih2 (NM_010582.1,2294-2312).
ggtgtctgacccagaatca

SEQ ID NO: 662798 - DNA, 19 bp, Mus musculus
  siRNA target sequence for Itih2 (NM_010582.1,2303-2321).
cccagaatcagggattgta

SEQ ID NO: 662799 - DNA, 19 bp, Mus musculus
  siRNA target sequence for Itih2 (NM_010582.1,2305-2323).
cagaatcagggattgtagt

SEQ ID NO: 662800 - DNA, 19 bp, Mus musculus
  siRNA target sequence for Itih2 (NM_010582.1,2483-2501).
gtccgacacagctcatctt

SEQ ID NO: 662801 - DNA, 19 bp, Mus musculus
  siRNA target sequence for Itih2 (NM_010582.1,2548-2566).
ctctcaccctgaataaaga

SEQ ID NO: 662802 - DNA, 19 bp, Mus musculus
  siRNA target sequence for Itih2 (NM_010582.1,2599-2617).
ggaggaagcacccagttaa

SEQ ID NO: 662803 - DNA, 19 bp, Mus musculus
  siRNA target sequence for Itih2 (NM_010582.1,2602-2620).
ggaagcacccagttaacgt

SEQ ID NO: 662804 - DNA, 19 bp, Mus musculus
  siRNA target sequence for Itih2 (NM_010582.1,2843-2861).
cgttccctgctggtttgta

SEQ ID NO: 662805 - DNA, 19 bp, Mus musculus
  siRNA target sequence for Itih2 (NM_010582.1,2848-2866).
cctgctggtttgtacacaa

SEQ ID NO: 662806 - DNA, 19 bp, Mus musculus
  siRNA target sequence for Itih2 (NM_010582.1,2878-2896).
gtttcatcgatggacatta

SEQ ID NO: 662807 - DNA, 19 bp, Mus musculus
  siRNA target sequence for Itih2 (NM_010582.1,2885-2903).
cgatggacattataaggat

SEQ ID NO: 662808 - DNA, 19 bp, Mus musculus
  siRNA target sequence for Itih2 (NM_010582.1,2890-2908).
gacattataaggattattt

SEQ ID NO: 662809 - DNA, 19 bp, Mus musculus
  siRNA target sequence for Mug2 (NM_008646.1,848-866).
ggacaggtgaagataagta

SEQ ID NO: 662810 - DNA, 19 bp, Mus musculus
  siRNA target sequence for Mug2 (NM_008646.1,849-867).
gacaggtgaagataagtat

SEQ ID NO: 662811 - DNA, 19 bp, Mus musculus
  siRNA target sequence for Mug2 (NM_008646.1,1029-1047).
gactggagttcaatggata

SEQ ID NO: 662812 - DNA, 19 bp, Mus musculus
  siRNA target sequence for Mug2 (NM_008646.1,1033-1051).
ggagttcaatggatatgga

SEQ ID NO: 662813 - DNA, 19 bp, Mus musculus
  siRNA target sequence for Mug2 (NM_008646.1,1034-1052).
gagttcaatggatatggaa

SEQ ID NO: 662814 - DNA, 19 bp, Mus musculus
  siRNA target sequence for Mug2 (NM_008646.1,1039-1057).
caatggatatggaacaact

SEQ ID NO: 662815 - DNA, 19 bp, Mus musculus
  siRNA target sequence for Mug2 (NM_008646.1,1313-1331).
gggaaagattcatgttact

SEQ ID NO: 662816 - DNA, 19 bp, Mus musculus
  siRNA target sequence for Mug2 (NM_008646.1,1314-1332).
ggaaagattcatgttactt

SEQ ID NO: 662817 - DNA, 19 bp, Mus musculus
  siRNA target sequence for Mug2 (NM_008646.1,2124-2142).
cagggcctcgtgggaaatt

SEQ ID NO: 662818 - DNA, 19 bp, Mus musculus
  siRNA target sequence for Mug2 (NM_008646.1,2127-2145).
ggcctcgtgggaaatttga

SEQ ID NO: 662819 - DNA, 19 bp, Mus musculus
  siRNA target sequence for Mug2 (NM_008646.1,2128-2146).
gcctcgtgggaaatttgat

SEQ ID NO: 662820 - DNA, 19 bp, Mus musculus
  siRNA target sequence for Mug2 (NM_008646.1,2150-2168).
gcatttagtagtgaagttt

SEQ ID NO: 662821 - DNA, 19 bp, Mus musculus
  siRNA target sequence for Mug2 (NM_008646.1,2165-2183).
gtttctgggacattgcaaa

SEQ ID NO: 662822 - DNA, 19 bp, Mus musculus
  siRNA target sequence for Mug2 (NM_008646.1,2180-2198).
caaaagggatcaagtaaaa

SEQ ID NO: 662823 - DNA, 19 bp, Mus musculus
  siRNA target sequence for Mug2 (NM_008646.1,3408-3426).
ggcgaaatgccaactttgt

SEQ ID NO: 662824 - DNA, 19 bp, Mus musculus
  siRNA target sequence for Mug2 (NM_008646.1,3826-3844).
ggtgaccatccaatctaca

SEQ ID NO: 662825 - DNA, 19 bp, Mus musculus
  siRNA target sequence for Mug2 (NM_008646.1,3972-3990).
ctacactgagatacaacat

SEQ ID NO: 662826 - DNA, 19 bp, Mus musculus
  siRNA target sequence for Pzp (NM_007376.1,64-82).
gctgcccacaccagctttt

SEQ ID NO: 662827 - DNA, 19 bp, Mus musculus
  siRNA target sequence for Pzp (NM_007376.1,67-85).
gcccacaccagcttttctt

SEQ ID NO: 662828 - DNA, 19 bp, Mus musculus
  siRNA target sequence for Pzp (NM_007376.1,126-144).
ctgcaaaaccacaatatgt

SEQ ID NO: 662829 - DNA, 19 bp, Mus musculus
  siRNA target sequence for Pzp (NM_007376.1,287-305).
gataaggactccttctact

SEQ ID NO: 662830 - DNA, 19 bp, Mus musculus
  siRNA target sequence for Pzp (NM_007376.1,319-337).
gatctcaggttcaccttta

SEQ ID NO: 662831 - DNA, 19 bp, Mus musculus
  siRNA target sequence for Pzp (NM_007376.1,330-348).
cacctttaccctacacatt

SEQ ID NO: 662832 - DNA, 19 bp, Mus musculus
  siRNA target sequence for Pzp (NM_007376.1,339-357).
cctacacattcattactgt

SEQ ID NO: 662833 - DNA, 19 bp, Mus musculus
  siRNA target sequence for Pzp (NM_007376.1,371-389).
ccaacgcagcgcttcataa

SEQ ID NO: 662834 - DNA, 19 bp, Mus musculus
  siRNA target sequence for Pzp (NM_007376.1,385-403).
cataaagaagaagtcaata

SEQ ID NO: 662835 - DNA, 19 bp, Mus musculus
  siRNA target sequence for Pzp (NM_007376.1,475-493).
gaaattccgagttgtttct

SEQ ID NO: 662836 - DNA, 19 bp, Mus musculus
  siRNA target sequence for Pzp (NM_007376.1,502-520).
cagttttcgcccgttgaat

SEQ ID NO: 662837 - DNA, 19 bp, Mus musculus
  siRNA target sequence for Pzp (NM_007376.1,510-528).
gcccgttgaatgaaacgtt

SEQ ID NO: 662838 - DNA, 19 bp, Mus musculus
  siRNA target sequence for Pzp (NM_007376.1,525-543).
cgttccctgtcgtttatat

SEQ ID NO: 662839 - DNA, 19 bp, Mus musculus
  siRNA target sequence for Pzp (NM_007376.1,636-654).
cagctctgggtatctacaa

SEQ ID NO: 662840 - DNA, 19 bp, Mus musculus
  siRNA target sequence for Pzp (NM_007376.1,645-663).
gtatctacaaggttgtagt

SEQ ID NO: 662841 - DNA, 19 bp, Mus musculus
  siRNA target sequence for Pzp (NM_007376.1,722-740).
cccaaatttgaggtgataa

SEQ ID NO: 662842 - DNA, 19 bp, Mus musculus
  siRNA target sequence for Pzp (NM_007376.1,791-809).
gcttgtggcgtatacacat

SEQ ID NO: 662843 - DNA, 19 bp, Mus musculus
  siRNA target sequence for Pzp (NM_007376.1,797-815).
ggcgtatacacatatggaa

SEQ ID NO: 662844 - DNA, 19 bp, Mus musculus
  siRNA target sequence for Pzp (NM_007376.1,798-816).
gcgtatacacatatggaaa

SEQ ID NO: 662845 - DNA, 19 bp, Mus musculus
  siRNA target sequence for Pzp (NM_007376.1,824-842).
cccggtctggtgacattga

SEQ ID NO: 662846 - DNA, 19 bp, Mus musculus
  siRNA target sequence for Pzp (NM_007376.1,826-844).
cggtctggtgacattgaga

SEQ ID NO: 662847 - DNA, 19 bp, Mus musculus
  siRNA target sequence for Pzp (NM_007376.1,870-888).
gctccacctgccataacca

SEQ ID NO: 662848 - DNA, 19 bp, Mus musculus
  siRNA target sequence for Pzp (NM_007376.1,873-891).
ccacctgccataaccaaaa

SEQ ID NO: 662849 - DNA, 19 bp, Mus musculus
  siRNA target sequence for Pzp (NM_007376.1,879-897).
gccataaccaaaactcaat

SEQ ID NO: 662850 - DNA, 19 bp, Mus musculus
  siRNA target sequence for Pzp (NM_007376.1,990-1008).
gccacgacatgaagataga

SEQ ID NO: 662851 - DNA, 19 bp, Mus musculus
  siRNA target sequence for Pzp (NM_007376.1,1089-1107).
gcaaactgaaatttactaa

SEQ ID NO: 662852 - DNA, 19 bp, Mus musculus
  siRNA target sequence for Pzp (NM_007376.1,1178-1196).
ccaatccccaacaaaaaca

SEQ ID NO: 662853 - DNA, 19 bp, Mus musculus
  siRNA target sequence for Pzp (NM_007376.1,1220-1238).
gggtacctgtccattttta

SEQ ID NO: 662854 - DNA, 19 bp, Mus musculus
  siRNA target sequence for Pzp (NM_007376.1,1331-1349).
catgtctgctatgataact

SEQ ID NO: 662855 - DNA, 19 bp, Mus musculus
  siRNA target sequence for Pzp (NM_007376.1,1466-1484).
caggagattcggatacact

SEQ ID NO: 662856 - DNA, 19 bp, Mus musculus
  siRNA target sequence for Pzp (NM_007376.1,1476-1494).
ggatacactacctcttgaa

SEQ ID NO: 662857 - DNA, 19 bp, Mus musculus
  siRNA target sequence for Pzp (NM_007376.1,1661-1679).
cagctgctcatttatgcta

SEQ ID NO: 662858 - DNA, 19 bp, Mus musculus
  siRNA target sequence for Pzp (NM_007376.1,1669-1687).
catttatgctattttacct

SEQ ID NO: 662859 - DNA, 19 bp, Mus musculus
  siRNA target sequence for Pzp (NM_007376.1,1710-1728).
ctcagaattttgaaatcga

SEQ ID NO: 662860 - DNA, 19 bp, Mus musculus
  siRNA target sequence for Pzp (NM_007376.1,1734-1752).
gttttgccaacaaggtaaa

SEQ ID NO: 662861 - DNA, 19 bp, Mus musculus
  siRNA target sequence for Pzp (NM_007376.1,1741-1759).
caacaaggtaaatttgagt

SEQ ID NO: 662862 - DNA, 19 bp, Mus musculus
  siRNA target sequence for Pzp (NM_007376.1,1889-1907).
cctcagtcaatctacaatt

SEQ ID NO: 662863 - DNA, 19 bp, Mus musculus
  siRNA target sequence for Pzp (NM_007376.1,1944-1962).
gtgtcccagtgtacaaaga

SEQ ID NO: 662864 - DNA, 19 bp, Mus musculus
  siRNA target sequence for Pzp (NM_007376.1,1974-1992).
gcatcagcggagaagacat

SEQ ID NO: 662865 - DNA, 19 bp, Mus musculus
  siRNA target sequence for Pzp (NM_007376.1,2023-2041).
gcactctctgggcgataat

SEQ ID NO: 662866 - DNA, 19 bp, Mus musculus
  siRNA target sequence for Pzp (NM_007376.1,2026-2044).
ctctctgggcgataatgat

SEQ ID NO: 662867 - DNA, 19 bp, Mus musculus
  siRNA target sequence for Pzp (NM_007376.1,2045-2063).
gcacacagcatttttcagt

SEQ ID NO: 662868 - DNA, 19 bp, Mus musculus
  siRNA target sequence for Pzp (NM_007376.1,2060-2078).
cagtctgtaggaataaata

SEQ ID NO: 662869 - DNA, 19 bp, Mus musculus
  siRNA target sequence for Pzp (NM_007376.1,2110-2128).
cttttgtcaagagtttcaa

SEQ ID NO: 662870 - DNA, 19 bp, Mus musculus
  siRNA target sequence for Pzp (NM_007376.1,2115-2133).
gtcaagagtttcaacacta

SEQ ID NO: 662871 - DNA, 19 bp, Mus musculus
  siRNA target sequence for Pzp (NM_007376.1,2230-2248).
ggactactctgatgaaatt

SEQ ID NO: 662872 - DNA, 19 bp, Mus musculus
  siRNA target sequence for Pzp (NM_007376.1,2231-2249).
gactactctgatgaaatta

SEQ ID NO: 662873 - DNA, 19 bp, Mus musculus
  siRNA target sequence for Pzp (NM_007376.1,2270-2288).
gagacagtgcggaagtact

SEQ ID NO: 662874 - DNA, 19 bp, Mus musculus
  siRNA target sequence for Pzp (NM_007376.1,2340-2358).
gtgaattggcggtaaaggt

SEQ ID NO: 662875 - DNA, 19 bp, Mus musculus
  siRNA target sequence for Pzp (NM_007376.1,2557-2575).
ccgagtggacctagagatt

SEQ ID NO: 662876 - DNA, 19 bp, Mus musculus
  siRNA target sequence for Pzp (NM_007376.1,2558-2576).
cgagtggacctagagattt

SEQ ID NO: 662877 - DNA, 19 bp, Mus musculus
  siRNA target sequence for Pzp (NM_007376.1,2606-2624).
ggccatgaaaactctcatt

SEQ ID NO: 662878 - DNA, 19 bp, Mus musculus
  siRNA target sequence for Pzp (NM_007376.1,2676-2694).
cgctgggggaggtgaactt

SEQ ID NO: 662879 - DNA, 19 bp, Mus musculus
  siRNA target sequence for Pzp (NM_007376.1,2782-2800).
ggtgaagtccgtaatagtt

SEQ ID NO: 662880 - DNA, 19 bp, Mus musculus
  siRNA target sequence for Pzp (NM_007376.1,2842-2860).
gttatgcccacaagatact

SEQ ID NO: 662881 - DNA, 19 bp, Mus musculus
  siRNA target sequence for Pzp (NM_007376.1,2931-2949).
ccgttttgggtgatatact

SEQ ID NO: 662882 - DNA, 19 bp, Mus musculus
  siRNA target sequence for Pzp (NM_007376.1,2948-2966).
ctgggctctgcaatgcaaa

SEQ ID NO: 662883 - DNA, 19 bp, Mus musculus
  siRNA target sequence for Pzp (NM_007376.1,2952-2970).
gctctgcaatgcaaaacct

SEQ ID NO: 662884 - DNA, 19 bp, Mus musculus
  siRNA target sequence for Pzp (NM_007376.1,3185-3203).
ggcaacactccgggaaata

SEQ ID NO: 662885 - DNA, 19 bp, Mus musculus
  siRNA target sequence for Pzp (NM_007376.1,3187-3205).
caacactccgggaaatact

SEQ ID NO: 662886 - DNA, 19 bp, Mus musculus
  siRNA target sequence for Pzp (NM_007376.1,3242-3260).
gctcagtcgcacatcttta

SEQ ID NO: 662887 - DNA, 19 bp, Mus musculus
  siRNA target sequence for Pzp (NM_007376.1,3243-3261).
ctcagtcgcacatctttat

SEQ ID NO: 662888 - DNA, 19 bp, Mus musculus
  siRNA target sequence for Pzp (NM_007376.1,3289-3307).
caactggctctccatgaaa

SEQ ID NO: 662889 - DNA, 19 bp, Mus musculus
  siRNA target sequence for Pzp (NM_007376.1,3449-3467).
gtgcgaaatgctctatttt

SEQ ID NO: 662890 - DNA, 19 bp, Mus musculus
  siRNA target sequence for Pzp (NM_007376.1,3581-3599).
ctgcttgaatccctaaaca

SEQ ID NO: 662891 - DNA, 19 bp, Mus musculus
  siRNA target sequence for Pzp (NM_007376.1,3639-3657).
gccctggggatgttcagaa

SEQ ID NO: 662892 - DNA, 19 bp, Mus musculus
  siRNA target sequence for Pzp (NM_007376.1,3661-3679).
gaaggccttatctttctat

SEQ ID NO: 662893 - DNA, 19 bp, Mus musculus
  siRNA target sequence for Pzp (NM_007376.1,3664-3682).
ggccttatctttctatcaa

SEQ ID NO: 662894 - DNA, 19 bp, Mus musculus
  siRNA target sequence for Pzp (NM_007376.1,3721-3739).
cgtgcttctcgcctatcta

SEQ ID NO: 662895 - DNA, 19 bp, Mus musculus
  siRNA target sequence for Pzp (NM_007376.1,3875-3893).
ctccaagccctctccaaat

SEQ ID NO: 662896 - DNA, 19 bp, Mus musculus
  siRNA target sequence for Pzp (NM_007376.1,3877-3895).
ccaagccctctccaaatat

SEQ ID NO: 662897 - DNA, 19 bp, Mus musculus
  siRNA target sequence for Pzp (NM_007376.1,3912-3930).
cgagaagtcagaaagaagt

SEQ ID NO: 662898 - DNA, 19 bp, Mus musculus
  siRNA target sequence for Pzp (NM_007376.1,3953-3971).
gggaccttctctaagactt

SEQ ID NO: 662899 - DNA, 19 bp, Mus musculus
  siRNA target sequence for Pzp (NM_007376.1,3954-3972).
ggaccttctctaagacttt

SEQ ID NO: 662900 - DNA, 19 bp, Mus musculus
  siRNA target sequence for Pzp (NM_007376.1,4020-4038).
cagatctgcccggaaatta

SEQ ID NO: 662901 - DNA, 19 bp, Mus musculus
  siRNA target sequence for Pzp (NM_007376.1,4080-4098).
catctctaaagtacaacat

SEQ ID NO: 662902 - DNA, 19 bp, Mus musculus
  siRNA target sequence for Pzp (NM_007376.1,4125-4143).
ccttcgctctgcaagtcaa

SEQ ID NO: 662903 - DNA, 19 bp, Mus musculus
  siRNA target sequence for Pzp (NM_007376.1,4190-4208).
cagattcgcatcaacgtaa

SEQ ID NO: 662904 - DNA, 19 bp, Mus musculus
  siRNA target sequence for Pzp (NM_007376.1,4258-4276).
gatggtatcaggcttcata

SEQ ID NO: 662905 - DNA, 19 bp, Mus musculus
  siRNA target sequence for Pzp (NM_007376.1,4262-4280).
gtatcaggcttcataccta

SEQ ID NO: 662906 - DNA, 19 bp, Mus musculus
  siRNA target sequence for Pzp (NM_007376.1,4303-4321).
ccaagaccagcctaacatt

SEQ ID NO: 662907 - DNA, 19 bp, Mus musculus
  siRNA target sequence for Pzp (NM_007376.1,4341-4359).
ccaaccatgttctaatcta

SEQ ID NO: 662908 - DNA, 19 bp, Mus musculus
  siRNA target sequence for Pzp (NM_007376.1,4475-4493).
gaattcaccgttgaagaat

SEQ ID NO: 662909 - DNA, 19 bp, Mus musculus
  siRNA target sequence for Pzp (NM_007376.1,4480-4498).
caccgttgaagaatacagt

SEQ ID NO: 662910 - DNA, 19 bp, Mus musculus
  siRNA target sequence for Reck (NM_016678.1,105-123).
gggtgctgtatgctgtaat

SEQ ID NO: 662911 - DNA, 19 bp, Mus musculus
  siRNA target sequence for Reck (NM_016678.1,109-127).
gctgtatgctgtaatcatt

SEQ ID NO: 662912 - DNA, 19 bp, Mus musculus
  siRNA target sequence for Reck (NM_016678.1,138-156).
ccaaatgtgccgtgatgta

SEQ ID NO: 662913 - DNA, 19 bp, Mus musculus
  siRNA target sequence for Reck (NM_016678.1,182-200).
gtgaatcccgactgaaaca

SEQ ID NO: 662914 - DNA, 19 bp, Mus musculus
  siRNA target sequence for Reck (NM_016678.1,230-248).
ctgaaacaatggttgaaat

SEQ ID NO: 662915 - DNA, 19 bp, Mus musculus
  siRNA target sequence for Reck (NM_016678.1,267-285).
gtctttgccaggggtattt

SEQ ID NO: 662916 - DNA, 19 bp, Mus musculus
  siRNA target sequence for Reck (NM_016678.1,269-287).
ctttgccaggggtatttaa

SEQ ID NO: 662917 - DNA, 19 bp, Mus musculus
  siRNA target sequence for Reck (NM_016678.1,360-378).
gcaggcatcttcgaaaaat

SEQ ID NO: 662918 - DNA, 19 bp, Mus musculus
  siRNA target sequence for Reck (NM_016678.1,409-427).
gagaatgctcttttcagtt

SEQ ID NO: 662919 - DNA, 19 bp, Mus musculus
  siRNA target sequence for Reck (NM_016678.1,428-446).
gcattagcagaaatgaaat

SEQ ID NO: 662920 - DNA, 19 bp, Mus musculus
  siRNA target sequence for Reck (NM_016678.1,483-501).
caactgccgagaattctgt

SEQ ID NO: 662921 - DNA, 19 bp, Mus musculus
  siRNA target sequence for Reck (NM_016678.1,498-516).
ctgtcaagccatttttcga

SEQ ID NO: 662922 - DNA, 19 bp, Mus musculus
  siRNA target sequence for Reck (NM_016678.1,613-631).
cagtcttatccaatgagaa

SEQ ID NO: 662923 - DNA, 19 bp, Mus musculus
  siRNA target sequence for Reck (NM_016678.1,629-647).
gaaacccaactgatagttt

SEQ ID NO: 662924 - DNA, 19 bp, Mus musculus
  siRNA target sequence for Reck (NM_016678.1,633-651).
cccaactgatagtttatat

SEQ ID NO: 662925 - DNA, 19 bp, Mus musculus
  siRNA target sequence for Reck (NM_016678.1,687-705).
cgcctgcaagagaattcta

SEQ ID NO: 662926 - DNA, 19 bp, Mus musculus
  siRNA target sequence for Reck (NM_016678.1,688-706).
gcctgcaagagaattctaa

SEQ ID NO: 662927 - DNA, 19 bp, Mus musculus
  siRNA target sequence for Reck (NM_016678.1,689-707).
cctgcaagagaattctaat

SEQ ID NO: 662928 - DNA, 19 bp, Mus musculus
  siRNA target sequence for Reck (NM_016678.1,740-758).
gtctcattgagggttgtaa

SEQ ID NO: 662929 - DNA, 19 bp, Mus musculus
  siRNA target sequence for Reck (NM_016678.1,742-760).
ctcattgagggttgtaaga

SEQ ID NO: 662930 - DNA, 19 bp, Mus musculus
  siRNA target sequence for Reck (NM_016678.1,762-780).
ccagcccttgcctcaagat

SEQ ID NO: 662931 - DNA, 19 bp, Mus musculus
  siRNA target sequence for Reck (NM_016678.1,912-930).
ggaactgtgcaccaaactt

SEQ ID NO: 662932 - DNA, 19 bp, Mus musculus
  siRNA target sequence for Reck (NM_016678.1,916-934).
ctgtgcaccaaactttata

SEQ ID NO: 662933 - DNA, 19 bp, Mus musculus
  siRNA target sequence for Reck (NM_016678.1,975-993).
ccgcatctgtgagtataat

SEQ ID NO: 662934 - DNA, 19 bp, Mus musculus
  siRNA target sequence for Reck (NM_016678.1,1043-1061).
gccagttgggctgtacaaa

SEQ ID NO: 662935 - DNA, 19 bp, Mus musculus
  siRNA target sequence for Reck (NM_016678.1,1052-1070).
gctgtacaaacctgactta

SEQ ID NO: 662936 - DNA, 19 bp, Mus musculus
  siRNA target sequence for Reck (NM_016678.1,1065-1083).
gacttactgtacaaacttt

SEQ ID NO: 662937 - DNA, 19 bp, Mus musculus
  siRNA target sequence for Reck (NM_016678.1,1299-1317).
ctgcaaatcagattgtgta

SEQ ID NO: 662938 - DNA, 19 bp, Mus musculus
  siRNA target sequence for Reck (NM_016678.1,1307-1325).
cagattgtgtagagattct

SEQ ID NO: 662939 - DNA, 19 bp, Mus musculus
  siRNA target sequence for Reck (NM_016678.1,1309-1327).
gattgtgtagagattctca

SEQ ID NO: 662940 - DNA, 19 bp, Mus musculus
  siRNA target sequence for Reck (NM_016678.1,1365-1383).
cacagctgaaagtatctgt

SEQ ID NO: 662941 - DNA, 19 bp, Mus musculus
  siRNA target sequence for Reck (NM_016678.1,1550-1568).
cagatccctgccttccata

SEQ ID NO: 662942 - DNA, 19 bp, Mus musculus
  siRNA target sequence for Reck (NM_016678.1,1574-1592).
gtgttcaaggctgcaaatt

SEQ ID NO: 662943 - DNA, 19 bp, Mus musculus
  siRNA target sequence for Reck (NM_016678.1,1657-1675).
gaagttggttgctacaaga

SEQ ID NO: 662944 - DNA, 19 bp, Mus musculus
  siRNA target sequence for Reck (NM_016678.1,1660-1678).
gttggttgctacaagatct

SEQ ID NO: 662945 - DNA, 19 bp, Mus musculus
  siRNA target sequence for Reck (NM_016678.1,1712-1730).
gtatggaaatgcactgtat

SEQ ID NO: 662946 - DNA, 19 bp, Mus musculus
  siRNA target sequence for Reck (NM_016678.1,1732-1750).
gacctccagaagtcttgta

SEQ ID NO: 662947 - DNA, 19 bp, Mus musculus
  siRNA target sequence for Reck (NM_016678.1,1773-1791).
ccacggaacatcctttact

SEQ ID NO: 662948 - DNA, 19 bp, Mus musculus
  siRNA target sequence for Reck (NM_016678.1,1774-1792).
cacggaacatcctttacta

SEQ ID NO: 662949 - DNA, 19 bp, Mus musculus
  siRNA target sequence for Reck (NM_016678.1,1776-1794).
cggaacatcctttactatt

SEQ ID NO: 662950 - DNA, 19 bp, Mus musculus
  siRNA target sequence for Reck (NM_016678.1,1800-1818).
caatgtctgttcttgtttt

SEQ ID NO: 662951 - DNA, 19 bp, Mus musculus
  siRNA target sequence for Reck (NM_016678.1,1811-1829).
cttgttttgcgggtaattt

SEQ ID NO: 662952 - DNA, 19 bp, Mus musculus
  siRNA target sequence for Reck (NM_016678.1,1814-1832).
gttttgcgggtaatttagt

SEQ ID NO: 662953 - DNA, 19 bp, Mus musculus
  siRNA target sequence for Reck (NM_016678.1,1904-1922).
gtaactgcgcagatcagtt

SEQ ID NO: 662954 - DNA, 19 bp, Mus musculus
  siRNA target sequence for Reck (NM_016678.1,2005-2023).
gagtttggaccttgtatct

SEQ ID NO: 662955 - DNA, 19 bp, Mus musculus
  siRNA target sequence for Reck (NM_016678.1,2088-2106).
ctgcctgacgacttttgat

SEQ ID NO: 662956 - DNA, 19 bp, Mus musculus
  siRNA target sequence for Reck (NM_016678.1,2090-2108).
gcctgacgacttttgataa

SEQ ID NO: 662957 - DNA, 19 bp, Mus musculus
  siRNA target sequence for Reck (NM_016678.1,2091-2109).
cctgacgacttttgataaa

SEQ ID NO: 662958 - DNA, 19 bp, Mus musculus
  siRNA target sequence for Reck (NM_016678.1,2092-2110).
ctgacgacttttgataaat

SEQ ID NO: 662959 - DNA, 19 bp, Mus musculus
  siRNA target sequence for Reck (NM_016678.1,2094-2112).
gacgacttttgataaattt

SEQ ID NO: 662960 - DNA, 19 bp, Mus musculus
  siRNA target sequence for Reck (NM_016678.1,2113-2131).
ggatgtagccaatatgagt

SEQ ID NO: 662961 - DNA, 19 bp, Mus musculus
  siRNA target sequence for Reck (NM_016678.1,2229-2247).
gaaaagcctgtcttacaga

SEQ ID NO: 662962 - DNA, 19 bp, Mus musculus
  siRNA target sequence for Reck (NM_016678.1,2338-2356).
cgtgtggccgtggattact

SEQ ID NO: 662963 - DNA, 19 bp, Mus musculus
  siRNA target sequence for Reck (NM_016678.1,2339-2357).
gtgtggccgtggattacta

SEQ ID NO: 662964 - DNA, 19 bp, Mus musculus
  siRNA target sequence for Reck (NM_016678.1,2377-2395).
ggcgtcctctcggaataca

SEQ ID NO: 662965 - DNA, 19 bp, Mus musculus
  siRNA target sequence for Reck (NM_016678.1,2379-2397).
cgtcctctcggaatacagt

SEQ ID NO: 662966 - DNA, 19 bp, Mus musculus
  siRNA target sequence for Reck (NM_016678.1,2494-2512).
gggatgttacgggtattat

SEQ ID NO: 662967 - DNA, 19 bp, Mus musculus
  siRNA target sequence for Reck (NM_016678.1,2504-2522).
gggtattatttgacaaaga

SEQ ID NO: 662968 - DNA, 19 bp, Mus musculus
  siRNA target sequence for Reck (NM_016678.1,2567-2585).
ccgttgtggagattcttca

SEQ ID NO: 662969 - DNA, 19 bp, Mus musculus
  siRNA target sequence for Reck (NM_016678.1,2620-2638).
gacgtgtttggatacttga

SEQ ID NO: 662970 - DNA, 19 bp, Mus musculus
  siRNA target sequence for Reck (NM_016678.1,2698-2716).
cagattgaggcctgcaata

SEQ ID NO: 662971 - DNA, 19 bp, Mus musculus
  siRNA target sequence for Serpina10 (NM_144834.2,112-130).
ggctggtgactagtttcaa

SEQ ID NO: 662972 - DNA, 19 bp, Mus musculus
  siRNA target sequence for Serpina10 (NM_144834.2,113-131).
gctggtgactagtttcaat

SEQ ID NO: 662973 - DNA, 19 bp, Mus musculus
  siRNA target sequence for Serpina10 (NM_144834.2,117-135).
gtgactagtttcaatctca

SEQ ID NO: 662974 - DNA, 19 bp, Mus musculus
  siRNA target sequence for Serpina10 (NM_144834.2,170-188).
gtctcaggattatgagaat

SEQ ID NO: 662975 - DNA, 19 bp, Mus musculus
  siRNA target sequence for Serpina10 (NM_144834.2,172-190).
ctcaggattatgagaatca

SEQ ID NO: 662976 - DNA, 19 bp, Mus musculus
  siRNA target sequence for Serpina10 (NM_144834.2,174-192).
caggattatgagaatcaaa

SEQ ID NO: 662977 - DNA, 19 bp, Mus musculus
  siRNA target sequence for Serpina10 (NM_144834.2,258-276).
ggcaaggatgaggaatatt

SEQ ID NO: 662978 - DNA, 19 bp, Mus musculus
  siRNA target sequence for Serpina10 (NM_144834.2,297-315).
ctctccaatgagacttcaa

SEQ ID NO: 662979 - DNA, 19 bp, Mus musculus
  siRNA target sequence for Serpina10 (NM_144834.2,322-340).
ggttcaacctgcttcgaaa

SEQ ID NO: 662980 - DNA, 19 bp, Mus musculus
  siRNA target sequence for Serpina10 (NM_144834.2,352-370).
ggcacgacggcaatgtgat

SEQ ID NO: 662981 - DNA, 19 bp, Mus musculus
  siRNA target sequence for Serpina10 (NM_144834.2,357-375).
gacggcaatgtgatcttct

SEQ ID NO: 662982 - DNA, 19 bp, Mus musculus
  siRNA target sequence for Serpina10 (NM_144834.2,575-593).
catccacaaggactttgat

SEQ ID NO: 662983 - DNA, 19 bp, Mus musculus
  siRNA target sequence for Serpina10 (NM_144834.2,611-629).
caatctctccaagaagtat

SEQ ID NO: 662984 - DNA, 19 bp, Mus musculus
  siRNA target sequence for Serpina10 (NM_144834.2,741-759).
gagattaatcctgaaacaa

SEQ ID NO: 662985 - DNA, 19 bp, Mus musculus
  siRNA target sequence for Serpina10 (NM_144834.2,771-789).
gtggactacgtcttgttca

SEQ ID NO: 662986 - DNA, 19 bp, Mus musculus
  siRNA target sequence for Serpina10 (NM_144834.2,773-791).
ggactacgtcttgttcaaa

SEQ ID NO: 662987 - DNA, 19 bp, Mus musculus
  siRNA target sequence for Serpina10 (NM_144834.2,849-867).
gacaagtacagggcaatta

SEQ ID NO: 662988 - DNA, 19 bp, Mus musculus
  siRNA target sequence for Serpina10 (NM_144834.2,881-899).
gtaccgggaagggaacttt

SEQ ID NO: 662989 - DNA, 19 bp, Mus musculus
  siRNA target sequence for Serpina10 (NM_144834.2,885-903).
cgggaagggaactttacct

SEQ ID NO: 662990 - DNA, 19 bp, Mus musculus
  siRNA target sequence for Serpina10 (NM_144834.2,901-919).
cctccacctttgacaagaa

SEQ ID NO: 662991 - DNA, 19 bp, Mus musculus
  siRNA target sequence for Serpina10 (NM_144834.2,984-1002).
gagaagacaggtgattact

SEQ ID NO: 662992 - DNA, 19 bp, Mus musculus
  siRNA target sequence for Serpina10 (NM_144834.2,1208-1226).
ggtgtccagggttttacaa

SEQ ID NO: 662993 - DNA, 19 bp, Mus musculus
  siRNA target sequence for Serpina10 (NM_144834.2,1326-1344).
cggccttttcacttcatca

SEQ ID NO: 662994 - DNA, 19 bp, Mus musculus
  siRNA target sequence for Serpina12 (NM_026535.1,654-672).
cctggctaagaatgtgtat

SEQ ID NO: 662995 - DNA, 19 bp, Mus musculus
  siRNA target sequence for Serpina12 (NM_026535.1,791-809).
caggcaccgtgatgattct

SEQ ID NO: 662996 - DNA, 19 bp, Mus musculus
  siRNA target sequence for Serpina12 (NM_026535.1,793-811).
ggcaccgtgatgattctca

SEQ ID NO: 662997 - DNA, 19 bp, Mus musculus
  siRNA target sequence for Serpina12 (NM_026535.1,808-826).
ctcacaaattatatttact

SEQ ID NO: 662998 - DNA, 19 bp, Mus musculus
  siRNA target sequence for Serpina12 (NM_026535.1,836-854).
ggtggcagtatgaattcga

SEQ ID NO: 662999 - DNA, 19 bp, Mus musculus
  siRNA target sequence for Serpina12 (NM_026535.1,910-928).
gtacccatgatgttccaaa

SEQ ID NO: 663000 - DNA, 19 bp, Mus musculus
  siRNA target sequence for Serpina12 (NM_026535.1,965-983).
cctgcaccatcttggaaat

SEQ ID NO: 663001 - DNA, 19 bp, Mus musculus
  siRNA target sequence for Serpina12 (NM_026535.1,1055-1073).
ggttgcaggcagacatctt

SEQ ID NO: 663002 - DNA, 19 bp, Mus musculus
  siRNA target sequence for Serpina12 (NM_026535.1,1056-1074).
gttgcaggcagacatcttt

SEQ ID NO: 663003 - DNA, 19 bp, Mus musculus
  siRNA target sequence for Serpina12 (NM_026535.1,1129-1147).
ctccgcatctcgtctactt

SEQ ID NO: 663004 - DNA, 19 bp, Mus musculus
  siRNA target sequence for Serpina12 (NM_026535.1,1132-1150).
cgcatctcgtctacttaca

SEQ ID NO: 663005 - DNA, 19 bp, Mus musculus
  siRNA target sequence for Serpina12 (NM_026535.1,1133-1151).
gcatctcgtctacttacaa

SEQ ID NO: 663006 - DNA, 19 bp, Mus musculus
  siRNA target sequence for Serpina12 (NM_026535.1,1139-1157).
cgtctacttacaacatgaa

SEQ ID NO: 663007 - DNA, 19 bp, Mus musculus
  siRNA target sequence for Serpina12 (NM_026535.1,1207-1225).
gacctcacccggatctcat

SEQ ID NO: 663008 - DNA, 19 bp, Mus musculus
  siRNA target sequence for Serpina12 (NM_026535.1,1333-1351).
gagaccccacgacatatga

SEQ ID NO: 663009 - DNA, 19 bp, Mus musculus
  siRNA target sequence for Serpina12 (NM_026535.1,1365-1383).
cttcctcatgatgatctat

SEQ ID NO: 663010 - DNA, 19 bp, Mus musculus
  siRNA target sequence for Serpina12 (NM_026535.1,1369-1387).
ctcatgatgatctatgaga

SEQ ID NO: 663011 - DNA, 19 bp, Mus musculus
  siRNA target sequence for Serpina1a (NM_009243.1,1150-1168).
caaatggttcctatgtcta

SEQ ID NO: 663012 - DNA, 19 bp, Mus musculus
  siRNA target sequence for Serpina1e (NM_009247.1,1151-1169).
gtcttacaaggcggttttt

SEQ ID NO: 663013 - DNA, 19 bp, Mus musculus
  siRNA target sequence for Serpina3c (NM_008458.1,127-145).
gctctggggctcgtgataa

SEQ ID NO: 663014 - DNA, 19 bp, Mus musculus
  siRNA target sequence for Serpina3c (NM_008458.1,1325-1343).
ctctctttatagccaaaat

SEQ ID NO: 663015 - DNA, 19 bp, Mus musculus
  siRNA target sequence for Serpina5 (NM_172953.1,275-293).
gggacctcccagtagcaaa

SEQ ID NO: 663016 - DNA, 19 bp, Mus musculus
  siRNA target sequence for Serpina5 (NM_172953.1,286-304).
gtagcaaagactttgcttt

SEQ ID NO: 663017 - DNA, 19 bp, Mus musculus
  siRNA target sequence for Serpina5 (NM_172953.1,362-380).
cttgagcgtgtctatgagt

SEQ ID NO: 663018 - DNA, 19 bp, Mus musculus
  siRNA target sequence for Serpina5 (NM_172953.1,542-560).
gggcagtgccctttttaaa

SEQ ID NO: 663019 - DNA, 19 bp, Mus musculus
  siRNA target sequence for Serpina5 (NM_172953.1,598-616).
ccatgaagacactgtacat

SEQ ID NO: 663020 - DNA, 19 bp, Mus musculus
  siRNA target sequence for Serpina5 (NM_172953.1,662-680).
gaagcagatcaacaactat

SEQ ID NO: 663021 - DNA, 19 bp, Mus musculus
  siRNA target sequence for Serpina5 (NM_172953.1,692-710).
gaccaagggcaagattgta

SEQ ID NO: 663022 - DNA, 19 bp, Mus musculus
  siRNA target sequence for Serpina5 (NM_172953.1,733-751).
gcacccatgtcatgatagt

SEQ ID NO: 663023 - DNA, 19 bp, Mus musculus
  siRNA target sequence for Serpina5 (NM_172953.1,741-759).
gtcatgatagtggtaaatt

SEQ ID NO: 663024 - DNA, 19 bp, Mus musculus
  siRNA target sequence for Serpina5 (NM_172953.1,750-768).
gtggtaaattacatcttct

SEQ ID NO: 663025 - DNA, 19 bp, Mus musculus
  siRNA target sequence for Serpina5 (NM_172953.1,789-807).
gccttcagtgagacaaaca

SEQ ID NO: 663026 - DNA, 19 bp, Mus musculus
  siRNA target sequence for Serpina5 (NM_172953.1,857-875).
catgatgaaccgtgaagat

SEQ ID NO: 663027 - DNA, 19 bp, Mus musculus
  siRNA target sequence for Serpina5 (NM_172953.1,867-885).
cgtgaagatgggtattcct

SEQ ID NO: 663028 - DNA, 19 bp, Mus musculus
  siRNA target sequence for Serpina5 (NM_172953.1,883-901).
cctactacctggaccaaaa

SEQ ID NO: 663029 - DNA, 19 bp, Mus musculus
  siRNA target sequence for Serpina5 (NM_172953.1,937-955).
gcaatgccatcgctctatt

SEQ ID NO: 663030 - DNA, 19 bp, Mus musculus
  siRNA target sequence for Serpina5 (NM_172953.1,938-956).
caatgccatcgctctattt

SEQ ID NO: 663031 - DNA, 19 bp, Mus musculus
  siRNA target sequence for Serpina5 (NM_172953.1,943-961).
ccatcgctctatttattct

SEQ ID NO: 663032 - DNA, 19 bp, Mus musculus
  siRNA target sequence for Serpina5 (NM_172953.1,1037-1055).
caccaaaagacgcttagat

SEQ ID NO: 663033 - DNA, 19 bp, Mus musculus
  siRNA target sequence for Serpina5 (NM_172953.1,1039-1057).
ccaaaagacgcttagatct

SEQ ID NO: 663034 - DNA, 19 bp, Mus musculus
  siRNA target sequence for Serpina5 (NM_172953.1,1040-1058).
caaaagacgcttagatctt

SEQ ID NO: 663035 - DNA, 19 bp, Mus musculus
  siRNA target sequence for Serpina5 (NM_172953.1,1045-1063).
gacgcttagatctttacct

SEQ ID NO: 663036 - DNA, 19 bp, Mus musculus
  siRNA target sequence for Serpina5 (NM_172953.1,1076-1094).
cattgaggctacctacaaa

SEQ ID NO: 663037 - DNA, 19 bp, Mus musculus
  siRNA target sequence for Serpina5 (NM_172953.1,1160-1178).
cattactgaccataccaat

SEQ ID NO: 663038 - DNA, 19 bp, Mus musculus
  siRNA target sequence for Serpina5 (NM_172953.1,1167-1185).
gaccataccaatatcaagt

SEQ ID NO: 663039 - DNA, 19 bp, Mus musculus
  siRNA target sequence for Serpina5 (NM_172953.1,1170-1188).
cataccaatatcaagttgt

SEQ ID NO: 663040 - DNA, 19 bp, Mus musculus
  siRNA target sequence for Serpina5 (NM_172953.1,1191-1209).
gagatggtgcacaaatcca

SEQ ID NO: 663041 - DNA, 19 bp, Mus musculus
  siRNA target sequence for Serpina5 (NM_172953.1,1254-1272).
ggagccatcttcacattca

SEQ ID NO: 663042 - DNA, 19 bp, Mus musculus
  siRNA target sequence for Serpina5 (NM_172953.1,1282-1300).
ggccgagctccctgaagat

SEQ ID NO: 663043 - DNA, 19 bp, Mus musculus
  siRNA target sequence for Serpina5 (NM_172953.1,1335-1353).
gaggattcacatatacttt

SEQ ID NO: 663044 - DNA, 19 bp, Mus musculus
  siRNA target sequence for Serpina9 (NM_027997.1,87-105).
ccgagttctcctattggtt

SEQ ID NO: 663045 - DNA, 19 bp, Mus musculus
  siRNA target sequence for Serpina9 (NM_027997.1,118-136).
ccaatattctgcatgttgt

SEQ ID NO: 663046 - DNA, 19 bp, Mus musculus
  siRNA target sequence for Serpina9 (NM_027997.1,166-184).
caccttccctctatgaaga

SEQ ID NO: 663047 - DNA, 19 bp, Mus musculus
  siRNA target sequence for Serpinb4 (NM_009126.1,705-723).
gaaacaaaacatcgaattt

SEQ ID NO: 663048 - DNA, 19 bp, Mus musculus
  siRNA target sequence for Serpinb5 (NM_009257.2,123-141).
gacttgttcaaacaactat

SEQ ID NO: 663049 - DNA, 19 bp, Mus musculus
  siRNA target sequence for Serpinb5 (NM_009257.2,221-239).
caaaggcgacacagcaaat

SEQ ID NO: 663050 - DNA, 19 bp, Mus musculus
  siRNA target sequence for Serpinb5 (NM_009257.2,226-244).
gcgacacagcaaatgaaat

SEQ ID NO: 663051 - DNA, 19 bp, Mus musculus
  siRNA target sequence for Serpinb5 (NM_009257.2,227-245).
cgacacagcaaatgaaatt

SEQ ID NO: 663052 - DNA, 19 bp, Mus musculus
  siRNA target sequence for Serpinb5 (NM_009257.2,247-265).
gacaggtccttcattttga

SEQ ID NO: 663053 - DNA, 19 bp, Mus musculus
  siRNA target sequence for Serpinb5 (NM_009257.2,249-267).
caggtccttcattttgaga

SEQ ID NO: 663054 - DNA, 19 bp, Mus musculus
  siRNA target sequence for Serpinb5 (NM_009257.2,283-301).
cctttgggtttcaaacagt

SEQ ID NO: 663055 - DNA, 19 bp, Mus musculus
  siRNA target sequence for Serpinb5 (NM_009257.2,300-318).
gtcacttctgatgttaata

SEQ ID NO: 663056 - DNA, 19 bp, Mus musculus
  siRNA target sequence for Serpinb5 (NM_009257.2,353-371).
gcgactctacatagacaaa

SEQ ID NO: 663057 - DNA, 19 bp, Mus musculus
  siRNA target sequence for Serpinb5 (NM_009257.2,354-372).
cgactctacatagacaaat

SEQ ID NO: 663058 - DNA, 19 bp, Mus musculus
  siRNA target sequence for Serpinb5 (NM_009257.2,375-393).
ctgaacccttctacagaat

SEQ ID NO: 663059 - DNA, 19 bp, Mus musculus
  siRNA target sequence for Serpinb5 (NM_009257.2,412-430).
gaccatatgcaaaagaatt

SEQ ID NO: 663060 - DNA, 19 bp, Mus musculus
  siRNA target sequence for Serpinb5 (NM_009257.2,462-480).
gaaacgaaaggtcaaatta

SEQ ID NO: 663061 - DNA, 19 bp, Mus musculus
  siRNA target sequence for Serpinb5 (NM_009257.2,474-492).
caaattaacagctccatta

SEQ ID NO: 663062 - DNA, 19 bp, Mus musculus
  siRNA target sequence for Serpinb5 (NM_009257.2,507-525).
ggccactttgaggacattt

SEQ ID NO: 663063 - DNA, 19 bp, Mus musculus
  siRNA target sequence for Serpinb5 (NM_009257.2,508-526).
gccactttgaggacatttt

SEQ ID NO: 663064 - DNA, 19 bp, Mus musculus
  siRNA target sequence for Serpinb5 (NM_009257.2,510-528).
cactttgaggacattttgt

SEQ ID NO: 663065 - DNA, 19 bp, Mus musculus
  siRNA target sequence for Serpinb5 (NM_009257.2,527-545).
gtcagagaacagtataagt

SEQ ID NO: 663066 - DNA, 19 bp, Mus musculus
  siRNA target sequence for Serpinb5 (NM_009257.2,529-547).
cagagaacagtataagtga

SEQ ID NO: 663067 - DNA, 19 bp, Mus musculus
  siRNA target sequence for Serpinb5 (NM_009257.2,544-562).
gtgaccagaccaaaatcct

SEQ ID NO: 663068 - DNA, 19 bp, Mus musculus
  siRNA target sequence for Serpinb5 (NM_009257.2,566-584).
ggttaatgctgcctacttt

SEQ ID NO: 663069 - DNA, 19 bp, Mus musculus
  siRNA target sequence for Serpinb5 (NM_009257.2,602-620).
gaaatttccggaatcagaa

SEQ ID NO: 663070 - DNA, 19 bp, Mus musculus
  siRNA target sequence for Serpinb5 (NM_009257.2,654-672).
gacaccaaacccgtacaaa

SEQ ID NO: 663071 - DNA, 19 bp, Mus musculus
  siRNA target sequence for Serpinb5 (NM_009257.2,658-676).
ccaaacccgtacaaatgat

SEQ ID NO: 663072 - DNA, 19 bp, Mus musculus
  siRNA target sequence for Serpinb5 (NM_009257.2,664-682).
ccgtacaaatgatgaatct

SEQ ID NO: 663073 - DNA, 19 bp, Mus musculus
  siRNA target sequence for Serpinb5 (NM_009257.2,665-683).
cgtacaaatgatgaatctt

SEQ ID NO: 663074 - DNA, 19 bp, Mus musculus
  siRNA target sequence for Serpinb5 (NM_009257.2,695-713).
ctgcttgggtaacattgat

SEQ ID NO: 663075 - DNA, 19 bp, Mus musculus
  siRNA target sequence for Serpinb5 (NM_009257.2,716-734).
catcagctgtaagatcata

SEQ ID NO: 663076 - DNA, 19 bp, Mus musculus
  siRNA target sequence for Serpinb5 (NM_009257.2,721-739).
gctgtaagatcatagaact

SEQ ID NO: 663077 - DNA, 19 bp, Mus musculus
  siRNA target sequence for Serpinb5 (NM_009257.2,722-740).
ctgtaagatcatagaactt

SEQ ID NO: 663078 - DNA, 19 bp, Mus musculus
  siRNA target sequence for Serpinb5 (NM_009257.2,952-970).
gcctagggctgaaaagtct

SEQ ID NO: 663079 - DNA, 19 bp, Mus musculus
  siRNA target sequence for Serpinb5 (NM_009257.2,959-977).
gctgaaaagtctcttcaat

SEQ ID NO: 663080 - DNA, 19 bp, Mus musculus
  siRNA target sequence for Serpinb5 (NM_009257.2,1020-1038).
gtgtccctgtcaaatgtga

SEQ ID NO: 663081 - DNA, 19 bp, Mus musculus
  siRNA target sequence for Serpinb5 (NM_009257.2,1022-1040).
gtccctgtcaaatgtgatt

SEQ ID NO: 663082 - DNA, 19 bp, Mus musculus
  siRNA target sequence for Serpinb5 (NM_009257.2,1024-1042).
ccctgtcaaatgtgattca

SEQ ID NO: 663083 - DNA, 19 bp, Mus musculus
  siRNA target sequence for Serpinb5 (NM_009257.2,1026-1044).
ctgtcaaatgtgattcata

SEQ ID NO: 663084 - DNA, 19 bp, Mus musculus
  siRNA target sequence for Serpinb5 (NM_009257.2,1028-1046).
gtcaaatgtgattcataga

SEQ ID NO: 663085 - DNA, 19 bp, Mus musculus
  siRNA target sequence for Serpinb5 (NM_009257.2,1091-1109).
gccagggtcccggatctta

SEQ ID NO: 663086 - DNA, 19 bp, Mus musculus
  siRNA target sequence for Serpinb5 (NM_009257.2,1093-1111).
cagggtcccggatcttaca

SEQ ID NO: 663087 - DNA, 19 bp, Mus musculus
  siRNA target sequence for Serpinb5 (NM_009257.2,1112-1130).
gcacaaggatgaattcaat

SEQ ID NO: 663088 - DNA, 19 bp, Mus musculus
  siRNA target sequence for Serpinb5 (NM_009257.2,1127-1145).
caatgctgaccatccattt

SEQ ID NO: 663089 - DNA, 19 bp, Mus musculus
  siRNA target sequence for Serpinb5 (NM_009257.2,1132-1150).
ctgaccatccatttattta

SEQ ID NO: 663090 - DNA, 19 bp, Mus musculus
  siRNA target sequence for Serpinb5 (NM_009257.2,1154-1172).
cattagacacaacaaaact

SEQ ID NO: 663091 - DNA, 19 bp, Mus musculus
  siRNA target sequence for Serpinb6a (NM_009254.2,547-565).
ggataagacttgtgatctt

SEQ ID NO: 663092 - DNA, 19 bp, Mus musculus
  siRNA target sequence for Serpinb6a (NM_009254.2,714-732).
caggtacagtgaattctga

SEQ ID NO: 663093 - DNA, 19 bp, Mus musculus
  siRNA target sequence for Serpinb6a (NM_009254.2,735-753).
catcgctagtccttgtgaa

SEQ ID NO: 663094 - DNA, 19 bp, Mus musculus
  siRNA target sequence for Serpinb6a (NM_009254.2,1001-1019).
gtaacttacgagaaattta

SEQ ID NO: 663095 - DNA, 19 bp, Mus musculus
  siRNA target sequence for Serpinb6a (NM_009254.2,1275-1293).
cggtgaggtgcatgagatt

SEQ ID NO: 663096 - DNA, 19 bp, Mus musculus
  siRNA target sequence for Serpinb6b (NM_011454.1,120-138).
gtacttttctcacctataa

SEQ ID NO: 663097 - DNA, 19 bp, Mus musculus
  siRNA target sequence for Serpinb6b (NM_011454.1,254-272).
ccagggattccaatcactt

SEQ ID NO: 663098 - DNA, 19 bp, Mus musculus
  siRNA target sequence for Serpinb6b (NM_011454.1,495-513).
ctatcttcgggttcagtaa

SEQ ID NO: 663099 - DNA, 19 bp, Mus musculus
  siRNA target sequence for Serpinb6b (NM_011454.1,785-803).
ggagataacttataagaaa

SEQ ID NO: 663100 - DNA, 19 bp, Mus musculus
  siRNA target sequence for Serpinb6b (NM_011454.1,948-966).
gacttttcaggaatagcat

SEQ ID NO: 663101 - DNA, 19 bp, Mus musculus
  siRNA target sequence for Serpinb6b (NM_011454.1,1045-1063).
ctgccactgcagccaatat

SEQ ID NO: 663102 - DNA, 19 bp, Mus musculus
  siRNA target sequence for Serpinb6b (NM_011454.1,1049-1067).
cactgcagccaatataggt

SEQ ID NO: 663103 - DNA, 19 bp, Mus musculus
  siRNA target sequence for Serpinb6b (NM_011454.1,1051-1069).
ctgcagccaatataggttt

SEQ ID NO: 663104 - DNA, 19 bp, Mus musculus
  siRNA target sequence for Serpinb6b (NM_011454.1,1056-1074).
gccaatataggttttaggt

SEQ ID NO: 663105 - DNA, 19 bp, Mus musculus
  siRNA target sequence for Serpinb6b (NM_011454.1,1132-1150).
ggaccagtgggattgtgtt

SEQ ID NO: 663106 - DNA, 19 bp, Mus musculus
  siRNA target sequence for Serpinb6c (NM_148942.1,120-138).
cgctggtcatggtcttatt

SEQ ID NO: 663107 - DNA, 19 bp, Mus musculus
  siRNA target sequence for Serpinb6c (NM_148942.1,154-172).
cactgcgatccagataact

SEQ ID NO: 663108 - DNA, 19 bp, Mus musculus
  siRNA target sequence for Serpinb6c (NM_148942.1,156-174).
ctgcgatccagataactca

SEQ ID NO: 663109 - DNA, 19 bp, Mus musculus
  siRNA target sequence for Serpinb6c (NM_148942.1,473-491).
ggtacaatacattcaaaca

SEQ ID NO: 663110 - DNA, 19 bp, Mus musculus
  siRNA target sequence for Serpinb6c (NM_148942.1,1067-1085).
cggtccaccccttgtttct

SEQ ID NO: 663111 - DNA, 19 bp, Mus musculus
  siRNA target sequence for Serpinb7 (NM_027548.1,74-92).
ccttgctgcagcaaatgca

SEQ ID NO: 663112 - DNA, 19 bp, Mus musculus
  siRNA target sequence for Serpinb7 (NM_027548.1,93-111).
gaatttggcttcgacttat

SEQ ID NO: 663113 - DNA, 19 bp, Mus musculus
  siRNA target sequence for Serpinb7 (NM_027548.1,122-140).
ggatagtagccaaggaaat

SEQ ID NO: 663114 - DNA, 19 bp, Mus musculus
  siRNA target sequence for Serpinb7 (NM_027548.1,214-232).
gtgcacgtcagattgacaa

SEQ ID NO: 663115 - DNA, 19 bp, Mus musculus
  siRNA target sequence for Serpinb7 (NM_027548.1,228-246).
gacaaggcactgcacttta

SEQ ID NO: 663116 - DNA, 19 bp, Mus musculus
  siRNA target sequence for Serpinb7 (NM_027548.1,242-260).
ctttaacataccatcaaga

SEQ ID NO: 663117 - DNA, 19 bp, Mus musculus
  siRNA target sequence for Serpinb7 (NM_027548.1,265-283).
gaaactcatctaataatca

SEQ ID NO: 663118 - DNA, 19 bp, Mus musculus
  siRNA target sequence for Serpinb7 (NM_027548.1,285-303).
ccaggacttcagtatcaat

SEQ ID NO: 663119 - DNA, 19 bp, Mus musculus
  siRNA target sequence for Serpinb7 (NM_027548.1,286-304).
caggacttcagtatcaatt

SEQ ID NO: 663120 - DNA, 19 bp, Mus musculus
  siRNA target sequence for Serpinb7 (NM_027548.1,288-306).
ggacttcagtatcaattga

SEQ ID NO: 663121 - DNA, 19 bp, Mus musculus
  siRNA target sequence for Serpinb7 (NM_027548.1,289-307).
gacttcagtatcaattgaa

SEQ ID NO: 663122 - DNA, 19 bp, Mus musculus
  siRNA target sequence for Serpinb7 (NM_027548.1,291-309).
cttcagtatcaattgaaaa

SEQ ID NO: 663123 - DNA, 19 bp, Mus musculus
  siRNA target sequence for Serpinb7 (NM_027548.1,296-314).
gtatcaattgaaaagagtt

SEQ ID NO: 663124 - DNA, 19 bp, Mus musculus
  siRNA target sequence for Serpinb7 (NM_027548.1,331-349).
catctcataaggattatga

SEQ ID NO: 663125 - DNA, 19 bp, Mus musculus
  siRNA target sequence for Serpinb7 (NM_027548.1,334-352).
ctcataaggattatgaact

SEQ ID NO: 663126 - DNA, 19 bp, Mus musculus
  siRNA target sequence for Serpinb7 (NM_027548.1,384-402).
gtctatgactttcataaga

SEQ ID NO: 663127 - DNA, 19 bp, Mus musculus
  siRNA target sequence for Serpinb7 (NM_027548.1,411-429).
gagtgtgctgaaaacttat

SEQ ID NO: 663128 - DNA, 19 bp, Mus musculus
  siRNA target sequence for Serpinb7 (NM_027548.1,448-466).
gagttgacttcacaaatga

SEQ ID NO: 663129 - DNA, 19 bp, Mus musculus
  siRNA target sequence for Serpinb7 (NM_027548.1,458-476).
cacaaatgatgtacaagat

SEQ ID NO: 663130 - DNA, 19 bp, Mus musculus
  siRNA target sequence for Serpinb7 (NM_027548.1,615-633).
gccttcaccaagactgata

SEQ ID NO: 663131 - DNA, 19 bp, Mus musculus
  siRNA target sequence for Serpinb7 (NM_027548.1,636-654).
ctcagttgccgttttaggt

SEQ ID NO: 663132 - DNA, 19 bp, Mus musculus
  siRNA target sequence for Serpinb7 (NM_027548.1,659-677).
cacgtgtcctggaaaagta

SEQ ID NO: 663133 - DNA, 19 bp, Mus musculus
  siRNA target sequence for Serpinb7 (NM_027548.1,661-679).
cgtgtcctggaaaagtagt

SEQ ID NO: 663134 - DNA, 19 bp, Mus musculus
  siRNA target sequence for Serpinb7 (NM_027548.1,669-687).
ggaaaagtagttaatatga

SEQ ID NO: 663135 - DNA, 19 bp, Mus musculus
  siRNA target sequence for Serpinb7 (NM_027548.1,670-688).
gaaaagtagttaatatgat

SEQ ID NO: 663136 - DNA, 19 bp, Mus musculus
  siRNA target sequence for Serpinb7 (NM_027548.1,693-711).
caagaacggcggttcaatt

SEQ ID NO: 663137 - DNA, 19 bp, Mus musculus
  siRNA target sequence for Serpinb7 (NM_027548.1,696-714).
gaacggcggttcaatttgt

SEQ ID NO: 663138 - DNA, 19 bp, Mus musculus
  siRNA target sequence for Serpinb7 (NM_027548.1,699-717).
cggcggttcaatttgtcta

SEQ ID NO: 663139 - DNA, 19 bp, Mus musculus
  siRNA target sequence for Serpinb7 (NM_027548.1,704-722).
gttcaatttgtctaccatt

SEQ ID NO: 663140 - DNA, 19 bp, Mus musculus
  siRNA target sequence for Serpinb7 (NM_027548.1,730-748).
caccaatgcaggttcttga

SEQ ID NO: 663141 - DNA, 19 bp, Mus musculus
  siRNA target sequence for Serpinb7 (NM_027548.1,740-758).
ggttcttgagctccaatat

SEQ ID NO: 663142 - DNA, 19 bp, Mus musculus
  siRNA target sequence for Serpinb7 (NM_027548.1,762-780).
ggtggcataagcatgtaca

SEQ ID NO: 663143 - DNA, 19 bp, Mus musculus
  siRNA target sequence for Serpinb7 (NM_027548.1,763-781).
gtggcataagcatgtacat

SEQ ID NO: 663144 - DNA, 19 bp, Mus musculus
  siRNA target sequence for Serpinb7 (NM_027548.1,766-784).
gcataagcatgtacattat

SEQ ID NO: 663145 - DNA, 19 bp, Mus musculus
  siRNA target sequence for Serpinb7 (NM_027548.1,792-810).
gaggatggcctatgtgaaa

SEQ ID NO: 663146 - DNA, 19 bp, Mus musculus
  siRNA target sequence for Serpinb7 (NM_027548.1,847-865).
ggaccaataggaggaaaat

SEQ ID NO: 663147 - DNA, 19 bp, Mus musculus
  siRNA target sequence for Serpinb7 (NM_027548.1,928-946).
cgcaccacttgaaatcctt

SEQ ID NO: 663148 - DNA, 19 bp, Mus musculus
  siRNA target sequence for Serpinb7 (NM_027548.1,938-956).
gaaatccttaggcttgaaa

SEQ ID NO: 663149 - DNA, 19 bp, Mus musculus
  siRNA target sequence for Serpinb7 (NM_027548.1,943-961).
ccttaggcttgaaagatat

SEQ ID NO: 663150 - DNA, 19 bp, Mus musculus
  siRNA target sequence for Serpinb7 (NM_027548.1,1002-1020).
ggaggtcgtctctacgtat

SEQ ID NO: 663151 - DNA, 19 bp, Mus musculus
  siRNA target sequence for Serpinb7 (NM_027548.1,1005-1023).
ggtcgtctctacgtatcaa

SEQ ID NO: 663152 - DNA, 19 bp, Mus musculus
  siRNA target sequence for Serpinb7 (NM_027548.1,1006-1024).
gtcgtctctacgtatcaaa

SEQ ID NO: 663153 - DNA, 19 bp, Mus musculus
  siRNA target sequence for Serpinb7 (NM_027548.1,1011-1029).
ctctacgtatcaaagctaa

SEQ ID NO: 663154 - DNA, 19 bp, Mus musculus
  siRNA target sequence for Serpinb7 (NM_027548.1,1077-1095).
gctgccacagaaaataaca

SEQ ID NO: 663155 - DNA, 19 bp, Mus musculus
  siRNA target sequence for Serpinb7 (NM_027548.1,1084-1102).
cagaaaataacattgttga

SEQ ID NO: 663156 - DNA, 19 bp, Mus musculus
  siRNA target sequence for Serpinb7 (NM_027548.1,1144-1162).
cctttctgtttgtcatcaa

SEQ ID NO: 663157 - DNA, 19 bp, Mus musculus
  siRNA target sequence for Serpinb9b (NM_011452.1,549-567).
gcaggtcaactttttcaaa

SEQ ID NO: 663158 - DNA, 19 bp, Mus musculus
  siRNA target sequence for Serpinb9b (NM_011452.1,643-661).
gcagatgactcagttaatt

SEQ ID NO: 663159 - DNA, 19 bp, Mus musculus
  siRNA target sequence for Serpinb9b (NM_011452.1,710-728).
gggcttgccagttttgcaa

SEQ ID NO: 663160 - DNA, 19 bp, Mus musculus
  siRNA target sequence for Serpinb9b (NM_011452.1,846-864).
gctgataatgccctatgaa

SEQ ID NO: 663161 - DNA, 19 bp, Mus musculus
  siRNA target sequence for Serpinb9b (NM_011452.1,1068-1086).
ggatgtcttcgaaaaagaa

SEQ ID NO: 663162 - DNA, 19 bp, Mus musculus
  siRNA target sequence for Serpinb9c (NM_011453.2,167-185).
gctctagctatgttccttt

SEQ ID NO: 663163 - DNA, 19 bp, Mus musculus
  siRNA target sequence for Serpinb9c (NM_011453.2,202-220).
caccgaaatccagatatct

SEQ ID NO: 663164 - DNA, 19 bp, Mus musculus
  siRNA target sequence for Serpinb9c (NM_011453.2,204-222).
ccgaaatccagatatctga

SEQ ID NO: 663165 - DNA, 19 bp, Mus musculus
  siRNA target sequence for Serpinb9c (NM_011453.2,219-237).
ctgaggcaattggcttaaa

SEQ ID NO: 663166 - DNA, 19 bp, Mus musculus
  siRNA target sequence for Serpinb9c (NM_011453.2,223-241).
ggcaattggcttaaacaca

SEQ ID NO: 663167 - DNA, 19 bp, Mus musculus
  siRNA target sequence for Serpinb9c (NM_011453.2,433-451).
ggaggccaggaatcacata

SEQ ID NO: 663168 - DNA, 19 bp, Mus musculus
  siRNA target sequence for Serpinb9c (NM_011453.2,434-452).
gaggccaggaatcacataa

SEQ ID NO: 663169 - DNA, 19 bp, Mus musculus
  siRNA target sequence for Serpinb9c (NM_011453.2,460-478).
ggtctgcaaaaatacaaaa

SEQ ID NO: 663170 - DNA, 19 bp, Mus musculus
  siRNA target sequence for Serpinb9c (NM_011453.2,519-537).
cagagaccaggcttgtact

SEQ ID NO: 663171 - DNA, 19 bp, Mus musculus
  siRNA target sequence for Serpinb9c (NM_011453.2,525-543).
ccaggcttgtacttgtcaa

SEQ ID NO: 663172 - DNA, 19 bp, Mus musculus
  siRNA target sequence for Serpinb9c (NM_011453.2,526-544).
caggcttgtacttgtcaat

SEQ ID NO: 663173 - DNA, 19 bp, Mus musculus
  siRNA target sequence for Serpinb9c (NM_011453.2,567-585).
ggcatcaccagtttgacat

SEQ ID NO: 663174 - DNA, 19 bp, Mus musculus
  siRNA target sequence for Serpinb9c (NM_011453.2,568-586).
gcatcaccagtttgacata

SEQ ID NO: 663175 - DNA, 19 bp, Mus musculus
  siRNA target sequence for Serpinb9c (NM_011453.2,569-587).
catcaccagtttgacataa

SEQ ID NO: 663176 - DNA, 19 bp, Mus musculus
  siRNA target sequence for Serpinb9c (NM_011453.2,572-590).
caccagtttgacataaagt

SEQ ID NO: 663177 - DNA, 19 bp, Mus musculus
  siRNA target sequence for Serpinb9c (NM_011453.2,829-847).
ctatttgaagaccactaaa

SEQ ID NO: 663178 - DNA, 19 bp, Mus musculus
  siRNA target sequence for Serpinb9c (NM_011453.2,838-856).
gaccactaaagttttggtt

SEQ ID NO: 663179 - DNA, 19 bp, Mus musculus
  siRNA target sequence for Serpinb9c (NM_011453.2,840-858).
ccactaaagttttggtttt

SEQ ID NO: 663180 - DNA, 19 bp, Mus musculus
  siRNA target sequence for Serpinb9c (NM_011453.2,1006-1024).
gtgtgttgtggaagttaat

SEQ ID NO: 663181 - DNA, 19 bp, Mus musculus
  siRNA target sequence for Serpinb9c (NM_011453.2,1050-1068).
ccacagctgatgatactgt

SEQ ID NO: 663182 - DNA, 19 bp, Mus musculus
  siRNA target sequence for Serpinb9c (NM_011453.2,1051-1069).
cacagctgatgatactgta

SEQ ID NO: 663183 - DNA, 19 bp, Mus musculus
  siRNA target sequence for Serpinb9c (NM_011453.2,1055-1073).
gctgatgatactgtatgtt

SEQ ID NO: 663184 - DNA, 19 bp, Mus musculus
  siRNA target sequence for Serpinb9d (NM_011460.1,859-877).
ggcatcgagcttcatgttt

SEQ ID NO: 663185 - DNA, 19 bp, Mus musculus
  siRNA target sequence for Serpinb9d (NM_011460.1,1092-1110).
gtgctgtttaggttcttat

SEQ ID NO: 663186 - DNA, 19 bp, Mus musculus
  siRNA target sequence for Serpinf1 (NM_011340.2,326-344).
gaacagagtctgtcattca

SEQ ID NO: 663187 - DNA, 19 bp, Mus musculus
  siRNA target sequence for Serpinf1 (NM_011340.2,465-483).
gaggaaacttcgagtcaaa

SEQ ID NO: 663188 - DNA, 19 bp, Mus musculus
  siRNA target sequence for Serpinf1 (NM_011340.2,553-571).
gtagaccttcaggagatta

SEQ ID NO: 663189 - DNA, 19 bp, Mus musculus
  siRNA target sequence for Serpinf1 (NM_011340.2,769-787).
cctaaggccatcttacgat

SEQ ID NO: 663190 - DNA, 19 bp, Mus musculus
  siRNA target sequence for Serpinf1 (NM_011340.2,829-847).
cccttgacaggaagtatga

SEQ ID NO: 663191 - DNA, 19 bp, Mus musculus
  siRNA target sequence for Serpinf1 (NM_011340.2,879-897).
ccagaacttgaccatgata

SEQ ID NO: 663192 - DNA, 19 bp, Mus musculus
  siRNA target sequence for Serpinf1 (NM_011340.2,914-932).
ctgagttcattcatgacat

SEQ ID NO: 663193 - DNA, 19 bp, Mus musculus
  siRNA target sequence for Serpinf1 (NM_011340.2,934-952).
gaccgagaactgaagacta

SEQ ID NO: 663194 - DNA, 19 bp, Mus musculus
  siRNA target sequence for Serpinf1 (NM_011340.2,1176-1194).
caccttcccgctagactat

SEQ ID NO: 663195 - DNA, 19 bp, Mus musculus
  siRNA target sequence for Serpinf1 (NM_011340.2,1178-1196).
ccttcccgctagactatca

SEQ ID NO: 663196 - DNA, 19 bp, Mus musculus
  siRNA target sequence for Serpinf1 (NM_011340.2,1184-1202).
cgctagactatcaccttaa

SEQ ID NO: 663197 - DNA, 19 bp, Mus musculus
  siRNA target sequence for Serpinf2 (NM_008878.1,192-210).
ggacaaccaggattttggt

SEQ ID NO: 663198 - DNA, 19 bp, Mus musculus
  siRNA target sequence for Serpinf2 (NM_008878.1,289-307).
gccatgatggcttttacta

SEQ ID NO: 663199 - DNA, 19 bp, Mus musculus
  siRNA target sequence for Serpinf2 (NM_008878.1,436-454).
cgagtgttgcacatgaaca

SEQ ID NO: 663200 - DNA, 19 bp, Mus musculus
  siRNA target sequence for Serpinf2 (NM_008878.1,543-561).
gaaaggatttcccatcaaa

SEQ ID NO: 663201 - DNA, 19 bp, Mus musculus
  siRNA target sequence for Serpinf2 (NM_008878.1,596-614).
gtgcgaagcccgtgaaact

SEQ ID NO: 663202 - DNA, 19 bp, Mus musculus
  siRNA target sequence for Serpinf2 (NM_008878.1,598-616).
gcgaagcccgtgaaactga

SEQ ID NO: 663203 - DNA, 19 bp, Mus musculus
  siRNA target sequence for Serpinf2 (NM_008878.1,631-649).
gaagacctggcgaacatca

SEQ ID NO: 663204 - DNA, 19 bp, Mus musculus
  siRNA target sequence for Serpinf2 (NM_008878.1,637-655).
ctggcgaacatcaaccaat

SEQ ID NO: 663205 - DNA, 19 bp, Mus musculus
  siRNA target sequence for Serpinf2 (NM_008878.1,837-855).
gatgcacgcggtgtcatat

SEQ ID NO: 663206 - DNA, 19 bp, Mus musculus
  siRNA target sequence for Serpinf2 (NM_008878.1,840-858).
gcacgcggtgtcatatcct

SEQ ID NO: 663207 - DNA, 19 bp, Mus musculus
  siRNA target sequence for Serpinf2 (NM_008878.1,907-925).
ccctttaagaacaacatga

SEQ ID NO: 663208 - DNA, 19 bp, Mus musculus
  siRNA target sequence for Serpinf2 (NM_008878.1,933-951).
ggtcgtgatgcccacttat

SEQ ID NO: 663209 - DNA, 19 bp, Mus musculus
  siRNA target sequence for Serpinf2 (NM_008878.1,1229-1247).
gcgtagccatgaatcgaat

SEQ ID NO: 663210 - DNA, 19 bp, Mus musculus
  siRNA target sequence for Serpinf2 (NM_008878.1,1469-1487).
cccgcatggaggaagacta

SEQ ID NO: 663211 - DNA, 19 bp, Mus musculus
  siRNA target sequence for Serping1 (NM_009776.1,275-293).
ccatcacaataacaaatga

SEQ ID NO: 663212 - DNA, 19 bp, Mus musculus
  siRNA target sequence for Serping1 (NM_009776.1,423-441).
cacccaggctactactgaa

SEQ ID NO: 663213 - DNA, 19 bp, Mus musculus
  siRNA target sequence for Serping1 (NM_009776.1,695-713).
gtgtccaccaagcactaaa

SEQ ID NO: 663214 - DNA, 19 bp, Mus musculus
  siRNA target sequence for Serping1 (NM_009776.1,881-899).
ctgagaacaccaaccataa

SEQ ID NO: 663215 - DNA, 19 bp, Mus musculus
  siRNA target sequence for Serping1 (NM_009776.1,883-901).
gagaacaccaaccataaga

SEQ ID NO: 663216 - DNA, 19 bp, Mus musculus
  siRNA target sequence for Serping1 (NM_009776.1,970-988).
gccaagtggaagataacat

SEQ ID NO: 663217 - DNA, 19 bp, Mus musculus
  siRNA target sequence for Serping1 (NM_009776.1,971-989).
ccaagtggaagataacatt

SEQ ID NO: 663218 - DNA, 19 bp, Mus musculus
  siRNA target sequence for Serping1 (NM_009776.1,1020-1038).
ctacaaaaactctatgatt

SEQ ID NO: 663219 - DNA, 19 bp, Mus musculus
  siRNA target sequence for Serping1 (NM_009776.1,1068-1086).
ccctgtggcccaattcgat

SEQ ID NO: 663220 - DNA, 19 bp, Mus musculus
  siRNA target sequence for Serping1 (NM_009776.1,1078-1096).
caattcgatgaccatactt

SEQ ID NO: 663221 - DNA, 19 bp, Mus musculus
  siRNA target sequence for Serping1 (NM_009776.1,1166-1184).
caaagcaccaacttaaaga

SEQ ID NO: 663222 - DNA, 19 bp, Mus musculus
  siRNA target sequence for Serping1 (NM_009776.1,1263-1281).
cctgacgatgcctcatata

SEQ ID NO: 663223 - DNA, 19 bp, Mus musculus
  siRNA target sequence for Serping1 (NM_009776.1,1264-1282).
ctgacgatgcctcatataa

SEQ ID NO: 663224 - DNA, 19 bp, Mus musculus
  siRNA target sequence for Serping1 (NM_009776.1,1273-1291).
cctcatataaaagtaaaga

SEQ ID NO: 663225 - DNA, 19 bp, Mus musculus
  siRNA target sequence for Serping1 (NM_009776.1,1368-1386).
gaccgaggacccagatctt

SEQ ID NO: 663226 - DNA, 19 bp, Mus musculus
  siRNA target sequence for Serping1 (NM_009776.1,1473-1491).
ccgaagcttacccatcttt

SEQ ID NO: 663227 - DNA, 19 bp, Mus musculus
  siRNA target sequence for Serpinh1 (NM_009825.1,266-284).
ctccttctgggcaccttat

SEQ ID NO: 663228 - DNA, 19 bp, Mus musculus
  siRNA target sequence for Serpini1 (NM_009250.1,157-175).
gttcccagatgaaaccata

SEQ ID NO: 663229 - DNA, 19 bp, Mus musculus
  siRNA target sequence for Serpini1 (NM_009250.1,183-201).
ggtcagtgaacatgtataa

SEQ ID NO: 663230 - DNA, 19 bp, Mus musculus
  siRNA target sequence for Serpini1 (NM_009250.1,210-228).
gaggcaccggggaagatga

SEQ ID NO: 663231 - DNA, 19 bp, Mus musculus
  siRNA target sequence for Serpini1 (NM_009250.1,284-302).
ggggctcaaggatctacta

SEQ ID NO: 663232 - DNA, 19 bp, Mus musculus
  siRNA target sequence for Serpini1 (NM_009250.1,325-343).
gggatatgagggtctgaaa

SEQ ID NO: 663233 - DNA, 19 bp, Mus musculus
  siRNA target sequence for Serpini1 (NM_009250.1,364-382).
cctgagggatttttctaat

SEQ ID NO: 663234 - DNA, 19 bp, Mus musculus
  siRNA target sequence for Serpini1 (NM_009250.1,393-411).
ccgaagaaaaccaatatgt

SEQ ID NO: 663235 - DNA, 19 bp, Mus musculus
  siRNA target sequence for Serpini1 (NM_009250.1,423-441).
ccaattcgctctttgtaca

SEQ ID NO: 663236 - DNA, 19 bp, Mus musculus
  siRNA target sequence for Serpini1 (NM_009250.1,478-496).
gctgaaaatgtactttaat

SEQ ID NO: 663237 - DNA, 19 bp, Mus musculus
  siRNA target sequence for Serpini1 (NM_009250.1,481-499).
gaaaatgtactttaatgca

SEQ ID NO: 663238 - DNA, 19 bp, Mus musculus
  siRNA target sequence for Serpini1 (NM_009250.1,538-556).
ggctaactccatcaataaa

SEQ ID NO: 663239 - DNA, 19 bp, Mus musculus
  siRNA target sequence for Serpini1 (NM_009250.1,539-557).
gctaactccatcaataaat

SEQ ID NO: 663240 - DNA, 19 bp, Mus musculus
  siRNA target sequence for Serpini1 (NM_009250.1,558-576).
gggtggagaattatacaaa

SEQ ID NO: 663241 - DNA, 19 bp, Mus musculus
  siRNA target sequence for Serpini1 (NM_009250.1,562-580).
ggagaattatacaaacagt

SEQ ID NO: 663242 - DNA, 19 bp, Mus musculus
  siRNA target sequence for Serpini1 (NM_009250.1,624-642).
ctaatttggccctcatcaa

SEQ ID NO: 663243 - DNA, 19 bp, Mus musculus
  siRNA target sequence for Serpini1 (NM_009250.1,634-652).
cctcatcaatgctgtatat

SEQ ID NO: 663244 - DNA, 19 bp, Mus musculus
  siRNA target sequence for Serpini1 (NM_009250.1,683-701).
cctgaaaataccagaactt

SEQ ID NO: 663245 - DNA, 19 bp, Mus musculus
  siRNA target sequence for Serpini1 (NM_009250.1,705-723).
ccttcacgaaagatgatga

SEQ ID NO: 663246 - DNA, 19 bp, Mus musculus
  siRNA target sequence for Serpini1 (NM_009250.1,706-724).
cttcacgaaagatgatgaa

SEQ ID NO: 663247 - DNA, 19 bp, Mus musculus
  siRNA target sequence for Serpini1 (NM_009250.1,709-727).
cacgaaagatgatgaaagt

SEQ ID NO: 663248 - DNA, 19 bp, Mus musculus
  siRNA target sequence for Serpini1 (NM_009250.1,726-744).
gtgaagtgcagattccaat

SEQ ID NO: 663249 - DNA, 19 bp, Mus musculus
  siRNA target sequence for Serpini1 (NM_009250.1,811-829).
ctaccaagtccttgagata

SEQ ID NO: 663250 - DNA, 19 bp, Mus musculus
  siRNA target sequence for Serpini1 (NM_009250.1,1022-1040).
gcccttggggtcactgaaa

SEQ ID NO: 663251 - DNA, 19 bp, Mus musculus
  siRNA target sequence for Serpini1 (NM_009250.1,1025-1043).
cttggggtcactgaaattt

SEQ ID NO: 663252 - DNA, 19 bp, Mus musculus
  siRNA target sequence for Serpini1 (NM_009250.1,1028-1046).
ggggtcactgaaattttca

SEQ ID NO: 663253 - DNA, 19 bp, Mus musculus
  siRNA target sequence for Serpini1 (NM_009250.1,1029-1047).
gggtcactgaaattttcat

SEQ ID NO: 663254 - DNA, 19 bp, Mus musculus
  siRNA target sequence for Serpini1 (NM_009250.1,1065-1083).
ctgccatgtcagataagaa

SEQ ID NO: 663255 - DNA, 19 bp, Mus musculus
  siRNA target sequence for Serpini1 (NM_009250.1,1114-1132).
gtcctgcattgaggttaat

SEQ ID NO: 663256 - DNA, 19 bp, Mus musculus
  siRNA target sequence for Serpini1 (NM_009250.1,1162-1180).
cggaatgattgcgattagt

SEQ ID NO: 663257 - DNA, 19 bp, Mus musculus
  siRNA target sequence for Serpini1 (NM_009250.1,1163-1181).
ggaatgattgcgattagta

SEQ ID NO: 663258 - DNA, 19 bp, Mus musculus
  siRNA target sequence for Serpini1 (NM_009250.1,1192-1210).
gctgtaccctcaggttatt

SEQ ID NO: 663259 - DNA, 19 bp, Mus musculus
  siRNA target sequence for Serpini1 (NM_009250.1,1211-1229).
gtcgaccatccatttctct

SEQ ID NO: 663260 - DNA, 19 bp, Mus musculus
  siRNA target sequence for Serpini1 (NM_009250.1,1232-1250).
cttatcaggaacaggaaat

SEQ ID NO: 663261 - DNA, 19 bp, Mus musculus
  siRNA target sequence for Serpini1 (NM_009250.1,1245-1263).
ggaaatctggcataatctt

SEQ ID NO: 663262 - DNA, 19 bp, Mus musculus
  siRNA target sequence for Serpini2 (NM_026460.1,112-130).
caagagcgactgaccaaaa

SEQ ID NO: 663263 - DNA, 19 bp, Mus musculus
  siRNA target sequence for Serpini2 (NM_026460.1,115-133).
gagcgactgaccaaaaaat

SEQ ID NO: 663264 - DNA, 19 bp, Mus musculus
  siRNA target sequence for Serpini2 (NM_026460.1,138-156).
gactttgcagtggatcttt

SEQ ID NO: 663265 - DNA, 19 bp, Mus musculus
  siRNA target sequence for Serpini2 (NM_026460.1,147-165).
gtggatctttataaagcta

SEQ ID NO: 663266 - DNA, 19 bp, Mus musculus
  siRNA target sequence for Serpini2 (NM_026460.1,149-167).
ggatctttataaagctatt

SEQ ID NO: 663267 - DNA, 19 bp, Mus musculus
  siRNA target sequence for Serpini2 (NM_026460.1,230-248).
ggtccaactaggtgcaaaa

SEQ ID NO: 663268 - DNA, 19 bp, Mus musculus
  siRNA target sequence for Serpini2 (NM_026460.1,233-251).
ccaactaggtgcaaaagga

SEQ ID NO: 663269 - DNA, 19 bp, Mus musculus
  siRNA target sequence for Serpini2 (NM_026460.1,234-252).
caactaggtgcaaaaggaa

SEQ ID NO: 663270 - DNA, 19 bp, Mus musculus
  siRNA target sequence for Serpini2 (NM_026460.1,330-348).
cttttttcagccatctcaa

SEQ ID NO: 663271 - DNA, 19 bp, Mus musculus
  siRNA target sequence for Serpini2 (NM_026460.1,457-475).
ctacaaaactggtggattt

SEQ ID NO: 663272 - DNA, 19 bp, Mus musculus
  siRNA target sequence for Serpini2 (NM_026460.1,713-731).
gttgcgagcacaatatggt

SEQ ID NO: 663273 - DNA, 19 bp, Mus musculus
  siRNA target sequence for Serpini2 (NM_026460.1,716-734).
gcgagcacaatatggttat

SEQ ID NO: 663274 - DNA, 19 bp, Mus musculus
  siRNA target sequence for Serpini2 (NM_026460.1,717-735).
cgagcacaatatggttatt

SEQ ID NO: 663275 - DNA, 19 bp, Mus musculus
  siRNA target sequence for Serpini2 (NM_026460.1,748-766).
ccatgacatgtcaagtttt

SEQ ID NO: 663276 - DNA, 19 bp, Mus musculus
  siRNA target sequence for Serpini2 (NM_026460.1,909-927).
gtcagcctccctcgattta

SEQ ID NO: 663277 - DNA, 19 bp, Mus musculus
  siRNA target sequence for Serpini2 (NM_026460.1,911-929).
cagcctccctcgatttaaa

SEQ ID NO: 663278 - DNA, 19 bp, Mus musculus
  siRNA target sequence for Serpini2 (NM_026460.1,917-935).
ccctcgatttaaaatagaa

SEQ ID NO: 663279 - DNA, 19 bp, Mus musculus
  siRNA target sequence for Serpini2 (NM_026460.1,919-937).
ctcgatttaaaatagaaca

SEQ ID NO: 663280 - DNA, 19 bp, Mus musculus
  siRNA target sequence for Serpini2 (NM_026460.1,921-939).
cgatttaaaatagaacaaa

SEQ ID NO: 663281 - DNA, 19 bp, Mus musculus
  siRNA target sequence for Serpini2 (NM_026460.1,1047-1065).
gtcatgcagaaagttttct

SEQ ID NO: 663282 - DNA, 19 bp, Mus musculus
  siRNA target sequence for Serpini2 (NM_026460.1,1096-1114).
cagcatccacaggcataaa

SEQ ID NO: 663283 - DNA, 19 bp, Mus musculus
  siRNA target sequence for Serpini2 (NM_026460.1,1098-1116).
gcatccacaggcataaaca

SEQ ID NO: 663284 - DNA, 19 bp, Mus musculus
  siRNA target sequence for Serpini2 (NM_026460.1,1132-1150).
gtttgactcagactcaatt

SEQ ID NO: 663285 - DNA, 19 bp, Mus musculus
  siRNA target sequence for Serpini2 (NM_026460.1,1184-1202).
gcacatccgaacagaatca

SEQ ID NO: 663286 - DNA, 19 bp, Mus musculus
  siRNA target sequence for Serpini2 (NM_026460.1,1187-1205).
catccgaacagaatcaatt

SEQ ID NO: 663287 - DNA, 19 bp, Mus musculus
  siRNA target sequence for Serpini2 (NM_026460.1,1191-1209).
cgaacagaatcaattttgt

SEQ ID NO: 663288 - DNA, 19 bp, Mus musculus
  siRNA target sequence for Serpini2 (NM_026460.1,1223-1241).
gacagatcctgacattcaa

SEQ ID NO: 663289 - DNA, 19 bp, Mus musculus
  siRNA target sequence for Slpi (NM_011414.1,449-467).
gaagtcctgcggcctttta

SEQ ID NO: 663290 - DNA, 19 bp, Mus musculus
  siRNA target sequence for Slpi (NM_011414.1,454-472).
cctgcggccttttaccttt

SEQ ID NO: 663291 - DNA, 19 bp, Mus musculus
  siRNA target sequence for Slpi (NM_011414.1,545-563).
cggagcctgccctgctaaa

SEQ ID NO: 663292 - DNA, 19 bp, Mus musculus
  siRNA target sequence for Slpi (NM_011414.1,546-564).
ggagcctgccctgctaaaa

SEQ ID NO: 663293 - DNA, 19 bp, Mus musculus
  siRNA target sequence for Slpi (NM_011414.1,705-723).
cctgggaggtgcgtcaaaa

SEQ ID NO: 663294 - DNA, 19 bp, Mus musculus
  siRNA target sequence for Slpi (NM_011414.1,709-727).
ggaggtgcgtcaaaactca

SEQ ID NO: 663295 - DNA, 19 bp, Mus musculus
  siRNA target sequence for Slpi (NM_011414.1,775-793).
ggcagtgtgacggcaaata

SEQ ID NO: 663296 - DNA, 19 bp, Mus musculus
  siRNA target sequence for Slpi (NM_011414.1,777-795).
cagtgtgacggcaaataca

SEQ ID NO: 663297 - DNA, 19 bp, Mus musculus
  siRNA target sequence for Slpi (NM_011414.1,797-815).
gtgctgtgagggtatatgt

SEQ ID NO: 663298 - DNA, 19 bp, Mus musculus
  siRNA target sequence for Spink3 (NM_009258.1,92-110).
gtttagcaggtaacacttt

SEQ ID NO: 663299 - DNA, 19 bp, Mus musculus
  siRNA target sequence for Spink3 (NM_009258.1,157-175).
gcgggatgtcccagaattt

SEQ ID NO: 663300 - DNA, 19 bp, Mus musculus
  siRNA target sequence for Spink3 (NM_009258.1,158-176).
cgggatgtcccagaattta

SEQ ID NO: 663301 - DNA, 19 bp, Mus musculus
  siRNA target sequence for Spink3 (NM_009258.1,159-177).
gggatgtcccagaatttat

SEQ ID NO: 663302 - DNA, 19 bp, Mus musculus
  siRNA target sequence for Spink3 (NM_009258.1,190-208).
gggactgacggaattactt

SEQ ID NO: 663303 - DNA, 19 bp, Mus musculus
  siRNA target sequence for Spink3 (NM_009258.1,191-209).
ggactgacggaattactta

SEQ ID NO: 663304 - DNA, 19 bp, Mus musculus
  siRNA target sequence for Spink3 (NM_009258.1,192-210).
gactgacggaattacttat

SEQ ID NO: 663305 - DNA, 19 bp, Mus musculus
  siRNA target sequence for Spink4 (NM_011463.1,130-148).
cagctgggagccttgtttt

SEQ ID NO: 663306 - DNA, 19 bp, Mus musculus
  siRNA target sequence for Spink4 (NM_011463.1,221-239).
cacggatgggctcacatat

SEQ ID NO: 663307 - DNA, 19 bp, Mus musculus
  siRNA target sequence for Spink4 (NM_011463.1,223-241).
cggatgggctcacatatga

SEQ ID NO: 663308 - DNA, 19 bp, Mus musculus
  siRNA target sequence for Spink4 (NM_011463.1,224-242).
ggatgggctcacatatgaa

SEQ ID NO: 663309 - DNA, 19 bp, Mus musculus
  siRNA target sequence for Spink4 (NM_011463.1,229-247).
ggctcacatatgaaaatga

SEQ ID NO: 663310 - DNA, 19 bp, Mus musculus
  siRNA target sequence for Spink4 (NM_011463.1,261-279).
ctgacccggatgaaaacca

SEQ ID NO: 663311 - DNA, 19 bp, Mus musculus
  siRNA target sequence for Spink4 (NM_011463.1,277-295).
ccatgaaggacattcaaat

SEQ ID NO: 663312 - DNA, 19 bp, Mus musculus
  siRNA target sequence for Spinlw1 (NM_029325.1,150-168).
gagatgccccagattcaga

SEQ ID NO: 663313 - DNA, 19 bp, Mus musculus
  siRNA target sequence for Spinlw1 (NM_029325.1,210-228).
cagggactgcccgaagaaa

SEQ ID NO: 663314 - DNA, 19 bp, Mus musculus
  siRNA target sequence for Spinlw1 (NM_029325.1,328-346).
cgtcgttggtggtttaata

SEQ ID NO: 663315 - DNA, 19 bp, Mus musculus
  siRNA target sequence for Spinlw1 (NM_029325.1,329-347).
gtcgttggtggtttaataa

SEQ ID NO: 663316 - DNA, 19 bp, Mus musculus
  siRNA target sequence for Spinlw1 (NM_029325.1,359-377).
cgtgccaagtcttcatcta

SEQ ID NO: 663317 - DNA, 19 bp, Mus musculus
  siRNA target sequence for Spinlw1 (NM_029325.1,360-378).
gtgccaagtcttcatctat

SEQ ID NO: 663318 - DNA, 19 bp, Mus musculus
  siRNA target sequence for Spinlw1 (NM_029325.1,426-444).
ccagaacgcctgcgaaaaa

SEQ ID NO: 663319 - DNA, 19 bp, Mus musculus
  siRNA target sequence for Spinlw1 (NM_029325.1,427-445).
cagaacgcctgcgaaaaaa

SEQ ID NO: 663320 - DNA, 19 bp, Mus musculus
  siRNA target sequence for Spint2 (NM_011464.1,482-500).
ccagccatttgtttatgga

SEQ ID NO: 663321 - DNA, 19 bp, Mus musculus
  siRNA target sequence for Spint2 (NM_011464.1,507-525).
gaaggcaatggcaataact

SEQ ID NO: 663322 - DNA, 19 bp, Mus musculus
  siRNA target sequence for Spint2 (NM_011464.1,661-679).
ctgctgagatcttcaacta

SEQ ID NO: 663323 - DNA, 19 bp, Mus musculus
  siRNA target sequence for Spint2 (NM_011464.1,732-750).
cctcgctggtactatgaca

SEQ ID NO: 663324 - DNA, 19 bp, Mus musculus
  siRNA target sequence for Spint2 (NM_011464.1,753-771).
gaaaagaattcctgtatca

SEQ ID NO: 663325 - DNA, 19 bp, Mus musculus
  siRNA target sequence for Spint2 (NM_011464.1,763-781).
cctgtatcagcttcatcta

SEQ ID NO: 663326 - DNA, 19 bp, Mus musculus
  siRNA target sequence for Spint2 (NM_011464.1,981-999).
cgtgcgctgcgcactgttt

SEQ ID NO: 663327 - DNA, 19 bp, Mus musculus
  siRNA target sequence for Spint2 (NM_011464.1,1000-1018).
ggagcactgcggatgacaa

SEQ ID NO: 663328 - DNA, 19 bp, Mus musculus
  siRNA target sequence for Spock3 (NM_023689.2,316-334).
catttgatcaagctttaga

SEQ ID NO: 663329 - DNA, 19 bp, Mus musculus
  siRNA target sequence for Spock3 (NM_023689.2,348-366).
ccatgcttaaagacgaaat

SEQ ID NO: 663330 - DNA, 19 bp, Mus musculus
  siRNA target sequence for Spock3 (NM_023689.2,370-388).
gccgccacaaagtttgcat

SEQ ID NO: 663331 - DNA, 19 bp, Mus musculus
  siRNA target sequence for Spock3 (NM_023689.2,371-389).
ccgccacaaagtttgcatt

SEQ ID NO: 663332 - DNA, 19 bp, Mus musculus
  siRNA target sequence for Spock3 (NM_023689.2,372-390).
cgccacaaagtttgcatta

SEQ ID NO: 663333 - DNA, 19 bp, Mus musculus
  siRNA target sequence for Spock3 (NM_023689.2,402-420).
cagactgcactgtgtatca

SEQ ID NO: 663334 - DNA, 19 bp, Mus musculus
  siRNA target sequence for Spock3 (NM_023689.2,456-474).
ggaggaagccataagcaat

SEQ ID NO: 663335 - DNA, 19 bp, Mus musculus
  siRNA target sequence for Spock3 (NM_023689.2,527-545).
cccagtctgtggttctgat

SEQ ID NO: 663336 - DNA, 19 bp, Mus musculus
  siRNA target sequence for Spock3 (NM_023689.2,538-556).
gttctgatgggcattccta

SEQ ID NO: 663337 - DNA, 19 bp, Mus musculus
  siRNA target sequence for Spock3 (NM_023689.2,543-561).
gatgggcattcctactctt

SEQ ID NO: 663338 - DNA, 19 bp, Mus musculus
  siRNA target sequence for Spock3 (NM_023689.2,605-623).
gatctctatcaaatgtgaa

SEQ ID NO: 663339 - DNA, 19 bp, Mus musculus
  siRNA target sequence for Spock3 (NM_023689.2,633-651).
ccatgtccctccgataagt

SEQ ID NO: 663340 - DNA, 19 bp, Mus musculus
  siRNA target sequence for Spock3 (NM_023689.2,644-662).
cgataagtccatgaacata

SEQ ID NO: 663341 - DNA, 19 bp, Mus musculus
  siRNA target sequence for Spock3 (NM_023689.2,802-820).
gatttgataccagtatttt

SEQ ID NO: 663342 - DNA, 19 bp, Mus musculus
  siRNA target sequence for Spock3 (NM_023689.2,814-832).
gtattttgccaatttgcaa

SEQ ID NO: 663343 - DNA, 19 bp, Mus musculus
  siRNA target sequence for Spock3 (NM_023689.2,838-856).
cacttggctggatgtttaa

SEQ ID NO: 663344 - DNA, 19 bp, Mus musculus
  siRNA target sequence for Spock3 (NM_023689.2,840-858).
cttggctggatgtttaata

SEQ ID NO: 663345 - DNA, 19 bp, Mus musculus
  siRNA target sequence for Spock3 (NM_023689.2,859-877).
gacttgatacaaactatga

SEQ ID NO: 663346 - DNA, 19 bp, Mus musculus
  siRNA target sequence for Spock3 (NM_023689.2,868-886).
caaactatgacctgctatt

SEQ ID NO: 663347 - DNA, 19 bp, Mus musculus
  siRNA target sequence for Spock3 (NM_023689.2,895-913).
cagagcttgggagcatata

SEQ ID NO: 663348 - DNA, 19 bp, Mus musculus
  siRNA target sequence for Spock3 (NM_023689.2,899-917).
gcttgggagcatatacctt

SEQ ID NO: 663349 - DNA, 19 bp, Mus musculus
  siRNA target sequence for Spock3 (NM_023689.2,903-921).
gggagcatataccttgata

SEQ ID NO: 663350 - DNA, 19 bp, Mus musculus
  siRNA target sequence for Spock3 (NM_023689.2,904-922).
ggagcatataccttgataa

SEQ ID NO: 663351 - DNA, 19 bp, Mus musculus
  siRNA target sequence for Spock3 (NM_023689.2,907-925).
gcatataccttgataagaa

SEQ ID NO: 663352 - DNA, 19 bp, Mus musculus
  siRNA target sequence for Spock3 (NM_023689.2,908-926).
catataccttgataagaat

SEQ ID NO: 663353 - DNA, 19 bp, Mus musculus
  siRNA target sequence for Spock3 (NM_023689.2,964-982).
cttacaaggacagtttgat

SEQ ID NO: 663354 - DNA, 19 bp, Mus musculus
  siRNA target sequence for Spock3 (NM_023689.2,968-986).
caaggacagtttgatatct

SEQ ID NO: 663355 - DNA, 19 bp, Mus musculus
  siRNA target sequence for Spock3 (NM_023689.2,972-990).
gacagtttgatatctaata

SEQ ID NO: 663356 - DNA, 19 bp, Mus musculus
  siRNA target sequence for Spock3 (NM_023689.2,976-994).
gtttgatatctaataatga

SEQ ID NO: 663357 - DNA, 19 bp, Mus musculus
  siRNA target sequence for Spock3 (NM_023689.2,1033-1051).
gccacacggagctcagtaa

SEQ ID NO: 663358 - DNA, 19 bp, Mus musculus
  siRNA target sequence for Spock3 (NM_023689.2,1160-1178).
ctggtgtgttgacagatat

SEQ ID NO: 663359 - DNA, 19 bp, Mus musculus
  siRNA target sequence for Spock3 (NM_023689.2,1163-1181).
gtgtgttgacagatatgga

SEQ ID NO: 663360 - DNA, 19 bp, Mus musculus
  siRNA target sequence for Spock3 (NM_023689.2,1165-1183).
gtgttgacagatatggaaa

SEQ ID NO: 663361 - DNA, 19 bp, Mus musculus
  siRNA target sequence for Spock3 (NM_023689.2,1215-1233).
gcagattgtgctatagact

SEQ ID NO: 663362 - DNA, 19 bp, Mus musculus
  siRNA target sequence for Spock3 (NM_023689.2,1253-1271).
cgcaagtggagattttcgt

SEQ ID NO: 663363 - DNA, 19 bp, Mus musculus
  siRNA target sequence for Spock3 (NM_023689.2,1370-1388).
ggatgtccatgatggatat

SEQ ID NO: 663364 - DNA, 19 bp, Mus musculus
  siRNA target sequence for Spock3 (NM_023689.2,1371-1389).
gatgtccatgatggatata

SEQ ID NO: 663365 - DNA, 19 bp, Mus musculus
  siRNA target sequence for Spock3 (NM_023689.2,1374-1392).
gtccatgatggatatattt

SEQ ID NO: 663366 - DNA, 19 bp, Mus musculus
  siRNA target sequence for Tfpi (NM_011576.1,394-412).
gccttgttcccgagtttct

SEQ ID NO: 663367 - DNA, 19 bp, Mus musculus
  siRNA target sequence for Tfpi (NM_011576.1,395-413).
ccttgttcccgagtttctt

SEQ ID NO: 663368 - DNA, 19 bp, Mus musculus
  siRNA target sequence for Tfpi (NM_011576.1,396-414).
cttgttcccgagtttctta

SEQ ID NO: 663369 - DNA, 19 bp, Mus musculus
  siRNA target sequence for Tfpi (NM_011576.1,464-482).
gaaaccgctacatacattt

SEQ ID NO: 663370 - DNA, 19 bp, Mus musculus
  siRNA target sequence for Tfpi (NM_011576.1,505-523).
gtccatgcaaagcaatgat

SEQ ID NO: 663371 - DNA, 19 bp, Mus musculus
  siRNA target sequence for Tfpi (NM_011576.1,507-525).
ccatgcaaagcaatgataa

SEQ ID NO: 663372 - DNA, 19 bp, Mus musculus
  siRNA target sequence for Tfpi (NM_011576.1,516-534).
gcaatgataaggagttatt

SEQ ID NO: 663373 - DNA, 19 bp, Mus musculus
  siRNA target sequence for Tfpi (NM_011576.1,539-557).
caatatgtatactcatcaa

SEQ ID NO: 663374 - DNA, 19 bp, Mus musculus
  siRNA target sequence for Tfpi (NM_011576.1,545-563).
gtatactcatcaatgtgaa

SEQ ID NO: 663375 - DNA, 19 bp, Mus musculus
  siRNA target sequence for Tfpi (NM_011576.1,589-607).
ggaacgagaaccgatttga

SEQ ID NO: 663376 - DNA, 19 bp, Mus musculus
  siRNA target sequence for Tfpi (NM_011576.1,590-608).
gaacgagaaccgatttgat

SEQ ID NO: 663377 - DNA, 19 bp, Mus musculus
  siRNA target sequence for Tfpi (NM_011576.1,634-652).
gcataccaggttatgagaa

SEQ ID NO: 663378 - DNA, 19 bp, Mus musculus
  siRNA target sequence for Tfpi (NM_011576.1,718-736).
gactctgccgaggttacat

SEQ ID NO: 663379 - DNA, 19 bp, Mus musculus
  siRNA target sequence for Tfpi (NM_011576.1,720-738).
ctctgccgaggttacatga

SEQ ID NO: 663380 - DNA, 19 bp, Mus musculus
  siRNA target sequence for Tfpi (NM_011576.1,734-752).
catgaagaggtatctttat

SEQ ID NO: 663381 - DNA, 19 bp, Mus musculus
  siRNA target sequence for Tfpi (NM_011576.1,806-824).
ccgcaacaactttgaaact

SEQ ID NO: 663382 - DNA, 19 bp, Mus musculus
  siRNA target sequence for Tfpi (NM_011576.1,807-825).
cgcaacaactttgaaactt

SEQ ID NO: 663383 - DNA, 19 bp, Mus musculus
  siRNA target sequence for Tfpi (NM_011576.1,899-917).
ctacgtaactgatggaaat

SEQ ID NO: 663384 - DNA, 19 bp, Mus musculus
  siRNA target sequence for Tfpi (NM_011576.1,902-920).
cgtaactgatggaaatact

SEQ ID NO: 663385 - DNA, 19 bp, Mus musculus
  siRNA target sequence for Tfpi (NM_011576.1,925-943).
ctgatcgcagtactgtaaa

SEQ ID NO: 663386 - DNA, 19 bp, Mus musculus
  siRNA target sequence for Tfpi (NM_011576.1,927-945).
gatcgcagtactgtaaata

SEQ ID NO: 663387 - DNA, 19 bp, Mus musculus
  siRNA target sequence for Tfpi (NM_011576.1,930-948).
cgcagtactgtaaataaca

SEQ ID NO: 663388 - DNA, 19 bp, Mus musculus
  siRNA target sequence for Tfpi (NM_011576.1,931-949).
gcagtactgtaaataacat

SEQ ID NO: 663389 - DNA, 19 bp, Mus musculus
  siRNA target sequence for Tfpi (NM_011576.1,974-992).
gcccaggcgtcgggattat

SEQ ID NO: 663390 - DNA, 19 bp, Mus musculus
  siRNA target sequence for Tfpi (NM_011576.1,977-995).
caggcgtcgggattatcgt

SEQ ID NO: 663391 - DNA, 19 bp, Mus musculus
  siRNA target sequence for Tfpi (NM_011576.1,1049-1067).
gagaagattctactacaat

SEQ ID NO: 663392 - DNA, 19 bp, Mus musculus
  siRNA target sequence for Tfpi (NM_011576.1,1078-1096).
ggaaatgccaccgatttaa

SEQ ID NO: 663393 - DNA, 19 bp, Mus musculus
  siRNA target sequence for Tfpi (NM_011576.1,1159-1177).
gtaaaacaggtctcatcaa

SEQ ID NO: 663394 - DNA, 19 bp, Mus musculus
  siRNA target sequence for Tfpi (NM_011576.1,1167-1185).
ggtctcatcaaaaacaagt

SEQ ID NO: 663395 - DNA, 19 bp, Mus musculus
  siRNA target sequence for Tfpi (NM_011576.1,1181-1199).
caagtcaaaaggagtagtt

SEQ ID NO: 663396 - DNA, 19 bp, Mus musculus
  siRNA target sequence for Tfpi (NM_011576.1,1220-1238).
gcccttcgtgaaagttgta

SEQ ID NO: 663397 - DNA, 19 bp, Mus musculus
  siRNA target sequence for Tfpi (NM_011576.1,1226-1244).
cgtgaaagttgtatatgaa

SEQ ID NO: 663398 - DNA, 19 bp, Mus musculus
  siRNA target sequence for Tfpi (NM_011576.1,1227-1245).
gtgaaagttgtatatgaaa

SEQ ID NO: 663399 - DNA, 19 bp, Mus musculus
  siRNA target sequence for Tfpi2 (NM_009364.2,81-99).
cccctgcaactgtggaatt

SEQ ID NO: 663400 - DNA, 19 bp, Mus musculus
  siRNA target sequence for Tfpi2 (NM_009364.2,143-161).
gtctgcccaagggaataat

SEQ ID NO: 663401 - DNA, 19 bp, Mus musculus
  siRNA target sequence for Tfpi2 (NM_009364.2,148-166).
cccaagggaataatttaga

SEQ ID NO: 663402 - DNA, 19 bp, Mus musculus
  siRNA target sequence for Tfpi2 (NM_009364.2,240-258).
caaaagtgccgcagattca

SEQ ID NO: 663403 - DNA, 19 bp, Mus musculus
  siRNA target sequence for Tfpi2 (NM_009364.2,245-263).
gtgccgcagattcaactat

SEQ ID NO: 663404 - DNA, 19 bp, Mus musculus
  siRNA target sequence for Tfpi2 (NM_009364.2,322-340).
gcggaagtatcgagaaagt

SEQ ID NO: 663405 - DNA, 19 bp, Mus musculus
  siRNA target sequence for Tfpi2 (NM_009364.2,323-341).
cggaagtatcgagaaagtt

SEQ ID NO: 663406 - DNA, 19 bp, Mus musculus
  siRNA target sequence for Tfpi2 (NM_009364.2,354-372).
cgatcagagctaaaaacat

SEQ ID NO: 663407 - DNA, 19 bp, Mus musculus
  siRNA target sequence for Tfpi2 (NM_009364.2,355-373).
gatcagagctaaaaacata

SEQ ID NO: 663408 - DNA, 19 bp, Mus musculus
  siRNA target sequence for Tfpi2 (NM_009364.2,360-378).
gagctaaaaacatatccat

SEQ ID NO: 663409 - DNA, 19 bp, Mus musculus
  siRNA target sequence for Tfpi2 (NM_009364.2,376-394).
catgtgataagcccaatat

SEQ ID NO: 663410 - DNA, 19 bp, Mus musculus
  siRNA target sequence for Tfpi2 (NM_009364.2,387-405).
cccaatatacggtttttct

SEQ ID NO: 663411 - DNA, 19 bp, Mus musculus
  siRNA target sequence for Tfpi2 (NM_009364.2,388-406).
ccaatatacggtttttctt

SEQ ID NO: 663412 - DNA, 19 bp, Mus musculus
  siRNA target sequence for Tfpi2 (NM_009364.2,447-465).
ctgtgtagcaggactataa

SEQ ID NO: 663413 - DNA, 19 bp, Mus musculus
  siRNA target sequence for Tfpi2 (NM_009364.2,449-467).
gtgtagcaggactataaat

SEQ ID NO: 663414 - DNA, 19 bp, Mus musculus
  siRNA target sequence for Tfpi2 (NM_009364.2,451-469).
gtagcaggactataaatgt

SEQ ID NO: 663415 - DNA, 19 bp, Mus musculus
  siRNA target sequence for Tfpi2 (NM_009364.2,500-518).
gtgtgaaccacggaaacat

SEQ ID NO: 663416 - DNA, 19 bp, Mus musculus
  siRNA target sequence for Tfpi2 (NM_009364.2,502-520).
gtgaaccacggaaacatat

SEQ ID NO: 663417 - DNA, 19 bp, Mus musculus
  siRNA target sequence for Tfpi2 (NM_009364.2,507-525).
ccacggaaacatattccat

SEQ ID NO: 663418 - DNA, 19 bp, Mus musculus
  siRNA target sequence for Tfpi2 (NM_009364.2,511-529).
ggaaacatattccatcatt

SEQ ID NO: 663419 - DNA, 19 bp, Mus musculus
  siRNA target sequence for Tfpi2 (NM_009364.2,565-583).
ccaatgtgacacgctttta

SEQ ID NO: 663420 - DNA, 19 bp, Mus musculus
  siRNA target sequence for Tfpi2 (NM_009364.2,566-584).
caatgtgacacgcttttat

SEQ ID NO: 663421 - DNA, 19 bp, Mus musculus
  siRNA target sequence for Tfpi2 (NM_009364.2,570-588).
gtgacacgcttttatttta

SEQ ID NO: 663422 - DNA, 19 bp, Mus musculus
  siRNA target sequence for Tfpi2 (NM_009364.2,572-590).
gacacgcttttattttaat

SEQ ID NO: 663423 - DNA, 19 bp, Mus musculus
  siRNA target sequence for Tfpi2 (NM_009364.2,576-594).
cgcttttattttaattcaa

SEQ ID NO: 663424 - DNA, 19 bp, Mus musculus
  siRNA target sequence for Tfpi2 (NM_009364.2,633-651).
ggtgggaatgagaataact

SEQ ID NO: 663425 - DNA, 19 bp, Mus musculus
  siRNA target sequence for Tmeff2 (NM_019790.2,501-519).
cccgtgacgctgcttatca

SEQ ID NO: 663426 - DNA, 19 bp, Mus musculus
  siRNA target sequence for Tmeff2 (NM_019790.2,502-520).
ccgtgacgctgcttatcat

SEQ ID NO: 663427 - DNA, 19 bp, Mus musculus
  siRNA target sequence for Tmeff2 (NM_019790.2,503-521).
cgtgacgctgcttatcata

SEQ ID NO: 663428 - DNA, 19 bp, Mus musculus
  siRNA target sequence for Tmeff2 (NM_019790.2,587-605).
gaactgctccggttacgat

SEQ ID NO: 663429 - DNA, 19 bp, Mus musculus
  siRNA target sequence for Tmeff2 (NM_019790.2,597-615).
ggttacgatgacagagaaa

SEQ ID NO: 663430 - DNA, 19 bp, Mus musculus
  siRNA target sequence for Tmeff2 (NM_019790.2,602-620).
cgatgacagagaaaatgat

SEQ ID NO: 663431 - DNA, 19 bp, Mus musculus
  siRNA target sequence for Tmeff2 (NM_019790.2,654-672).
gacggggaatgtttaagga

SEQ ID NO: 663432 - DNA, 19 bp, Mus musculus
  siRNA target sequence for Tmeff2 (NM_019790.2,656-674).
cggggaatgtttaaggatt

SEQ ID NO: 663433 - DNA, 19 bp, Mus musculus
  siRNA target sequence for Tmeff2 (NM_019790.2,688-706).
cttgcgtctgtcagttcaa

SEQ ID NO: 663434 - DNA, 19 bp, Mus musculus
  siRNA target sequence for Tmeff2 (NM_019790.2,899-917).
gacatccacctgtgacatt

SEQ ID NO: 663435 - DNA, 19 bp, Mus musculus
  siRNA target sequence for Tmeff2 (NM_019790.2,1017-1035).
gatgggaaatcttatgata

SEQ ID NO: 663436 - DNA, 19 bp, Mus musculus
  siRNA target sequence for Tmeff2 (NM_019790.2,1022-1040).
gaaatcttatgataatgca

SEQ ID NO: 663437 - DNA, 19 bp, Mus musculus
  siRNA target sequence for Tmeff2 (NM_019790.2,1091-1109).
gtctctgggtcgatgtcaa

SEQ ID NO: 663438 - DNA, 19 bp, Mus musculus
  siRNA target sequence for Tmeff2 (NM_019790.2,1095-1113).
ctgggtcgatgtcaagata

SEQ ID NO: 663439 - DNA, 19 bp, Mus musculus
  siRNA target sequence for Tmeff2 (NM_019790.2,1098-1116).
ggtcgatgtcaagataaca

SEQ ID NO: 663440 - DNA, 19 bp, Mus musculus
  siRNA target sequence for Tmeff2 (NM_019790.2,1101-1119).
cgatgtcaagataacacaa

SEQ ID NO: 663441 - DNA, 19 bp, Mus musculus
  siRNA target sequence for Tmeff2 (NM_019790.2,1115-1133).
cacaactacaaccactaaa

SEQ ID NO: 663442 - DNA, 19 bp, Mus musculus
  siRNA target sequence for Tmeff2 (NM_019790.2,1167-1185).
gcagagaatgctaacaaat

SEQ ID NO: 663443 - DNA, 19 bp, Mus musculus
  siRNA target sequence for Tmeff2 (NM_019790.2,1168-1186).
cagagaatgctaacaaatt

SEQ ID NO: 663444 - DNA, 19 bp, Mus musculus
  siRNA target sequence for Tmeff2 (NM_019790.2,1216-1234).
cttgcccagaacattataa

SEQ ID NO: 663445 - DNA, 19 bp, Mus musculus
  siRNA target sequence for Tmeff2 (NM_019790.2,1220-1238).
cccagaacattataatggt

SEQ ID NO: 663446 - DNA, 19 bp, Mus musculus
  siRNA target sequence for Tmeff2 (NM_019790.2,1221-1239).
ccagaacattataatggtt

SEQ ID NO: 663447 - DNA, 19 bp, Mus musculus
  siRNA target sequence for Tmeff2 (NM_019790.2,1256-1274).
gtgtgaacactccatcaat

SEQ ID NO: 663448 - DNA, 19 bp, Mus musculus
  siRNA target sequence for Tmeff2 (NM_019790.2,1258-1276).
gtgaacactccatcaatat

SEQ ID NO: 663449 - DNA, 19 bp, Mus musculus
  siRNA target sequence for Tmeff2 (NM_019790.2,1314-1332).
ggtcaacactgtgaaaaga

SEQ ID NO: 663450 - DNA, 19 bp, Mus musculus
  siRNA target sequence for Tmeff2 (NM_019790.2,1315-1333).
gtcaacactgtgaaaagaa

SEQ ID NO: 663451 - DNA, 19 bp, Mus musculus
  siRNA target sequence for Tmeff2 (NM_019790.2,1372-1390).
ggttccagtacgtcttgat

SEQ ID NO: 663452 - DNA, 19 bp, Mus musculus
  siRNA target sequence for Tmeff2 (NM_019790.2,1373-1391).
gttccagtacgtcttgatt

SEQ ID NO: 663453 - DNA, 19 bp, Mus musculus
  siRNA target sequence for Tmeff2 (NM_019790.2,1530-1548).
gcatccacacggttaatct

SEQ ID NO: 663454 - DNA, 19 bp, Mus musculus
  siRNA target sequence for Wfdc1 (NM_023395.1,48-66).
gggtaactgcggcagaaaa

SEQ ID NO: 663455 - DNA, 19 bp, Mus musculus
  siRNA target sequence for Wfdc1 (NM_023395.1,50-68).
gtaactgcggcagaaaagt

SEQ ID NO: 663456 - DNA, 19 bp, Mus musculus
  siRNA target sequence for Wfdc1 (NM_023395.1,294-312).
caggcgctgctgctacaat

SEQ ID NO: 663457 - DNA, 19 bp, Mus musculus
  siRNA target sequence for Wfdc1 (NM_023395.1,417-435).
cggtcctgaggaagtgtta

SEQ ID NO: 663458 - DNA, 19 bp, Mus musculus
  siRNA target sequence for Wfdc1 (NM_023395.1,494-512).
gctatgagtgccatatcct

SEQ ID NO: 663459 - DNA, 19 bp, Mus musculus
  siRNA target sequence for Wfdc1 (NM_023395.1,661-679).
caacagaggcactttccat

SEQ ID NO: 663460 - DNA, 19 bp, Mus musculus
  siRNA target sequence for Ahsg (NM_013465.1,141-159).
caggactgggttttagaga

SEQ ID NO: 663461 - DNA, 19 bp, Mus musculus
  siRNA target sequence for Ahsg (NM_013465.1,203-221).
gccgtggactacctcaata

SEQ ID NO: 663462 - DNA, 19 bp, Mus musculus
  siRNA target sequence for Ahsg (NM_013465.1,204-222).
ccgtggactacctcaataa

SEQ ID NO: 663463 - DNA, 19 bp, Mus musculus
  siRNA target sequence for Ahsg (NM_013465.1,205-223).
cgtggactacctcaataat

SEQ ID NO: 663464 - DNA, 19 bp, Mus musculus
  siRNA target sequence for Ahsg (NM_013465.1,208-226).
ggactacctcaataatcat

SEQ ID NO: 663465 - DNA, 19 bp, Mus musculus
  siRNA target sequence for Ahsg (NM_013465.1,211-229).
ctacctcaataatcatctt

SEQ ID NO: 663466 - DNA, 19 bp, Mus musculus
  siRNA target sequence for Ahsg (NM_013465.1,291-309).
ccttcggagtggtgtatga

SEQ ID NO: 663467 - DNA, 19 bp, Mus musculus
  siRNA target sequence for Ahsg (NM_013465.1,355-373).
caccccgctggcaaactgt

SEQ ID NO: 663468 - DNA, 19 bp, Mus musculus
  siRNA target sequence for Ahsg (NM_013465.1,688-706).
cactgactgtactgcaaaa

SEQ ID NO: 663469 - DNA, 19 bp, Mus musculus
  siRNA target sequence for Ahsg (NM_013465.1,804-822).
cagtggcctgcaagttatt

SEQ ID NO: 663470 - DNA, 19 bp, Mus musculus
  siRNA target sequence for Ahsg (NM_013465.1,808-826).
ggcctgcaagttattccaa

SEQ ID NO: 663471 - DNA, 19 bp, Mus musculus
  siRNA target sequence for Birc5 (NM_009689.1,251-269).
ccgagaacgagcctgattt

SEQ ID NO: 663472 - DNA, 19 bp, Mus musculus
  siRNA target sequence for Birc5 (NM_009689.1,326-344).
cgatagaggagcatagaaa

SEQ ID NO: 663473 - DNA, 19 bp, Mus musculus
  siRNA target sequence for Birc5 (NM_009689.1,391-409).
gaactaaccgtcagtgaat

SEQ ID NO: 663474 - DNA, 19 bp, Mus musculus
  siRNA target sequence for Birc5 (NM_009689.1,398-416).
ccgtcagtgaattcttgaa

SEQ ID NO: 663475 - DNA, 19 bp, Mus musculus
  siRNA target sequence for Birc5 (NM_009689.1,481-499).
gaagagactgcaaagacta

SEQ ID NO: 663476 - DNA, 19 bp, Mus musculus
  siRNA target sequence for Birc5 (NM_009689.1,495-513).
gactacccgtcagtcaatt

SEQ ID NO: 663477 - DNA, 19 bp, Mus musculus
  siRNA target sequence for Birc5 (NM_009689.1,497-515).
ctacccgtcagtcaattga

SEQ ID NO: 663478 - DNA, 19 bp, Mus musculus
  siRNA target sequence for C230060M08Rik (NM_182939.1,573-591).
cggatccgagaagaaacta

SEQ ID NO: 663479 - DNA, 19 bp, Mus musculus
  siRNA target sequence for C230060M08Rik (NM_182939.1,574-592).
ggatccgagaagaaactat

SEQ ID NO: 663480 - DNA, 19 bp, Mus musculus
  siRNA target sequence for Cast (NM_009817.1,152-170).
gaaaggatccgatgagaaa

SEQ ID NO: 663481 - DNA, 19 bp, Mus musculus
  siRNA target sequence for Cast (NM_009817.1,314-332).
gtctaagaaaccacaatca

SEQ ID NO: 663482 - DNA, 19 bp, Mus musculus
  siRNA target sequence for Cast (NM_009817.1,407-425).
gaagcacacatcaagtaca

SEQ ID NO: 663483 - DNA, 19 bp, Mus musculus
  siRNA target sequence for Cast (NM_009817.1,581-599).
caaagtggttggtaagaaa

SEQ ID NO: 663484 - DNA, 19 bp, Mus musculus
  siRNA target sequence for Cast (NM_009817.1,895-913).
ggactgaccaggctataga

SEQ ID NO: 663485 - DNA, 19 bp, Mus musculus
  siRNA target sequence for Cast (NM_009817.1,1954-1972).
ctgatccagatgagaacaa

SEQ ID NO: 663486 - DNA, 19 bp, Mus musculus
  siRNA target sequence for Cast (NM_009817.1,2008-2026).
cagagcatagcgagaaact

SEQ ID NO: 663487 - DNA, 19 bp, Mus musculus
  siRNA target sequence for Cst10 (NM_021405.1,244-262).
ccagctgaccctaaggata

SEQ ID NO: 663488 - DNA, 19 bp, Mus musculus
  siRNA target sequence for Cst10 (NM_021405.1,279-297).
ggtaaagtttgctgttaga

SEQ ID NO: 663489 - DNA, 19 bp, Mus musculus
  siRNA target sequence for Cst10 (NM_021405.1,280-298).
gtaaagtttgctgttagaa

SEQ ID NO: 663490 - DNA, 19 bp, Mus musculus
  siRNA target sequence for Cst10 (NM_021405.1,296-314).
gaacctacaatgatatgga

SEQ ID NO: 663491 - DNA, 19 bp, Mus musculus
  siRNA target sequence for Cst10 (NM_021405.1,312-330).
ggacaatgacctgtatctt

SEQ ID NO: 663492 - DNA, 19 bp, Mus musculus
  siRNA target sequence for Cst10 (NM_021405.1,376-394).
gggaagaactactacttga

SEQ ID NO: 663493 - DNA, 19 bp, Mus musculus
  siRNA target sequence for Cst10 (NM_021405.1,378-396).
gaagaactactacttgaaa

SEQ ID NO: 663494 - DNA, 19 bp, Mus musculus
  siRNA target sequence for Cst10 (NM_021405.1,381-399).
gaactactacttgaaaatt

SEQ ID NO: 663495 - DNA, 19 bp, Mus musculus
  siRNA target sequence for Cst10 (NM_021405.1,403-421).
ctaggccgaaccacatgta

SEQ ID NO: 663496 - DNA, 19 bp, Mus musculus
  siRNA target sequence for Cst10 (NM_021405.1,409-427).
cgaaccacatgtaccaaaa

SEQ ID NO: 663497 - DNA, 19 bp, Mus musculus
  siRNA target sequence for Cst10 (NM_021405.1,419-437).
gtaccaaaactgagtctaa

SEQ ID NO: 663498 - DNA, 19 bp, Mus musculus
  siRNA target sequence for Cst10 (NM_021405.1,430-448).
gagtctaatttggttgatt

SEQ ID NO: 663499 - DNA, 19 bp, Mus musculus
  siRNA target sequence for Cst10 (NM_021405.1,441-459).
ggttgattgtcccttcaat

SEQ ID NO: 663500 - DNA, 19 bp, Mus musculus
  siRNA target sequence for Cst10 (NM_021405.1,477-495).
gaagagggtcatctgtaat

SEQ ID NO: 663501 - DNA, 19 bp, Mus musculus
  siRNA target sequence for Cst10 (NM_021405.1,482-500).
gggtcatctgtaatttcca

SEQ ID NO: 663502 - DNA, 19 bp, Mus musculus
  siRNA target sequence for Cst10 (NM_021405.1,511-529).
gcaccttggctgaacaaga

SEQ ID NO: 663503 - DNA, 19 bp, Mus musculus
  siRNA target sequence for Cst10 (NM_021405.1,539-557).
caaacttcaactgttacaa

SEQ ID NO: 663504 - DNA, 19 bp, Mus musculus
  siRNA target sequence for Cst3 (NM_009976.2,240-258).
gctgtgagcgagtacaaca

SEQ ID NO: 663505 - DNA, 19 bp, Mus musculus
  siRNA target sequence for Cst3 (NM_009976.2,241-259).
ctgtgagcgagtacaacaa

SEQ ID NO: 663506 - DNA, 19 bp, Mus musculus
  siRNA target sequence for Cst3 (NM_009976.2,320-338).
cgtggctggagtgaactat

SEQ ID NO: 663507 - DNA, 19 bp, Mus musculus
  siRNA target sequence for Cst3 (NM_009976.2,321-339).
gtggctggagtgaactatt

SEQ ID NO: 663508 - DNA, 19 bp, Mus musculus
  siRNA target sequence for Cst3 (NM_009976.2,324-342).
gctggagtgaactattttt

SEQ ID NO: 663509 - DNA, 19 bp, Mus musculus
  siRNA target sequence for Cst3 (NM_009976.2,350-368).
ggagatgggccgaactaca

SEQ ID NO: 663510 - DNA, 19 bp, Mus musculus
  siRNA target sequence for Cst3 (NM_009976.2,351-369).
gagatgggccgaactacat

SEQ ID NO: 663511 - DNA, 19 bp, Mus musculus
  siRNA target sequence for Cst3 (NM_009976.2,353-371).
gatgggccgaactacatgt

SEQ ID NO: 663512 - DNA, 19 bp, Mus musculus
  siRNA target sequence for Cst3 (NM_009976.2,370-388).
gtaccaagtcccagacaaa

SEQ ID NO: 663513 - DNA, 19 bp, Mus musculus
  siRNA target sequence for Cst3 (NM_009976.2,377-395).
gtcccagacaaatttgact

SEQ ID NO: 663514 - DNA, 19 bp, Mus musculus
  siRNA target sequence for Cst3 (NM_009976.2,475-493).
gcacacactccctgacaaa

SEQ ID NO: 663515 - DNA, 19 bp, Mus musculus
  siRNA target sequence for Cst3 (NM_009976.2,480-498).
cactccctgacaaaattca

SEQ ID NO: 663516 - DNA, 19 bp, Mus musculus
  siRNA target sequence for Cst6 (NM_028623.2,345-363).
ccggagaacgccagaactt

SEQ ID NO: 663517 - DNA, 19 bp, Mus musculus
  siRNA target sequence for Cst6 (NM_028623.2,404-422).
gctgtggccagctacaata

SEQ ID NO: 663518 - DNA, 19 bp, Mus musculus
  siRNA target sequence for Cst6 (NM_028623.2,426-444).
gcagcgacagcctctacta

SEQ ID NO: 663519 - DNA, 19 bp, Mus musculus
  siRNA target sequence for Cst6 (NM_028623.2,429-447).
gcgacagcctctactactt

SEQ ID NO: 663520 - DNA, 19 bp, Mus musculus
  siRNA target sequence for Cst6 (NM_028623.2,482-500).
ctggtggctggcatcaagt

SEQ ID NO: 663521 - DNA, 19 bp, Mus musculus
  siRNA target sequence for Cst7 (NM_009977.1,187-205).
gccaggattccccaaaaca

SEQ ID NO: 663522 - DNA, 19 bp, Mus musculus
  siRNA target sequence for Cst7 (NM_009977.1,192-210).
gattccccaaaacaataga

SEQ ID NO: 663523 - DNA, 19 bp, Mus musculus
  siRNA target sequence for Cst7 (NM_009977.1,243-261).
ggcacagtgtggaaaagtt

SEQ ID NO: 663524 - DNA, 19 bp, Mus musculus
  siRNA target sequence for Cst7 (NM_009977.1,328-346).
ggtgaaaggcctgaaatat

SEQ ID NO: 663525 - DNA, 19 bp, Mus musculus
  siRNA target sequence for Cst7 (NM_009977.1,329-347).
gtgaaaggcctgaaatata

SEQ ID NO: 663526 - DNA, 19 bp, Mus musculus
  siRNA target sequence for Cst7 (NM_009977.1,358-376).
gaaaatcggccgaactaca

SEQ ID NO: 663527 - DNA, 19 bp, Mus musculus
  siRNA target sequence for Cst7 (NM_009977.1,431-449).
gccttgaagcggactctat

SEQ ID NO: 663528 - DNA, 19 bp, Mus musculus
  siRNA target sequence for Cst7 (NM_009977.1,432-450).
ccttgaagcggactctata

SEQ ID NO: 663529 - DNA, 19 bp, Mus musculus
  siRNA target sequence for Cst7 (NM_009977.1,433-451).
cttgaagcggactctatat

SEQ ID NO: 663530 - DNA, 19 bp, Mus musculus
  siRNA target sequence for Cst7 (NM_009977.1,477-495).
cctggctccacagttttga

SEQ ID NO: 663531 - DNA, 19 bp, Mus musculus
  siRNA target sequence for Cst8 (NM_009978.1,276-294).
gtgaaggcacagaactact

SEQ ID NO: 663532 - DNA, 19 bp, Mus musculus
  siRNA target sequence for Cst8 (NM_009978.1,290-308).
ctactttggatccattaat

SEQ ID NO: 663533 - DNA, 19 bp, Mus musculus
  siRNA target sequence for Cst8 (NM_009978.1,297-315).
ggatccattaatatctcta

SEQ ID NO: 663534 - DNA, 19 bp, Mus musculus
  siRNA target sequence for Cst8 (NM_009978.1,298-316).
gatccattaatatctctaa

SEQ ID NO: 663535 - DNA, 19 bp, Mus musculus
  siRNA target sequence for Cst8 (NM_009978.1,386-404).
cttccttgtggacaagata

SEQ ID NO: 663536 - DNA, 19 bp, Mus musculus
  siRNA target sequence for Cst8 (NM_009978.1,401-419).
gatactccatgccaaactt

SEQ ID NO: 663537 - DNA, 19 bp, Mus musculus
  siRNA target sequence for Cst8 (NM_009978.1,427-445).
cagaccgaatggaatacca

SEQ ID NO: 663538 - DNA, 19 bp, Mus musculus
  siRNA target sequence for Cst8 (NM_009978.1,429-447).
gaccgaatggaataccaaa

SEQ ID NO: 663539 - DNA, 19 bp, Mus musculus
  siRNA target sequence for Cst8 (NM_009978.1,431-449).
ccgaatggaataccaaatt

SEQ ID NO: 663540 - DNA, 19 bp, Mus musculus
  siRNA target sequence for Cst8 (NM_009978.1,461-479).
ctcccgcagtaattgcaaa

SEQ ID NO: 663541 - DNA, 19 bp, Mus musculus
  siRNA target sequence for Cst8 (NM_009978.1,463-481).
cccgcagtaattgcaaaaa

SEQ ID NO: 663542 - DNA, 19 bp, Mus musculus
  siRNA target sequence for Cst8 (NM_009978.1,464-482).
ccgcagtaattgcaaaaaa

SEQ ID NO: 663543 - DNA, 19 bp, Mus musculus
  siRNA target sequence for Cst8 (NM_009978.1,571-589).
cctggaatggcgagttcaa

SEQ ID NO: 663544 - DNA, 19 bp, Mus musculus
  siRNA target sequence for Cst8 (NM_009978.1,590-608).
cctgttgagcaaagaatgt

SEQ ID NO: 663545 - DNA, 19 bp, Mus musculus
  siRNA target sequence for Cst8 (NM_009978.1,591-609).
ctgttgagcaaagaatgta

SEQ ID NO: 663546 - DNA, 19 bp, Mus musculus
  siRNA target sequence for Cst9 (NM_009979.1,144-162).
ctgtctcgaaggccaataa

SEQ ID NO: 663547 - DNA, 19 bp, Mus musculus
  siRNA target sequence for Cst9 (NM_009979.1,200-218).
gaatttgccgtgaacacat

SEQ ID NO: 663548 - DNA, 19 bp, Mus musculus
  siRNA target sequence for Cst9 (NM_009979.1,245-263).
gcctacaggatggaacata

SEQ ID NO: 663549 - DNA, 19 bp, Mus musculus
  siRNA target sequence for Cst9 (NM_009979.1,276-294).
ggagggagaaggtaaattt

SEQ ID NO: 663550 - DNA, 19 bp, Mus musculus
  siRNA target sequence for Cst9 (NM_009979.1,280-298).
ggagaaggtaaattttcca

SEQ ID NO: 663551 - DNA, 19 bp, Mus musculus
  siRNA target sequence for Cst9 (NM_009979.1,281-299).
gagaaggtaaattttccaa

SEQ ID NO: 663552 - DNA, 19 bp, Mus musculus
  siRNA target sequence for Cst9 (NM_009979.1,320-338).
cagctgcgtagaaccatat

SEQ ID NO: 663553 - DNA, 19 bp, Mus musculus
  siRNA target sequence for Cst9 (NM_009979.1,323-341).
ctgcgtagaaccatatgca

SEQ ID NO: 663554 - DNA, 19 bp, Mus musculus
  siRNA target sequence for Cst9 (NM_009979.1,386-404).
catggtctgaataatacct

SEQ ID NO: 663555 - DNA, 19 bp, Mus musculus
  siRNA target sequence for Cst9 (NM_009979.1,403-421).
cttcacctgcctgtttact

SEQ ID NO: 663556 - DNA, 19 bp, Mus musculus
  siRNA target sequence for Cst9 (NM_009979.1,415-433).
gtttactgtcggtacctat

SEQ ID NO: 663557 - DNA, 19 bp, Mus musculus
  siRNA target sequence for Cst9 (NM_009979.1,425-443).
ggtacctatccctggataa

SEQ ID NO: 663558 - DNA, 19 bp, Mus musculus
  siRNA target sequence for Cst9 (NM_009979.1,429-447).
cctatccctggataacaaa

SEQ ID NO: 663559 - DNA, 19 bp, Mus musculus
  siRNA target sequence for Cstb (NM_007793.2,164-182).
gcttgaatcgaaagaaaat

SEQ ID NO: 663560 - DNA, 19 bp, Mus musculus
  siRNA target sequence for Cstb (NM_007793.2,281-299).
gcacttgagggtgtttcaa

SEQ ID NO: 663561 - DNA, 19 bp, Mus musculus
  siRNA target sequence for Cstb (NM_007793.2,297-315).
caacccctcccccatgaaa

SEQ ID NO: 663562 - DNA, 19 bp, Mus musculus
  siRNA target sequence for Cstl1 (NM_177655.2,288-306).
caactcgacactccatttt

SEQ ID NO: 663563 - DNA, 19 bp, Mus musculus
  siRNA target sequence for Cstl1 (NM_177655.2,336-354).
cgacacctacttgtatcaa

SEQ ID NO: 663564 - DNA, 19 bp, Mus musculus
  siRNA target sequence for Cstl1 (NM_177655.2,339-357).
cacctacttgtatcaagtt

SEQ ID NO: 663565 - DNA, 19 bp, Mus musculus
  siRNA target sequence for Cstl1 (NM_177655.2,341-359).
cctacttgtatcaagttca

SEQ ID NO: 663566 - DNA, 19 bp, Mus musculus
  siRNA target sequence for Cstl1 (NM_177655.2,389-407).
ccacaggggtggagtattt

SEQ ID NO: 663567 - DNA, 19 bp, Mus musculus
  siRNA target sequence for Cstl1 (NM_177655.2,420-438).
gattggcaggaccaaatgt

SEQ ID NO: 663568 - DNA, 19 bp, Mus musculus
  siRNA target sequence for Cstl1 (NM_177655.2,424-442).
ggcaggaccaaatgtaaga

SEQ ID NO: 663569 - DNA, 19 bp, Mus musculus
  siRNA target sequence for Cstl1 (NM_177655.2,495-513).
gagcctgatttgcaaatca

SEQ ID NO: 663570 - DNA, 19 bp, Mus musculus
  siRNA target sequence for Cstl1 (NM_177655.2,526-544).
gtaccctggatgaactact

SEQ ID NO: 663571 - DNA, 19 bp, Mus musculus
  siRNA target sequence for Fetub (NM_021564.1,371-389).
caaaaggatggctatatgt

SEQ ID NO: 663572 - DNA, 19 bp, Mus musculus
  siRNA target sequence for Fetub (NM_021564.1,448-466).
gttctacctcacattggat

SEQ ID NO: 663573 - DNA, 19 bp, Mus musculus
  siRNA target sequence for Fetub (NM_021564.1,454-472).
cctcacattggatgtctta

SEQ ID NO: 663574 - DNA, 19 bp, Mus musculus
  siRNA target sequence for Fetub (NM_021564.1,516-534).
gcaaaccgaggatgttcta

SEQ ID NO: 663575 - DNA, 19 bp, Mus musculus
  siRNA target sequence for Fetub (NM_021564.1,521-539).
ccgaggatgttctatgagt

SEQ ID NO: 663576 - DNA, 19 bp, Mus musculus
  siRNA target sequence for Fetub (NM_021564.1,529-547).
gttctatgagtcggtttat

SEQ ID NO: 663577 - DNA, 19 bp, Mus musculus
  siRNA target sequence for Fetub (NM_021564.1,618-636).
cacttcgcccagtttccaa

SEQ ID NO: 663578 - DNA, 19 bp, Mus musculus
  siRNA target sequence for Fetub (NM_021564.1,666-684).
gccctagccccattgactt

SEQ ID NO: 663579 - DNA, 19 bp, Mus musculus
  siRNA target sequence for Fetub (NM_021564.1,672-690).
gccccattgacttgtcaaa

SEQ ID NO: 663580 - DNA, 19 bp, Mus musculus
  siRNA target sequence for Fetub (NM_021564.1,711-729).
ccacggagtcgcttgcaaa

SEQ ID NO: 663581 - DNA, 19 bp, Mus musculus
  siRNA target sequence for Fetub (NM_021564.1,714-732).
cggagtcgcttgcaaagtt

SEQ ID NO: 663582 - DNA, 19 bp, Mus musculus
  siRNA target sequence for Fetub (NM_021564.1,722-740).
cttgcaaagttcaacagta

SEQ ID NO: 663583 - DNA, 19 bp, Mus musculus
  siRNA target sequence for Fetub (NM_021564.1,736-754).
cagtaagagcccctcaaaa

SEQ ID NO: 663584 - DNA, 19 bp, Mus musculus
  siRNA target sequence for Fetub (NM_021564.1,738-756).
gtaagagcccctcaaaaaa

SEQ ID NO: 663585 - DNA, 19 bp, Mus musculus
  siRNA target sequence for Fetub (NM_021564.1,809-827).
gcttactatgtggaatatt

SEQ ID NO: 663586 - DNA, 19 bp, Mus musculus
  siRNA target sequence for Fetub (NM_021564.1,886-904).
ctctgagcccgttggtatt

SEQ ID NO: 663587 - DNA, 19 bp, Mus musculus
  siRNA target sequence for Fetub (NM_021564.1,911-929).
ggttctacggtccaaagtt

SEQ ID NO: 663588 - DNA, 19 bp, Mus musculus
  siRNA target sequence for Fetub (NM_021564.1,952-970).
ccaacccgtagaaaagtct

SEQ ID NO: 663589 - DNA, 19 bp, Mus musculus
  siRNA target sequence for Fetub (NM_021564.1,984-1002).
gtgagttcttcgaatctca

SEQ ID NO: 663590 - DNA, 19 bp, Mus musculus
  siRNA target sequence for Fetub (NM_021564.1,1216-1234).
ccagggggacacactagat

SEQ ID NO: 663591 - DNA, 19 bp, Mus musculus
  siRNA target sequence for Hrg (NM_053176.1,142-160).
gttctagacctgatcaata

SEQ ID NO: 663592 - DNA, 19 bp, Mus musculus
  siRNA target sequence for Hrg (NM_053176.1,227-245).
gaacggccacagtctacta

SEQ ID NO: 663593 - DNA, 19 bp, Mus musculus
  siRNA target sequence for Hrg (NM_053176.1,230-248).
cggccacagtctactactt

SEQ ID NO: 663594 - DNA, 19 bp, Mus musculus
  siRNA target sequence for Hrg (NM_053176.1,314-332).
catcgaggtggcaatctga

SEQ ID NO: 663595 - DNA, 19 bp, Mus musculus
  siRNA target sequence for Hrg (NM_053176.1,320-338).
ggtggcaatctgaaatagt

SEQ ID NO: 663596 - DNA, 19 bp, Mus musculus
  siRNA target sequence for Hrg (NM_053176.1,339-357).
gattggacaatgtaaggta

SEQ ID NO: 663597 - DNA, 19 bp, Mus musculus
  siRNA target sequence for Hrg (NM_053176.1,362-380).
ccacaagatactcaaatga

SEQ ID NO: 663598 - DNA, 19 bp, Mus musculus
  siRNA target sequence for Hrg (NM_053176.1,372-390).
ctcaaatgagtctcaagat

SEQ ID NO: 663599 - DNA, 19 bp, Mus musculus
  siRNA target sequence for Hrg (NM_053176.1,434-452).
cagcacttcgcaataccaa

SEQ ID NO: 663600 - DNA, 19 bp, Mus musculus
  siRNA target sequence for Hrg (NM_053176.1,461-479).
ctgtactcttggacttctt

SEQ ID NO: 663601 - DNA, 19 bp, Mus musculus
  siRNA target sequence for Hrg (NM_053176.1,489-507).
cgagctctacagaaagcaa

SEQ ID NO: 663602 - DNA, 19 bp, Mus musculus
  siRNA target sequence for Hrg (NM_053176.1,512-530).
gtaaagccctggacaagta

SEQ ID NO: 663603 - DNA, 19 bp, Mus musculus
  siRNA target sequence for Hrg (NM_053176.1,525-543).
caagtacaaaacggataat

SEQ ID NO: 663604 - DNA, 19 bp, Mus musculus
  siRNA target sequence for Hrg (NM_053176.1,528-546).
gtacaaaacggataatggt

SEQ ID NO: 663605 - DNA, 19 bp, Mus musculus
  siRNA target sequence for Hrg (NM_053176.1,571-589).
cgggcagaacgggttataa

SEQ ID NO: 663606 - DNA, 19 bp, Mus musculus
  siRNA target sequence for Hrg (NM_053176.1,573-591).
ggcagaacgggttataaga

SEQ ID NO: 663607 - DNA, 19 bp, Mus musculus
  siRNA target sequence for Hrg (NM_053176.1,601-619).
ggggaaagaaccaattact

SEQ ID NO: 663608 - DNA, 19 bp, Mus musculus
  siRNA target sequence for Hrg (NM_053176.1,694-712).
gcacttttgtcctacagta

SEQ ID NO: 663609 - DNA, 19 bp, Mus musculus
  siRNA target sequence for Hrg (NM_053176.1,735-753).
cccagattccattgatata

SEQ ID NO: 663610 - DNA, 19 bp, Mus musculus
  siRNA target sequence for Hrg (NM_053176.1,758-776).
gcgaagtcttcaacattga

SEQ ID NO: 663611 - DNA, 19 bp, Mus musculus
  siRNA target sequence for Hrg (NM_053176.1,822-840).
gcgtcctctttgtgacaaa

SEQ ID NO: 663612 - DNA, 19 bp, Mus musculus
  siRNA target sequence for Hrg (NM_053176.1,871-889).
catcatcatacccataaga

SEQ ID NO: 663613 - DNA, 19 bp, Mus musculus
  siRNA target sequence for Hrg (NM_053176.1,939-957).
cagaccacgccttcaagaa

SEQ ID NO: 663614 - DNA, 19 bp, Mus musculus
  siRNA target sequence for Hrg (NM_053176.1,1013-1031).
cccatagaccctcttataa

SEQ ID NO: 663615 - DNA, 19 bp, Mus musculus
  siRNA target sequence for Hrg (NM_053176.1,1014-1032).
ccatagaccctcttataat

SEQ ID NO: 663616 - DNA, 19 bp, Mus musculus
  siRNA target sequence for Hrg (NM_053176.1,1025-1043).
cttataatcacagttgtaa

SEQ ID NO: 663617 - DNA, 19 bp, Mus musculus
  siRNA target sequence for Hrg (NM_053176.1,1290-1308).
gccctccaatagtcaagaa

SEQ ID NO: 663618 - DNA, 19 bp, Mus musculus
  siRNA target sequence for Hrg (NM_053176.1,1292-1310).
cctccaatagtcaagaact

SEQ ID NO: 663619 - DNA, 19 bp, Mus musculus
  siRNA target sequence for Hrg (NM_053176.1,1295-1313).
ccaatagtcaagaactcaa

SEQ ID NO: 663620 - DNA, 19 bp, Mus musculus
  siRNA target sequence for Hrg (NM_053176.1,1392-1410).
ccaccaccaacaaattgga

SEQ ID NO: 663621 - DNA, 19 bp, Mus musculus
  siRNA target sequence for Hrg (NM_053176.1,1419-1437).
ccgactccctccactgaat

SEQ ID NO: 663622 - DNA, 19 bp, Mus musculus
  siRNA target sequence for Hrg (NM_053176.1,1420-1438).
cgactccctccactgaata

SEQ ID NO: 663623 - DNA, 19 bp, Mus musculus
  siRNA target sequence for Hrg (NM_053176.1,1425-1443).
ccctccactgaatataggt

SEQ ID NO: 663624 - DNA, 19 bp, Mus musculus
  siRNA target sequence for Hrg (NM_053176.1,1547-1565).
ggtcatgtccagggaaatt

SEQ ID NO: 663625 - DNA, 19 bp, Mus musculus
  siRNA target sequence for Hrg (NM_053176.1,1550-1568).
catgtccagggaaatttga

SEQ ID NO: 663626 - DNA, 19 bp, Mus musculus
  siRNA target sequence for Hrg (NM_053176.1,1590-1608).
caagttttttggatataca

SEQ ID NO: 663627 - DNA, 19 bp, Mus musculus
  siRNA target sequence for Hrg (NM_053176.1,1600-1618).
ggatatacacctccaaaat

SEQ ID NO: 663628 - DNA, 19 bp, Mus musculus
  siRNA target sequence for Ngp (NM_008694.1,68-86).
gctgtggaagacctttgta

SEQ ID NO: 663629 - DNA, 19 bp, Mus musculus
  siRNA target sequence for Ngp (NM_008694.1,73-91).
ggaagacctttgtattggt

SEQ ID NO: 663630 - DNA, 19 bp, Mus musculus
  siRNA target sequence for Ngp (NM_008694.1,119-137).
ggcccttcgacaactaaga

SEQ ID NO: 663631 - DNA, 19 bp, Mus musculus
  siRNA target sequence for Ngp (NM_008694.1,121-139).
cccttcgacaactaagata

SEQ ID NO: 663632 - DNA, 19 bp, Mus musculus
  siRNA target sequence for Ngp (NM_008694.1,122-140).
ccttcgacaactaagatat

SEQ ID NO: 663633 - DNA, 19 bp, Mus musculus
  siRNA target sequence for Ngp (NM_008694.1,300-318).
gagagacagcctaaagact

SEQ ID NO: 663634 - DNA, 19 bp, Mus musculus
  siRNA target sequence for Ngp (NM_008694.1,420-438).
cgagaggatacccaagaaa

SEQ ID NO: 663635 - DNA, 19 bp, Mus musculus
  siRNA target sequence for Stfa3 (NM_025288.1,163-181).
cgaggctgtcgagtataaa

SEQ ID NO: 663636 - DNA, 19 bp, Mus musculus
  siRNA target sequence for Timp1 (NM_011593.1,121-139).
ctggtcataagggctaaat

SEQ ID NO: 663637 - DNA, 19 bp, Mus musculus
  siRNA target sequence for Timp1 (NM_011593.1,124-142).
gtcataagggctaaattca

SEQ ID NO: 663638 - DNA, 19 bp, Mus musculus
  siRNA target sequence for Timp1 (NM_011593.1,170-188).
ccttataccagcgttataa

SEQ ID NO: 663639 - DNA, 19 bp, Mus musculus
  siRNA target sequence for Timp1 (NM_011593.1,178-196).
cagcgttataagatcaaga

SEQ ID NO: 663640 - DNA, 19 bp, Mus musculus
  siRNA target sequence for Timp1 (NM_011593.1,306-324).
gaaccgcagtgaagagttt

SEQ ID NO: 663641 - DNA, 19 bp, Mus musculus
  siRNA target sequence for Timp1 (NM_011593.1,549-567).
ctaccagagccgtcacttt

SEQ ID NO: 663642 - DNA, 19 bp, Mus musculus
  siRNA target sequence for Timp2 (NM_011594.2,318-336).
ccgcaacaggcgttttgca

SEQ ID NO: 663643 - DNA, 19 bp, Mus musculus
  siRNA target sequence for Timp2 (NM_011594.2,319-337).
cgcaacaggcgttttgcaa

SEQ ID NO: 663644 - DNA, 19 bp, Mus musculus
  siRNA target sequence for Timp2 (NM_011594.2,320-338).
gcaacaggcgttttgcaat

SEQ ID NO: 663645 - DNA, 19 bp, Mus musculus
  siRNA target sequence for Timp2 (NM_011594.2,334-352).
gcaatgcagacgtagtgat

SEQ ID NO: 663646 - DNA, 19 bp, Mus musculus
  siRNA target sequence for Timp2 (NM_011594.2,381-399).
gtggattccgggaatgaca

SEQ ID NO: 663647 - DNA, 19 bp, Mus musculus
  siRNA target sequence for Timp2 (NM_011594.2,413-431).
catcaagaggattcagtat

SEQ ID NO: 663648 - DNA, 19 bp, Mus musculus
  siRNA target sequence for Timp2 (NM_011594.2,421-439).
ggattcagtatgagatcaa

SEQ ID NO: 663649 - DNA, 19 bp, Mus musculus
  siRNA target sequence for Timp2 (NM_011594.2,465-483).
gacaaagacatcgagttta

SEQ ID NO: 663650 - DNA, 19 bp, Mus musculus
  siRNA target sequence for Timp2 (NM_011594.2,471-489).
gacatcgagtttatctaca

SEQ ID NO: 663651 - DNA, 19 bp, Mus musculus
  siRNA target sequence for Timp2 (NM_011594.2,539-557).
gaaggagtatctaattgca

SEQ ID NO: 663652 - DNA, 19 bp, Mus musculus
  siRNA target sequence for Timp2 (NM_011594.2,613-631).
cctgggacacgcttagcat

SEQ ID NO: 663653 - DNA, 19 bp, Mus musculus
  siRNA target sequence for Timp3 (NM_011595.1,504-522).
ctattaagcagatgaagat

SEQ ID NO: 663654 - DNA, 19 bp, Mus musculus
  siRNA target sequence for Timp3 (NM_011595.1,548-566).
cacgtgcagtacattcaca

SEQ ID NO: 663655 - DNA, 19 bp, Mus musculus
  siRNA target sequence for Timp3 (NM_011595.1,565-583).
cacggaagcctctgaaagt

SEQ ID NO: 663656 - DNA, 19 bp, Mus musculus
  siRNA target sequence for Timp3 (NM_011595.1,588-606).
gtggcctcaagctagaagt

SEQ ID NO: 663657 - DNA, 19 bp, Mus musculus
  siRNA target sequence for Timp3 (NM_011595.1,591-609).
gcctcaagctagaagtcaa

SEQ ID NO: 663658 - DNA, 19 bp, Mus musculus
  siRNA target sequence for Timp3 (NM_011595.1,707-725).
cagcgcaagggcctcaatt

SEQ ID NO: 663659 - DNA, 19 bp, Mus musculus
  siRNA target sequence for Timp3 (NM_011595.1,765-783).
gctactacttgccttgttt

SEQ ID NO: 663660 - DNA, 19 bp, Mus musculus
  siRNA target sequence for Timp3 (NM_011595.1,766-784).
ctactacttgccttgtttt

SEQ ID NO: 663661 - DNA, 19 bp, Mus musculus
  siRNA target sequence for Timp3 (NM_011595.1,813-831).
ccgacatgctctccaattt

SEQ ID NO: 663662 - DNA, 19 bp, Mus musculus
  siRNA target sequence for Timp3 (NM_011595.1,814-832).
cgacatgctctccaatttt

SEQ ID NO: 663663 - DNA, 19 bp, Mus musculus
  siRNA target sequence for Timp3 (NM_011595.1,833-851).
gggtaccctggctatcagt

SEQ ID NO: 663664 - DNA, 19 bp, Mus musculus
  siRNA target sequence for Timp3 (NM_011595.1,842-860).
ggctatcagtccaaacact

SEQ ID NO: 663665 - DNA, 19 bp, Mus musculus
  siRNA target sequence for Timp3 (NM_011595.1,843-861).
gctatcagtccaaacacta

SEQ ID NO: 663666 - DNA, 19 bp, Mus musculus
  siRNA target sequence for Timp4 (NM_080639.2,195-213).
gccactcggctctagtgat

SEQ ID NO: 663667 - DNA, 19 bp, Mus musculus
  siRNA target sequence for Timp4 (NM_080639.2,196-214).
ccactcggctctagtgata

SEQ ID NO: 663668 - DNA, 19 bp, Mus musculus
  siRNA target sequence for Timp4 (NM_080639.2,264-282).
ctgacactcaaaaactgat

SEQ ID NO: 663669 - DNA, 19 bp, Mus musculus
  siRNA target sequence for Timp4 (NM_080639.2,278-296).
ctgatccggtatgaaatca

SEQ ID NO: 663670 - DNA, 19 bp, Mus musculus
  siRNA target sequence for Timp4 (NM_080639.2,280-298).
gatccggtatgaaatcaaa

SEQ ID NO: 663671 - DNA, 19 bp, Mus musculus
  siRNA target sequence for Timp4 (NM_080639.2,284-302).
cggtatgaaatcaaacaga

SEQ ID NO: 663672 - DNA, 19 bp, Mus musculus
  siRNA target sequence for Timp4 (NM_080639.2,347-365).
gtctacacgccatttgact

SEQ ID NO: 663673 - DNA, 19 bp, Mus musculus
  siRNA target sequence for Timp4 (NM_080639.2,403-421).
caagcagtatcttttgact

SEQ ID NO: 663674 - DNA, 19 bp, Mus musculus
  siRNA target sequence for Timp4 (NM_080639.2,504-522).
gggagagcctgaatcatca

SEQ ID NO: 663675 - DNA, 19 bp, Mus musculus
  siRNA target sequence for Timp4 (NM_080639.2,544-562).
ccaaatcaccacttgctat

SEQ ID NO: 663676 - DNA, 19 bp, Mus musculus
  siRNA target sequence for Timp4 (NM_080639.2,714-732).
ggaaggagtacgttgacat

SEQ ID NO: 663677 - DNA, 19 bp, Mus musculus
  siRNA target sequence for A2m (NM_175628.2,243-261).
cacctaaacgagacagtaa

SEQ ID NO: 663678 - DNA, 19 bp, Mus musculus
  siRNA target sequence for A2m (NM_175628.2,251-269).
cgagacagtaacagtgaaa

SEQ ID NO: 663679 - DNA, 19 bp, Mus musculus
  siRNA target sequence for A2m (NM_175628.2,305-323).
cttcactgaccttgttgtt

SEQ ID NO: 663680 - DNA, 19 bp, Mus musculus
  siRNA target sequence for A2m (NM_175628.2,359-377).
cccacagtcttcatccaat

SEQ ID NO: 663681 - DNA, 19 bp, Mus musculus
  siRNA target sequence for A2m (NM_175628.2,440-458).
ggtgctgatcaagactaaa

SEQ ID NO: 663682 - DNA, 19 bp, Mus musculus
  siRNA target sequence for A2m (NM_175628.2,444-462).
ctgatcaagactaaagaga

SEQ ID NO: 663683 - DNA, 19 bp, Mus musculus
  siRNA target sequence for A2m (NM_175628.2,481-499).
ctgacaagcccatctacaa

SEQ ID NO: 663684 - DNA, 19 bp, Mus musculus
  siRNA target sequence for A2m (NM_175628.2,517-535).
gatttcgtgttgtctcatt

SEQ ID NO: 663685 - DNA, 19 bp, Mus musculus
  siRNA target sequence for A2m (NM_175628.2,528-546).
gtctcattggacgaaaatt

SEQ ID NO: 663686 - DNA, 19 bp, Mus musculus
  siRNA target sequence for A2m (NM_175628.2,532-550).
cattggacgaaaatttcca

SEQ ID NO: 663687 - DNA, 19 bp, Mus musculus
  siRNA target sequence for A2m (NM_175628.2,566-584).
gattcctctactgtacatt

SEQ ID NO: 663688 - DNA, 19 bp, Mus musculus
  siRNA target sequence for A2m (NM_175628.2,696-714).
gtggtgatacgtacagaat

SEQ ID NO: 663689 - DNA, 19 bp, Mus musculus
  siRNA target sequence for A2m (NM_175628.2,698-716).
ggtgatacgtacagaatca

SEQ ID NO: 663690 - DNA, 19 bp, Mus musculus
  siRNA target sequence for A2m (NM_175628.2,890-908).
cagaaagtacagtaatcct

SEQ ID NO: 663691 - DNA, 19 bp, Mus musculus
  siRNA target sequence for A2m (NM_175628.2,932-950).
gctggctttctgtgagaaa

SEQ ID NO: 663692 - DNA, 19 bp, Mus musculus
  siRNA target sequence for A2m (NM_175628.2,1013-1031).
gctaaagaggcaagagtat

SEQ ID NO: 663693 - DNA, 19 bp, Mus musculus
  siRNA target sequence for A2m (NM_175628.2,1090-1108).
ccggtaaagggctcactaa

SEQ ID NO: 663694 - DNA, 19 bp, Mus musculus
  siRNA target sequence for A2m (NM_175628.2,1140-1158).
gtgaacgtggatacacatt

SEQ ID NO: 663695 - DNA, 19 bp, Mus musculus
  siRNA target sequence for A2m (NM_175628.2,1211-1229).
cacccctattccatatgaa

SEQ ID NO: 663696 - DNA, 19 bp, Mus musculus
  siRNA target sequence for A2m (NM_175628.2,1466-1484).
ggaatccctgccctataaa

SEQ ID NO: 663697 - DNA, 19 bp, Mus musculus
  siRNA target sequence for A2m (NM_175628.2,1505-1523).
ggcggtccaggctcattat

SEQ ID NO: 663698 - DNA, 19 bp, Mus musculus
  siRNA target sequence for A2m (NM_175628.2,1506-1524).
gcggtccaggctcattata

SEQ ID NO: 663699 - DNA, 19 bp, Mus musculus
  siRNA target sequence for A2m (NM_175628.2,1507-1525).
cggtccaggctcattatat

SEQ ID NO: 663700 - DNA, 19 bp, Mus musculus
  siRNA target sequence for A2m (NM_175628.2,1508-1526).
ggtccaggctcattatatt

SEQ ID NO: 663701 - DNA, 19 bp, Mus musculus
  siRNA target sequence for A2m (NM_175628.2,1511-1529).
ccaggctcattatattcta

SEQ ID NO: 663702 - DNA, 19 bp, Mus musculus
  siRNA target sequence for A2m (NM_175628.2,1512-1530).
caggctcattatattctaa

SEQ ID NO: 663703 - DNA, 19 bp, Mus musculus
  siRNA target sequence for A2m (NM_175628.2,1514-1532).
ggctcattatattctaaat

SEQ ID NO: 663704 - DNA, 19 bp, Mus musculus
  siRNA target sequence for A2m (NM_175628.2,1552-1570).
ggaaggagttggtcttcta

SEQ ID NO: 663705 - DNA, 19 bp, Mus musculus
  siRNA target sequence for A2m (NM_175628.2,1553-1571).
gaaggagttggtcttctat

SEQ ID NO: 663706 - DNA, 19 bp, Mus musculus
  siRNA target sequence for A2m (NM_175628.2,1556-1574).
ggagttggtcttctattat

SEQ ID NO: 663707 - DNA, 19 bp, Mus musculus
  siRNA target sequence for A2m (NM_175628.2,1583-1601).
ggcaaagggaggcattgtt

SEQ ID NO: 663708 - DNA, 19 bp, Mus musculus
  siRNA target sequence for A2m (NM_175628.2,1695-1713).
gctcgactggtcctttata

SEQ ID NO: 663709 - DNA, 19 bp, Mus musculus
  siRNA target sequence for A2m (NM_175628.2,1698-1716).
cgactggtcctttatacca

SEQ ID NO: 663710 - DNA, 19 bp, Mus musculus
  siRNA target sequence for A2m (NM_175628.2,1736-1754).
ggttggagatactgttaaa

SEQ ID NO: 663711 - DNA, 19 bp, Mus musculus
  siRNA target sequence for A2m (NM_175628.2,1927-1945).
catccctggtttatgatct

SEQ ID NO: 663712 - DNA, 19 bp, Mus musculus
  siRNA target sequence for A2m (NM_175628.2,1973-1991).
ccctaagggtgtgaatcaa

SEQ ID NO: 663713 - DNA, 19 bp, Mus musculus
  siRNA target sequence for A2m (NM_175628.2,1975-1993).
ctaagggtgtgaatcaaca

SEQ ID NO: 663714 - DNA, 19 bp, Mus musculus
  siRNA target sequence for A2m (NM_175628.2,2068-2086).
caaatgaagaggacatgta

SEQ ID NO: 663715 - DNA, 19 bp, Mus musculus
  siRNA target sequence for A2m (NM_175628.2,2099-2117).
ggatatgggcttaaaggta

SEQ ID NO: 663716 - DNA, 19 bp, Mus musculus
  siRNA target sequence for A2m (NM_175628.2,2100-2118).
gatatgggcttaaaggtat

SEQ ID NO: 663717 - DNA, 19 bp, Mus musculus
  siRNA target sequence for A2m (NM_175628.2,2154-2172).
gaacgccttggagtcaata

SEQ ID NO: 663718 - DNA, 19 bp, Mus musculus
  siRNA target sequence for A2m (NM_175628.2,2157-2175).
cgccttggagtcaataaaa

SEQ ID NO: 663719 - DNA, 19 bp, Mus musculus
  siRNA target sequence for A2m (NM_175628.2,2181-2199).
gctgcataccaccttgtaa

SEQ ID NO: 663720 - DNA, 19 bp, Mus musculus
  siRNA target sequence for A2m (NM_175628.2,2637-2655).
gcggtgatccccaagtcat

SEQ ID NO: 663721 - DNA, 19 bp, Mus musculus
  siRNA target sequence for A2m (NM_175628.2,2638-2656).
cggtgatccccaagtcatt

SEQ ID NO: 663722 - DNA, 19 bp, Mus musculus
  siRNA target sequence for A2m (NM_175628.2,2642-2660).
gatccccaagtcattagga

SEQ ID NO: 663723 - DNA, 19 bp, Mus musculus
  siRNA target sequence for A2m (NM_175628.2,2645-2663).
ccccaagtcattaggaaat

SEQ ID NO: 663724 - DNA, 19 bp, Mus musculus
  siRNA target sequence for A2m (NM_175628.2,2836-2854).
ctgaggtatcggaacagat

SEQ ID NO: 663725 - DNA, 19 bp, Mus musculus
  siRNA target sequence for A2m (NM_175628.2,2840-2858).
ggtatcggaacagatatct

SEQ ID NO: 663726 - DNA, 19 bp, Mus musculus
  siRNA target sequence for A2m (NM_175628.2,2895-2913).
cgagcttctgtcacagttt

SEQ ID NO: 663727 - DNA, 19 bp, Mus musculus
  siRNA target sequence for A2m (NM_175628.2,2993-3011).
ggttctgtttgctcctaat

SEQ ID NO: 663728 - DNA, 19 bp, Mus musculus
  siRNA target sequence for A2m (NM_175628.2,2997-3015).
ctgtttgctcctaatatct

SEQ ID NO: 663729 - DNA, 19 bp, Mus musculus
  siRNA target sequence for A2m (NM_175628.2,2999-3017).
gtttgctcctaatatctat

SEQ ID NO: 663730 - DNA, 19 bp, Mus musculus
  siRNA target sequence for A2m (NM_175628.2,3071-3089).
ggccattacctatctcaat

SEQ ID NO: 663731 - DNA, 19 bp, Mus musculus
  siRNA target sequence for A2m (NM_175628.2,3072-3090).
gccattacctatctcaata

SEQ ID NO: 663732 - DNA, 19 bp, Mus musculus
  siRNA target sequence for A2m (NM_175628.2,3084-3102).
ctcaatacgggttaccaaa

SEQ ID NO: 663733 - DNA, 19 bp, Mus musculus
  siRNA target sequence for A2m (NM_175628.2,3091-3109).
cgggttaccaaagacaatt

SEQ ID NO: 663734 - DNA, 19 bp, Mus musculus
  siRNA target sequence for A2m (NM_175628.2,3092-3110).
gggttaccaaagacaatta

SEQ ID NO: 663735 - DNA, 19 bp, Mus musculus
  siRNA target sequence for A2m (NM_175628.2,3093-3111).
ggttaccaaagacaattaa

SEQ ID NO: 663736 - DNA, 19 bp, Mus musculus
  siRNA target sequence for A2m (NM_175628.2,3094-3112).
gttaccaaagacaattaaa

SEQ ID NO: 663737 - DNA, 19 bp, Mus musculus
  siRNA target sequence for A2m (NM_175628.2,3099-3117).
caaagacaattaaactaca

SEQ ID NO: 663738 - DNA, 19 bp, Mus musculus
  siRNA target sequence for A2m (NM_175628.2,3123-3141).
cgggatggctcctacagta

SEQ ID NO: 663739 - DNA, 19 bp, Mus musculus
  siRNA target sequence for A2m (NM_175628.2,3137-3155).
cagtacttttggggataaa

SEQ ID NO: 663740 - DNA, 19 bp, Mus musculus
  siRNA target sequence for A2m (NM_175628.2,3189-3207).
gcctttgtactgaagagtt

SEQ ID NO: 663741 - DNA, 19 bp, Mus musculus
  siRNA target sequence for A2m (NM_175628.2,3210-3228).
gctcaggctcgaagatata

SEQ ID NO: 663742 - DNA, 19 bp, Mus musculus
  siRNA target sequence for A2m (NM_175628.2,3213-3231).
caggctcgaagatatatct

SEQ ID NO: 663743 - DNA, 19 bp, Mus musculus
  siRNA target sequence for A2m (NM_175628.2,3216-3234).
gctcgaagatatatcttca

SEQ ID NO: 663744 - DNA, 19 bp, Mus musculus
  siRNA target sequence for A2m (NM_175628.2,3217-3235).
ctcgaagatatatcttcat

SEQ ID NO: 663745 - DNA, 19 bp, Mus musculus
  siRNA target sequence for A2m (NM_175628.2,3310-3328).
ccgggtcactgctcaacaa

SEQ ID NO: 663746 - DNA, 19 bp, Mus musculus
  siRNA target sequence for A2m (NM_175628.2,3311-3329).
cgggtcactgctcaacaat

SEQ ID NO: 663747 - DNA, 19 bp, Mus musculus
  siRNA target sequence for A2m (NM_175628.2,3423-3441).
gtccgaaatgccctctttt

SEQ ID NO: 663748 - DNA, 19 bp, Mus musculus
  siRNA target sequence for A2m (NM_175628.2,3572-3590).
cgatgaggaggcggtaaaa

SEQ ID NO: 663749 - DNA, 19 bp, Mus musculus
  siRNA target sequence for A2m (NM_175628.2,3581-3599).
ggcggtaaaagaagacaat

SEQ ID NO: 663750 - DNA, 19 bp, Mus musculus
  siRNA target sequence for A2m (NM_175628.2,3582-3600).
gcggtaaaagaagacaatt

SEQ ID NO: 663751 - DNA, 19 bp, Mus musculus
  siRNA target sequence for A2m (NM_175628.2,3854-3872).
cggagcagctactttcaca

SEQ ID NO: 663752 - DNA, 19 bp, Mus musculus
  siRNA target sequence for A2m (NM_175628.2,3855-3873).
ggagcagctactttcacaa

SEQ ID NO: 663753 - DNA, 19 bp, Mus musculus
  siRNA target sequence for A2m (NM_175628.2,3910-3928).
ctggcgcattttatacaaa

SEQ ID NO: 663754 - DNA, 19 bp, Mus musculus
  siRNA target sequence for A2m (NM_175628.2,3944-3962).
cgacaaccagttattatta

SEQ ID NO: 663755 - DNA, 19 bp, Mus musculus
  siRNA target sequence for A2m (NM_175628.2,3992-4010).
ggattacaccgcaaaggta

SEQ ID NO: 663756 - DNA, 19 bp, Mus musculus
  siRNA target sequence for A2m (NM_175628.2,4031-4049).
cctccagacatccttgaaa

SEQ ID NO: 663757 - DNA, 19 bp, Mus musculus
  siRNA target sequence for A2m (NM_175628.2,4032-4050).
ctccagacatccttgaaat

SEQ ID NO: 663758 - DNA, 19 bp, Mus musculus
  siRNA target sequence for A2m (NM_175628.2,4034-4052).
ccagacatccttgaaatat

SEQ ID NO: 663759 - DNA, 19 bp, Mus musculus
  siRNA target sequence for A2m (NM_175628.2,4037-4055).
gacatccttgaaatatagt

SEQ ID NO: 663760 - DNA, 19 bp, Mus musculus
  siRNA target sequence for A2m (NM_175628.2,4111-4129).
ggacttgtgaggatctcaa

SEQ ID NO: 663761 - DNA, 19 bp, Mus musculus
  siRNA target sequence for A2m (NM_175628.2,4112-4130).
gacttgtgaggatctcaaa

SEQ ID NO: 663762 - DNA, 19 bp, Mus musculus
  siRNA target sequence for A2m (NM_175628.2,4153-4171).
cactcaatatcagttacat

SEQ ID NO: 663763 - DNA, 19 bp, Mus musculus
  siRNA target sequence for A2m (NM_175628.2,4281-4299).
cggacggaagtcagcaata

SEQ ID NO: 663764 - DNA, 19 bp, Mus musculus
  siRNA target sequence for A2m (NM_175628.2,4282-4300).
ggacggaagtcagcaataa

SEQ ID NO: 663765 - DNA, 19 bp, Mus musculus
  siRNA target sequence for A2m (NM_175628.2,4285-4303).
cggaagtcagcaataacca

SEQ ID NO: 663766 - DNA, 19 bp, Mus musculus
  siRNA target sequence for A2m (NM_175628.2,4286-4304).
ggaagtcagcaataaccat

SEQ ID NO: 663767 - DNA, 19 bp, Mus musculus
  siRNA target sequence for A2m (NM_175628.2,4305-4323).
gtcttgatttacttggata

SEQ ID NO: 663768 - DNA, 19 bp, Mus musculus
  siRNA target sequence for A2m (NM_175628.2,4316-4334).
cttggataaggtgtcaaat

SEQ ID NO: 663769 - DNA, 19 bp, Mus musculus
  siRNA target sequence for A2m (NM_175628.2,4320-4338).
gataaggtgtcaaatcaga

SEQ ID NO: 663770 - DNA, 19 bp, Mus musculus
  siRNA target sequence for A2m (NM_175628.2,4355-4373).
catggtgcagcaagatatt

SEQ ID NO: 663771 - DNA, 19 bp, Mus musculus
  siRNA target sequence for A2m (NM_175628.2,4418-4436).
ctacgagaaagatgagttt

SEQ ID NO: 663772 - DNA, 19 bp, Mus musculus
  siRNA target sequence for AI182371 (NM_178885.2,34-52).
gggcttttggggaacactt

SEQ ID NO: 663773 - DNA, 19 bp, Mus musculus
  siRNA target sequence for AI182371 (NM_178885.2,45-63).
gaacacttctgtttctgat

SEQ ID NO: 663774 - DNA, 19 bp, Mus musculus
  siRNA target sequence for AI182371 (NM_178885.2,59-77).
ctgatcttccttgaacaaa

SEQ ID NO: 663775 - DNA, 19 bp, Mus musculus
  siRNA target sequence for AI182371 (NM_178885.2,165-183).
gccatactgaggcatttga

SEQ ID NO: 663776 - DNA, 19 bp, Mus musculus
  siRNA target sequence for AI182371 (NM_178885.2,167-185).
catactgaggcatttgaca

SEQ ID NO: 663777 - DNA, 19 bp, Mus musculus
  siRNA target sequence for AI182371 (NM_178885.2,193-211).
ctctgtaaaaagttatcct

SEQ ID NO: 663778 - DNA, 19 bp, Mus musculus
  siRNA target sequence for AI182371 (NM_178885.2,204-222).
gttatcctgatgaaaatgt

SEQ ID NO: 663779 - DNA, 19 bp, Mus musculus
  siRNA target sequence for AI182371 (NM_178885.2,210-228).
ctgatgaaaatgttcgtta

SEQ ID NO: 663780 - DNA, 19 bp, Mus musculus
  siRNA target sequence for AI182371 (NM_178885.2,215-233).
gaaaatgttcgttactctt

SEQ ID NO: 663781 - DNA, 19 bp, Mus musculus
  siRNA target sequence for AI182371 (NM_178885.2,235-253).
cagcactgttaatttatca

SEQ ID NO: 663782 - DNA, 19 bp, Mus musculus
  siRNA target sequence for AI182371 (NM_178885.2,268-286).
ccaaaacactgcaatctta

SEQ ID NO: 663783 - DNA, 19 bp, Mus musculus
  siRNA target sequence for AI182371 (NM_178885.2,344-362).
gaagtcgtgtcaaagcatt

SEQ ID NO: 663784 - DNA, 19 bp, Mus musculus
  siRNA target sequence for AI182371 (NM_178885.2,349-367).
cgtgtcaaagcattttgca

SEQ ID NO: 663785 - DNA, 19 bp, Mus musculus
  siRNA target sequence for AI182371 (NM_178885.2,350-368).
gtgtcaaagcattttgcaa

SEQ ID NO: 663786 - DNA, 19 bp, Mus musculus
  siRNA target sequence for AI182371 (NM_178885.2,382-400).
gccaatcatctatgacaat

SEQ ID NO: 663787 - DNA, 19 bp, Mus musculus
  siRNA target sequence for AI182371 (NM_178885.2,401-419).
gactctctcttcgttcaaa

SEQ ID NO: 663788 - DNA, 19 bp, Mus musculus
  siRNA target sequence for AI182371 (NM_178885.2,421-439).
cgacaagtccgtgtatact

SEQ ID NO: 663789 - DNA, 19 bp, Mus musculus
  siRNA target sequence for AI182371 (NM_178885.2,441-459).
cacaacagcctgtaaaggt

SEQ ID NO: 663790 - DNA, 19 bp, Mus musculus
  siRNA target sequence for AI182371 (NM_178885.2,462-480).
gtgtctactctgtgaatga

SEQ ID NO: 663791 - DNA, 19 bp, Mus musculus
  siRNA target sequence for AI182371 (NM_178885.2,534-552).
ggtcccaagttgacacaat

SEQ ID NO: 663792 - DNA, 19 bp, Mus musculus
  siRNA target sequence for AI182371 (NM_178885.2,537-555).
cccaagttgacacaataga

SEQ ID NO: 663793 - DNA, 19 bp, Mus musculus
  siRNA target sequence for AI182371 (NM_178885.2,683-701).
gaagttaaagaatacgata

SEQ ID NO: 663794 - DNA, 19 bp, Mus musculus
  siRNA target sequence for AI182371 (NM_178885.2,692-710).
gaatacgataaaacttaca

SEQ ID NO: 663795 - DNA, 19 bp, Mus musculus
  siRNA target sequence for AI182371 (NM_178885.2,796-814).
gtgtctgcgacagaagata

SEQ ID NO: 663796 - DNA, 19 bp, Mus musculus
  siRNA target sequence for AI182371 (NM_178885.2,820-838).
gcaagcttctacatacaaa

SEQ ID NO: 663797 - DNA, 19 bp, Mus musculus
  siRNA target sequence for AI182371 (NM_178885.2,866-884).
gatggggccagatataaca

SEQ ID NO: 663798 - DNA, 19 bp, Mus musculus
  siRNA target sequence for AI182371 (NM_178885.2,870-888).
gggccagatataacataca

SEQ ID NO: 663799 - DNA, 19 bp, Mus musculus
  siRNA target sequence for AI182371 (NM_178885.2,871-889).
ggccagatataacatacat

SEQ ID NO: 663800 - DNA, 19 bp, Mus musculus
  siRNA target sequence for AI182371 (NM_178885.2,873-891).
ccagatataacatacatga

SEQ ID NO: 663801 - DNA, 19 bp, Mus musculus
  siRNA target sequence for AI182371 (NM_178885.2,906-924).
gagctgcccgtgtgaagat

SEQ ID NO: 663802 - DNA, 19 bp, Mus musculus
  siRNA target sequence for C3 (NM_009778.1,70-88).
cagggtcccagctactagt

SEQ ID NO: 663803 - DNA, 19 bp, Mus musculus
  siRNA target sequence for C3 (NM_009778.1,123-141).
ctggggatccccatgtatt

SEQ ID NO: 663804 - DNA, 19 bp, Mus musculus
  siRNA target sequence for C3 (NM_009778.1,126-144).
gggatccccatgtattcca

SEQ ID NO: 663805 - DNA, 19 bp, Mus musculus
  siRNA target sequence for C3 (NM_009778.1,127-145).
ggatccccatgtattccat

SEQ ID NO: 663806 - DNA, 19 bp, Mus musculus
  siRNA target sequence for C3 (NM_009778.1,132-150).
cccatgtattccatcatta

SEQ ID NO: 663807 - DNA, 19 bp, Mus musculus
  siRNA target sequence for C3 (NM_009778.1,134-152).
catgtattccatcattact

SEQ ID NO: 663808 - DNA, 19 bp, Mus musculus
  siRNA target sequence for C3 (NM_009778.1,237-255).
gtgcaagacttcctaaaga

SEQ ID NO: 663809 - DNA, 19 bp, Mus musculus
  siRNA target sequence for C3 (NM_009778.1,333-351).
gccagtaaggaattcaact

SEQ ID NO: 663810 - DNA, 19 bp, Mus musculus
  siRNA target sequence for C3 (NM_009778.1,481-499).
ctggctccactgtcttata

SEQ ID NO: 663811 - DNA, 19 bp, Mus musculus
  siRNA target sequence for C3 (NM_009778.1,617-635).
cggcatcttgcctttgtct

SEQ ID NO: 663812 - DNA, 19 bp, Mus musculus
  siRNA target sequence for C3 (NM_009778.1,670-688).
ggaagatccgagcctttta

SEQ ID NO: 663813 - DNA, 19 bp, Mus musculus
  siRNA target sequence for C3 (NM_009778.1,674-692).
gatccgagccttttacgaa

SEQ ID NO: 663814 - DNA, 19 bp, Mus musculus
  siRNA target sequence for C3 (NM_009778.1,696-714).
gcgccgaagcagatcttct

SEQ ID NO: 663815 - DNA, 19 bp, Mus musculus
  siRNA target sequence for C3 (NM_009778.1,770-788).
gcccacagagacattttat

SEQ ID NO: 663816 - DNA, 19 bp, Mus musculus
  siRNA target sequence for C3 (NM_009778.1,771-789).
cccacagagacattttatt

SEQ ID NO: 663817 - DNA, 19 bp, Mus musculus
  siRNA target sequence for C3 (NM_009778.1,858-876).
gggacagccttcgtgattt

SEQ ID NO: 663818 - DNA, 19 bp, Mus musculus
  siRNA target sequence for C3 (NM_009778.1,860-878).
gacagccttcgtgattttt

SEQ ID NO: 663819 - DNA, 19 bp, Mus musculus
  siRNA target sequence for C3 (NM_009778.1,882-900).
gtccaggatggcgataaga

SEQ ID NO: 663820 - DNA, 19 bp, Mus musculus
  siRNA target sequence for C3 (NM_009778.1,887-905).
ggatggcgataagaagatt

SEQ ID NO: 663821 - DNA, 19 bp, Mus musculus
  siRNA target sequence for C3 (NM_009778.1,888-906).
gatggcgataagaagattt

SEQ ID NO: 663822 - DNA, 19 bp, Mus musculus
  siRNA target sequence for C3 (NM_009778.1,892-910).
gcgataagaagatttctct

SEQ ID NO: 663823 - DNA, 19 bp, Mus musculus
  siRNA target sequence for C3 (NM_009778.1,919-937).
ccctcacgcgcgtagtgat

SEQ ID NO: 663824 - DNA, 19 bp, Mus musculus
  siRNA target sequence for C3 (NM_009778.1,920-938).
cctcacgcgcgtagtgatt

SEQ ID NO: 663825 - DNA, 19 bp, Mus musculus
  siRNA target sequence for C3 (NM_009778.1,1226-1244).
ggtcactcagggatctaat

SEQ ID NO: 663826 - DNA, 19 bp, Mus musculus
  siRNA target sequence for C3 (NM_009778.1,1229-1247).
cactcagggatctaatgca

SEQ ID NO: 663827 - DNA, 19 bp, Mus musculus
  siRNA target sequence for C3 (NM_009778.1,1250-1268).
ggctctcacccaagatgat

SEQ ID NO: 663828 - DNA, 19 bp, Mus musculus
  siRNA target sequence for C3 (NM_009778.1,1266-1284).
gatggcgtggccaagctaa

SEQ ID NO: 663829 - DNA, 19 bp, Mus musculus
  siRNA target sequence for C3 (NM_009778.1,1340-1358).
ggacactctcccagaatca

SEQ ID NO: 663830 - DNA, 19 bp, Mus musculus
  siRNA target sequence for C3 (NM_009778.1,1509-1527).
gccaagatccgatactaca

SEQ ID NO: 663831 - DNA, 19 bp, Mus musculus
  siRNA target sequence for C3 (NM_009778.1,1528-1546).
cctacctggttatgaacaa

SEQ ID NO: 663832 - DNA, 19 bp, Mus musculus
  siRNA target sequence for C3 (NM_009778.1,1624-1642).
cagagtttattccttcatt

SEQ ID NO: 663833 - DNA, 19 bp, Mus musculus
  siRNA target sequence for C3 (NM_009778.1,1644-1662).
cgcctggtggcttactaca

SEQ ID NO: 663834 - DNA, 19 bp, Mus musculus
  siRNA target sequence for C3 (NM_009778.1,2059-2077).
gccgtcgctcagtacagtt

SEQ ID NO: 663835 - DNA, 19 bp, Mus musculus
  siRNA target sequence for C3 (NM_009778.1,2062-2080).
gtcgctcagtacagttgat

SEQ ID NO: 663836 - DNA, 19 bp, Mus musculus
  siRNA target sequence for C3 (NM_009778.1,2151-2169).
cgggatatccctatgagat

SEQ ID NO: 663837 - DNA, 19 bp, Mus musculus
  siRNA target sequence for C3 (NM_009778.1,2152-2170).
gggatatccctatgagata

SEQ ID NO: 663838 - DNA, 19 bp, Mus musculus
  siRNA target sequence for C3 (NM_009778.1,2154-2172).
gatatccctatgagataca

SEQ ID NO: 663839 - DNA, 19 bp, Mus musculus
  siRNA target sequence for C3 (NM_009778.1,2202-2220).
cagggcgagaactgcataa

SEQ ID NO: 663840 - DNA, 19 bp, Mus musculus
  siRNA target sequence for C3 (NM_009778.1,2249-2267).
caccaagctgcgtgaacaa

SEQ ID NO: 663841 - DNA, 19 bp, Mus musculus
  siRNA target sequence for C3 (NM_009778.1,2251-2269).
ccaagctgcgtgaacaaca

SEQ ID NO: 663842 - DNA, 19 bp, Mus musculus
  siRNA target sequence for C3 (NM_009778.1,2366-2384).
ctggttgtggaccatagaa

SEQ ID NO: 663843 - DNA, 19 bp, Mus musculus
  siRNA target sequence for C3 (NM_009778.1,2368-2386).
ggttgtggaccatagaaga

SEQ ID NO: 663844 - DNA, 19 bp, Mus musculus
  siRNA target sequence for C3 (NM_009778.1,2416-2434).
ctacgaaggtcatgaacat

SEQ ID NO: 663845 - DNA, 19 bp, Mus musculus
  siRNA target sequence for C3 (NM_009778.1,2736-2754).
gtggctgtaccgtatgtca

SEQ ID NO: 663846 - DNA, 19 bp, Mus musculus
  siRNA target sequence for C3 (NM_009778.1,2738-2756).
ggctgtaccgtatgtcatt

SEQ ID NO: 663847 - DNA, 19 bp, Mus musculus
  siRNA target sequence for C3 (NM_009778.1,2740-2758).
ctgtaccgtatgtcattgt

SEQ ID NO: 663848 - DNA, 19 bp, Mus musculus
  siRNA target sequence for C3 (NM_009778.1,3007-3025).
ggagcccggtggttcagat

SEQ ID NO: 663849 - DNA, 19 bp, Mus musculus
  siRNA target sequence for C3 (NM_009778.1,3107-3125).
catgacaccaacagtcatt

SEQ ID NO: 663850 - DNA, 19 bp, Mus musculus
  siRNA target sequence for C3 (NM_009778.1,3118-3136).
cagtcattgcggtacacta

SEQ ID NO: 663851 - DNA, 19 bp, Mus musculus
  siRNA target sequence for C3 (NM_009778.1,3148-3166).
ccgaacagtgggagaagtt

SEQ ID NO: 663852 - DNA, 19 bp, Mus musculus
  siRNA target sequence for C3 (NM_009778.1,3354-3372).
ctgtgtggggctgttaaat

SEQ ID NO: 663853 - DNA, 19 bp, Mus musculus
  siRNA target sequence for C3 (NM_009778.1,3392-3410).
gaagccggatggtgtcttt

SEQ ID NO: 663854 - DNA, 19 bp, Mus musculus
  siRNA target sequence for C3 (NM_009778.1,3424-3442).
ccgtgattcaccaagaaat

SEQ ID NO: 663855 - DNA, 19 bp, Mus musculus
  siRNA target sequence for C3 (NM_009778.1,3428-3446).
gattcaccaagaaatgatt

SEQ ID NO: 663856 - DNA, 19 bp, Mus musculus
  siRNA target sequence for C3 (NM_009778.1,3569-3587).
ggcaggggagtatattgaa

SEQ ID NO: 663857 - DNA, 19 bp, Mus musculus
  siRNA target sequence for C3 (NM_009778.1,3641-3659).
cctggccctgatgaacaaa

SEQ ID NO: 663858 - DNA, 19 bp, Mus musculus
  siRNA target sequence for C3 (NM_009778.1,3670-3688).
cttacctcggcaagtttct

SEQ ID NO: 663859 - DNA, 19 bp, Mus musculus
  siRNA target sequence for C3 (NM_009778.1,3864-3882).
caggctaccttcatggtat

SEQ ID NO: 663860 - DNA, 19 bp, Mus musculus
  siRNA target sequence for C3 (NM_009778.1,3884-3902).
ccaagccttggcccaatat

SEQ ID NO: 663861 - DNA, 19 bp, Mus musculus
  siRNA target sequence for C3 (NM_009778.1,3890-3908).
cttggcccaatatcaaaca

SEQ ID NO: 663862 - DNA, 19 bp, Mus musculus
  siRNA target sequence for C3 (NM_009778.1,3893-3911).
ggcccaatatcaaacagat

SEQ ID NO: 663863 - DNA, 19 bp, Mus musculus
  siRNA target sequence for C3 (NM_009778.1,3907-3925).
cagatgtccctgaccataa

SEQ ID NO: 663864 - DNA, 19 bp, Mus musculus
  siRNA target sequence for C3 (NM_009778.1,4082-4100).
gtcggtggtggcagtgtat

SEQ ID NO: 663865 - DNA, 19 bp, Mus musculus
  siRNA target sequence for C3 (NM_009778.1,4084-4102).
cggtggtggcagtgtatca

SEQ ID NO: 663866 - DNA, 19 bp, Mus musculus
  siRNA target sequence for C3 (NM_009778.1,4142-4160).
cctcagggtcagcataaga

SEQ ID NO: 663867 - DNA, 19 bp, Mus musculus
  siRNA target sequence for C3 (NM_009778.1,4239-4257).
gatgtggacgccactatgt

SEQ ID NO: 663868 - DNA, 19 bp, Mus musculus
  siRNA target sequence for C3 (NM_009778.1,4326-4344).
ggagtagatagatacatct

SEQ ID NO: 663869 - DNA, 19 bp, Mus musculus
  siRNA target sequence for C3 (NM_009778.1,4439-4457).
caaagttcaccagtacttt

SEQ ID NO: 663870 - DNA, 19 bp, Mus musculus
  siRNA target sequence for C3 (NM_009778.1,4519-4537).
catgcacccggttctatca

SEQ ID NO: 663871 - DNA, 19 bp, Mus musculus
  siRNA target sequence for C3 (NM_009778.1,4569-4587).
ctgtgccacagtgaaatgt

SEQ ID NO: 663872 - DNA, 19 bp, Mus musculus
  siRNA target sequence for C3 (NM_009778.1,4620-4638).
cagtcacaggagaagatca

SEQ ID NO: 663873 - DNA, 19 bp, Mus musculus
  siRNA target sequence for C3 (NM_009778.1,4671-4689).
cccggagtcgactatgtgt

SEQ ID NO: 663874 - DNA, 19 bp, Mus musculus
  siRNA target sequence for C3 (NM_009778.1,4672-4690).
ccggagtcgactatgtgta

SEQ ID NO: 663875 - DNA, 19 bp, Mus musculus
  siRNA target sequence for C3 (NM_009778.1,4677-4695).
gtcgactatgtgtacaaga

SEQ ID NO: 663876 - DNA, 19 bp, Mus musculus
  siRNA target sequence for C3 (NM_009778.1,4794-4812).
cagcaacgcaagttcatca

SEQ ID NO: 663877 - DNA, 19 bp, Mus musculus
  siRNA target sequence for C4 (NM_009780.1,1244-1262).
cctccaacgttcctgttaa

SEQ ID NO: 663878 - DNA, 19 bp, Mus musculus
  siRNA target sequence for C4 (NM_009780.1,1780-1798).
ggtgccaaggagtatcgta

SEQ ID NO: 663879 - DNA, 19 bp, Mus musculus
  siRNA target sequence for C4 (NM_009780.1,1781-1799).
gtgccaaggagtatcgtaa

SEQ ID NO: 663880 - DNA, 19 bp, Mus musculus
  siRNA target sequence for C4 (NM_009780.1,1795-1813).
cgtaatgcggacatgatga

SEQ ID NO: 663881 - DNA, 19 bp, Mus musculus
  siRNA target sequence for C4 (NM_009780.1,1796-1814).
gtaatgcggacatgatgaa

SEQ ID NO: 663882 - DNA, 19 bp, Mus musculus
  siRNA target sequence for C4 (NM_009780.1,1812-1830).
gaagctccgaattcaaact

SEQ ID NO: 663883 - DNA, 19 bp, Mus musculus
  siRNA target sequence for C4 (NM_009780.1,1884-1902).
gggtggtcggtctcacaaa

SEQ ID NO: 663884 - DNA, 19 bp, Mus musculus
  siRNA target sequence for C4 (NM_009780.1,2020-2038).
ggtgatcgactaactcaaa

SEQ ID NO: 663885 - DNA, 19 bp, Mus musculus
  siRNA target sequence for C4 (NM_009780.1,2116-2134).
gagaagttgggccagtatt

SEQ ID NO: 663886 - DNA, 19 bp, Mus musculus
  siRNA target sequence for C4 (NM_009780.1,2118-2136).
gaagttgggccagtattct

SEQ ID NO: 663887 - DNA, 19 bp, Mus musculus
  siRNA target sequence for C4 (NM_009780.1,2121-2139).
gttgggccagtattcttct

SEQ ID NO: 663888 - DNA, 19 bp, Mus musculus
  siRNA target sequence for C4 (NM_009780.1,2460-2478).
gaccacatgggagattcat

SEQ ID NO: 663889 - DNA, 19 bp, Mus musculus
  siRNA target sequence for C4 (NM_009780.1,2530-2548).
gttcgagtgttcagaaaat

SEQ ID NO: 663890 - DNA, 19 bp, Mus musculus
  siRNA target sequence for C4 (NM_009780.1,2583-2601).
ccgctttgagcagtttgaa

SEQ ID NO: 663891 - DNA, 19 bp, Mus musculus
  siRNA target sequence for C4 (NM_009780.1,2584-2602).
cgctttgagcagtttgaat

SEQ ID NO: 663892 - DNA, 19 bp, Mus musculus
  siRNA target sequence for C4 (NM_009780.1,2585-2603).
gctttgagcagtttgaatt

SEQ ID NO: 663893 - DNA, 19 bp, Mus musculus
  siRNA target sequence for C4 (NM_009780.1,2611-2629).
gttctttacaactatctga

SEQ ID NO: 663894 - DNA, 19 bp, Mus musculus
  siRNA target sequence for C4 (NM_009780.1,2790-2808).
ggtggctcgaggggttttt

SEQ ID NO: 663895 - DNA, 19 bp, Mus musculus
  siRNA target sequence for C4 (NM_009780.1,2793-2811).
ggctcgaggggtttttgat

SEQ ID NO: 663896 - DNA, 19 bp, Mus musculus
  siRNA target sequence for C4 (NM_009780.1,2826-2844).
gtctaagattctccaaatt

SEQ ID NO: 663897 - DNA, 19 bp, Mus musculus
  siRNA target sequence for C4 (NM_009780.1,2883-2901).
caacctcgaccccctaaat

SEQ ID NO: 663898 - DNA, 19 bp, Mus musculus
  siRNA target sequence for C4 (NM_009780.1,3079-3097).
gagcaaaccatgatctatt

SEQ ID NO: 663899 - DNA, 19 bp, Mus musculus
  siRNA target sequence for C4 (NM_009780.1,3139-3157).
gaacagtggagcaaactgt

SEQ ID NO: 663900 - DNA, 19 bp, Mus musculus
  siRNA target sequence for C4 (NM_009780.1,3150-3168).
caaactgtcccctgaaaca

SEQ ID NO: 663901 - DNA, 19 bp, Mus musculus
  siRNA target sequence for C4 (NM_009780.1,3216-3234).
gcagtttcggaagaatgat

SEQ ID NO: 663902 - DNA, 19 bp, Mus musculus
  siRNA target sequence for C4 (NM_009780.1,4952-4970).
ctgccttccgtctctttga

SEQ ID NO: 663903 - DNA, 19 bp, Mus musculus
  siRNA target sequence for C4 (NM_009780.1,5051-5069).
cctcttgccgccttcgttt

SEQ ID NO: 663904 - DNA, 19 bp, Mus musculus
  siRNA target sequence for C4 (NM_009780.1,5066-5084).
gtttggagcctaacaaaga

SEQ ID NO: 663905 - DNA, 19 bp, Mus musculus
  siRNA target sequence for C4 (NM_009780.1,5108-5126).
gggaaaccagtgacaacaa

SEQ ID NO: 663906 - DNA, 19 bp, Mus musculus
  siRNA target sequence for C4 (NM_009780.1,5219-5237).
gtttccagctcaaagactt

SEQ ID NO: 663907 - DNA, 19 bp, Mus musculus
  siRNA target sequence for Cd109 (NM_153098.2,259-277).
ccccacaggtccttgtaaa

SEQ ID NO: 663908 - DNA, 19 bp, Mus musculus
  siRNA target sequence for Cd109 (NM_153098.2,382-400).
ctctgagcagtgcagataa

SEQ ID NO: 663909 - DNA, 19 bp, Mus musculus
  siRNA target sequence for Cd109 (NM_153098.2,386-404).
gagcagtgcagataagatt

SEQ ID NO: 663910 - DNA, 19 bp, Mus musculus
  siRNA target sequence for Cd109 (NM_153098.2,388-406).
gcagtgcagataagattta

SEQ ID NO: 663911 - DNA, 19 bp, Mus musculus
  siRNA target sequence for Cd109 (NM_153098.2,391-409).
gtgcagataagatttatga

SEQ ID NO: 663912 - DNA, 19 bp, Mus musculus
  siRNA target sequence for Cd109 (NM_153098.2,430-448).
cagagaatgagatcgtatt

SEQ ID NO: 663913 - DNA, 19 bp, Mus musculus
  siRNA target sequence for Cd109 (NM_153098.2,432-450).
gagaatgagatcgtattct

SEQ ID NO: 663914 - DNA, 19 bp, Mus musculus
  siRNA target sequence for Cd109 (NM_153098.2,449-467).
ctccaacaggacacgttta

SEQ ID NO: 663915 - DNA, 19 bp, Mus musculus
  siRNA target sequence for Cd109 (NM_153098.2,452-470).
caacaggacacgtttaaca

SEQ ID NO: 663916 - DNA, 19 bp, Mus musculus
  siRNA target sequence for Cd109 (NM_153098.2,455-473).
caggacacgtttaacattt

SEQ ID NO: 663917 - DNA, 19 bp, Mus musculus
  siRNA target sequence for Cd109 (NM_153098.2,457-475).
ggacacgtttaacatttga

SEQ ID NO: 663918 - DNA, 19 bp, Mus musculus
  siRNA target sequence for Cd109 (NM_153098.2,526-544).
cgaagcaggaagtgaagtt

SEQ ID NO: 663919 - DNA, 19 bp, Mus musculus
  siRNA target sequence for Cd109 (NM_153098.2,556-574).
cactctgctcagatctcaa

SEQ ID NO: 663920 - DNA, 19 bp, Mus musculus
  siRNA target sequence for Cd109 (NM_153098.2,567-585).
gatctcaagccttatagga

SEQ ID NO: 663921 - DNA, 19 bp, Mus musculus
  siRNA target sequence for Cd109 (NM_153098.2,589-607).
ccgtggacattttcattaa

SEQ ID NO: 663922 - DNA, 19 bp, Mus musculus
  siRNA target sequence for Cd109 (NM_153098.2,609-627).
gatccgaagtctaatgtga

SEQ ID NO: 663923 - DNA, 19 bp, Mus musculus
  siRNA target sequence for Cd109 (NM_153098.2,660-678).
ggagtcgtttccaaaactt

SEQ ID NO: 663924 - DNA, 19 bp, Mus musculus
  siRNA target sequence for Cd109 (NM_153098.2,661-679).
gagtcgtttccaaaacttt

SEQ ID NO: 663925 - DNA, 19 bp, Mus musculus
  siRNA target sequence for Cd109 (NM_153098.2,681-699).
caactatcctctaatccaa

SEQ ID NO: 663926 - DNA, 19 bp, Mus musculus
  siRNA target sequence for Cd109 (NM_153098.2,689-707).
ctctaatccaatatttggt

SEQ ID NO: 663927 - DNA, 19 bp, Mus musculus
  siRNA target sequence for Cd109 (NM_153098.2,716-734).
cattcaggttcaagtgaat

SEQ ID NO: 663928 - DNA, 19 bp, Mus musculus
  siRNA target sequence for Cd109 (NM_153098.2,729-747).
gtgaatgatcagcaatatt

SEQ ID NO: 663929 - DNA, 19 bp, Mus musculus
  siRNA target sequence for Cd109 (NM_153098.2,759-777).
caggtcctagaatatgtgt

SEQ ID NO: 663930 - DNA, 19 bp, Mus musculus
  siRNA target sequence for Cd109 (NM_153098.2,761-779).
ggtcctagaatatgtgtta

SEQ ID NO: 663931 - DNA, 19 bp, Mus musculus
  siRNA target sequence for Cd109 (NM_153098.2,765-783).
ctagaatatgtgttaccaa

SEQ ID NO: 663932 - DNA, 19 bp, Mus musculus
  siRNA target sequence for Cd109 (NM_153098.2,800-818).
gcagaccccgctgtattgt

SEQ ID NO: 663933 - DNA, 19 bp, Mus musculus
  siRNA target sequence for Cd109 (NM_153098.2,801-819).
cagaccccgctgtattgtt

SEQ ID NO: 663934 - DNA, 19 bp, Mus musculus
  siRNA target sequence for Cd109 (NM_153098.2,820-838).
ccttgaagtctaaacagtt

SEQ ID NO: 663935 - DNA, 19 bp, Mus musculus
  siRNA target sequence for Cd109 (NM_153098.2,844-862).
gctccgtcatagcaaagta

SEQ ID NO: 663936 - DNA, 19 bp, Mus musculus
  siRNA target sequence for Cd109 (NM_153098.2,845-863).
ctccgtcatagcaaagtat

SEQ ID NO: 663937 - DNA, 19 bp, Mus musculus
  siRNA target sequence for Cd109 (NM_153098.2,848-866).
cgtcatagcaaagtataca

SEQ ID NO: 663938 - DNA, 19 bp, Mus musculus
  siRNA target sequence for Cd109 (NM_153098.2,884-902).
gggaagtctgtcacttaca

SEQ ID NO: 663939 - DNA, 19 bp, Mus musculus
  siRNA target sequence for Cd109 (NM_153098.2,885-903).
ggaagtctgtcacttacat

SEQ ID NO: 663940 - DNA, 19 bp, Mus musculus
  siRNA target sequence for Cd109 (NM_153098.2,893-911).
gtcacttacatttttacct

SEQ ID NO: 663941 - DNA, 19 bp, Mus musculus
  siRNA target sequence for Cd109 (NM_153098.2,895-913).
cacttacatttttaccttt

SEQ ID NO: 663942 - DNA, 19 bp, Mus musculus
  siRNA target sequence for Cd109 (NM_153098.2,935-953).
gaatatcacaaaaagtttt

SEQ ID NO: 663943 - DNA, 19 bp, Mus musculus
  siRNA target sequence for Cd109 (NM_153098.2,984-1002).
gataattatgagatgaaaa

SEQ ID NO: 663944 - DNA, 19 bp, Mus musculus
  siRNA target sequence for Cd109 (NM_153098.2,1036-1054).
cggaagggagttatgagaa

SEQ ID NO: 663945 - DNA, 19 bp, Mus musculus
  siRNA target sequence for Cd109 (NM_153098.2,1093-1111).
ctactgtgacggaatcact

SEQ ID NO: 663946 - DNA, 19 bp, Mus musculus
  siRNA target sequence for Cd109 (NM_153098.2,1110-1128).
ctcacaggtatctcaagaa

SEQ ID NO: 663947 - DNA, 19 bp, Mus musculus
  siRNA target sequence for Cd109 (NM_153098.2,1145-1163).
gtttttcaagcaacatgat

SEQ ID NO: 663948 - DNA, 19 bp, Mus musculus
  siRNA target sequence for Cd109 (NM_153098.2,1169-1187).
cattgagatttttgattat

SEQ ID NO: 663949 - DNA, 19 bp, Mus musculus
  siRNA target sequence for Cd109 (NM_153098.2,1173-1191).
gagatttttgattatacga

SEQ ID NO: 663950 - DNA, 19 bp, Mus musculus
  siRNA target sequence for Cd109 (NM_153098.2,1238-1256).
ccgctctgatggcaatcaa

SEQ ID NO: 663951 - DNA, 19 bp, Mus musculus
  siRNA target sequence for Cd109 (NM_153098.2,1241-1259).
ctctgatggcaatcaacta

SEQ ID NO: 663952 - DNA, 19 bp, Mus musculus
  siRNA target sequence for Cd109 (NM_153098.2,1300-1318).
cccagcggaaaaataacca

SEQ ID NO: 663953 - DNA, 19 bp, Mus musculus
  siRNA target sequence for Cd109 (NM_153098.2,1333-1351).
gagatcaggaaatggatta

SEQ ID NO: 663954 - DNA, 19 bp, Mus musculus
  siRNA target sequence for Cd109 (NM_153098.2,1372-1390).
ctatcccccaaaatggaat

SEQ ID NO: 663955 - DNA, 19 bp, Mus musculus
  siRNA target sequence for Cd109 (NM_153098.2,1386-1404).
ggaatcattaagattgaat

SEQ ID NO: 663956 - DNA, 19 bp, Mus musculus
  siRNA target sequence for Cd109 (NM_153098.2,1387-1405).
gaatcattaagattgaatt

SEQ ID NO: 663957 - DNA, 19 bp, Mus musculus
  siRNA target sequence for Cd109 (NM_153098.2,1423-1441).
ccggcgagctacaactgaa

SEQ ID NO: 663958 - DNA, 19 bp, Mus musculus
  siRNA target sequence for Cd109 (NM_153098.2,1431-1449).
ctacaactgaaggcttatt

SEQ ID NO: 663959 - DNA, 19 bp, Mus musculus
  siRNA target sequence for Cd109 (NM_153098.2,1439-1457).
gaaggcttattttcttgat

SEQ ID NO: 663960 - DNA, 19 bp, Mus musculus
  siRNA target sequence for Cd109 (NM_153098.2,1505-1523).
gacgtacatccagcttaaa

SEQ ID NO: 663961 - DNA, 19 bp, Mus musculus
  siRNA target sequence for Cd109 (NM_153098.2,1544-1562).
ggtggggtcaccttttgat

SEQ ID NO: 663962 - DNA, 19 bp, Mus musculus
  siRNA target sequence for Cd109 (NM_153098.2,1573-1591).
gtggcaacagacaattcaa

SEQ ID NO: 663963 - DNA, 19 bp, Mus musculus
  siRNA target sequence for Cd109 (NM_153098.2,1592-1610).
ggacttaagctatatggta

SEQ ID NO: 663964 - DNA, 19 bp, Mus musculus
  siRNA target sequence for Cd109 (NM_153098.2,1593-1611).
gacttaagctatatggtaa

SEQ ID NO: 663965 - DNA, 19 bp, Mus musculus
  siRNA target sequence for Cd109 (NM_153098.2,1595-1613).
cttaagctatatggtaata

SEQ ID NO: 663966 - DNA, 19 bp, Mus musculus
  siRNA target sequence for Cd109 (NM_153098.2,1600-1618).
gctatatggtaatatcaaa

SEQ ID NO: 663967 - DNA, 19 bp, Mus musculus
  siRNA target sequence for Cd109 (NM_153098.2,1631-1649).
ggctgcaggcaaacaaagt

SEQ ID NO: 663968 - DNA, 19 bp, Mus musculus
  siRNA target sequence for Cd109 (NM_153098.2,1632-1650).
gctgcaggcaaacaaagtt

SEQ ID NO: 663969 - DNA, 19 bp, Mus musculus
  siRNA target sequence for Cd109 (NM_153098.2,1635-1653).
gcaggcaaacaaagttcaa

SEQ ID NO: 663970 - DNA, 19 bp, Mus musculus
  siRNA target sequence for Cd109 (NM_153098.2,1685-1703).
ggctccaaaggcctgtata

SEQ ID NO: 663971 - DNA, 19 bp, Mus musculus
  siRNA target sequence for Cd109 (NM_153098.2,1686-1704).
gctccaaaggcctgtataa

SEQ ID NO: 663972 - DNA, 19 bp, Mus musculus
  siRNA target sequence for Cd109 (NM_153098.2,1687-1705).
ctccaaaggcctgtataat

SEQ ID NO: 663973 - DNA, 19 bp, Mus musculus
  siRNA target sequence for Cd109 (NM_153098.2,1697-1715).
ctgtataatcgcatattat

SEQ ID NO: 663974 - DNA, 19 bp, Mus musculus
  siRNA target sequence for Cd109 (NM_153098.2,1724-1742).
ggatggggaaattataaat

SEQ ID NO: 663975 - DNA, 19 bp, Mus musculus
  siRNA target sequence for Cd109 (NM_153098.2,1728-1746).
ggggaaattataaatgata

SEQ ID NO: 663976 - DNA, 19 bp, Mus musculus
  siRNA target sequence for Cd109 (NM_153098.2,1790-1808).
gctgttttggagtaaacct

SEQ ID NO: 663977 - DNA, 19 bp, Mus musculus
  siRNA target sequence for Cd109 (NM_153098.2,1810-1828).
cagtcaagccatctgataa

SEQ ID NO: 663978 - DNA, 19 bp, Mus musculus
  siRNA target sequence for Cd109 (NM_153098.2,1862-1880).
ctccctggtggggattgta

SEQ ID NO: 663979 - DNA, 19 bp, Mus musculus
  siRNA target sequence for Cd109 (NM_153098.2,1873-1891).
ggattgtagctgttgacaa

SEQ ID NO: 663980 - DNA, 19 bp, Mus musculus
  siRNA target sequence for Cd109 (NM_153098.2,1884-1902).
gttgacaaaagtgtaacat

SEQ ID NO: 663981 - DNA, 19 bp, Mus musculus
  siRNA target sequence for Cd109 (NM_153098.2,1916-1934).
caacagtattacaatggaa

SEQ ID NO: 663982 - DNA, 19 bp, Mus musculus
  siRNA target sequence for Cd109 (NM_153098.2,1921-1939).
gtattacaatggaaaccat

SEQ ID NO: 663983 - DNA, 19 bp, Mus musculus
  siRNA target sequence for Cd109 (NM_153098.2,1943-1961).
ccatgaactggaactttat

SEQ ID NO: 663984 - DNA, 19 bp, Mus musculus
  siRNA target sequence for Cd109 (NM_153098.2,1977-1995).
ctaggcatgttcatgaact

SEQ ID NO: 663985 - DNA, 19 bp, Mus musculus
  siRNA target sequence for Cd109 (NM_153098.2,2033-2051).
gacagatgcaacccttata

SEQ ID NO: 663986 - DNA, 19 bp, Mus musculus
  siRNA target sequence for Cd109 (NM_153098.2,2072-2090).
ctacgatactgaagagtat

SEQ ID NO: 663987 - DNA, 19 bp, Mus musculus
  siRNA target sequence for Cd109 (NM_153098.2,2075-2093).
cgatactgaagagtattct

SEQ ID NO: 663988 - DNA, 19 bp, Mus musculus
  siRNA target sequence for Cd109 (NM_153098.2,2119-2137).
caaacctggttgattttga

SEQ ID NO: 663989 - DNA, 19 bp, Mus musculus
  siRNA target sequence for Cd109 (NM_153098.2,2146-2164).
cttcagttaacaatgtaca

SEQ ID NO: 663990 - DNA, 19 bp, Mus musculus
  siRNA target sequence for Cd109 (NM_153098.2,2160-2178).
gtacatgtcaggaagaatt

SEQ ID NO: 663991 - DNA, 19 bp, Mus musculus
  siRNA target sequence for Cd109 (NM_153098.2,2206-2224).
cctacatgggatctaagat

SEQ ID NO: 663992 - DNA, 19 bp, Mus musculus
  siRNA target sequence for Cd109 (NM_153098.2,2210-2228).
catgggatctaagatttat

SEQ ID NO: 663993 - DNA, 19 bp, Mus musculus
  siRNA target sequence for Cd109 (NM_153098.2,2213-2231).
gggatctaagatttatgaa

SEQ ID NO: 663994 - DNA, 19 bp, Mus musculus
  siRNA target sequence for Cd109 (NM_153098.2,2269-2287).
gggtggcttcggcttttgt

SEQ ID NO: 663995 - DNA, 19 bp, Mus musculus
  siRNA target sequence for Cd109 (NM_153098.2,2342-2360).
cttccaaccgtttttcctt

SEQ ID NO: 663996 - DNA, 19 bp, Mus musculus
  siRNA target sequence for Cd109 (NM_153098.2,2370-2388).
cttccgtactctgttatca

SEQ ID NO: 663997 - DNA, 19 bp, Mus musculus
  siRNA target sequence for Cd109 (NM_153098.2,2409-2427).
gaagtatccatcgtcaatt

SEQ ID NO: 663998 - DNA, 19 bp, Mus musculus
  siRNA target sequence for Cd109 (NM_153098.2,2412-2430).
gtatccatcgtcaattatt

SEQ ID NO: 663999 - DNA, 19 bp, Mus musculus
  siRNA target sequence for Cd109 (NM_153098.2,2416-2434).
ccatcgtcaattatttgaa

SEQ ID NO: 664000 - DNA, 19 bp, Mus musculus
  siRNA target sequence for Cd109 (NM_153098.2,2417-2435).
catcgtcaattatttgaaa

SEQ ID NO: 664001 - DNA, 19 bp, Mus musculus
  siRNA target sequence for Cd109 (NM_153098.2,2440-2458).
caattaaggttgtgatact

SEQ ID NO: 664002 - DNA, 19 bp, Mus musculus
  siRNA target sequence for Cd109 (NM_153098.2,2522-2540).
ccggaagactgttcaagtt

SEQ ID NO: 664003 - DNA, 19 bp, Mus musculus
  siRNA target sequence for Cd109 (NM_153098.2,2582-2600).
cacgcacttgggagagatt

SEQ ID NO: 664004 - DNA, 19 bp, Mus musculus
  siRNA target sequence for Cd109 (NM_153098.2,2641-2659).
ctgtcacccagacaattgt

SEQ ID NO: 664005 - DNA, 19 bp, Mus musculus
  siRNA target sequence for Cd109 (NM_153098.2,2645-2663).
cacccagacaattgtagta

SEQ ID NO: 664006 - DNA, 19 bp, Mus musculus
  siRNA target sequence for Cd109 (NM_153098.2,2647-2665).
cccagacaattgtagtaaa

SEQ ID NO: 664007 - DNA, 19 bp, Mus musculus
  siRNA target sequence for Cd109 (NM_153098.2,2673-2691).
gggatagaaaagtcgtatt

SEQ ID NO: 664008 - DNA, 19 bp, Mus musculus
  siRNA target sequence for Cd109 (NM_153098.2,2692-2710).
cgaaatctgtcttattgga

SEQ ID NO: 664009 - DNA, 19 bp, Mus musculus
  siRNA target sequence for Cd109 (NM_153098.2,2718-2736).
gatagcaacgtagaaagta

SEQ ID NO: 664010 - DNA, 19 bp, Mus musculus
  siRNA target sequence for Cd109 (NM_153098.2,2730-2748).
gaaagtaagcagcaatcta

SEQ ID NO: 664011 - DNA, 19 bp, Mus musculus
  siRNA target sequence for Cd109 (NM_153098.2,2774-2792).
ggtcattggcagtgaaaga

SEQ ID NO: 664012 - DNA, 19 bp, Mus musculus
  siRNA target sequence for Cd109 (NM_153098.2,2852-2870).
gatccggatgccttatgga

SEQ ID NO: 664013 - DNA, 19 bp, Mus musculus
  siRNA target sequence for Cd109 (NM_153098.2,2934-2952).
cagaaacagctgacagtta

SEQ ID NO: 664014 - DNA, 19 bp, Mus musculus
  siRNA target sequence for Cd109 (NM_153098.2,2940-2958).
cagctgacagttaatttaa

SEQ ID NO: 664015 - DNA, 19 bp, Mus musculus
  siRNA target sequence for Cd109 (NM_153098.2,2961-2979).
gaaaaggccctttcatata

SEQ ID NO: 664016 - DNA, 19 bp, Mus musculus
  siRNA target sequence for Cd109 (NM_153098.2,2974-2992).
catatatgaggcaaggtta

SEQ ID NO: 664017 - DNA, 19 bp, Mus musculus
  siRNA target sequence for Cd109 (NM_153098.2,2993-3011).
ccaaagggagcttctctat

SEQ ID NO: 664018 - DNA, 19 bp, Mus musculus
  siRNA target sequence for Cd109 (NM_153098.2,3067-3085).
cttggctgtcagcatttgt

SEQ ID NO: 664019 - DNA, 19 bp, Mus musculus
  siRNA target sequence for Cd109 (NM_153098.2,3070-3088).
ggctgtcagcatttgtttt

SEQ ID NO: 664020 - DNA, 19 bp, Mus musculus
  siRNA target sequence for Cd109 (NM_153098.2,3071-3089).
gctgtcagcatttgtttta

SEQ ID NO: 664021 - DNA, 19 bp, Mus musculus
  siRNA target sequence for Cd109 (NM_153098.2,3105-3123).
gctgattactatatagata

SEQ ID NO: 664022 - DNA, 19 bp, Mus musculus
  siRNA target sequence for Cd109 (NM_153098.2,3106-3124).
ctgattactatatagatat

SEQ ID NO: 664023 - DNA, 19 bp, Mus musculus
  siRNA target sequence for Cd109 (NM_153098.2,3126-3144).
gatcaggatgtgttacaca

SEQ ID NO: 664024 - DNA, 19 bp, Mus musculus
  siRNA target sequence for Cd109 (NM_153098.2,3135-3153).
gtgttacacagaacatata

SEQ ID NO: 664025 - DNA, 19 bp, Mus musculus
  siRNA target sequence for Cd109 (NM_153098.2,3154-3172).
cttggcttaatgcacataa

SEQ ID NO: 664026 - DNA, 19 bp, Mus musculus
  siRNA target sequence for Cd109 (NM_153098.2,3198-3216).
ccaggaagagtgattcaca

SEQ ID NO: 664027 - DNA, 19 bp, Mus musculus
  siRNA target sequence for Cd109 (NM_153098.2,3250-3268).
cacttacggcctatattgt

SEQ ID NO: 664028 - DNA, 19 bp, Mus musculus
  siRNA target sequence for Cd109 (NM_153098.2,3252-3270).
cttacggcctatattgtga

SEQ ID NO: 664029 - DNA, 19 bp, Mus musculus
  siRNA target sequence for Cd109 (NM_153098.2,3271-3289).
cttctgtcctgggatacaa

SEQ ID NO: 664030 - DNA, 19 bp, Mus musculus
  siRNA target sequence for Cd109 (NM_153098.2,3276-3294).
gtcctgggatacaaaaagt

SEQ ID NO: 664031 - DNA, 19 bp, Mus musculus
  siRNA target sequence for Cd109 (NM_153098.2,3293-3311).
gtatcagcctaatatcgat

SEQ ID NO: 664032 - DNA, 19 bp, Mus musculus
  siRNA target sequence for Cd109 (NM_153098.2,3301-3319).
ctaatatcgatgtacaaga

SEQ ID NO: 664033 - DNA, 19 bp, Mus musculus
  siRNA target sequence for Cd109 (NM_153098.2,3309-3327).
gatgtacaagactcaatca

SEQ ID NO: 664034 - DNA, 19 bp, Mus musculus
  siRNA target sequence for Cd109 (NM_153098.2,3322-3340).
caatcaagtttttggaatt

SEQ ID NO: 664035 - DNA, 19 bp, Mus musculus
  siRNA target sequence for Cd109 (NM_153098.2,3352-3370).
gaggaatttcggacaatta

SEQ ID NO: 664036 - DNA, 19 bp, Mus musculus
  siRNA target sequence for Cd109 (NM_153098.2,3354-3372).
ggaatttcggacaattata

SEQ ID NO: 664037 - DNA, 19 bp, Mus musculus
  siRNA target sequence for Cd109 (NM_153098.2,3440-3458).
gctgatgcagcgatcagaa

SEQ ID NO: 664038 - DNA, 19 bp, Mus musculus
  siRNA target sequence for Cd109 (NM_153098.2,3441-3459).
ctgatgcagcgatcagaaa

SEQ ID NO: 664039 - DNA, 19 bp, Mus musculus
  siRNA target sequence for Cd109 (NM_153098.2,3522-3540).
cgctccgtggacatcgaaa

SEQ ID NO: 664040 - DNA, 19 bp, Mus musculus
  siRNA target sequence for Cd109 (NM_153098.2,3523-3541).
gctccgtggacatcgaaat

SEQ ID NO: 664041 - DNA, 19 bp, Mus musculus
  siRNA target sequence for Cd109 (NM_153098.2,3533-3551).
catcgaaatcgctgcttat

SEQ ID NO: 664042 - DNA, 19 bp, Mus musculus
  siRNA target sequence for Cd109 (NM_153098.2,3536-3554).
cgaaatcgctgcttatgca

SEQ ID NO: 664043 - DNA, 19 bp, Mus musculus
  siRNA target sequence for Cd109 (NM_153098.2,3585-3603).
gagggaatcccggttatga

SEQ ID NO: 664044 - DNA, 19 bp, Mus musculus
  siRNA target sequence for Cd109 (NM_153098.2,3607-3625).
ggctcatccagcaaagaaa

SEQ ID NO: 664045 - DNA, 19 bp, Mus musculus
  siRNA target sequence for Cd109 (NM_153098.2,3663-3681).
gtggccctgaaggcattat

SEQ ID NO: 664046 - DNA, 19 bp, Mus musculus
  siRNA target sequence for Cd109 (NM_153098.2,3665-3683).
ggccctgaaggcattatct

SEQ ID NO: 664047 - DNA, 19 bp, Mus musculus
  siRNA target sequence for Cd109 (NM_153098.2,3667-3685).
ccctgaaggcattatctga

SEQ ID NO: 664048 - DNA, 19 bp, Mus musculus
  siRNA target sequence for Cd109 (NM_153098.2,3668-3686).
cctgaaggcattatctgaa

SEQ ID NO: 664049 - DNA, 19 bp, Mus musculus
  siRNA target sequence for Cd109 (NM_153098.2,3849-3867).
catggctcgggatttgcta

SEQ ID NO: 664050 - DNA, 19 bp, Mus musculus
  siRNA target sequence for Cd109 (NM_153098.2,3852-3870).
ggctcgggatttgctattt

SEQ ID NO: 664051 - DNA, 19 bp, Mus musculus
  siRNA target sequence for Cd109 (NM_153098.2,3865-3883).
ctatttgccagcttaatgt

SEQ ID NO: 664052 - DNA, 19 bp, Mus musculus
  siRNA target sequence for Cd109 (NM_153098.2,3871-3889).
gccagcttaatgttgacta

SEQ ID NO: 664053 - DNA, 19 bp, Mus musculus
  siRNA target sequence for Cd109 (NM_153098.2,3872-3890).
ccagcttaatgttgactat

SEQ ID NO: 664054 - DNA, 19 bp, Mus musculus
  siRNA target sequence for Cd109 (NM_153098.2,3873-3891).
cagcttaatgttgactata

SEQ ID NO: 664055 - DNA, 19 bp, Mus musculus
  siRNA target sequence for Cd109 (NM_153098.2,3896-3914).
gaaaggttcaggttcttct

SEQ ID NO: 664056 - DNA, 19 bp, Mus musculus
  siRNA target sequence for Cd109 (NM_153098.2,3900-3918).
ggttcaggttcttctaaaa

SEQ ID NO: 664057 - DNA, 19 bp, Mus musculus
  siRNA target sequence for Cd109 (NM_153098.2,3922-3940).
ggagatctaccgaaaatca

SEQ ID NO: 664058 - DNA, 19 bp, Mus musculus
  siRNA target sequence for Cd109 (NM_153098.2,3923-3941).
gagatctaccgaaaatcaa

SEQ ID NO: 664059 - DNA, 19 bp, Mus musculus
  siRNA target sequence for Cd109 (NM_153098.2,3925-3943).
gatctaccgaaaatcaaga

SEQ ID NO: 664060 - DNA, 19 bp, Mus musculus
  siRNA target sequence for Cd109 (NM_153098.2,3928-3946).
ctaccgaaaatcaagaagt

SEQ ID NO: 664061 - DNA, 19 bp, Mus musculus
  siRNA target sequence for Cd109 (NM_153098.2,3931-3949).
ccgaaaatcaagaagtttt

SEQ ID NO: 664062 - DNA, 19 bp, Mus musculus
  siRNA target sequence for Cd109 (NM_153098.2,3932-3950).
cgaaaatcaagaagttttt

SEQ ID NO: 664063 - DNA, 19 bp, Mus musculus
  siRNA target sequence for Cd109 (NM_153098.2,3988-4006).
gtcacctgaatctgaatgt

SEQ ID NO: 664064 - DNA, 19 bp, Mus musculus
  siRNA target sequence for Cd109 (NM_153098.2,4112-4130).
cctgaagaaagtggaatat

SEQ ID NO: 664065 - DNA, 19 bp, Mus musculus
  siRNA target sequence for Cd109 (NM_153098.2,4136-4154).
cgggaaactcaacctttat

SEQ ID NO: 664066 - DNA, 19 bp, Mus musculus
  siRNA target sequence for Cd109 (NM_153098.2,4145-4163).
caacctttatttagattct

SEQ ID NO: 664067 - DNA, 19 bp, Mus musculus
  siRNA target sequence for Cd109 (NM_153098.2,4148-4166).
cctttatttagattctgta

SEQ ID NO: 664068 - DNA, 19 bp, Mus musculus
  siRNA target sequence for Cd109 (NM_153098.2,4170-4188).
gaatcccagttttgtgtta

SEQ ID NO: 664069 - DNA, 19 bp, Mus musculus
  siRNA target sequence for Cd109 (NM_153098.2,4198-4216).
ctgtgagagactacaaagt

SEQ ID NO: 664070 - DNA, 19 bp, Mus musculus
  siRNA target sequence for Cd109 (NM_153098.2,4204-4222).
gagactacaaagtttcaaa

SEQ ID NO: 664071 - DNA, 19 bp, Mus musculus
  siRNA target sequence for Cd109 (NM_153098.2,4208-4226).
ctacaaagtttcaaatatt

SEQ ID NO: 664072 - DNA, 19 bp, Mus musculus
  siRNA target sequence for Cd109 (NM_153098.2,4228-4246).
gagatggttcagtatctgt

SEQ ID NO: 664073 - DNA, 19 bp, Mus musculus
  siRNA target sequence for Cd109 (NM_153098.2,4230-4248).
gatggttcagtatctgtaa

SEQ ID NO: 664074 - DNA, 19 bp, Mus musculus
  siRNA target sequence for Cd109 (NM_153098.2,4234-4252).
gttcagtatctgtaatgga

SEQ ID NO: 664075 - DNA, 19 bp, Mus musculus
  siRNA target sequence for Cd109 (NM_153098.2,4275-4293).
gcagtgcgaagctacaaca

SEQ ID NO: 664076 - DNA, 19 bp, Mus musculus
  siRNA target sequence for Cd109 (NM_153098.2,4402-4420).
gctccgtccttctgtactt

SEQ ID NO: 664077 - DNA, 19 bp, Mus musculus
  siRNA target sequence for Cd109 (NM_153098.2,4403-4421).
ctccgtccttctgtacttt

SEQ ID NO: 664078 - DNA, 19 bp, Mus musculus
  siRNA target sequence for Expi (NM_007969.2,170-188).
ctgcctgggctctgtctaa

SEQ ID NO: 664079 - DNA, 19 bp, Mus musculus
  siRNA target sequence for Galnt5 (NM_172855.1,542-560).
ggcgagtcttggcatttat

SEQ ID NO: 664080 - DNA, 19 bp, Mus musculus
  siRNA target sequence for Galnt5 (NM_172855.1,543-561).
gcgagtcttggcatttata

SEQ ID NO: 664081 - DNA, 19 bp, Mus musculus
  siRNA target sequence for Galnt5 (NM_172855.1,544-562).
cgagtcttggcatttatat

SEQ ID NO: 664082 - DNA, 19 bp, Mus musculus
  siRNA target sequence for Galnt5 (NM_172855.1,635-653).
ggctactcaaagaagatat

SEQ ID NO: 664083 - DNA, 19 bp, Mus musculus
  siRNA target sequence for Galnt5 (NM_172855.1,637-655).
ctactcaaagaagatatca

SEQ ID NO: 664084 - DNA, 19 bp, Mus musculus
  siRNA target sequence for Galnt5 (NM_172855.1,663-681).
ggaacatacgggattcaga

SEQ ID NO: 664085 - DNA, 19 bp, Mus musculus
  siRNA target sequence for Galnt5 (NM_172855.1,694-712).
caagtgaaggtcctttaca

SEQ ID NO: 664086 - DNA, 19 bp, Mus musculus
  siRNA target sequence for Galnt5 (NM_172855.1,749-767).
cgtggggtaaggagaactt

SEQ ID NO: 664087 - DNA, 19 bp, Mus musculus
  siRNA target sequence for Galnt5 (NM_172855.1,750-768).
gtggggtaaggagaacttt

SEQ ID NO: 664088 - DNA, 19 bp, Mus musculus
  siRNA target sequence for Galnt5 (NM_172855.1,776-794).
ctgagaaccatgaactcaa

SEQ ID NO: 664089 - DNA, 19 bp, Mus musculus
  siRNA target sequence for Galnt5 (NM_172855.1,790-808).
ctcaaggttgaggagaata

SEQ ID NO: 664090 - DNA, 19 bp, Mus musculus
  siRNA target sequence for Galnt5 (NM_172855.1,975-993).
caagtggatgacagtgtta

SEQ ID NO: 664091 - DNA, 19 bp, Mus musculus
  siRNA target sequence for Galnt5 (NM_172855.1,1008-1026).
cccattcacagcttcaaga

SEQ ID NO: 664092 - DNA, 19 bp, Mus musculus
  siRNA target sequence for Galnt5 (NM_172855.1,1027-1045).
ggagttccattgaccaaaa

SEQ ID NO: 664093 - DNA, 19 bp, Mus musculus
  siRNA target sequence for Galnt5 (NM_172855.1,1054-1072).
cgtacagaaaccttcgata

SEQ ID NO: 664094 - DNA, 19 bp, Mus musculus
  siRNA target sequence for Galnt5 (NM_172855.1,1055-1073).
gtacagaaaccttcgataa

SEQ ID NO: 664095 - DNA, 19 bp, Mus musculus
  siRNA target sequence for Galnt5 (NM_172855.1,1058-1076).
cagaaaccttcgataaaaa

SEQ ID NO: 664096 - DNA, 19 bp, Mus musculus
  siRNA target sequence for Galnt5 (NM_172855.1,1064-1082).
ccttcgataaaaaacaaga

SEQ ID NO: 664097 - DNA, 19 bp, Mus musculus
  siRNA target sequence for Galnt5 (NM_172855.1,1102-1120).
gtcagcagcgatacatcaa

SEQ ID NO: 664098 - DNA, 19 bp, Mus musculus
  siRNA target sequence for Galnt5 (NM_172855.1,1107-1125).
cagcgatacatcaaagcaa

SEQ ID NO: 664099 - DNA, 19 bp, Mus musculus
  siRNA target sequence for Galnt5 (NM_172855.1,1278-1296).
gagcaaagacctaaaacat

SEQ ID NO: 664100 - DNA, 19 bp, Mus musculus
  siRNA target sequence for Galnt5 (NM_172855.1,1280-1298).
gcaaagacctaaaacatga

SEQ ID NO: 664101 - DNA, 19 bp, Mus musculus
  siRNA target sequence for Galnt5 (NM_172855.1,1309-1327).
gcgctaccacttcttaagt

SEQ ID NO: 664102 - DNA, 19 bp, Mus musculus
  siRNA target sequence for Galnt5 (NM_172855.1,1310-1328).
cgctaccacttcttaagtt

SEQ ID NO: 664103 - DNA, 19 bp, Mus musculus
  siRNA target sequence for Galnt5 (NM_172855.1,1334-1352).
cagatatgggtcatttaaa

SEQ ID NO: 664104 - DNA, 19 bp, Mus musculus
  siRNA target sequence for Galnt5 (NM_172855.1,1342-1360).
ggtcatttaaagaaccaat

SEQ ID NO: 664105 - DNA, 19 bp, Mus musculus
  siRNA target sequence for Galnt5 (NM_172855.1,1414-1432).
gcgccagggaagaaactta

SEQ ID NO: 664106 - DNA, 19 bp, Mus musculus
  siRNA target sequence for Galnt5 (NM_172855.1,1415-1433).
cgccagggaagaaacttaa

SEQ ID NO: 664107 - DNA, 19 bp, Mus musculus
  siRNA target sequence for Galnt5 (NM_172855.1,1491-1509).
caaagaggtacctaattct

SEQ ID NO: 664108 - DNA, 19 bp, Mus musculus
  siRNA target sequence for Galnt5 (NM_172855.1,1495-1513).
gaggtacctaattctaaaa

SEQ ID NO: 664109 - DNA, 19 bp, Mus musculus
  siRNA target sequence for Galnt5 (NM_172855.1,1520-1538).
ctgtgtttcctaaattact

SEQ ID NO: 664110 - DNA, 19 bp, Mus musculus
  siRNA target sequence for Galnt5 (NM_172855.1,1621-1639).
cagtccaagcccaccatat

SEQ ID NO: 664111 - DNA, 19 bp, Mus musculus
  siRNA target sequence for Galnt5 (NM_172855.1,1737-1755).
gcaccacgtgttcagaatt

SEQ ID NO: 664112 - DNA, 19 bp, Mus musculus
  siRNA target sequence for Galnt5 (NM_172855.1,1873-1891).
gtctaccttagtgatttga

SEQ ID NO: 664113 - DNA, 19 bp, Mus musculus
  siRNA target sequence for Galnt5 (NM_172855.1,1931-1949).
ggtgtgcagagcaactagt

SEQ ID NO: 664114 - DNA, 19 bp, Mus musculus
  siRNA target sequence for Galnt5 (NM_172855.1,1937-1955).
cagagcaactagttcacaa

SEQ ID NO: 664115 - DNA, 19 bp, Mus musculus
  siRNA target sequence for Galnt5 (NM_172855.1,1977-1995).
catcatgtgctttgtagat

SEQ ID NO: 664116 - DNA, 19 bp, Mus musculus
  siRNA target sequence for Galnt5 (NM_172855.1,2243-2261).
ctcatgtggagtgtaatgt

SEQ ID NO: 664117 - DNA, 19 bp, Mus musculus
  siRNA target sequence for Galnt5 (NM_172855.1,2275-2293).
cctctactggaaagagttt

SEQ ID NO: 664118 - DNA, 19 bp, Mus musculus
  siRNA target sequence for Galnt5 (NM_172855.1,2276-2294).
ctctactggaaagagttta

SEQ ID NO: 664119 - DNA, 19 bp, Mus musculus
  siRNA target sequence for Galnt5 (NM_172855.1,2278-2296).
ctactggaaagagtttatt

SEQ ID NO: 664120 - DNA, 19 bp, Mus musculus
  siRNA target sequence for Galnt5 (NM_172855.1,2313-2331).
ggcctgtccagtaattgaa

SEQ ID NO: 664121 - DNA, 19 bp, Mus musculus
  siRNA target sequence for Galnt5 (NM_172855.1,2315-2333).
cctgtccagtaattgaagt

SEQ ID NO: 664122 - DNA, 19 bp, Mus musculus
  siRNA target sequence for Galnt5 (NM_172855.1,2341-2359).
gacaaggacatgagttaca

SEQ ID NO: 664123 - DNA, 19 bp, Mus musculus
  siRNA target sequence for Galnt5 (NM_172855.1,2391-2409).
cacctggcccatgaacttt

SEQ ID NO: 664124 - DNA, 19 bp, Mus musculus
  siRNA target sequence for Galnt5 (NM_172855.1,2420-2438).
caatccctccagatgttgt

SEQ ID NO: 664125 - DNA, 19 bp, Mus musculus
  siRNA target sequence for Galnt5 (NM_172855.1,2482-2500).
gtcatggcaggtggattat

SEQ ID NO: 664126 - DNA, 19 bp, Mus musculus
  siRNA target sequence for Galnt5 (NM_172855.1,2484-2502).
catggcaggtggattattt

SEQ ID NO: 664127 - DNA, 19 bp, Mus musculus
  siRNA target sequence for Galnt5 (NM_172855.1,2488-2506).
gcaggtggattattttcca

SEQ ID NO: 664128 - DNA, 19 bp, Mus musculus
  siRNA target sequence for Galnt5 (NM_172855.1,2597-2615).
ggatgtgtggtggtgaaat

SEQ ID NO: 664129 - DNA, 19 bp, Mus musculus
  siRNA target sequence for Galnt5 (NM_172855.1,2652-2670).
cagaaacgacaatccatat

SEQ ID NO: 664130 - DNA, 19 bp, Mus musculus
  siRNA target sequence for Galnt5 (NM_172855.1,2742-2760).
ctacagggaactcttctat

SEQ ID NO: 664131 - DNA, 19 bp, Mus musculus
  siRNA target sequence for Galnt5 (NM_172855.1,2997-3015).
gcttcaacaatttaattat

SEQ ID NO: 664132 - DNA, 19 bp, Mus musculus
  siRNA target sequence for Galnt5 (NM_172855.1,3017-3035).
cctgggtaagacttattaa

SEQ ID NO: 664133 - DNA, 19 bp, Mus musculus
  siRNA target sequence for Galnt5 (NM_172855.1,3115-3133).
cttaaatggctgcacaaat

SEQ ID NO: 664134 - DNA, 19 bp, Mus musculus
  siRNA target sequence for Galnt5 (NM_172855.1,3162-3180).
ggatcacattgtttttgaa

SEQ ID NO: 664135 - DNA, 19 bp, Mus musculus
  siRNA target sequence for Galnt5 (NM_172855.1,3183-3201).
ctatcagcagttattatgt

SEQ ID NO: 664136 - DNA, 19 bp, Mus musculus
  siRNA target sequence for Galnt5 (NM_172855.1,3189-3207).
gcagttattatgtatggaa

SEQ ID NO: 664137 - DNA, 19 bp, Mus musculus
  siRNA target sequence for Galnt5 (NM_172855.1,3261-3279).
gcaacaaaagtggaaattt

SEQ ID NO: 664138 - DNA, 19 bp, Mus musculus
  siRNA target sequence for Hc (NM_010406.1,107-125).
cgggtcggctcgtctgaaa

SEQ ID NO: 664139 - DNA, 19 bp, Mus musculus
  siRNA target sequence for Hc (NM_010406.1,108-126).
gggtcggctcgtctgaaaa

SEQ ID NO: 664140 - DNA, 19 bp, Mus musculus
  siRNA target sequence for Hc (NM_010406.1,109-127).
ggtcggctcgtctgaaaat

SEQ ID NO: 664141 - DNA, 19 bp, Mus musculus
  siRNA target sequence for Hc (NM_010406.1,158-176).
gcatttgatgcaactcttt

SEQ ID NO: 664142 - DNA, 19 bp, Mus musculus
  siRNA target sequence for Hc (NM_010406.1,213-231).
cttcaggctatgttaattt

SEQ ID NO: 664143 - DNA, 19 bp, Mus musculus
  siRNA target sequence for Hc (NM_010406.1,234-252).
ccccggaaaacaaattcca

SEQ ID NO: 664144 - DNA, 19 bp, Mus musculus
  siRNA target sequence for Hc (NM_010406.1,235-253).
cccggaaaacaaattccaa

SEQ ID NO: 664145 - DNA, 19 bp, Mus musculus
  siRNA target sequence for Hc (NM_010406.1,268-286).
gacactacagcccaatcaa

SEQ ID NO: 664146 - DNA, 19 bp, Mus musculus
  siRNA target sequence for Hc (NM_010406.1,306-324).
cagtctctcacgtgtatct

SEQ ID NO: 664147 - DNA, 19 bp, Mus musculus
  siRNA target sequence for Hc (NM_010406.1,332-350).
gtgtcaaaacacttttcaa

SEQ ID NO: 664148 - DNA, 19 bp, Mus musculus
  siRNA target sequence for Hc (NM_010406.1,372-390).
cctataacaatggaattct

SEQ ID NO: 664149 - DNA, 19 bp, Mus musculus
  siRNA target sequence for Hc (NM_010406.1,420-438).
cgccggaccagtcagtaaa

SEQ ID NO: 664150 - DNA, 19 bp, Mus musculus
  siRNA target sequence for Hc (NM_010406.1,422-440).
ccggaccagtcagtaaaga

SEQ ID NO: 664151 - DNA, 19 bp, Mus musculus
  siRNA target sequence for Hc (NM_010406.1,423-441).
cggaccagtcagtaaagat

SEQ ID NO: 664152 - DNA, 19 bp, Mus musculus
  siRNA target sequence for Hc (NM_010406.1,425-443).
gaccagtcagtaaagatca

SEQ ID NO: 664153 - DNA, 19 bp, Mus musculus
  siRNA target sequence for Hc (NM_010406.1,478-496).
caaacgggagactgtctta

SEQ ID NO: 664154 - DNA, 19 bp, Mus musculus
  siRNA target sequence for Hc (NM_010406.1,482-500).
cgggagactgtcttaactt

SEQ ID NO: 664155 - DNA, 19 bp, Mus musculus
  siRNA target sequence for Hc (NM_010406.1,483-501).
gggagactgtcttaacttt

SEQ ID NO: 664156 - DNA, 19 bp, Mus musculus
  siRNA target sequence for Hc (NM_010406.1,545-563).
gattacaccggaattatct

SEQ ID NO: 664157 - DNA, 19 bp, Mus musculus
  siRNA target sequence for Hc (NM_010406.1,620-638).
gctaactataagaaggatt

SEQ ID NO: 664158 - DNA, 19 bp, Mus musculus
  siRNA target sequence for Hc (NM_010406.1,686-704).
ccacgattctctgtttcaa

SEQ ID NO: 664159 - DNA, 19 bp, Mus musculus
  siRNA target sequence for Hc (NM_010406.1,687-705).
cacgattctctgtttcaat

SEQ ID NO: 664160 - DNA, 19 bp, Mus musculus
  siRNA target sequence for Hc (NM_010406.1,694-712).
ctctgtttcaatagaacta

SEQ ID NO: 664161 - DNA, 19 bp, Mus musculus
  siRNA target sequence for Hc (NM_010406.1,943-961).
gtcctacaacagtctagaa

SEQ ID NO: 664162 - DNA, 19 bp, Mus musculus
  siRNA target sequence for Hc (NM_010406.1,954-972).
gtctagaagacttaaacaa

SEQ ID NO: 664163 - DNA, 19 bp, Mus musculus
  siRNA target sequence for Hc (NM_010406.1,973-991).
caagtacctttatattgca

SEQ ID NO: 664164 - DNA, 19 bp, Mus musculus
  siRNA target sequence for Hc (NM_010406.1,989-1007).
gcagtaacagtcacagaat

SEQ ID NO: 664165 - DNA, 19 bp, Mus musculus
  siRNA target sequence for Hc (NM_010406.1,1065-1083).
cctacacactgaatttggt

SEQ ID NO: 664166 - DNA, 19 bp, Mus musculus
  siRNA target sequence for Hc (NM_010406.1,1179-1197).
ctctgatggcacaaacagt

SEQ ID NO: 664167 - DNA, 19 bp, Mus musculus
  siRNA target sequence for Hc (NM_010406.1,1188-1206).
cacaaacagtcgatgtgaa

SEQ ID NO: 664168 - DNA, 19 bp, Mus musculus
  siRNA target sequence for Hc (NM_010406.1,1194-1212).
cagtcgatgtgaatcaaga

SEQ ID NO: 664169 - DNA, 19 bp, Mus musculus
  siRNA target sequence for Hc (NM_010406.1,1290-1308).
caaatgtgacggtgctaaa

SEQ ID NO: 664170 - DNA, 19 bp, Mus musculus
  siRNA target sequence for Hc (NM_010406.1,1299-1317).
cggtgctaaagtttgagat

SEQ ID NO: 664171 - DNA, 19 bp, Mus musculus
  siRNA target sequence for Hc (NM_010406.1,1332-1350).
cagaacttcccgaagaaaa

SEQ ID NO: 664172 - DNA, 19 bp, Mus musculus
  siRNA target sequence for Hc (NM_010406.1,1386-1404).
cgtctctcagccaaagtta

SEQ ID NO: 664173 - DNA, 19 bp, Mus musculus
  siRNA target sequence for Hc (NM_010406.1,1389-1407).
ctctcagccaaagttacat

SEQ ID NO: 664174 - DNA, 19 bp, Mus musculus
  siRNA target sequence for Hc (NM_010406.1,1415-1433).
gcttggactgaaaactaca

SEQ ID NO: 664175 - DNA, 19 bp, Mus musculus
  siRNA target sequence for Hc (NM_010406.1,1416-1434).
cttggactgaaaactacaa

SEQ ID NO: 664176 - DNA, 19 bp, Mus musculus
  siRNA target sequence for Hc (NM_010406.1,1476-1494).
ccaagagcccatatatcga

SEQ ID NO: 664177 - DNA, 19 bp, Mus musculus
  siRNA target sequence for Hc (NM_010406.1,1482-1500).
gcccatatatcgacaaaat

SEQ ID NO: 664178 - DNA, 19 bp, Mus musculus
  siRNA target sequence for Hc (NM_010406.1,1483-1501).
cccatatatcgacaaaata

SEQ ID NO: 664179 - DNA, 19 bp, Mus musculus
  siRNA target sequence for Hc (NM_010406.1,1484-1502).
ccatatatcgacaaaataa

SEQ ID NO: 664180 - DNA, 19 bp, Mus musculus
  siRNA target sequence for Hc (NM_010406.1,1492-1510).
cgacaaaataactcactat

SEQ ID NO: 664181 - DNA, 19 bp, Mus musculus
  siRNA target sequence for Hc (NM_010406.1,1505-1523).
cactataattacttgattt

SEQ ID NO: 664182 - DNA, 19 bp, Mus musculus
  siRNA target sequence for Hc (NM_010406.1,1507-1525).
ctataattacttgatttta

SEQ ID NO: 664183 - DNA, 19 bp, Mus musculus
  siRNA target sequence for Hc (NM_010406.1,1546-1564).
gtacggcacaagagagaaa

SEQ ID NO: 664184 - DNA, 19 bp, Mus musculus
  siRNA target sequence for Hc (NM_010406.1,1549-1567).
cggcacaagagagaaactt

SEQ ID NO: 664185 - DNA, 19 bp, Mus musculus
  siRNA target sequence for Hc (NM_010406.1,1572-1590).
cctcaacttatcaaaatat

SEQ ID NO: 664186 - DNA, 19 bp, Mus musculus
  siRNA target sequence for Hc (NM_010406.1,1573-1591).
ctcaacttatcaaaatata

SEQ ID NO: 664187 - DNA, 19 bp, Mus musculus
  siRNA target sequence for Hc (NM_010406.1,1625-1643).
gcacgactcctggtctatt

SEQ ID NO: 664188 - DNA, 19 bp, Mus musculus
  siRNA target sequence for Hc (NM_010406.1,1626-1644).
cacgactcctggtctatta

SEQ ID NO: 664189 - DNA, 19 bp, Mus musculus
  siRNA target sequence for Hc (NM_010406.1,1629-1647).
gactcctggtctattacat

SEQ ID NO: 664190 - DNA, 19 bp, Mus musculus
  siRNA target sequence for Hc (NM_010406.1,1679-1697).
gctgacgcagtctggataa

SEQ ID NO: 664191 - DNA, 19 bp, Mus musculus
  siRNA target sequence for Hc (NM_010406.1,1680-1698).
ctgacgcagtctggataaa

SEQ ID NO: 664192 - DNA, 19 bp, Mus musculus
  siRNA target sequence for Hc (NM_010406.1,1733-1751).
catctgtctccagatgaat

SEQ ID NO: 664193 - DNA, 19 bp, Mus musculus
  siRNA target sequence for Hc (NM_010406.1,1804-1822).
ctcatgggtagcactatca

SEQ ID NO: 664194 - DNA, 19 bp, Mus musculus
  siRNA target sequence for Hc (NM_010406.1,1933-1951).
ccatgacaatgcagatgta

SEQ ID NO: 664195 - DNA, 19 bp, Mus musculus
  siRNA target sequence for Hc (NM_010406.1,1934-1952).
catgacaatgcagatgtat

SEQ ID NO: 664196 - DNA, 19 bp, Mus musculus
  siRNA target sequence for Hc (NM_010406.1,1939-1957).
caatgcagatgtattccat

SEQ ID NO: 664197 - DNA, 19 bp, Mus musculus
  siRNA target sequence for Hc (NM_010406.1,1990-2008).
cgcagatgactcccattat

SEQ ID NO: 664198 - DNA, 19 bp, Mus musculus
  siRNA target sequence for Hc (NM_010406.1,2084-2102).
gctgctaagtacaaacata

SEQ ID NO: 664199 - DNA, 19 bp, Mus musculus
  siRNA target sequence for Hc (NM_010406.1,2088-2106).
ctaagtacaaacatagtgt

SEQ ID NO: 664200 - DNA, 19 bp, Mus musculus
  siRNA target sequence for Hc (NM_010406.1,2135-2153).
cgagtgaacttctacgaaa

SEQ ID NO: 664201 - DNA, 19 bp, Mus musculus
  siRNA target sequence for Hc (NM_010406.1,2209-2227).
caacgagtgctgtactatt

SEQ ID NO: 664202 - DNA, 19 bp, Mus musculus
  siRNA target sequence for Hc (NM_010406.1,2220-2238).
gtactattgcgaacaagat

SEQ ID NO: 664203 - DNA, 19 bp, Mus musculus
  siRNA target sequence for Hc (NM_010406.1,2229-2247).
cgaacaagatccgaaaaga

SEQ ID NO: 664204 - DNA, 19 bp, Mus musculus
  siRNA target sequence for Hc (NM_010406.1,2273-2291).
ggaaggatccacattaaga

SEQ ID NO: 664205 - DNA, 19 bp, Mus musculus
  siRNA target sequence for Hc (NM_010406.1,2338-2356).
gagctggctatgggaaatt

SEQ ID NO: 664206 - DNA, 19 bp, Mus musculus
  siRNA target sequence for Hc (NM_010406.1,2357-2375).
catcgcgttcccaaaagaa

SEQ ID NO: 664207 - DNA, 19 bp, Mus musculus
  siRNA target sequence for Hc (NM_010406.1,2432-2450).
ggcatttcagacaatggta

SEQ ID NO: 664208 - DNA, 19 bp, Mus musculus
  siRNA target sequence for Hc (NM_010406.1,2434-2452).
catttcagacaatggtata

SEQ ID NO: 664209 - DNA, 19 bp, Mus musculus
  siRNA target sequence for Hc (NM_010406.1,2470-2488).
caaggcaaaggtgttcaaa

SEQ ID NO: 664210 - DNA, 19 bp, Mus musculus
  siRNA target sequence for Hc (NM_010406.1,2503-2521).
gatgaacataccatattct

SEQ ID NO: 664211 - DNA, 19 bp, Mus musculus
  siRNA target sequence for Hc (NM_010406.1,2506-2524).
gaacataccatattctgtt

SEQ ID NO: 664212 - DNA, 19 bp, Mus musculus
  siRNA target sequence for Hc (NM_010406.1,2528-2546).
cgaggagaacagatccaat

SEQ ID NO: 664213 - DNA, 19 bp, Mus musculus
  siRNA target sequence for Hc (NM_010406.1,2529-2547).
gaggagaacagatccaatt

SEQ ID NO: 664214 - DNA, 19 bp, Mus musculus
  siRNA target sequence for Hc (NM_010406.1,2531-2549).
ggagaacagatccaattga

SEQ ID NO: 664215 - DNA, 19 bp, Mus musculus
  siRNA target sequence for Hc (NM_010406.1,2532-2550).
gagaacagatccaattgaa

SEQ ID NO: 664216 - DNA, 19 bp, Mus musculus
  siRNA target sequence for Hc (NM_010406.1,2542-2560).
ccaattgaaaggaactgtt

SEQ ID NO: 664217 - DNA, 19 bp, Mus musculus
  siRNA target sequence for Hc (NM_010406.1,2543-2561).
caattgaaaggaactgttt

SEQ ID NO: 664218 - DNA, 19 bp, Mus musculus
  siRNA target sequence for Hc (NM_010406.1,2552-2570).
ggaactgtttacaactata

SEQ ID NO: 664219 - DNA, 19 bp, Mus musculus
  siRNA target sequence for Hc (NM_010406.1,2741-2759).
ggccttcactccataaact

SEQ ID NO: 664220 - DNA, 19 bp, Mus musculus
  siRNA target sequence for Hc (NM_010406.1,2744-2762).
cttcactccataaacttct

SEQ ID NO: 664221 - DNA, 19 bp, Mus musculus
  siRNA target sequence for Hc (NM_010406.1,2780-2798).
gggaaagacatcttagtaa

SEQ ID NO: 664222 - DNA, 19 bp, Mus musculus
  siRNA target sequence for Hc (NM_010406.1,2781-2799).
ggaaagacatcttagtaaa

SEQ ID NO: 664223 - DNA, 19 bp, Mus musculus
  siRNA target sequence for Hc (NM_010406.1,2786-2804).
gacatcttagtaaagacat

SEQ ID NO: 664224 - DNA, 19 bp, Mus musculus
  siRNA target sequence for Hc (NM_010406.1,2823-2841).
gagtcaagagggaaagcta

SEQ ID NO: 664225 - DNA, 19 bp, Mus musculus
  siRNA target sequence for Hc (NM_010406.1,2857-2875).
ggaccctaagggaattcgt

SEQ ID NO: 664226 - DNA, 19 bp, Mus musculus
  siRNA target sequence for Hc (NM_010406.1,2866-2884).
gggaattcgtggtattgtt

SEQ ID NO: 664227 - DNA, 19 bp, Mus musculus
  siRNA target sequence for Hc (NM_010406.1,2867-2885).
ggaattcgtggtattgtta

SEQ ID NO: 664228 - DNA, 19 bp, Mus musculus
  siRNA target sequence for Hc (NM_010406.1,2868-2886).
gaattcgtggtattgttaa

SEQ ID NO: 664229 - DNA, 19 bp, Mus musculus
  siRNA target sequence for Hc (NM_010406.1,2926-2944).
ggtccccaagaccaaagtt

SEQ ID NO: 664230 - DNA, 19 bp, Mus musculus
  siRNA target sequence for Hc (NM_010406.1,2929-2947).
ccccaagaccaaagttgaa

SEQ ID NO: 664231 - DNA, 19 bp, Mus musculus
  siRNA target sequence for Hc (NM_010406.1,2972-2990).
cttgtaggggagttcttgt

SEQ ID NO: 664232 - DNA, 19 bp, Mus musculus
  siRNA target sequence for Hc (NM_010406.1,3003-3021).
gtaaggaaggcatcaacat

SEQ ID NO: 664233 - DNA, 19 bp, Mus musculus
  siRNA target sequence for Hc (NM_010406.1,3066-3084).
gcatagctccggtgttcta

SEQ ID NO: 664234 - DNA, 19 bp, Mus musculus
  siRNA target sequence for Hc (NM_010406.1,3067-3085).
catagctccggtgttctat

SEQ ID NO: 664235 - DNA, 19 bp, Mus musculus
  siRNA target sequence for Hc (NM_010406.1,3071-3089).
gctccggtgttctatgttt

SEQ ID NO: 664236 - DNA, 19 bp, Mus musculus
  siRNA target sequence for Hc (NM_010406.1,3072-3090).
ctccggtgttctatgtttt

SEQ ID NO: 664237 - DNA, 19 bp, Mus musculus
  siRNA target sequence for Hc (NM_010406.1,3075-3093).
cggtgttctatgttttcca

SEQ ID NO: 664238 - DNA, 19 bp, Mus musculus
  siRNA target sequence for Hc (NM_010406.1,3189-3207).
gcgtcatgtcctacagaaa

SEQ ID NO: 664239 - DNA, 19 bp, Mus musculus
  siRNA target sequence for Hc (NM_010406.1,3199-3217).
ctacagaaacgctgactat

SEQ ID NO: 664240 - DNA, 19 bp, Mus musculus
  siRNA target sequence for Hc (NM_010406.1,3253-3271).
ctggctgacagcttttgct

SEQ ID NO: 664241 - DNA, 19 bp, Mus musculus
  siRNA target sequence for Hc (NM_010406.1,3285-3303).
gacaggtggccaagtatgt

SEQ ID NO: 664242 - DNA, 19 bp, Mus musculus
  siRNA target sequence for Hc (NM_010406.1,3287-3305).
caggtggccaagtatgtaa

SEQ ID NO: 664243 - DNA, 19 bp, Mus musculus
  siRNA target sequence for Hc (NM_010406.1,3370-3388).
cggctctttcaaggaaaat

SEQ ID NO: 664244 - DNA, 19 bp, Mus musculus
  siRNA target sequence for Hc (NM_010406.1,3379-3397).
caaggaaaattcccaatat

SEQ ID NO: 664245 - DNA, 19 bp, Mus musculus
  siRNA target sequence for Hc (NM_010406.1,3382-3400).
ggaaaattcccaatatcta

SEQ ID NO: 664246 - DNA, 19 bp, Mus musculus
  siRNA target sequence for Hc (NM_010406.1,3391-3409).
ccaatatctaccaataaaa

SEQ ID NO: 664247 - DNA, 19 bp, Mus musculus
  siRNA target sequence for Hc (NM_010406.1,3392-3410).
caatatctaccaataaaat

SEQ ID NO: 664248 - DNA, 19 bp, Mus musculus
  siRNA target sequence for Hc (NM_010406.1,3462-3480).
ccttttctgtgattggaat

SEQ ID NO: 664249 - DNA, 19 bp, Mus musculus
  siRNA target sequence for Hc (NM_010406.1,3496-3514).
catatgccccaccatgaaa

SEQ ID NO: 664250 - DNA, 19 bp, Mus musculus
  siRNA target sequence for Hc (NM_010406.1,3501-3519).
gccccaccatgaaaatcca

SEQ ID NO: 664251 - DNA, 19 bp, Mus musculus
  siRNA target sequence for Hc (NM_010406.1,3517-3535).
ccacacagcgctagataaa

SEQ ID NO: 664252 - DNA, 19 bp, Mus musculus
  siRNA target sequence for Hc (NM_010406.1,3631-3649).
cccgaggtttcgtctaatt

SEQ ID NO: 664253 - DNA, 19 bp, Mus musculus
  siRNA target sequence for Hc (NM_010406.1,3633-3651).
cgaggtttcgtctaattgt

SEQ ID NO: 664254 - DNA, 19 bp, Mus musculus
  siRNA target sequence for Hc (NM_010406.1,3657-3675).
ccctgaggaaggaagcttt

SEQ ID NO: 664255 - DNA, 19 bp, Mus musculus
  siRNA target sequence for Hc (NM_010406.1,3751-3769).
cggcacagcaggtatggtt

SEQ ID NO: 664256 - DNA, 19 bp, Mus musculus
  siRNA target sequence for Hc (NM_010406.1,3862-3880).
gtatggaggcggcttttat

SEQ ID NO: 664257 - DNA, 19 bp, Mus musculus
  siRNA target sequence for Hc (NM_010406.1,3883-3901).
cacccaggatacgattaat

SEQ ID NO: 664258 - DNA, 19 bp, Mus musculus
  siRNA target sequence for Hc (NM_010406.1,3927-3945).
cactcctgttaaaacaaat

SEQ ID NO: 664259 - DNA, 19 bp, Mus musculus
  siRNA target sequence for Hc (NM_010406.1,3961-3979).
catcaatgtcgcctacaaa

SEQ ID NO: 664260 - DNA, 19 bp, Mus musculus
  siRNA target sequence for Hc (NM_010406.1,3986-4004).
ggtgacttccacaagtata

SEQ ID NO: 664261 - DNA, 19 bp, Mus musculus
  siRNA target sequence for Hc (NM_010406.1,3987-4005).
gtgacttccacaagtataa

SEQ ID NO: 664262 - DNA, 19 bp, Mus musculus
  siRNA target sequence for Hc (NM_010406.1,4086-4104).
gtggcttggccacagtata

SEQ ID NO: 664263 - DNA, 19 bp, Mus musculus
  siRNA target sequence for Hc (NM_010406.1,4215-4233).
ctggattcaagcgcataat

SEQ ID NO: 664264 - DNA, 19 bp, Mus musculus
  siRNA target sequence for Hc (NM_010406.1,4278-4296).
ggtcctcccatgcagtaat

SEQ ID NO: 664265 - DNA, 19 bp, Mus musculus
  siRNA target sequence for Hc (NM_010406.1,4281-4299).
cctcccatgcagtaatgga

SEQ ID NO: 664266 - DNA, 19 bp, Mus musculus
  siRNA target sequence for Hc (NM_010406.1,4290-4308).
cagtaatggatatatcact

SEQ ID NO: 664267 - DNA, 19 bp, Mus musculus
  siRNA target sequence for Hc (NM_010406.1,4363-4381).
ggatcaactactaactgat

SEQ ID NO: 664268 - DNA, 19 bp, Mus musculus
  siRNA target sequence for Hc (NM_010406.1,4364-4382).
gatcaactactaactgatt

SEQ ID NO: 664269 - DNA, 19 bp, Mus musculus
  siRNA target sequence for Hc (NM_010406.1,4403-4421).
gtcattctgcaactgaatt

SEQ ID NO: 664270 - DNA, 19 bp, Mus musculus
  siRNA target sequence for Hc (NM_010406.1,4422-4440).
cgatcccctccagagattt

SEQ ID NO: 664271 - DNA, 19 bp, Mus musculus
  siRNA target sequence for Hc (NM_010406.1,4450-4468).
ccggttccggatatttgaa

SEQ ID NO: 664272 - DNA, 19 bp, Mus musculus
  siRNA target sequence for Hc (NM_010406.1,4453-4471).
gttccggatatttgaactt

SEQ ID NO: 664273 - DNA, 19 bp, Mus musculus
  siRNA target sequence for Hc (NM_010406.1,4535-4553).
cagtgcaccatgatttata

SEQ ID NO: 664274 - DNA, 19 bp, Mus musculus
  siRNA target sequence for Hc (NM_010406.1,4539-4557).
gcaccatgatttatagcat

SEQ ID NO: 664275 - DNA, 19 bp, Mus musculus
  siRNA target sequence for Hc (NM_010406.1,4540-4558).
caccatgatttatagcatt

SEQ ID NO: 664276 - DNA, 19 bp, Mus musculus
  siRNA target sequence for Hc (NM_010406.1,4688-4706).
ccagagactgcatatgctt

SEQ ID NO: 664277 - DNA, 19 bp, Mus musculus
  siRNA target sequence for Hc (NM_010406.1,4689-4707).
cagagactgcatatgctta

SEQ ID NO: 664278 - DNA, 19 bp, Mus musculus
  siRNA target sequence for Hc (NM_010406.1,4761-4779).
cgactcttctggtcactta

SEQ ID NO: 664279 - DNA, 19 bp, Mus musculus
  siRNA target sequence for Hc (NM_010406.1,4764-4782).
ctcttctggtcacttacaa

SEQ ID NO: 664280 - DNA, 19 bp, Mus musculus
  siRNA target sequence for Hc (NM_010406.1,4809-4827).
cggaggtcaccttcattaa

SEQ ID NO: 664281 - DNA, 19 bp, Mus musculus
  siRNA target sequence for Hc (NM_010406.1,4924-4942).
gtatatataccctctagat

SEQ ID NO: 664282 - DNA, 19 bp, Mus musculus
  siRNA target sequence for Hc (NM_010406.1,4944-4962).
cctccacctggattgaata

SEQ ID NO: 664283 - DNA, 19 bp, Mus musculus
  siRNA target sequence for Hc (NM_010406.1,4945-4963).
ctccacctggattgaatat

SEQ ID NO: 664284 - DNA, 19 bp, Mus musculus
  siRNA target sequence for Hc (NM_010406.1,4986-5004).
catcctgtcaagcatttgt

SEQ ID NO: 664285 - DNA, 19 bp, Mus musculus
  siRNA target sequence for Hc (NM_010406.1,5024-5042).
gctgaagacctctttttaa

SEQ ID NO: 664286 - DNA, 19 bp, Mus musculus
  siRNA target sequence for Wap (NM_011709.1,160-178).
gtatcatctgccaaaccaa

SEQ ID NO: 664287 - DNA, 19 bp, Mus musculus
  siRNA target sequence for Wap (NM_011709.1,232-250).
gcaaaactcctgtcaacat

SEQ ID NO: 664288 - DNA, 19 bp, Mus musculus
  siRNA target sequence for Cdkn1b (NM_009875.2,511-529).
caaacgtgagagtgtctaa

SEQ ID NO: 664289 - DNA, 19 bp, Mus musculus
  siRNA target sequence for Cdkn1b (NM_009875.2,583-601).
cttccgcctgcagaaatct

SEQ ID NO: 664290 - DNA, 19 bp, Mus musculus
  siRNA target sequence for Cdkn1b (NM_009875.2,647-665).
gcactgccgggatatggaa

SEQ ID NO: 664291 - DNA, 19 bp, Mus musculus
  siRNA target sequence for Cdkn1b (NM_009875.2,673-691).
gtcagcgcaagtggaattt

SEQ ID NO: 664292 - DNA, 19 bp, Mus musculus
  siRNA target sequence for Cdkn1b (NM_009875.2,754-772).
gcttgcccgagttctacta

SEQ ID NO: 664293 - DNA, 19 bp, Mus musculus
  siRNA target sequence for Cdkn1b (NM_009875.2,843-861).
cgccaggcggtgcctttaa

SEQ ID NO: 664294 - DNA, 19 bp, Mus musculus
  siRNA target sequence for Cdkn1b (NM_009875.2,844-862).
gccaggcggtgcctttaat

SEQ ID NO: 664295 - DNA, 19 bp, Mus musculus
  siRNA target sequence for Cdkn1b (NM_009875.2,908-926).
gcctgactcgtcagacaat

SEQ ID NO: 664296 - DNA, 19 bp, Mus musculus
  siRNA target sequence for Cdkn1c (NM_009876.2,178-196).
cgataccttcccagtgata

SEQ ID NO: 664297 - DNA, 19 bp, Mus musculus
  siRNA target sequence for Cdkn1c (NM_009876.2,1020-1038).
ccaatgcgaacgacttctt

SEQ ID NO: 664298 - DNA, 19 bp, Mus musculus
  siRNA target sequence for Cdkn1c (NM_009876.2,1053-1071).
gaactgcgcaggagaacaa

SEQ ID NO: 664299 - DNA, 19 bp, Mus musculus
  siRNA target sequence for Pkia (NM_008862.2,127-145).
ctacgtatgcagatttcat

SEQ ID NO: 664300 - DNA, 19 bp, Mus musculus
  siRNA target sequence for Pkia (NM_008862.2,160-178).
caggtagaagaaatgcaat

SEQ ID NO: 664301 - DNA, 19 bp, Mus musculus
  siRNA target sequence for Pkia (NM_008862.2,169-187).
gaaatgcaatacatgatat

SEQ ID NO: 664302 - DNA, 19 bp, Mus musculus
  siRNA target sequence for Pkia (NM_008862.2,205-223).
gtggcaacagcaatgaatt

SEQ ID NO: 664303 - DNA, 19 bp, Mus musculus
  siRNA target sequence for Pkia (NM_008862.2,214-232).
gcaatgaattagccttaaa

SEQ ID NO: 664304 - DNA, 19 bp, Mus musculus
  siRNA target sequence for Pkia (NM_008862.2,237-255).
gcaggccttgatatcaaca

SEQ ID NO: 664305 - DNA, 19 bp, Mus musculus
  siRNA target sequence for Pkia (NM_008862.2,238-256).
caggccttgatatcaacaa

SEQ ID NO: 664306 - DNA, 19 bp, Mus musculus
  siRNA target sequence for Pkib (NM_008863.2,563-581).
cgtgaaggaagatgcaaaa

SEQ ID NO: 664307 - DNA, 19 bp, Mus musculus
  siRNA target sequence for Pkib (NM_008863.2,619-637).
cacccctaaatgaaggaaa

SEQ ID NO: 664308 - DNA, 19 bp, Mus musculus
  siRNA target sequence for Pkig (NM_011106.1,234-252).
cctcctactcggacttcat

SEQ ID NO: 664309 - DNA, 19 bp, Mus musculus
  siRNA target sequence for 2210407C18Rik (NM_144544.1,98-116).
gcctcctcacagtttttgt

SEQ ID NO: 664310 - DNA, 19 bp, Mus musculus
  siRNA target sequence for 2210407C18Rik (NM_144544.1,298-316).
gcttcatatcaaaacctat

SEQ ID NO: 664311 - DNA, 19 bp, Mus musculus
  siRNA target sequence for 2210407C18Rik (NM_144544.1,343-361).
gggaatcgacagaaattta

SEQ ID NO: 664312 - DNA, 19 bp, Mus musculus
  siRNA target sequence for 2210407C18Rik (NM_144544.1,345-363).
gaatcgacagaaatttaga

SEQ ID NO: 664313 - DNA, 19 bp, Mus musculus
  siRNA target sequence for 2210407C18Rik (NM_144544.1,349-367).
cgacagaaatttagataca

SEQ ID NO: 664314 - DNA, 19 bp, Mus musculus
  siRNA target sequence for 2210407C18Rik (NM_144544.1,350-368).
gacagaaatttagatacaa

SEQ ID NO: 664315 - DNA, 19 bp, Mus musculus
  siRNA target sequence for 2210407C18Rik (NM_144544.1,454-472).
cctgcctgctacaataata

SEQ ID NO: 664316 - DNA, 19 bp, Mus musculus
  siRNA target sequence for 2210407C18Rik (NM_144544.1,455-473).
ctgcctgctacaataataa

SEQ ID NO: 664317 - DNA, 19 bp, Mus musculus
  siRNA target sequence for 2210407C18Rik (NM_144544.1,457-475).
gcctgctacaataataaaa

SEQ ID NO: 664318 - DNA, 19 bp, Mus musculus
  siRNA target sequence for 2210407C18Rik (NM_144544.1,516-534).
ggcagagaaaaggtgtatt

SEQ ID NO: 664319 - DNA, 19 bp, Mus musculus
  siRNA target sequence for 2210407C18Rik (NM_144544.1,603-621).
ctgtgcactgtatatgact

SEQ ID NO: 664320 - DNA, 19 bp, Mus musculus
  siRNA target sequence for 2210407C18Rik (NM_144544.1,624-642).
cttcaataacatacaaatt

SEQ ID NO: 664321 - DNA, 19 bp, Mus musculus
  siRNA target sequence for Gsbs (NM_011153.2,171-189).
gctttcagacgacatacta

SEQ ID NO: 664322 - DNA, 19 bp, Mus musculus
  siRNA target sequence for Gsbs (NM_011153.2,226-244).
ctttcagaccagttcatta

SEQ ID NO: 664323 - DNA, 19 bp, Mus musculus
  siRNA target sequence for Gsbs (NM_011153.2,300-318).
gaatgttgagtcagatcaa

SEQ ID NO: 664324 - DNA, 19 bp, Mus musculus
  siRNA target sequence for Gsbs (NM_011153.2,549-567).
gagtgcaggagtgattcta

SEQ ID NO: 664325 - DNA, 19 bp, Mus musculus
  siRNA target sequence for Gsbs (NM_011153.2,551-569).
gtgcaggagtgattctaga

SEQ ID NO: 664326 - DNA, 19 bp, Mus musculus
  siRNA target sequence for Gsbs (NM_011153.2,586-604).
ggtgacaagctagctattt

SEQ ID NO: 664327 - DNA, 19 bp, Mus musculus
  siRNA target sequence for Ppp1r14c (NM_133485.1,567-585).
gcggtgcgcgtgtcttctt

SEQ ID NO: 664328 - DNA, 19 bp, Mus musculus
  siRNA target sequence for Ppp1r14c (NM_133485.1,908-926).
gctctcgtagactgctata

SEQ ID NO: 664329 - DNA, 19 bp, Mus musculus
  siRNA target sequence for Ppp1r14c (NM_133485.1,909-927).
ctctcgtagactgctataa

SEQ ID NO: 664330 - DNA, 19 bp, Mus musculus
  siRNA target sequence for Ppp1r14c (NM_133485.1,952-970).
gctgctctcccggataaga

SEQ ID NO: 664331 - DNA, 19 bp, Mus musculus
  siRNA target sequence for 4930579P15Rik (NM_172420.2,402-420).
cccaatagccccaaaaaga

SEQ ID NO: 664332 - DNA, 19 bp, Mus musculus
  siRNA target sequence for 4930579P15Rik (NM_172420.2,403-421).
ccaatagccccaaaaagat

SEQ ID NO: 664333 - DNA, 19 bp, Mus musculus
  siRNA target sequence for 4930579P15Rik (NM_172420.2,404-422).
caatagccccaaaaagata

SEQ ID NO: 664334 - DNA, 19 bp, Mus musculus
  siRNA target sequence for 4930579P15Rik (NM_172420.2,410-428).
ccccaaaaagatacaattt

SEQ ID NO: 664335 - DNA, 19 bp, Mus musculus
  siRNA target sequence for 4930579P15Rik (NM_172420.2,499-517).
cagcatcccttgtgattct

SEQ ID NO: 664336 - DNA, 19 bp, Mus musculus
  siRNA target sequence for 4930579P15Rik (NM_172420.2,505-523).
cccttgtgattctcaatga

SEQ ID NO: 664337 - DNA, 19 bp, Mus musculus
  siRNA target sequence for 4930579P15Rik (NM_172420.2,510-528).
gtgattctcaatgaacata

SEQ ID NO: 664338 - DNA, 19 bp, Mus musculus
  siRNA target sequence for 4930579P15Rik (NM_172420.2,512-530).
gattctcaatgaacataat

SEQ ID NO: 664339 - DNA, 19 bp, Mus musculus
  siRNA target sequence for 4930579P15Rik (NM_172420.2,546-564).
gagaagagagtgactaaca

SEQ ID NO: 664340 - DNA, 19 bp, Mus musculus
  siRNA target sequence for 4930579P15Rik (NM_172420.2,548-566).
gaagagagtgactaacaca

SEQ ID NO: 664341 - DNA, 19 bp, Mus musculus
  siRNA target sequence for 4930579P15Rik (NM_172420.2,567-585).
caagaatcgcagaatgcat

SEQ ID NO: 664342 - DNA, 19 bp, Mus musculus
  siRNA target sequence for 4930579P15Rik (NM_172420.2,614-632).
cacaccaccggccatgaaa

SEQ ID NO: 664343 - DNA, 19 bp, Mus musculus
  siRNA target sequence for 4930579P15Rik (NM_172420.2,625-643).
ccatgaaaggcgttaagca

SEQ ID NO: 664344 - DNA, 19 bp, Mus musculus
  siRNA target sequence for 4930579P15Rik (NM_172420.2,626-644).
catgaaaggcgttaagcat

SEQ ID NO: 664345 - DNA, 19 bp, Mus musculus
  siRNA target sequence for 4930579P15Rik (NM_172420.2,634-652).
gcgttaagcatctgaaaga

SEQ ID NO: 664346 - DNA, 19 bp, Mus musculus
  siRNA target sequence for Ppp1r1a (NM_021391.2,218-236).
gtcctccccagaaatagat

SEQ ID NO: 664347 - DNA, 19 bp, Mus musculus
  siRNA target sequence for Ppp1r1a (NM_021391.2,221-239).
ctccccagaaatagatgaa

SEQ ID NO: 664348 - DNA, 19 bp, Mus musculus
  siRNA target sequence for Ppp1r1a (NM_021391.2,266-284).
gtccaccttgtcaatgtct

SEQ ID NO: 664349 - DNA, 19 bp, Mus musculus
  siRNA target sequence for Ppp1r1a (NM_021391.2,286-304).
cacggcaacggaagaagat

SEQ ID NO: 664350 - DNA, 19 bp, Mus musculus
  siRNA target sequence for Ppp1r1a (NM_021391.2,473-491).
cgggacagcacaaaagtct

SEQ ID NO: 664351 - DNA, 19 bp, Mus musculus
  siRNA target sequence for Ppp1r1b (NM_144828.1,453-471).
ccaacccctgccatgcttt

SEQ ID NO: 664352 - DNA, 19 bp, Mus musculus
  siRNA target sequence for Ppp1r1b (NM_144828.1,603-621).
cagcacctgcagaccatta

SEQ ID NO: 664353 - DNA, 19 bp, Mus musculus
  siRNA target sequence for Ppp1r1b (NM_144828.1,612-630).
cagaccattagcaacttga

SEQ ID NO: 664354 - DNA, 19 bp, Mus musculus
  siRNA target sequence for Ppp1r1b (NM_144828.1,782-800).
ggggcagaagcctacttgt

SEQ ID NO: 664355 - DNA, 19 bp, Mus musculus
  siRNA target sequence for Ppp1r1b (NM_144828.1,882-900).
gaaggcagagcaacactaa

SEQ ID NO: 664356 - DNA, 19 bp, Mus musculus
  siRNA target sequence for Oaz2 (NM_010952.2,163-181).
cacccaggacagtagtatt

SEQ ID NO: 664357 - DNA, 19 bp, Mus musculus
  siRNA target sequence for Oaz2 (NM_010952.2,177-195).
gtattttgccgttgagtaa

SEQ ID NO: 664358 - DNA, 19 bp, Mus musculus
  siRNA target sequence for Oaz2 (NM_010952.2,211-229).
gtgctgcaggcacattgtt

SEQ ID NO: 664359 - DNA, 19 bp, Mus musculus
  siRNA target sequence for Oaz2 (NM_010952.2,307-325).
cttctctctcagctctaat

SEQ ID NO: 664360 - DNA, 19 bp, Mus musculus
  siRNA target sequence for Oaz2 (NM_010952.2,310-328).
ctctctcagctctaatata

SEQ ID NO: 664361 - DNA, 19 bp, Mus musculus
  siRNA target sequence for Oaz2 (NM_010952.2,316-334).
cagctctaatatataagga

SEQ ID NO: 664362 - DNA, 19 bp, Mus musculus
  siRNA target sequence for Oaz2 (NM_010952.2,362-380).
ccctgtgaacgatggaaaa

SEQ ID NO: 664363 - DNA, 19 bp, Mus musculus
  siRNA target sequence for Oaz2 (NM_010952.2,448-466).
ccagccagagcctgtttgt

SEQ ID NO: 664364 - DNA, 19 bp, Mus musculus
  siRNA target sequence for Oaz2 (NM_010952.2,468-486).
gaaatcccagatggattat

SEQ ID NO: 664365 - DNA, 19 bp, Mus musculus
  siRNA target sequence for Oaz3 (NM_016901.1,209-227).
gctgccttgttgttacaaa

SEQ ID NO: 664366 - DNA, 19 bp, Mus musculus
  siRNA target sequence for Oaz3 (NM_016901.1,214-232).
cttgttgttacaaaagcat

SEQ ID NO: 664367 - DNA, 19 bp, Mus musculus
  siRNA target sequence for Oaz3 (NM_016901.1,220-238).
gttacaaaagcatcactta

SEQ ID NO: 664368 - DNA, 19 bp, Mus musculus
  siRNA target sequence for Oaz3 (NM_016901.1,378-396).
ccagcttaaagaactctat

SEQ ID NO: 664369 - DNA, 19 bp, Mus musculus
  siRNA target sequence for Oaz3 (NM_016901.1,445-463).
gatccagttcagttagact

SEQ ID NO: 664370 - DNA, 19 bp, Mus musculus
  siRNA target sequence for Oaz3 (NM_016901.1,667-685).
ctgctgcgagcctttagct

SEQ ID NO: 664371 - DNA, 19 bp, Mus musculus
  siRNA target sequence for Oaz3 (NM_016901.1,727-745).
cctccctgggacaatgtca

SEQ ID NO: 664372 - DNA, 19 bp, Mus musculus
  siRNA target sequence for Wbscr16 (NM_033572.1,171-189).
cggacgttccggtgtttca

SEQ ID NO: 664373 - DNA, 19 bp, Mus musculus
  siRNA target sequence for Wbscr16 (NM_033572.1,173-191).
gacgttccggtgtttcagt

SEQ ID NO: 664374 - DNA, 19 bp, Mus musculus
  siRNA target sequence for Wbscr16 (NM_033572.1,347-365).
cgcctggagctggatcata

SEQ ID NO: 664375 - DNA, 19 bp, Mus musculus
  siRNA target sequence for Wbscr16 (NM_033572.1,670-688).
ggtggtggaggatgaagta

SEQ ID NO: 664376 - DNA, 19 bp, Mus musculus
  siRNA target sequence for Wbscr16 (NM_033572.1,1096-1114).
gaacgcggagggacatgtt

SEQ ID NO: 664377 - DNA, 19 bp, Mus musculus
  siRNA target sequence for Wbscr16 (NM_033572.1,1101-1119).
cggagggacatgttttcgt

SEQ ID NO: 664378 - DNA, 19 bp, Mus musculus
  siRNA target sequence for Wbscr16 (NM_033572.1,1117-1135).
cgtctggggctatggaatt

SEQ ID NO: 664379 - DNA, 19 bp, Mus musculus
  siRNA target sequence for Wbscr16 (NM_033572.1,1156-1174).
cttggaaacggcaattcca

SEQ ID NO: 664380 - DNA, 19 bp, Mus musculus
  siRNA target sequence for Wbscr16 (NM_033572.1,1164-1182).
cggcaattccagaaatgat

SEQ ID NO: 664381 - DNA, 19 bp, Mus musculus
  siRNA target sequence for Wbscr16 (NM_033572.1,1165-1183).
ggcaattccagaaatgatt

SEQ ID NO: 664382 - DNA, 19 bp, Mus musculus
  siRNA target sequence for Wbscr16 (NM_033572.1,1184-1202).
ccacccacgctctttggtt

SEQ ID NO: 664383 - DNA, 19 bp, Mus musculus
  siRNA target sequence for Wbscr16 (NM_033572.1,1185-1203).
cacccacgctctttggttt

SEQ ID NO: 664384 - DNA, 19 bp, Mus musculus
  siRNA target sequence for Wbscr16 (NM_033572.1,1392-1410).
cgtgtggagtggatcacat

SEQ ID NO: 664385 - DNA, 19 bp, Mus musculus
  siRNA target sequence for Wbscr16 (NM_033572.1,1412-1430).
gtgactctagccaagtcat

SEQ ID NO: 664386 - DNA, 19 bp, Mus musculus
  siRNA target sequence for Wbscr16 (NM_033572.1,1418-1436).
ctagccaagtcattcatct

SEQ ID NO: 664387 - DNA, 19 bp, Mus musculus
  siRNA target sequence for 1700123K08Rik (NM_029693.1,93-111).
cgccttgtctgcttttgga

SEQ ID NO: 664388 - DNA, 19 bp, Mus musculus
  siRNA target sequence for 1700123K08Rik (NM_029693.1,210-228).
cacccccagttcaactaca

SEQ ID NO: 664389 - DNA, 19 bp, Mus musculus
  siRNA target sequence for 1700123K08Rik (NM_029693.1,530-548).
gccttccccagacatagat

SEQ ID NO: 664390 - DNA, 19 bp, Mus musculus
  siRNA target sequence for 1700123K08Rik (NM_029693.1,874-892).
ctgccagtggtacaatcta

SEQ ID NO: 664391 - DNA, 19 bp, Mus musculus
  siRNA target sequence for 2900055D14Rik (NM_028411.1,163-181).
ctccagaccggtaactaca

SEQ ID NO: 664392 - DNA, 19 bp, Mus musculus
  siRNA target sequence for 2900055D14Rik (NM_028411.1,254-272).
gaatggctcctgttatcca

SEQ ID NO: 664393 - DNA, 19 bp, Mus musculus
  siRNA target sequence for 2900055D14Rik (NM_028411.1,301-319).
gcaatcctcttcaacatca

SEQ ID NO: 664394 - DNA, 19 bp, Mus musculus
  siRNA target sequence for 2900055D14Rik (NM_028411.1,390-408).
gttcaaagggaccatcatt

SEQ ID NO: 664395 - DNA, 19 bp, Mus musculus
  siRNA target sequence for 2900055D14Rik (NM_028411.1,497-515).
caaacggcctgcaaacact

SEQ ID NO: 664396 - DNA, 19 bp, Mus musculus
  siRNA target sequence for 2900055D14Rik (NM_028411.1,501-519).
cggcctgcaaacactgttt

SEQ ID NO: 664397 - DNA, 19 bp, Mus musculus
  siRNA target sequence for 2900055D14Rik (NM_028411.1,504-522).
cctgcaaacactgtttgta

SEQ ID NO: 664398 - DNA, 19 bp, Mus musculus
  siRNA target sequence for 2900055D14Rik (NM_028411.1,546-564).
ctactgctatttctacaaa

SEQ ID NO: 664399 - DNA, 19 bp, Mus musculus
  siRNA target sequence for 2900055D14Rik (NM_028411.1,614-632).
ggcttcgcaaggagttcat

SEQ ID NO: 664400 - DNA, 19 bp, Mus musculus
  siRNA target sequence for 4921528G01Rik (NM_023884.2,135-153).
gcaggcaagcagtgttact

SEQ ID NO: 664401 - DNA, 19 bp, Mus musculus
  siRNA target sequence for 4921528G01Rik (NM_023884.2,271-289).
gaatacgcgggtcagataa

SEQ ID NO: 664402 - DNA, 19 bp, Mus musculus
  siRNA target sequence for 4921528G01Rik (NM_023884.2,276-294).
cgcgggtcagataacacta

SEQ ID NO: 664403 - DNA, 19 bp, Mus musculus
  siRNA target sequence for 4921528G01Rik (NM_023884.2,277-295).
gcgggtcagataacactaa

SEQ ID NO: 664404 - DNA, 19 bp, Mus musculus
  siRNA target sequence for 4921528G01Rik (NM_023884.2,317-335).
ctattcagccagatgaact

SEQ ID NO: 664405 - DNA, 19 bp, Mus musculus
  siRNA target sequence for 4921528G01Rik (NM_023884.2,322-340).
cagccagatgaactttcaa

SEQ ID NO: 664406 - DNA, 19 bp, Mus musculus
  siRNA target sequence for 4921528G01Rik (NM_023884.2,324-342).
gccagatgaactttcaagt

SEQ ID NO: 664407 - DNA, 19 bp, Mus musculus
  siRNA target sequence for 4921528G01Rik (NM_023884.2,392-410).
ctttcacaagaagatttaa

SEQ ID NO: 664408 - DNA, 19 bp, Mus musculus
  siRNA target sequence for 4921528G01Rik (NM_023884.2,404-422).
gatttaatcacgtaagctt

SEQ ID NO: 664409 - DNA, 19 bp, Mus musculus
  siRNA target sequence for 4921528G01Rik (NM_023884.2,444-462).
ccatgctcaaacactgaaa

SEQ ID NO: 664410 - DNA, 19 bp, Mus musculus
  siRNA target sequence for 4921528G01Rik (NM_023884.2,480-498).
gagccactatattaagact

SEQ ID NO: 664411 - DNA, 19 bp, Mus musculus
  siRNA target sequence for 4921528G01Rik (NM_023884.2,495-513).
gactgctaagaaactatat

SEQ ID NO: 664412 - DNA, 19 bp, Mus musculus
  siRNA target sequence for 4921528G01Rik (NM_023884.2,568-586).
ccgattttccggttgacta

SEQ ID NO: 664413 - DNA, 19 bp, Mus musculus
  siRNA target sequence for 4921528G01Rik (NM_023884.2,569-587).
cgattttccggttgactaa

SEQ ID NO: 664414 - DNA, 19 bp, Mus musculus
  siRNA target sequence for 4921528G01Rik (NM_023884.2,584-602).
ctaagacgtgggcgttatt

SEQ ID NO: 664415 - DNA, 19 bp, Mus musculus
  siRNA target sequence for 4921528G01Rik (NM_023884.2,588-606).
gacgtgggcgttattaagt

SEQ ID NO: 664416 - DNA, 19 bp, Mus musculus
  siRNA target sequence for 4921528G01Rik (NM_023884.2,594-612).
ggcgttattaagtcgaaaa

SEQ ID NO: 664417 - DNA, 19 bp, Mus musculus
  siRNA target sequence for 4921528G01Rik (NM_023884.2,596-614).
cgttattaagtcgaaaaga

SEQ ID NO: 664418 - DNA, 19 bp, Mus musculus
  siRNA target sequence for 4921528G01Rik (NM_023884.2,620-638).
ctacctttgaaaaactaga

SEQ ID NO: 664419 - DNA, 19 bp, Mus musculus
  siRNA target sequence for 4921528G01Rik (NM_023884.2,628-646).
gaaaaactagaatatgtaa

SEQ ID NO: 664420 - DNA, 19 bp, Mus musculus
  siRNA target sequence for 4921528G01Rik (NM_023884.2,735-753).
gtctgacttgacctacatt

SEQ ID NO: 664421 - DNA, 19 bp, Mus musculus
  siRNA target sequence for 4921528G01Rik (NM_023884.2,770-788).
ccaccggcagcattctaga

SEQ ID NO: 664422 - DNA, 19 bp, Mus musculus
  siRNA target sequence for 4921528G01Rik (NM_023884.2,773-791).
ccggcagcattctagaaaa

SEQ ID NO: 664423 - DNA, 19 bp, Mus musculus
  siRNA target sequence for 4921528G01Rik (NM_023884.2,800-818).
gatcaaatctgatgaacaa

SEQ ID NO: 664424 - DNA, 19 bp, Mus musculus
  siRNA target sequence for 4921528G01Rik (NM_023884.2,816-834).
caacattcttcgaataatt

SEQ ID NO: 664425 - DNA, 19 bp, Mus musculus
  siRNA target sequence for 4921528G01Rik (NM_023884.2,847-865).
cagtcctgtgaatatgata

SEQ ID NO: 664426 - DNA, 19 bp, Mus musculus
  siRNA target sequence for 4921528G01Rik (NM_023884.2,900-918).
ctctgttcagtatatagaa

SEQ ID NO: 664427 - DNA, 19 bp, Mus musculus
  siRNA target sequence for 4921528G01Rik (NM_023884.2,909-927).
gtatatagaagaactacaa

SEQ ID NO: 664428 - DNA, 19 bp, Mus musculus
  siRNA target sequence for 4921528G01Rik (NM_023884.2,951-969).
caagctctccttaaagata

SEQ ID NO: 664429 - DNA, 19 bp, Mus musculus
  siRNA target sequence for 4921528G01Rik (NM_023884.2,954-972).
gctctccttaaagatagaa

SEQ ID NO: 664430 - DNA, 19 bp, Mus musculus
  siRNA target sequence for 4921528G01Rik (NM_023884.2,1166-1184).
gcctgggttacaatttcat

SEQ ID NO: 664431 - DNA, 19 bp, Mus musculus
  siRNA target sequence for 4921528G01Rik (NM_023884.2,1170-1188).
gggttacaatttcattcat

SEQ ID NO: 664432 - DNA, 19 bp, Mus musculus
  siRNA target sequence for 4921528G01Rik (NM_023884.2,1240-1258).
cggcacctgctggatgata

SEQ ID NO: 664433 - DNA, 19 bp, Mus musculus
  siRNA target sequence for 4921528G01Rik (NM_023884.2,1426-1444).
ccgcgaaatggctatcgaa

SEQ ID NO: 664434 - DNA, 19 bp, Mus musculus
  siRNA target sequence for 4921528G01Rik (NM_023884.2,1497-1515).
gtaccccggagctgttact

SEQ ID NO: 664435 - DNA, 19 bp, Mus musculus
  siRNA target sequence for 4921528G01Rik (NM_023884.2,1500-1518).
ccccggagctgttactatt

SEQ ID NO: 664436 - DNA, 19 bp, Mus musculus
  siRNA target sequence for 4921528G01Rik (NM_023884.2,1502-1520).
ccggagctgttactattca

SEQ ID NO: 664437 - DNA, 19 bp, Mus musculus
  siRNA target sequence for 4921528G01Rik (NM_023884.2,1535-1553).
ggaaaaccttgctaaaaga

SEQ ID NO: 664438 - DNA, 19 bp, Mus musculus
  siRNA target sequence for 4921528G01Rik (NM_023884.2,1855-1873).
caacaggttcctacaaact

SEQ ID NO: 664439 - DNA, 19 bp, Mus musculus
  siRNA target sequence for 4921528G01Rik (NM_023884.2,1865-1883).
ctacaaacttgatgacttt

SEQ ID NO: 664440 - DNA, 19 bp, Mus musculus
  siRNA target sequence for 4930449I24Rik (NM_026136.1,914-932).
ggcaattattcgtgtctta

SEQ ID NO: 664441 - DNA, 19 bp, Mus musculus
  siRNA target sequence for 4930449I24Rik (NM_026136.1,916-934).
caattattcgtgtcttaca

SEQ ID NO: 664442 - DNA, 19 bp, Mus musculus
  siRNA target sequence for 4933421I07Rik (NM_027702.1,191-209).
ccccgattcgactacaaga

SEQ ID NO: 664443 - DNA, 19 bp, Mus musculus
  siRNA target sequence for 4933421I07Rik (NM_027702.1,363-381).
ggactgactgcattgaaga

SEQ ID NO: 664444 - DNA, 19 bp, Mus musculus
  siRNA target sequence for 4933421I07Rik (NM_027702.1,543-561).
ctctctccatgtttaagga

SEQ ID NO: 664445 - DNA, 19 bp, Mus musculus
  siRNA target sequence for 5830418G11Rik (NM_175211.2,400-418).
cgtcttcgacgttctgaaa

SEQ ID NO: 664446 - DNA, 19 bp, Mus musculus
  siRNA target sequence for 5830418G11Rik (NM_175211.2,437-455).
gccagtcagatcacattga

SEQ ID NO: 664447 - DNA, 19 bp, Mus musculus
  siRNA target sequence for 5830418G11Rik (NM_175211.2,585-603).
gggtcgtacgagaaattct

SEQ ID NO: 664448 - DNA, 19 bp, Mus musculus
  siRNA target sequence for 5830418G11Rik (NM_175211.2,586-604).
ggtcgtacgagaaattcta

SEQ ID NO: 664449 - DNA, 19 bp, Mus musculus
  siRNA target sequence for 5830418G11Rik (NM_175211.2,587-605).
gtcgtacgagaaattctaa

SEQ ID NO: 664450 - DNA, 19 bp, Mus musculus
  siRNA target sequence for 5830418G11Rik (NM_175211.2,589-607).
cgtacgagaaattctaaca

SEQ ID NO: 664451 - DNA, 19 bp, Mus musculus
  siRNA target sequence for 5830418G11Rik (NM_175211.2,674-692).
gaactgaacaaccttcatt

SEQ ID NO: 664452 - DNA, 19 bp, Mus musculus
  siRNA target sequence for 5830418G11Rik (NM_175211.2,700-718).
gtctgtggtgtcagcatta

SEQ ID NO: 664453 - DNA, 19 bp, Mus musculus
  siRNA target sequence for 5830418G11Rik (NM_175211.2,704-722).
gtggtgtcagcattacaaa

SEQ ID NO: 664454 - DNA, 19 bp, Mus musculus
  siRNA target sequence for 5830418G11Rik (NM_175211.2,773-791).
gacaagactacttttgaga

SEQ ID NO: 664455 - DNA, 19 bp, Mus musculus
  siRNA target sequence for 5830418G11Rik (NM_175211.2,778-796).
gactacttttgagaaactt

SEQ ID NO: 664456 - DNA, 19 bp, Mus musculus
  siRNA target sequence for 5830418G11Rik (NM_175211.2,898-916).
ggacttgatctacattgat

SEQ ID NO: 664457 - DNA, 19 bp, Mus musculus
  siRNA target sequence for 5830418G11Rik (NM_175211.2,936-954).
gcagcatcatggaaaacga

SEQ ID NO: 664458 - DNA, 19 bp, Mus musculus
  siRNA target sequence for 5830418G11Rik (NM_175211.2,985-1003).
ccgaatcattgccgattta

SEQ ID NO: 664459 - DNA, 19 bp, Mus musculus
  siRNA target sequence for 5830418G11Rik (NM_175211.2,987-1005).
gaatcattgccgatttaca

SEQ ID NO: 664460 - DNA, 19 bp, Mus musculus
  siRNA target sequence for 5830418G11Rik (NM_175211.2,991-1009).
cattgccgatttacaagtt

SEQ ID NO: 664461 - DNA, 19 bp, Mus musculus
  siRNA target sequence for 5830418G11Rik (NM_175211.2,1037-1055).
ctgccacatgtgcaaaagt

SEQ ID NO: 664462 - DNA, 19 bp, Mus musculus
  siRNA target sequence for 5830418G11Rik (NM_175211.2,1081-1099).
ggagctccagaagtttgta

SEQ ID NO: 664463 - DNA, 19 bp, Mus musculus
  siRNA target sequence for 5830418G11Rik (NM_175211.2,1225-1243).
gcccacctgtccagataca

SEQ ID NO: 664464 - DNA, 19 bp, Mus musculus
  siRNA target sequence for 5830418G11Rik (NM_175211.2,1226-1244).
cccacctgtccagatacat

SEQ ID NO: 664465 - DNA, 19 bp, Mus musculus
  siRNA target sequence for 5830418G11Rik (NM_175211.2,1324-1342).
gttgagtgtagttgaaagt

SEQ ID NO: 664466 - DNA, 19 bp, Mus musculus
  siRNA target sequence for 5830418G11Rik (NM_175211.2,1561-1579).
ggttccagttcggaattct

SEQ ID NO: 664467 - DNA, 19 bp, Mus musculus
  siRNA target sequence for 5830418G11Rik (NM_175211.2,1746-1764).
caggagccaccctccttta

SEQ ID NO: 664468 - DNA, 19 bp, Mus musculus
  siRNA target sequence for 5830418G11Rik (NM_175211.2,1748-1766).
ggagccaccctcctttact

SEQ ID NO: 664469 - DNA, 19 bp, Mus musculus
  siRNA target sequence for 5830418G11Rik (NM_175211.2,1749-1767).
gagccaccctcctttacta

SEQ ID NO: 664470 - DNA, 19 bp, Mus musculus
  siRNA target sequence for 5830418G11Rik (NM_175211.2,1783-1801).
gcggggtacagacagaaaa

SEQ ID NO: 664471 - DNA, 19 bp, Mus musculus
  siRNA target sequence for 5830418G11Rik (NM_175211.2,1788-1806).
gtacagacagaaaacatta

SEQ ID NO: 664472 - DNA, 19 bp, Mus musculus
  siRNA target sequence for 5830418G11Rik (NM_175211.2,1868-1886).
cccgagcacccagatatct

SEQ ID NO: 664473 - DNA, 19 bp, Mus musculus
  siRNA target sequence for 5830418G11Rik (NM_175211.2,1869-1887).
ccgagcacccagatatctt

SEQ ID NO: 664474 - DNA, 19 bp, Mus musculus
  siRNA target sequence for 5830418G11Rik (NM_175211.2,1891-1909).
gctgaataaccctgacaaa

SEQ ID NO: 664475 - DNA, 19 bp, Mus musculus
  siRNA target sequence for 5830418G11Rik (NM_175211.2,1900-1918).
ccctgacaaaggcaatgtt

SEQ ID NO: 664476 - DNA, 19 bp, Mus musculus
  siRNA target sequence for 5830418G11Rik (NM_175211.2,1930-1948).
gacgggctcccgtttccat

SEQ ID NO: 664477 - DNA, 19 bp, Mus musculus
  siRNA target sequence for 5830418G11Rik (NM_175211.2,2003-2021).
gtacctgcaaaccttatgt

SEQ ID NO: 664478 - DNA, 19 bp, Mus musculus
  siRNA target sequence for Bcar3 (NM_013867.1,476-494).
gcacagatgcctatcaaga

SEQ ID NO: 664479 - DNA, 19 bp, Mus musculus
  siRNA target sequence for Bcar3 (NM_013867.1,486-504).
ctatcaagacgtgtctata

SEQ ID NO: 664480 - DNA, 19 bp, Mus musculus
  siRNA target sequence for Bcar3 (NM_013867.1,543-561).
catacggtcctgtgacaat

SEQ ID NO: 664481 - DNA, 19 bp, Mus musculus
  siRNA target sequence for Bcar3 (NM_013867.1,637-655).
cggaaaggggaaaacttca

SEQ ID NO: 664482 - DNA, 19 bp, Mus musculus
  siRNA target sequence for Bcar3 (NM_013867.1,688-706).
ctggaatacgtgaagttct

SEQ ID NO: 664483 - DNA, 19 bp, Mus musculus
  siRNA target sequence for Bcar3 (NM_013867.1,739-757).
gagaggctgaaaaaggaat

SEQ ID NO: 664484 - DNA, 19 bp, Mus musculus
  siRNA target sequence for Bcar3 (NM_013867.1,827-845).
gacaggtgtctgaaaacct

SEQ ID NO: 664485 - DNA, 19 bp, Mus musculus
  siRNA target sequence for Bcar3 (NM_013867.1,928-946).
ctcgctcagcactttaaga

SEQ ID NO: 664486 - DNA, 19 bp, Mus musculus
  siRNA target sequence for Bcar3 (NM_013867.1,932-950).
ctcagcactttaagatcaa

SEQ ID NO: 664487 - DNA, 19 bp, Mus musculus
  siRNA target sequence for Bcar3 (NM_013867.1,983-1001).
gccgtgtgcagtaccaatt

SEQ ID NO: 664488 - DNA, 19 bp, Mus musculus
  siRNA target sequence for Bcar3 (NM_013867.1,986-1004).
gtgtgcagtaccaattcga

SEQ ID NO: 664489 - DNA, 19 bp, Mus musculus
  siRNA target sequence for Bcar3 (NM_013867.1,1089-1107).
catcttccagcccatcaat

SEQ ID NO: 664490 - DNA, 19 bp, Mus musculus
  siRNA target sequence for Bcar3 (NM_013867.1,1753-1771).
cggaactctggcatcaact

SEQ ID NO: 664491 - DNA, 19 bp, Mus musculus
  siRNA target sequence for Bcar3 (NM_013867.1,1754-1772).
ggaactctggcatcaacta

SEQ ID NO: 664492 - DNA, 19 bp, Mus musculus
  siRNA target sequence for Bcar3 (NM_013867.1,1789-1807).
gatgaccaggcgagacatt

SEQ ID NO: 664493 - DNA, 19 bp, Mus musculus
  siRNA target sequence for Bcar3 (NM_013867.1,1842-1860).
ggaggacaagaccaagttt

SEQ ID NO: 664494 - DNA, 19 bp, Mus musculus
  siRNA target sequence for Bcar3 (NM_013867.1,1876-1894).
gagaccgtgtcgtcattca

SEQ ID NO: 664495 - DNA, 19 bp, Mus musculus
  siRNA target sequence for Bcar3 (NM_013867.1,1878-1896).
gaccgtgtcgtcattcaga

SEQ ID NO: 664496 - DNA, 19 bp, Mus musculus
  siRNA target sequence for Bcar3 (NM_013867.1,1889-1907).
cattcagacccaatgactt

SEQ ID NO: 664497 - DNA, 19 bp, Mus musculus
  siRNA target sequence for Bcar3 (NM_013867.1,2171-2189).
gcattgctgtggacattct

SEQ ID NO: 664498 - DNA, 19 bp, Mus musculus
  siRNA target sequence for Bcar3 (NM_013867.1,2215-2233).
cgagcgggtaccctcaata

SEQ ID NO: 664499 - DNA, 19 bp, Mus musculus
  siRNA target sequence for Bcar3 (NM_013867.1,2216-2234).
gagcgggtaccctcaataa

SEQ ID NO: 664500 - DNA, 19 bp, Mus musculus
  siRNA target sequence for Bcar3 (NM_013867.1,2218-2236).
gcgggtaccctcaataaga

SEQ ID NO: 664501 - DNA, 19 bp, Mus musculus
  siRNA target sequence for Bcar3 (NM_013867.1,2219-2237).
cgggtaccctcaataagat

SEQ ID NO: 664502 - DNA, 19 bp, Mus musculus
  siRNA target sequence for Bcar3 (NM_013867.1,2322-2340).
gatcacaaggttagagaaa

SEQ ID NO: 664503 - DNA, 19 bp, Mus musculus
  siRNA target sequence for Bcar3 (NM_013867.1,2395-2413).
cagttgaagccctttagca

SEQ ID NO: 664504 - DNA, 19 bp, Mus musculus
  siRNA target sequence for Bcar3 (NM_013867.1,2429-2447).
gcagagagtctacatatgt

SEQ ID NO: 664505 - DNA, 19 bp, Mus musculus
  siRNA target sequence for Bcar3 (NM_013867.1,2483-2501).
cactggtgaccttaatgga

SEQ ID NO: 664506 - DNA, 19 bp, Mus musculus
  siRNA target sequence for Bcar3 (NM_013867.1,2529-2547).
cgacatgtgggaaaacaat

SEQ ID NO: 664507 - DNA, 19 bp, Mus musculus
  siRNA target sequence for Bcar3 (NM_013867.1,2687-2705).
ctgagttccagatgagatt

SEQ ID NO: 664508 - DNA, 19 bp, Mus musculus
  siRNA target sequence for Bcar3 (NM_013867.1,2743-2761).
gagagatacgacaagttca

SEQ ID NO: 664509 - DNA, 19 bp, Mus musculus
  siRNA target sequence for Bcar3 (NM_013867.1,2777-2795).
ccctctcacggaaactaga

SEQ ID NO: 664510 - DNA, 19 bp, Mus musculus
  siRNA target sequence for C030018K18Rik (NM_175258.2,230-248).
ggacttaaatattatttat

SEQ ID NO: 664511 - DNA, 19 bp, Mus musculus
  siRNA target sequence for C030018K18Rik (NM_175258.2,258-276).
catgggatggaaatactat

SEQ ID NO: 664512 - DNA, 19 bp, Mus musculus
  siRNA target sequence for C030018K18Rik (NM_175258.2,262-280).
ggatggaaatactatcaaa

SEQ ID NO: 664513 - DNA, 19 bp, Mus musculus
  siRNA target sequence for C030018K18Rik (NM_175258.2,287-305).
ggagcatcagcttaggtta

SEQ ID NO: 664514 - DNA, 19 bp, Mus musculus
  siRNA target sequence for C030018K18Rik (NM_175258.2,288-306).
gagcatcagcttaggttaa

SEQ ID NO: 664515 - DNA, 19 bp, Mus musculus
  siRNA target sequence for C030018K18Rik (NM_175258.2,291-309).
catcagcttaggttaatgt

SEQ ID NO: 664516 - DNA, 19 bp, Mus musculus
  siRNA target sequence for C030018K18Rik (NM_175258.2,294-312).
cagcttaggttaatgtcta

SEQ ID NO: 664517 - DNA, 19 bp, Mus musculus
  siRNA target sequence for C030018K18Rik (NM_175258.2,297-315).
cttaggttaatgtctacaa

SEQ ID NO: 664518 - DNA, 19 bp, Mus musculus
  siRNA target sequence for C030018K18Rik (NM_175258.2,316-334).
gagcacgctatgagagata

SEQ ID NO: 664519 - DNA, 19 bp, Mus musculus
  siRNA target sequence for C030018K18Rik (NM_175258.2,318-336).
gcacgctatgagagataca

SEQ ID NO: 664520 - DNA, 19 bp, Mus musculus
  siRNA target sequence for C030018K18Rik (NM_175258.2,329-347).
gagatacagtggcaatcaa

SEQ ID NO: 664521 - DNA, 19 bp, Mus musculus
  siRNA target sequence for C030018K18Rik (NM_175258.2,335-353).
cagtggcaatcaaatgctt

SEQ ID NO: 664522 - DNA, 19 bp, Mus musculus
  siRNA target sequence for C030018K18Rik (NM_175258.2,363-381).
gaaactattgccagatgtt

SEQ ID NO: 664523 - DNA, 19 bp, Mus musculus
  siRNA target sequence for C030018K18Rik (NM_175258.2,400-418).
gatctgtacttgtaaaaga

SEQ ID NO: 664524 - DNA, 19 bp, Mus musculus
  siRNA target sequence for C030018K18Rik (NM_175258.2,432-450).
cctccttgcagttttggta

SEQ ID NO: 664525 - DNA, 19 bp, Mus musculus
  siRNA target sequence for C030018K18Rik (NM_175258.2,452-470).
gcagtttggaggaaaaaga

SEQ ID NO: 664526 - DNA, 19 bp, Mus musculus
  siRNA target sequence for C030018K18Rik (NM_175258.2,486-504).
gtgttagaaccttcagaaa

SEQ ID NO: 664527 - DNA, 19 bp, Mus musculus
  siRNA target sequence for C030018K18Rik (NM_175258.2,577-595).
gacgaaggtttcggaaaat

SEQ ID NO: 664528 - DNA, 19 bp, Mus musculus
  siRNA target sequence for C030018K18Rik (NM_175258.2,579-597).
cgaaggtttcggaaaatta

SEQ ID NO: 664529 - DNA, 19 bp, Mus musculus
  siRNA target sequence for C030018K18Rik (NM_175258.2,606-624).
ggagaacgccaaaccataa

SEQ ID NO: 664530 - DNA, 19 bp, Mus musculus
  siRNA target sequence for C030018K18Rik (NM_175258.2,607-625).
gagaacgccaaaccataat

SEQ ID NO: 664531 - DNA, 19 bp, Mus musculus
  siRNA target sequence for C030018K18Rik (NM_175258.2,708-726).
gtgacgcatgtgtcttcta

SEQ ID NO: 664532 - DNA, 19 bp, Mus musculus
  siRNA target sequence for C030018K18Rik (NM_175258.2,710-728).
gacgcatgtgtcttctagt

SEQ ID NO: 664533 - DNA, 19 bp, Mus musculus
  siRNA target sequence for C030018K18Rik (NM_175258.2,766-784).
gcagtttatccgatatcta

SEQ ID NO: 664534 - DNA, 19 bp, Mus musculus
  siRNA target sequence for C030018K18Rik (NM_175258.2,767-785).
cagtttatccgatatctat

SEQ ID NO: 664535 - DNA, 19 bp, Mus musculus
  siRNA target sequence for C030018K18Rik (NM_175258.2,804-822).
gtaggagatgtagatttaa

SEQ ID NO: 664536 - DNA, 19 bp, Mus musculus
  siRNA target sequence for C030018K18Rik (NM_175258.2,899-917).
gcagggtcgagatcttgtt

SEQ ID NO: 664537 - DNA, 19 bp, Mus musculus
  siRNA target sequence for C030018K18Rik (NM_175258.2,915-933).
gttcgggagtgtcttgaaa

SEQ ID NO: 664538 - DNA, 19 bp, Mus musculus
  siRNA target sequence for C030018K18Rik (NM_175258.2,935-953).
ggaacccgcagacaaaact

SEQ ID NO: 664539 - DNA, 19 bp, Mus musculus
  siRNA target sequence for C030018K18Rik (NM_175258.2,1035-1053).
ctctgctccgtcatggttt

SEQ ID NO: 664540 - DNA, 19 bp, Mus musculus
  siRNA target sequence for C030018K18Rik (NM_175258.2,1040-1058).
ctccgtcatggtttttgaa

SEQ ID NO: 664541 - DNA, 19 bp, Mus musculus
  siRNA target sequence for C030018K18Rik (NM_175258.2,1042-1060).
ccgtcatggtttttgaagt

SEQ ID NO: 664542 - DNA, 19 bp, Mus musculus
  siRNA target sequence for C030018K18Rik (NM_175258.2,1070-1088).
ggctggggctgttattctt

SEQ ID NO: 664543 - DNA, 19 bp, Mus musculus
  siRNA target sequence for C030018K18Rik (NM_175258.2,1076-1094).
ggctgttattcttgaagat

SEQ ID NO: 664544 - DNA, 19 bp, Mus musculus
  siRNA target sequence for C030018K18Rik (NM_175258.2,1107-1125).
gactcatggtatgtcattt

SEQ ID NO: 664545 - DNA, 19 bp, Mus musculus
  siRNA target sequence for C030018K18Rik (NM_175258.2,1109-1127).
ctcatggtatgtcatttta

SEQ ID NO: 664546 - DNA, 19 bp, Mus musculus
  siRNA target sequence for C030018K18Rik (NM_175258.2,1241-1259).
gaccaaagtcgatgattgt

SEQ ID NO: 664547 - DNA, 19 bp, Mus musculus
  siRNA target sequence for C030018K18Rik (NM_175258.2,1243-1261).
ccaaagtcgatgattgtca

SEQ ID NO: 664548 - DNA, 19 bp, Mus musculus
  siRNA target sequence for C030018K18Rik (NM_175258.2,1275-1293).
gctcaacaagactattgga

SEQ ID NO: 664549 - DNA, 19 bp, Mus musculus
  siRNA target sequence for C030018K18Rik (NM_175258.2,1291-1309).
ggagaattttaaatcatgt

SEQ ID NO: 664550 - DNA, 19 bp, Mus musculus
  siRNA target sequence for C030018K18Rik (NM_175258.2,1391-1409).
caggaaaggacacattgta

SEQ ID NO: 664551 - DNA, 19 bp, Mus musculus
  siRNA target sequence for C030018K18Rik (NM_175258.2,1393-1411).
ggaaaggacacattgtaat

SEQ ID NO: 664552 - DNA, 19 bp, Mus musculus
  siRNA target sequence for C030018K18Rik (NM_175258.2,1482-1500).
gaagatttcctcttaactt

SEQ ID NO: 664553 - DNA, 19 bp, Mus musculus
  siRNA target sequence for C030018K18Rik (NM_175258.2,1583-1601).
gacacggattgtactctta

SEQ ID NO: 664554 - DNA, 19 bp, Mus musculus
  siRNA target sequence for C030018K18Rik (NM_175258.2,1593-1611).
gtactcttatgggtaaata

SEQ ID NO: 664555 - DNA, 19 bp, Mus musculus
  siRNA target sequence for C030018K18Rik (NM_175258.2,1689-1707).
gtaaggctcaaaagaattt

SEQ ID NO: 664556 - DNA, 19 bp, Mus musculus
  siRNA target sequence for C030018K18Rik (NM_175258.2,1731-1749).
ctacccctcagcaagaaca

SEQ ID NO: 664557 - DNA, 19 bp, Mus musculus
  siRNA target sequence for Ect2 (NM_007900.1,591-609).
gtgacgttggttcatcata

SEQ ID NO: 664558 - DNA, 19 bp, Mus musculus
  siRNA target sequence for Ect2 (NM_007900.1,611-629).
gggtggagttattcgaaaa

SEQ ID NO: 664559 - DNA, 19 bp, Mus musculus
  siRNA target sequence for Ect2 (NM_007900.1,613-631).
gtggagttattcgaaaaga

SEQ ID NO: 664560 - DNA, 19 bp, Mus musculus
  siRNA target sequence for Ect2 (NM_007900.1,615-633).
ggagttattcgaaaagagt

SEQ ID NO: 664561 - DNA, 19 bp, Mus musculus
  siRNA target sequence for Ect2 (NM_007900.1,624-642).
cgaaaagagtgtaattcca

SEQ ID NO: 664562 - DNA, 19 bp, Mus musculus
  siRNA target sequence for Ect2 (NM_007900.1,651-669).
catctggtggcaaattgta

SEQ ID NO: 664563 - DNA, 19 bp, Mus musculus
  siRNA target sequence for Ect2 (NM_007900.1,667-685).
gtacacaaggcgaaaaatt

SEQ ID NO: 664564 - DNA, 19 bp, Mus musculus
  siRNA target sequence for Ect2 (NM_007900.1,698-716).
gagcctgggcactccaatt

SEQ ID NO: 664565 - DNA, 19 bp, Mus musculus
  siRNA target sequence for Ect2 (NM_007900.1,702-720).
ctgggcactccaattatga

SEQ ID NO: 664566 - DNA, 19 bp, Mus musculus
  siRNA target sequence for Ect2 (NM_007900.1,722-740).
gccagaatggatttataaa

SEQ ID NO: 664567 - DNA, 19 bp, Mus musculus
  siRNA target sequence for Ect2 (NM_007900.1,743-761).
gtgggaaagacgcaatgaa

SEQ ID NO: 664568 - DNA, 19 bp, Mus musculus
  siRNA target sequence for Ect2 (NM_007900.1,751-769).
gacgcaatgaacagtgttt

SEQ ID NO: 664569 - DNA, 19 bp, Mus musculus
  siRNA target sequence for Ect2 (NM_007900.1,753-771).
cgcaatgaacagtgtttct

SEQ ID NO: 664570 - DNA, 19 bp, Mus musculus
  siRNA target sequence for Ect2 (NM_007900.1,807-825).
gttcctccattccaagatt

SEQ ID NO: 664571 - DNA, 19 bp, Mus musculus
  siRNA target sequence for Ect2 (NM_007900.1,926-944).
gtgcactcaccttattgtt

SEQ ID NO: 664572 - DNA, 19 bp, Mus musculus
  siRNA target sequence for Ect2 (NM_007900.1,928-946).
gcactcaccttattgttga

SEQ ID NO: 664573 - DNA, 19 bp, Mus musculus
  siRNA target sequence for Ect2 (NM_007900.1,942-960).
gttgaagagaatacagtaa

SEQ ID NO: 664574 - DNA, 19 bp, Mus musculus
  siRNA target sequence for Ect2 (NM_007900.1,1064-1082).
gtatgaaaaggctaatact

SEQ ID NO: 664575 - DNA, 19 bp, Mus musculus
  siRNA target sequence for Ect2 (NM_007900.1,1310-1328).
ctgtgctaagtcttctaga

SEQ ID NO: 664576 - DNA, 19 bp, Mus musculus
  siRNA target sequence for Ect2 (NM_007900.1,1319-1337).
gtcttctagaagttctact

SEQ ID NO: 664577 - DNA, 19 bp, Mus musculus
  siRNA target sequence for Ect2 (NM_007900.1,1388-1406).
ccagactgagagcaattat

SEQ ID NO: 664578 - DNA, 19 bp, Mus musculus
  siRNA target sequence for Ect2 (NM_007900.1,1399-1417).
gcaattatgtcaatatact

SEQ ID NO: 664579 - DNA, 19 bp, Mus musculus
  siRNA target sequence for Ect2 (NM_007900.1,1416-1434).
ctggccacaatcattcaat

SEQ ID NO: 664580 - DNA, 19 bp, Mus musculus
  siRNA target sequence for Ect2 (NM_007900.1,1493-1511).
ggagatcaagactattttt

SEQ ID NO: 664581 - DNA, 19 bp, Mus musculus
  siRNA target sequence for Ect2 (NM_007900.1,1516-1534).
gcatcccagatatctttga

SEQ ID NO: 664582 - DNA, 19 bp, Mus musculus
  siRNA target sequence for Ect2 (NM_007900.1,1544-1562).
gaagatcaaggatgatctt

SEQ ID NO: 664583 - DNA, 19 bp, Mus musculus
  siRNA target sequence for Ect2 (NM_007900.1,1560-1578).
cttgaagaccttattgcta

SEQ ID NO: 664584 - DNA, 19 bp, Mus musculus
  siRNA target sequence for Ect2 (NM_007900.1,1597-1615).
gtattggtgacatctttct

SEQ ID NO: 664585 - DNA, 19 bp, Mus musculus
  siRNA target sequence for Ect2 (NM_007900.1,1642-1660).
cctaccctccgtttgtaaa

SEQ ID NO: 664586 - DNA, 19 bp, Mus musculus
  siRNA target sequence for Ect2 (NM_007900.1,1647-1665).
cctccgtttgtaaacttct

SEQ ID NO: 664587 - DNA, 19 bp, Mus musculus
  siRNA target sequence for Ect2 (NM_007900.1,1648-1666).
ctccgtttgtaaacttctt

SEQ ID NO: 664588 - DNA, 19 bp, Mus musculus
  siRNA target sequence for Ect2 (NM_007900.1,1656-1674).
gtaaacttctttgaaatga

SEQ ID NO: 664589 - DNA, 19 bp, Mus musculus
  siRNA target sequence for Ect2 (NM_007900.1,1679-1697).
ggaaatgatcattaaatgt

SEQ ID NO: 664590 - DNA, 19 bp, Mus musculus
  siRNA target sequence for Ect2 (NM_007900.1,1806-1824).
cccagtgtcgctttacttt

SEQ ID NO: 664591 - DNA, 19 bp, Mus musculus
  siRNA target sequence for Ect2 (NM_007900.1,1807-1825).
ccagtgtcgctttactttt

SEQ ID NO: 664592 - DNA, 19 bp, Mus musculus
  siRNA target sequence for Ect2 (NM_007900.1,1808-1826).
cagtgtcgctttactttta

SEQ ID NO: 664593 - DNA, 19 bp, Mus musculus
  siRNA target sequence for Ect2 (NM_007900.1,1814-1832).
cgctttacttttaaacgat

SEQ ID NO: 664594 - DNA, 19 bp, Mus musculus
  siRNA target sequence for Ect2 (NM_007900.1,1885-1903).
ctattggatcactaaaaga

SEQ ID NO: 664595 - DNA, 19 bp, Mus musculus
  siRNA target sequence for Ect2 (NM_007900.1,1890-1908).
ggatcactaaaagaagtaa

SEQ ID NO: 664596 - DNA, 19 bp, Mus musculus
  siRNA target sequence for Ect2 (NM_007900.1,1902-1920).
gaagtaatgacacatatca

SEQ ID NO: 664597 - DNA, 19 bp, Mus musculus
  siRNA target sequence for Ect2 (NM_007900.1,1941-1959).
gaagcacagaagcaaattt

SEQ ID NO: 664598 - DNA, 19 bp, Mus musculus
  siRNA target sequence for Ect2 (NM_007900.1,1988-2006).
cccagctaatctcttatct

SEQ ID NO: 664599 - DNA, 19 bp, Mus musculus
  siRNA target sequence for Ect2 (NM_007900.1,1989-2007).
ccagctaatctcttatctt

SEQ ID NO: 664600 - DNA, 19 bp, Mus musculus
  siRNA target sequence for Ect2 (NM_007900.1,2100-2118).
gactgcctcgagatagcaa

SEQ ID NO: 664601 - DNA, 19 bp, Mus musculus
  siRNA target sequence for Ect2 (NM_007900.1,2119-2137).
gaaagcggcacaaggttat

SEQ ID NO: 664602 - DNA, 19 bp, Mus musculus
  siRNA target sequence for Ect2 (NM_007900.1,2132-2150).
ggttattggcacttttaga

SEQ ID NO: 664603 - DNA, 19 bp, Mus musculus
  siRNA target sequence for Ect2 (NM_007900.1,2201-2219).
catgcctctttctcagatt

SEQ ID NO: 664604 - DNA, 19 bp, Mus musculus
  siRNA target sequence for Ect2 (NM_007900.1,2237-2255).
ccgagagacagaagattgt

SEQ ID NO: 664605 - DNA, 19 bp, Mus musculus
  siRNA target sequence for Ect2 (NM_007900.1,2243-2261).
gacagaagattgtcacaat

SEQ ID NO: 664606 - DNA, 19 bp, Mus musculus
  siRNA target sequence for Ect2 (NM_007900.1,2290-2308).
cagaacaggccaatgtact

SEQ ID NO: 664607 - DNA, 19 bp, Mus musculus
  siRNA target sequence for Ect2 (NM_007900.1,2326-2344).
cgtcagaggagcttccaaa

SEQ ID NO: 664608 - DNA, 19 bp, Mus musculus
  siRNA target sequence for Ect2 (NM_007900.1,2360-2378).
gatgctgtgccgacatgta

SEQ ID NO: 664609 - DNA, 19 bp, Mus musculus
  siRNA target sequence for Ect2 (NM_007900.1,2398-2416).
cagatgctgagaatcttat

SEQ ID NO: 664610 - DNA, 19 bp, Mus musculus
  siRNA target sequence for Ect2 (NM_007900.1,2457-2475).
gatatggatagtacattga

SEQ ID NO: 664611 - DNA, 19 bp, Mus musculus
  siRNA target sequence for Ect2 (NM_007900.1,2478-2496).
cgagcatctagagcaataa

SEQ ID NO: 664612 - DNA, 19 bp, Mus musculus
  siRNA target sequence for Ect2 (NM_007900.1,2479-2497).
gagcatctagagcaataaa

SEQ ID NO: 664613 - DNA, 19 bp, Mus musculus
  siRNA target sequence for Ect2 (NM_007900.1,2513-2531).
ggttacaagggcattctct

SEQ ID NO: 664614 - DNA, 19 bp, Mus musculus
  siRNA target sequence for Ect2 (NM_007900.1,2555-2573).
cctgcggatggctctttca

SEQ ID NO: 664615 - DNA, 19 bp, Mus musculus
  siRNA target sequence for Ect2 (NM_007900.1,2559-2577).
cggatggctctttcatcat

SEQ ID NO: 664616 - DNA, 19 bp, Mus musculus
  siRNA target sequence for Ect2 (NM_007900.1,2703-2721).
cggagaagtcatacattaa

SEQ ID NO: 664617 - DNA, 19 bp, Mus musculus
  siRNA target sequence for Ect2 (NM_007900.1,2705-2723).
gagaagtcatacattaagt

SEQ ID NO: 664618 - DNA, 19 bp, Mus musculus
  siRNA target sequence for Ect2 (NM_007900.1,2725-2743).
gatctacaactcacttgat

SEQ ID NO: 664619 - DNA, 19 bp, Mus musculus
  siRNA target sequence for Grf2 (NM_054050.1,354-372).
cactctcccaaaatcaaga

SEQ ID NO: 664620 - DNA, 19 bp, Mus musculus
  siRNA target sequence for Grf2 (NM_054050.1,489-507).
gagcagcaggcagtagaat

SEQ ID NO: 664621 - DNA, 19 bp, Mus musculus
  siRNA target sequence for Grf2 (NM_054050.1,495-513).
caggcagtagaatttatgt

SEQ ID NO: 664622 - DNA, 19 bp, Mus musculus
  siRNA target sequence for Grf2 (NM_054050.1,590-608).
cagtgccttgcgctacttt

SEQ ID NO: 664623 - DNA, 19 bp, Mus musculus
  siRNA target sequence for Grf2 (NM_054050.1,594-612).
gccttgcgctactttaaga

SEQ ID NO: 664624 - DNA, 19 bp, Mus musculus
  siRNA target sequence for Grf2 (NM_054050.1,735-753).
gccctctcctcctgttata

SEQ ID NO: 664625 - DNA, 19 bp, Mus musculus
  siRNA target sequence for Grf2 (NM_054050.1,745-763).
cctgttatagccgagtata

SEQ ID NO: 664626 - DNA, 19 bp, Mus musculus
  siRNA target sequence for Grf2 (NM_054050.1,748-766).
gttatagccgagtatacca

SEQ ID NO: 664627 - DNA, 19 bp, Mus musculus
  siRNA target sequence for Grf2 (NM_054050.1,765-783).
cagagcctcgccaacctta

SEQ ID NO: 664628 - DNA, 19 bp, Mus musculus
  siRNA target sequence for Grf2 (NM_054050.1,813-831).
ggcgtgaactcagaagata

SEQ ID NO: 664629 - DNA, 19 bp, Mus musculus
  siRNA target sequence for Grf2 (NM_054050.1,814-832).
gcgtgaactcagaagataa

SEQ ID NO: 664630 - DNA, 19 bp, Mus musculus
  siRNA target sequence for Grf2 (NM_054050.1,847-865).
ctgtgaagggcgttatcaa

SEQ ID NO: 664631 - DNA, 19 bp, Mus musculus
  siRNA target sequence for Grf2 (NM_054050.1,890-908).
gctagtgaggctaaccatt

SEQ ID NO: 664632 - DNA, 19 bp, Mus musculus
  siRNA target sequence for Grf2 (NM_054050.1,1088-1106).
ccccaagccccctttacct

SEQ ID NO: 664633 - DNA, 19 bp, Mus musculus
  siRNA target sequence for Grf2 (NM_054050.1,1107-1125).
ggcatccgggtggttgata

SEQ ID NO: 664634 - DNA, 19 bp, Mus musculus
  siRNA target sequence for Grf2 (NM_054050.1,1108-1126).
gcatccgggtggttgataa

SEQ ID NO: 664635 - DNA, 19 bp, Mus musculus
  siRNA target sequence for Grf2 (NM_054050.1,1112-1130).
ccgggtggttgataacagt

SEQ ID NO: 664636 - DNA, 19 bp, Mus musculus
  siRNA target sequence for Grf2 (NM_054050.1,1127-1145).
cagtccaccagcattacca

SEQ ID NO: 664637 - DNA, 19 bp, Mus musculus
  siRNA target sequence for Grf2 (NM_054050.1,1137-1155).
gcattaccacccaagaaaa

SEQ ID NO: 664638 - DNA, 19 bp, Mus musculus
  siRNA target sequence for Grf2 (NM_054050.1,1241-1259).
caataggcaggactttgat

SEQ ID NO: 664639 - DNA, 19 bp, Mus musculus
  siRNA target sequence for Grf2 (NM_054050.1,1246-1264).
ggcaggactttgatgttga

SEQ ID NO: 664640 - DNA, 19 bp, Mus musculus
  siRNA target sequence for Grf2 (NM_054050.1,1247-1265).
gcaggactttgatgttgaa

SEQ ID NO: 664641 - DNA, 19 bp, Mus musculus
  siRNA target sequence for Grf2 (NM_054050.1,1250-1268).
ggactttgatgttgaatgt

SEQ ID NO: 664642 - DNA, 19 bp, Mus musculus
  siRNA target sequence for Grf2 (NM_054050.1,1439-1457).
ctacgaccccgactatgaa

SEQ ID NO: 664643 - DNA, 19 bp, Mus musculus
  siRNA target sequence for Grf2 (NM_054050.1,1706-1724).
gcgacacccctcacagtat

SEQ ID NO: 664644 - DNA, 19 bp, Mus musculus
  siRNA target sequence for Grf2 (NM_054050.1,1708-1726).
gacacccctcacagtatga

SEQ ID NO: 664645 - DNA, 19 bp, Mus musculus
  siRNA target sequence for Grf2 (NM_054050.1,1710-1728).
cacccctcacagtatgaca

SEQ ID NO: 664646 - DNA, 19 bp, Mus musculus
  siRNA target sequence for Grf2 (NM_054050.1,1836-1854).
gagtttgtgggtgatttca

SEQ ID NO: 664647 - DNA, 19 bp, Mus musculus
  siRNA target sequence for Grf2 (NM_054050.1,2051-2069).
gtccttctgcggtagtgat

SEQ ID NO: 664648 - DNA, 19 bp, Mus musculus
  siRNA target sequence for Grf2 (NM_054050.1,2204-2222).
ggaaaggtccccaaagtca

SEQ ID NO: 664649 - DNA, 19 bp, Mus musculus
  siRNA target sequence for Grf2 (NM_054050.1,2272-2290).
ccctcattgaccacaatga

SEQ ID NO: 664650 - DNA, 19 bp, Mus musculus
  siRNA target sequence for Grf2 (NM_054050.1,2350-2368).
gttcaggagacatcttact

SEQ ID NO: 664651 - DNA, 19 bp, Mus musculus
  siRNA target sequence for Grf2 (NM_054050.1,2763-2781).
ccaggaaccttgcatgatt

SEQ ID NO: 664652 - DNA, 19 bp, Mus musculus
  siRNA target sequence for Grf2 (NM_054050.1,2764-2782).
caggaaccttgcatgattt

SEQ ID NO: 664653 - DNA, 19 bp, Mus musculus
  siRNA target sequence for Grf2 (NM_054050.1,2817-2835).
ctggatgccgagcttttct

SEQ ID NO: 664654 - DNA, 19 bp, Mus musculus
  siRNA target sequence for Grf2 (NM_054050.1,2941-2959).
gggtgcggtccatcatcat

SEQ ID NO: 664655 - DNA, 19 bp, Mus musculus
  siRNA target sequence for Grf2 (NM_054050.1,3130-3148).
ctgagtactgcacattgat

SEQ ID NO: 664656 - DNA, 19 bp, Mus musculus
  siRNA target sequence for Grf2 (NM_054050.1,3203-3221).
cccatgtatcccataccta

SEQ ID NO: 664657 - DNA, 19 bp, Mus musculus
  siRNA target sequence for Grf2 (NM_054050.1,3212-3230).
cccatacctaggtctgatt

SEQ ID NO: 664658 - DNA, 19 bp, Mus musculus
  siRNA target sequence for Grf2 (NM_054050.1,3257-3275).
gggaaacccagattatatt

SEQ ID NO: 664659 - DNA, 19 bp, Mus musculus
  siRNA target sequence for Grf2 (NM_054050.1,3276-3294).
gacgggaaagtaaacttct

SEQ ID NO: 664660 - DNA, 19 bp, Mus musculus
  siRNA target sequence for Grf2 (NM_054050.1,3300-3318).
cggtggcaacagttcaaca

SEQ ID NO: 664661 - DNA, 19 bp, Mus musculus
  siRNA target sequence for Grf2 (NM_054050.1,3304-3322).
ggcaacagttcaacatatt

SEQ ID NO: 664662 - DNA, 19 bp, Mus musculus
  siRNA target sequence for Grf2 (NM_054050.1,3364-3382).
ggagaaacgacgacatcat

SEQ ID NO: 664663 - DNA, 19 bp, Mus musculus
  siRNA target sequence for Grf2 (NM_054050.1,3367-3385).
gaaacgacgacatcataaa

SEQ ID NO: 664664 - DNA, 19 bp, Mus musculus
  siRNA target sequence for Grf2 (NM_054050.1,3446-3464).
gatcaagcctaggaacata

SEQ ID NO: 664665 - DNA, 19 bp, Mus musculus
  siRNA target sequence for Grf2 (NM_054050.1,3449-3467).
caagcctaggaacataaca

SEQ ID NO: 664666 - DNA, 19 bp, Mus musculus
  siRNA target sequence for Grf2 (NM_054050.1,3461-3479).
cataacaaggcggaaaaca

SEQ ID NO: 664667 - DNA, 19 bp, Mus musculus
  siRNA target sequence for Mcf2 (NM_133197.1,135-153).
cccccgagaggcaagatga

SEQ ID NO: 664668 - DNA, 19 bp, Mus musculus
  siRNA target sequence for Mcf2 (NM_133197.1,235-253).
ctttcacggacattggatt

SEQ ID NO: 664669 - DNA, 19 bp, Mus musculus
  siRNA target sequence for Mcf2 (NM_133197.1,241-259).
cggacattggatttcgatt

SEQ ID NO: 664670 - DNA, 19 bp, Mus musculus
  siRNA target sequence for Mcf2 (NM_133197.1,243-261).
gacattggatttcgattta

SEQ ID NO: 664671 - DNA, 19 bp, Mus musculus
  siRNA target sequence for Mcf2 (NM_133197.1,262-280).
gccaggaggattttatgct

SEQ ID NO: 664672 - DNA, 19 bp, Mus musculus
  siRNA target sequence for Mcf2 (NM_133197.1,279-297).
ctgaaattaccagttgtta

SEQ ID NO: 664673 - DNA, 19 bp, Mus musculus
  siRNA target sequence for Mcf2 (NM_133197.1,294-312).
gttatgctgagctcagtta

SEQ ID NO: 664674 - DNA, 19 bp, Mus musculus
  siRNA target sequence for Mcf2 (NM_133197.1,372-390).
cagtactgccacagtgaat

SEQ ID NO: 664675 - DNA, 19 bp, Mus musculus
  siRNA target sequence for Mcf2 (NM_133197.1,488-506).
gctaccacaggatatcctt

SEQ ID NO: 664676 - DNA, 19 bp, Mus musculus
  siRNA target sequence for Mcf2 (NM_133197.1,489-507).
ctaccacaggatatccttt

SEQ ID NO: 664677 - DNA, 19 bp, Mus musculus
  siRNA target sequence for Mcf2 (NM_133197.1,526-544).
caggtcgagccgaaaggta

SEQ ID NO: 664678 - DNA, 19 bp, Mus musculus
  siRNA target sequence for Mcf2 (NM_133197.1,551-569).
gttgaagaatgacttaact

SEQ ID NO: 664679 - DNA, 19 bp, Mus musculus
  siRNA target sequence for Mcf2 (NM_133197.1,563-581).
cttaactgctgtaaccaaa

SEQ ID NO: 664680 - DNA, 19 bp, Mus musculus
  siRNA target sequence for Mcf2 (NM_133197.1,648-666).
gaatgtactcagcacataa

SEQ ID NO: 664681 - DNA, 19 bp, Mus musculus
  siRNA target sequence for Mcf2 (NM_133197.1,669-687).
ggcgactggcaaactatta

SEQ ID NO: 664682 - DNA, 19 bp, Mus musculus
  siRNA target sequence for Mcf2 (NM_133197.1,670-688).
gcgactggcaaactattaa

SEQ ID NO: 664683 - DNA, 19 bp, Mus musculus
  siRNA target sequence for Mcf2 (NM_133197.1,671-689).
cgactggcaaactattaaa

SEQ ID NO: 664684 - DNA, 19 bp, Mus musculus
  siRNA target sequence for Mcf2 (NM_133197.1,672-690).
gactggcaaactattaaaa

SEQ ID NO: 664685 - DNA, 19 bp, Mus musculus
  siRNA target sequence for Mcf2 (NM_133197.1,696-714).
ctggctcaggtgcatgata

SEQ ID NO: 664686 - DNA, 19 bp, Mus musculus
  siRNA target sequence for Mcf2 (NM_133197.1,702-720).
caggtgcatgatatggaaa

SEQ ID NO: 664687 - DNA, 19 bp, Mus musculus
  siRNA target sequence for Mcf2 (NM_133197.1,773-791).
gcaactgtggaagtttgaa

SEQ ID NO: 664688 - DNA, 19 bp, Mus musculus
  siRNA target sequence for Mcf2 (NM_133197.1,806-824).
ggctgtgactcaagttgaa

SEQ ID NO: 664689 - DNA, 19 bp, Mus musculus
  siRNA target sequence for Mcf2 (NM_133197.1,807-825).
gctgtgactcaagttgaat

SEQ ID NO: 664690 - DNA, 19 bp, Mus musculus
  siRNA target sequence for Mcf2 (NM_133197.1,865-883).
ggaacttagctcaagtaaa

SEQ ID NO: 664691 - DNA, 19 bp, Mus musculus
  siRNA target sequence for Mcf2 (NM_133197.1,889-907).
gacttaaaaaactagagat

SEQ ID NO: 664692 - DNA, 19 bp, Mus musculus
  siRNA target sequence for Mcf2 (NM_133197.1,900-918).
ctagagatcttagatgata

SEQ ID NO: 664693 - DNA, 19 bp, Mus musculus
  siRNA target sequence for Mcf2 (NM_133197.1,905-923).
gatcttagatgataaatct

SEQ ID NO: 664694 - DNA, 19 bp, Mus musculus
  siRNA target sequence for Mcf2 (NM_133197.1,965-983).
ccacaagctggcatcgaat

SEQ ID NO: 664695 - DNA, 19 bp, Mus musculus
  siRNA target sequence for Mcf2 (NM_133197.1,984-1002).
caccactatgcacttgatt

SEQ ID NO: 664696 - DNA, 19 bp, Mus musculus
  siRNA target sequence for Mcf2 (NM_133197.1,986-1004).
ccactatgcacttgattta

SEQ ID NO: 664697 - DNA, 19 bp, Mus musculus
  siRNA target sequence for Mcf2 (NM_133197.1,989-1007).
ctatgcacttgatttaatt

SEQ ID NO: 664698 - DNA, 19 bp, Mus musculus
  siRNA target sequence for Mcf2 (NM_133197.1,1026-1044).
ctacgctacctttctgata

SEQ ID NO: 664699 - DNA, 19 bp, Mus musculus
  siRNA target sequence for Mcf2 (NM_133197.1,1041-1059).
gatattttagttaatgaga

SEQ ID NO: 664700 - DNA, 19 bp, Mus musculus
  siRNA target sequence for Mcf2 (NM_133197.1,1094-1112).
caaagtgcatagactctta

SEQ ID NO: 664701 - DNA, 19 bp, Mus musculus
  siRNA target sequence for Mcf2 (NM_133197.1,1155-1173).
gctagccaaggaatggata

SEQ ID NO: 664702 - DNA, 19 bp, Mus musculus
  siRNA target sequence for Mcf2 (NM_133197.1,1160-1178).
ccaaggaatggataagttt

SEQ ID NO: 664703 - DNA, 19 bp, Mus musculus
  siRNA target sequence for Mcf2 (NM_133197.1,1169-1187).
ggataagtttcagactaaa

SEQ ID NO: 664704 - DNA, 19 bp, Mus musculus
  siRNA target sequence for Mcf2 (NM_133197.1,1206-1224).
cttcaggatgtggacaatt

SEQ ID NO: 664705 - DNA, 19 bp, Mus musculus
  siRNA target sequence for Mcf2 (NM_133197.1,1215-1233).
gtggacaatttccttcaaa

SEQ ID NO: 664706 - DNA, 19 bp, Mus musculus
  siRNA target sequence for Mcf2 (NM_133197.1,1235-1253).
ggccatgcctttcatcaat

SEQ ID NO: 664707 - DNA, 19 bp, Mus musculus
  siRNA target sequence for Mcf2 (NM_133197.1,1236-1254).
gccatgcctttcatcaatt

SEQ ID NO: 664708 - DNA, 19 bp, Mus musculus
  siRNA target sequence for Mcf2 (NM_133197.1,1237-1255).
ccatgcctttcatcaatta

SEQ ID NO: 664709 - DNA, 19 bp, Mus musculus
  siRNA target sequence for Mcf2 (NM_133197.1,1241-1259).
gcctttcatcaattatgat

SEQ ID NO: 664710 - DNA, 19 bp, Mus musculus
  siRNA target sequence for Mcf2 (NM_133197.1,1242-1260).
cctttcatcaattatgata

SEQ ID NO: 664711 - DNA, 19 bp, Mus musculus
  siRNA target sequence for Mcf2 (NM_133197.1,1243-1261).
ctttcatcaattatgatat

SEQ ID NO: 664712 - DNA, 19 bp, Mus musculus
  siRNA target sequence for Mcf2 (NM_133197.1,1247-1265).
catcaattatgatatcgaa

SEQ ID NO: 664713 - DNA, 19 bp, Mus musculus
  siRNA target sequence for Mcf2 (NM_133197.1,1271-1289).
gcaatatgaatttgatgta

SEQ ID NO: 664714 - DNA, 19 bp, Mus musculus
  siRNA target sequence for Mcf2 (NM_133197.1,1310-1328).
ggctcaaatgcagaatata

SEQ ID NO: 664715 - DNA, 19 bp, Mus musculus
  siRNA target sequence for Mcf2 (NM_133197.1,1424-1442).
ggttcctgcatctgaaaat

SEQ ID NO: 664716 - DNA, 19 bp, Mus musculus
  siRNA target sequence for Mcf2 (NM_133197.1,1443-1461).
gtgatgcggtccagaatga

SEQ ID NO: 664717 - DNA, 19 bp, Mus musculus
  siRNA target sequence for Mcf2 (NM_133197.1,1445-1463).
gatgcggtccagaatgata

SEQ ID NO: 664718 - DNA, 19 bp, Mus musculus
  siRNA target sequence for Mcf2 (NM_133197.1,1471-1489).
caccgaaacatgtgaaaaa

SEQ ID NO: 664719 - DNA, 19 bp, Mus musculus
  siRNA target sequence for Mcf2 (NM_133197.1,1473-1491).
ccgaaacatgtgaaaaagt

SEQ ID NO: 664720 - DNA, 19 bp, Mus musculus
  siRNA target sequence for Mcf2 (NM_133197.1,1508-1526).
cgctcagagcaatgtgaaa

SEQ ID NO: 664721 - DNA, 19 bp, Mus musculus
  siRNA target sequence for Mcf2 (NM_133197.1,1561-1579).
ctgatcagtctcccaaatt

SEQ ID NO: 664722 - DNA, 19 bp, Mus musculus
  siRNA target sequence for Mcf2 (NM_133197.1,1572-1590).
cccaaattggacaatagct

SEQ ID NO: 664723 - DNA, 19 bp, Mus musculus
  siRNA target sequence for Mcf2 (NM_133197.1,1573-1591).
ccaaattggacaatagctt

SEQ ID NO: 664724 - DNA, 19 bp, Mus musculus
  siRNA target sequence for Mcf2 (NM_133197.1,1583-1601).
caatagcttggatatttta

SEQ ID NO: 664725 - DNA, 19 bp, Mus musculus
  siRNA target sequence for Mcf2 (NM_133197.1,1650-1668).
cgagagctgtttactgttt

SEQ ID NO: 664726 - DNA, 19 bp, Mus musculus
  siRNA target sequence for Mcf2 (NM_133197.1,1902-1920).
cccaggtcagagttaattt

SEQ ID NO: 664727 - DNA, 19 bp, Mus musculus
  siRNA target sequence for Mcf2 (NM_133197.1,1933-1951).
ctgaatgtgcctttttcca

SEQ ID NO: 664728 - DNA, 19 bp, Mus musculus
  siRNA target sequence for Mcf2 (NM_133197.1,1953-1971).
gaatgtcaacgaaaattga

SEQ ID NO: 664729 - DNA, 19 bp, Mus musculus
  siRNA target sequence for Mcf2 (NM_133197.1,1957-1975).
gtcaacgaaaattgaaaca

SEQ ID NO: 664730 - DNA, 19 bp, Mus musculus
  siRNA target sequence for Mcf2 (NM_133197.1,2007-2025).
cctgttcaacgaatcacta

SEQ ID NO: 664731 - DNA, 19 bp, Mus musculus
  siRNA target sequence for Mcf2 (NM_133197.1,2008-2026).
ctgttcaacgaatcactaa

SEQ ID NO: 664732 - DNA, 19 bp, Mus musculus
  siRNA target sequence for Mcf2 (NM_133197.1,2010-2028).
gttcaacgaatcactaagt

SEQ ID NO: 664733 - DNA, 19 bp, Mus musculus
  siRNA target sequence for Mcf2 (NM_133197.1,2017-2035).
gaatcactaagtatcagtt

SEQ ID NO: 664734 - DNA, 19 bp, Mus musculus
  siRNA target sequence for Mcf2 (NM_133197.1,2046-2064).
gagcttttaaagtatagca

SEQ ID NO: 664735 - DNA, 19 bp, Mus musculus
  siRNA target sequence for Mcf2 (NM_133197.1,2077-2095).
gaactactaaattaaagga

SEQ ID NO: 664736 - DNA, 19 bp, Mus musculus
  siRNA target sequence for Mcf2 (NM_133197.1,2144-2162).
gcatcagactgccatcaat

SEQ ID NO: 664737 - DNA, 19 bp, Mus musculus
  siRNA target sequence for Mcf2 (NM_133197.1,2189-2207).
gggcaagatggttcttcaa

SEQ ID NO: 664738 - DNA, 19 bp, Mus musculus
  siRNA target sequence for Mcf2 (NM_133197.1,2205-2223).
caaggttccttcaatgttt

SEQ ID NO: 664739 - DNA, 19 bp, Mus musculus
  siRNA target sequence for Mcf2 (NM_133197.1,2234-2252).
ccggaaaggtgctacaaaa

SEQ ID NO: 664740 - DNA, 19 bp, Mus musculus
  siRNA target sequence for Mcf2 (NM_133197.1,2235-2253).
cggaaaggtgctacaaaaa

SEQ ID NO: 664741 - DNA, 19 bp, Mus musculus
  siRNA target sequence for Mcf2 (NM_133197.1,2236-2254).
ggaaaggtgctacaaaaat

SEQ ID NO: 664742 - DNA, 19 bp, Mus musculus
  siRNA target sequence for Mcf2 (NM_133197.1,2278-2296).
ccatgcagagacatctttt

SEQ ID NO: 664743 - DNA, 19 bp, Mus musculus
  siRNA target sequence for Mcf2 (NM_133197.1,2285-2303).
gagacatcttttcttatat

SEQ ID NO: 664744 - DNA, 19 bp, Mus musculus
  siRNA target sequence for Mcf2 (NM_133197.1,2310-2328).
gctgttatgttttgtaaga

SEQ ID NO: 664745 - DNA, 19 bp, Mus musculus
  siRNA target sequence for Mcf2 (NM_133197.1,2355-2373).
gatagatacccatcataca

SEQ ID NO: 664746 - DNA, 19 bp, Mus musculus
  siRNA target sequence for Mcf2 (NM_133197.1,2359-2377).
gatacccatcatacagttt

SEQ ID NO: 664747 - DNA, 19 bp, Mus musculus
  siRNA target sequence for Mcf2 (NM_133197.1,2430-2448).
gataaccgcaaatttgaaa

SEQ ID NO: 664748 - DNA, 19 bp, Mus musculus
  siRNA target sequence for Mcf2 (NM_133197.1,2510-2528).
gttatggctaaaagaaata

SEQ ID NO: 664749 - DNA, 19 bp, Mus musculus
  siRNA target sequence for Mcf2 (NM_133197.1,2659-2677).
gtgaggaaactcttttcaa

SEQ ID NO: 664750 - DNA, 19 bp, Mus musculus
  siRNA target sequence for Mcf2 (NM_133197.1,2811-2829).
gcaattgctgaacattcat

SEQ ID NO: 664751 - DNA, 19 bp, Mus musculus
  siRNA target sequence for Mrgef (NM_175930.2,79-97).
cccgcttgcgggtctttga

SEQ ID NO: 664752 - DNA, 19 bp, Mus musculus
  siRNA target sequence for Mrgef (NM_175930.2,157-175).
ccttcgatgtgccttattt

SEQ ID NO: 664753 - DNA, 19 bp, Mus musculus
  siRNA target sequence for Mrgef (NM_175930.2,161-179).
cgatgtgccttatttcaaa

SEQ ID NO: 664754 - DNA, 19 bp, Mus musculus
  siRNA target sequence for Mrgef (NM_175930.2,162-180).
gatgtgccttatttcaaat

SEQ ID NO: 664755 - DNA, 19 bp, Mus musculus
  siRNA target sequence for Mrgef (NM_175930.2,256-274).
ctctgctctctgacagata

SEQ ID NO: 664756 - DNA, 19 bp, Mus musculus
  siRNA target sequence for Mrgef (NM_175930.2,286-304).
ctggtaccccggagaagat

SEQ ID NO: 664757 - DNA, 19 bp, Mus musculus
  siRNA target sequence for Mrgef (NM_175930.2,305-323).
cttggagcaccttttgaat

SEQ ID NO: 664758 - DNA, 19 bp, Mus musculus
  siRNA target sequence for Mrgef (NM_175930.2,309-327).
gagcaccttttgaatgact

SEQ ID NO: 664759 - DNA, 19 bp, Mus musculus
  siRNA target sequence for Mrgef (NM_175930.2,337-355).
cagaggttcagcacaaaga

SEQ ID NO: 664760 - DNA, 19 bp, Mus musculus
  siRNA target sequence for Mrgef (NM_175930.2,384-402).
ctcacgtacaccgtattca

SEQ ID NO: 664761 - DNA, 19 bp, Mus musculus
  siRNA target sequence for Mrgef (NM_175930.2,421-439).
gccaggcgctgctaagaca

SEQ ID NO: 664762 - DNA, 19 bp, Mus musculus
  siRNA target sequence for Mrgef (NM_175930.2,425-443).
ggcgctgctaagacactat

SEQ ID NO: 664763 - DNA, 19 bp, Mus musculus
  siRNA target sequence for Mrgef (NM_175930.2,426-444).
gcgctgctaagacactatt

SEQ ID NO: 664764 - DNA, 19 bp, Mus musculus
  siRNA target sequence for Mrgef (NM_175930.2,438-456).
cactattctgccaagaagt

SEQ ID NO: 664765 - DNA, 19 bp, Mus musculus
  siRNA target sequence for Mrgef (NM_175930.2,440-458).
ctattctgccaagaagtat

SEQ ID NO: 664766 - DNA, 19 bp, Mus musculus
  siRNA target sequence for Mrgef (NM_175930.2,494-512).
gaagcgcaaggtcttacat

SEQ ID NO: 664767 - DNA, 19 bp, Mus musculus
  siRNA target sequence for Mrgef (NM_175930.2,595-613).
ggaacgtgctggatgatgt

SEQ ID NO: 664768 - DNA, 19 bp, Mus musculus
  siRNA target sequence for Mrgef (NM_175930.2,674-692).
ccgccgtcacactgttgat

SEQ ID NO: 664769 - DNA, 19 bp, Mus musculus
  siRNA target sequence for Mrgef (NM_175930.2,676-694).
gccgtcacactgttgatga

SEQ ID NO: 664770 - DNA, 19 bp, Mus musculus
  siRNA target sequence for Mrgef (NM_175930.2,678-696).
cgtcacactgttgatgaat

SEQ ID NO: 664771 - DNA, 19 bp, Mus musculus
  siRNA target sequence for Mrgef (NM_175930.2,679-697).
gtcacactgttgatgaata

SEQ ID NO: 664772 - DNA, 19 bp, Mus musculus
  siRNA target sequence for Mrgef (NM_175930.2,681-699).
cacactgttgatgaatact

SEQ ID NO: 664773 - DNA, 19 bp, Mus musculus
  siRNA target sequence for Mrgef (NM_175930.2,915-933).
gctctggtagccattacat

SEQ ID NO: 664774 - DNA, 19 bp, Mus musculus
  siRNA target sequence for Mrgef (NM_175930.2,920-938).
ggtagccattacattctct

SEQ ID NO: 664775 - DNA, 19 bp, Mus musculus
  siRNA target sequence for Mrgef (NM_175930.2,994-1012).
catctggtcggatatatgt

SEQ ID NO: 664776 - DNA, 19 bp, Mus musculus
  siRNA target sequence for Mrgef (NM_175930.2,997-1015).
ctggtcggatatatgtcta

SEQ ID NO: 664777 - DNA, 19 bp, Mus musculus
  siRNA target sequence for Mrgef (NM_175930.2,1113-1131).
gctctggaattaatgagtt

SEQ ID NO: 664778 - DNA, 19 bp, Mus musculus
  siRNA target sequence for Mrgef (NM_175930.2,1134-1152).
gattggagtctgttcaatt

SEQ ID NO: 664779 - DNA, 19 bp, Mus musculus
  siRNA target sequence for Mrgef (NM_175930.2,1138-1156).
ggagtctgttcaattcaat

SEQ ID NO: 664780 - DNA, 19 bp, Mus musculus
  siRNA target sequence for Mrgef (NM_175930.2,1167-1185).
gagctgatctacttcacat

SEQ ID NO: 664781 - DNA, 19 bp, Mus musculus
  siRNA target sequence for Mrgef (NM_175930.2,1194-1212).
caggggaacggagagaata

SEQ ID NO: 664782 - DNA, 19 bp, Mus musculus
  siRNA target sequence for Mrgef (NM_175930.2,1196-1214).
ggggaacggagagaatact

SEQ ID NO: 664783 - DNA, 19 bp, Mus musculus
  siRNA target sequence for Mrgef (NM_175930.2,1259-1277).
ctgggtagccacagagatt

SEQ ID NO: 664784 - DNA, 19 bp, Mus musculus
  siRNA target sequence for Mrgef (NM_175930.2,1302-1320).
cgcgtgcagctggtgaaaa

SEQ ID NO: 664785 - DNA, 19 bp, Mus musculus
  siRNA target sequence for Mrgef (NM_175930.2,1304-1322).
cgtgcagctggtgaaaaaa

SEQ ID NO: 664786 - DNA, 19 bp, Mus musculus
  siRNA target sequence for Mrgef (NM_175930.2,1305-1323).
gtgcagctggtgaaaaaat

SEQ ID NO: 664787 - DNA, 19 bp, Mus musculus
  siRNA target sequence for Mrgef (NM_175930.2,1353-1371).
caacagaacctaaactctt

SEQ ID NO: 664788 - DNA, 19 bp, Mus musculus
  siRNA target sequence for Mrgef (NM_175930.2,1405-1423).
ctgtcagccggctatcaca

SEQ ID NO: 664789 - DNA, 19 bp, Mus musculus
  siRNA target sequence for Mrgef (NM_175930.2,1420-1438).
cacagacctgggagaaaat

SEQ ID NO: 664790 - DNA, 19 bp, Mus musculus
  siRNA target sequence for Mrgef (NM_175930.2,1443-1461).
gggaagtttaagaagcttt

SEQ ID NO: 664791 - DNA, 19 bp, Mus musculus
  siRNA target sequence for Mrgef (NM_175930.2,1444-1462).
ggaagtttaagaagctttt

SEQ ID NO: 664792 - DNA, 19 bp, Mus musculus
  siRNA target sequence for Mrgef (NM_175930.2,1483-1501).
cggatccttccctaaacca

SEQ ID NO: 664793 - DNA, 19 bp, Mus musculus
  siRNA target sequence for Mrgef (NM_175930.2,1537-1555).
caccaaaaatccctttcat

SEQ ID NO: 664794 - DNA, 19 bp, Mus musculus
  siRNA target sequence for Mrgef (NM_175930.2,1553-1571).
catgcccttactgcttaaa

SEQ ID NO: 664795 - DNA, 19 bp, Mus musculus
  siRNA target sequence for Mrgef (NM_175930.2,1556-1574).
gcccttactgcttaaagat

SEQ ID NO: 664796 - DNA, 19 bp, Mus musculus
  siRNA target sequence for Mrgef (NM_175930.2,1565-1583).
gcttaaagatgtaacgttt

SEQ ID NO: 664797 - DNA, 19 bp, Mus musculus
  siRNA target sequence for Mrgef (NM_175930.2,1566-1584).
cttaaagatgtaacgttta

SEQ ID NO: 664798 - DNA, 19 bp, Mus musculus
  siRNA target sequence for Mrgef (NM_175930.2,1610-1628).
ggataatctcgtcaatttt

SEQ ID NO: 664799 - DNA, 19 bp, Mus musculus
  siRNA target sequence for Pcp2 (NM_008790.1,230-248).
gaccagcgtgtaacagtta

SEQ ID NO: 664800 - DNA, 19 bp, Mus musculus
  siRNA target sequence for Pcp2 (NM_008790.1,233-251).
cagcgtgtaacagttaatt

SEQ ID NO: 664801 - DNA, 19 bp, Mus musculus
  siRNA target sequence for Rasgrf1 (NM_011245.1,426-444).
gctcgagggaagtatctgt

SEQ ID NO: 664802 - DNA, 19 bp, Mus musculus
  siRNA target sequence for Rasgrf1 (NM_011245.1,427-445).
ctcgagggaagtatctgta

SEQ ID NO: 664803 - DNA, 19 bp, Mus musculus
  siRNA target sequence for Rasgrf1 (NM_011245.1,429-447).
cgagggaagtatctgtaaa

SEQ ID NO: 664804 - DNA, 19 bp, Mus musculus
  siRNA target sequence for Rasgrf1 (NM_011245.1,601-619).
gctcgcgccagctacaaga

SEQ ID NO: 664805 - DNA, 19 bp, Mus musculus
  siRNA target sequence for Rasgrf1 (NM_011245.1,602-620).
ctcgcgccagctacaagat

SEQ ID NO: 664806 - DNA, 19 bp, Mus musculus
  siRNA target sequence for Rasgrf1 (NM_011245.1,605-623).
gcgccagctacaagatact

SEQ ID NO: 664807 - DNA, 19 bp, Mus musculus
  siRNA target sequence for Rasgrf1 (NM_011245.1,748-766).
ctgaagacggaggtaacta

SEQ ID NO: 664808 - DNA, 19 bp, Mus musculus
  siRNA target sequence for Rasgrf1 (NM_011245.1,755-773).
cggaggtaactattacaaa

SEQ ID NO: 664809 - DNA, 19 bp, Mus musculus
  siRNA target sequence for Rasgrf1 (NM_011245.1,764-782).
ctattacaaacctgatcaa

SEQ ID NO: 664810 - DNA, 19 bp, Mus musculus
  siRNA target sequence for Rasgrf1 (NM_011245.1,783-801).
ggacaatgatcgtatccaa

SEQ ID NO: 664811 - DNA, 19 bp, Mus musculus
  siRNA target sequence for Rasgrf1 (NM_011245.1,784-802).
gacaatgatcgtatccaat

SEQ ID NO: 664812 - DNA, 19 bp, Mus musculus
  siRNA target sequence for Rasgrf1 (NM_011245.1,1087-1105).
gacgacgtcagcagtatct

SEQ ID NO: 664813 - DNA, 19 bp, Mus musculus
  siRNA target sequence for Rasgrf1 (NM_011245.1,1089-1107).
cgacgtcagcagtatcttt

SEQ ID NO: 664814 - DNA, 19 bp, Mus musculus
  siRNA target sequence for Rasgrf1 (NM_011245.1,1192-1210).
ctggcggacctgttcgata

SEQ ID NO: 664815 - DNA, 19 bp, Mus musculus
  siRNA target sequence for Rasgrf1 (NM_011245.1,1291-1309).
caaaaccgggactttgaca

SEQ ID NO: 664816 - DNA, 19 bp, Mus musculus
  siRNA target sequence for Rasgrf1 (NM_011245.1,1630-1648).
cagatgtccttgtctgaaa

SEQ ID NO: 664817 - DNA, 19 bp, Mus musculus
  siRNA target sequence for Rasgrf1 (NM_011245.1,1702-1720).
gagcgccagtgtttcctat

SEQ ID NO: 664818 - DNA, 19 bp, Mus musculus
  siRNA target sequence for Rasgrf1 (NM_011245.1,1958-1976).
catggaccagtgacatcat

SEQ ID NO: 664819 - DNA, 19 bp, Mus musculus
  siRNA target sequence for Rasgrf1 (NM_011245.1,1997-2015).
gctgcaatgggctcatgat

SEQ ID NO: 664820 - DNA, 19 bp, Mus musculus
  siRNA target sequence for Rasgrf1 (NM_011245.1,2001-2019).
caatgggctcatgatgaat

SEQ ID NO: 664821 - DNA, 19 bp, Mus musculus
  siRNA target sequence for Rasgrf1 (NM_011245.1,2045-2063).
ccgtgcctcagatgatcaa

SEQ ID NO: 664822 - DNA, 19 bp, Mus musculus
  siRNA target sequence for Rasgrf1 (NM_011245.1,2061-2079).
caagtctgacgcttcctta

SEQ ID NO: 664823 - DNA, 19 bp, Mus musculus
  siRNA target sequence for Rasgrf1 (NM_011245.1,2070-2088).
cgcttccttatattgtgat

SEQ ID NO: 664824 - DNA, 19 bp, Mus musculus
  siRNA target sequence for Rasgrf1 (NM_011245.1,2075-2093).
ccttatattgtgatgatgt

SEQ ID NO: 664825 - DNA, 19 bp, Mus musculus
  siRNA target sequence for Rasgrf1 (NM_011245.1,2095-2113).
gacattcgcttcagcaaaa

SEQ ID NO: 664826 - DNA, 19 bp, Mus musculus
  siRNA target sequence for Rasgrf1 (NM_011245.1,2123-2141).
cttgcaaagtgcttcagat

SEQ ID NO: 664827 - DNA, 19 bp, Mus musculus
  siRNA target sequence for Rasgrf1 (NM_011245.1,2188-2206).
cgcttcctgagcattgact

SEQ ID NO: 664828 - DNA, 19 bp, Mus musculus
  siRNA target sequence for Rasgrf1 (NM_011245.1,2260-2278).
ctggacaagctgatcaata

SEQ ID NO: 664829 - DNA, 19 bp, Mus musculus
  siRNA target sequence for Rasgrf1 (NM_011245.1,2383-2401).
cgcgccagccgcaagttct

SEQ ID NO: 664830 - DNA, 19 bp, Mus musculus
  siRNA target sequence for Rasgrf1 (NM_011245.1,2513-2531).
ggtgcagctccgatagcta

SEQ ID NO: 664831 - DNA, 19 bp, Mus musculus
  siRNA target sequence for Rasgrf1 (NM_011245.1,2523-2541).
cgatagctacgccaacata

SEQ ID NO: 664832 - DNA, 19 bp, Mus musculus
  siRNA target sequence for Rasgrf1 (NM_011245.1,2538-2556).
catacactcacccatatct

SEQ ID NO: 664833 - DNA, 19 bp, Mus musculus
  siRNA target sequence for Rasgrf1 (NM_011245.1,2750-2768).
cagaagtgtcaccagttaa

SEQ ID NO: 664834 - DNA, 19 bp, Mus musculus
  siRNA target sequence for Rasgrf1 (NM_011245.1,2752-2770).
gaagtgtcaccagttaaat

SEQ ID NO: 664835 - DNA, 19 bp, Mus musculus
  siRNA target sequence for Rasgrf1 (NM_011245.1,2773-2791).
ccaccaacaccaaaatcgt

SEQ ID NO: 664836 - DNA, 19 bp, Mus musculus
  siRNA target sequence for Rasgrf1 (NM_011245.1,2774-2792).
caccaacaccaaaatcgtt

SEQ ID NO: 664837 - DNA, 19 bp, Mus musculus
  siRNA target sequence for Rasgrf1 (NM_011245.1,2782-2800).
ccaaaatcgttcttaaaca

SEQ ID NO: 664838 - DNA, 19 bp, Mus musculus
  siRNA target sequence for Rasgrf1 (NM_011245.1,2818-2836).
ccattctttaactacaaca

SEQ ID NO: 664839 - DNA, 19 bp, Mus musculus
  siRNA target sequence for Rasgrf1 (NM_011245.1,2860-2878).
cgtgatctggtggacaata

SEQ ID NO: 664840 - DNA, 19 bp, Mus musculus
  siRNA target sequence for Rasgrf1 (NM_011245.1,2956-2974).
gtgtttcgaaggatgtctt

SEQ ID NO: 664841 - DNA, 19 bp, Mus musculus
  siRNA target sequence for Rasgrf1 (NM_011245.1,2993-3011).
cctctgaccagagaaatat

SEQ ID NO: 664842 - DNA, 19 bp, Mus musculus
  siRNA target sequence for Rasgrf1 (NM_011245.1,2996-3014).
ctgaccagagaaatatcga

SEQ ID NO: 664843 - DNA, 19 bp, Mus musculus
  siRNA target sequence for Rasgrf1 (NM_011245.1,3104-3122).
ccgacgatacgctcaaata

SEQ ID NO: 664844 - DNA, 19 bp, Mus musculus
  siRNA target sequence for Rasgrf1 (NM_011245.1,3106-3124).
gacgatacgctcaaataca

SEQ ID NO: 664845 - DNA, 19 bp, Mus musculus
  siRNA target sequence for Rasgrf1 (NM_011245.1,3206-3224).
ggactctgaccctagaaga

SEQ ID NO: 664846 - DNA, 19 bp, Mus musculus
  siRNA target sequence for Rasgrf1 (NM_011245.1,3213-3231).
gaccctagaagaaacaact

SEQ ID NO: 664847 - DNA, 19 bp, Mus musculus
  siRNA target sequence for Rasgrf1 (NM_011245.1,3227-3245).
caactgaacaacatagcat

SEQ ID NO: 664848 - DNA, 19 bp, Mus musculus
  siRNA target sequence for Rasgrf1 (NM_011245.1,3242-3260).
gcatgctggaagaagtcat

SEQ ID NO: 664849 - DNA, 19 bp, Mus musculus
  siRNA target sequence for Rasgrf1 (NM_011245.1,3340-3358).
gatcaccttgtcttcaaga

SEQ ID NO: 664850 - DNA, 19 bp, Mus musculus
  siRNA target sequence for Rasgrf1 (NM_011245.1,3349-3367).
gtcttcaagagtattcctt

SEQ ID NO: 664851 - DNA, 19 bp, Mus musculus
  siRNA target sequence for Rasgrf1 (NM_011245.1,3354-3372).
caagagtattccttatgaa

SEQ ID NO: 664852 - DNA, 19 bp, Mus musculus
  siRNA target sequence for Rasgrf1 (NM_011245.1,3453-3471).
ccatgtcagtaacttcatt

SEQ ID NO: 664853 - DNA, 19 bp, Mus musculus
  siRNA target sequence for Rasgrf1 (NM_011245.1,3465-3483).
cttcattgcttcagaaatt

SEQ ID NO: 664854 - DNA, 19 bp, Mus musculus
  siRNA target sequence for Rasgrf1 (NM_011245.1,3534-3552).
ggctgtggccgacatatgt

SEQ ID NO: 664855 - DNA, 19 bp, Mus musculus
  siRNA target sequence for Rasgrf1 (NM_011245.1,3554-3572).
gctgcctgcacaactacaa

SEQ ID NO: 664856 - DNA, 19 bp, Mus musculus
  siRNA target sequence for Rasgrf1 (NM_011245.1,3555-3573).
ctgcctgcacaactacaat

SEQ ID NO: 664857 - DNA, 19 bp, Mus musculus
  siRNA target sequence for Rasgrf1 (NM_011245.1,3609-3627).
cgccatcttccgtctcaaa

SEQ ID NO: 664858 - DNA, 19 bp, Mus musculus
  siRNA target sequence for Rasgrf1 (NM_011245.1,3610-3628).
gccatcttccgtctcaaaa

SEQ ID NO: 664859 - DNA, 19 bp, Mus musculus
  siRNA target sequence for Rasgrf1 (NM_011245.1,3611-3629).
ccatcttccgtctcaaaaa

SEQ ID NO: 664860 - DNA, 19 bp, Mus musculus
  siRNA target sequence for Rasgrf1 (NM_011245.1,3632-3650).
catggctcaaagtttctaa

SEQ ID NO: 664861 - DNA, 19 bp, Mus musculus
  siRNA target sequence for Rasgrf1 (NM_011245.1,3643-3661).
gtttctaagcagacgaaat

SEQ ID NO: 664862 - DNA, 19 bp, Mus musculus
  siRNA target sequence for Rasgrf1 (NM_011245.1,3651-3669).
gcagacgaaatctttgctt

SEQ ID NO: 664863 - DNA, 19 bp, Mus musculus
  siRNA target sequence for Rasgrf1 (NM_011245.1,3796-3814).
gaggggacacccaattaca

SEQ ID NO: 664864 - DNA, 19 bp, Mus musculus
  siRNA target sequence for Rasgrf1 (NM_011245.1,3846-3864).
gagaatgatctcccatatt

SEQ ID NO: 664865 - DNA, 19 bp, Mus musculus
  siRNA target sequence for Rasgrf1 (NM_011245.1,3848-3866).
gaatgatctcccatattat

SEQ ID NO: 664866 - DNA, 19 bp, Mus musculus
  siRNA target sequence for Rasgrf1 (NM_011245.1,3858-3876).
ccatattatccgagagatt

SEQ ID NO: 664867 - DNA, 19 bp, Mus musculus
  siRNA target sequence for Rasgrf1 (NM_011245.1,3930-3948).
gtacttactggatgaatct

SEQ ID NO: 664868 - DNA, 19 bp, Mus musculus
  siRNA target sequence for Rasgrf1 (NM_011245.1,3978-3996).
gtcttcgctcctaatcgaa

SEQ ID NO: 664869 - DNA, 19 bp, Mus musculus
  siRNA target sequence for Rasgrf1 (NM_011245.1,3983-4001).
cgctcctaatcgaaccaaa

SEQ ID NO: 664870 - DNA, 19 bp, Mus musculus
  siRNA target sequence for Rasgrf1 (NM_011245.1,3984-4002).
gctcctaatcgaaccaaaa

SEQ ID NO: 664871 - DNA, 19 bp, Mus musculus
  siRNA target sequence for Rasgrf2 (NM_009027.2,391-409).
gccagttacgcggacattt

SEQ ID NO: 664872 - DNA, 19 bp, Mus musculus
  siRNA target sequence for Rasgrf2 (NM_009027.2,392-410).
ccagttacgcggacatttt

SEQ ID NO: 664873 - DNA, 19 bp, Mus musculus
  siRNA target sequence for Rasgrf2 (NM_009027.2,395-413).
gttacgcggacattttgat

SEQ ID NO: 664874 - DNA, 19 bp, Mus musculus
  siRNA target sequence for Rasgrf2 (NM_009027.2,424-442).
gtgctaatgcagaagtaca

SEQ ID NO: 664875 - DNA, 19 bp, Mus musculus
  siRNA target sequence for Rasgrf2 (NM_009027.2,426-444).
gctaatgcagaagtacatt

SEQ ID NO: 664876 - DNA, 19 bp, Mus musculus
  siRNA target sequence for Rasgrf2 (NM_009027.2,432-450).
gcagaagtacattcatcta

SEQ ID NO: 664877 - DNA, 19 bp, Mus musculus
  siRNA target sequence for Rasgrf2 (NM_009027.2,441-459).
cattcatctagttcagatt

SEQ ID NO: 664878 - DNA, 19 bp, Mus musculus
  siRNA target sequence for Rasgrf2 (NM_009027.2,494-512).
gacatcaactcgaagatca

SEQ ID NO: 664879 - DNA, 19 bp, Mus musculus
  siRNA target sequence for Rasgrf2 (NM_009027.2,499-517).
caactcgaagatcaagata

SEQ ID NO: 664880 - DNA, 19 bp, Mus musculus
  siRNA target sequence for Rasgrf2 (NM_009027.2,530-548).
ggcttaaatcagagattgt

SEQ ID NO: 664881 - DNA, 19 bp, Mus musculus
  siRNA target sequence for Rasgrf2 (NM_009027.2,531-549).
gcttaaatcagagattgtt

SEQ ID NO: 664882 - DNA, 19 bp, Mus musculus
  siRNA target sequence for Rasgrf2 (NM_009027.2,581-599).
cgtaccacgtccatcaaga

SEQ ID NO: 664883 - DNA, 19 bp, Mus musculus
  siRNA target sequence for Rasgrf2 (NM_009027.2,2533-2551).
gggagtccaccaggattta

SEQ ID NO: 664884 - DNA, 19 bp, Mus musculus
  siRNA target sequence for Rasgrf2 (NM_009027.2,2534-2552).
ggagtccaccaggatttaa

SEQ ID NO: 664885 - DNA, 19 bp, Mus musculus
  siRNA target sequence for Rasgrf2 (NM_009027.2,2564-2582).
catgtgacaaggagttcat

SEQ ID NO: 664886 - DNA, 19 bp, Mus musculus
  siRNA target sequence for Rasgrf2 (NM_009027.2,2640-2658).
gcatgcccaggattttgaa

SEQ ID NO: 664887 - DNA, 19 bp, Mus musculus
  siRNA target sequence for Rasgrf2 (NM_009027.2,2757-2775).
cctgagggctctttcacaa

SEQ ID NO: 664888 - DNA, 19 bp, Mus musculus
  siRNA target sequence for Rasgrf2 (NM_009027.2,2760-2778).
gagggctctttcacaagat

SEQ ID NO: 664889 - DNA, 19 bp, Mus musculus
  siRNA target sequence for Rasgrf2 (NM_009027.2,2773-2791).
caagatgatcaagatgata

SEQ ID NO: 664890 - DNA, 19 bp, Mus musculus
  siRNA target sequence for Rasgrf2 (NM_009027.2,2785-2803).
gatgatatccacctaaaat

SEQ ID NO: 664891 - DNA, 19 bp, Mus musculus
  siRNA target sequence for Rasgrf2 (NM_009027.2,2796-2814).
cctaaaattagaggatata

SEQ ID NO: 664892 - DNA, 19 bp, Mus musculus
  siRNA target sequence for Rasgrf2 (NM_009027.2,2808-2826).
ggatataattcaaatgaca

SEQ ID NO: 664893 - DNA, 19 bp, Mus musculus
  siRNA target sequence for Rasgrf2 (NM_009027.2,2890-2908).
ctcctggaccacattgttt

SEQ ID NO: 664894 - DNA, 19 bp, Mus musculus
  siRNA target sequence for Rasgrf2 (NM_009027.2,2915-2933).
gcatcccctacgaagagtt

SEQ ID NO: 664895 - DNA, 19 bp, Mus musculus
  siRNA target sequence for Rasgrf2 (NM_009027.2,2916-2934).
catcccctacgaagagttt

SEQ ID NO: 664896 - DNA, 19 bp, Mus musculus
  siRNA target sequence for Rasgrf2 (NM_009027.2,2919-2937).
cccctacgaagagtttctt

SEQ ID NO: 664897 - DNA, 19 bp, Mus musculus
  siRNA target sequence for Rasgrf2 (NM_009027.2,2948-2966).
ggatgaagcttgacaagaa

SEQ ID NO: 664898 - DNA, 19 bp, Mus musculus
  siRNA target sequence for Rasgrf2 (NM_009027.2,2996-3014).
gccagcacttcaatgagat

SEQ ID NO: 664899 - DNA, 19 bp, Mus musculus
  siRNA target sequence for Rasgrf2 (NM_009027.2,3027-3045).
ggcctcccagataatgaat

SEQ ID NO: 664900 - DNA, 19 bp, Mus musculus
  siRNA target sequence for Rasgrf2 (NM_009027.2,3028-3046).
gcctcccagataatgaatt

SEQ ID NO: 664901 - DNA, 19 bp, Mus musculus
  siRNA target sequence for Rasgrf2 (NM_009027.2,3029-3047).
cctcccagataatgaatta

SEQ ID NO: 664902 - DNA, 19 bp, Mus musculus
  siRNA target sequence for Rasgrf2 (NM_009027.2,3065-3083).
gtgccaacgccattgagaa

SEQ ID NO: 664903 - DNA, 19 bp, Mus musculus
  siRNA target sequence for Rasgrf2 (NM_009027.2,3107-3125).
gccgatgtctccacaacta

SEQ ID NO: 664904 - DNA, 19 bp, Mus musculus
  siRNA target sequence for Rasgrf2 (NM_009027.2,3109-3127).
cgatgtctccacaactaca

SEQ ID NO: 664905 - DNA, 19 bp, Mus musculus
  siRNA target sequence for Rasgrf2 (NM_009027.2,3110-3128).
gatgtctccacaactacaa

SEQ ID NO: 664906 - DNA, 19 bp, Mus musculus
  siRNA target sequence for Rasgrf2 (NM_009027.2,3237-3255).
gaagactgtttcatctgaa

SEQ ID NO: 664907 - DNA, 19 bp, Mus musculus
  siRNA target sequence for Rasgrf2 (NM_009027.2,3270-3288).
cctcagagagactctcaaa

SEQ ID NO: 664908 - DNA, 19 bp, Mus musculus
  siRNA target sequence for Rasgrf2 (NM_009027.2,3271-3289).
ctcagagagactctcaaaa

SEQ ID NO: 664909 - DNA, 19 bp, Mus musculus
  siRNA target sequence for Rasgrf2 (NM_009027.2,3310-3328).
ccttaccttgggatgtact

SEQ ID NO: 664910 - DNA, 19 bp, Mus musculus
  siRNA target sequence for Rasgrf2 (NM_009027.2,3332-3350).
cagatctggcattcattga

SEQ ID NO: 664911 - DNA, 19 bp, Mus musculus
  siRNA target sequence for Rasgrf2 (NM_009027.2,3372-3390).
cgaagagggccttgtcaat

SEQ ID NO: 664912 - DNA, 19 bp, Mus musculus
  siRNA target sequence for Rasgrf2 (NM_009027.2,3373-3391).
gaagagggccttgtcaatt

SEQ ID NO: 664913 - DNA, 19 bp, Mus musculus
  siRNA target sequence for Rasgrf2 (NM_009027.2,3393-3411).
ctccaaaatgcgaatgata

SEQ ID NO: 664914 - DNA, 19 bp, Mus musculus
  siRNA target sequence for Rasgrf2 (NM_009027.2,3396-3414).
caaaatgcgaatgatatca

SEQ ID NO: 664915 - DNA, 19 bp, Mus musculus
  siRNA target sequence for Rasgrf2 (NM_009027.2,3402-3420).
gcgaatgatatcacacatt

SEQ ID NO: 664916 - DNA, 19 bp, Mus musculus
  siRNA target sequence for Rasgrf2 (NM_009027.2,3403-3421).
cgaatgatatcacacatta

SEQ ID NO: 664917 - DNA, 19 bp, Mus musculus
  siRNA target sequence for Rasgrf2 (NM_009027.2,3505-3523).
cttgtcatagacgaagatt

SEQ ID NO: 664918 - DNA, 19 bp, Mus musculus
  siRNA target sequence for Rasgrp4 (NM_145149.1,263-281).
ggtcatggcgtccatgaat

SEQ ID NO: 664919 - DNA, 19 bp, Mus musculus
  siRNA target sequence for Rasgrp4 (NM_145149.1,318-336).
gagctattggaggaatgta

SEQ ID NO: 664920 - DNA, 19 bp, Mus musculus
  siRNA target sequence for Rasgrp4 (NM_145149.1,367-385).
gccgaggggaccacattct

SEQ ID NO: 664921 - DNA, 19 bp, Mus musculus
  siRNA target sequence for Rasgrp4 (NM_145149.1,369-387).
cgaggggaccacattctca

SEQ ID NO: 664922 - DNA, 19 bp, Mus musculus
  siRNA target sequence for Rasgrp4 (NM_145149.1,370-388).
gaggggaccacattctcaa

SEQ ID NO: 664923 - DNA, 19 bp, Mus musculus
  siRNA target sequence for Rasgrp4 (NM_145149.1,440-458).
ccgtctgctgacttcgtat

SEQ ID NO: 664924 - DNA, 19 bp, Mus musculus
  siRNA target sequence for Rasgrp4 (NM_145149.1,444-462).
ctgctgacttcgtatcaga

SEQ ID NO: 664925 - DNA, 19 bp, Mus musculus
  siRNA target sequence for Rasgrp4 (NM_145149.1,490-508).
gacagctacagatctgtta

SEQ ID NO: 664926 - DNA, 19 bp, Mus musculus
  siRNA target sequence for Rasgrp4 (NM_145149.1,560-578).
ccagctggaagcagtcata

SEQ ID NO: 664927 - DNA, 19 bp, Mus musculus
  siRNA target sequence for Rasgrp4 (NM_145149.1,561-579).
cagctggaagcagtcataa

SEQ ID NO: 664928 - DNA, 19 bp, Mus musculus
  siRNA target sequence for Rasgrp4 (NM_145149.1,573-591).
gtcataagccggttttgga

SEQ ID NO: 664929 - DNA, 19 bp, Mus musculus
  siRNA target sequence for Rasgrp4 (NM_145149.1,711-729).
cggaaagtgtcattgctat

SEQ ID NO: 664930 - DNA, 19 bp, Mus musculus
  siRNA target sequence for Rasgrp4 (NM_145149.1,942-960).
gcccaggtcctggacaaat

SEQ ID NO: 664931 - DNA, 19 bp, Mus musculus
  siRNA target sequence for Rasgrp4 (NM_145149.1,1119-1137).
ctctcatcccacaacaact

SEQ ID NO: 664932 - DNA, 19 bp, Mus musculus
  siRNA target sequence for Rasgrp4 (NM_145149.1,1263-1281).
cacctacccaagctgaata

SEQ ID NO: 664933 - DNA, 19 bp, Mus musculus
  siRNA target sequence for Rasgrp4 (NM_145149.1,1274-1292).
gctgaatagcctctatcta

SEQ ID NO: 664934 - DNA, 19 bp, Mus musculus
  siRNA target sequence for Rasgrp4 (NM_145149.1,1401-1419).
gagatctacgagctttctt

SEQ ID NO: 664935 - DNA, 19 bp, Mus musculus
  siRNA target sequence for Rasgrp4 (NM_145149.1,1403-1421).
gatctacgagctttcttat

SEQ ID NO: 664936 - DNA, 19 bp, Mus musculus
  siRNA target sequence for Rasgrp4 (NM_145149.1,1554-1572).
gagtccgtgttcaagaact

SEQ ID NO: 664937 - DNA, 19 bp, Mus musculus
  siRNA target sequence for Rgl2 (NM_009059.1,135-153).
ccctgcggctgcttttgga

SEQ ID NO: 664938 - DNA, 19 bp, Mus musculus
  siRNA target sequence for Rgl2 (NM_009059.1,307-325).
ggatggtgcgacctttact

SEQ ID NO: 664939 - DNA, 19 bp, Mus musculus
  siRNA target sequence for Rgl2 (NM_009059.1,592-610).
ggtagccatctctgtactt

SEQ ID NO: 664940 - DNA, 19 bp, Mus musculus
  siRNA target sequence for Rgl2 (NM_009059.1,593-611).
gtagccatctctgtacttt

SEQ ID NO: 664941 - DNA, 19 bp, Mus musculus
  siRNA target sequence for Rgl2 (NM_009059.1,880-898).
gctagatgcggaactgttt

SEQ ID NO: 664942 - DNA, 19 bp, Mus musculus
  siRNA target sequence for Rgl2 (NM_009059.1,884-902).
gatgcggaactgtttctta

SEQ ID NO: 664943 - DNA, 19 bp, Mus musculus
  siRNA target sequence for Rgl2 (NM_009059.1,888-906).
cggaactgtttcttaatct

SEQ ID NO: 664944 - DNA, 19 bp, Mus musculus
  siRNA target sequence for Rgl2 (NM_009059.1,987-1005).
ctaccgtcacacagttcaa

SEQ ID NO: 664945 - DNA, 19 bp, Mus musculus
  siRNA target sequence for Rgl2 (NM_009059.1,1247-1265).
gacagcctccgagtctttt

SEQ ID NO: 664946 - DNA, 19 bp, Mus musculus
  siRNA target sequence for Rgl2 (NM_009059.1,1471-1489).
ggagaatggctacatcaat

SEQ ID NO: 664947 - DNA, 19 bp, Mus musculus
  siRNA target sequence for Rgl2 (NM_009059.1,1474-1492).
gaatggctacatcaatttt

SEQ ID NO: 664948 - DNA, 19 bp, Mus musculus
  siRNA target sequence for Rgl2 (NM_009059.1,1478-1496).
ggctacatcaattttgaca

SEQ ID NO: 664949 - DNA, 19 bp, Mus musculus
  siRNA target sequence for Rgl2 (NM_009059.1,1479-1497).
gctacatcaattttgacaa

SEQ ID NO: 664950 - DNA, 19 bp, Mus musculus
  siRNA target sequence for Rgl2 (NM_009059.1,1499-1517).
cggaggaaggagtttgcta

SEQ ID NO: 664951 - DNA, 19 bp, Mus musculus
  siRNA target sequence for Rgl2 (NM_009059.1,1504-1522).
gaaggagtttgctatcctt

SEQ ID NO: 664952 - DNA, 19 bp, Mus musculus
  siRNA target sequence for Rgl2 (NM_009059.1,1561-1579).
cgacctccgacctaactct

SEQ ID NO: 664953 - DNA, 19 bp, Mus musculus
  siRNA target sequence for Rgl2 (NM_009059.1,1569-1587).
gacctaactctgatatcca

SEQ ID NO: 664954 - DNA, 19 bp, Mus musculus
  siRNA target sequence for Rgl2 (NM_009059.1,1692-1710).
ctcggccaacactagtgat

SEQ ID NO: 664955 - DNA, 19 bp, Mus musculus
  siRNA target sequence for Rgl2 (NM_009059.1,2061-2079).
cctctgattgccgaatcat

SEQ ID NO: 664956 - DNA, 19 bp, Mus musculus
  siRNA target sequence for Rgl2 (NM_009059.1,2263-2281).
ctcagctaacgtcttctat

SEQ ID NO: 664957 - DNA, 19 bp, Mus musculus
  siRNA target sequence for Arhgdia (NM_133796.3,564-582).
gagagcttcaagaaacagt

SEQ ID NO: 664958 - DNA, 19 bp, Mus musculus
  siRNA target sequence for Arhgdia (NM_133796.3,603-621).
gtggagtaccggataaaaa

SEQ ID NO: 664959 - DNA, 19 bp, Mus musculus
  siRNA target sequence for Arhgdia (NM_133796.3,608-626).
gtaccggataaaaatctct

SEQ ID NO: 664960 - DNA, 19 bp, Mus musculus
  siRNA target sequence for Arhgdia (NM_133796.3,648-666).
gtgtccggcatgaagtaca

SEQ ID NO: 664961 - DNA, 19 bp, Mus musculus
  siRNA target sequence for Arhgdia (NM_133796.3,733-751).
cgagggccgaggagtatga

SEQ ID NO: 664962 - DNA, 19 bp, Mus musculus
  siRNA target sequence for Arhgdia (NM_133796.3,736-754).
gggccgaggagtatgagtt

SEQ ID NO: 664963 - DNA, 19 bp, Mus musculus
  siRNA target sequence for Arhgdib (NM_007486.1,204-222).
gagagtctaaccaagtaca

SEQ ID NO: 664964 - DNA, 19 bp, Mus musculus
  siRNA target sequence for Arhgdib (NM_007486.1,208-226).
gtctaaccaagtacaagaa

SEQ ID NO: 664965 - DNA, 19 bp, Mus musculus
  siRNA target sequence for Arhgdib (NM_007486.1,251-269).
ggtagcagacccaacagtt

SEQ ID NO: 664966 - DNA, 19 bp, Mus musculus
  siRNA target sequence for Arhgdib (NM_007486.1,267-285).
gttcccaacgtgactgtta

SEQ ID NO: 664967 - DNA, 19 bp, Mus musculus
  siRNA target sequence for Arhgdib (NM_007486.1,287-305).
ccggcttagccttgtatgt

SEQ ID NO: 664968 - DNA, 19 bp, Mus musculus
  siRNA target sequence for Arhgdib (NM_007486.1,345-363).
gatctcgaggccctcaaaa

SEQ ID NO: 664969 - DNA, 19 bp, Mus musculus
  siRNA target sequence for Arhgdib (NM_007486.1,351-369).
gaggccctcaaaaaggata

SEQ ID NO: 664970 - DNA, 19 bp, Mus musculus
  siRNA target sequence for Arhgdib (NM_007486.1,354-372).
gccctcaaaaaggatacat

SEQ ID NO: 664971 - DNA, 19 bp, Mus musculus
  siRNA target sequence for Arhgdib (NM_007486.1,420-438).
gtgaataaggatattgtgt

SEQ ID NO: 664972 - DNA, 19 bp, Mus musculus
  siRNA target sequence for Arhgdib (NM_007486.1,442-460).
gcctgaagtatgttcaaca

SEQ ID NO: 664973 - DNA, 19 bp, Mus musculus
  siRNA target sequence for Arhgdib (NM_007486.1,522-540).
cgaccagaggagtacgaat

SEQ ID NO: 664974 - DNA, 19 bp, Mus musculus
  siRNA target sequence for Arhgdib (NM_007486.1,654-672).
ctggccattaagaaggatt

SEQ ID NO: 664975 - DNA, 19 bp, Mus musculus
  siRNA target sequence for Arhgdig (NM_008113.2,437-455).
gacccctgccacccattat

SEQ ID NO: 664976 - DNA, 19 bp, Mus musculus
  siRNA target sequence for Arhgdig (NM_008113.2,511-529).
gctccagggcctatcatca

SEQ ID NO: 664977 - DNA, 19 bp, Mus musculus
  siRNA target sequence for Arhgdig (NM_008113.2,512-530).
ctccagggcctatcatcat

SEQ ID NO: 664978 - DNA, 19 bp, Mus musculus
  siRNA target sequence for Gdi3 (NM_008112.2,836-854).
gtacctgtatccgctttat

SEQ ID NO: 664979 - DNA, 19 bp, Mus musculus
  siRNA target sequence for Gdi3 (NM_008112.2,1350-1368).
gatagtcagatcttcattt

SEQ ID NO: 664980 - DNA, 19 bp, Mus musculus
  siRNA target sequence for Sipa1 (NM_011379.2,1218-1236).
ccggagcagcctttatgca

SEQ ID NO: 664981 - DNA, 19 bp, Mus musculus
  siRNA target sequence for Sipa1 (NM_011379.2,1264-1282).
gcgactcaaaggctttgaa

SEQ ID NO: 664982 - DNA, 19 bp, Mus musculus
  siRNA target sequence for Sipa1 (NM_011379.2,1265-1283).
cgactcaaaggctttgaaa

SEQ ID NO: 664983 - DNA, 19 bp, Mus musculus
  siRNA target sequence for Sipa1 (NM_011379.2,1268-1286).
ctcaaaggctttgaaagtt

SEQ ID NO: 664984 - DNA, 19 bp, Mus musculus
  siRNA target sequence for Sipa1 (NM_011379.2,1385-1403).
ctgccttacacgcctaata

SEQ ID NO: 664985 - DNA, 19 bp, Mus musculus
  siRNA target sequence for Sipa1 (NM_011379.2,1389-1407).
cttacacgcctaataacca

SEQ ID NO: 664986 - DNA, 19 bp, Mus musculus
  siRNA target sequence for Sipa1 (NM_011379.2,1427-1445).
cgtcatatcggcaacgata

SEQ ID NO: 664987 - DNA, 19 bp, Mus musculus
  siRNA target sequence for Sipa1 (NM_011379.2,1428-1446).
gtcatatcggcaacgatat

SEQ ID NO: 664988 - DNA, 19 bp, Mus musculus
  siRNA target sequence for Sipa1 (NM_011379.2,1737-1755).
cacgcacacgccaacagta

SEQ ID NO: 664989 - DNA, 19 bp, Mus musculus
  siRNA target sequence for Sipa1 (NM_011379.2,2046-2064).
gtgcctgtcgcgacgtatt

SEQ ID NO: 664990 - DNA, 19 bp, Mus musculus
  siRNA target sequence for Sipa1 (NM_011379.2,2197-2215).
gtgtgagaccagagaacta

SEQ ID NO: 664991 - DNA, 19 bp, Mus musculus
  siRNA target sequence for Sipa1 (NM_011379.2,2516-2534).
gagccagtacaggatgaaa

SEQ ID NO: 664992 - DNA, 19 bp, Mus musculus
  siRNA target sequence for Sipa1 (NM_011379.2,2518-2536).
gccagtacaggatgaaact

SEQ ID NO: 664993 - DNA, 19 bp, Mus musculus
  siRNA target sequence for Sipa1 (NM_011379.2,2535-2553).
ctgggaagttggtcatatt

SEQ ID NO: 664994 - DNA, 19 bp, Mus musculus
  siRNA target sequence for Sipa1 (NM_011379.2,2562-2580).
ccaagcagctgctacattt

SEQ ID NO: 664995 - DNA, 19 bp, Mus musculus
  siRNA target sequence for Sipa1 (NM_011379.2,2802-2820).
gccccagtagccatgaaga

SEQ ID NO: 664996 - DNA, 19 bp, Mus musculus
  siRNA target sequence for Sipa1 (NM_011379.2,2876-2894).
ctgcggaattccatcagta

SEQ ID NO: 664997 - DNA, 19 bp, Mus musculus
  siRNA target sequence for Sipa1 (NM_011379.2,2961-2979).
ccacttgcaacacaattct

SEQ ID NO: 664998 - DNA, 19 bp, Mus musculus
  siRNA target sequence for Sipa1 (NM_011379.2,3028-3046).
caaggaagctttaaagtgt

SEQ ID NO: 664999 - DNA, 19 bp, Mus musculus
  siRNA target sequence for Sipa1 (NM_011379.2,3036-3054).
ctttaaagtgtgattctga

SEQ ID NO: 665000 - DNA, 19 bp, Mus musculus
  siRNA target sequence for AW120551 (NM_178888.3,160-178).
gatttcagtaggaagcatt

SEQ ID NO: 665001 - DNA, 19 bp, Mus musculus
  siRNA target sequence for AW120551 (NM_178888.3,165-183).
cagtaggaagcattatgga

SEQ ID NO: 665002 - DNA, 19 bp, Mus musculus
  siRNA target sequence for AW120551 (NM_178888.3,338-356).
cccggtggtatttcaagta

SEQ ID NO: 665003 - DNA, 19 bp, Mus musculus
  siRNA target sequence for AW120551 (NM_178888.3,456-474).
ccctcagtatcgtgcaatt

SEQ ID NO: 665004 - DNA, 19 bp, Mus musculus
  siRNA target sequence for AW120551 (NM_178888.3,460-478).
cagtatcgtgcaattcttt

SEQ ID NO: 665005 - DNA, 19 bp, Mus musculus
  siRNA target sequence for AW120551 (NM_178888.3,491-509).
gtacgcaaaaaatatgtct

SEQ ID NO: 665006 - DNA, 19 bp, Mus musculus
  siRNA target sequence for AW120551 (NM_178888.3,708-726).
gatgttcagcaatgaaatt

SEQ ID NO: 665007 - DNA, 19 bp, Mus musculus
  siRNA target sequence for AW120551 (NM_178888.3,757-775).
ctcctcggtgacaccatta

SEQ ID NO: 665008 - DNA, 19 bp, Mus musculus
  siRNA target sequence for AW120551 (NM_178888.3,759-777).
cctcggtgacaccattact

SEQ ID NO: 665009 - DNA, 19 bp, Mus musculus
  siRNA target sequence for AW120551 (NM_178888.3,762-780).
cggtgacaccattactcta

SEQ ID NO: 665010 - DNA, 19 bp, Mus musculus
  siRNA target sequence for AW120551 (NM_178888.3,763-781).
ggtgacaccattactctaa

SEQ ID NO: 665011 - DNA, 19 bp, Mus musculus
  siRNA target sequence for AW120551 (NM_178888.3,802-820).
ggcggtctggacaccaaaa

SEQ ID NO: 665012 - DNA, 19 bp, Mus musculus
  siRNA target sequence for AW120551 (NM_178888.3,803-821).
gcggtctggacaccaaaaa

SEQ ID NO: 665013 - DNA, 19 bp, Mus musculus
  siRNA target sequence for AW120551 (NM_178888.3,808-826).
ctggacaccaaaaataaca

SEQ ID NO: 665014 - DNA, 19 bp, Mus musculus
  siRNA target sequence for AW120551 (NM_178888.3,832-850).
gggatcaactcagtctata

SEQ ID NO: 665015 - DNA, 19 bp, Mus musculus
  siRNA target sequence for AW120551 (NM_178888.3,938-956).
gccacattggaaacgatat

SEQ ID NO: 665016 - DNA, 19 bp, Mus musculus
  siRNA target sequence for AW120551 (NM_178888.3,939-957).
ccacattggaaacgatatt

SEQ ID NO: 665017 - DNA, 19 bp, Mus musculus
  siRNA target sequence for AW120551 (NM_178888.3,1011-1029).
catgatccgctcccatttt

SEQ ID NO: 665018 - DNA, 19 bp, Mus musculus
  siRNA target sequence for AW120551 (NM_178888.3,1014-1032).
gatccgctcccattttaca

SEQ ID NO: 665019 - DNA, 19 bp, Mus musculus
  siRNA target sequence for AW120551 (NM_178888.3,1017-1035).
ccgctcccattttacacat

SEQ ID NO: 665020 - DNA, 19 bp, Mus musculus
  siRNA target sequence for AW120551 (NM_178888.3,1019-1037).
gctcccattttacacatat

SEQ ID NO: 665021 - DNA, 19 bp, Mus musculus
  siRNA target sequence for AW120551 (NM_178888.3,1020-1038).
ctcccattttacacatatt

SEQ ID NO: 665022 - DNA, 19 bp, Mus musculus
  siRNA target sequence for AW120551 (NM_178888.3,1022-1040).
cccattttacacatatttt

SEQ ID NO: 665023 - DNA, 19 bp, Mus musculus
  siRNA target sequence for AW120551 (NM_178888.3,1050-1068).
gaggtatgaccagcaaaat

SEQ ID NO: 665024 - DNA, 19 bp, Mus musculus
  siRNA target sequence for AW120551 (NM_178888.3,1133-1151).
cccctccggtgtttactga

SEQ ID NO: 665025 - DNA, 19 bp, Mus musculus
  siRNA target sequence for AW120551 (NM_178888.3,1156-1174).
caggaattcagggactttt

SEQ ID NO: 665026 - DNA, 19 bp, Mus musculus
  siRNA target sequence for AW120551 (NM_178888.3,1241-1259).
ggcgtactctggacatgtt

SEQ ID NO: 665027 - DNA, 19 bp, Mus musculus
  siRNA target sequence for AW120551 (NM_178888.3,1287-1305).
gccggatttgcataagaat

SEQ ID NO: 665028 - DNA, 19 bp, Mus musculus
  siRNA target sequence for AW120551 (NM_178888.3,1288-1306).
ccggatttgcataagaata

SEQ ID NO: 665029 - DNA, 19 bp, Mus musculus
  siRNA target sequence for AW120551 (NM_178888.3,1289-1307).
cggatttgcataagaatat

SEQ ID NO: 665030 - DNA, 19 bp, Mus musculus
  siRNA target sequence for AW120551 (NM_178888.3,1308-1326).
gctcaatcggcgatctttt

SEQ ID NO: 665031 - DNA, 19 bp, Mus musculus
  siRNA target sequence for AW120551 (NM_178888.3,1309-1327).
ctcaatcggcgatctttta

SEQ ID NO: 665032 - DNA, 19 bp, Mus musculus
  siRNA target sequence for AW120551 (NM_178888.3,1311-1329).
caatcggcgatcttttagt

SEQ ID NO: 665033 - DNA, 19 bp, Mus musculus
  siRNA target sequence for AW120551 (NM_178888.3,1317-1335).
gcgatcttttagtgatgtt

SEQ ID NO: 665034 - DNA, 19 bp, Mus musculus
  siRNA target sequence for AW120551 (NM_178888.3,1350-1368).
caagtcagcacggaaaaaa

SEQ ID NO: 665035 - DNA, 19 bp, Mus musculus
  siRNA target sequence for AW120551 (NM_178888.3,1378-1396).
cggcaggccgagtttgtga

SEQ ID NO: 665036 - DNA, 19 bp, Mus musculus
  siRNA target sequence for AW120551 (NM_178888.3,1383-1401).
ggccgagtttgtgagaata

SEQ ID NO: 665037 - DNA, 19 bp, Mus musculus
  siRNA target sequence for AW120551 (NM_178888.3,1457-1475).
cagcatcagggatgtgtaa

SEQ ID NO: 665038 - DNA, 19 bp, Mus musculus
  siRNA target sequence for AW120551 (NM_178888.3,1460-1478).
catcagggatgtgtaaaaa

SEQ ID NO: 665039 - DNA, 19 bp, Mus musculus
  siRNA target sequence for AW120551 (NM_178888.3,1604-1622).
catccgtgcccgtgtttga

SEQ ID NO: 665040 - DNA, 19 bp, Mus musculus
  siRNA target sequence for AW120551 (NM_178888.3,1614-1632).
cgtgtttgacagaactcta

SEQ ID NO: 665041 - DNA, 19 bp, Mus musculus
  siRNA target sequence for AW120551 (NM_178888.3,1775-1793).
ctgactgccgagaaaacaa

SEQ ID NO: 665042 - DNA, 19 bp, Mus musculus
  siRNA target sequence for AW120551 (NM_178888.3,1814-1832).
gccacctgtatgctattaa

SEQ ID NO: 665043 - DNA, 19 bp, Mus musculus
  siRNA target sequence for AW120551 (NM_178888.3,1854-1872).
gagaatcgtggttgcaatt

SEQ ID NO: 665044 - DNA, 19 bp, Mus musculus
  siRNA target sequence for AW120551 (NM_178888.3,1961-1979).
ctcctgttgaggaattcca

SEQ ID NO: 665045 - DNA, 19 bp, Mus musculus
  siRNA target sequence for AW120551 (NM_178888.3,2136-2154).
ggaggccaacaaggttaat

SEQ ID NO: 665046 - DNA, 19 bp, Mus musculus
  siRNA target sequence for AW120551 (NM_178888.3,2141-2159).
ccaacaaggttaattttgt

SEQ ID NO: 665047 - DNA, 19 bp, Mus musculus
  siRNA target sequence for AW120551 (NM_178888.3,2158-2176).
gttgcagctattgatgttt

SEQ ID NO: 665048 - DNA, 19 bp, Mus musculus
  siRNA target sequence for AW120551 (NM_178888.3,2202-2220).
cctgtgctacaactatagt

SEQ ID NO: 665049 - DNA, 19 bp, Mus musculus
  siRNA target sequence for AW120551 (NM_178888.3,2211-2229).
caactatagttgcatctat

SEQ ID NO: 665050 - DNA, 19 bp, Mus musculus
  siRNA target sequence for AW120551 (NM_178888.3,2214-2232).
ctatagttgcatctataaa

SEQ ID NO: 665051 - DNA, 19 bp, Mus musculus
  siRNA target sequence for AW120551 (NM_178888.3,2219-2237).
gttgcatctataaaaaggt

SEQ ID NO: 665052 - DNA, 19 bp, Mus musculus
  siRNA target sequence for AW120551 (NM_178888.3,2438-2456).
ccaggtcagatatatactt

SEQ ID NO: 665053 - DNA, 19 bp, Mus musculus
  siRNA target sequence for AW120551 (NM_178888.3,2548-2566).
gacactccactgtttcctt

SEQ ID NO: 665054 - DNA, 19 bp, Mus musculus
  siRNA target sequence for AW120551 (NM_178888.3,2575-2593).
ggggaaggtgaaattcagt

SEQ ID NO: 665055 - DNA, 19 bp, Mus musculus
  siRNA target sequence for AW120551 (NM_178888.3,2640-2658).
catcgagcgacctctgaaa

SEQ ID NO: 665056 - DNA, 19 bp, Mus musculus
  siRNA target sequence for AW120551 (NM_178888.3,2643-2661).
cgagcgacctctgaaatca

SEQ ID NO: 665057 - DNA, 19 bp, Mus musculus
  siRNA target sequence for AW120551 (NM_178888.3,2653-2671).
ctgaaatcacccttagtct

SEQ ID NO: 665058 - DNA, 19 bp, Mus musculus
  siRNA target sequence for AW120551 (NM_178888.3,2741-2759).
ccctctcccgcatggaaat

SEQ ID NO: 665059 - DNA, 19 bp, Mus musculus
  siRNA target sequence for AW120551 (NM_178888.3,2742-2760).
cctctcccgcatggaaatt

SEQ ID NO: 665060 - DNA, 19 bp, Mus musculus
  siRNA target sequence for AW120551 (NM_178888.3,2743-2761).
ctctcccgcatggaaatta

SEQ ID NO: 665061 - DNA, 19 bp, Mus musculus
  siRNA target sequence for AW120551 (NM_178888.3,2745-2763).
ctcccgcatggaaattaaa

SEQ ID NO: 665062 - DNA, 19 bp, Mus musculus
  siRNA target sequence for AW120551 (NM_178888.3,2747-2765).
cccgcatggaaattaaaga

SEQ ID NO: 665063 - DNA, 19 bp, Mus musculus
  siRNA target sequence for AW120551 (NM_178888.3,2751-2769).
catggaaattaaagagatt

SEQ ID NO: 665064 - DNA, 19 bp, Mus musculus
  siRNA target sequence for AW120551 (NM_178888.3,2857-2875).
cggaagcggttggaagaaa

SEQ ID NO: 665065 - DNA, 19 bp, Mus musculus
  siRNA target sequence for AW120551 (NM_178888.3,2922-2940).
caggatcccatcaggaatt

SEQ ID NO: 665066 - DNA, 19 bp, Mus musculus
  siRNA target sequence for AW120551 (NM_178888.3,2979-2997).
caaccactgggcaagttct

SEQ ID NO: 665067 - DNA, 19 bp, Mus musculus
  siRNA target sequence for AW120551 (NM_178888.3,3003-3021).
ggacgctggggtggataaa

SEQ ID NO: 665068 - DNA, 19 bp, Mus musculus
  siRNA target sequence for Dnaja3 (NM_023646.2,274-292).
cttctttggccaaagatga

SEQ ID NO: 665069 - DNA, 19 bp, Mus musculus
  siRNA target sequence for Dnaja3 (NM_023646.2,277-295).
ctttggccaaagatgatta

SEQ ID NO: 665070 - DNA, 19 bp, Mus musculus
  siRNA target sequence for Dnaja3 (NM_023646.2,283-301).
ccaaagatgattattacca

SEQ ID NO: 665071 - DNA, 19 bp, Mus musculus
  siRNA target sequence for Dnaja3 (NM_023646.2,422-440).
ccagctggcagaagcttat

SEQ ID NO: 665072 - DNA, 19 bp, Mus musculus
  siRNA target sequence for Dnaja3 (NM_023646.2,630-648).
gatcagcctcaggaataca

SEQ ID NO: 665073 - DNA, 19 bp, Mus musculus
  siRNA target sequence for Dnaja3 (NM_023646.2,693-711).
gagttcactgtgaacatta

SEQ ID NO: 665074 - DNA, 19 bp, Mus musculus
  siRNA target sequence for Dnaja3 (NM_023646.2,698-716).
cactgtgaacattatggat

SEQ ID NO: 665075 - DNA, 19 bp, Mus musculus
  siRNA target sequence for Dnaja3 (NM_023646.2,743-761).
gaacgagcctggaaccaaa

SEQ ID NO: 665076 - DNA, 19 bp, Mus musculus
  siRNA target sequence for Dnaja3 (NM_023646.2,764-782).
gcagcattgccattactgt

SEQ ID NO: 665077 - DNA, 19 bp, Mus musculus
  siRNA target sequence for Dnaja3 (NM_023646.2,783-801).
ggcggctcgggcatggaaa

SEQ ID NO: 665078 - DNA, 19 bp, Mus musculus
  siRNA target sequence for Dnaja3 (NM_023646.2,786-804).
ggctcgggcatggaaacta

SEQ ID NO: 665079 - DNA, 19 bp, Mus musculus
  siRNA target sequence for Dnaja3 (NM_023646.2,787-805).
gctcgggcatggaaactat

SEQ ID NO: 665080 - DNA, 19 bp, Mus musculus
  siRNA target sequence for Dnaja3 (NM_023646.2,791-809).
gggcatggaaactatcaat

SEQ ID NO: 665081 - DNA, 19 bp, Mus musculus
  siRNA target sequence for Dnaja3 (NM_023646.2,792-810).
ggcatggaaactatcaata

SEQ ID NO: 665082 - DNA, 19 bp, Mus musculus
  siRNA target sequence for Dnaja3 (NM_023646.2,857-875).
gggctccatcatcacaaat

SEQ ID NO: 665083 - DNA, 19 bp, Mus musculus
  siRNA target sequence for Dnaja3 (NM_023646.2,914-932).
gaagaagcgcgtgacaatt

SEQ ID NO: 665084 - DNA, 19 bp, Mus musculus
  siRNA target sequence for Dnaja3 (NM_023646.2,917-935).
gaagcgcgtgacaattcct

SEQ ID NO: 665085 - DNA, 19 bp, Mus musculus
  siRNA target sequence for Dnaja3 (NM_023646.2,976-994).
cagtgggaaaacgagaaat

SEQ ID NO: 665086 - DNA, 19 bp, Mus musculus
  siRNA target sequence for Dnaja3 (NM_023646.2,978-996).
gtgggaaaacgagaaattt

SEQ ID NO: 665087 - DNA, 19 bp, Mus musculus
  siRNA target sequence for Dnaja3 (NM_023646.2,980-998).
gggaaaacgagaaattttt

SEQ ID NO: 665088 - DNA, 19 bp, Mus musculus
  siRNA target sequence for Dnaja3 (NM_023646.2,988-1006).
gagaaatttttgtcacatt

SEQ ID NO: 665089 - DNA, 19 bp, Mus musculus
  siRNA target sequence for Dnaja3 (NM_023646.2,990-1008).
gaaatttttgtcacattca

SEQ ID NO: 665090 - DNA, 19 bp, Mus musculus
  siRNA target sequence for Dnaja3 (NM_023646.2,1052-1070).
ccactcggacctctttatt

SEQ ID NO: 665091 - DNA, 19 bp, Mus musculus
  siRNA target sequence for Dnaja3 (NM_023646.2,1055-1073).
ctcggacctctttatttca

SEQ ID NO: 665092 - DNA, 19 bp, Mus musculus
  siRNA target sequence for Dnaja3 (NM_023646.2,1057-1075).
cggacctctttatttcaat

SEQ ID NO: 665093 - DNA, 19 bp, Mus musculus
  siRNA target sequence for Dnaja3 (NM_023646.2,1058-1076).
ggacctctttatttcaata

SEQ ID NO: 665094 - DNA, 19 bp, Mus musculus
  siRNA target sequence for Dnaja3 (NM_023646.2,1072-1090).
caatagctcaagctattct

SEQ ID NO: 665095 - DNA, 19 bp, Mus musculus
  siRNA target sequence for Dnaja3 (NM_023646.2,1107-1125).
gcccagggcctgtatgaga

SEQ ID NO: 665096 - DNA, 19 bp, Mus musculus
  siRNA target sequence for Dnaja3 (NM_023646.2,1113-1131).
ggcctgtatgagacaatca

SEQ ID NO: 665097 - DNA, 19 bp, Mus musculus
  siRNA target sequence for Dnaja3 (NM_023646.2,1114-1132).
gcctgtatgagacaatcaa

SEQ ID NO: 665098 - DNA, 19 bp, Mus musculus
  siRNA target sequence for Dnaja3 (NM_023646.2,1115-1133).
cctgtatgagacaatcaat

SEQ ID NO: 665099 - DNA, 19 bp, Mus musculus
  siRNA target sequence for Dnaja3 (NM_023646.2,1169-1187).
gattcgtttgactggaaaa

SEQ ID NO: 665100 - DNA, 19 bp, Mus musculus
  siRNA target sequence for Dnaja3 (NM_023646.2,1213-1231).
gctatggtgaccactacat

SEQ ID NO: 665101 - DNA, 19 bp, Mus musculus
  siRNA target sequence for Dnaja3 (NM_023646.2,1218-1236).
ggtgaccactacattcaca

SEQ ID NO: 665102 - DNA, 19 bp, Mus musculus
  siRNA target sequence for Dnaja3 (NM_023646.2,1219-1237).
gtgaccactacattcacat

SEQ ID NO: 665103 - DNA, 19 bp, Mus musculus
  siRNA target sequence for Dnaja3 (NM_023646.2,1313-1331).
cgtggaggggacggttaat

SEQ ID NO: 665104 - DNA, 19 bp, Mus musculus
  siRNA target sequence for Dnaja3 (NM_023646.2,1353-1371).
ggtggcagaaccatggata

SEQ ID NO: 665105 - DNA, 19 bp, Mus musculus
  siRNA target sequence for Dnaja3 (NM_023646.2,1410-1428).
gacaatgagggattccttt

SEQ ID NO: 665106 - DNA, 19 bp, Mus musculus
  siRNA target sequence for Dnaja3 (NM_023646.2,1418-1436).
gggattcctttccaaactt

SEQ ID NO: 665107 - DNA, 19 bp, Mus musculus
  siRNA target sequence for Dnaja3 (NM_023646.2,1424-1442).
cctttccaaacttaagaaa

SEQ ID NO: 665108 - DNA, 19 bp, Mus musculus
  siRNA target sequence for Rhpn1 (NM_008164.1,89-107).
gctcctttgtgcaaaacca

SEQ ID NO: 665109 - DNA, 19 bp, Mus musculus
  siRNA target sequence for Rhpn1 (NM_008164.1,173-191).
ggaccggtgctgaaaacct

SEQ ID NO: 665110 - DNA, 19 bp, Mus musculus
  siRNA target sequence for Rhpn1 (NM_008164.1,212-230).
cctgggtccgagaaacagt

SEQ ID NO: 665111 - DNA, 19 bp, Mus musculus
  siRNA target sequence for Rhpn1 (NM_008164.1,322-340).
gagggcgaagggattacta

SEQ ID NO: 665112 - DNA, 19 bp, Mus musculus
  siRNA target sequence for Rhpn1 (NM_008164.1,324-342).
gggcgaagggattactatt

SEQ ID NO: 665113 - DNA, 19 bp, Mus musculus
  siRNA target sequence for Rhpn1 (NM_008164.1,430-448).
gatggtacctcctttgaga

SEQ ID NO: 665114 - DNA, 19 bp, Mus musculus
  siRNA target sequence for Rhpn1 (NM_008164.1,661-679).
ggcagtgtactgtttaaca

SEQ ID NO: 665115 - DNA, 19 bp, Mus musculus
  siRNA target sequence for Rhpn1 (NM_008164.1,963-981).
ccaggtggcaactgaatat

SEQ ID NO: 665116 - DNA, 19 bp, Mus musculus
  siRNA target sequence for Rhpn1 (NM_008164.1,1077-1095).
cgccctggcccactatcat

SEQ ID NO: 665117 - DNA, 19 bp, Mus musculus
  siRNA target sequence for Rhpn1 (NM_008164.1,1850-1868).
gctggagccgcaagaataa

SEQ ID NO: 665118 - DNA, 19 bp, Mus musculus
  siRNA target sequence for Rhpn1 (NM_008164.1,1853-1871).
ggagccgcaagaataaaca

SEQ ID NO: 665119 - DNA, 19 bp, Mus musculus
  siRNA target sequence for Rhpn1 (NM_008164.1,1854-1872).
gagccgcaagaataaacaa

SEQ ID NO: 665120 - DNA, 19 bp, Mus musculus
  siRNA target sequence for 3110043J09Rik (NM_028455.1,108-126).
gcacaagtcacccattcta

SEQ ID NO: 665121 - DNA, 19 bp, Mus musculus
  siRNA target sequence for 3110043J09Rik (NM_028455.1,109-127).
cacaagtcacccattctat

SEQ ID NO: 665122 - DNA, 19 bp, Mus musculus
  siRNA target sequence for 3110043J09Rik (NM_028455.1,111-129).
caagtcacccattctatga

SEQ ID NO: 665123 - DNA, 19 bp, Mus musculus
  siRNA target sequence for 3110043J09Rik (NM_028455.1,114-132).
gtcacccattctatgatgt

SEQ ID NO: 665124 - DNA, 19 bp, Mus musculus
  siRNA target sequence for 3110043J09Rik (NM_028455.1,278-296).
gtggagaacgactatacta

SEQ ID NO: 665125 - DNA, 19 bp, Mus musculus
  siRNA target sequence for 3110043J09Rik (NM_028455.1,289-307).
ctatactattgtctacttt

SEQ ID NO: 665126 - DNA, 19 bp, Mus musculus
  siRNA target sequence for 3110043J09Rik (NM_028455.1,294-312).
ctattgtctactttcacta

SEQ ID NO: 665127 - DNA, 19 bp, Mus musculus
  siRNA target sequence for 3110043J09Rik (NM_028455.1,459-477).
ccctcatcagtcacaagtt

SEQ ID NO: 665128 - DNA, 19 bp, Mus musculus
  siRNA target sequence for 3110043J09Rik (NM_028455.1,663-681).
gcgtcagcctgcaatacct

SEQ ID NO: 665129 - DNA, 19 bp, Mus musculus
  siRNA target sequence for 3110043J09Rik (NM_028455.1,721-739).
gcgttggacggtgacatat

SEQ ID NO: 665130 - DNA, 19 bp, Mus musculus
  siRNA target sequence for 3110043J09Rik (NM_028455.1,723-741).
gttggacggtgacatatct

SEQ ID NO: 665131 - DNA, 19 bp, Mus musculus
  siRNA target sequence for 3110043J09Rik (NM_028455.1,808-826).
ggtgcagcggctatatgat

SEQ ID NO: 665132 - DNA, 19 bp, Mus musculus
  siRNA target sequence for 3110043J09Rik (NM_028455.1,811-829).
gcagcggctatatgatcaa

SEQ ID NO: 665133 - DNA, 19 bp, Mus musculus
  siRNA target sequence for 3110043J09Rik (NM_028455.1,831-849).
ggaagcccgtgaactttga

SEQ ID NO: 665134 - DNA, 19 bp, Mus musculus
  siRNA target sequence for 3110043J09Rik (NM_028455.1,841-859).
gaactttgatgattatgga

SEQ ID NO: 665135 - DNA, 19 bp, Mus musculus
  siRNA target sequence for 3110043J09Rik (NM_028455.1,875-893).
gccgtgatcctgaagacat

SEQ ID NO: 665136 - DNA, 19 bp, Mus musculus
  siRNA target sequence for 3110043J09Rik (NM_028455.1,1008-1026).
gcctcccagaacacaacta

SEQ ID NO: 665137 - DNA, 19 bp, Mus musculus
  siRNA target sequence for 3110043J09Rik (NM_028455.1,1009-1027).
cctcccagaacacaactat

SEQ ID NO: 665138 - DNA, 19 bp, Mus musculus
  siRNA target sequence for 3110043J09Rik (NM_028455.1,1106-1124).
ctggcgtgcgtgtttggat

SEQ ID NO: 665139 - DNA, 19 bp, Mus musculus
  siRNA target sequence for 3110043J09Rik (NM_028455.1,1110-1128).
cgtgcgtgtttggattgaa

SEQ ID NO: 665140 - DNA, 19 bp, Mus musculus
  siRNA target sequence for 3110043J09Rik (NM_028455.1,1167-1185).
ccctggtacctctgaactt

SEQ ID NO: 665141 - DNA, 19 bp, Mus musculus
  siRNA target sequence for 3110043J09Rik (NM_028455.1,1169-1187).
ctggtacctctgaacttgt

SEQ ID NO: 665142 - DNA, 19 bp, Mus musculus
  siRNA target sequence for 3110043J09Rik (NM_028455.1,1191-1209).
cagagctgctgatagagta

SEQ ID NO: 665143 - DNA, 19 bp, Mus musculus
  siRNA target sequence for 3110043J09Rik (NM_028455.1,1279-1297).
ggctggccctgttaccaaa

SEQ ID NO: 665144 - DNA, 19 bp, Mus musculus
  siRNA target sequence for 3110043J09Rik (NM_028455.1,1283-1301).
ggccctgttaccaaagaat

SEQ ID NO: 665145 - DNA, 19 bp, Mus musculus
  siRNA target sequence for 3110043J09Rik (NM_028455.1,1286-1304).
cctgttaccaaagaattta

SEQ ID NO: 665146 - DNA, 19 bp, Mus musculus
  siRNA target sequence for 6230410J09Rik (NM_029522.1,378-396).
ggaagaccattcctttcat

SEQ ID NO: 665147 - DNA, 19 bp, Mus musculus
  siRNA target sequence for 6230410J09Rik (NM_029522.1,473-491).
gcgctggcgtgtcattttt

SEQ ID NO: 665148 - DNA, 19 bp, Mus musculus
  siRNA target sequence for 6230410J09Rik (NM_029522.1,515-533).
ctgaagacctcaaaacact

SEQ ID NO: 665149 - DNA, 19 bp, Mus musculus
  siRNA target sequence for 6230410J09Rik (NM_029522.1,525-543).
caaaacactcagtgctatt

SEQ ID NO: 665150 - DNA, 19 bp, Mus musculus
  siRNA target sequence for 6230410J09Rik (NM_029522.1,582-600).
ctacgccaaagcgttagaa

SEQ ID NO: 665151 - DNA, 19 bp, Mus musculus
  siRNA target sequence for 6230410J09Rik (NM_029522.1,587-605).
ccaaagcgttagaatacca

SEQ ID NO: 665152 - DNA, 19 bp, Mus musculus
  siRNA target sequence for 6230410J09Rik (NM_029522.1,603-621).
ccaccaccatgacttaact

SEQ ID NO: 665153 - DNA, 19 bp, Mus musculus
  siRNA target sequence for 6230410J09Rik (NM_029522.1,606-624).
ccaccatgacttaactctt

SEQ ID NO: 665154 - DNA, 19 bp, Mus musculus
  siRNA target sequence for 6230410J09Rik (NM_029522.1,642-660).
ccaacttggggaagctaaa

SEQ ID NO: 665155 - DNA, 19 bp, Mus musculus
  siRNA target sequence for 6230410J09Rik (NM_029522.1,690-708).
ggtgcttgggaattttgat

SEQ ID NO: 665156 - DNA, 19 bp, Mus musculus
  siRNA target sequence for 6230410J09Rik (NM_029522.1,693-711).
gcttgggaattttgatgaa

SEQ ID NO: 665157 - DNA, 19 bp, Mus musculus
  siRNA target sequence for 6230410J09Rik (NM_029522.1,746-764).
ccagagagcttaatgacaa

SEQ ID NO: 665158 - DNA, 19 bp, Mus musculus
  siRNA target sequence for 6230410J09Rik (NM_029522.1,776-794).
caagagcgctctacaatct

SEQ ID NO: 665159 - DNA, 19 bp, Mus musculus
  siRNA target sequence for 6230410J09Rik (NM_029522.1,783-801).
gctctacaatcttggaaat

SEQ ID NO: 665160 - DNA, 19 bp, Mus musculus
  siRNA target sequence for 6230410J09Rik (NM_029522.1,808-826).
cacgccaaagggaaaagct

SEQ ID NO: 665161 - DNA, 19 bp, Mus musculus
  siRNA target sequence for 6230410J09Rik (NM_029522.1,910-928).
gaaaacctgtccttagtaa

SEQ ID NO: 665162 - DNA, 19 bp, Mus musculus
  siRNA target sequence for 6230410J09Rik (NM_029522.1,1002-1020).
cttcagggatgcagttata

SEQ ID NO: 665163 - DNA, 19 bp, Mus musculus
  siRNA target sequence for 6230410J09Rik (NM_029522.1,1005-1023).
cagggatgcagttatagct

SEQ ID NO: 665164 - DNA, 19 bp, Mus musculus
  siRNA target sequence for 6230410J09Rik (NM_029522.1,1029-1047).
gcagcgtctcctaattgca

SEQ ID NO: 665165 - DNA, 19 bp, Mus musculus
  siRNA target sequence for 6230410J09Rik (NM_029522.1,1030-1048).
cagcgtctcctaattgcaa

SEQ ID NO: 665166 - DNA, 19 bp, Mus musculus
  siRNA target sequence for 6230410J09Rik (NM_029522.1,1130-1148).
ctgcttccgaatactacaa

SEQ ID NO: 665167 - DNA, 19 bp, Mus musculus
  siRNA target sequence for 6230410J09Rik (NM_029522.1,1132-1150).
gcttccgaatactacaaga

SEQ ID NO: 665168 - DNA, 19 bp, Mus musculus
  siRNA target sequence for 6230410J09Rik (NM_029522.1,1213-1231).
cttgggaatacatacactt

SEQ ID NO: 665169 - DNA, 19 bp, Mus musculus
  siRNA target sequence for 6230410J09Rik (NM_029522.1,1253-1271).
ccatcgattaccacctaaa

SEQ ID NO: 665170 - DNA, 19 bp, Mus musculus
  siRNA target sequence for 6230410J09Rik (NM_029522.1,1368-1386).
ccaagcaatgcattttgct

SEQ ID NO: 665171 - DNA, 19 bp, Mus musculus
  siRNA target sequence for 6230410J09Rik (NM_029522.1,1482-1500).
gagctacagcacaaataat

SEQ ID NO: 665172 - DNA, 19 bp, Mus musculus
  siRNA target sequence for 6230410J09Rik (NM_029522.1,1584-1602).
cttggaacttatgaagtta

SEQ ID NO: 665173 - DNA, 19 bp, Mus musculus
  siRNA target sequence for 6230410J09Rik (NM_029522.1,1587-1605).
ggaacttatgaagttaaca

SEQ ID NO: 665174 - DNA, 19 bp, Mus musculus
  siRNA target sequence for 6230410J09Rik (NM_029522.1,1609-1627).
gaaaaggtgccgaattgga

SEQ ID NO: 665175 - DNA, 19 bp, Mus musculus
  siRNA target sequence for 6230410J09Rik (NM_029522.1,1618-1636).
ccgaattggaacagtgaaa

SEQ ID NO: 665176 - DNA, 19 bp, Mus musculus
  siRNA target sequence for 6230410J09Rik (NM_029522.1,1619-1637).
cgaattggaacagtgaaat

SEQ ID NO: 665177 - DNA, 19 bp, Mus musculus
  siRNA target sequence for 6230410J09Rik (NM_029522.1,1620-1638).
gaattggaacagtgaaatt

SEQ ID NO: 665178 - DNA, 19 bp, Mus musculus
  siRNA target sequence for 6230410J09Rik (NM_029522.1,1631-1649).
gtgaaattctcgctaaaca

SEQ ID NO: 665179 - DNA, 19 bp, Mus musculus
  siRNA target sequence for 6230410J09Rik (NM_029522.1,1676-1694).
caaagctcctgtttgtcaa

SEQ ID NO: 665180 - DNA, 19 bp, Mus musculus
  siRNA target sequence for 6230410J09Rik (NM_029522.1,1697-1715).
gactgaagggcaaaaagta

SEQ ID NO: 665181 - DNA, 19 bp, Mus musculus
  siRNA target sequence for 6230410J09Rik (NM_029522.1,1778-1796).
cgccacgctcccagaagaa

SEQ ID NO: 665182 - DNA, 19 bp, Mus musculus
  siRNA target sequence for 6230410J09Rik (NM_029522.1,1781-1799).
cacgctcccagaagaaaat

SEQ ID NO: 665183 - DNA, 19 bp, Mus musculus
  siRNA target sequence for 6230410J09Rik (NM_029522.1,1891-1909).
ggaaactgtcgcacaacat

SEQ ID NO: 665184 - DNA, 19 bp, Mus musculus
  siRNA target sequence for 6230410J09Rik (NM_029522.1,1925-1943).
ctgctacccccaagttgat

SEQ ID NO: 665185 - DNA, 19 bp, Mus musculus
  siRNA target sequence for 6230410J09Rik (NM_029522.1,1927-1945).
gctacccccaagttgatga

SEQ ID NO: 665186 - DNA, 19 bp, Mus musculus
  siRNA target sequence for 6230410J09Rik (NM_029522.1,1928-1946).
ctacccccaagttgatgaa

SEQ ID NO: 665187 - DNA, 19 bp, Mus musculus
  siRNA target sequence for 6230410J09Rik (NM_029522.1,2029-2047).
gaccagagggccagtttca

SEQ ID NO: 665188 - DNA, 19 bp, Mus musculus
  siRNA target sequence for 6230410J09Rik (NM_029522.1,2032-2050).
cagagggccagtttcagta

SEQ ID NO: 665189 - DNA, 19 bp, Mus musculus
  siRNA target sequence for 6230410J09Rik (NM_029522.1,2034-2052).
gagggccagtttcagtaat

SEQ ID NO: 665190 - DNA, 19 bp, Mus musculus
  siRNA target sequence for 6230410J09Rik (NM_029522.1,2057-2075).
cagggctccgcctgacaaa

SEQ ID NO: 665191 - DNA, 19 bp, Mus musculus
  siRNA target sequence for 6230410J09Rik (NM_029522.1,2079-2097).
caacagtccatctgtactt

SEQ ID NO: 665192 - DNA, 19 bp, Mus musculus
  siRNA target sequence for 6230410J09Rik (NM_029522.1,2095-2113).
cttgagcgcctgatgacaa

SEQ ID NO: 665193 - DNA, 19 bp, Mus musculus
  siRNA target sequence for 6230410J09Rik (NM_029522.1,2101-2119).
cgcctgatgacaaatgaca

SEQ ID NO: 665194 - DNA, 19 bp, Mus musculus
  siRNA target sequence for 6230410J09Rik (NM_029522.1,2163-2181).
ccaggggtcaagattagat

SEQ ID NO: 665195 - DNA, 19 bp, Mus musculus
  siRNA target sequence for 6230410J09Rik (NM_029522.1,2166-2184).
ggggtcaagattagatgat

SEQ ID NO: 665196 - DNA, 19 bp, Mus musculus
  siRNA target sequence for 6230410J09Rik (NM_029522.1,2169-2187).
gtcaagattagatgatcaa

SEQ ID NO: 665197 - DNA, 19 bp, Mus musculus
  siRNA target sequence for 6230410J09Rik (NM_029522.1,2229-2247).
cccggatgaggacttcttt

SEQ ID NO: 665198 - DNA, 19 bp, Mus musculus
  siRNA target sequence for 6230410J09Rik (NM_029522.1,2230-2248).
ccggatgaggacttcttta

SEQ ID NO: 665199 - DNA, 19 bp, Mus musculus
  siRNA target sequence for 6230410J09Rik (NM_029522.1,2256-2274).
cttacgctctcaagctaaa

SEQ ID NO: 665200 - DNA, 19 bp, Mus musculus
  siRNA target sequence for 6230410J09Rik (NM_029522.1,2335-2353).
ctaaaggaacttttgcaaa

SEQ ID NO: 665201 - DNA, 19 bp, Mus musculus
  siRNA target sequence for 6230410J09Rik (NM_029522.1,2360-2378).
ctttgttggaatttaagca

SEQ ID NO: 665202 - DNA, 19 bp, Mus musculus
  siRNA target sequence for AA960287 (NM_134116.1,264-282).
cgaggccccaccaaaccta

SEQ ID NO: 665203 - DNA, 19 bp, Mus musculus
  siRNA target sequence for AA960287 (NM_134116.1,345-363).
ccagtgccagcggattgaa

SEQ ID NO: 665204 - DNA, 19 bp, Mus musculus
  siRNA target sequence for Arhgap6 (NM_009707.1,464-482).
ctcggttcccgcttagctt

SEQ ID NO: 665205 - DNA, 19 bp, Mus musculus
  siRNA target sequence for Arhgap6 (NM_009707.1,533-551).
cctctgtgctcgtcttttt

SEQ ID NO: 665206 - DNA, 19 bp, Mus musculus
  siRNA target sequence for Arhgap6 (NM_009707.1,536-554).
ctgtgctcgtctttttcca

SEQ ID NO: 665207 - DNA, 19 bp, Mus musculus
  siRNA target sequence for Arhgap6 (NM_009707.1,557-575).
ccaagtaccccgcaagaaa

SEQ ID NO: 665208 - DNA, 19 bp, Mus musculus
  siRNA target sequence for Arhgap6 (NM_009707.1,558-576).
caagtaccccgcaagaaaa

SEQ ID NO: 665209 - DNA, 19 bp, Mus musculus
  siRNA target sequence for Arhgap6 (NM_009707.1,588-606).
gcagcttccactttgacta

SEQ ID NO: 665210 - DNA, 19 bp, Mus musculus
  siRNA target sequence for Arhgap6 (NM_009707.1,784-802).
ccagcctccacctaacagt

SEQ ID NO: 665211 - DNA, 19 bp, Mus musculus
  siRNA target sequence for Arhgap6 (NM_009707.1,1034-1052).
gattcactagggaaggaaa

SEQ ID NO: 665212 - DNA, 19 bp, Mus musculus
  siRNA target sequence for Arhgap6 (NM_009707.1,1112-1130).
gctaatgaccgggcatata

SEQ ID NO: 665213 - DNA, 19 bp, Mus musculus
  siRNA target sequence for Arhgap6 (NM_009707.1,1113-1131).
ctaatgaccgggcatataa

SEQ ID NO: 665214 - DNA, 19 bp, Mus musculus
  siRNA target sequence for Arhgap6 (NM_009707.1,1118-1136).
gaccgggcatataaactga

SEQ ID NO: 665215 - DNA, 19 bp, Mus musculus
  siRNA target sequence for Arhgap6 (NM_009707.1,1169-1187).
gcatcatcggattttgtgt

SEQ ID NO: 665216 - DNA, 19 bp, Mus musculus
  siRNA target sequence for Arhgap6 (NM_009707.1,1226-1244).
gaactctcaagcagtaact

SEQ ID NO: 665217 - DNA, 19 bp, Mus musculus
  siRNA target sequence for Arhgap6 (NM_009707.1,1332-1350).
ccatgtccgtggattccat

SEQ ID NO: 665218 - DNA, 19 bp, Mus musculus
  siRNA target sequence for Arhgap6 (NM_009707.1,1547-1565).
cgagttggaagctcaaaga

SEQ ID NO: 665219 - DNA, 19 bp, Mus musculus
  siRNA target sequence for Arhgap6 (NM_009707.1,1575-1593).
gacaattgcgtgaagaatt

SEQ ID NO: 665220 - DNA, 19 bp, Mus musculus
  siRNA target sequence for Arhgap6 (NM_009707.1,1639-1657).
cgatgtggcagccttgtta

SEQ ID NO: 665221 - DNA, 19 bp, Mus musculus
  siRNA target sequence for Arhgap6 (NM_009707.1,1703-1721).
ctatacactgcatttatca

SEQ ID NO: 665222 - DNA, 19 bp, Mus musculus
  siRNA target sequence for Arhgap6 (NM_009707.1,1758-1776).
ccttgcaactcctcattta

SEQ ID NO: 665223 - DNA, 19 bp, Mus musculus
  siRNA target sequence for Arhgap6 (NM_009707.1,1840-1858).
caggcatgctgatgataat

SEQ ID NO: 665224 - DNA, 19 bp, Mus musculus
  siRNA target sequence for Arhgap6 (NM_009707.1,1996-2014).
ggagagcacagccatcata

SEQ ID NO: 665225 - DNA, 19 bp, Mus musculus
  siRNA target sequence for Arhgap6 (NM_009707.1,2067-2085).
cagatctccagaatgaagt

SEQ ID NO: 665226 - DNA, 19 bp, Mus musculus
  siRNA target sequence for Arhgap6 (NM_009707.1,2112-2130).
cagatgttgtggactactt

SEQ ID NO: 665227 - DNA, 19 bp, Mus musculus
  siRNA target sequence for Arhgap6 (NM_009707.1,2123-2141).
gactacttgctcagaagaa

SEQ ID NO: 665228 - DNA, 19 bp, Mus musculus
  siRNA target sequence for Arhgap6 (NM_009707.1,2155-2173).
ctcgagccctgacatactt

SEQ ID NO: 665229 - DNA, 19 bp, Mus musculus
  siRNA target sequence for Arhgap6 (NM_009707.1,2157-2175).
cgagccctgacatacttca

SEQ ID NO: 665230 - DNA, 19 bp, Mus musculus
  siRNA target sequence for Arhgap6 (NM_009707.1,2198-2216).
ggagggaggcattcatcta

SEQ ID NO: 665231 - DNA, 19 bp, Mus musculus
  siRNA target sequence for Arhgap6 (NM_009707.1,2241-2259).
gagacatctccccttatga

SEQ ID NO: 665232 - DNA, 19 bp, Mus musculus
  siRNA target sequence for Arhgap6 (NM_009707.1,2243-2261).
gacatctccccttatgaca

SEQ ID NO: 665233 - DNA, 19 bp, Mus musculus
  siRNA target sequence for Arhgap6 (NM_009707.1,2363-2381).
ctggtgggccacttgtcat

SEQ ID NO: 665234 - DNA, 19 bp, Mus musculus
  siRNA target sequence for Arhgap6 (NM_009707.1,2441-2459).
gaggagcctttcaatatct

SEQ ID NO: 665235 - DNA, 19 bp, Mus musculus
  siRNA target sequence for Arhgap6 (NM_009707.1,2462-2480).
ggaacttggcattcaacat

SEQ ID NO: 665236 - DNA, 19 bp, Mus musculus
  siRNA target sequence for Arhgap6 (NM_009707.1,2517-2535).
cttatggcgacatttttga

SEQ ID NO: 665237 - DNA, 19 bp, Mus musculus
  siRNA target sequence for Arhgap6 (NM_009707.1,2548-2566).
ccgaccgaggccttgttct

SEQ ID NO: 665238 - DNA, 19 bp, Mus musculus
  siRNA target sequence for Arhgap6 (NM_009707.1,2629-2647).
cagtggcactcaggtaatt

SEQ ID NO: 665239 - DNA, 19 bp, Mus musculus
  siRNA target sequence for Arhgap6 (NM_009707.1,2763-2781).
ccagctctgatccattttt

SEQ ID NO: 665240 - DNA, 19 bp, Mus musculus
  siRNA target sequence for Arhgap6 (NM_009707.1,3084-3102).
ccagcgagcaggacaaaca

SEQ ID NO: 665241 - DNA, 19 bp, Mus musculus
  siRNA target sequence for Arhgap6 (NM_009707.1,3091-3109).
gcaggacaaacagaactta

SEQ ID NO: 665242 - DNA, 19 bp, Mus musculus
  siRNA target sequence for AW060714 (NM_146084.1,511-529).
cctccccttccttgagtaa

SEQ ID NO: 665243 - DNA, 19 bp, Mus musculus
  siRNA target sequence for AW060714 (NM_146084.1,536-554).
ctccgatcttgctagcaaa

SEQ ID NO: 665244 - DNA, 19 bp, Mus musculus
  siRNA target sequence for AW060714 (NM_146084.1,538-556).
ccgatcttgctagcaaaat

SEQ ID NO: 665245 - DNA, 19 bp, Mus musculus
  siRNA target sequence for AW060714 (NM_146084.1,539-557).
cgatcttgctagcaaaata

SEQ ID NO: 665246 - DNA, 19 bp, Mus musculus
  siRNA target sequence for AW060714 (NM_146084.1,624-642).
cgccacgttgtggactata

SEQ ID NO: 665247 - DNA, 19 bp, Mus musculus
  siRNA target sequence for AW060714 (NM_146084.1,625-643).
gccacgttgtggactatat

SEQ ID NO: 665248 - DNA, 19 bp, Mus musculus
  siRNA target sequence for AW060714 (NM_146084.1,626-644).
ccacgttgtggactatatt

SEQ ID NO: 665249 - DNA, 19 bp, Mus musculus
  siRNA target sequence for AW060714 (NM_146084.1,767-785).
cgtcccctcagccattagt

SEQ ID NO: 665250 - DNA, 19 bp, Mus musculus
  siRNA target sequence for AW060714 (NM_146084.1,778-796).
ccattagtctccttaggtt

SEQ ID NO: 665251 - DNA, 19 bp, Mus musculus
  siRNA target sequence for AW060714 (NM_146084.1,779-797).
cattagtctccttaggttt

SEQ ID NO: 665252 - DNA, 19 bp, Mus musculus
  siRNA target sequence for AW060714 (NM_146084.1,831-849).
ggcagcttgcatattcact

SEQ ID NO: 665253 - DNA, 19 bp, Mus musculus
  siRNA target sequence for AW060714 (NM_146084.1,832-850).
gcagcttgcatattcactt

SEQ ID NO: 665254 - DNA, 19 bp, Mus musculus
  siRNA target sequence for AW060714 (NM_146084.1,851-869).
gctgcagctttctcaagat

SEQ ID NO: 665255 - DNA, 19 bp, Mus musculus
  siRNA target sequence for AW060714 (NM_146084.1,854-872).
gcagctttctcaagattat

SEQ ID NO: 665256 - DNA, 19 bp, Mus musculus
  siRNA target sequence for AW060714 (NM_146084.1,857-875).
gctttctcaagattataat

SEQ ID NO: 665257 - DNA, 19 bp, Mus musculus
  siRNA target sequence for AW060714 (NM_146084.1,918-936).
cagcttccacctgttaatt

SEQ ID NO: 665258 - DNA, 19 bp, Mus musculus
  siRNA target sequence for AW060714 (NM_146084.1,921-939).
cttccacctgttaattaca

SEQ ID NO: 665259 - DNA, 19 bp, Mus musculus
  siRNA target sequence for AW060714 (NM_146084.1,925-943).
cacctgttaattacagttt

SEQ ID NO: 665260 - DNA, 19 bp, Mus musculus
  siRNA target sequence for AW060714 (NM_146084.1,971-989).
caatgtagcatcacatcat

SEQ ID NO: 665261 - DNA, 19 bp, Mus musculus
  siRNA target sequence for AW060714 (NM_146084.1,993-1011).
gaaatttggtctgcaaatt

SEQ ID NO: 665262 - DNA, 19 bp, Mus musculus
  siRNA target sequence for AW060714 (NM_146084.1,1032-1050).
ccagatgtcttccacattt

SEQ ID NO: 665263 - DNA, 19 bp, Mus musculus
  siRNA target sequence for AW060714 (NM_146084.1,1033-1051).
cagatgtcttccacattta

SEQ ID NO: 665264 - DNA, 19 bp, Mus musculus
  siRNA target sequence for AW060714 (NM_146084.1,1094-1112).
gataatggcgggacttcta

SEQ ID NO: 665265 - DNA, 19 bp, Mus musculus
  siRNA target sequence for AW060714 (NM_146084.1,1100-1118).
ggcgggacttctagaaaat

SEQ ID NO: 665266 - DNA, 19 bp, Mus musculus
  siRNA target sequence for AW060714 (NM_146084.1,1105-1123).
gacttctagaaaattatta

SEQ ID NO: 665267 - DNA, 19 bp, Mus musculus
  siRNA target sequence for AW060714 (NM_146084.1,1113-1131).
gaaaattattacgagtttt

SEQ ID NO: 665268 - DNA, 19 bp, Mus musculus
  siRNA target sequence for AW060714 (NM_146084.1,1124-1142).
cgagttttttgagaatgaa

SEQ ID NO: 665269 - DNA, 19 bp, Mus musculus
  siRNA target sequence for AW060714 (NM_146084.1,1226-1244).
gctggagcatatagaagaa

SEQ ID NO: 665270 - DNA, 19 bp, Mus musculus
  siRNA target sequence for AW060714 (NM_146084.1,1229-1247).
ggagcatatagaagaactt

SEQ ID NO: 665271 - DNA, 19 bp, Mus musculus
  siRNA target sequence for AW060714 (NM_146084.1,1281-1299).
ccagaggtgctgcagttaa

SEQ ID NO: 665272 - DNA, 19 bp, Mus musculus
  siRNA target sequence for AW060714 (NM_146084.1,1284-1302).
gaggtgctgcagttaagga

SEQ ID NO: 665273 - DNA, 19 bp, Mus musculus
  siRNA target sequence for AW060714 (NM_146084.1,1319-1337).
ggactcagacagtgttaca

SEQ ID NO: 665274 - DNA, 19 bp, Mus musculus
  siRNA target sequence for AW060714 (NM_146084.1,1375-1393).
ctaatgccagtgatggtaa

SEQ ID NO: 665275 - DNA, 19 bp, Mus musculus
  siRNA target sequence for AW060714 (NM_146084.1,1389-1407).
ggtaacattaagtgttcaa

SEQ ID NO: 665276 - DNA, 19 bp, Mus musculus
  siRNA target sequence for AW060714 (NM_146084.1,1417-1435).
ctggtactactgcagataa

SEQ ID NO: 665277 - DNA, 19 bp, Mus musculus
  siRNA target sequence for AW060714 (NM_146084.1,1437-1455).
gaagtcatgcagcaagatt

SEQ ID NO: 665278 - DNA, 19 bp, Mus musculus
  siRNA target sequence for AW060714 (NM_146084.1,1482-1500).
gagtctgtaggtatactgt

SEQ ID NO: 665279 - DNA, 19 bp, Mus musculus
  siRNA target sequence for AW060714 (NM_146084.1,1484-1502).
gtctgtaggtatactgtta

SEQ ID NO: 665280 - DNA, 19 bp, Mus musculus
  siRNA target sequence for AW060714 (NM_146084.1,1486-1504).
ctgtaggtatactgttaga

SEQ ID NO: 665281 - DNA, 19 bp, Mus musculus
  siRNA target sequence for AW060714 (NM_146084.1,1513-1531).
gtgaccacggggatagtga

SEQ ID NO: 665282 - DNA, 19 bp, Mus musculus
  siRNA target sequence for AW060714 (NM_146084.1,1517-1535).
ccacggggatagtgaagat

SEQ ID NO: 665283 - DNA, 19 bp, Mus musculus
  siRNA target sequence for AW060714 (NM_146084.1,1540-1558).
gtcctgagaggaaggaata

SEQ ID NO: 665284 - DNA, 19 bp, Mus musculus
  siRNA target sequence for AW060714 (NM_146084.1,1589-1607).
cttgattctggattctagt

SEQ ID NO: 665285 - DNA, 19 bp, Mus musculus
  siRNA target sequence for AW060714 (NM_146084.1,1598-1616).
ggattctagtagcaagata

SEQ ID NO: 665286 - DNA, 19 bp, Mus musculus
  siRNA target sequence for AW060714 (NM_146084.1,1606-1624).
gtagcaagatacgtgattt

SEQ ID NO: 665287 - DNA, 19 bp, Mus musculus
  siRNA target sequence for AW060714 (NM_146084.1,1609-1627).
gcaagatacgtgatttgaa

SEQ ID NO: 665288 - DNA, 19 bp, Mus musculus
  siRNA target sequence for AW060714 (NM_146084.1,1610-1628).
caagatacgtgatttgaat

SEQ ID NO: 665289 - DNA, 19 bp, Mus musculus
  siRNA target sequence for AW060714 (NM_146084.1,1678-1696).
gagaagcagcgtgtataca

SEQ ID NO: 665290 - DNA, 19 bp, Mus musculus
  siRNA target sequence for AW060714 (NM_146084.1,1680-1698).
gaagcagcgtgtatacaga

SEQ ID NO: 665291 - DNA, 19 bp, Mus musculus
  siRNA target sequence for AW060714 (NM_146084.1,1746-1764).
gagccgtttcctgcattta

SEQ ID NO: 665292 - DNA, 19 bp, Mus musculus
  siRNA target sequence for AW060714 (NM_146084.1,1852-1870).
gccctccagtattatctca

SEQ ID NO: 665293 - DNA, 19 bp, Mus musculus
  siRNA target sequence for AW060714 (NM_146084.1,1853-1871).
ccctccagtattatctcat

SEQ ID NO: 665294 - DNA, 19 bp, Mus musculus
  siRNA target sequence for AW060714 (NM_146084.1,1894-1912).
gccaacgtttcctacatga

SEQ ID NO: 665295 - DNA, 19 bp, Mus musculus
  siRNA target sequence for AW060714 (NM_146084.1,1895-1913).
ccaacgtttcctacatgat

SEQ ID NO: 665296 - DNA, 19 bp, Mus musculus
  siRNA target sequence for AW060714 (NM_146084.1,1911-1929).
gatccagaagcgttggatt

SEQ ID NO: 665297 - DNA, 19 bp, Mus musculus
  siRNA target sequence for AW060714 (NM_146084.1,1933-1951).
cgtcaaaggcactttcctt

SEQ ID NO: 665298 - DNA, 19 bp, Mus musculus
  siRNA target sequence for AW060714 (NM_146084.1,1941-1959).
gcactttccttcactagaa

SEQ ID NO: 665299 - DNA, 19 bp, Mus musculus
  siRNA target sequence for AW060714 (NM_146084.1,1966-1984).
ggtcatccttcagttcaaa

SEQ ID NO: 665300 - DNA, 19 bp, Mus musculus
  siRNA target sequence for AW060714 (NM_146084.1,2001-2019).
gacagaacaccatatcagt

SEQ ID NO: 665301 - DNA, 19 bp, Mus musculus
  siRNA target sequence for AW060714 (NM_146084.1,2109-2127).
gccaatccgaaggtattaa

SEQ ID NO: 665302 - DNA, 19 bp, Mus musculus
  siRNA target sequence for AW060714 (NM_146084.1,2110-2128).
ccaatccgaaggtattaaa

SEQ ID NO: 665303 - DNA, 19 bp, Mus musculus
  siRNA target sequence for AW060714 (NM_146084.1,2111-2129).
caatccgaaggtattaaaa

SEQ ID NO: 665304 - DNA, 19 bp, Mus musculus
  siRNA target sequence for AW060714 (NM_146084.1,2115-2133).
ccgaaggtattaaaatgga

SEQ ID NO: 665305 - DNA, 19 bp, Mus musculus
  siRNA target sequence for AW060714 (NM_146084.1,2116-2134).
cgaaggtattaaaatggat

SEQ ID NO: 665306 - DNA, 19 bp, Mus musculus
  siRNA target sequence for AW060714 (NM_146084.1,2131-2149).
ggatgacagagcttacgaa

SEQ ID NO: 665307 - DNA, 19 bp, Mus musculus
  siRNA target sequence for AW060714 (NM_146084.1,2132-2150).
gatgacagagcttacgaaa

SEQ ID NO: 665308 - DNA, 19 bp, Mus musculus
  siRNA target sequence for AW060714 (NM_146084.1,2146-2164).
cgaaattgcggaagcaaat

SEQ ID NO: 665309 - DNA, 19 bp, Mus musculus
  siRNA target sequence for AW060714 (NM_146084.1,2147-2165).
gaaattgcggaagcaaatt

SEQ ID NO: 665310 - DNA, 19 bp, Mus musculus
  siRNA target sequence for AW060714 (NM_146084.1,2153-2171).
gcggaagcaaattaaagat

SEQ ID NO: 665311 - DNA, 19 bp, Mus musculus
  siRNA target sequence for AW060714 (NM_146084.1,2328-2346).
gcaactcttgagctgatta

SEQ ID NO: 665312 - DNA, 19 bp, Mus musculus
  siRNA target sequence for AW060714 (NM_146084.1,2332-2350).
ctcttgagctgattaccaa

SEQ ID NO: 665313 - DNA, 19 bp, Mus musculus
  siRNA target sequence for AW060714 (NM_146084.1,2405-2423).
gacaaaagatcatttgata

SEQ ID NO: 665314 - DNA, 19 bp, Mus musculus
  siRNA target sequence for AW060714 (NM_146084.1,2442-2460).
cagaaaagtctgctttact

SEQ ID NO: 665315 - DNA, 19 bp, Mus musculus
  siRNA target sequence for AW060714 (NM_146084.1,2504-2522).
cattgttaagcctctctat

SEQ ID NO: 665316 - DNA, 19 bp, Mus musculus
  siRNA target sequence for AW060714 (NM_146084.1,2508-2526).
gttaagcctctctatgata

SEQ ID NO: 665317 - DNA, 19 bp, Mus musculus
  siRNA target sequence for AW060714 (NM_146084.1,2612-2630).
gttacagccaatcatagaa

SEQ ID NO: 665318 - DNA, 19 bp, Mus musculus
  siRNA target sequence for AW060714 (NM_146084.1,2733-2751).
cagtcgtccttggaaaact

SEQ ID NO: 665319 - DNA, 19 bp, Mus musculus
  siRNA target sequence for AW060714 (NM_146084.1,2744-2762).
ggaaaacttagaatctgat

SEQ ID NO: 665320 - DNA, 19 bp, Mus musculus
  siRNA target sequence for AW060714 (NM_146084.1,2787-2805).
gctcgggatctctgcttat

SEQ ID NO: 665321 - DNA, 19 bp, Mus musculus
  siRNA target sequence for AW060714 (NM_146084.1,2832-2850).
gaattactggaacaacttt

SEQ ID NO: 665322 - DNA, 19 bp, Mus musculus
  siRNA target sequence for AW060714 (NM_146084.1,2885-2903).
gatgctacgggagtttgaa

SEQ ID NO: 665323 - DNA, 19 bp, Mus musculus
  siRNA target sequence for AW060714 (NM_146084.1,2897-2915).
gtttgaagaagcgttctat

SEQ ID NO: 665324 - DNA, 19 bp, Mus musculus
  siRNA target sequence for AW060714 (NM_146084.1,2990-3008).
caaagccaagcttagactt

SEQ ID NO: 665325 - DNA, 19 bp, Mus musculus
  siRNA target sequence for AW060714 (NM_146084.1,2995-3013).
ccaagcttagacttcttga

SEQ ID NO: 665326 - DNA, 19 bp, Mus musculus
  siRNA target sequence for Gdi1 (NM_010273.1,177-195).
caggtcttaccgaatgcat

SEQ ID NO: 665327 - DNA, 19 bp, Mus musculus
  siRNA target sequence for Gdi1 (NM_010273.1,241-259).
ggaccgaaacccctactat

SEQ ID NO: 665328 - DNA, 19 bp, Mus musculus
  siRNA target sequence for Gdi1 (NM_010273.1,284-302).
cccctggaggagctatata

SEQ ID NO: 665329 - DNA, 19 bp, Mus musculus
  siRNA target sequence for Gdi1 (NM_010273.1,296-314).
ctatataagcgctttcaga

SEQ ID NO: 665330 - DNA, 19 bp, Mus musculus
  siRNA target sequence for Gdi1 (NM_010273.1,401-419).
ctggtaaagatgctactat

SEQ ID NO: 665331 - DNA, 19 bp, Mus musculus
  siRNA target sequence for Gdi1 (NM_010273.1,409-427).
gatgctactatatacagaa

SEQ ID NO: 665332 - DNA, 19 bp, Mus musculus
  siRNA target sequence for Gdi1 (NM_010273.1,519-537).
ccttggcttctaatctgat

SEQ ID NO: 665333 - DNA, 19 bp, Mus musculus
  siRNA target sequence for Gdi1 (NM_010273.1,538-556).
gggcatgtttgaaaaacga

SEQ ID NO: 665334 - DNA, 19 bp, Mus musculus
  siRNA target sequence for Gdi1 (NM_010273.1,554-572).
cgacgcttccgaaaatttt

SEQ ID NO: 665335 - DNA, 19 bp, Mus musculus
  siRNA target sequence for Gdi1 (NM_010273.1,555-573).
gacgcttccgaaaattttt

SEQ ID NO: 665336 - DNA, 19 bp, Mus musculus
  siRNA target sequence for Gdi1 (NM_010273.1,558-576).
gcttccgaaaatttttggt

SEQ ID NO: 665337 - DNA, 19 bp, Mus musculus
  siRNA target sequence for Gdi1 (NM_010273.1,583-601).
ggcaaactttgatgagaat

SEQ ID NO: 665338 - DNA, 19 bp, Mus musculus
  siRNA target sequence for Gdi1 (NM_010273.1,639-657).
ccagcatgcgtgatgtcta

SEQ ID NO: 665339 - DNA, 19 bp, Mus musculus
  siRNA target sequence for Gdi1 (NM_010273.1,743-761).
ccctgtcttgagactatta

SEQ ID NO: 665340 - DNA, 19 bp, Mus musculus
  siRNA target sequence for Gdi1 (NM_010273.1,744-762).
cctgtcttgagactattaa

SEQ ID NO: 665341 - DNA, 19 bp, Mus musculus
  siRNA target sequence for Gdi1 (NM_010273.1,756-774).
ctattaaccgcatcaagtt

SEQ ID NO: 665342 - DNA, 19 bp, Mus musculus
  siRNA target sequence for Gdi1 (NM_010273.1,801-819).
gcaagagcccctatttata

SEQ ID NO: 665343 - DNA, 19 bp, Mus musculus
  siRNA target sequence for Gdi1 (NM_010273.1,811-829).
ctatttatacccactgtat

SEQ ID NO: 665344 - DNA, 19 bp, Mus musculus
  siRNA target sequence for Gdi1 (NM_010273.1,859-877).
cagattgagtgccatctat

SEQ ID NO: 665345 - DNA, 19 bp, Mus musculus
  siRNA target sequence for Gdi1 (NM_010273.1,931-949).
caaggtggtgggtgtcaaa

SEQ ID NO: 665346 - DNA, 19 bp, Mus musculus
  siRNA target sequence for Gdi1 (NM_010273.1,934-952).
ggtggtgggtgtcaaatct

SEQ ID NO: 665347 - DNA, 19 bp, Mus musculus
  siRNA target sequence for Gdi1 (NM_010273.1,1028-1046).
caggttattcgcatcatct

SEQ ID NO: 665348 - DNA, 19 bp, Mus musculus
  siRNA target sequence for Gdi1 (NM_010273.1,1031-1049).
gttattcgcatcatctgta

SEQ ID NO: 665349 - DNA, 19 bp, Mus musculus
  siRNA target sequence for Gdi2 (NM_008111.1,377-395).
gttcttcacatggatagaa

SEQ ID NO: 665350 - DNA, 19 bp, Mus musculus
  siRNA target sequence for Gdi2 (NM_008111.1,388-406).
ggatagaaacccgtattat

SEQ ID NO: 665351 - DNA, 19 bp, Mus musculus
  siRNA target sequence for Gdi2 (NM_008111.1,679-697).
cctaatggggctgtttgaa

SEQ ID NO: 665352 - DNA, 19 bp, Mus musculus
  siRNA target sequence for Gdi2 (NM_008111.1,680-698).
ctaatggggctgtttgaaa

SEQ ID NO: 665353 - DNA, 19 bp, Mus musculus
  siRNA target sequence for Gdi2 (NM_008111.1,685-703).
ggggctgtttgaaaaacgt

SEQ ID NO: 665354 - DNA, 19 bp, Mus musculus
  siRNA target sequence for Gdi2 (NM_008111.1,711-729).
gaaaattcctggtatatgt

SEQ ID NO: 665355 - DNA, 19 bp, Mus musculus
  siRNA target sequence for Gdi2 (NM_008111.1,745-763).
gaacgatcctcgaactttt

SEQ ID NO: 665356 - DNA, 19 bp, Mus musculus
  siRNA target sequence for Gdi2 (NM_008111.1,793-811).
gcgagaggtgtataagaaa

SEQ ID NO: 665357 - DNA, 19 bp, Mus musculus
  siRNA target sequence for Gdi2 (NM_008111.1,794-812).
cgagaggtgtataagaaat

SEQ ID NO: 665358 - DNA, 19 bp, Mus musculus
  siRNA target sequence for Gdi2 (NM_008111.1,946-964).
cggcaaaagcccatacctt

SEQ ID NO: 665359 - DNA, 19 bp, Mus musculus
  siRNA target sequence for Gdi2 (NM_008111.1,1148-1166).
gtgaaagatcgagtagaaa

SEQ ID NO: 665360 - DNA, 19 bp, Mus musculus
  siRNA target sequence for Gdi2 (NM_008111.1,1389-1407).
gaccagccctggagctttt

SEQ ID NO: 665361 - DNA, 19 bp, Mus musculus
  siRNA target sequence for Gdi2 (NM_008111.1,1483-1501).
ctttatatcccgtacctat

SEQ ID NO: 665362 - DNA, 19 bp, Mus musculus
  siRNA target sequence for Gdi2 (NM_008111.1,1535-1553).
gacattaaggacatctata

SEQ ID NO: 665363 - DNA, 19 bp, Mus musculus
  siRNA target sequence for Nf1 (NM_010897.1,159-177).
cgacgagcagcttccaata

SEQ ID NO: 665364 - DNA, 19 bp, Mus musculus
  siRNA target sequence for Nf1 (NM_010897.1,160-178).
gacgagcagcttccaataa

SEQ ID NO: 665365 - DNA, 19 bp, Mus musculus
  siRNA target sequence for Nf1 (NM_010897.1,233-251).
gtctgatcaacatttccaa

SEQ ID NO: 665366 - DNA, 19 bp, Mus musculus
  siRNA target sequence for Nf1 (NM_010897.1,235-253).
ctgatcaacatttccaaat

SEQ ID NO: 665367 - DNA, 19 bp, Mus musculus
  siRNA target sequence for Nf1 (NM_010897.1,287-305).
ccatcctaaagaatgttaa

SEQ ID NO: 665368 - DNA, 19 bp, Mus musculus
  siRNA target sequence for Nf1 (NM_010897.1,301-319).
gttaacaatatgaggatat

SEQ ID NO: 665369 - DNA, 19 bp, Mus musculus
  siRNA target sequence for Nf1 (NM_010897.1,355-373).
cagttgatcatattggata

SEQ ID NO: 665370 - DNA, 19 bp, Mus musculus
  siRNA target sequence for Nf1 (NM_010897.1,386-404).
gtcttgctgggcaaccaaa

SEQ ID NO: 665371 - DNA, 19 bp, Mus musculus
  siRNA target sequence for Nf1 (NM_010897.1,401-419).
caaaggacacaatgagatt

SEQ ID NO: 665372 - DNA, 19 bp, Mus musculus
  siRNA target sequence for Nf1 (NM_010897.1,405-423).
ggacacaatgagattagat

SEQ ID NO: 665373 - DNA, 19 bp, Mus musculus
  siRNA target sequence for Nf1 (NM_010897.1,477-495).
ctgccgtgaaggaaaccaa

SEQ ID NO: 665374 - DNA, 19 bp, Mus musculus
  siRNA target sequence for Nf1 (NM_010897.1,543-561).
cagctgcaacaacttcaat

SEQ ID NO: 665375 - DNA, 19 bp, Mus musculus
  siRNA target sequence for Nf1 (NM_010897.1,555-573).
cttcaatgcagtctttagt

SEQ ID NO: 665376 - DNA, 19 bp, Mus musculus
  siRNA target sequence for Nf1 (NM_010897.1,567-585).
ctttagtcgcatttctaca

SEQ ID NO: 665377 - DNA, 19 bp, Mus musculus
  siRNA target sequence for Nf1 (NM_010897.1,625-643).
gatgttcacgatatagaat

SEQ ID NO: 665378 - DNA, 19 bp, Mus musculus
  siRNA target sequence for Nf1 (NM_010897.1,628-646).
gttcacgatatagaattgt

SEQ ID NO: 665379 - DNA, 19 bp, Mus musculus
  siRNA target sequence for Nf1 (NM_010897.1,661-679).
gtggattgtgcaaaattaa

SEQ ID NO: 665380 - DNA, 19 bp, Mus musculus
  siRNA target sequence for Nf1 (NM_010897.1,771-789).
gaactgggtagaaaattat

SEQ ID NO: 665381 - DNA, 19 bp, Mus musculus
  siRNA target sequence for Nf1 (NM_010897.1,844-862).
gcagagaagctgtttgact

SEQ ID NO: 665382 - DNA, 19 bp, Mus musculus
  siRNA target sequence for Nf1 (NM_010897.1,901-919).
gcagtgtggcccctacaaa

SEQ ID NO: 665383 - DNA, 19 bp, Mus musculus
  siRNA target sequence for Nf1 (NM_010897.1,902-920).
cagtgtggcccctacaaat

SEQ ID NO: 665384 - DNA, 19 bp, Mus musculus
  siRNA target sequence for Nf1 (NM_010897.1,906-924).
gtggcccctacaaatcatt

SEQ ID NO: 665385 - DNA, 19 bp, Mus musculus
  siRNA target sequence for Nf1 (NM_010897.1,908-926).
ggcccctacaaatcattct

SEQ ID NO: 665386 - DNA, 19 bp, Mus musculus
  siRNA target sequence for Nf1 (NM_010897.1,916-934).
caaatcattctccttatct

SEQ ID NO: 665387 - DNA, 19 bp, Mus musculus
  siRNA target sequence for Nf1 (NM_010897.1,972-990).
ggtggacgagagcaacata

SEQ ID NO: 665388 - DNA, 19 bp, Mus musculus
  siRNA target sequence for Nf1 (NM_010897.1,973-991).
gtggacgagagcaacataa

SEQ ID NO: 665389 - DNA, 19 bp, Mus musculus
  siRNA target sequence for Nf1 (NM_010897.1,976-994).
gacgagagcaacataaaca

SEQ ID NO: 665390 - DNA, 19 bp, Mus musculus
  siRNA target sequence for Nf1 (NM_010897.1,1096-1114).
gcaagtacttacatcaact

SEQ ID NO: 665391 - DNA, 19 bp, Mus musculus
  siRNA target sequence for Nf1 (NM_010897.1,1149-1167).
gtccatggtagttgatctt

SEQ ID NO: 665392 - DNA, 19 bp, Mus musculus
  siRNA target sequence for Nf1 (NM_010897.1,1151-1169).
ccatggtagttgatcttaa

SEQ ID NO: 665393 - DNA, 19 bp, Mus musculus
  siRNA target sequence for Nf1 (NM_010897.1,1273-1291).
cacaacaaccaacacttta

SEQ ID NO: 665394 - DNA, 19 bp, Mus musculus
  siRNA target sequence for Nf1 (NM_010897.1,1327-1345).
cactatgtgttggtaaact

SEQ ID NO: 665395 - DNA, 19 bp, Mus musculus
  siRNA target sequence for Nf1 (NM_010897.1,1329-1347).
ctatgtgttggtaaactca

SEQ ID NO: 665396 - DNA, 19 bp, Mus musculus
  siRNA target sequence for Nf1 (NM_010897.1,1353-1371).
ccgcatcatcaccaattct

SEQ ID NO: 665397 - DNA, 19 bp, Mus musculus
  siRNA target sequence for Nf1 (NM_010897.1,1377-1395).
ggattggtggcctaagatt

SEQ ID NO: 665398 - DNA, 19 bp, Mus musculus
  siRNA target sequence for Nf1 (NM_010897.1,1388-1406).
ctaagattgatgctgtata

SEQ ID NO: 665399 - DNA, 19 bp, Mus musculus
  siRNA target sequence for Nf1 (NM_010897.1,1415-1433).
cagttgaacttcgcaatat

SEQ ID NO: 665400 - DNA, 19 bp, Mus musculus
  siRNA target sequence for Nf1 (NM_010897.1,1417-1435).
gttgaacttcgcaatatgt

SEQ ID NO: 665401 - DNA, 19 bp, Mus musculus
  siRNA target sequence for Nf1 (NM_010897.1,1474-1492).
gcgcacccagcaatacgaa

SEQ ID NO: 665402 - DNA, 19 bp, Mus musculus
  siRNA target sequence for Nf1 (NM_010897.1,1475-1493).
cgcacccagcaatacgaat

SEQ ID NO: 665403 - DNA, 19 bp, Mus musculus
  siRNA target sequence for Nf1 (NM_010897.1,1495-1513).
gcaccaagtctcaccttta

SEQ ID NO: 665404 - DNA, 19 bp, Mus musculus
  siRNA target sequence for Nf1 (NM_010897.1,1496-1514).
caccaagtctcacctttaa

SEQ ID NO: 665405 - DNA, 19 bp, Mus musculus
  siRNA target sequence for Nf1 (NM_010897.1,1521-1539).
ggtaacaagccttaaattt

SEQ ID NO: 665406 - DNA, 19 bp, Mus musculus
  siRNA target sequence for Nf1 (NM_010897.1,1522-1540).
gtaacaagccttaaattta

SEQ ID NO: 665407 - DNA, 19 bp, Mus musculus
  siRNA target sequence for Nf1 (NM_010897.1,1563-1581).
gacaaggagctacaaatgt

SEQ ID NO: 665408 - DNA, 19 bp, Mus musculus
  siRNA target sequence for Nf1 (NM_010897.1,1590-1608).
gtccatggtgaaactgatt

SEQ ID NO: 665409 - DNA, 19 bp, Mus musculus
  siRNA target sequence for Nf1 (NM_010897.1,1592-1610).
ccatggtgaaactgattca

SEQ ID NO: 665410 - DNA, 19 bp, Mus musculus
  siRNA target sequence for Nf1 (NM_010897.1,1613-1631).
cagacccaaagcttttgct

SEQ ID NO: 665411 - DNA, 19 bp, Mus musculus
  siRNA target sequence for Nf1 (NM_010897.1,1623-1641).
gcttttgctttgtaatcca

SEQ ID NO: 665412 - DNA, 19 bp, Mus musculus
  siRNA target sequence for Nf1 (NM_010897.1,1668-1686).
cagtacagcagaactaatt

SEQ ID NO: 665413 - DNA, 19 bp, Mus musculus
  siRNA target sequence for Nf1 (NM_010897.1,1755-1773).
gctggtccttcatcagtta

SEQ ID NO: 665414 - DNA, 19 bp, Mus musculus
  siRNA target sequence for Nf1 (NM_010897.1,1801-1819).
gctcctgtagagacattct

SEQ ID NO: 665415 - DNA, 19 bp, Mus musculus
  siRNA target sequence for Nf1 (NM_010897.1,1829-1847).
gctcacaaatgctttttta

SEQ ID NO: 665416 - DNA, 19 bp, Mus musculus
  siRNA target sequence for Nf1 (NM_010897.1,1848-1866).
catctgcaagaaattaact

SEQ ID NO: 665417 - DNA, 19 bp, Mus musculus
  siRNA target sequence for Nf1 (NM_010897.1,1904-1922).
ggttacgggaaattctgat

SEQ ID NO: 665418 - DNA, 19 bp, Mus musculus
  siRNA target sequence for Nf1 (NM_010897.1,2028-2046).
cactcagatgtcagttgat

SEQ ID NO: 665419 - DNA, 19 bp, Mus musculus
  siRNA target sequence for Nf1 (NM_010897.1,2034-2052).
gatgtcagttgatcatgat

SEQ ID NO: 665420 - DNA, 19 bp, Mus musculus
  siRNA target sequence for Nf1 (NM_010897.1,2080-2098).
gcatctctgcggaaaggaa

SEQ ID NO: 665421 - DNA, 19 bp, Mus musculus
  siRNA target sequence for Nf1 (NM_010897.1,2173-2191).
ctagaagtggccttataca

SEQ ID NO: 665422 - DNA, 19 bp, Mus musculus
  siRNA target sequence for Nf1 (NM_010897.1,2290-2308).
gtgtcagtacacaacttct

SEQ ID NO: 665423 - DNA, 19 bp, Mus musculus
  siRNA target sequence for Nf1 (NM_010897.1,2418-2436).
ccctactgcaggaaacatt

SEQ ID NO: 665424 - DNA, 19 bp, Mus musculus
  siRNA target sequence for Nf1 (NM_010897.1,2420-2438).
ctactgcaggaaacattga

SEQ ID NO: 665425 - DNA, 19 bp, Mus musculus
  siRNA target sequence for Nf1 (NM_010897.1,2463-2481).
gtgggaacaggctacaaaa

SEQ ID NO: 665426 - DNA, 19 bp, Mus musculus
  siRNA target sequence for Nf1 (NM_010897.1,2465-2483).
gggaacaggctacaaaact

SEQ ID NO: 665427 - DNA, 19 bp, Mus musculus
  siRNA target sequence for Nf1 (NM_010897.1,2466-2484).
ggaacaggctacaaaacta

SEQ ID NO: 665428 - DNA, 19 bp, Mus musculus
  siRNA target sequence for Nf1 (NM_010897.1,2467-2485).
gaacaggctacaaaactaa

SEQ ID NO: 665429 - DNA, 19 bp, Mus musculus
  siRNA target sequence for Nf1 (NM_010897.1,2472-2490).
ggctacaaaactaatcctt

SEQ ID NO: 665430 - DNA, 19 bp, Mus musculus
  siRNA target sequence for Nf1 (NM_010897.1,2473-2491).
gctacaaaactaatcctta

SEQ ID NO: 665431 - DNA, 19 bp, Mus musculus
  siRNA target sequence for Nf1 (NM_010897.1,2474-2492).
ctacaaaactaatccttaa

SEQ ID NO: 665432 - DNA, 19 bp, Mus musculus
  siRNA target sequence for Nf1 (NM_010897.1,2536-2554).
cttcataagaccattgtta

SEQ ID NO: 665433 - DNA, 19 bp, Mus musculus
  siRNA target sequence for Nf1 (NM_010897.1,2579-2597).
gaggaggctccatagactt

SEQ ID NO: 665434 - DNA, 19 bp, Mus musculus
  siRNA target sequence for Nf1 (NM_010897.1,2728-2746).
gaacgcaaagggtctatga

SEQ ID NO: 665435 - DNA, 19 bp, Mus musculus
  siRNA target sequence for Nf1 (NM_010897.1,2731-2749).
cgcaaagggtctatgattt

SEQ ID NO: 665436 - DNA, 19 bp, Mus musculus
  siRNA target sequence for Nf1 (NM_010897.1,2733-2751).
caaagggtctatgatttct

SEQ ID NO: 665437 - DNA, 19 bp, Mus musculus
  siRNA target sequence for Nf1 (NM_010897.1,2738-2756).
ggtctatgatttctgtaat

SEQ ID NO: 665438 - DNA, 19 bp, Mus musculus
  siRNA target sequence for Nf1 (NM_010897.1,2783-2801).
ctgtcagcagatttatgga

SEQ ID NO: 665439 - DNA, 19 bp, Mus musculus
  siRNA target sequence for Nf1 (NM_010897.1,2800-2818).
gaccggcttctgtccttaa

SEQ ID NO: 665440 - DNA, 19 bp, Mus musculus
  siRNA target sequence for Nf1 (NM_010897.1,2804-2822).
ggcttctgtccttaatggt

SEQ ID NO: 665441 - DNA, 19 bp, Mus musculus
  siRNA target sequence for Nf1 (NM_010897.1,2835-2853).
gaaagtggggcttcagata

SEQ ID NO: 665442 - DNA, 19 bp, Mus musculus
  siRNA target sequence for Nf1 (NM_010897.1,2848-2866).
cagatacggaccaatgtta

SEQ ID NO: 665443 - DNA, 19 bp, Mus musculus
  siRNA target sequence for Nf1 (NM_010897.1,2886-2904).
gttgagtcctgctctgtat

SEQ ID NO: 665444 - DNA, 19 bp, Mus musculus
  siRNA target sequence for Nf1 (NM_010897.1,2956-2974).
caaggacaggtattactaa

SEQ ID NO: 665445 - DNA, 19 bp, Mus musculus
  siRNA target sequence for Nf1 (NM_010897.1,2960-2978).
gacaggtattactaagtga

SEQ ID NO: 665446 - DNA, 19 bp, Mus musculus
  siRNA target sequence for Nf1 (NM_010897.1,2979-2997).
cagcaatactcagtttgta

SEQ ID NO: 665447 - DNA, 19 bp, Mus musculus
  siRNA target sequence for Nf1 (NM_010897.1,2981-2999).
gcaatactcagtttgtaga

SEQ ID NO: 665448 - DNA, 19 bp, Mus musculus
  siRNA target sequence for Nf1 (NM_010897.1,3024-3042).
cctactggataatcatact

SEQ ID NO: 665449 - DNA, 19 bp, Mus musculus
  siRNA target sequence for Nf1 (NM_010897.1,3064-3082).
ggacaagcgagcattgaga

SEQ ID NO: 665450 - DNA, 19 bp, Mus musculus
  siRNA target sequence for Nf1 (NM_010897.1,3070-3088).
gcgagcattgagacaatga

SEQ ID NO: 665451 - DNA, 19 bp, Mus musculus
  siRNA target sequence for Nf1 (NM_010897.1,3071-3089).
cgagcattgagacaatgat

SEQ ID NO: 665452 - DNA, 19 bp, Mus musculus
  siRNA target sequence for Nf1 (NM_010897.1,3102-3120).
cagatacgttcgtgttctt

SEQ ID NO: 665453 - DNA, 19 bp, Mus musculus
  siRNA target sequence for Nf1 (NM_010897.1,3113-3131).
gtgttcttgggaatatggt

SEQ ID NO: 665454 - DNA, 19 bp, Mus musculus
  siRNA target sequence for Nf1 (NM_010897.1,3122-3140).
ggaatatggtccatgcaat

SEQ ID NO: 665455 - DNA, 19 bp, Mus musculus
  siRNA target sequence for Nf1 (NM_010897.1,3123-3141).
gaatatggtccatgcaata

SEQ ID NO: 665456 - DNA, 19 bp, Mus musculus
  siRNA target sequence for Nf1 (NM_010897.1,3129-3147).
ggtccatgcaatacaaata

SEQ ID NO: 665457 - DNA, 19 bp, Mus musculus
  siRNA target sequence for Nf1 (NM_010897.1,3130-3148).
gtccatgcaatacaaataa

SEQ ID NO: 665458 - DNA, 19 bp, Mus musculus
  siRNA target sequence for Nf1 (NM_010897.1,3132-3150).
ccatgcaatacaaataaaa

SEQ ID NO: 665459 - DNA, 19 bp, Mus musculus
  siRNA target sequence for Nf1 (NM_010897.1,3227-3245).
ggaataagatggtagaata

SEQ ID NO: 665460 - DNA, 19 bp, Mus musculus
  siRNA target sequence for Nf1 (NM_010897.1,3234-3252).
gatggtagaatatctaaca

SEQ ID NO: 665461 - DNA, 19 bp, Mus musculus
  siRNA target sequence for Nf1 (NM_010897.1,3257-3275).
gggttatgggaacatcaaa

SEQ ID NO: 665462 - DNA, 19 bp, Mus musculus
  siRNA target sequence for Nf1 (NM_010897.1,3423-3441).
ccttaagtacttcacatta

SEQ ID NO: 665463 - DNA, 19 bp, Mus musculus
  siRNA target sequence for Nf1 (NM_010897.1,3424-3442).
cttaagtacttcacattat

SEQ ID NO: 665464 - DNA, 19 bp, Mus musculus
  siRNA target sequence for Nf1 (NM_010897.1,3462-3480).
ctgtagtgaagttgaagat

SEQ ID NO: 665465 - DNA, 19 bp, Mus musculus
  siRNA target sequence for Nf1 (NM_010897.1,3548-3566).
cagtgcttgcaatgtcaaa

SEQ ID NO: 665466 - DNA, 19 bp, Mus musculus
  siRNA target sequence for Nf1 (NM_010897.1,3550-3568).
gtgcttgcaatgtcaaact

SEQ ID NO: 665467 - DNA, 19 bp, Mus musculus
  siRNA target sequence for Nf1 (NM_010897.1,3552-3570).
gcttgcaatgtcaaactta

SEQ ID NO: 665468 - DNA, 19 bp, Mus musculus
  siRNA target sequence for Nf1 (NM_010897.1,3563-3581).
caaacttactcaatgctaa

SEQ ID NO: 665469 - DNA, 19 bp, Mus musculus
  siRNA target sequence for Nf1 (NM_010897.1,3603-3621).
ctccataggcttaggttat

SEQ ID NO: 665470 - DNA, 19 bp, Mus musculus
  siRNA target sequence for Nf1 (NM_010897.1,3605-3623).
ccataggcttaggttatca

SEQ ID NO: 665471 - DNA, 19 bp, Mus musculus
  siRNA target sequence for Nf1 (NM_010897.1,3644-3662).
ctacgtttatggaagttct

SEQ ID NO: 665472 - DNA, 19 bp, Mus musculus
  siRNA target sequence for Nf1 (NM_010897.1,3679-3697).
caaggaacagaattcgata

SEQ ID NO: 665473 - DNA, 19 bp, Mus musculus
  siRNA target sequence for Nf1 (NM_010897.1,3683-3701).
gaacagaattcgatacact

SEQ ID NO: 665474 - DNA, 19 bp, Mus musculus
  siRNA target sequence for Nf1 (NM_010897.1,3711-3729).
ggtgttggcagatcgattt

SEQ ID NO: 665475 - DNA, 19 bp, Mus musculus
  siRNA target sequence for Nf1 (NM_010897.1,3739-3757).
gtggaactggtcacaatga

SEQ ID NO: 665476 - DNA, 19 bp, Mus musculus
  siRNA target sequence for Nf1 (NM_010897.1,3837-3855).
ggttctggtcactctgttt

SEQ ID NO: 665477 - DNA, 19 bp, Mus musculus
  siRNA target sequence for Nf1 (NM_010897.1,3856-3874).
gattcccggcatttactct

SEQ ID NO: 665478 - DNA, 19 bp, Mus musculus
  siRNA target sequence for Nf1 (NM_010897.1,3882-3900).
gctctggaacatgttttct

SEQ ID NO: 665479 - DNA, 19 bp, Mus musculus
  siRNA target sequence for Nf1 (NM_010897.1,3948-3966).
cagcttggccagtaagata

SEQ ID NO: 665480 - DNA, 19 bp, Mus musculus
  siRNA target sequence for Nf1 (NM_010897.1,3991-4009).
ggtgctacttacctacaaa

SEQ ID NO: 665481 - DNA, 19 bp, Mus musculus
  siRNA target sequence for Nf1 (NM_010897.1,3995-4013).
ctacttacctacaaaagct

SEQ ID NO: 665482 - DNA, 19 bp, Mus musculus
  siRNA target sequence for Nf1 (NM_010897.1,4011-4029).
gctcttggaccctttatta

SEQ ID NO: 665483 - DNA, 19 bp, Mus musculus
  siRNA target sequence for Nf1 (NM_010897.1,4014-4032).
cttggaccctttattacga

SEQ ID NO: 665484 - DNA, 19 bp, Mus musculus
  siRNA target sequence for Nf1 (NM_010897.1,4046-4064).
cttcggattggcaacatgt

SEQ ID NO: 665485 - DNA, 19 bp, Mus musculus
  siRNA target sequence for Nf1 (NM_010897.1,4077-4095).
ggatcctaccaggttagaa

SEQ ID NO: 665486 - DNA, 19 bp, Mus musculus
  siRNA target sequence for Nf1 (NM_010897.1,4232-4250).
gccactccctactgaataa

SEQ ID NO: 665487 - DNA, 19 bp, Mus musculus
  siRNA target sequence for Nf1 (NM_010897.1,4233-4251).
ccactccctactgaataaa

SEQ ID NO: 665488 - DNA, 19 bp, Mus musculus
  siRNA target sequence for Nf1 (NM_010897.1,4243-4261).
ctgaataaagctacagtaa

SEQ ID NO: 665489 - DNA, 19 bp, Mus musculus
  siRNA target sequence for Nf1 (NM_010897.1,4326-4344).
cgtaggaagtgccatgttt

SEQ ID NO: 665490 - DNA, 19 bp, Mus musculus
  siRNA target sequence for Nf1 (NM_010897.1,4334-4352).
gtgccatgtttctcagatt

SEQ ID NO: 665491 - DNA, 19 bp, Mus musculus
  siRNA target sequence for Nf1 (NM_010897.1,4381-4399).
gaagcagggattttagata

SEQ ID NO: 665492 - DNA, 19 bp, Mus musculus
  siRNA target sequence for Nf1 (NM_010897.1,4384-4402).
gcagggattttagataaaa

SEQ ID NO: 665493 - DNA, 19 bp, Mus musculus
  siRNA target sequence for Nf1 (NM_010897.1,4385-4403).
cagggattttagataaaaa

SEQ ID NO: 665494 - DNA, 19 bp, Mus musculus
  siRNA target sequence for Nf1 (NM_010897.1,4405-4423).
ccaccacctagaattgaaa

SEQ ID NO: 665495 - DNA, 19 bp, Mus musculus
  siRNA target sequence for Nf1 (NM_010897.1,4431-4449).
gaagttaatgtcaaaggta

SEQ ID NO: 665496 - DNA, 19 bp, Mus musculus
  siRNA target sequence for Nf1 (NM_010897.1,4455-4473).
gagcattgccaatcatgta

SEQ ID NO: 665497 - DNA, 19 bp, Mus musculus
  siRNA target sequence for Nf1 (NM_010897.1,4499-4517).
gaccttttaatgattttgt

SEQ ID NO: 665498 - DNA, 19 bp, Mus musculus
  siRNA target sequence for Nf1 (NM_010897.1,4540-4558).
cgaaggtttttcctagata

SEQ ID NO: 665499 - DNA, 19 bp, Mus musculus
  siRNA target sequence for Nf1 (NM_010897.1,4551-4569).
cctagatatagcatcagat

SEQ ID NO: 665500 - DNA, 19 bp, Mus musculus
  siRNA target sequence for Nf1 (NM_010897.1,4552-4570).
ctagatatagcatcagatt

SEQ ID NO: 665501 - DNA, 19 bp, Mus musculus
  siRNA target sequence for Nf1 (NM_010897.1,4574-4592).
ccacaagtgatgcagtaaa

SEQ ID NO: 665502 - DNA, 19 bp, Mus musculus
  siRNA target sequence for Nf1 (NM_010897.1,4577-4595).
caagtgatgcagtaaacca

SEQ ID NO: 665503 - DNA, 19 bp, Mus musculus
  siRNA target sequence for Nf1 (NM_010897.1,4620-4638).
caatgtgcttgctttacat

SEQ ID NO: 665504 - DNA, 19 bp, Mus musculus
  siRNA target sequence for Nf1 (NM_010897.1,4767-4785).
caagcctgtggcagataca

SEQ ID NO: 665505 - DNA, 19 bp, Mus musculus
  siRNA target sequence for Nf1 (NM_010897.1,4866-4884).
caaggccttgaaaacgtta

SEQ ID NO: 665506 - DNA, 19 bp, Mus musculus
  siRNA target sequence for Nf1 (NM_010897.1,4870-4888).
gccttgaaaacgttaagca

SEQ ID NO: 665507 - DNA, 19 bp, Mus musculus
  siRNA target sequence for Nf1 (NM_010897.1,4871-4889).
ccttgaaaacgttaagcat

SEQ ID NO: 665508 - DNA, 19 bp, Mus musculus
  siRNA target sequence for Nf1 (NM_010897.1,4910-4928).
ccaaagctgggaatcctat

SEQ ID NO: 665509 - DNA, 19 bp, Mus musculus
  siRNA target sequence for Nf1 (NM_010897.1,4911-4929).
caaagctgggaatcctatt

SEQ ID NO: 665510 - DNA, 19 bp, Mus musculus
  siRNA target sequence for Nf1 (NM_010897.1,4919-4937).
ggaatcctattttttatta

SEQ ID NO: 665511 - DNA, 19 bp, Mus musculus
  siRNA target sequence for Nf1 (NM_010897.1,4920-4938).
gaatcctattttttattat

SEQ ID NO: 665512 - DNA, 19 bp, Mus musculus
  siRNA target sequence for Nf1 (NM_010897.1,4939-4957).
gttgcacggaggttcaaaa

SEQ ID NO: 665513 - DNA, 19 bp, Mus musculus
  siRNA target sequence for Nf1 (NM_010897.1,4953-4971).
caaaactggccagatcaat

SEQ ID NO: 665514 - DNA, 19 bp, Mus musculus
  siRNA target sequence for Nf1 (NM_010897.1,4990-5008).
catgtcttgctgactttaa

SEQ ID NO: 665515 - DNA, 19 bp, Mus musculus
  siRNA target sequence for Nf1 (NM_010897.1,5001-5019).
gactttaaagccatattat

SEQ ID NO: 665516 - DNA, 19 bp, Mus musculus
  siRNA target sequence for Nf1 (NM_010897.1,5052-5070).
ccatactgggcctagcaat

SEQ ID NO: 665517 - DNA, 19 bp, Mus musculus
  siRNA target sequence for Nf1 (NM_010897.1,5060-5078).
ggcctagcaatcgctttaa

SEQ ID NO: 665518 - DNA, 19 bp, Mus musculus
  siRNA target sequence for Nf1 (NM_010897.1,5061-5079).
gcctagcaatcgctttaaa

SEQ ID NO: 665519 - DNA, 19 bp, Mus musculus
  siRNA target sequence for Nf1 (NM_010897.1,5066-5084).
gcaatcgctttaaaacaga

SEQ ID NO: 665520 - DNA, 19 bp, Mus musculus
  siRNA target sequence for Nf1 (NM_010897.1,5088-5106).
cctctctaagtggtttgtt

SEQ ID NO: 665521 - DNA, 19 bp, Mus musculus
  siRNA target sequence for Nf1 (NM_010897.1,5130-5148).
caacgtctctgcagtctat

SEQ ID NO: 665522 - DNA, 19 bp, Mus musculus
  siRNA target sequence for Nf1 (NM_010897.1,5138-5156).
ctgcagtctatatctataa

SEQ ID NO: 665523 - DNA, 19 bp, Mus musculus
  siRNA target sequence for Nf1 (NM_010897.1,5140-5158).
gcagtctatatctataact

SEQ ID NO: 665524 - DNA, 19 bp, Mus musculus
  siRNA target sequence for Nf1 (NM_010897.1,5168-5186).
gggtcagggagtataccaa

SEQ ID NO: 665525 - DNA, 19 bp, Mus musculus
  siRNA target sequence for Nf1 (NM_010897.1,5169-5187).
ggtcagggagtataccaaa

SEQ ID NO: 665526 - DNA, 19 bp, Mus musculus
  siRNA target sequence for Nf1 (NM_010897.1,5174-5192).
gggagtataccaaatacca

SEQ ID NO: 665527 - DNA, 19 bp, Mus musculus
  siRNA target sequence for Nf1 (NM_010897.1,5175-5193).
ggagtataccaaataccat

SEQ ID NO: 665528 - DNA, 19 bp, Mus musculus
  siRNA target sequence for Nf1 (NM_010897.1,5307-5325).
ggctttggaagaagatcta

SEQ ID NO: 665529 - DNA, 19 bp, Mus musculus
  siRNA target sequence for Nf1 (NM_010897.1,5361-5379).
ggacaccaaagtttctatt

SEQ ID NO: 665530 - DNA, 19 bp, Mus musculus
  siRNA target sequence for Nf1 (NM_010897.1,5362-5380).
gacaccaaagtttctatta

SEQ ID NO: 665531 - DNA, 19 bp, Mus musculus
  siRNA target sequence for Nf1 (NM_010897.1,5366-5384).
ccaaagtttctattaaggt

SEQ ID NO: 665532 - DNA, 19 bp, Mus musculus
  siRNA target sequence for Nf1 (NM_010897.1,5433-5451).
ggggcaatccgtcttttta

SEQ ID NO: 665533 - DNA, 19 bp, Mus musculus
  siRNA target sequence for Nf1 (NM_010897.1,5434-5452).
gggcaatccgtctttttaa

SEQ ID NO: 665534 - DNA, 19 bp, Mus musculus
  siRNA target sequence for Nf1 (NM_010897.1,5435-5453).
ggcaatccgtctttttaaa

SEQ ID NO: 665535 - DNA, 19 bp, Mus musculus
  siRNA target sequence for Nf1 (NM_010897.1,5436-5454).
gcaatccgtctttttaaat

SEQ ID NO: 665536 - DNA, 19 bp, Mus musculus
  siRNA target sequence for Nf1 (NM_010897.1,5441-5459).
ccgtctttttaaatgatat

SEQ ID NO: 665537 - DNA, 19 bp, Mus musculus
  siRNA target sequence for Nf1 (NM_010897.1,5442-5460).
cgtctttttaaatgatatt

SEQ ID NO: 665538 - DNA, 19 bp, Mus musculus
  siRNA target sequence for Nf1 (NM_010897.1,5500-5518).
gagaaccagttcactctaa

SEQ ID NO: 665539 - DNA, 19 bp, Mus musculus
  siRNA target sequence for Nf1 (NM_010897.1,5505-5523).
ccagttcactctaaccatt

SEQ ID NO: 665540 - DNA, 19 bp, Mus musculus
  siRNA target sequence for Nf1 (NM_010897.1,5570-5588).
ccattgttcagtctatcat

SEQ ID NO: 665541 - DNA, 19 bp, Mus musculus
  siRNA target sequence for Nf1 (NM_010897.1,5571-5589).
cattgttcagtctatcatt

SEQ ID NO: 665542 - DNA, 19 bp, Mus musculus
  siRNA target sequence for Nf1 (NM_010897.1,5578-5596).
cagtctatcattcatatca

SEQ ID NO: 665543 - DNA, 19 bp, Mus musculus
  siRNA target sequence for Nf1 (NM_010897.1,5631-5649).
ccctcagcataccaagatt

SEQ ID NO: 665544 - DNA, 19 bp, Mus musculus
  siRNA target sequence for Nf1 (NM_010897.1,5643-5661).
caagattcgaccaaaggat

SEQ ID NO: 665545 - DNA, 19 bp, Mus musculus
  siRNA target sequence for Nf1 (NM_010897.1,5677-5695).
cttaatattgcgttactga

SEQ ID NO: 665546 - DNA, 19 bp, Mus musculus
  siRNA target sequence for Nf1 (NM_010897.1,5703-5721).
cagttcagaccctagttta

SEQ ID NO: 665547 - DNA, 19 bp, Mus musculus
  siRNA target sequence for Nf1 (NM_010897.1,5723-5741).
ggtctgctgcctataatct

SEQ ID NO: 665548 - DNA, 19 bp, Mus musculus
  siRNA target sequence for Nf1 (NM_010897.1,5751-5769).
cttaacctgcacctttaat

SEQ ID NO: 665549 - DNA, 19 bp, Mus musculus
  siRNA target sequence for Nf1 (NM_010897.1,5794-5812).
gagacatcggggttatgca

SEQ ID NO: 665550 - DNA, 19 bp, Mus musculus
  siRNA target sequence for Nf1 (NM_010897.1,5875-5893).
cacctcaccttagagtttt

SEQ ID NO: 665551 - DNA, 19 bp, Mus musculus
  siRNA target sequence for Nf1 (NM_010897.1,5911-5929).
ggatttagcaaatctagta

SEQ ID NO: 665552 - DNA, 19 bp, Mus musculus
  siRNA target sequence for Nf1 (NM_010897.1,5912-5930).
gatttagcaaatctagtat

SEQ ID NO: 665553 - DNA, 19 bp, Mus musculus
  siRNA target sequence for Nf1 (NM_010897.1,5940-5958).
gcacctttgtttggaatat

SEQ ID NO: 665554 - DNA, 19 bp, Mus musculus
  siRNA target sequence for Nf1 (NM_010897.1,5966-5984).
catggctgtcaaatctagt

SEQ ID NO: 665555 - DNA, 19 bp, Mus musculus
  siRNA target sequence for Nf1 (NM_010897.1,6025-6043).
gttactgccatccttgata

SEQ ID NO: 665556 - DNA, 19 bp, Mus musculus
  siRNA target sequence for Nf1 (NM_010897.1,6029-6047).
ctgccatccttgataagct

SEQ ID NO: 665557 - DNA, 19 bp, Mus musculus
  siRNA target sequence for Nf1 (NM_010897.1,6031-6049).
gccatccttgataagctaa

SEQ ID NO: 665558 - DNA, 19 bp, Mus musculus
  siRNA target sequence for Nf1 (NM_010897.1,6032-6050).
ccatccttgataagctaat

SEQ ID NO: 665559 - DNA, 19 bp, Mus musculus
  siRNA target sequence for Nf1 (NM_010897.1,6033-6051).
catccttgataagctaata

SEQ ID NO: 665560 - DNA, 19 bp, Mus musculus
  siRNA target sequence for Nf1 (NM_010897.1,6036-6054).
ccttgataagctaataaca

SEQ ID NO: 665561 - DNA, 19 bp, Mus musculus
  siRNA target sequence for Nf1 (NM_010897.1,6082-6100).
ccttctattcaagcaaaaa

SEQ ID NO: 665562 - DNA, 19 bp, Mus musculus
  siRNA target sequence for Nf1 (NM_010897.1,6139-6157).
gttgtgcttgacagtttca

SEQ ID NO: 665563 - DNA, 19 bp, Mus musculus
  siRNA target sequence for Nf1 (NM_010897.1,6142-6160).
gtgcttgacagtttcatca

SEQ ID NO: 665564 - DNA, 19 bp, Mus musculus
  siRNA target sequence for Nf1 (NM_010897.1,6233-6251).
ctggaaatgtgaaattggt

SEQ ID NO: 665565 - DNA, 19 bp, Mus musculus
  siRNA target sequence for Nf1 (NM_010897.1,6249-6267).
ggtgtcgagtaaggttatt

SEQ ID NO: 665566 - DNA, 19 bp, Mus musculus
  siRNA target sequence for Nf1 (NM_010897.1,6269-6287).
gaaggatgtgtaaaataat

SEQ ID NO: 665567 - DNA, 19 bp, Mus musculus
  siRNA target sequence for Nf1 (NM_010897.1,6338-6356).
gggacgacattgccatttt

SEQ ID NO: 665568 - DNA, 19 bp, Mus musculus
  siRNA target sequence for Nf1 (NM_010897.1,6339-6357).
ggacgacattgccatttta

SEQ ID NO: 665569 - DNA, 19 bp, Mus musculus
  siRNA target sequence for Nf1 (NM_010897.1,6406-6424).
gctcatctgccctatctct

SEQ ID NO: 665570 - DNA, 19 bp, Mus musculus
  siRNA target sequence for Nf1 (NM_010897.1,6426-6444).
ccatgttgtcactttctta

SEQ ID NO: 665571 - DNA, 19 bp, Mus musculus
  siRNA target sequence for Nf1 (NM_010897.1,6479-6497).
cacatgggctgctcatcaa

SEQ ID NO: 665572 - DNA, 19 bp, Mus musculus
  siRNA target sequence for Nf1 (NM_010897.1,6490-6508).
ctcatcaatatcattcact

SEQ ID NO: 665573 - DNA, 19 bp, Mus musculus
  siRNA target sequence for Nf1 (NM_010897.1,6579-6597).
gttctcgttacccaaattt

SEQ ID NO: 665574 - DNA, 19 bp, Mus musculus
  siRNA target sequence for Nf1 (NM_010897.1,6584-6602).
cgttacccaaattttactt

SEQ ID NO: 665575 - DNA, 19 bp, Mus musculus
  siRNA target sequence for Nf1 (NM_010897.1,6585-6603).
gttacccaaattttactta

SEQ ID NO: 665576 - DNA, 19 bp, Mus musculus
  siRNA target sequence for Nf1 (NM_010897.1,6756-6774).
ggcatgtatgagagatatt

SEQ ID NO: 665577 - DNA, 19 bp, Mus musculus
  siRNA target sequence for Nf1 (NM_010897.1,6792-6810).
ggatcagtggacagaacta

SEQ ID NO: 665578 - DNA, 19 bp, Mus musculus
  siRNA target sequence for Nf1 (NM_010897.1,6803-6821).
cagaactagctcaaagatt

SEQ ID NO: 665579 - DNA, 19 bp, Mus musculus
  siRNA target sequence for Nf1 (NM_010897.1,6814-6832).
caaagatttgcgtttcagt

SEQ ID NO: 665580 - DNA, 19 bp, Mus musculus
  siRNA target sequence for Nf1 (NM_010897.1,6899-6917).
ggcagataaagcagattat

SEQ ID NO: 665581 - DNA, 19 bp, Mus musculus
  siRNA target sequence for Nf1 (NM_010897.1,6909-6927).
gcagattatccgaattctt

SEQ ID NO: 665582 - DNA, 19 bp, Mus musculus
  siRNA target sequence for Nf1 (NM_010897.1,6910-6928).
cagattatccgaattctta

SEQ ID NO: 665583 - DNA, 19 bp, Mus musculus
  siRNA target sequence for Nf1 (NM_010897.1,6963-6981).
cacttacaacagtcaagtt

SEQ ID NO: 665584 - DNA, 19 bp, Mus musculus
  siRNA target sequence for Nf1 (NM_010897.1,6972-6990).
cagtcaagttctgatagaa

SEQ ID NO: 665585 - DNA, 19 bp, Mus musculus
  siRNA target sequence for Nf1 (NM_010897.1,6995-7013).
cggtgatagcactaacaaa

SEQ ID NO: 665586 - DNA, 19 bp, Mus musculus
  siRNA target sequence for Nf1 (NM_010897.1,6996-7014).
ggtgatagcactaacaaaa

SEQ ID NO: 665587 - DNA, 19 bp, Mus musculus
  siRNA target sequence for Nf1 (NM_010897.1,6999-7017).
gatagcactaacaaaatta

SEQ ID NO: 665588 - DNA, 19 bp, Mus musculus
  siRNA target sequence for Nf1 (NM_010897.1,7087-7105).
ctggacgaagtcaacttgt

SEQ ID NO: 665589 - DNA, 19 bp, Mus musculus
  siRNA target sequence for Nf1 (NM_010897.1,7089-7107).
ggacgaagtcaacttgtat

SEQ ID NO: 665590 - DNA, 19 bp, Mus musculus
  siRNA target sequence for Nf1 (NM_010897.1,7090-7108).
gacgaagtcaacttgtatt

SEQ ID NO: 665591 - DNA, 19 bp, Mus musculus
  siRNA target sequence for Nf1 (NM_010897.1,7150-7168).
gacagtctccggatattca

SEQ ID NO: 665592 - DNA, 19 bp, Mus musculus
  siRNA target sequence for Nf1 (NM_010897.1,7152-7170).
cagtctccggatattcaat

SEQ ID NO: 665593 - DNA, 19 bp, Mus musculus
  siRNA target sequence for Nf1 (NM_010897.1,7154-7172).
gtctccggatattcaatga

SEQ ID NO: 665594 - DNA, 19 bp, Mus musculus
  siRNA target sequence for Nf1 (NM_010897.1,7156-7174).
ctccggatattcaatgaca

SEQ ID NO: 665595 - DNA, 19 bp, Mus musculus
  siRNA target sequence for Nf1 (NM_010897.1,7282-7300).
ctagttggacacctcttaa

SEQ ID NO: 665596 - DNA, 19 bp, Mus musculus
  siRNA target sequence for Nf1 (NM_010897.1,7358-7376).
cactactaactctcgttaa

SEQ ID NO: 665597 - DNA, 19 bp, Mus musculus
  siRNA target sequence for Nf1 (NM_010897.1,7360-7378).
ctactaactctcgttaaca

SEQ ID NO: 665598 - DNA, 19 bp, Mus musculus
  siRNA target sequence for Nf1 (NM_010897.1,7412-7430).
cacagagtgtggcttactt

SEQ ID NO: 665599 - DNA, 19 bp, Mus musculus
  siRNA target sequence for Nf1 (NM_010897.1,7468-7486).
cgctgtagcctcaagcata

SEQ ID NO: 665600 - DNA, 19 bp, Mus musculus
  siRNA target sequence for Nf1 (NM_010897.1,7498-7516).
cttcttactgatatttcaa

SEQ ID NO: 665601 - DNA, 19 bp, Mus musculus
  siRNA target sequence for Nf1 (NM_010897.1,7514-7532).
caatggaaaatgttcctat

SEQ ID NO: 665602 - DNA, 19 bp, Mus musculus
  siRNA target sequence for Nf1 (NM_010897.1,7533-7551).
ggatacatatcccattcat

SEQ ID NO: 665603 - DNA, 19 bp, Mus musculus
  siRNA target sequence for Nf1 (NM_010897.1,7552-7570).
cacggtgaccccagctata

SEQ ID NO: 665604 - DNA, 19 bp, Mus musculus
  siRNA target sequence for Nf1 (NM_010897.1,7555-7573).
ggtgaccccagctatagga

SEQ ID NO: 665605 - DNA, 19 bp, Mus musculus
  siRNA target sequence for Nf1 (NM_010897.1,7561-7579).
cccagctataggacactaa

SEQ ID NO: 665606 - DNA, 19 bp, Mus musculus
  siRNA target sequence for Nf1 (NM_010897.1,7562-7580).
ccagctataggacactaaa

SEQ ID NO: 665607 - DNA, 19 bp, Mus musculus
  siRNA target sequence for Nf1 (NM_010897.1,7565-7583).
gctataggacactaaagga

SEQ ID NO: 665608 - DNA, 19 bp, Mus musculus
  siRNA target sequence for Nf1 (NM_010897.1,7660-7678).
ccccgagccaggaaatcca

SEQ ID NO: 665609 - DNA, 19 bp, Mus musculus
  siRNA target sequence for Nf1 (NM_010897.1,7661-7679).
cccgagccaggaaatccat

SEQ ID NO: 665610 - DNA, 19 bp, Mus musculus
  siRNA target sequence for Nf1 (NM_010897.1,7733-7751).
caagaaaaagttttgatca

SEQ ID NO: 665611 - DNA, 19 bp, Mus musculus
  siRNA target sequence for Nf1 (NM_010897.1,7791-7809).
ggaatcagggattacaaca

SEQ ID NO: 665612 - DNA, 19 bp, Mus musculus
  siRNA target sequence for Nf1 (NM_010897.1,7874-7892).
cgcagcagcacccacattt

SEQ ID NO: 665613 - DNA, 19 bp, Mus musculus
  siRNA target sequence for Nf1 (NM_010897.1,7885-7903).
ccacatttacggaaagtct

SEQ ID NO: 665614 - DNA, 19 bp, Mus musculus
  siRNA target sequence for Nf1 (NM_010897.1,7908-7926).
ctctgaatcaaatgttctt

SEQ ID NO: 665615 - DNA, 19 bp, Mus musculus
  siRNA target sequence for Nf1 (NM_010897.1,7983-8001).
ggctacactggtaaaatat

SEQ ID NO: 665616 - DNA, 19 bp, Mus musculus
  siRNA target sequence for Nf1 (NM_010897.1,7984-8002).
gctacactggtaaaatata

SEQ ID NO: 665617 - DNA, 19 bp, Mus musculus
  siRNA target sequence for Nf1 (NM_010897.1,7992-8010).
ggtaaaatatactacagat

SEQ ID NO: 665618 - DNA, 19 bp, Mus musculus
  siRNA target sequence for Nf1 (NM_010897.1,8024-8042).
ggattctttatgaatatct

SEQ ID NO: 665619 - DNA, 19 bp, Mus musculus
  siRNA target sequence for Nf1 (NM_010897.1,8109-8127).
caataccctcttgtcttta

SEQ ID NO: 665620 - DNA, 19 bp, Mus musculus
  siRNA target sequence for Nf1 (NM_010897.1,8130-8148).
ccaagatccaaatttgtta

SEQ ID NO: 665621 - DNA, 19 bp, Mus musculus
  siRNA target sequence for Nf1 (NM_010897.1,8131-8149).
caagatccaaatttgttaa

SEQ ID NO: 665622 - DNA, 19 bp, Mus musculus
  siRNA target sequence for Nf1 (NM_010897.1,8153-8171).
caatccatggaattgtaca

SEQ ID NO: 665623 - DNA, 19 bp, Mus musculus
  siRNA target sequence for Nf1 (NM_010897.1,8201-8219).
cacagtaccagacatctta

SEQ ID NO: 665624 - DNA, 19 bp, Mus musculus
  siRNA target sequence for Nf1 (NM_010897.1,8253-8271).
gtttgcaggacccttttca

SEQ ID NO: 665625 - DNA, 19 bp, Mus musculus
  siRNA target sequence for Nf1 (NM_010897.1,8260-8278).
ggacccttttcaaagcaaa

SEQ ID NO: 665626 - DNA, 19 bp, Mus musculus
  siRNA target sequence for Nf1 (NM_010897.1,8334-8352).
cacgtacttgcctggaatt

SEQ ID NO: 665627 - DNA, 19 bp, Mus musculus
  siRNA target sequence for Nf1 (NM_010897.1,8336-8354).
cgtacttgcctggaattga

SEQ ID NO: 665628 - DNA, 19 bp, Mus musculus
  siRNA target sequence for Nf1 (NM_010897.1,8426-8444).
gtatcactgccaaccttaa

SEQ ID NO: 665629 - DNA, 19 bp, Mus musculus
  siRNA target sequence for Nf1 (NM_010897.1,8435-8453).
ccaaccttaacctctctaa

SEQ ID NO: 665630 - DNA, 19 bp, Mus musculus
  siRNA target sequence for Nf1 (NM_010897.1,8436-8454).
caaccttaacctctctaat

SEQ ID NO: 665631 - DNA, 19 bp, Mus musculus
  siRNA target sequence for Nf1 (NM_010897.1,8440-8458).
cttaacctctctaattcca

SEQ ID NO: 665632 - DNA, 19 bp, Mus musculus
  siRNA target sequence for Nf1 (NM_010897.1,8526-8544).
cgctggccactgtaacagt

SEQ ID NO: 665633 - DNA, 19 bp, Mus musculus
  siRNA target sequence for Nf1 (NM_010897.1,8594-8612).
ctggcagtttcaaacgtaa

SEQ ID NO: 665634 - DNA, 19 bp, Mus musculus
  siRNA target sequence for Nf1 (NM_010897.1,8596-8614).
ggcagtttcaaacgtaata

SEQ ID NO: 665635 - DNA, 19 bp, Mus musculus
  siRNA target sequence for Nf1 (NM_010897.1,8608-8626).
cgtaatagcattaagaaga

SEQ ID NO: 665636 - DNA, 19 bp, Mus musculus
  siRNA target sequence for Ophn1 (NM_052976.2,679-697).
ccgccagaggctcaagtat

SEQ ID NO: 665637 - DNA, 19 bp, Mus musculus
  siRNA target sequence for Ophn1 (NM_052976.2,680-698).
cgccagaggctcaagtatt

SEQ ID NO: 665638 - DNA, 19 bp, Mus musculus
  siRNA target sequence for Ophn1 (NM_052976.2,685-703).
gaggctcaagtattatgaa

SEQ ID NO: 665639 - DNA, 19 bp, Mus musculus
  siRNA target sequence for Ophn1 (NM_052976.2,687-705).
ggctcaagtattatgaaga

SEQ ID NO: 665640 - DNA, 19 bp, Mus musculus
  siRNA target sequence for Ophn1 (NM_052976.2,749-767).
gacggcagcgcgcttatca

SEQ ID NO: 665641 - DNA, 19 bp, Mus musculus
  siRNA target sequence for Ophn1 (NM_052976.2,760-778).
gcttatcagcgctatgaga

SEQ ID NO: 665642 - DNA, 19 bp, Mus musculus
  siRNA target sequence for Ophn1 (NM_052976.2,761-779).
cttatcagcgctatgagaa

SEQ ID NO: 665643 - DNA, 19 bp, Mus musculus
  siRNA target sequence for Ophn1 (NM_052976.2,769-787).
cgctatgagaaattactct

SEQ ID NO: 665644 - DNA, 19 bp, Mus musculus
  siRNA target sequence for Ophn1 (NM_052976.2,792-810).
cggttcagaaattttctca

SEQ ID NO: 665645 - DNA, 19 bp, Mus musculus
  siRNA target sequence for Ophn1 (NM_052976.2,813-831).
cactccagtcatttcaatt

SEQ ID NO: 665646 - DNA, 19 bp, Mus musculus
  siRNA target sequence for Ophn1 (NM_052976.2,817-835).
ccagtcatttcaatttgat

SEQ ID NO: 665647 - DNA, 19 bp, Mus musculus
  siRNA target sequence for Ophn1 (NM_052976.2,855-873).
ccgatgatgagattaatat

SEQ ID NO: 665648 - DNA, 19 bp, Mus musculus
  siRNA target sequence for Ophn1 (NM_052976.2,856-874).
cgatgatgagattaatata

SEQ ID NO: 665649 - DNA, 19 bp, Mus musculus
  siRNA target sequence for Ophn1 (NM_052976.2,875-893).
gcggaatcattcaaggaat

SEQ ID NO: 665650 - DNA, 19 bp, Mus musculus
  siRNA target sequence for Ophn1 (NM_052976.2,876-894).
cggaatcattcaaggaatt

SEQ ID NO: 665651 - DNA, 19 bp, Mus musculus
  siRNA target sequence for Ophn1 (NM_052976.2,877-895).
ggaatcattcaaggaattt

SEQ ID NO: 665652 - DNA, 19 bp, Mus musculus
  siRNA target sequence for Ophn1 (NM_052976.2,964-982).
caaacccctggaaactttt

SEQ ID NO: 665653 - DNA, 19 bp, Mus musculus
  siRNA target sequence for Ophn1 (NM_052976.2,978-996).
cttttcggaaggaacaaat

SEQ ID NO: 665654 - DNA, 19 bp, Mus musculus
  siRNA target sequence for Ophn1 (NM_052976.2,983-1001).
cggaaggaacaaataggtt

SEQ ID NO: 665655 - DNA, 19 bp, Mus musculus
  siRNA target sequence for Ophn1 (NM_052976.2,984-1002).
ggaaggaacaaataggttt

SEQ ID NO: 665656 - DNA, 19 bp, Mus musculus
  siRNA target sequence for Ophn1 (NM_052976.2,985-1003).
gaaggaacaaataggtttt

SEQ ID NO: 665657 - DNA, 19 bp, Mus musculus
  siRNA target sequence for Ophn1 (NM_052976.2,988-1006).
ggaacaaataggttttaca

SEQ ID NO: 665658 - DNA, 19 bp, Mus musculus
  siRNA target sequence for Ophn1 (NM_052976.2,989-1007).
gaacaaataggttttacaa

SEQ ID NO: 665659 - DNA, 19 bp, Mus musculus
  siRNA target sequence for Ophn1 (NM_052976.2,1034-1052).
gatggtgagaggttttact

SEQ ID NO: 665660 - DNA, 19 bp, Mus musculus
  siRNA target sequence for Ophn1 (NM_052976.2,1117-1135).
cctccaagtggataaggaa

SEQ ID NO: 665661 - DNA, 19 bp, Mus musculus
  siRNA target sequence for Ophn1 (NM_052976.2,1141-1159).
caatttctttgaatcatct

SEQ ID NO: 665662 - DNA, 19 bp, Mus musculus
  siRNA target sequence for Ophn1 (NM_052976.2,1155-1173).
catctcttgactatgttta

SEQ ID NO: 665663 - DNA, 19 bp, Mus musculus
  siRNA target sequence for Ophn1 (NM_052976.2,1193-1211).
gagtcaaagaagttcaata

SEQ ID NO: 665664 - DNA, 19 bp, Mus musculus
  siRNA target sequence for Ophn1 (NM_052976.2,1223-1241).
gtcttggccttccttcata

SEQ ID NO: 665665 - DNA, 19 bp, Mus musculus
  siRNA target sequence for Ophn1 (NM_052976.2,1238-1256).
catagcctcttcatttcta

SEQ ID NO: 665666 - DNA, 19 bp, Mus musculus
  siRNA target sequence for Ophn1 (NM_052976.2,1282-1300).
ggatttcctgccatacaaa

SEQ ID NO: 665667 - DNA, 19 bp, Mus musculus
  siRNA target sequence for Ophn1 (NM_052976.2,1313-1331).
ctcagcttacagaatacaa

SEQ ID NO: 665668 - DNA, 19 bp, Mus musculus
  siRNA target sequence for Ophn1 (NM_052976.2,1317-1335).
gcttacagaatacaagaaa

SEQ ID NO: 665669 - DNA, 19 bp, Mus musculus
  siRNA target sequence for Ophn1 (NM_052976.2,1425-1443).
ccattgaaggctatctcta

SEQ ID NO: 665670 - DNA, 19 bp, Mus musculus
  siRNA target sequence for Ophn1 (NM_052976.2,1474-1492).
ctgggcgaaatactattgt

SEQ ID NO: 665671 - DNA, 19 bp, Mus musculus
  siRNA target sequence for Ophn1 (NM_052976.2,1556-1574).
cagggaccggtggacttaa

SEQ ID NO: 665672 - DNA, 19 bp, Mus musculus
  siRNA target sequence for Ophn1 (NM_052976.2,1558-1576).
gggaccggtggacttaact

SEQ ID NO: 665673 - DNA, 19 bp, Mus musculus
  siRNA target sequence for Ophn1 (NM_052976.2,1559-1577).
ggaccggtggacttaactt

SEQ ID NO: 665674 - DNA, 19 bp, Mus musculus
  siRNA target sequence for Ophn1 (NM_052976.2,1560-1578).
gaccggtggacttaacttt

SEQ ID NO: 665675 - DNA, 19 bp, Mus musculus
  siRNA target sequence for Ophn1 (NM_052976.2,1562-1580).
ccggtggacttaactttga

SEQ ID NO: 665676 - DNA, 19 bp, Mus musculus
  siRNA target sequence for Ophn1 (NM_052976.2,1732-1750).
ctaccacactcctataaca

SEQ ID NO: 665677 - DNA, 19 bp, Mus musculus
  siRNA target sequence for Ophn1 (NM_052976.2,1735-1753).
ccacactcctataacaaaa

SEQ ID NO: 665678 - DNA, 19 bp, Mus musculus
  siRNA target sequence for Ophn1 (NM_052976.2,1797-1815).
ggaagtgcatcaattttat

SEQ ID NO: 665679 - DNA, 19 bp, Mus musculus
  siRNA target sequence for Ophn1 (NM_052976.2,1798-1816).
gaagtgcatcaattttatt

SEQ ID NO: 665680 - DNA, 19 bp, Mus musculus
  siRNA target sequence for Ophn1 (NM_052976.2,1885-1903).
gctctatgccttttttgat

SEQ ID NO: 665681 - DNA, 19 bp, Mus musculus
  siRNA target sequence for Ophn1 (NM_052976.2,1892-1910).
gccttttttgatccaaaat

SEQ ID NO: 665682 - DNA, 19 bp, Mus musculus
  siRNA target sequence for Ophn1 (NM_052976.2,1894-1912).
cttttttgatccaaaatgt

SEQ ID NO: 665683 - DNA, 19 bp, Mus musculus
  siRNA target sequence for Ophn1 (NM_052976.2,1911-1929).
gtccaggggatgttgattt

SEQ ID NO: 665684 - DNA, 19 bp, Mus musculus
  siRNA target sequence for Ophn1 (NM_052976.2,1917-1935).
gggatgttgatttccataa

SEQ ID NO: 665685 - DNA, 19 bp, Mus musculus
  siRNA target sequence for Ophn1 (NM_052976.2,1919-1937).
gatgttgatttccataaca

SEQ ID NO: 665686 - DNA, 19 bp, Mus musculus
  siRNA target sequence for Ophn1 (NM_052976.2,1940-1958).
gactgggacattaagacaa

SEQ ID NO: 665687 - DNA, 19 bp, Mus musculus
  siRNA target sequence for Ophn1 (NM_052976.2,1945-1963).
ggacattaagacaatcaca

SEQ ID NO: 665688 - DNA, 19 bp, Mus musculus
  siRNA target sequence for Ophn1 (NM_052976.2,1946-1964).
gacattaagacaatcacaa

SEQ ID NO: 665689 - DNA, 19 bp, Mus musculus
  siRNA target sequence for Ophn1 (NM_052976.2,1954-1972).
gacaatcacaagctcttta

SEQ ID NO: 665690 - DNA, 19 bp, Mus musculus
  siRNA target sequence for Ophn1 (NM_052976.2,1956-1974).
caatcacaagctctttaaa

SEQ ID NO: 665691 - DNA, 19 bp, Mus musculus
  siRNA target sequence for Ophn1 (NM_052976.2,1995-2013).
cagaacctgtcatgactta

SEQ ID NO: 665692 - DNA, 19 bp, Mus musculus
  siRNA target sequence for Ophn1 (NM_052976.2,1997-2015).
gaacctgtcatgacttata

SEQ ID NO: 665693 - DNA, 19 bp, Mus musculus
  siRNA target sequence for Ophn1 (NM_052976.2,2066-2084).
cgtctgggggctattcact

SEQ ID NO: 665694 - DNA, 19 bp, Mus musculus
  siRNA target sequence for Ophn1 (NM_052976.2,2083-2101).
ctccctagtatataagcta

SEQ ID NO: 665695 - DNA, 19 bp, Mus musculus
  siRNA target sequence for Ophn1 (NM_052976.2,2117-2135).
gagatgctggaacttctaa

SEQ ID NO: 665696 - DNA, 19 bp, Mus musculus
  siRNA target sequence for Ophn1 (NM_052976.2,2122-2140).
gctggaacttctaatcaaa

SEQ ID NO: 665697 - DNA, 19 bp, Mus musculus
  siRNA target sequence for Ophn1 (NM_052976.2,2161-2179).
gcacagcaaagagaatctt

SEQ ID NO: 665698 - DNA, 19 bp, Mus musculus
  siRNA target sequence for Ophn1 (NM_052976.2,2190-2208).
ccaatatgggggtgatctt

SEQ ID NO: 665699 - DNA, 19 bp, Mus musculus
  siRNA target sequence for Ophn1 (NM_052976.2,2300-2318).
cactttggcaagatttatt

SEQ ID NO: 665700 - DNA, 19 bp, Mus musculus
  siRNA target sequence for Ophn1 (NM_052976.2,2383-2401).
caaaccaatcacaatctca

SEQ ID NO: 665701 - DNA, 19 bp, Mus musculus
  siRNA target sequence for Ophn1 (NM_052976.2,2417-2435).
gaaaagactgtgttctata

SEQ ID NO: 665702 - DNA, 19 bp, Mus musculus
  siRNA target sequence for Ophn1 (NM_052976.2,2480-2498).
cctaatggtacaatcacta

SEQ ID NO: 665703 - DNA, 19 bp, Mus musculus
  siRNA target sequence for Ophn1 (NM_052976.2,2581-2599).
cccaagcagacctgtttct

SEQ ID NO: 665704 - DNA, 19 bp, Mus musculus
  siRNA target sequence for Ophn1 (NM_052976.2,2629-2647).
ggatgtggggaggttgtta

SEQ ID NO: 665705 - DNA, 19 bp, Mus musculus
  siRNA target sequence for Ophn1 (NM_052976.2,2954-2972).
gcatctaggaccagattct

SEQ ID NO: 665706 - DNA, 19 bp, Mus musculus
  siRNA target sequence for Ophn1 (NM_052976.2,2962-2980).
gaccagattctttgaaaca

SEQ ID NO: 665707 - DNA, 19 bp, Mus musculus
  siRNA target sequence for Ralbp1 (NM_009067.1,538-556).
caaaaagcccagtttctct

SEQ ID NO: 665708 - DNA, 19 bp, Mus musculus
  siRNA target sequence for Ralbp1 (NM_009067.1,753-771).
cgagtgtcaagcccatttt

SEQ ID NO: 665709 - DNA, 19 bp, Mus musculus
  siRNA target sequence for Ralbp1 (NM_009067.1,843-861).
gggagtgtgtggactacat

SEQ ID NO: 665710 - DNA, 19 bp, Mus musculus
  siRNA target sequence for Ralbp1 (NM_009067.1,948-966).
gagaggagtctccaaactt

SEQ ID NO: 665711 - DNA, 19 bp, Mus musculus
  siRNA target sequence for Ralbp1 (NM_009067.1,960-978).
caaacttagaagaatatga

SEQ ID NO: 665712 - DNA, 19 bp, Mus musculus
  siRNA target sequence for Ralbp1 (NM_009067.1,1015-1033).
gcgagaccttccagagaat

SEQ ID NO: 665713 - DNA, 19 bp, Mus musculus
  siRNA target sequence for Ralbp1 (NM_009067.1,1132-1150).
gccggagtgcaatcatctt

SEQ ID NO: 665714 - DNA, 19 bp, Mus musculus
  siRNA target sequence for Ralbp1 (NM_009067.1,1134-1152).
cggagtgcaatcatcttct

SEQ ID NO: 665715 - DNA, 19 bp, Mus musculus
  siRNA target sequence for Ralbp1 (NM_009067.1,1410-1428).
ggagacaggagttcctttt

SEQ ID NO: 665716 - DNA, 19 bp, Mus musculus
  siRNA target sequence for Ralbp1 (NM_009067.1,1456-1474).
cgggataaaggacttatct

SEQ ID NO: 665717 - DNA, 19 bp, Mus musculus
  siRNA target sequence for Ralbp1 (NM_009067.1,1457-1475).
gggataaaggacttatcta

SEQ ID NO: 665718 - DNA, 19 bp, Mus musculus
  siRNA target sequence for Ralbp1 (NM_009067.1,1459-1477).
gataaaggacttatctaaa

SEQ ID NO: 665719 - DNA, 19 bp, Mus musculus
  siRNA target sequence for Ralbp1 (NM_009067.1,1524-1542).
gaaagctgagggaagctaa

SEQ ID NO: 665720 - DNA, 19 bp, Mus musculus
  siRNA target sequence for Ralbp1 (NM_009067.1,1531-1549).
gagggaagctaaaagacaa

SEQ ID NO: 665721 - DNA, 19 bp, Mus musculus
  siRNA target sequence for Ralbp1 (NM_009067.1,1747-1765).
ccgcctccgagctgaaatt

SEQ ID NO: 665722 - DNA, 19 bp, Mus musculus
  siRNA target sequence for Ranbp1 (NM_011239.1,213-231).
cagttcgagccaatagttt

SEQ ID NO: 665723 - DNA, 19 bp, Mus musculus
  siRNA target sequence for Ranbp1 (NM_011239.1,215-233).
gttcgagccaatagtttct

SEQ ID NO: 665724 - DNA, 19 bp, Mus musculus
  siRNA target sequence for Ranbp1 (NM_011239.1,218-236).
cgagccaatagtttctctt

SEQ ID NO: 665725 - DNA, 19 bp, Mus musculus
  siRNA target sequence for Ranbp1 (NM_011239.1,305-323).
ccggtttgcttcagagaat

SEQ ID NO: 665726 - DNA, 19 bp, Mus musculus
  siRNA target sequence for Ranbp1 (NM_011239.1,387-405).
gggaccatccgccttctta

SEQ ID NO: 665727 - DNA, 19 bp, Mus musculus
  siRNA target sequence for Ranbp1 (NM_011239.1,388-406).
ggaccatccgccttcttat

SEQ ID NO: 665728 - DNA, 19 bp, Mus musculus
  siRNA target sequence for Ranbp1 (NM_011239.1,434-452).
cgccaaccactatattaca

SEQ ID NO: 665729 - DNA, 19 bp, Mus musculus
  siRNA target sequence for Ranbp1 (NM_011239.1,551-569).
cgccatccgcttcctaaat

SEQ ID NO: 665730 - DNA, 19 bp, Mus musculus
  siRNA target sequence for Ranbp1 (NM_011239.1,570-588).
gctgagaatgcacaaaagt

SEQ ID NO: 665731 - DNA, 19 bp, Mus musculus
  siRNA target sequence for Ranbp1 (NM_011239.1,573-591).
gagaatgcacaaaagttca

SEQ ID NO: 665732 - DNA, 19 bp, Mus musculus
  siRNA target sequence for Rangap1 (NM_011241.3,331-349).
cggagggcagctgagtttt

SEQ ID NO: 665733 - DNA, 19 bp, Mus musculus
  siRNA target sequence for Rangap1 (NM_011241.3,333-351).
gagggcagctgagttttaa

SEQ ID NO: 665734 - DNA, 19 bp, Mus musculus
  siRNA target sequence for Rangap1 (NM_011241.3,352-370).
gggcaagggtctcaaacta

SEQ ID NO: 665735 - DNA, 19 bp, Mus musculus
  siRNA target sequence for Rangap1 (NM_011241.3,358-376).
gggtctcaaactaaatact

SEQ ID NO: 665736 - DNA, 19 bp, Mus musculus
  siRNA target sequence for Rangap1 (NM_011241.3,423-441).
gcctcgaagctctacgatt

SEQ ID NO: 665737 - DNA, 19 bp, Mus musculus
  siRNA target sequence for Rangap1 (NM_011241.3,519-537).
gccactggagtgacatgtt

SEQ ID NO: 665738 - DNA, 19 bp, Mus musculus
  siRNA target sequence for Rangap1 (NM_011241.3,704-722).
ctacaggaactcaagctta

SEQ ID NO: 665739 - DNA, 19 bp, Mus musculus
  siRNA target sequence for Rangap1 (NM_011241.3,739-757).
catcgggggtggcaagatt

SEQ ID NO: 665740 - DNA, 19 bp, Mus musculus
  siRNA target sequence for Rangap1 (NM_011241.3,867-885).
ctgcactggcagaagcttt

SEQ ID NO: 665741 - DNA, 19 bp, Mus musculus
  siRNA target sequence for Rangap1 (NM_011241.3,921-939).
cacagaacggaattaacca

SEQ ID NO: 665742 - DNA, 19 bp, Mus musculus
  siRNA target sequence for Rangap1 (NM_011241.3,981-999).
ccctgttgcgagtcatcaa

SEQ ID NO: 665743 - DNA, 19 bp, Mus musculus
  siRNA target sequence for Rangap1 (NM_011241.3,988-1006).
gcgagtcatcaacctaaat

SEQ ID NO: 665744 - DNA, 19 bp, Mus musculus
  siRNA target sequence for Rangap1 (NM_011241.3,1067-1085).
caagtggaagtgatcaatt

SEQ ID NO: 665745 - DNA, 19 bp, Mus musculus
  siRNA target sequence for Rangap1 (NM_011241.3,1146-1164).
gcctgcccaagctaaagga

SEQ ID NO: 665746 - DNA, 19 bp, Mus musculus
  siRNA target sequence for Rangap1 (NM_011241.3,1172-1190).
ctgtcgttctgcgaaatca

SEQ ID NO: 665747 - DNA, 19 bp, Mus musculus
  siRNA target sequence for Rangap1 (NM_011241.3,1304-1322).
gtgatggacagcttcaata

SEQ ID NO: 665748 - DNA, 19 bp, Mus musculus
  siRNA target sequence for Rangap1 (NM_011241.3,1519-1537).
gatcctggaccctaacagt

SEQ ID NO: 665749 - DNA, 19 bp, Mus musculus
  siRNA target sequence for Rangap1 (NM_011241.3,1673-1691).
gacccagagaaggttgttt

SEQ ID NO: 665750 - DNA, 19 bp, Mus musculus
  siRNA target sequence for Rangap1 (NM_011241.3,1722-1740).
gggatgacgcctcagtaaa

SEQ ID NO: 665751 - DNA, 19 bp, Mus musculus
  siRNA target sequence for Rangap1 (NM_011241.3,1724-1742).
gatgacgcctcagtaaaga

SEQ ID NO: 665752 - DNA, 19 bp, Mus musculus
  siRNA target sequence for Rangap1 (NM_011241.3,1758-1776).
ccatcgatgccctcatgaa

SEQ ID NO: 665753 - DNA, 19 bp, Mus musculus
  siRNA target sequence for Rangap1 (NM_011241.3,1913-1931).
gtggtgaggcaggactatt

SEQ ID NO: 665754 - DNA, 19 bp, Mus musculus
  siRNA target sequence for Rangap1 (NM_011241.3,2021-2039).
ctgcagacgctatacaaca

SEQ ID NO: 665755 - DNA, 19 bp, Mus musculus
  siRNA target sequence for Rangap1 (NM_011241.3,2024-2042).
cagacgctatacaacatct

SEQ ID NO: 665756 - DNA, 19 bp, Mus musculus
  siRNA target sequence for Rasa2 (NM_053268.1,125-143).
gcaggatctatgaagcaaa

SEQ ID NO: 665757 - DNA, 19 bp, Mus musculus
  siRNA target sequence for Rasa2 (NM_053268.1,128-146).
ggatctatgaagcaaaaaa

SEQ ID NO: 665758 - DNA, 19 bp, Mus musculus
  siRNA target sequence for Rasa2 (NM_053268.1,129-147).
gatctatgaagcaaaaaat

SEQ ID NO: 665759 - DNA, 19 bp, Mus musculus
  siRNA target sequence for Rasa2 (NM_053268.1,180-198).
cgattgtttctgcactata

SEQ ID NO: 665760 - DNA, 19 bp, Mus musculus
  siRNA target sequence for Rasa2 (NM_053268.1,185-203).
gtttctgcactataaattt

SEQ ID NO: 665761 - DNA, 19 bp, Mus musculus
  siRNA target sequence for Rasa2 (NM_053268.1,224-242).
gcacccaggttgttgaaaa

SEQ ID NO: 665762 - DNA, 19 bp, Mus musculus
  siRNA target sequence for Rasa2 (NM_053268.1,228-246).
ccaggttgttgaaaagtct

SEQ ID NO: 665763 - DNA, 19 bp, Mus musculus
  siRNA target sequence for Rasa2 (NM_053268.1,286-304).
ccaagaactttccagtatt

SEQ ID NO: 665764 - DNA, 19 bp, Mus musculus
  siRNA target sequence for Rasa2 (NM_053268.1,341-359).
gagatcttcgtataggaaa

SEQ ID NO: 665765 - DNA, 19 bp, Mus musculus
  siRNA target sequence for Rasa2 (NM_053268.1,355-373).
ggaaaagtagccatcaaaa

SEQ ID NO: 665766 - DNA, 19 bp, Mus musculus
  siRNA target sequence for Rasa2 (NM_053268.1,420-438).
gcagccgattgactcaaat

SEQ ID NO: 665767 - DNA, 19 bp, Mus musculus
  siRNA target sequence for Rasa2 (NM_053268.1,421-439).
cagccgattgactcaaatt

SEQ ID NO: 665768 - DNA, 19 bp, Mus musculus
  siRNA target sequence for Rasa2 (NM_053268.1,423-441).
gccgattgactcaaattca

SEQ ID NO: 665769 - DNA, 19 bp, Mus musculus
  siRNA target sequence for Rasa2 (NM_053268.1,425-443).
cgattgactcaaattcaga

SEQ ID NO: 665770 - DNA, 19 bp, Mus musculus
  siRNA target sequence for Rasa2 (NM_053268.1,426-444).
gattgactcaaattcagaa

SEQ ID NO: 665771 - DNA, 19 bp, Mus musculus
  siRNA target sequence for Rasa2 (NM_053268.1,456-474).
ggttcaccttgagttaaga

SEQ ID NO: 665772 - DNA, 19 bp, Mus musculus
  siRNA target sequence for Rasa2 (NM_053268.1,462-480).
ccttgagttaagactgaat

SEQ ID NO: 665773 - DNA, 19 bp, Mus musculus
  siRNA target sequence for Rasa2 (NM_053268.1,540-558).
ccatgggttgcctctcata

SEQ ID NO: 665774 - DNA, 19 bp, Mus musculus
  siRNA target sequence for Rasa2 (NM_053268.1,563-581).
gacaaagctgtgatcctta

SEQ ID NO: 665775 - DNA, 19 bp, Mus musculus
  siRNA target sequence for Rasa2 (NM_053268.1,605-623).
cctctaggaatgaccaaaa

SEQ ID NO: 665776 - DNA, 19 bp, Mus musculus
  siRNA target sequence for Rasa2 (NM_053268.1,647-665).
caagcaatccacagttcaa

SEQ ID NO: 665777 - DNA, 19 bp, Mus musculus
  siRNA target sequence for Rasa2 (NM_053268.1,650-668).
gcaatccacagttcaatga

SEQ ID NO: 665778 - DNA, 19 bp, Mus musculus
  siRNA target sequence for Rasa2 (NM_053268.1,651-669).
caatccacagttcaatgaa

SEQ ID NO: 665779 - DNA, 19 bp, Mus musculus
  siRNA target sequence for Rasa2 (NM_053268.1,799-817).
gttttcctgggagagatta

SEQ ID NO: 665780 - DNA, 19 bp, Mus musculus
  siRNA target sequence for Rasa2 (NM_053268.1,813-831).
gattaaggttcctgtcaat

SEQ ID NO: 665781 - DNA, 19 bp, Mus musculus
  siRNA target sequence for Rasa2 (NM_053268.1,823-841).
cctgtcaatgtgttaagaa

SEQ ID NO: 665782 - DNA, 19 bp, Mus musculus
  siRNA target sequence for Rasa2 (NM_053268.1,828-846).
caatgtgttaagaagtgat

SEQ ID NO: 665783 - DNA, 19 bp, Mus musculus
  siRNA target sequence for Rasa2 (NM_053268.1,839-857).
gaagtgattcctttcatca

SEQ ID NO: 665784 - DNA, 19 bp, Mus musculus
  siRNA target sequence for Rasa2 (NM_053268.1,870-888).
gctacagccaagagacaat

SEQ ID NO: 665785 - DNA, 19 bp, Mus musculus
  siRNA target sequence for Rasa2 (NM_053268.1,909-927).
cgatgacctgggatctctt

SEQ ID NO: 665786 - DNA, 19 bp, Mus musculus
  siRNA target sequence for Rasa2 (NM_053268.1,975-993).
ctatggaccgctgaaaact

SEQ ID NO: 665787 - DNA, 19 bp, Mus musculus
  siRNA target sequence for Rasa2 (NM_053268.1,1029-1047).
cgcctcagctgcttatatt

SEQ ID NO: 665788 - DNA, 19 bp, Mus musculus
  siRNA target sequence for Rasa2 (NM_053268.1,1054-1072).
gaaatatgtcaagatcaaa

SEQ ID NO: 665789 - DNA, 19 bp, Mus musculus
  siRNA target sequence for Rasa2 (NM_053268.1,1099-1117).
ctgttgctgcatcacaata

SEQ ID NO: 665790 - DNA, 19 bp, Mus musculus
  siRNA target sequence for Rasa2 (NM_053268.1,1101-1119).
gttgctgcatcacaataaa

SEQ ID NO: 665791 - DNA, 19 bp, Mus musculus
  siRNA target sequence for Rasa2 (NM_053268.1,1104-1122).
gctgcatcacaataaactt

SEQ ID NO: 665792 - DNA, 19 bp, Mus musculus
  siRNA target sequence for Rasa2 (NM_053268.1,1171-1189).
gatgccaacgcaatattta

SEQ ID NO: 665793 - DNA, 19 bp, Mus musculus
  siRNA target sequence for Rasa2 (NM_053268.1,1214-1232).
gtctgactgagatgatgaa

SEQ ID NO: 665794 - DNA, 19 bp, Mus musculus
  siRNA target sequence for Rasa2 (NM_053268.1,1262-1280).
cgctgaagcccgttctaga

SEQ ID NO: 665795 - DNA, 19 bp, Mus musculus
  siRNA target sequence for Rasa2 (NM_053268.1,1263-1281).
gctgaagcccgttctagat

SEQ ID NO: 665796 - DNA, 19 bp, Mus musculus
  siRNA target sequence for Rasa2 (NM_053268.1,1269-1287).
gcccgttctagatgagata

SEQ ID NO: 665797 - DNA, 19 bp, Mus musculus
  siRNA target sequence for Rasa2 (NM_053268.1,1270-1288).
cccgttctagatgagatat

SEQ ID NO: 665798 - DNA, 19 bp, Mus musculus
  siRNA target sequence for Rasa2 (NM_053268.1,1272-1290).
cgttctagatgagatatgt

SEQ ID NO: 665799 - DNA, 19 bp, Mus musculus
  siRNA target sequence for Rasa2 (NM_053268.1,1276-1294).
ctagatgagatatgtgaat

SEQ ID NO: 665800 - DNA, 19 bp, Mus musculus
  siRNA target sequence for Rasa2 (NM_053268.1,1295-1313).
cctcgaaatcctgtgaaat

SEQ ID NO: 665801 - DNA, 19 bp, Mus musculus
  siRNA target sequence for Rasa2 (NM_053268.1,1326-1344).
gttgaaagagggagataat

SEQ ID NO: 665802 - DNA, 19 bp, Mus musculus
  siRNA target sequence for Rasa2 (NM_053268.1,1335-1353).
gggagataatgtagagaat

SEQ ID NO: 665803 - DNA, 19 bp, Mus musculus
  siRNA target sequence for Rasa2 (NM_053268.1,1336-1354).
ggagataatgtagagaata

SEQ ID NO: 665804 - DNA, 19 bp, Mus musculus
  siRNA target sequence for Rasa2 (NM_053268.1,1359-1377).
ggagaatctgtactactat

SEQ ID NO: 665805 - DNA, 19 bp, Mus musculus
  siRNA target sequence for Rasa2 (NM_053268.1,1457-1475).
ggcaaatggctgctaagaa

SEQ ID NO: 665806 - DNA, 19 bp, Mus musculus
  siRNA target sequence for Rasa2 (NM_053268.1,1469-1487).
ctaagaaatttcctaatca

SEQ ID NO: 665807 - DNA, 19 bp, Mus musculus
  siRNA target sequence for Rasa2 (NM_053268.1,1580-1598).
ctcattatccagatacaca

SEQ ID NO: 665808 - DNA, 19 bp, Mus musculus
  siRNA target sequence for Rasa2 (NM_053268.1,1599-1617).
gacagttaggacattgact

SEQ ID NO: 665809 - DNA, 19 bp, Mus musculus
  siRNA target sequence for Rasa2 (NM_053268.1,1610-1628).
cattgactctcatctcaaa

SEQ ID NO: 665810 - DNA, 19 bp, Mus musculus
  siRNA target sequence for Rasa2 (NM_053268.1,1625-1643).
caaaaaccattcagattat

SEQ ID NO: 665811 - DNA, 19 bp, Mus musculus
  siRNA target sequence for Rasa2 (NM_053268.1,1631-1649).
ccattcagattattggaaa

SEQ ID NO: 665812 - DNA, 19 bp, Mus musculus
  siRNA target sequence for Rasa2 (NM_053268.1,1655-1673).
gatgtcagtccagaaaaaa

SEQ ID NO: 665813 - DNA, 19 bp, Mus musculus
  siRNA target sequence for Rasa2 (NM_053268.1,1674-1692).
gtcacggttcaaaaagtca

SEQ ID NO: 665814 - DNA, 19 bp, Mus musculus
  siRNA target sequence for Rasa2 (NM_053268.1,1769-1787).
catctacggaaactaaaga

SEQ ID NO: 665815 - DNA, 19 bp, Mus musculus
  siRNA target sequence for Rasa2 (NM_053268.1,1818-1836).
gaaagaaggtgagatgtat

SEQ ID NO: 665816 - DNA, 19 bp, Mus musculus
  siRNA target sequence for Rasa2 (NM_053268.1,1849-1867).
ggaagaacccgtattggaa

SEQ ID NO: 665817 - DNA, 19 bp, Mus musculus
  siRNA target sequence for Rasa2 (NM_053268.1,1856-1874).
cccgtattggaaagaagaa

SEQ ID NO: 665818 - DNA, 19 bp, Mus musculus
  siRNA target sequence for Rasa2 (NM_053268.1,1858-1876).
cgtattggaaagaagaact

SEQ ID NO: 665819 - DNA, 19 bp, Mus musculus
  siRNA target sequence for Rasa2 (NM_053268.1,1859-1877).
gtattggaaagaagaactt

SEQ ID NO: 665820 - DNA, 19 bp, Mus musculus
  siRNA target sequence for Rasa2 (NM_053268.1,1929-1947).
gcaaggcaaagatgcaatt

SEQ ID NO: 665821 - DNA, 19 bp, Mus musculus
  siRNA target sequence for Rasa2 (NM_053268.1,2019-2037).
gttccaagtgatacataca

SEQ ID NO: 665822 - DNA, 19 bp, Mus musculus
  siRNA target sequence for Rasa2 (NM_053268.1,2045-2063).
cgctgtacatccaagcaaa

SEQ ID NO: 665823 - DNA, 19 bp, Mus musculus
  siRNA target sequence for Rasa2 (NM_053268.1,2078-2096).
ccaatgagtggatagatgt

SEQ ID NO: 665824 - DNA, 19 bp, Mus musculus
  siRNA target sequence for Rasa2 (NM_053268.1,2143-2161).
cacccctcagcgtatctca

SEQ ID NO: 665825 - DNA, 19 bp, Mus musculus
  siRNA target sequence for Rasa2 (NM_053268.1,2241-2259).
catccagatagatatcgat

SEQ ID NO: 665826 - DNA, 19 bp, Mus musculus
  siRNA target sequence for Rasa2 (NM_053268.1,2371-2389).
gaacctggttattctaagt

SEQ ID NO: 665827 - DNA, 19 bp, Mus musculus
  siRNA target sequence for Rasa2 (NM_053268.1,2374-2392).
cctggttattctaagttca

SEQ ID NO: 665828 - DNA, 19 bp, Mus musculus
  siRNA target sequence for Rasa2 (NM_053268.1,2400-2418).
ggattctgttgcaaccttt

SEQ ID NO: 665829 - DNA, 19 bp, Mus musculus
  siRNA target sequence for Rasa2 (NM_053268.1,2401-2419).
gattctgttgcaaccttta

SEQ ID NO: 665830 - DNA, 19 bp, Mus musculus
  siRNA target sequence for Rasa2 (NM_053268.1,2421-2439).
gacaattcagcaaatcaaa

SEQ ID NO: 665831 - DNA, 19 bp, Mus musculus
  siRNA target sequence for Rasa2 (NM_053268.1,2489-2507).
gatcgagtagtgcaaaata

SEQ ID NO: 665832 - DNA, 19 bp, Mus musculus
  siRNA target sequence for Rasa3 (NM_009025.1,161-179).
gagcgtgaggatcaagatt

SEQ ID NO: 665833 - DNA, 19 bp, Mus musculus
  siRNA target sequence for Rasa3 (NM_009025.1,308-326).
cggagaggacttttactgt

SEQ ID NO: 665834 - DNA, 19 bp, Mus musculus
  siRNA target sequence for Rasa3 (NM_009025.1,345-363).
cgccacctgtccttttaca

SEQ ID NO: 665835 - DNA, 19 bp, Mus musculus
  siRNA target sequence for Rasa3 (NM_009025.1,346-364).
gccacctgtccttttacat

SEQ ID NO: 665836 - DNA, 19 bp, Mus musculus
  siRNA target sequence for Rasa3 (NM_009025.1,347-365).
ccacctgtccttttacatt

SEQ ID NO: 665837 - DNA, 19 bp, Mus musculus
  siRNA target sequence for Rasa3 (NM_009025.1,547-565).
gtgtcgtctgccacaaact

SEQ ID NO: 665838 - DNA, 19 bp, Mus musculus
  siRNA target sequence for Rasa3 (NM_009025.1,588-606).
cagggtctccccattgtga

SEQ ID NO: 665839 - DNA, 19 bp, Mus musculus
  siRNA target sequence for Rasa3 (NM_009025.1,702-720).
cagtttgacgaggtgtttt

SEQ ID NO: 665840 - DNA, 19 bp, Mus musculus
  siRNA target sequence for Rasa3 (NM_009025.1,704-722).
gtttgacgaggtgttttat

SEQ ID NO: 665841 - DNA, 19 bp, Mus musculus
  siRNA target sequence for Rasa3 (NM_009025.1,782-800).
ggacgtggacaaacttgaa

SEQ ID NO: 665842 - DNA, 19 bp, Mus musculus
  siRNA target sequence for Rasa3 (NM_009025.1,783-801).
gacgtggacaaacttgaaa

SEQ ID NO: 665843 - DNA, 19 bp, Mus musculus
  siRNA target sequence for Rasa3 (NM_009025.1,884-902).
gcgacactcgagctcttat

SEQ ID NO: 665844 - DNA, 19 bp, Mus musculus
  siRNA target sequence for Rasa3 (NM_009025.1,886-904).
gacactcgagctcttatga

SEQ ID NO: 665845 - DNA, 19 bp, Mus musculus
  siRNA target sequence for Rasa3 (NM_009025.1,925-943).
cccgagacaacggcaataa

SEQ ID NO: 665846 - DNA, 19 bp, Mus musculus
  siRNA target sequence for Rasa3 (NM_009025.1,927-945).
cgagacaacggcaataaga

SEQ ID NO: 665847 - DNA, 19 bp, Mus musculus
  siRNA target sequence for Rasa3 (NM_009025.1,965-983).
ggggtctctgaggttaaat

SEQ ID NO: 665848 - DNA, 19 bp, Mus musculus
  siRNA target sequence for Rasa3 (NM_009025.1,967-985).
ggtctctgaggttaaatgt

SEQ ID NO: 665849 - DNA, 19 bp, Mus musculus
  siRNA target sequence for Rasa3 (NM_009025.1,974-992).
gaggttaaatgtcgtttat

SEQ ID NO: 665850 - DNA, 19 bp, Mus musculus
  siRNA target sequence for Rasa3 (NM_009025.1,977-995).
gttaaatgtcgtttataca

SEQ ID NO: 665851 - DNA, 19 bp, Mus musculus
  siRNA target sequence for Rasa3 (NM_009025.1,1030-1048).
cactgcgtgacctgttact

SEQ ID NO: 665852 - DNA, 19 bp, Mus musculus
  siRNA target sequence for Rasa3 (NM_009025.1,1032-1050).
ctgcgtgacctgttactga

SEQ ID NO: 665853 - DNA, 19 bp, Mus musculus
  siRNA target sequence for Rasa3 (NM_009025.1,1229-1247).
catcttccgaggaaactca

SEQ ID NO: 665854 - DNA, 19 bp, Mus musculus
  siRNA target sequence for Rasa3 (NM_009025.1,1384-1402).
gcgaaaacctcgagaacaa

SEQ ID NO: 665855 - DNA, 19 bp, Mus musculus
  siRNA target sequence for Rasa3 (NM_009025.1,1474-1492).
ccgtcatgtgtgacatctt

SEQ ID NO: 665856 - DNA, 19 bp, Mus musculus
  siRNA target sequence for Rasa3 (NM_009025.1,1651-1669).
ctagaaccctgacacttat

SEQ ID NO: 665857 - DNA, 19 bp, Mus musculus
  siRNA target sequence for Rasa3 (NM_009025.1,1657-1675).
ccctgacacttatctcaaa

SEQ ID NO: 665858 - DNA, 19 bp, Mus musculus
  siRNA target sequence for Rasa3 (NM_009025.1,1706-1724).
gtccaagtctgccagtttt

SEQ ID NO: 665859 - DNA, 19 bp, Mus musculus
  siRNA target sequence for Rasa3 (NM_009025.1,1708-1726).
ccaagtctgccagttttaa

SEQ ID NO: 665860 - DNA, 19 bp, Mus musculus
  siRNA target sequence for Rasa3 (NM_009025.1,1733-1751).
gtacatggcgacattctat

SEQ ID NO: 665861 - DNA, 19 bp, Mus musculus
  siRNA target sequence for Rasa3 (NM_009025.1,1736-1754).
catggcgacattctatgaa

SEQ ID NO: 665862 - DNA, 19 bp, Mus musculus
  siRNA target sequence for Rasa3 (NM_009025.1,1844-1862).
gcagcccatcctgcttaaa

SEQ ID NO: 665863 - DNA, 19 bp, Mus musculus
  siRNA target sequence for Rasa3 (NM_009025.1,1847-1865).
gcccatcctgcttaaagaa

SEQ ID NO: 665864 - DNA, 19 bp, Mus musculus
  siRNA target sequence for Rasa3 (NM_009025.1,1891-1909).
gaaggaaacggtttggaat

SEQ ID NO: 665865 - DNA, 19 bp, Mus musculus
  siRNA target sequence for Rasa3 (NM_009025.1,2041-2059).
ccttccgaatgaaaaacat

SEQ ID NO: 665866 - DNA, 19 bp, Mus musculus
  siRNA target sequence for Rasa3 (NM_009025.1,2077-2095).
cagagcgtgccctgtacat

SEQ ID NO: 665867 - DNA, 19 bp, Mus musculus
  siRNA target sequence for Rasa3 (NM_009025.1,2318-2336).
gcgcatctactctctcttt

SEQ ID NO: 665868 - DNA, 19 bp, Mus musculus
  siRNA target sequence for Rasa3 (NM_009025.1,2319-2337).
cgcatctactctctcttta

SEQ ID NO: 665869 - DNA, 19 bp, Mus musculus
  siRNA target sequence for Rasa3 (NM_009025.1,2378-2396).
cggcagcaagtctgtgtat

SEQ ID NO: 665870 - DNA, 19 bp, Mus musculus
  siRNA target sequence for Rasa3 (NM_009025.1,2552-2570).
ccaggagcaccctattgga

SEQ ID NO: 665871 - DNA, 19 bp, Mus musculus
  siRNA target sequence for Rasal1 (NM_013832.2,350-368).
cctattgtctggtgaaagt

SEQ ID NO: 665872 - DNA, 19 bp, Mus musculus
  siRNA target sequence for Rasal1 (NM_013832.2,629-647).
gcctggatgtgaagctatt

SEQ ID NO: 665873 - DNA, 19 bp, Mus musculus
  siRNA target sequence for Rasal1 (NM_013832.2,745-763).
gtgttctggggcaaccata

SEQ ID NO: 665874 - DNA, 19 bp, Mus musculus
  siRNA target sequence for Rasal1 (NM_013832.2,753-771).
gggcaaccatagtttggaa

SEQ ID NO: 665875 - DNA, 19 bp, Mus musculus
  siRNA target sequence for Rasal1 (NM_013832.2,754-772).
ggcaaccatagtttggaaa

SEQ ID NO: 665876 - DNA, 19 bp, Mus musculus
  siRNA target sequence for Rasal1 (NM_013832.2,769-787).
gaaacttcgaccatcaaga

SEQ ID NO: 665877 - DNA, 19 bp, Mus musculus
  siRNA target sequence for Rasal1 (NM_013832.2,961-979).
cggctcctgccctttccta

SEQ ID NO: 665878 - DNA, 19 bp, Mus musculus
  siRNA target sequence for Rasal1 (NM_013832.2,1225-1243).
ccctttctagattatctca

SEQ ID NO: 665879 - DNA, 19 bp, Mus musculus
  siRNA target sequence for Rasal1 (NM_013832.2,1307-1325).
ccaagtcgatggaacagtt

SEQ ID NO: 665880 - DNA, 19 bp, Mus musculus
  siRNA target sequence for Rasal1 (NM_013832.2,1386-1404).
cttcgaggagaagaaatat

SEQ ID NO: 665881 - DNA, 19 bp, Mus musculus
  siRNA target sequence for Rasal1 (NM_013832.2,1503-1521).
gctgctgaccggataccta

SEQ ID NO: 665882 - DNA, 19 bp, Mus musculus
  siRNA target sequence for Rasal1 (NM_013832.2,1668-1686).
cctctttctgcggttcttt

SEQ ID NO: 665883 - DNA, 19 bp, Mus musculus
  siRNA target sequence for Rasal1 (NM_013832.2,1947-1965).
ggtccaaccctcaaccatt

SEQ ID NO: 665884 - DNA, 19 bp, Mus musculus
  siRNA target sequence for Rasal1 (NM_013832.2,2216-2234).
cctacctccagtgtaagaa

SEQ ID NO: 665885 - DNA, 19 bp, Mus musculus
  siRNA target sequence for Rin1 (NM_145495.1,89-107).
gagccaccaacctgaactt

SEQ ID NO: 665886 - DNA, 19 bp, Mus musculus
  siRNA target sequence for Rin1 (NM_145495.1,140-158).
ctacagacccactgtatga

SEQ ID NO: 665887 - DNA, 19 bp, Mus musculus
  siRNA target sequence for Rin1 (NM_145495.1,322-340).
ctggtgcggaaatctaaca

SEQ ID NO: 665888 - DNA, 19 bp, Mus musculus
  siRNA target sequence for Rin1 (NM_145495.1,324-342).
ggtgcggaaatctaacact

SEQ ID NO: 665889 - DNA, 19 bp, Mus musculus
  siRNA target sequence for Rin1 (NM_145495.1,380-398).
ctagtggcccctcttttgt

SEQ ID NO: 665890 - DNA, 19 bp, Mus musculus
  siRNA target sequence for Rin1 (NM_145495.1,422-440).
gtactggcggtgtctcttt

SEQ ID NO: 665891 - DNA, 19 bp, Mus musculus
  siRNA target sequence for Rin1 (NM_145495.1,495-513).
ccgtaccagagccattcat

SEQ ID NO: 665892 - DNA, 19 bp, Mus musculus
  siRNA target sequence for Rin1 (NM_145495.1,497-515).
gtaccagagccattcatca

SEQ ID NO: 665893 - DNA, 19 bp, Mus musculus
  siRNA target sequence for Rin1 (NM_145495.1,839-857).
ccagccaaacggaaagact

SEQ ID NO: 665894 - DNA, 19 bp, Mus musculus
  siRNA target sequence for Rin1 (NM_145495.1,885-903).
gagctcagtgggatatcgt

SEQ ID NO: 665895 - DNA, 19 bp, Mus musculus
  siRNA target sequence for Rin1 (NM_145495.1,1292-1310).
cagagcggctggaattggt

SEQ ID NO: 665896 - DNA, 19 bp, Mus musculus
  siRNA target sequence for Rin1 (NM_145495.1,1459-1477).
gggtcccacctgactcttt

SEQ ID NO: 665897 - DNA, 19 bp, Mus musculus
  siRNA target sequence for Rin1 (NM_145495.1,1956-1974).
gcccccagggtcttcaatt

SEQ ID NO: 665898 - DNA, 19 bp, Mus musculus
  siRNA target sequence for Rin1 (NM_145495.1,2102-2120).
caactggctacctcatcta

SEQ ID NO: 665899 - DNA, 19 bp, Mus musculus
  siRNA target sequence for Rin1 (NM_145495.1,2212-2230).
gagacagggggtctaaaca

SEQ ID NO: 665900 - DNA, 19 bp, Mus musculus
  siRNA target sequence for Rin1 (NM_145495.1,2214-2232).
gacagggggtctaaacaga

SEQ ID NO: 665901 - DNA, 19 bp, Mus musculus
  siRNA target sequence for Rin3 (NM_177620.2,243-261).
ccaccctgccggtcctatt

SEQ ID NO: 665902 - DNA, 19 bp, Mus musculus
  siRNA target sequence for Rin3 (NM_177620.2,246-264).
ccctgccggtcctattcca

SEQ ID NO: 665903 - DNA, 19 bp, Mus musculus
  siRNA target sequence for Rin3 (NM_177620.2,549-567).
gctggagtaccccatcaaa

SEQ ID NO: 665904 - DNA, 19 bp, Mus musculus
  siRNA target sequence for Rin3 (NM_177620.2,552-570).
ggagtaccccatcaaagaa

SEQ ID NO: 665905 - DNA, 19 bp, Mus musculus
  siRNA target sequence for Rin3 (NM_177620.2,555-573).
gtaccccatcaaagaagaa

SEQ ID NO: 665906 - DNA, 19 bp, Mus musculus
  siRNA target sequence for Rin3 (NM_177620.2,568-586).
gaagaaaaggctatactgt

SEQ ID NO: 665907 - DNA, 19 bp, Mus musculus
  siRNA target sequence for Rin3 (NM_177620.2,607-625).
gtgtttgaggacatcttca

SEQ ID NO: 665908 - DNA, 19 bp, Mus musculus
  siRNA target sequence for Rin3 (NM_177620.2,644-662).
gtgtcagtagagacttact

SEQ ID NO: 665909 - DNA, 19 bp, Mus musculus
  siRNA target sequence for Rin3 (NM_177620.2,701-719).
ctagcagcttccttgaact

SEQ ID NO: 665910 - DNA, 19 bp, Mus musculus
  siRNA target sequence for Rin3 (NM_177620.2,754-772).
gactcctcgctgaactcaa

SEQ ID NO: 665911 - DNA, 19 bp, Mus musculus
  siRNA target sequence for Rin3 (NM_177620.2,850-868).
gcaaattgttcctgtgaaa

SEQ ID NO: 665912 - DNA, 19 bp, Mus musculus
  siRNA target sequence for Rin3 (NM_177620.2,851-869).
caaattgttcctgtgaaat

SEQ ID NO: 665913 - DNA, 19 bp, Mus musculus
  siRNA target sequence for Rin3 (NM_177620.2,891-909).
ccgcctgtggtttgtgaat

SEQ ID NO: 665914 - DNA, 19 bp, Mus musculus
  siRNA target sequence for Rin3 (NM_177620.2,895-913).
ctgtggtttgtgaatccta

SEQ ID NO: 665915 - DNA, 19 bp, Mus musculus
  siRNA target sequence for Rin3 (NM_177620.2,1459-1477).
ccccagagcaccgtaagta

SEQ ID NO: 665916 - DNA, 19 bp, Mus musculus
  siRNA target sequence for Rin3 (NM_177620.2,1843-1861).
gaccaggactcctactcaa

SEQ ID NO: 665917 - DNA, 19 bp, Mus musculus
  siRNA target sequence for Rin3 (NM_177620.2,1991-2009).
ccagcgaccgcaaactgta

SEQ ID NO: 665918 - DNA, 19 bp, Mus musculus
  siRNA target sequence for Rin3 (NM_177620.2,1992-2010).
cagcgaccgcaaactgtat

SEQ ID NO: 665919 - DNA, 19 bp, Mus musculus
  siRNA target sequence for Rin3 (NM_177620.2,1994-2012).
gcgaccgcaaactgtataa

SEQ ID NO: 665920 - DNA, 19 bp, Mus musculus
  siRNA target sequence for Rin3 (NM_177620.2,2131-2149).
gagatccgtaccatgatga

SEQ ID NO: 665921 - DNA, 19 bp, Mus musculus
  siRNA target sequence for Rin3 (NM_177620.2,2239-2257).
gtggagtcagccttgtaca

SEQ ID NO: 665922 - DNA, 19 bp, Mus musculus
  siRNA target sequence for Rin3 (NM_177620.2,2666-2684).
gagagggttcctactatct

SEQ ID NO: 665923 - DNA, 19 bp, Mus musculus
  siRNA target sequence for Rin3 (NM_177620.2,2668-2686).
gagggttcctactatctga

SEQ ID NO: 665924 - DNA, 19 bp, Mus musculus
  siRNA target sequence for Rin3 (NM_177620.2,2698-2716).
ggagccctggagcacatta

SEQ ID NO: 665925 - DNA, 19 bp, Mus musculus
  siRNA target sequence for Rin3 (NM_177620.2,2789-2807).
gcaggcgcacgctcaacaa

SEQ ID NO: 665926 - DNA, 19 bp, Mus musculus
  siRNA target sequence for Rin3 (NM_177620.2,2790-2808).
caggcgcacgctcaacaaa

SEQ ID NO: 665927 - DNA, 19 bp, Mus musculus
  siRNA target sequence for Rin3 (NM_177620.2,3116-3134).
gccagccctgtatagtagt

SEQ ID NO: 665928 - DNA, 19 bp, Mus musculus
  siRNA target sequence for Rin3 (NM_177620.2,3136-3154).
cgggaacccaacttcctat

SEQ ID NO: 665929 - DNA, 19 bp, Mus musculus
  siRNA target sequence for Sh3bp1 (NM_009164.1,634-652).
gattcttatgccaactact

SEQ ID NO: 665930 - DNA, 19 bp, Mus musculus
  siRNA target sequence for Sh3bp1 (NM_009164.1,638-656).
cttatgccaactactttat

SEQ ID NO: 665931 - DNA, 19 bp, Mus musculus
  siRNA target sequence for Sh3bp1 (NM_009164.1,788-806).
gggtatatggggtatcttt

SEQ ID NO: 665932 - DNA, 19 bp, Mus musculus
  siRNA target sequence for Sh3bp1 (NM_009164.1,790-808).
gtatatggggtatctttga

SEQ ID NO: 665933 - DNA, 19 bp, Mus musculus
  siRNA target sequence for Sh3bp1 (NM_009164.1,968-986).
cccacagcctagaggaatt

SEQ ID NO: 665934 - DNA, 19 bp, Mus musculus
  siRNA target sequence for Sh3bp1 (NM_009164.1,1145-1163).
gtctaccccaagagaactt

SEQ ID NO: 665935 - DNA, 19 bp, Mus musculus
  siRNA target sequence for Sh3bp1 (NM_009164.1,1147-1165).
ctaccccaagagaacttca

SEQ ID NO: 665936 - DNA, 19 bp, Mus musculus
  siRNA target sequence for Sh3bp1 (NM_009164.1,1272-1290).
gtggcctcccgagaaagaa

SEQ ID NO: 665937 - DNA, 19 bp, Mus musculus
  siRNA target sequence for Sh3bp1 (NM_009164.1,1348-1366).
gtcgaggcgctgatacaga

SEQ ID NO: 665938 - DNA, 19 bp, Mus musculus
  siRNA target sequence for Sh3bp1 (NM_009164.1,1376-1394).
ccctcttccctggagatat

SEQ ID NO: 665939 - DNA, 19 bp, Mus musculus
  siRNA target sequence for Sh3bp1 (NM_009164.1,1378-1396).
ctcttccctggagatatca

SEQ ID NO: 665940 - DNA, 19 bp, Mus musculus
  siRNA target sequence for Sh3bp1 (NM_009164.1,1385-1403).
ctggagatatcaacttcaa

SEQ ID NO: 665941 - DNA, 19 bp, Mus musculus
  siRNA target sequence for Sh3bp1 (NM_009164.1,1869-1887).
ctcccctgtcatctcaaat

SEQ ID NO: 665942 - DNA, 19 bp, Mus musculus
  siRNA target sequence for Stard13 (NM_146258.1,3338-3356).
gccactccccagaatggta

SEQ ID NO: 665943 - DNA, 19 bp, Mus musculus
  siRNA target sequence for Stard13 (NM_146258.1,3376-3394).
ctctgtgcggcagaagtta

SEQ ID NO: 665944 - DNA, 19 bp, Mus musculus
  siRNA target sequence for Stard13 (NM_146258.1,3395-3413).
ccagaattaggaactcttt

SEQ ID NO: 665945 - DNA, 19 bp, Mus musculus
  siRNA target sequence for Stard13 (NM_146258.1,3428-3446).
ctgagggtccagaaacaaa

SEQ ID NO: 665946 - DNA, 19 bp, Mus musculus
  siRNA target sequence for Stard13 (NM_146258.1,3430-3448).
gagggtccagaaacaaaaa

SEQ ID NO: 665947 - DNA, 19 bp, Mus musculus
  siRNA target sequence for Tsc2 (NM_011647.1,188-206).
gcaaacagactgagtttat

SEQ ID NO: 665948 - DNA, 19 bp, Mus musculus
  siRNA target sequence for Tsc2 (NM_011647.1,255-273).
caatcgcatccgaatgata

SEQ ID NO: 665949 - DNA, 19 bp, Mus musculus
  siRNA target sequence for Tsc2 (NM_011647.1,286-304).
gatgtggcaaaaactaaga

SEQ ID NO: 665950 - DNA, 19 bp, Mus musculus
  siRNA target sequence for Tsc2 (NM_011647.1,399-417).
cttattgaaggccattgta

SEQ ID NO: 665951 - DNA, 19 bp, Mus musculus
  siRNA target sequence for Tsc2 (NM_011647.1,498-516).
ccatgaaaggctagaagtt

SEQ ID NO: 665952 - DNA, 19 bp, Mus musculus
  siRNA target sequence for Tsc2 (NM_011647.1,532-550).
gacaatgggaggcacatta

SEQ ID NO: 665953 - DNA, 19 bp, Mus musculus
  siRNA target sequence for Tsc2 (NM_011647.1,538-556).
gggaggcacattacctatt

SEQ ID NO: 665954 - DNA, 19 bp, Mus musculus
  siRNA target sequence for Tsc2 (NM_011647.1,656-674).
gttaccttgacgaatacat

SEQ ID NO: 665955 - DNA, 19 bp, Mus musculus
  siRNA target sequence for Tsc2 (NM_011647.1,677-695).
catcaatggttcacatgat

SEQ ID NO: 665956 - DNA, 19 bp, Mus musculus
  siRNA target sequence for Tsc2 (NM_011647.1,760-778).
gctgtggtctgctacaact

SEQ ID NO: 665957 - DNA, 19 bp, Mus musculus
  siRNA target sequence for Tsc2 (NM_011647.1,861-879).
gaagttgatgcgtaacctt

SEQ ID NO: 665958 - DNA, 19 bp, Mus musculus
  siRNA target sequence for Tsc2 (NM_011647.1,895-913).
ggccacagcgccatctaca

SEQ ID NO: 665959 - DNA, 19 bp, Mus musculus
  siRNA target sequence for Tsc2 (NM_011647.1,896-914).
gccacagcgccatctacaa

SEQ ID NO: 665960 - DNA, 19 bp, Mus musculus
  siRNA target sequence for Tsc2 (NM_011647.1,1079-1097).
ccaatgaggtggtgtcata

SEQ ID NO: 665961 - DNA, 19 bp, Mus musculus
  siRNA target sequence for Tsc2 (NM_011647.1,1080-1098).
caatgaggtggtgtcatat

SEQ ID NO: 665962 - DNA, 19 bp, Mus musculus
  siRNA target sequence for Tsc2 (NM_011647.1,1086-1104).
ggtggtgtcatatgagatt

SEQ ID NO: 665963 - DNA, 19 bp, Mus musculus
  siRNA target sequence for Tsc2 (NM_011647.1,1099-1117).
gagattgttctgtccataa

SEQ ID NO: 665964 - DNA, 19 bp, Mus musculus
  siRNA target sequence for Tsc2 (NM_011647.1,1101-1119).
gattgttctgtccataaca

SEQ ID NO: 665965 - DNA, 19 bp, Mus musculus
  siRNA target sequence for Tsc2 (NM_011647.1,1179-1197).
catcattgaacgactactt

SEQ ID NO: 665966 - DNA, 19 bp, Mus musculus
  siRNA target sequence for Tsc2 (NM_011647.1,1346-1364).
ctgaatcctctctcttaaa

SEQ ID NO: 665967 - DNA, 19 bp, Mus musculus
  siRNA target sequence for Tsc2 (NM_011647.1,1531-1549).
gaggaggagctgattaact

SEQ ID NO: 665968 - DNA, 19 bp, Mus musculus
  siRNA target sequence for Tsc2 (NM_011647.1,1833-1851).
ccacgccactcgagtgtat

SEQ ID NO: 665969 - DNA, 19 bp, Mus musculus
  siRNA target sequence for Tsc2 (NM_011647.1,1837-1855).
gccactcgagtgtatgaga

SEQ ID NO: 665970 - DNA, 19 bp, Mus musculus
  siRNA target sequence for Tsc2 (NM_011647.1,1848-1866).
gtatgagagcctcattagt

SEQ ID NO: 665971 - DNA, 19 bp, Mus musculus
  siRNA target sequence for Tsc2 (NM_011647.1,2392-2410).
cccgtgctaacagcattaa

SEQ ID NO: 665972 - DNA, 19 bp, Mus musculus
  siRNA target sequence for Tsc2 (NM_011647.1,2393-2411).
ccgtgctaacagcattaat

SEQ ID NO: 665973 - DNA, 19 bp, Mus musculus
  siRNA target sequence for Tsc2 (NM_011647.1,2394-2412).
cgtgctaacagcattaata

SEQ ID NO: 665974 - DNA, 19 bp, Mus musculus
  siRNA target sequence for Tsc2 (NM_011647.1,2395-2413).
gtgctaacagcattaatat

SEQ ID NO: 665975 - DNA, 19 bp, Mus musculus
  siRNA target sequence for Tsc2 (NM_011647.1,2398-2416).
ctaacagcattaatatctt

SEQ ID NO: 665976 - DNA, 19 bp, Mus musculus
  siRNA target sequence for Tsc2 (NM_011647.1,2530-2548).
gagatgcccgacatcatca

SEQ ID NO: 665977 - DNA, 19 bp, Mus musculus
  siRNA target sequence for Tsc2 (NM_011647.1,2798-2816).
cctttcggaaggatttcgt

SEQ ID NO: 665978 - DNA, 19 bp, Mus musculus
  siRNA target sequence for Tsc2 (NM_011647.1,2809-2827).
gatttcgtcccttatatca

SEQ ID NO: 665979 - DNA, 19 bp, Mus musculus
  siRNA target sequence for Tsc2 (NM_011647.1,2851-2869).
ctcctgtcttttgatgata

SEQ ID NO: 665980 - DNA, 19 bp, Mus musculus
  siRNA target sequence for Tsc2 (NM_011647.1,2894-2912).
cacggagcaccagtcttaa

SEQ ID NO: 665981 - DNA, 19 bp, Mus musculus
  siRNA target sequence for Tsc2 (NM_011647.1,2914-2932).
gagagacccaaaagtttga

SEQ ID NO: 665982 - DNA, 19 bp, Mus musculus
  siRNA target sequence for Tsc2 (NM_011647.1,2947-2965).
cccaaacaaggcctgaata

SEQ ID NO: 665983 - DNA, 19 bp, Mus musculus
  siRNA target sequence for Tsc2 (NM_011647.1,2948-2966).
ccaaacaaggcctgaataa

SEQ ID NO: 665984 - DNA, 19 bp, Mus musculus
  siRNA target sequence for Tsc2 (NM_011647.1,3021-3039).
ccgcagcatcagtgtatct

SEQ ID NO: 665985 - DNA, 19 bp, Mus musculus
  siRNA target sequence for Tsc2 (NM_011647.1,3049-3067).
gtccgcagcagaatacaga

SEQ ID NO: 665986 - DNA, 19 bp, Mus musculus
  siRNA target sequence for Tsc2 (NM_011647.1,3095-3113).
ctgcggatgagaactctat

SEQ ID NO: 665987 - DNA, 19 bp, Mus musculus
  siRNA target sequence for Tsc2 (NM_011647.1,3184-3202).
cgatatgtgttctccaatt

SEQ ID NO: 665988 - DNA, 19 bp, Mus musculus
  siRNA target sequence for Tsc2 (NM_011647.1,3355-3373).
cagggtggctcggattcaa

SEQ ID NO: 665989 - DNA, 19 bp, Mus musculus
  siRNA target sequence for Tsc2 (NM_011647.1,3505-3523).
gttggtgtcctggatactt

SEQ ID NO: 665990 - DNA, 19 bp, Mus musculus
  siRNA target sequence for Tsc2 (NM_011647.1,4031-4049).
ccgaattggaggatttcga

SEQ ID NO: 665991 - DNA, 19 bp, Mus musculus
  siRNA target sequence for Tsc2 (NM_011647.1,4112-4130).
catctagccaggaagaaaa

SEQ ID NO: 665992 - DNA, 19 bp, Mus musculus
  siRNA target sequence for Tsc2 (NM_011647.1,4231-4249).
cagcctttgagcaagtcta

SEQ ID NO: 665993 - DNA, 19 bp, Mus musculus
  siRNA target sequence for Tsc2 (NM_011647.1,4299-4317).
ggacaagattgatattgga

SEQ ID NO: 665994 - DNA, 19 bp, Mus musculus
  siRNA target sequence for Tsc2 (NM_011647.1,4477-4495).
ggctataccatctctgatt

SEQ ID NO: 665995 - DNA, 19 bp, Mus musculus
  siRNA target sequence for Tsc2 (NM_011647.1,4659-4677).
gcccaatgagtcctttgaa

SEQ ID NO: 665996 - DNA, 19 bp, Mus musculus
  siRNA target sequence for Tsc2 (NM_011647.1,4699-4717).
cagattccatcctatgaca

SEQ ID NO: 665997 - DNA, 19 bp, Mus musculus
  siRNA target sequence for Tsc2 (NM_011647.1,5125-5143).
gactacaagtgcaacctat

SEQ ID NO: 665998 - DNA, 19 bp, Mus musculus
  siRNA target sequence for Tsc2 (NM_011647.1,5219-5237).
gggcgctccctgttgtgat

SEQ ID NO: 665999 - DNA, 19 bp, Mus musculus
  siRNA target sequence for Tsc2 (NM_011647.1,5338-5356).
gcaagactccgccacatta

SEQ ID NO: 666000 - DNA, 19 bp, Mus musculus
  siRNA target sequence for Tsc2 (NM_011647.1,5339-5357).
caagactccgccacattaa

SEQ ID NO: 666001 - DNA, 19 bp, Mus musculus
  siRNA target sequence for Tsc2 (NM_011647.1,5377-5395).
cgtgaagaggtgcactatt

SEQ ID NO: 666002 - DNA, 19 bp, Mus musculus
  siRNA target sequence for Tsc2 (NM_011647.1,5380-5398).
gaagaggtgcactattcca

SEQ ID NO: 666003 - DNA, 19 bp, Mus musculus
  siRNA target sequence for Tsc2 (NM_011647.1,5488-5506).
cggaagcgcctcatttcct

SEQ ID NO: 666004 - DNA, 19 bp, Mus musculus
  siRNA target sequence for Bcl2l13 (NM_153516.1,191-209).
cgactgcgtctctaggatt

SEQ ID NO: 666005 - DNA, 19 bp, Mus musculus
  siRNA target sequence for Bcl2l13 (NM_153516.1,194-212).
ctgcgtctctaggatttca

SEQ ID NO: 666006 - DNA, 19 bp, Mus musculus
  siRNA target sequence for Bcl2l13 (NM_153516.1,196-214).
gcgtctctaggatttcact

SEQ ID NO: 666007 - DNA, 19 bp, Mus musculus
  siRNA target sequence for Bcl2l13 (NM_153516.1,197-215).
cgtctctaggatttcacta

SEQ ID NO: 666008 - DNA, 19 bp, Mus musculus
  siRNA target sequence for Bcl2l13 (NM_153516.1,198-216).
gtctctaggatttcactat

SEQ ID NO: 666009 - DNA, 19 bp, Mus musculus
  siRNA target sequence for Bcl2l13 (NM_153516.1,200-218).
ctctaggatttcactatga

SEQ ID NO: 666010 - DNA, 19 bp, Mus musculus
  siRNA target sequence for Bcl2l13 (NM_153516.1,205-223).
ggatttcactatgaaacaa

SEQ ID NO: 666011 - DNA, 19 bp, Mus musculus
  siRNA target sequence for Bcl2l13 (NM_153516.1,281-299).
cacccccaggagttcaact

SEQ ID NO: 666012 - DNA, 19 bp, Mus musculus
  siRNA target sequence for Bcl2l13 (NM_153516.1,315-333).
gtctctgaatccagaagtt

SEQ ID NO: 666013 - DNA, 19 bp, Mus musculus
  siRNA target sequence for Bcl2l13 (NM_153516.1,319-337).
ctgaatccagaagttttat

SEQ ID NO: 666014 - DNA, 19 bp, Mus musculus
  siRNA target sequence for Bcl2l13 (NM_153516.1,321-339).
gaatccagaagttttatta

SEQ ID NO: 666015 - DNA, 19 bp, Mus musculus
  siRNA target sequence for Bcl2l13 (NM_153516.1,455-473).
ccgagagctccatagaaga

SEQ ID NO: 666016 - DNA, 19 bp, Mus musculus
  siRNA target sequence for Bcl2l13 (NM_153516.1,549-567).
cagccagccagtgacatat

SEQ ID NO: 666017 - DNA, 19 bp, Mus musculus
  siRNA target sequence for Bcl2l13 (NM_153516.1,561-579).
gacatatgaggcatatcgt

SEQ ID NO: 666018 - DNA, 19 bp, Mus musculus
  siRNA target sequence for Bcl2l13 (NM_153516.1,568-586).
gaggcatatcgtgaatgta

SEQ ID NO: 666019 - DNA, 19 bp, Mus musculus
  siRNA target sequence for Bcl2l13 (NM_153516.1,570-588).
ggcatatcgtgaatgtaca

SEQ ID NO: 666020 - DNA, 19 bp, Mus musculus
  siRNA target sequence for Bcl2l13 (NM_153516.1,603-621).
ccatgccagcggatggaat

SEQ ID NO: 666021 - DNA, 19 bp, Mus musculus
  siRNA target sequence for Bcl2l13 (NM_153516.1,604-622).
catgccagcggatggaata

SEQ ID NO: 666022 - DNA, 19 bp, Mus musculus
  siRNA target sequence for Bcl2l13 (NM_153516.1,609-627).
cagcggatggaataagctt

SEQ ID NO: 666023 - DNA, 19 bp, Mus musculus
  siRNA target sequence for Bcl2l13 (NM_153516.1,611-629).
gcggatggaataagctttt

SEQ ID NO: 666024 - DNA, 19 bp, Mus musculus
  siRNA target sequence for Bcl2l13 (NM_153516.1,614-632).
gatggaataagcttttggt

SEQ ID NO: 666025 - DNA, 19 bp, Mus musculus
  siRNA target sequence for Bcl2l13 (NM_153516.1,624-642).
gcttttggtgcctctagtt

SEQ ID NO: 666026 - DNA, 19 bp, Mus musculus
  siRNA target sequence for Bcl2l13 (NM_153516.1,630-648).
ggtgcctctagttttgcta

SEQ ID NO: 666027 - DNA, 19 bp, Mus musculus
  siRNA target sequence for Bcl2l13 (NM_153516.1,635-653).
ctctagttttgctacaaca

SEQ ID NO: 666028 - DNA, 19 bp, Mus musculus
  siRNA target sequence for Bcl2l13 (NM_153516.1,649-667).
caacacctgcttttggaat

SEQ ID NO: 666029 - DNA, 19 bp, Mus musculus
  siRNA target sequence for Bcl2l13 (NM_153516.1,652-670).
cacctgcttttggaattga

SEQ ID NO: 666030 - DNA, 19 bp, Mus musculus
  siRNA target sequence for Bcl2l13 (NM_153516.1,735-753).
cgccgcagagttcatcatt

SEQ ID NO: 666031 - DNA, 19 bp, Mus musculus
  siRNA target sequence for Bcl2l13 (NM_153516.1,811-829).
gggatcattgcggaagata

SEQ ID NO: 666032 - DNA, 19 bp, Mus musculus
  siRNA target sequence for Bcl2l13 (NM_153516.1,816-834).
cattgcggaagatagcaat

SEQ ID NO: 666033 - DNA, 19 bp, Mus musculus
  siRNA target sequence for Bcl2l13 (NM_153516.1,820-838).
gcggaagatagcaatgaca

SEQ ID NO: 666034 - DNA, 19 bp, Mus musculus
  siRNA target sequence for Bcl2l13 (NM_153516.1,821-839).
cggaagatagcaatgacat

SEQ ID NO: 666035 - DNA, 19 bp, Mus musculus
  siRNA target sequence for Bcl2l13 (NM_153516.1,856-874).
gacaactccggacaagtta

SEQ ID NO: 666036 - DNA, 19 bp, Mus musculus
  siRNA target sequence for Bcl2l13 (NM_153516.1,858-876).
caactccggacaagttagt

SEQ ID NO: 666037 - DNA, 19 bp, Mus musculus
  siRNA target sequence for Bcl2l13 (NM_153516.1,1206-1224).
ccccactccgtctgtgttt

SEQ ID NO: 666038 - DNA, 19 bp, Mus musculus
  siRNA target sequence for Bcl2l13 (NM_153516.1,1453-1471).
ggagttgcactggctttaa

SEQ ID NO: 666039 - DNA, 19 bp, Mus musculus
  siRNA target sequence for Psme1 (NM_011189.1,162-180).
cctgcttgggagctatttt

SEQ ID NO: 666040 - DNA, 19 bp, Mus musculus
  siRNA target sequence for Psme1 (NM_011189.1,196-214).
gagttggatgcgttcttaa

SEQ ID NO: 666041 - DNA, 19 bp, Mus musculus
  siRNA target sequence for Psme1 (NM_011189.1,417-435).
cctcctgcaacgcctaaaa

SEQ ID NO: 666042 - DNA, 19 bp, Mus musculus
  siRNA target sequence for Psme1 (NM_011189.1,420-438).
cctgcaacgcctaaaacct

SEQ ID NO: 666043 - DNA, 19 bp, Mus musculus
  siRNA target sequence for Psme1 (NM_011189.1,480-498).
ctggttgcagctacagata

SEQ ID NO: 666044 - DNA, 19 bp, Mus musculus
  siRNA target sequence for Psme1 (NM_011189.1,654-672).
gccccacgtgggtgactat

SEQ ID NO: 666045 - DNA, 19 bp, Mus musculus
  siRNA target sequence for Psme1 (NM_011189.1,735-753).
gatccgaaatgcttatgct

SEQ ID NO: 666046 - DNA, 19 bp, Mus musculus
  siRNA target sequence for Cdk5r (NM_009871.2,690-708).
gcaacatcgcgcatctcaa

SEQ ID NO: 666047 - DNA, 19 bp, Mus musculus
  siRNA target sequence for Cdk5r (NM_009871.2,698-716).
gcgcatctcaacaatgaga

SEQ ID NO: 666048 - DNA, 19 bp, Mus musculus
  siRNA target sequence for Cdk5r (NM_009871.2,919-937).
gcgctgcctgggtgagttt

SEQ ID NO: 666049 - DNA, 19 bp, Mus musculus
  siRNA target sequence for Cdk5r (NM_009871.2,1238-1256).
gaccgttgcctctcagtta

SEQ ID NO: 666050 - DNA, 19 bp, Mus musculus
  siRNA target sequence for Cdk5r (NM_009871.2,1241-1259).
cgttgcctctcagttatca

SEQ ID NO: 666051 - DNA, 19 bp, Mus musculus
  siRNA target sequence for Cdk5r (NM_009871.2,1273-1291).
caagatgctgcagatcaat

SEQ ID NO: 666052 - DNA, 19 bp, Mus musculus
  siRNA target sequence for Cdk5r (NM_009871.2,1288-1306).
caatgccgacccacactat

SEQ ID NO: 666053 - DNA, 19 bp, Mus musculus
  siRNA target sequence for Cdk5r (NM_009871.2,1292-1310).
gccgacccacactatttca

SEQ ID NO: 666054 - DNA, 19 bp, Mus musculus
  siRNA target sequence for Cdk5r (NM_009871.2,1294-1312).
cgacccacactatttcaca

SEQ ID NO: 666055 - DNA, 19 bp, Mus musculus
  siRNA target sequence for Cdk5r (NM_009871.2,1318-1336).
gttctctgacttgaagaat

SEQ ID NO: 666056 - DNA, 19 bp, Mus musculus
  siRNA target sequence for Noxa1 (NM_172204.2,379-397).
cgctggctaggatgtactt

SEQ ID NO: 666057 - DNA, 19 bp, Mus musculus
  siRNA target sequence for Noxa1 (NM_172204.2,380-398).
gctggctaggatgtacttt

SEQ ID NO: 666058 - DNA, 19 bp, Mus musculus
  siRNA target sequence for Noxa1 (NM_172204.2,384-402).
gctaggatgtactttaaca

SEQ ID NO: 666059 - DNA, 19 bp, Mus musculus
  siRNA target sequence for Noxa1 (NM_172204.2,439-457).
ctgcgctgcgggcatttga

SEQ ID NO: 666060 - DNA, 19 bp, Mus musculus
  siRNA target sequence for Noxa1 (NM_172204.2,604-622).
cacaactgggtctgaactt

SEQ ID NO: 666061 - DNA, 19 bp, Mus musculus
  siRNA target sequence for Noxa1 (NM_172204.2,613-631).
gtctgaacttcaaattgca

SEQ ID NO: 666062 - DNA, 19 bp, Mus musculus
  siRNA target sequence for Noxa1 (NM_172204.2,688-706).
ccaaggctgccaatactct

SEQ ID NO: 666063 - DNA, 19 bp, Mus musculus
  siRNA target sequence for Noxa1 (NM_172204.2,689-707).
caaggctgccaatactcta

SEQ ID NO: 666064 - DNA, 19 bp, Mus musculus
  siRNA target sequence for Noxa1 (NM_172204.2,730-748).
cagagggggctcaagacat

SEQ ID NO: 666065 - DNA, 19 bp, Mus musculus
  siRNA target sequence for Noxa1 (NM_172204.2,827-845).
gcctcccaggcgataccta

SEQ ID NO: 666066 - DNA, 19 bp, Mus musculus
  siRNA target sequence for Noxa1 (NM_172204.2,828-846).
cctcccaggcgatacctaa

SEQ ID NO: 666067 - DNA, 19 bp, Mus musculus
  siRNA target sequence for Noxa1 (NM_172204.2,829-847).
ctcccaggcgatacctaaa

SEQ ID NO: 666068 - DNA, 19 bp, Mus musculus
  siRNA target sequence for Noxa1 (NM_172204.2,832-850).
ccaggcgatacctaaaaca

SEQ ID NO: 666069 - DNA, 19 bp, Mus musculus
  siRNA target sequence for Noxa1 (NM_172204.2,833-851).
caggcgatacctaaaacat

SEQ ID NO: 666070 - DNA, 19 bp, Mus musculus
  siRNA target sequence for Noxa1 (NM_172204.2,835-853).
ggcgatacctaaaacatct

SEQ ID NO: 666071 - DNA, 19 bp, Mus musculus
  siRNA target sequence for Noxa1 (NM_172204.2,1010-1028).
cacgagccctggcctatat

SEQ ID NO: 666072 - DNA, 19 bp, Mus musculus
  siRNA target sequence for Noxa1 (NM_172204.2,1012-1030).
cgagccctggcctatatga

SEQ ID NO: 666073 - DNA, 19 bp, Mus musculus
  siRNA target sequence for Noxa1 (NM_172204.2,1013-1031).
gagccctggcctatatgat

SEQ ID NO: 666074 - DNA, 19 bp, Mus musculus
  siRNA target sequence for Noxa1 (NM_172204.2,1016-1034).
ccctggcctatatgatagt

SEQ ID NO: 666075 - DNA, 19 bp, Mus musculus
  siRNA target sequence for Noxa1 (NM_172204.2,1017-1035).
cctggcctatatgatagtt

SEQ ID NO: 666076 - DNA, 19 bp, Mus musculus
  siRNA target sequence for Noxa1 (NM_172204.2,1018-1036).
ctggcctatatgatagttt

SEQ ID NO: 666077 - DNA, 19 bp, Mus musculus
  siRNA target sequence for Noxa1 (NM_172204.2,1087-1105).
ctgagggagcagctacaaa

SEQ ID NO: 666078 - DNA, 19 bp, Mus musculus
  siRNA target sequence for Noxa1 (NM_172204.2,1102-1120).
caaaggaccctgaatcctt

SEQ ID NO: 666079 - DNA, 19 bp, Mus musculus
  siRNA target sequence for Noxa1 (NM_172204.2,1179-1197).
ggcctgtccagttttcaga

SEQ ID NO: 666080 - DNA, 19 bp, Mus musculus
  siRNA target sequence for Noxa1 (NM_172204.2,1378-1396).
cagtcctctaccaagtagt

SEQ ID NO: 666081 - DNA, 19 bp, Mus musculus
  siRNA target sequence for Noxa1 (NM_172204.2,1417-1435).
cccaaagaccggaggattt

SEQ ID NO: 666082 - DNA, 19 bp, Mus musculus
  siRNA target sequence for Noxo1 (NM_027988.1,251-269).
ctccagaagacccttaaga

SEQ ID NO: 666083 - DNA, 19 bp, Mus musculus
  siRNA target sequence for Noxo1 (NM_027988.1,292-310).
cctgctacggagatctgaa

SEQ ID NO: 666084 - DNA, 19 bp, Mus musculus
  siRNA target sequence for Noxo1 (NM_027988.1,366-384).
gtcgaggactggtacgttt

SEQ ID NO: 666085 - DNA, 19 bp, Mus musculus
  siRNA target sequence for Noxo1 (NM_027988.1,450-468).
cacttcacggcttctttgt

SEQ ID NO: 666086 - DNA, 19 bp, Mus musculus
  siRNA target sequence for Noxo1 (NM_027988.1,557-575).
ggcagccttgacattcata

SEQ ID NO: 666087 - DNA, 19 bp, Mus musculus
  siRNA target sequence for Noxo1 (NM_027988.1,781-799).
gtcaggcctggctttgcaa

SEQ ID NO: 666088 - DNA, 19 bp, Mus musculus
  siRNA target sequence for Ppp2r4 (NM_138748.2,303-321).
ctccaactactcagaactt

SEQ ID NO: 666089 - DNA, 19 bp, Mus musculus
  siRNA target sequence for Ppp2r4 (NM_138748.2,305-323).
ccaactactcagaacttta

SEQ ID NO: 666090 - DNA, 19 bp, Mus musculus
  siRNA target sequence for Ppp2r4 (NM_138748.2,306-324).
caactactcagaactttat

SEQ ID NO: 666091 - DNA, 19 bp, Mus musculus
  siRNA target sequence for Ppp2r4 (NM_138748.2,373-391).
gcgctctcaggcatatgct

SEQ ID NO: 666092 - DNA, 19 bp, Mus musculus
  siRNA target sequence for Ppp2r4 (NM_138748.2,382-400).
ggcatatgctgactacatt

SEQ ID NO: 666093 - DNA, 19 bp, Mus musculus
  siRNA target sequence for Ppp2r4 (NM_138748.2,406-424).
catccttaccctcaatgaa

SEQ ID NO: 666094 - DNA, 19 bp, Mus musculus
  siRNA target sequence for Ppp2r4 (NM_138748.2,482-500).
ctggtggcacttcttgata

SEQ ID NO: 666095 - DNA, 19 bp, Mus musculus
  siRNA target sequence for Ppp2r4 (NM_138748.2,505-523).
ggataggtggattgatgaa

SEQ ID NO: 666096 - DNA, 19 bp, Mus musculus
  siRNA target sequence for Ppp2r4 (NM_138748.2,506-524).
gataggtggattgatgaaa

SEQ ID NO: 666097 - DNA, 19 bp, Mus musculus
  siRNA target sequence for Ppp2r4 (NM_138748.2,682-700).
ggggaactccacacgaatt

SEQ ID NO: 666098 - DNA, 19 bp, Mus musculus
  siRNA target sequence for Ppp2r4 (NM_138748.2,799-817).
caaggtgtttgataggtat

SEQ ID NO: 666099 - DNA, 19 bp, Mus musculus
  siRNA target sequence for Ppp2r4 (NM_138748.2,802-820).
ggtgtttgataggtatctt

SEQ ID NO: 666100 - DNA, 19 bp, Mus musculus
  siRNA target sequence for Ppp2r4 (NM_138748.2,1097-1115).
ccctcctggtctaaagtga

SEQ ID NO: 666101 - DNA, 19 bp, Mus musculus
  siRNA target sequence for Ppp2r4 (NM_138748.2,1098-1116).
cctcctggtctaaagtgaa

SEQ ID NO: 666102 - DNA, 19 bp, Mus musculus
  siRNA target sequence for Ppp2r4 (NM_138748.2,1120-1138).
gggcctcattcgaatgtat

SEQ ID NO: 666103 - DNA, 19 bp, Mus musculus
  siRNA target sequence for Ppp2r4 (NM_138748.2,1121-1139).
ggcctcattcgaatgtata

SEQ ID NO: 666104 - DNA, 19 bp, Mus musculus
  siRNA target sequence for Ppp2r4 (NM_138748.2,1122-1140).
gcctcattcgaatgtataa

SEQ ID NO: 666105 - DNA, 19 bp, Mus musculus
  siRNA target sequence for Alox5ap (NM_009663.1,306-324).
ccttcgccggactgatgta

SEQ ID NO: 666106 - DNA, 19 bp, Mus musculus
  siRNA target sequence for Alox5ap (NM_009663.1,378-396).
gcacccctggctacatctt

SEQ ID NO: 666107 - DNA, 19 bp, Mus musculus
  siRNA target sequence for Alox5ap (NM_009663.1,441-459).
ggatactcaaccattacct

SEQ ID NO: 666108 - DNA, 19 bp, Mus musculus
  siRNA target sequence for Alox5ap (NM_009663.1,474-492).
gaagcgactttgagaacta

SEQ ID NO: 666109 - DNA, 19 bp, Mus musculus
  siRNA target sequence for Clps (NM_025469.1,146-164).
gaggacggtgagatctgtt

SEQ ID NO: 666110 - DNA, 19 bp, Mus musculus
  siRNA target sequence for Clps (NM_025469.1,149-167).
gacggtgagatctgtttga

SEQ ID NO: 666111 - DNA, 19 bp, Mus musculus
  siRNA target sequence for Guca2 (NM_008190.1,119-137).
gagtcagtgaaaaaactta

SEQ ID NO: 666112 - DNA, 19 bp, Mus musculus
  siRNA target sequence for Guca2 (NM_008190.1,169-187).
ggtgagtcacaagaagttt

SEQ ID NO: 666113 - DNA, 19 bp, Mus musculus
  siRNA target sequence for Guca2 (NM_008190.1,209-227).
gtggcaccacagctatgta

SEQ ID NO: 666114 - DNA, 19 bp, Mus musculus
  siRNA target sequence for Guca2 (NM_008190.1,211-229).
ggcaccacagctatgtagt

SEQ ID NO: 666115 - DNA, 19 bp, Mus musculus
  siRNA target sequence for Guca2 (NM_008190.1,212-230).
gcaccacagctatgtagta

SEQ ID NO: 666116 - DNA, 19 bp, Mus musculus
  siRNA target sequence for Guca2b (NM_008191.1,145-163).
gtgcacagggtgtctacat

SEQ ID NO: 666117 - DNA, 19 bp, Mus musculus
  siRNA target sequence for Guca2b (NM_008191.1,147-165).
gcacagggtgtctacatca

SEQ ID NO: 666118 - DNA, 19 bp, Mus musculus
  siRNA target sequence for Guca2b (NM_008191.1,148-166).
cacagggtgtctacatcaa

SEQ ID NO: 666119 - DNA, 19 bp, Mus musculus
  siRNA target sequence for Cabyr (NM_027687.2,174-192).
ccagtttgcagccgtttat

SEQ ID NO: 666120 - DNA, 19 bp, Mus musculus
  siRNA target sequence for Cabyr (NM_027687.2,175-193).
cagtttgcagccgtttatt

SEQ ID NO: 666121 - DNA, 19 bp, Mus musculus
  siRNA target sequence for Cabyr (NM_027687.2,182-200).
cagccgtttattttaaaga

SEQ ID NO: 666122 - DNA, 19 bp, Mus musculus
  siRNA target sequence for Cabyr (NM_027687.2,185-203).
ccgtttattttaaagaact

SEQ ID NO: 666123 - DNA, 19 bp, Mus musculus
  siRNA target sequence for Cabyr (NM_027687.2,220-238).
gggaattcgtctctagata

SEQ ID NO: 666124 - DNA, 19 bp, Mus musculus
  siRNA target sequence for Cabyr (NM_027687.2,221-239).
ggaattcgtctctagatat

SEQ ID NO: 666125 - DNA, 19 bp, Mus musculus
  siRNA target sequence for Cabyr (NM_027687.2,222-240).
gaattcgtctctagatata

SEQ ID NO: 666126 - DNA, 19 bp, Mus musculus
  siRNA target sequence for Cabyr (NM_027687.2,227-245).
cgtctctagatataaaaga

SEQ ID NO: 666127 - DNA, 19 bp, Mus musculus
  siRNA target sequence for Cabyr (NM_027687.2,412-430).
ctatttagcaacaaaacca

SEQ ID NO: 666128 - DNA, 19 bp, Mus musculus
  siRNA target sequence for Cabyr (NM_027687.2,443-461).
cagttcatgctgaagtaca

SEQ ID NO: 666129 - DNA, 19 bp, Mus musculus
  siRNA target sequence for Cabyr (NM_027687.2,563-581).
ctgccgagtacgcttatgt

SEQ ID NO: 666130 - DNA, 19 bp, Mus musculus
  siRNA target sequence for Cabyr (NM_027687.2,600-618).
gtttgccgctcagatgtta

SEQ ID NO: 666131 - DNA, 19 bp, Mus musculus
  siRNA target sequence for Cabyr (NM_027687.2,604-622).
gccgctcagatgttaggta

SEQ ID NO: 666132 - DNA, 19 bp, Mus musculus
  siRNA target sequence for Cabyr (NM_027687.2,605-623).
ccgctcagatgttaggtaa

SEQ ID NO: 666133 - DNA, 19 bp, Mus musculus
  siRNA target sequence for Cabyr (NM_027687.2,606-624).
cgctcagatgttaggtaat

SEQ ID NO: 666134 - DNA, 19 bp, Mus musculus
  siRNA target sequence for Cabyr (NM_027687.2,608-626).
ctcagatgttaggtaatgt

SEQ ID NO: 666135 - DNA, 19 bp, Mus musculus
  siRNA target sequence for Cabyr (NM_027687.2,619-637).
ggtaatgtgccatctactt

SEQ ID NO: 666136 - DNA, 19 bp, Mus musculus
  siRNA target sequence for Cabyr (NM_027687.2,620-638).
gtaatgtgccatctactta

SEQ ID NO: 666137 - DNA, 19 bp, Mus musculus
  siRNA target sequence for Cabyr (NM_027687.2,654-672).
ggtggacgtggcaacaagt

SEQ ID NO: 666138 - DNA, 19 bp, Mus musculus
  siRNA target sequence for Cabyr (NM_027687.2,655-673).
gtggacgtggcaacaagta

SEQ ID NO: 666139 - DNA, 19 bp, Mus musculus
  siRNA target sequence for Cabyr (NM_027687.2,749-767).
ctggagagacggtagaagt

SEQ ID NO: 666140 - DNA, 19 bp, Mus musculus
  siRNA target sequence for Cabyr (NM_027687.2,785-803).
catctgcgcaggtagttgt

SEQ ID NO: 666141 - DNA, 19 bp, Mus musculus
  siRNA target sequence for Cabyr (NM_027687.2,846-864).
ccccttgcagggtgaacaa

SEQ ID NO: 666142 - DNA, 19 bp, Mus musculus
  siRNA target sequence for Cabyr (NM_027687.2,886-904).
cctgatacccaggttacat

SEQ ID NO: 666143 - DNA, 19 bp, Mus musculus
  siRNA target sequence for Cabyr (NM_027687.2,909-927).
cagtcgtatatcatccata

SEQ ID NO: 666144 - DNA, 19 bp, Mus musculus
  siRNA target sequence for Cabyr (NM_027687.2,911-929).
gtcgtatatcatccatata

SEQ ID NO: 666145 - DNA, 19 bp, Mus musculus
  siRNA target sequence for Cabyr (NM_027687.2,913-931).
cgtatatcatccatatata

SEQ ID NO: 666146 - DNA, 19 bp, Mus musculus
  siRNA target sequence for Cabyr (NM_027687.2,969-987).
ggagataccaggatacata

SEQ ID NO: 666147 - DNA, 19 bp, Mus musculus
  siRNA target sequence for Cabyr (NM_027687.2,972-990).
gataccaggatacatagtt

SEQ ID NO: 666148 - DNA, 19 bp, Mus musculus
  siRNA target sequence for Cabyr (NM_027687.2,984-1002).
catagttatcccttttact

SEQ ID NO: 666149 - DNA, 19 bp, Mus musculus
  siRNA target sequence for Cabyr (NM_027687.2,993-1011).
cccttttactgatcatgat

SEQ ID NO: 666150 - DNA, 19 bp, Mus musculus
  siRNA target sequence for Cabyr (NM_027687.2,1009-1027).
gatcaagttgcttgtgtta

SEQ ID NO: 666151 - DNA, 19 bp, Mus musculus
  siRNA target sequence for Cabyr (NM_027687.2,1019-1037).
cttgtgttaaagaaattga

SEQ ID NO: 666152 - DNA, 19 bp, Mus musculus
  siRNA target sequence for Cabyr (NM_027687.2,1066-1084).
gtagaacccaagactaaaa

SEQ ID NO: 666153 - DNA, 19 bp, Mus musculus
  siRNA target sequence for Cabyr (NM_027687.2,1069-1087).
gaacccaagactaaaatat

SEQ ID NO: 666154 - DNA, 19 bp, Mus musculus
  siRNA target sequence for Cabyr (NM_027687.2,1270-1288).
cttgaaacggagatcgtta

SEQ ID NO: 666155 - DNA, 19 bp, Mus musculus
  siRNA target sequence for Cabyr (NM_027687.2,1277-1295).
cggagatcgttatcataaa

SEQ ID NO: 666156 - DNA, 19 bp, Mus musculus
  siRNA target sequence for Cabyr (NM_027687.2,1332-1350).
cgctgcaccccattcatct

SEQ ID NO: 666157 - DNA, 19 bp, Mus musculus
  siRNA target sequence for Cabyr (NM_027687.2,1370-1388).
cgccaggaggccttactga

SEQ ID NO: 666158 - DNA, 19 bp, Mus musculus
  siRNA target sequence for Cabyr (NM_181731.2,640-658).
ggacaaccaccaccatatt

SEQ ID NO: 666159 - DNA, 19 bp, Mus musculus
  siRNA target sequence for Cabyr (NM_181731.2,649-667).
ccaccatattctaatatgt

SEQ ID NO: 666160 - DNA, 19 bp, Mus musculus
  siRNA target sequence for Cabyr (NM_181731.2,666-684).
gtggacactttattgtcta

SEQ ID NO: 666161 - DNA, 19 bp, Mus musculus
  siRNA target sequence for Cabyr (NM_181731.2,739-757).
ccccaagcaaccctgtatt

SEQ ID NO: 666162 - DNA, 19 bp, Mus musculus
  siRNA target sequence for Cabyr (NM_181731.2,745-763).
gcaaccctgtatttaccta

SEQ ID NO: 666163 - DNA, 19 bp, Mus musculus
  siRNA target sequence for Cabyr (NM_181731.2,746-764).
caaccctgtatttacctaa

SEQ ID NO: 666164 - DNA, 19 bp, Mus musculus
  siRNA target sequence for Cabyr (NM_181731.2,750-768).
cctgtatttacctaatcct

SEQ ID NO: 666165 - DNA, 19 bp, Mus musculus
  siRNA target sequence for Cabyr (NM_181731.2,767-785).
ctaaggagccacagtttct

SEQ ID NO: 666166 - DNA, 19 bp, Mus musculus
  siRNA target sequence for Cabyr (NM_181731.2,806-824).
cgtctccaacttatgtgat

SEQ ID NO: 666167 - DNA, 19 bp, Mus musculus
  siRNA target sequence for Cabyr (NM_181731.2,843-861).
gaccaatgccccacctttt

SEQ ID NO: 666168 - DNA, 19 bp, Mus musculus
  siRNA target sequence for Cabyr (NM_181731.2,851-869).
ccccaccttttatattagt

SEQ ID NO: 666169 - DNA, 19 bp, Mus musculus
  siRNA target sequence for Cabyr (NM_181731.2,1065-1083).
gaaaagcccagtctttctt

SEQ ID NO: 666170 - DNA, 19 bp, Mus musculus
  siRNA target sequence for Cabyr (NM_181731.2,1091-1109).
ctttcccagtagaagatgt

SEQ ID NO: 666171 - DNA, 19 bp, Mus musculus
  siRNA target sequence for Cabyr (NM_181731.2,1097-1115).
cagtagaagatgtagctaa

SEQ ID NO: 666172 - DNA, 19 bp, Mus musculus
  siRNA target sequence for Cabyr (NM_181731.2,1126-1144).
ggatctggtgacaaacgta

SEQ ID NO: 666173 - DNA, 19 bp, Mus musculus
  siRNA target sequence for Cabyr (NM_181731.2,1147-1165).
ccctttggaagttatggta

SEQ ID NO: 666174 - DNA, 19 bp, Mus musculus
  siRNA target sequence for Cabyr (NM_181731.2,1148-1166).
cctttggaagttatggtat

SEQ ID NO: 666175 - DNA, 19 bp, Mus musculus
  siRNA target sequence for Cabyr (NM_181731.2,1149-1167).
ctttggaagttatggtatt

SEQ ID NO: 666176 - DNA, 19 bp, Mus musculus
  siRNA target sequence for Spa17 (NM_011449.1,115-133).
cacccactaccgaattcca

SEQ ID NO: 666177 - DNA, 19 bp, Mus musculus
  siRNA target sequence for Spa17 (NM_011449.1,161-179).
ctgacacgggagattctga

SEQ ID NO: 666178 - DNA, 19 bp, Mus musculus
  siRNA target sequence for Spa17 (NM_011449.1,180-198).
gggagcaaccggacaatat

SEQ ID NO: 666179 - DNA, 19 bp, Mus musculus
  siRNA target sequence for Spa17 (NM_011449.1,181-199).
ggagcaaccggacaatata

SEQ ID NO: 666180 - DNA, 19 bp, Mus musculus
  siRNA target sequence for Spa17 (NM_011449.1,184-202).
gcaaccggacaatatacca

SEQ ID NO: 666181 - DNA, 19 bp, Mus musculus
  siRNA target sequence for Spa17 (NM_011449.1,204-222).
cttttgccgcagcgtattt

SEQ ID NO: 666182 - DNA, 19 bp, Mus musculus
  siRNA target sequence for Spa17 (NM_011449.1,209-227).
gccgcagcgtattttgaga

SEQ ID NO: 666183 - DNA, 19 bp, Mus musculus
  siRNA target sequence for Spa17 (NM_011449.1,210-228).
ccgcagcgtattttgagaa

SEQ ID NO: 666184 - DNA, 19 bp, Mus musculus
  siRNA target sequence for Spa17 (NM_011449.1,226-244).
gaaccttctagagaaaaga

SEQ ID NO: 666185 - DNA, 19 bp, Mus musculus
  siRNA target sequence for Spa17 (NM_011449.1,283-301).
ggtagaggaccgcttctat

SEQ ID NO: 666186 - DNA, 19 bp, Mus musculus
  siRNA target sequence for Spa17 (NM_011449.1,284-302).
gtagaggaccgcttctata

SEQ ID NO: 666187 - DNA, 19 bp, Mus musculus
  siRNA target sequence for Spa17 (NM_011449.1,287-305).
gaggaccgcttctataaca

SEQ ID NO: 666188 - DNA, 19 bp, Mus musculus
  siRNA target sequence for Spa17 (NM_011449.1,310-328).
cgcattcaaggaacaagaa

SEQ ID NO: 666189 - DNA, 19 bp, Mus musculus
  siRNA target sequence for Spa17 (NM_011449.1,342-360).
gtgaacaagaattagctaa

SEQ ID NO: 666190 - DNA, 19 bp, Mus musculus
  siRNA target sequence for Spa17 (NM_011449.1,430-448).
ggaggcggctgctctcaaa

SEQ ID NO: 666191 - DNA, 19 bp, Mus musculus
  siRNA target sequence for Spa17 (NM_011449.1,431-449).
gaggcggctgctctcaaaa

SEQ ID NO: 666192 - DNA, 19 bp, Mus musculus
  siRNA target sequence for Spa17 (NM_011449.1,435-453).
cggctgctctcaaaatcca

SEQ ID NO: 666193 - DNA, 19 bp, Mus musculus
  siRNA target sequence for Spa17 (NM_011449.1,504-522).
cagataagaatgagaatct

SEQ ID NO: 666194 - DNA, 19 bp, Mus musculus
  siRNA target sequence for Ccnd1 (NM_007631.1,250-268).
gtgcgccctccgtatctta

SEQ ID NO: 666195 - DNA, 19 bp, Mus musculus
  siRNA target sequence for Ccnd1 (NM_007631.1,252-270).
gcgccctccgtatcttact

SEQ ID NO: 666196 - DNA, 19 bp, Mus musculus
  siRNA target sequence for Ccnd1 (NM_007631.1,253-271).
cgccctccgtatcttactt

SEQ ID NO: 666197 - DNA, 19 bp, Mus musculus
  siRNA target sequence for Ccnd1 (NM_007631.1,255-273).
ccctccgtatcttacttca

SEQ ID NO: 666198 - DNA, 19 bp, Mus musculus
  siRNA target sequence for Ccnd1 (NM_007631.1,256-274).
cctccgtatcttacttcaa

SEQ ID NO: 666199 - DNA, 19 bp, Mus musculus
  siRNA target sequence for Ccnd1 (NM_007631.1,298-316).
catccatgcggaaaatcgt

SEQ ID NO: 666200 - DNA, 19 bp, Mus musculus
  siRNA target sequence for Ccnd1 (NM_007631.1,490-508).
ccttgactgccgagaagtt

SEQ ID NO: 666201 - DNA, 19 bp, Mus musculus
  siRNA target sequence for Ccnd1 (NM_007631.1,598-616).
ccatgactccccacgattt

SEQ ID NO: 666202 - DNA, 19 bp, Mus musculus
  siRNA target sequence for Ccnd1 (NM_007631.1,711-729).
gatgtgaagttcatttcca

SEQ ID NO: 666203 - DNA, 19 bp, Mus musculus
  siRNA target sequence for Ccnd1 (NM_007631.1,818-836).
ccgcacaacgcactttctt

SEQ ID NO: 666204 - DNA, 19 bp, Mus musculus
  siRNA target sequence for Ccnd1 (NM_007631.1,819-837).
cgcacaacgcactttcttt

SEQ ID NO: 666205 - DNA, 19 bp, Mus musculus
  siRNA target sequence for Ccne2 (NM_009830.1,15-33).
ccgtttacaagctaagcaa

SEQ ID NO: 666206 - DNA, 19 bp, Mus musculus
  siRNA target sequence for Ccne2 (NM_009830.1,62-80).
cgcaagaaacccagataat

SEQ ID NO: 666207 - DNA, 19 bp, Mus musculus
  siRNA target sequence for Ccne2 (NM_009830.1,63-81).
gcaagaaacccagataatt

SEQ ID NO: 666208 - DNA, 19 bp, Mus musculus
  siRNA target sequence for Ccne2 (NM_009830.1,103-121).
gcacaggatgtcaaaaaaa

SEQ ID NO: 666209 - DNA, 19 bp, Mus musculus
  siRNA target sequence for Ccne2 (NM_009830.1,148-166).
cagtatgagattaggaatt

SEQ ID NO: 666210 - DNA, 19 bp, Mus musculus
  siRNA target sequence for Ccne2 (NM_009830.1,150-168).
gtatgagattaggaattgt

SEQ ID NO: 666211 - DNA, 19 bp, Mus musculus
  siRNA target sequence for Ccne2 (NM_009830.1,190-208).
ggaatcagcccttgcatta

SEQ ID NO: 666212 - DNA, 19 bp, Mus musculus
  siRNA target sequence for Ccne2 (NM_009830.1,214-232).
gaaacaccccataaagaaa

SEQ ID NO: 666213 - DNA, 19 bp, Mus musculus
  siRNA target sequence for Ccne2 (NM_009830.1,294-312).
ctcacctctgccagattta

SEQ ID NO: 666214 - DNA, 19 bp, Mus musculus
  siRNA target sequence for Ccne2 (NM_009830.1,298-316).
cctctgccagatttaagct

SEQ ID NO: 666215 - DNA, 19 bp, Mus musculus
  siRNA target sequence for Ccne2 (NM_009830.1,363-381).
cagatacgtgcatgacaaa

SEQ ID NO: 666216 - DNA, 19 bp, Mus musculus
  siRNA target sequence for Ccne2 (NM_009830.1,365-383).
gatacgtgcatgacaaaca

SEQ ID NO: 666217 - DNA, 19 bp, Mus musculus
  siRNA target sequence for Ccne2 (NM_009830.1,413-431).
cacagatgaggtcaatact

SEQ ID NO: 666218 - DNA, 19 bp, Mus musculus
  siRNA target sequence for Ccne2 (NM_009830.1,440-458).
ggcttttagaggtttgtga

SEQ ID NO: 666219 - DNA, 19 bp, Mus musculus
  siRNA target sequence for Ccne2 (NM_009830.1,441-459).
gcttttagaggtttgtgaa

SEQ ID NO: 666220 - DNA, 19 bp, Mus musculus
  siRNA target sequence for Ccne2 (NM_009830.1,467-485).
ctcttcatagggagacatt

SEQ ID NO: 666221 - DNA, 19 bp, Mus musculus
  siRNA target sequence for Ccne2 (NM_009830.1,576-594).
gttcattgcttccaaactt

SEQ ID NO: 666222 - DNA, 19 bp, Mus musculus
  siRNA target sequence for Ccne2 (NM_009830.1,597-615).
ggaaatctacgctcctaaa

SEQ ID NO: 666223 - DNA, 19 bp, Mus musculus
  siRNA target sequence for Ccne2 (NM_009830.1,608-626).
ctcctaaactccaagagtt

SEQ ID NO: 666224 - DNA, 19 bp, Mus musculus
  siRNA target sequence for Ccne2 (NM_009830.1,644-662).
gtgcttgcagtgaagtaga

SEQ ID NO: 666225 - DNA, 19 bp, Mus musculus
  siRNA target sequence for Ccne2 (NM_009830.1,646-664).
gcttgcagtgaagtagata

SEQ ID NO: 666226 - DNA, 19 bp, Mus musculus
  siRNA target sequence for Ccne2 (NM_009830.1,647-665).
cttgcagtgaagtagatat

SEQ ID NO: 666227 - DNA, 19 bp, Mus musculus
  siRNA target sequence for Ccne2 (NM_009830.1,694-712).
gctttaaaatgggaacttt

SEQ ID NO: 666228 - DNA, 19 bp, Mus musculus
  siRNA target sequence for Ccne2 (NM_009830.1,816-834).
ccagatagctcagctttta

SEQ ID NO: 666229 - DNA, 19 bp, Mus musculus
  siRNA target sequence for Ccne2 (NM_009830.1,852-870).
catcgactctttagaattt

SEQ ID NO: 666230 - DNA, 19 bp, Mus musculus
  siRNA target sequence for Ccne2 (NM_009830.1,855-873).
cgactctttagaatttcaa

SEQ ID NO: 666231 - DNA, 19 bp, Mus musculus
  siRNA target sequence for Ccne2 (NM_009830.1,856-874).
gactctttagaatttcaat

SEQ ID NO: 666232 - DNA, 19 bp, Mus musculus
  siRNA target sequence for Ccne2 (NM_009830.1,885-903).
ggctgctgccgccttatgt

SEQ ID NO: 666233 - DNA, 19 bp, Mus musculus
  siRNA target sequence for Ccne2 (NM_009830.1,889-907).
gctgccgccttatgtcatt

SEQ ID NO: 666234 - DNA, 19 bp, Mus musculus
  siRNA target sequence for Ccne2 (NM_009830.1,890-908).
ctgccgccttatgtcattt

SEQ ID NO: 666235 - DNA, 19 bp, Mus musculus
  siRNA target sequence for Ccne2 (NM_009830.1,892-910).
gccgccttatgtcatttta

SEQ ID NO: 666236 - DNA, 19 bp, Mus musculus
  siRNA target sequence for Ccne2 (NM_009830.1,919-937).
gaagtggttaagaaagctt

SEQ ID NO: 666237 - DNA, 19 bp, Mus musculus
  siRNA target sequence for Ccne2 (NM_009830.1,985-1003).
ccttttgttagtgttgtaa

SEQ ID NO: 666238 - DNA, 19 bp, Mus musculus
  siRNA target sequence for Ccne2 (NM_009830.1,1090-1108).
gctttgctgaatgaagtaa

SEQ ID NO: 666239 - DNA, 19 bp, Mus musculus
  siRNA target sequence for Ccne2 (NM_009830.1,1095-1113).
gctgaatgaagtaaactat

SEQ ID NO: 666240 - DNA, 19 bp, Mus musculus
  siRNA target sequence for Ccne2 (NM_009830.1,1105-1123).
gtaaactatgtgaacatct

SEQ ID NO: 666241 - DNA, 19 bp, Mus musculus
  siRNA target sequence for Ccne2 (NM_009830.1,1143-1161).
gtcaccagtgtgtaatgga

SEQ ID NO: 666242 - DNA, 19 bp, Mus musculus
  siRNA target sequence for Ccne2 (NM_009830.1,1175-1193).
caccaaagagtactgaaaa

SEQ ID NO: 666243 - DNA, 19 bp, Mus musculus
  siRNA target sequence for 2900026H06Rik (NM_028392.1,249-267).
cgttacctgccttatatct

SEQ ID NO: 666244 - DNA, 19 bp, Mus musculus
  siRNA target sequence for 2900026H06Rik (NM_028392.1,250-268).
gttacctgccttatatctt

SEQ ID NO: 666245 - DNA, 19 bp, Mus musculus
  siRNA target sequence for 2900026H06Rik (NM_028392.1,338-356).
caaccacacgggagagtta

SEQ ID NO: 666246 - DNA, 19 bp, Mus musculus
  siRNA target sequence for 2900026H06Rik (NM_028392.1,341-359).
ccacacgggagagttacta

SEQ ID NO: 666247 - DNA, 19 bp, Mus musculus
  siRNA target sequence for 2900026H06Rik (NM_028392.1,374-392).
ggggggtcgggtcgtaata

SEQ ID NO: 666248 - DNA, 19 bp, Mus musculus
  siRNA target sequence for 2900026H06Rik (NM_028392.1,375-393).
gggggtcgggtcgtaatat

SEQ ID NO: 666249 - DNA, 19 bp, Mus musculus
  siRNA target sequence for 2900026H06Rik (NM_028392.1,376-394).
ggggtcgggtcgtaatatt

SEQ ID NO: 666250 - DNA, 19 bp, Mus musculus
  siRNA target sequence for 2900026H06Rik (NM_028392.1,377-395).
gggtcgggtcgtaatattt

SEQ ID NO: 666251 - DNA, 19 bp, Mus musculus
  siRNA target sequence for 2900026H06Rik (NM_028392.1,379-397).
gtcgggtcgtaatatttca

SEQ ID NO: 666252 - DNA, 19 bp, Mus musculus
  siRNA target sequence for 2900026H06Rik (NM_028392.1,426-444).
catcgtaggggtgaataca

SEQ ID NO: 666253 - DNA, 19 bp, Mus musculus
  siRNA target sequence for 2900026H06Rik (NM_028392.1,430-448).
gtaggggtgaatacaatgt

SEQ ID NO: 666254 - DNA, 19 bp, Mus musculus
  siRNA target sequence for 2900026H06Rik (NM_028392.1,561-579).
cttctgtctaccaacgata

SEQ ID NO: 666255 - DNA, 19 bp, Mus musculus
  siRNA target sequence for 2900026H06Rik (NM_028392.1,600-618).
gtcagtgagcgggataaga

SEQ ID NO: 666256 - DNA, 19 bp, Mus musculus
  siRNA target sequence for 2900026H06Rik (NM_028392.1,663-681).
gatcctgccaccatcacaa

SEQ ID NO: 666257 - DNA, 19 bp, Mus musculus
  siRNA target sequence for 2900026H06Rik (NM_028392.1,728-746).
caccccacgaagagtgttt

SEQ ID NO: 666258 - DNA, 19 bp, Mus musculus
  siRNA target sequence for 2900026H06Rik (NM_028392.1,754-772).
cgcacacgtaccacatcaa

SEQ ID NO: 666259 - DNA, 19 bp, Mus musculus
  siRNA target sequence for 2900026H06Rik (NM_028392.1,813-831).
gctgatgacctgaggatta

SEQ ID NO: 666260 - DNA, 19 bp, Mus musculus
  siRNA target sequence for 2900026H06Rik (NM_028392.1,819-837).
gacctgaggattaatctgt

SEQ ID NO: 666261 - DNA, 19 bp, Mus musculus
  siRNA target sequence for 2900026H06Rik (NM_028392.1,942-960).
cactgcaacaccttcgtat

SEQ ID NO: 666262 - DNA, 19 bp, Mus musculus
  siRNA target sequence for 2900026H06Rik (NM_028392.1,1053-1071).
ccaagcaacagatcgtttt

SEQ ID NO: 666263 - DNA, 19 bp, Mus musculus
  siRNA target sequence for 2900026H06Rik (NM_028392.1,1054-1072).
caagcaacagatcgttttt

SEQ ID NO: 666264 - DNA, 19 bp, Mus musculus
  siRNA target sequence for 2900026H06Rik (NM_028392.1,1087-1105).
cttcaatttcggatgtgaa

SEQ ID NO: 666265 - DNA, 19 bp, Mus musculus
  siRNA target sequence for 2900026H06Rik (NM_028392.1,1090-1108).
caatttcggatgtgaaatt

SEQ ID NO: 666266 - DNA, 19 bp, Mus musculus
  siRNA target sequence for 2900026H06Rik (NM_028392.1,1113-1131).
cacagtgggaggtatatca

SEQ ID NO: 666267 - DNA, 19 bp, Mus musculus
  siRNA target sequence for 2900026H06Rik (NM_028392.1,1163-1181).
ggacctcaacatggaaaat

SEQ ID NO: 666268 - DNA, 19 bp, Mus musculus
  siRNA target sequence for 2900026H06Rik (NM_028392.1,1226-1244).
gttgtgctccctctatgaa

SEQ ID NO: 666269 - DNA, 19 bp, Mus musculus
  siRNA target sequence for 2900026H06Rik (NM_028392.1,1285-1303).
ggtcagacagcgtcatcat

SEQ ID NO: 666270 - DNA, 19 bp, Mus musculus
  siRNA target sequence for 2900026H06Rik (NM_028392.1,1404-1422).
ctcaaaccccgaaaagtgt

SEQ ID NO: 666271 - DNA, 19 bp, Mus musculus
  siRNA target sequence for 2900026H06Rik (NM_028392.1,1430-1448).
gggcaagcgaagaaaagat

SEQ ID NO: 666272 - DNA, 19 bp, Mus musculus
  siRNA target sequence for 2900026H06Rik (NM_028392.1,1503-1521).
catccttcagaaaacatta

SEQ ID NO: 666273 - DNA, 19 bp, Mus musculus
  siRNA target sequence for 2900026H06Rik (NM_028392.1,1524-1542).
gcagtggcggctacgaata

SEQ ID NO: 666274 - DNA, 19 bp, Mus musculus
  siRNA target sequence for 2900026H06Rik (NM_028392.1,1525-1543).
cagtggcggctacgaataa

SEQ ID NO: 666275 - DNA, 19 bp, Mus musculus
  siRNA target sequence for 2900026H06Rik (NM_028392.1,1527-1545).
gtggcggctacgaataact

SEQ ID NO: 666276 - DNA, 19 bp, Mus musculus
  siRNA target sequence for 2900026H06Rik (NM_028392.1,1529-1547).
ggcggctacgaataactta

SEQ ID NO: 666277 - DNA, 19 bp, Mus musculus
  siRNA target sequence for 2900026H06Rik (NM_028392.1,1530-1548).
gcggctacgaataacttat

SEQ ID NO: 666278 - DNA, 19 bp, Mus musculus
  siRNA target sequence for 2900026H06Rik (NM_028392.1,1531-1549).
cggctacgaataacttata

SEQ ID NO: 666279 - DNA, 19 bp, Mus musculus
  siRNA target sequence for 2900026H06Rik (NM_028392.1,1532-1550).
ggctacgaataacttatat

SEQ ID NO: 666280 - DNA, 19 bp, Mus musculus
  siRNA target sequence for 6330548O06Rik (NM_172994.1,168-186).
cggacacgcggaaaattaa

SEQ ID NO: 666281 - DNA, 19 bp, Mus musculus
  siRNA target sequence for 6330548O06Rik (NM_172994.1,347-365).
ggtgagtacgatgtataca

SEQ ID NO: 666282 - DNA, 19 bp, Mus musculus
  siRNA target sequence for 6330548O06Rik (NM_172994.1,765-783).
ctgatcggagcttcaacat

SEQ ID NO: 666283 - DNA, 19 bp, Mus musculus
  siRNA target sequence for 6330548O06Rik (NM_172994.1,1002-1020).
cggtgtccgacgtgaagtt

SEQ ID NO: 666284 - DNA, 19 bp, Mus musculus
  siRNA target sequence for 6330548O06Rik (NM_172994.1,1004-1022).
gtgtccgacgtgaagttca

SEQ ID NO: 666285 - DNA, 19 bp, Mus musculus
  siRNA target sequence for 6330548O06Rik (NM_172994.1,1088-1106).
gaggcgaggcccatagaga

SEQ ID NO: 666286 - DNA, 19 bp, Mus musculus
  siRNA target sequence for Ppp2r2d (NM_026391.1,125-143).
gcggaagccgacatcatct

SEQ ID NO: 666287 - DNA, 19 bp, Mus musculus
  siRNA target sequence for Ppp2r2d (NM_026391.1,139-157).
catctccaccgttgagttt

SEQ ID NO: 666288 - DNA, 19 bp, Mus musculus
  siRNA target sequence for Ppp2r2d (NM_026391.1,144-162).
ccaccgttgagtttaacta

SEQ ID NO: 666289 - DNA, 19 bp, Mus musculus
  siRNA target sequence for Ppp2r2d (NM_026391.1,194-212).
ggtggcagagttgttattt

SEQ ID NO: 666290 - DNA, 19 bp, Mus musculus
  siRNA target sequence for Ppp2r2d (NM_026391.1,195-213).
gtggcagagttgttatttt

SEQ ID NO: 666291 - DNA, 19 bp, Mus musculus
  siRNA target sequence for Ppp2r2d (NM_026391.1,198-216).
gcagagttgttattttcca

SEQ ID NO: 666292 - DNA, 19 bp, Mus musculus
  siRNA target sequence for Ppp2r2d (NM_026391.1,247-265).
ctctaggggagagtacaat

SEQ ID NO: 666293 - DNA, 19 bp, Mus musculus
  siRNA target sequence for Ppp2r2d (NM_026391.1,348-366).
ggtggttaccgcaacagaa

SEQ ID NO: 666294 - DNA, 19 bp, Mus musculus
  siRNA target sequence for Ppp2r2d (NM_026391.1,349-367).
gtggttaccgcaacagaat

SEQ ID NO: 666295 - DNA, 19 bp, Mus musculus
  siRNA target sequence for Ppp2r2d (NM_026391.1,364-382).
gaatgctgctcattttcta

SEQ ID NO: 666296 - DNA, 19 bp, Mus musculus
  siRNA target sequence for Ppp2r2d (NM_026391.1,473-491).
cgacttcgagacccattta

SEQ ID NO: 666297 - DNA, 19 bp, Mus musculus
  siRNA target sequence for Ppp2r2d (NM_026391.1,476-494).
cttcgagacccatttagaa

SEQ ID NO: 666298 - DNA, 19 bp, Mus musculus
  siRNA target sequence for Ppp2r2d (NM_026391.1,479-497).
cgagacccatttagaatta

SEQ ID NO: 666299 - DNA, 19 bp, Mus musculus
  siRNA target sequence for Ppp2r2d (NM_026391.1,498-516).
cggcactacgggttccaat

SEQ ID NO: 666300 - DNA, 19 bp, Mus musculus
  siRNA target sequence for Ppp2r2d (NM_026391.1,499-517).
ggcactacgggttccaata

SEQ ID NO: 666301 - DNA, 19 bp, Mus musculus
  siRNA target sequence for Ppp2r2d (NM_026391.1,500-518).
gcactacgggttccaatat

SEQ ID NO: 666302 - DNA, 19 bp, Mus musculus
  siRNA target sequence for Ppp2r2d (NM_026391.1,545-563).
gcaagtccacgacgaattt

SEQ ID NO: 666303 - DNA, 19 bp, Mus musculus
  siRNA target sequence for Ppp2r2d (NM_026391.1,546-564).
caagtccacgacgaatttt

SEQ ID NO: 666304 - DNA, 19 bp, Mus musculus
  siRNA target sequence for Ppp2r2d (NM_026391.1,552-570).
cacgacgaatttttgcaaa

SEQ ID NO: 666305 - DNA, 19 bp, Mus musculus
  siRNA target sequence for Ppp2r2d (NM_026391.1,586-604).
cataaattccatttcagta

SEQ ID NO: 666306 - DNA, 19 bp, Mus musculus
  siRNA target sequence for Ppp2r2d (NM_026391.1,638-656).
gatctgagaattaacctat

SEQ ID NO: 666307 - DNA, 19 bp, Mus musculus
  siRNA target sequence for Ppp2r2d (NM_026391.1,659-677).
catttagaaatcacagata

SEQ ID NO: 666308 - DNA, 19 bp, Mus musculus
  siRNA target sequence for Ppp2r2d (NM_026391.1,754-772).
cccacatcagtgcaatgta

SEQ ID NO: 666309 - DNA, 19 bp, Mus musculus
  siRNA target sequence for Ppp2r2d (NM_026391.1,755-773).
ccacatcagtgcaatgtat

SEQ ID NO: 666310 - DNA, 19 bp, Mus musculus
  siRNA target sequence for Ppp2r2d (NM_026391.1,906-924).
catctatatctgatgtcaa

SEQ ID NO: 666311 - DNA, 19 bp, Mus musculus
  siRNA target sequence for Ppp2r2d (NM_026391.1,932-950).
cacagtggtcgatacatga

SEQ ID NO: 666312 - DNA, 19 bp, Mus musculus
  siRNA target sequence for Ppp2r2d (NM_026391.1,1014-1032).
cccaccaggtacatgagta

SEQ ID NO: 666313 - DNA, 19 bp, Mus musculus
  siRNA target sequence for Ppp2r2d (NM_026391.1,1104-1122).
gttcagacagtgccattat

SEQ ID NO: 666314 - DNA, 19 bp, Mus musculus
  siRNA target sequence for Ppp2r2d (NM_026391.1,1138-1156).
caacttctttagaatgttt

SEQ ID NO: 666315 - DNA, 19 bp, Mus musculus
  siRNA target sequence for Ppp2r2d (NM_026391.1,1144-1162).
ctttagaatgtttgataga

SEQ ID NO: 666316 - DNA, 19 bp, Mus musculus
  siRNA target sequence for Ppp2r2d (NM_026391.1,1165-1183).
cactcggagggatgttaca

SEQ ID NO: 666317 - DNA, 19 bp, Mus musculus
  siRNA target sequence for Ppp2r2d (NM_026391.1,1167-1185).
ctcggagggatgttacact

SEQ ID NO: 666318 - DNA, 19 bp, Mus musculus
  siRNA target sequence for Ppp2r2d (NM_026391.1,1279-1297).
ggacagtttggacttcaat

SEQ ID NO: 666319 - DNA, 19 bp, Mus musculus
  siRNA target sequence for Ppp2r2d (NM_026391.1,1280-1298).
gacagtttggacttcaata

SEQ ID NO: 666320 - DNA, 19 bp, Mus musculus
  siRNA target sequence for Ppp2r2d (NM_026391.1,1322-1340).
caccccatggagagcatta

SEQ ID NO: 666321 - DNA, 19 bp, Mus musculus
  siRNA target sequence for Ppp2r2d (NM_026391.1,1327-1345).
catggagagcattattgct

SEQ ID NO: 666322 - DNA, 19 bp, Mus musculus
  siRNA target sequence for Ppp2r2d (NM_026391.1,1343-1361).
gctgtagctgccaccaata

SEQ ID NO: 666323 - DNA, 19 bp, Mus musculus
  siRNA target sequence for Ppp2r2d (NM_026391.1,1344-1362).
ctgtagctgccaccaataa

SEQ ID NO: 666324 - DNA, 19 bp, Mus musculus
  siRNA target sequence for Ppp2r2d (NM_026391.1,1349-1367).
gctgccaccaataacttgt

SEQ ID NO: 666325 - DNA, 19 bp, Mus musculus
  siRNA target sequence for Ppp2r2d (NM_026391.1,1350-1368).
ctgccaccaataacttgta

SEQ ID NO: 666326 - DNA, 19 bp, Mus musculus
  siRNA target sequence for Ppp2r2d (NM_026391.1,1352-1370).
gccaccaataacttgtata

SEQ ID NO: 666327 - DNA, 19 bp, Mus musculus
  siRNA target sequence for Ppp2r2d (NM_026391.1,1353-1371).
ccaccaataacttgtatat

SEQ ID NO: 666328 - DNA, 19 bp, Mus musculus
  siRNA target sequence for Ppp2r5b (NM_198168.1,639-657).
gtggggtgatgtttgactt

SEQ ID NO: 666329 - DNA, 19 bp, Mus musculus
  siRNA target sequence for Ppp2r5b (NM_198168.1,642-660).
gggtgatgtttgacttctt

SEQ ID NO: 666330 - DNA, 19 bp, Mus musculus
  siRNA target sequence for Ppp2r5b (NM_198168.1,697-715).
gcgtgcagccctcaatgaa

SEQ ID NO: 666331 - DNA, 19 bp, Mus musculus
  siRNA target sequence for Ppp2r5b (NM_198168.1,759-777).
ccgtctacccagacatcat

SEQ ID NO: 666332 - DNA, 19 bp, Mus musculus
  siRNA target sequence for Ppp2r5b (NM_198168.1,772-790).
catcatccgcatgatatca

SEQ ID NO: 666333 - DNA, 19 bp, Mus musculus
  siRNA target sequence for Ppp2r5b (NM_198168.1,775-793).
catccgcatgatatcagta

SEQ ID NO: 666334 - DNA, 19 bp, Mus musculus
  siRNA target sequence for Ppp2r5b (NM_198168.1,778-796).
ccgcatgatatcagtaaat

SEQ ID NO: 666335 - DNA, 19 bp, Mus musculus
  siRNA target sequence for Ppp2r5b (NM_198168.1,779-797).
cgcatgatatcagtaaata

SEQ ID NO: 666336 - DNA, 19 bp, Mus musculus
  siRNA target sequence for Ppp2r5b (NM_198168.1,780-798).
gcatgatatcagtaaatat

SEQ ID NO: 666337 - DNA, 19 bp, Mus musculus
  siRNA target sequence for Ppp2r5b (NM_198168.1,876-894).
cacatctgcagctggtata

SEQ ID NO: 666338 - DNA, 19 bp, Mus musculus
  siRNA target sequence for Ppp2r5b (NM_198168.1,935-953).
ccctctgtggccaagagat

SEQ ID NO: 666339 - DNA, 19 bp, Mus musculus
  siRNA target sequence for Ppp2r5b (NM_198168.1,951-969).
gatacgtggatcaaaagtt

SEQ ID NO: 666340 - DNA, 19 bp, Mus musculus
  siRNA target sequence for Ppp2r5b (NM_198168.1,1073-1091).
gcctacatccgcaaacagt

SEQ ID NO: 666341 - DNA, 19 bp, Mus musculus
  siRNA target sequence for Ppp2r5b (NM_198168.1,1120-1138).
cgagctggaacacttcaat

SEQ ID NO: 666342 - DNA, 19 bp, Mus musculus
  siRNA target sequence for Ppp2r5b (NM_198168.1,1140-1158).
gtgtggctgagctcttaga

SEQ ID NO: 666343 - DNA, 19 bp, Mus musculus
  siRNA target sequence for Ppp2r5b (NM_198168.1,1151-1169).
ctcttagagatcttaggaa

SEQ ID NO: 666344 - DNA, 19 bp, Mus musculus
  siRNA target sequence for Ppp2r5b (NM_198168.1,1246-1264).
ctctgtcaagtcactatct

SEQ ID NO: 666345 - DNA, 19 bp, Mus musculus
  siRNA target sequence for Ppp2r5b (NM_198168.1,1320-1338).
ccttgacagagcatgttat

SEQ ID NO: 666346 - DNA, 19 bp, Mus musculus
  siRNA target sequence for Ppp2r5b (NM_198168.1,1374-1392).
cccagaaggaggtgatgtt

SEQ ID NO: 666347 - DNA, 19 bp, Mus musculus
  siRNA target sequence for Ppp2r5c (NM_012023.1,71-89).
ctcctgcggatcaagagaa

SEQ ID NO: 666348 - DNA, 19 bp, Mus musculus
  siRNA target sequence for Ppp2r5c (NM_012023.1,76-94).
gcggatcaagagaagcttt

SEQ ID NO: 666349 - DNA, 19 bp, Mus musculus
  siRNA target sequence for Ppp2r5c (NM_012023.1,77-95).
cggatcaagagaagctttt

SEQ ID NO: 666350 - DNA, 19 bp, Mus musculus
  siRNA target sequence for Ppp2r5c (NM_012023.1,248-266).
ccgaggccgtccacatgtt

SEQ ID NO: 666351 - DNA, 19 bp, Mus musculus
  siRNA target sequence for Ppp2r5c (NM_012023.1,249-267).
cgaggccgtccacatgttt

SEQ ID NO: 666352 - DNA, 19 bp, Mus musculus
  siRNA target sequence for Ppp2r5c (NM_012023.1,308-326).
ccacgggagcagaattcga

SEQ ID NO: 666353 - DNA, 19 bp, Mus musculus
  siRNA target sequence for Ppp2r5c (NM_012023.1,336-354).
ggatgaaccaacgttagaa

SEQ ID NO: 666354 - DNA, 19 bp, Mus musculus
  siRNA target sequence for Ppp2r5c (NM_012023.1,365-383).
ctcatctgcagcttgttta

SEQ ID NO: 666355 - DNA, 19 bp, Mus musculus
  siRNA target sequence for Ppp2r5c (NM_012023.1,424-442).
cccaatatagcaaagaaat

SEQ ID NO: 666356 - DNA, 19 bp, Mus musculus
  siRNA target sequence for Ppp2r5c (NM_012023.1,469-487).
cttctagagctgtttgaca

SEQ ID NO: 666357 - DNA, 19 bp, Mus musculus
  siRNA target sequence for Ppp2r5c (NM_012023.1,497-515).
ctcgggagagagattttct

SEQ ID NO: 666358 - DNA, 19 bp, Mus musculus
  siRNA target sequence for Ppp2r5c (NM_012023.1,499-517).
cgggagagagattttctaa

SEQ ID NO: 666359 - DNA, 19 bp, Mus musculus
  siRNA target sequence for Ppp2r5c (NM_012023.1,562-580).
gcttacatcaggaaacaga

SEQ ID NO: 666360 - DNA, 19 bp, Mus musculus
  siRNA target sequence for Ppp2r5c (NM_012023.1,563-581).
cttacatcaggaaacagat

SEQ ID NO: 666361 - DNA, 19 bp, Mus musculus
  siRNA target sequence for Ppp2r5c (NM_012023.1,572-590).
ggaaacagatcaataatat

SEQ ID NO: 666362 - DNA, 19 bp, Mus musculus
  siRNA target sequence for Ppp2r5c (NM_012023.1,651-669).
cctgggaagtataattaat

SEQ ID NO: 666363 - DNA, 19 bp, Mus musculus
  siRNA target sequence for Ppp2r5c (NM_012023.1,781-799).
gtcgtgcagtttttagaga

SEQ ID NO: 666364 - DNA, 19 bp, Mus musculus
  siRNA target sequence for Ppp2r5c (NM_012023.1,826-844).
gtaatggcacttctcaaat

SEQ ID NO: 666365 - DNA, 19 bp, Mus musculus
  siRNA target sequence for Ppp2r5c (NM_012023.1,840-858).
caaatactggccaaagact

SEQ ID NO: 666366 - DNA, 19 bp, Mus musculus
  siRNA target sequence for Ppp2r5c (NM_012023.1,855-873).
gactcacagtccaaaagaa

SEQ ID NO: 666367 - DNA, 19 bp, Mus musculus
  siRNA target sequence for Ppp2r5c (NM_012023.1,857-875).
ctcacagtccaaaagaagt

SEQ ID NO: 666368 - DNA, 19 bp, Mus musculus
  siRNA target sequence for Ppp2r5c (NM_012023.1,874-892).
gtaatgttcttaaatgaat

SEQ ID NO: 666369 - DNA, 19 bp, Mus musculus
  siRNA target sequence for Ppp2r5c (NM_012023.1,954-972).
ccgacagttagccaaatgt

SEQ ID NO: 666370 - DNA, 19 bp, Mus musculus
  siRNA target sequence for Ppp2r5c (NM_012023.1,956-974).
gacagttagccaaatgtgt

SEQ ID NO: 666371 - DNA, 19 bp, Mus musculus
  siRNA target sequence for Ppp2r5c (NM_012023.1,1088-1106).
ccttataccgcaactcaaa

SEQ ID NO: 666372 - DNA, 19 bp, Mus musculus
  siRNA target sequence for Ppp2r5c (NM_012023.1,1122-1140).
gacaatacacggcttgata

SEQ ID NO: 666373 - DNA, 19 bp, Mus musculus
  siRNA target sequence for Ppp2r5c (NM_012023.1,1124-1142).
caatacacggcttgatata

SEQ ID NO: 666374 - DNA, 19 bp, Mus musculus
  siRNA target sequence for Ppp2r5c (NM_012023.1,1293-1311).
ccagtatgcagtgtatagt

SEQ ID NO: 666375 - DNA, 19 bp, Mus musculus
  siRNA target sequence for Ppp2r5c (NM_012023.1,1296-1314).
gtatgcagtgtatagtcaa

SEQ ID NO: 666376 - DNA, 19 bp, Mus musculus
  siRNA target sequence for Ppp2r5d (NM_009358.2,288-306).
cagggggaccccagattgt

SEQ ID NO: 666377 - DNA, 19 bp, Mus musculus
  siRNA target sequence for Ppp2r5d (NM_009358.2,294-312).
gaccccagattgtcaagaa

SEQ ID NO: 666378 - DNA, 19 bp, Mus musculus
  siRNA target sequence for Ppp2r5d (NM_009358.2,355-373).
ccgggagctacaaaaactt

SEQ ID NO: 666379 - DNA, 19 bp, Mus musculus
  siRNA target sequence for Ppp2r5d (NM_009358.2,405-423).
gtgaggagctgtttatcca

SEQ ID NO: 666380 - DNA, 19 bp, Mus musculus
  siRNA target sequence for Ppp2r5d (NM_009358.2,532-550).
cacccacagccgtgatgtt

SEQ ID NO: 666381 - DNA, 19 bp, Mus musculus
  siRNA target sequence for Ppp2r5d (NM_009358.2,534-552).
cccacagccgtgatgttgt

SEQ ID NO: 666382 - DNA, 19 bp, Mus musculus
  siRNA target sequence for Ppp2r5d (NM_009358.2,610-628).
gctgcctccttcatcgaat

SEQ ID NO: 666383 - DNA, 19 bp, Mus musculus
  siRNA target sequence for Ppp2r5d (NM_009358.2,695-713).
cagctcgtgtacgagtttt

SEQ ID NO: 666384 - DNA, 19 bp, Mus musculus
  siRNA target sequence for Ppp2r5d (NM_009358.2,698-716).
ctcgtgtacgagtttttct

SEQ ID NO: 666385 - DNA, 19 bp, Mus musculus
  siRNA target sequence for Ppp2r5d (NM_009358.2,746-764).
ccaaatatagccaagaagt

SEQ ID NO: 666386 - DNA, 19 bp, Mus musculus
  siRNA target sequence for Ppp2r5d (NM_009358.2,747-765).
caaatatagccaagaagta

SEQ ID NO: 666387 - DNA, 19 bp, Mus musculus
  siRNA target sequence for Ppp2r5d (NM_009358.2,796-814).
ggacctattcgatagtgaa

SEQ ID NO: 666388 - DNA, 19 bp, Mus musculus
  siRNA target sequence for Ppp2r5d (NM_009358.2,822-840).
gagagcgggattttctcaa

SEQ ID NO: 666389 - DNA, 19 bp, Mus musculus
  siRNA target sequence for Ppp2r5d (NM_009358.2,844-862).
cattttgcatcgcatctat

SEQ ID NO: 666390 - DNA, 19 bp, Mus musculus
  siRNA target sequence for Ppp2r5d (NM_009358.2,854-872).
cgcatctatggcaagtttt

SEQ ID NO: 666391 - DNA, 19 bp, Mus musculus
  siRNA target sequence for Ppp2r5d (NM_009358.2,877-895).
gctccgggcttatattcgt

SEQ ID NO: 666392 - DNA, 19 bp, Mus musculus
  siRNA target sequence for Ppp2r5d (NM_009358.2,878-896).
ctccgggcttatattcgta

SEQ ID NO: 666393 - DNA, 19 bp, Mus musculus
  siRNA target sequence for Ppp2r5d (NM_009358.2,908-926).
cacatcttctacaggttta

SEQ ID NO: 666394 - DNA, 19 bp, Mus musculus
  siRNA target sequence for Ppp2r5d (NM_009358.2,1061-1079).
gtcaagtctctgagtgtat

SEQ ID NO: 666395 - DNA, 19 bp, Mus musculus
  siRNA target sequence for Ppp2r5d (NM_009358.2,1210-1228).
cgagctggaggagattcta

SEQ ID NO: 666396 - DNA, 19 bp, Mus musculus
  siRNA target sequence for Ppp2r5d (NM_009358.2,1238-1256).
gaaccctcggagttcagta

SEQ ID NO: 666397 - DNA, 19 bp, Mus musculus
  siRNA target sequence for Ppp2r5d (NM_009358.2,1245-1263).
cggagttcagtaaagtcat

SEQ ID NO: 666398 - DNA, 19 bp, Mus musculus
  siRNA target sequence for Ppp2r5d (NM_009358.2,1276-1294).
ccgccagcttgccaaatgt

SEQ ID NO: 666399 - DNA, 19 bp, Mus musculus
  siRNA target sequence for Ppp2r5d (NM_009358.2,1330-1348).
cctctactactggaacaat

SEQ ID NO: 666400 - DNA, 19 bp, Mus musculus
  siRNA target sequence for Ppp2r5d (NM_009358.2,1399-1417).
catgtttcctgcactctat

SEQ ID NO: 666401 - DNA, 19 bp, Mus musculus
  siRNA target sequence for Ppp2r5d (NM_009358.2,1446-1464).
caatccatggactcatcta

SEQ ID NO: 666402 - DNA, 19 bp, Mus musculus
  siRNA target sequence for Ppp2r5e (NM_012024.1,568-586).
ctccatcagtggataaagt

SEQ ID NO: 666403 - DNA, 19 bp, Mus musculus
  siRNA target sequence for Ppp2r5e (NM_012024.1,571-589).
catcagtggataaagtaga

SEQ ID NO: 666404 - DNA, 19 bp, Mus musculus
  siRNA target sequence for Ppp2r5e (NM_012024.1,579-597).
gataaagtagacggatttt

SEQ ID NO: 666405 - DNA, 19 bp, Mus musculus
  siRNA target sequence for Ppp2r5e (NM_012024.1,598-616).
ctcggaagtccgtcagaaa

SEQ ID NO: 666406 - DNA, 19 bp, Mus musculus
  siRNA target sequence for Ppp2r5e (NM_012024.1,773-791).
catggacacgctatctgat

SEQ ID NO: 666407 - DNA, 19 bp, Mus musculus
  siRNA target sequence for Ppp2r5e (NM_012024.1,776-794).
ggacacgctatctgatctt

SEQ ID NO: 666408 - DNA, 19 bp, Mus musculus
  siRNA target sequence for Ppp2r5e (NM_012024.1,777-795).
gacacgctatctgatctta

SEQ ID NO: 666409 - DNA, 19 bp, Mus musculus
  siRNA target sequence for Ppp2r5e (NM_012024.1,809-827).
caagcgctccactcttaat

SEQ ID NO: 666410 - DNA, 19 bp, Mus musculus
  siRNA target sequence for Ppp2r5e (NM_012024.1,812-830).
gcgctccactcttaatgaa

SEQ ID NO: 666411 - DNA, 19 bp, Mus musculus
  siRNA target sequence for Ppp2r5e (NM_012024.1,814-832).
gctccactcttaatgaact

SEQ ID NO: 666412 - DNA, 19 bp, Mus musculus
  siRNA target sequence for Ppp2r5e (NM_012024.1,833-851).
ggtggactacattacaata

SEQ ID NO: 666413 - DNA, 19 bp, Mus musculus
  siRNA target sequence for Ppp2r5e (NM_012024.1,875-893).
gacttaccctgaagtagtt

SEQ ID NO: 666414 - DNA, 19 bp, Mus musculus
  siRNA target sequence for Ppp2r5e (NM_012024.1,885-903).
gaagtagttagaatggtat

SEQ ID NO: 666415 - DNA, 19 bp, Mus musculus
  siRNA target sequence for Ppp2r5e (NM_012024.1,895-913).
gaatggtatcttgcaatat

SEQ ID NO: 666416 - DNA, 19 bp, Mus musculus
  siRNA target sequence for Ppp2r5e (NM_012024.1,990-1008).
ccccacttacagcttgtat

SEQ ID NO: 666417 - DNA, 19 bp, Mus musculus
  siRNA target sequence for Ppp2r5e (NM_012024.1,991-1009).
cccacttacagcttgtata

SEQ ID NO: 666418 - DNA, 19 bp, Mus musculus
  siRNA target sequence for Ppp2r5e (NM_012024.1,1122-1140).
cctcgagaacgggactatt

SEQ ID NO: 666419 - DNA, 19 bp, Mus musculus
  siRNA target sequence for Ppp2r5e (NM_012024.1,1123-1141).
ctcgagaacgggactattt

SEQ ID NO: 666420 - DNA, 19 bp, Mus musculus
  siRNA target sequence for Ppp2r5e (NM_012024.1,1125-1143).
cgagaacgggactatttaa

SEQ ID NO: 666421 - DNA, 19 bp, Mus musculus
  siRNA target sequence for Ppp2r5e (NM_012024.1,1126-1144).
gagaacgggactatttaaa

SEQ ID NO: 666422 - DNA, 19 bp, Mus musculus
  siRNA target sequence for Ppp2r5e (NM_012024.1,1147-1165).
cagtcttgcacaggattta

SEQ ID NO: 666423 - DNA, 19 bp, Mus musculus
  siRNA target sequence for Ppp2r5e (NM_012024.1,1197-1215).
cgaaaacaaattaacaata

SEQ ID NO: 666424 - DNA, 19 bp, Mus musculus
  siRNA target sequence for Ppp2r5e (NM_012024.1,1266-1284).
ctgctggaaatattaggaa

SEQ ID NO: 666425 - DNA, 19 bp, Mus musculus
  siRNA target sequence for Ppp2r5e (NM_012024.1,1309-1327).
cactcaaggcagaacacaa

SEQ ID NO: 666426 - DNA, 19 bp, Mus musculus
  siRNA target sequence for Ppp2r5e (NM_012024.1,1394-1412).
gctggcgtattgtatagta

SEQ ID NO: 666427 - DNA, 19 bp, Mus musculus
  siRNA target sequence for Ppp2r5e (NM_012024.1,1399-1417).
cgtattgtatagtacagtt

SEQ ID NO: 666428 - DNA, 19 bp, Mus musculus
  siRNA target sequence for Ppp2r5e (NM_012024.1,1435-1453).
cccttacagaaccagttat

SEQ ID NO: 666429 - DNA, 19 bp, Mus musculus
  siRNA target sequence for Ppp2r5e (NM_012024.1,1449-1467).
gttattagggggctaatga

SEQ ID NO: 666430 - DNA, 19 bp, Mus musculus
  siRNA target sequence for Ppp2r5e (NM_012024.1,1536-1554).
gtgattgaaccgtcacaat

SEQ ID NO: 666431 - DNA, 19 bp, Mus musculus
  siRNA target sequence for Ppp2r5e (NM_012024.1,1538-1556).
gattgaaccgtcacaattt

SEQ ID NO: 666432 - DNA, 19 bp, Mus musculus
  siRNA target sequence for Ppp2r5e (NM_012024.1,1542-1560).
gaaccgtcacaatttgtta

SEQ ID NO: 666433 - DNA, 19 bp, Mus musculus
  siRNA target sequence for Ppp2r5e (NM_012024.1,1545-1563).
ccgtcacaatttgttaaaa

SEQ ID NO: 666434 - DNA, 19 bp, Mus musculus
  siRNA target sequence for Ppp2r5e (NM_012024.1,1549-1567).
cacaatttgttaaaatcca

SEQ ID NO: 666435 - DNA, 19 bp, Mus musculus
  siRNA target sequence for Ppp2r5e (NM_012024.1,1622-1640).
ggcagaaagggcactctat

SEQ ID NO: 666436 - DNA, 19 bp, Mus musculus
  siRNA target sequence for Ppp2r5e (NM_012024.1,1623-1641).
gcagaaagggcactctatt

SEQ ID NO: 666437 - DNA, 19 bp, Mus musculus
  siRNA target sequence for Ppp2r5e (NM_012024.1,1624-1642).
cagaaagggcactctatta

SEQ ID NO: 666438 - DNA, 19 bp, Mus musculus
  siRNA target sequence for Ppp2r5e (NM_012024.1,1632-1650).
gcactctattattggaata

SEQ ID NO: 666439 - DNA, 19 bp, Mus musculus
  siRNA target sequence for Ppp2r5e (NM_012024.1,1633-1651).
cactctattattggaataa

SEQ ID NO: 666440 - DNA, 19 bp, Mus musculus
  siRNA target sequence for Ppp2r5e (NM_012024.1,1689-1707).
gtcatccttcccatcatgt

SEQ ID NO: 666441 - DNA, 19 bp, Mus musculus
  siRNA target sequence for Ppp2r5e (NM_012024.1,1703-1721).
catgttctccagcctttat

SEQ ID NO: 666442 - DNA, 19 bp, Mus musculus
  siRNA target sequence for Ppp2r5e (NM_012024.1,1775-1793).
gttgaaggcatttatggaa

SEQ ID NO: 666443 - DNA, 19 bp, Mus musculus
  siRNA target sequence for Ppp2r5e (NM_012024.1,1839-1857).
gatcgtcagcgtgagaaaa

SEQ ID NO: 666444 - DNA, 19 bp, Mus musculus
  siRNA target sequence for Ppp2r5e (NM_012024.1,1843-1861).
gtcagcgtgagaaaaagaa

SEQ ID NO: 666445 - DNA, 19 bp, Mus musculus
  siRNA target sequence for Sln (NM_025540.1,245-263).
ctcaggagctgtttatcaa

SEQ ID NO: 666446 - DNA, 19 bp, Mus musculus
  siRNA target sequence for Sln (NM_025540.1,304-322).
ctcgtgaggtcctaccaat

SEQ ID NO: 666447 - DNA, 19 bp, Mus musculus
  siRNA target sequence for Sln (NM_025540.1,307-325).
gtgaggtcctaccaatact

SEQ ID NO: 666448 - DNA, 19 bp, Mus musculus
  siRNA target sequence for 0610039K22Rik (NM_025346.1,394-412).
gtcctgcacaagttcctaa

SEQ ID NO: 666449 - DNA, 19 bp, Mus musculus
  siRNA target sequence for 0610039K22Rik (NM_025346.1,584-602).
ccgaccataaggacattca

SEQ ID NO: 666450 - DNA, 19 bp, Mus musculus
  siRNA target sequence for 0610039K22Rik (NM_025346.1,619-637).
gtgggcaaagccattgaca

SEQ ID NO: 666451 - DNA, 19 bp, Mus musculus
  siRNA target sequence for 0610039K22Rik (NM_025346.1,776-794).
gccaggaatcgacattgaa

SEQ ID NO: 666452 - DNA, 19 bp, Mus musculus
  siRNA target sequence for 0610039K22Rik (NM_025346.1,816-834).
gcccttcttggagttgaat

SEQ ID NO: 666453 - DNA, 19 bp, Mus musculus
  siRNA target sequence for 0610039K22Rik (NM_025346.1,940-958).
ctgcaccggctgcacttta

SEQ ID NO: 666454 - DNA, 19 bp, Mus musculus
  siRNA target sequence for 0610039K22Rik (NM_025346.1,1046-1064).
gagagatccaggtgatgat

SEQ ID NO: 666455 - DNA, 19 bp, Mus musculus
  siRNA target sequence for 0610039K22Rik (NM_025346.1,1245-1263).
gctgatgaacattaaagct

SEQ ID NO: 666456 - DNA, 19 bp, Mus musculus
  siRNA target sequence for 0610039K22Rik (NM_025346.1,1295-1313).
ggagtcacaaggatgagtt

SEQ ID NO: 666457 - DNA, 19 bp, Mus musculus
  siRNA target sequence for 0610039K22Rik (NM_025346.1,1344-1362).
ctggtaccactcagtgttt

SEQ ID NO: 666458 - DNA, 19 bp, Mus musculus
  siRNA target sequence for 0610039K22Rik (NM_025346.1,1378-1396).
cgacagcagacctcagatt

SEQ ID NO: 666459 - DNA, 19 bp, Mus musculus
  siRNA target sequence for 0610039K22Rik (NM_025346.1,1436-1454).
ccagagatgcactcaacaa

SEQ ID NO: 666460 - DNA, 19 bp, Mus musculus
  siRNA target sequence for 0610039K22Rik (NM_025346.1,1439-1457).
gagatgcactcaacaaact

SEQ ID NO: 666461 - DNA, 19 bp, Mus musculus
  siRNA target sequence for 0610039K22Rik (NM_025346.1,1513-1531).
gatgggaaacgcatcatat

SEQ ID NO: 666462 - DNA, 19 bp, Mus musculus
  siRNA target sequence for 0610039K22Rik (NM_025346.1,1516-1534).
gggaaacgcatcatattct

SEQ ID NO: 666463 - DNA, 19 bp, Mus musculus
  siRNA target sequence for 1110008P14Rik (NM_198001.1,154-172).
gggcacggaaggagagaat

SEQ ID NO: 666464 - DNA, 19 bp, Mus musculus
  siRNA target sequence for 1110008P14Rik (NM_198001.1,178-196).
cttcggggaagcagagtat

SEQ ID NO: 666465 - DNA, 19 bp, Mus musculus
  siRNA target sequence for 1110008P14Rik (NM_198001.1,210-228).
ccatgttggatcagatcaa

SEQ ID NO: 666466 - DNA, 19 bp, Mus musculus
  siRNA target sequence for 1110008P14Rik (NM_198001.1,303-321).
ggcagacgcgcctggaatt

SEQ ID NO: 666467 - DNA, 19 bp, Mus musculus
  siRNA target sequence for 1110011D13Rik (NM_029095.1,225-243).
cctggaggcatcacaagat

SEQ ID NO: 666468 - DNA, 19 bp, Mus musculus
  siRNA target sequence for 1110011D13Rik (NM_029095.1,325-343).
gagtgggtgatgtggttta

SEQ ID NO: 666469 - DNA, 19 bp, Mus musculus
  siRNA target sequence for 1110011D13Rik (NM_029095.1,329-347).
gggtgatgtggtttaccaa

SEQ ID NO: 666470 - DNA, 19 bp, Mus musculus
  siRNA target sequence for 1110011D13Rik (NM_029095.1,344-362).
ccaacttccgaaatgtcat

SEQ ID NO: 666471 - DNA, 19 bp, Mus musculus
  siRNA target sequence for 1110011D13Rik (NM_029095.1,345-363).
caacttccgaaatgtcatt

SEQ ID NO: 666472 - DNA, 19 bp, Mus musculus
  siRNA target sequence for 1110011D13Rik (NM_029095.1,423-441).
gctccgctcctggatgtat

SEQ ID NO: 666473 - DNA, 19 bp, Mus musculus
  siRNA target sequence for 1110011D13Rik (NM_029095.1,432-450).
ctggatgtatgctgtatat

SEQ ID NO: 666474 - DNA, 19 bp, Mus musculus
  siRNA target sequence for 1110011D13Rik (NM_029095.1,594-612).
ggttgaccctggaatctct

SEQ ID NO: 666475 - DNA, 19 bp, Mus musculus
  siRNA target sequence for 1110011D13Rik (NM_029095.1,857-875).
gcgagctatggcacattca

SEQ ID NO: 666476 - DNA, 19 bp, Mus musculus
  siRNA target sequence for 1110011D13Rik (NM_029095.1,998-1016).
ctggcctggcgtactcaaa

SEQ ID NO: 666477 - DNA, 19 bp, Mus musculus
  siRNA target sequence for 1110011D13Rik (NM_029095.1,1112-1130).
gcattactgcgctctatgt

SEQ ID NO: 666478 - DNA, 19 bp, Mus musculus
  siRNA target sequence for 1110011D13Rik (NM_029095.1,1146-1164).
cttcgaccgtggtatcaat

SEQ ID NO: 666479 - DNA, 19 bp, Mus musculus
  siRNA target sequence for 1110011D13Rik (NM_029095.1,1149-1167).
cgaccgtggtatcaatgat

SEQ ID NO: 666480 - DNA, 19 bp, Mus musculus
  siRNA target sequence for 1110011D13Rik (NM_029095.1,1150-1168).
gaccgtggtatcaatgatt

SEQ ID NO: 666481 - DNA, 19 bp, Mus musculus
  siRNA target sequence for 1110011D13Rik (NM_029095.1,1161-1179).
caatgattggctttgcaaa

SEQ ID NO: 666482 - DNA, 19 bp, Mus musculus
  siRNA target sequence for 1110011D13Rik (NM_029095.1,1290-1308).
ctacctgtggtctgttctt

SEQ ID NO: 666483 - DNA, 19 bp, Mus musculus
  siRNA target sequence for 1110011D13Rik (NM_029095.1,1442-1460).
gggctatcatcatgtacaa

SEQ ID NO: 666484 - DNA, 19 bp, Mus musculus
  siRNA target sequence for 1110011D13Rik (NM_029095.1,1501-1519).
gcccgacgcctgatactta

SEQ ID NO: 666485 - DNA, 19 bp, Mus musculus
  siRNA target sequence for 1110011D13Rik (NM_029095.1,1503-1521).
ccgacgcctgatacttaca

SEQ ID NO: 666486 - DNA, 19 bp, Mus musculus
  siRNA target sequence for 1110011D13Rik (NM_029095.1,1535-1553).
ccacactggcggtcttgtt

SEQ ID NO: 666487 - DNA, 19 bp, Mus musculus
  siRNA target sequence for 1110011D13Rik (NM_029095.1,1565-1583).
gtggtgtccagctggtaaa

SEQ ID NO: 666488 - DNA, 19 bp, Mus musculus
  siRNA target sequence for 1110021D01Rik (NM_025387.1,162-180).
gcccattgatgcctttaca

SEQ ID NO: 666489 - DNA, 19 bp, Mus musculus
  siRNA target sequence for 1110021D01Rik (NM_025387.1,163-181).
cccattgatgcctttacat

SEQ ID NO: 666490 - DNA, 19 bp, Mus musculus
  siRNA target sequence for 1110021D01Rik (NM_025387.1,172-190).
gcctttacattattttggt

SEQ ID NO: 666491 - DNA, 19 bp, Mus musculus
  siRNA target sequence for 1110021D01Rik (NM_025387.1,356-374).
gggaccttggccggaatta

SEQ ID NO: 666492 - DNA, 19 bp, Mus musculus
  siRNA target sequence for 1110021D01Rik (NM_025387.1,357-375).
ggaccttggccggaattat

SEQ ID NO: 666493 - DNA, 19 bp, Mus musculus
  siRNA target sequence for 1110021D01Rik (NM_025387.1,368-386).
ggaattatggggatgagat

SEQ ID NO: 666494 - DNA, 19 bp, Mus musculus
  siRNA target sequence for 1110021D01Rik (NM_025387.1,388-406).
ctacaactcggggaaattt

SEQ ID NO: 666495 - DNA, 19 bp, Mus musculus
  siRNA target sequence for 1110021D01Rik (NM_025387.1,439-457).
gctgatggttgccaaagtt

SEQ ID NO: 666496 - DNA, 19 bp, Mus musculus
  siRNA target sequence for 1110021D01Rik (NM_025387.1,445-463).
ggttgccaaagttggaatt

SEQ ID NO: 666497 - DNA, 19 bp, Mus musculus
  siRNA target sequence for 1110021D01Rik (NM_025387.1,446-464).
gttgccaaagttggaatta

SEQ ID NO: 666498 - DNA, 19 bp, Mus musculus
  siRNA target sequence for 1110032N12Rik (NM_026824.2,269-287).
ccaaactgcagggttttga

SEQ ID NO: 666499 - DNA, 19 bp, Mus musculus
  siRNA target sequence for 1110032N12Rik (NM_026824.2,412-430).
catgcccaggtcttcgtta

SEQ ID NO: 666500 - DNA, 19 bp, Mus musculus
  siRNA target sequence for 1110032N12Rik (NM_026824.2,436-454).
gctaactaccgcaaagaga

SEQ ID NO: 666501 - DNA, 19 bp, Mus musculus
  siRNA target sequence for 1110032N12Rik (NM_026824.2,437-455).
ctaactaccgcaaagagaa

SEQ ID NO: 666502 - DNA, 19 bp, Mus musculus
  siRNA target sequence for 1110032N12Rik (NM_026824.2,444-462).
ccgcaaagagaacttgtat

SEQ ID NO: 666503 - DNA, 19 bp, Mus musculus
  siRNA target sequence for 1110032N12Rik (NM_026824.2,445-463).
cgcaaagagaacttgtatt

SEQ ID NO: 666504 - DNA, 19 bp, Mus musculus
  siRNA target sequence for 1110032N12Rik (NM_026824.2,477-495).
cgaggacaggcctctcatt

SEQ ID NO: 666505 - DNA, 19 bp, Mus musculus
  siRNA target sequence for 1110032N12Rik (NM_026824.2,537-555).
ggctctcctagcacaagat

SEQ ID NO: 666506 - DNA, 19 bp, Mus musculus
  siRNA target sequence for 1110032N12Rik (NM_026824.2,538-556).
gctctcctagcacaagatt

SEQ ID NO: 666507 - DNA, 19 bp, Mus musculus
  siRNA target sequence for 1110032N12Rik (NM_026824.2,539-557).
ctctcctagcacaagatta

SEQ ID NO: 666508 - DNA, 19 bp, Mus musculus
  siRNA target sequence for 1110032N12Rik (NM_026824.2,541-559).
ctcctagcacaagattact

SEQ ID NO: 666509 - DNA, 19 bp, Mus musculus
  siRNA target sequence for 1110032N12Rik (NM_026824.2,543-561).
cctagcacaagattactgt

SEQ ID NO: 666510 - DNA, 19 bp, Mus musculus
  siRNA target sequence for 1110032N12Rik (NM_026824.2,688-706).
gttcctgtcacgtgcaaaa

SEQ ID NO: 666511 - DNA, 19 bp, Mus musculus
  siRNA target sequence for 1110032N12Rik (NM_026824.2,830-848).
cctcctgggaacacatcaa

SEQ ID NO: 666512 - DNA, 19 bp, Mus musculus
  siRNA target sequence for 1110032N12Rik (NM_026824.2,883-901).
gccaatgggaacatccaat

SEQ ID NO: 666513 - DNA, 19 bp, Mus musculus
  siRNA target sequence for 1110032N12Rik (NM_026824.2,1053-1071).
cccttgtccactatcgtat

SEQ ID NO: 666514 - DNA, 19 bp, Mus musculus
  siRNA target sequence for 1110032N12Rik (NM_026824.2,1176-1194).
gagccaggcgctaaagctt

SEQ ID NO: 666515 - DNA, 19 bp, Mus musculus
  siRNA target sequence for 1110032N12Rik (NM_026824.2,1365-1383).
ggagggcttgtccaagaat

SEQ ID NO: 666516 - DNA, 19 bp, Mus musculus
  siRNA target sequence for 1110032N12Rik (NM_026824.2,1366-1384).
gagggcttgtccaagaata

SEQ ID NO: 666517 - DNA, 19 bp, Mus musculus
  siRNA target sequence for 1110032N12Rik (NM_026824.2,1370-1388).
gcttgtccaagaataagct

SEQ ID NO: 666518 - DNA, 19 bp, Mus musculus
  siRNA target sequence for 1110032N12Rik (NM_026824.2,1399-1417).
ctgaggaaccctcacaaaa

SEQ ID NO: 666519 - DNA, 19 bp, Mus musculus
  siRNA target sequence for 1110032N12Rik (NM_026824.2,1403-1421).
ggaaccctcacaaaacctt

SEQ ID NO: 666520 - DNA, 19 bp, Mus musculus
  siRNA target sequence for 1110032N12Rik (NM_026824.2,1404-1422).
gaaccctcacaaaaccttt

SEQ ID NO: 666521 - DNA, 19 bp, Mus musculus
  siRNA target sequence for 1110032N12Rik (NM_026824.2,1456-1474).
gaccagtgtggaaatccaa

SEQ ID NO: 666522 - DNA, 19 bp, Mus musculus
  siRNA target sequence for 1110032N12Rik (NM_026824.2,1476-1494).
gggcaataggtgtgtgttt

SEQ ID NO: 666523 - DNA, 19 bp, Mus musculus
  siRNA target sequence for 1110032N12Rik (NM_026824.2,1477-1495).
ggcaataggtgtgtgttta

SEQ ID NO: 666524 - DNA, 19 bp, Mus musculus
  siRNA target sequence for 1110032N12Rik (NM_026824.2,1552-1570).
ggtcatggattgcttttta

SEQ ID NO: 666525 - DNA, 19 bp, Mus musculus
  siRNA target sequence for 1110032N12Rik (NM_026824.2,1574-1592).
ccaaattagagaagtcttt

SEQ ID NO: 666526 - DNA, 19 bp, Mus musculus
  siRNA target sequence for 1110060O18Rik (NM_026846.1,186-204).
gcctgctcgggcatcttct

SEQ ID NO: 666527 - DNA, 19 bp, Mus musculus
  siRNA target sequence for 1110060O18Rik (NM_026846.1,236-254).
ctgtggatcagcttaccaa

SEQ ID NO: 666528 - DNA, 19 bp, Mus musculus
  siRNA target sequence for 1110060O18Rik (NM_026846.1,241-259).
gatcagcttaccaaaagga

SEQ ID NO: 666529 - DNA, 19 bp, Mus musculus
  siRNA target sequence for 1110060O18Rik (NM_026846.1,244-262).
cagcttaccaaaaggatat

SEQ ID NO: 666530 - DNA, 19 bp, Mus musculus
  siRNA target sequence for 1110060O18Rik (NM_026846.1,247-265).
cttaccaaaaggatatcca

SEQ ID NO: 666531 - DNA, 19 bp, Mus musculus
  siRNA target sequence for 1110060O18Rik (NM_026846.1,375-393).
cagcaaaaacgcaagatct

SEQ ID NO: 666532 - DNA, 19 bp, Mus musculus
  siRNA target sequence for 1110060O18Rik (NM_026846.1,384-402).
cgcaagatcttcaccaata

SEQ ID NO: 666533 - DNA, 19 bp, Mus musculus
  siRNA target sequence for 1110060O18Rik (NM_026846.1,385-403).
gcaagatcttcaccaataa

SEQ ID NO: 666534 - DNA, 19 bp, Mus musculus
  siRNA target sequence for 1110060O18Rik (NM_026846.1,389-407).
gatcttcaccaataagtgt

SEQ ID NO: 666535 - DNA, 19 bp, Mus musculus
  siRNA target sequence for 1110060O18Rik (NM_026846.1,437-455).
gatgaaactgacttgtgat

SEQ ID NO: 666536 - DNA, 19 bp, Mus musculus
  siRNA target sequence for 1110060O18Rik (NM_026846.1,489-507).
catcccctggaccatgaat

SEQ ID NO: 666537 - DNA, 19 bp, Mus musculus
  siRNA target sequence for 1110060O18Rik (NM_026846.1,536-554).
ggcagggcttgctgctatt

SEQ ID NO: 666538 - DNA, 19 bp, Mus musculus
  siRNA target sequence for 1110060O18Rik (NM_026846.1,540-558).
gggcttgctgctatttcta

SEQ ID NO: 666539 - DNA, 19 bp, Mus musculus
  siRNA target sequence for 1110060O18Rik (NM_026846.1,564-582).
caaggtctggcttctacaa

SEQ ID NO: 666540 - DNA, 19 bp, Mus musculus
  siRNA target sequence for 1110060O18Rik (NM_026846.1,602-620).
ccggaccttgccttcatca

SEQ ID NO: 666541 - DNA, 19 bp, Mus musculus
  siRNA target sequence for 1110060O18Rik (NM_026846.1,603-621).
cggaccttgccttcatcat

SEQ ID NO: 666542 - DNA, 19 bp, Mus musculus
  siRNA target sequence for 1110060O18Rik (NM_026846.1,744-762).
gctaaaccccaggttctaa

SEQ ID NO: 666543 - DNA, 19 bp, Mus musculus
  siRNA target sequence for 1190005B03Rik (NM_144536.1,106-124).
catagaagatatcatatca

SEQ ID NO: 666544 - DNA, 19 bp, Mus musculus
  siRNA target sequence for 1190005B03Rik (NM_144536.1,190-208).
gcggaatacccaaaaatat

SEQ ID NO: 666545 - DNA, 19 bp, Mus musculus
  siRNA target sequence for 1190005B03Rik (NM_144536.1,279-297).
ggggctgctcacataataa

SEQ ID NO: 666546 - DNA, 19 bp, Mus musculus
  siRNA target sequence for 1190005B03Rik (NM_144536.1,281-299).
ggctgctcacataataatt

SEQ ID NO: 666547 - DNA, 19 bp, Mus musculus
  siRNA target sequence for 1190005B03Rik (NM_144536.1,334-352).
ctatggctataaaattaca

SEQ ID NO: 666548 - DNA, 19 bp, Mus musculus
  siRNA target sequence for 1190005B03Rik (NM_144536.1,379-397).
gctcctgaacagttgtact

SEQ ID NO: 666549 - DNA, 19 bp, Mus musculus
  siRNA target sequence for 1190005B03Rik (NM_144536.1,385-403).
gaacagttgtactgtgaaa

SEQ ID NO: 666550 - DNA, 19 bp, Mus musculus
  siRNA target sequence for 1190005B03Rik (NM_144536.1,407-425).
ccagctgaagaccacttta

SEQ ID NO: 666551 - DNA, 19 bp, Mus musculus
  siRNA target sequence for 1190005B03Rik (NM_144536.1,419-437).
cactttagaaactcaatca

SEQ ID NO: 666552 - DNA, 19 bp, Mus musculus
  siRNA target sequence for 1190005B03Rik (NM_144536.1,421-439).
ctttagaaactcaatcaaa

SEQ ID NO: 666553 - DNA, 19 bp, Mus musculus
  siRNA target sequence for 1190005B03Rik (NM_144536.1,568-586).
ggaggaaacaataaaaggt

SEQ ID NO: 666554 - DNA, 19 bp, Mus musculus
  siRNA target sequence for 1190005B03Rik (NM_144536.1,636-654).
gtggagctcgactggattt

SEQ ID NO: 666555 - DNA, 19 bp, Mus musculus
  siRNA target sequence for 1190005B03Rik (NM_144536.1,666-684).
gaaagaatccgctgataga

SEQ ID NO: 666556 - DNA, 19 bp, Mus musculus
  siRNA target sequence for 1190005B03Rik (NM_144536.1,674-692).
ccgctgatagaaatcattt

SEQ ID NO: 666557 - DNA, 19 bp, Mus musculus
  siRNA target sequence for 1190005B03Rik (NM_144536.1,716-734).
gcttgtacctactgcaaaa

SEQ ID NO: 666558 - DNA, 19 bp, Mus musculus
  siRNA target sequence for 1190005B03Rik (NM_144536.1,723-741).
cctactgcaaaactaaaca

SEQ ID NO: 666559 - DNA, 19 bp, Mus musculus
  siRNA target sequence for 1190005B03Rik (NM_144536.1,759-777).
ccagctatcccattgatga

SEQ ID NO: 666560 - DNA, 19 bp, Mus musculus
  siRNA target sequence for 1190005B03Rik (NM_144536.1,792-810).
ccaagcaatcctttcaaga

SEQ ID NO: 666561 - DNA, 19 bp, Mus musculus
  siRNA target sequence for 1190005B03Rik (NM_144536.1,929-947).
ctgaggctgggcatgacaa

SEQ ID NO: 666562 - DNA, 19 bp, Mus musculus
  siRNA target sequence for 1190005B03Rik (NM_144536.1,940-958).
catgacaaatccaccatat

SEQ ID NO: 666563 - DNA, 19 bp, Mus musculus
  siRNA target sequence for 1190005B03Rik (NM_144536.1,943-961).
gacaaatccaccatatatt

SEQ ID NO: 666564 - DNA, 19 bp, Mus musculus
  siRNA target sequence for 1190005B03Rik (NM_144536.1,945-963).
caaatccaccatatatttt

SEQ ID NO: 666565 - DNA, 19 bp, Mus musculus
  siRNA target sequence for 1190005B03Rik (NM_144536.1,1078-1096).
ctgcgtggccgacttcaaa

SEQ ID NO: 666566 - DNA, 19 bp, Mus musculus
  siRNA target sequence for 1190005B03Rik (NM_144536.1,1081-1099).
cgtggccgacttcaaaaga

SEQ ID NO: 666567 - DNA, 19 bp, Mus musculus
  siRNA target sequence for 1190005B03Rik (NM_144536.1,1118-1136).
gagaaggttcctggaataa

SEQ ID NO: 666568 - DNA, 19 bp, Mus musculus
  siRNA target sequence for 1190005B03Rik (NM_144536.1,1123-1141).
ggttcctggaataacgatt

SEQ ID NO: 666569 - DNA, 19 bp, Mus musculus
  siRNA target sequence for 1190005B03Rik (NM_144536.1,1137-1155).
cgattgctacggatattat

SEQ ID NO: 666570 - DNA, 19 bp, Mus musculus
  siRNA target sequence for 1190005B03Rik (NM_144536.1,1170-1188).
gagaaaccgatcaggattt

SEQ ID NO: 666571 - DNA, 19 bp, Mus musculus
  siRNA target sequence for 1190005B03Rik (NM_144536.1,1177-1195).
cgatcaggattttcaagaa

SEQ ID NO: 666572 - DNA, 19 bp, Mus musculus
  siRNA target sequence for 1190005B03Rik (NM_144536.1,1178-1196).
gatcaggattttcaagaaa

SEQ ID NO: 666573 - DNA, 19 bp, Mus musculus
  siRNA target sequence for 1190005B03Rik (NM_144536.1,1197-1215).
cagtgaaacttgttgaaga

SEQ ID NO: 666574 - DNA, 19 bp, Mus musculus
  siRNA target sequence for 1190005B03Rik (NM_144536.1,1205-1223).
cttgttgaagagtacaaat

SEQ ID NO: 666575 - DNA, 19 bp, Mus musculus
  siRNA target sequence for 1190005B03Rik (NM_144536.1,1261-1279).
cggaactcctgctgcaaaa

SEQ ID NO: 666576 - DNA, 19 bp, Mus musculus
  siRNA target sequence for 1190005B03Rik (NM_144536.1,1329-1347).
ctcgggtgtttcattccta

SEQ ID NO: 666577 - DNA, 19 bp, Mus musculus
  siRNA target sequence for 1190005B03Rik (NM_144536.1,1363-1381).
caagattggcgaaagacaa

SEQ ID NO: 666578 - DNA, 19 bp, Mus musculus
  siRNA target sequence for 1190005B03Rik (NM_144536.1,1366-1384).
gattggcgaaagacaacaa

SEQ ID NO: 666579 - DNA, 19 bp, Mus musculus
  siRNA target sequence for 1190005B03Rik (NM_144536.1,1428-1446).
ctcataaccgattctatga

SEQ ID NO: 666580 - DNA, 19 bp, Mus musculus
  siRNA target sequence for 1190005B03Rik (NM_144536.1,1493-1511).
gaagtcgacatttacgaat

SEQ ID NO: 666581 - DNA, 19 bp, Mus musculus
  siRNA target sequence for 1190005B03Rik (NM_144536.1,1595-1613).
gaagtctcaggtttgacaa

SEQ ID NO: 666582 - DNA, 19 bp, Mus musculus
  siRNA target sequence for 1190005B03Rik (NM_144536.1,1602-1620).
caggtttgacaaaggaatt

SEQ ID NO: 666583 - DNA, 19 bp, Mus musculus
  siRNA target sequence for 1190005B03Rik (NM_144536.1,1604-1622).
ggtttgacaaaggaattca

SEQ ID NO: 666584 - DNA, 19 bp, Mus musculus
  siRNA target sequence for 1190005B03Rik (NM_144536.1,1709-1727).
cagatgtcccagtatgact

SEQ ID NO: 666585 - DNA, 19 bp, Mus musculus
  siRNA target sequence for 1190005B03Rik (NM_144536.1,1759-1777).
cctcgctctccttttgcat

SEQ ID NO: 666586 - DNA, 19 bp, Mus musculus
  siRNA target sequence for 1190005B03Rik (NM_144536.1,1780-1798).
ctggccagactctttgctt

SEQ ID NO: 666587 - DNA, 19 bp, Mus musculus
  siRNA target sequence for 1190006E07Rik (NM_026879.1,215-233).
gactgtggacgatgtcata

SEQ ID NO: 666588 - DNA, 19 bp, Mus musculus
  siRNA target sequence for 1190006E07Rik (NM_026879.1,217-235).
ctgtggacgatgtcataaa

SEQ ID NO: 666589 - DNA, 19 bp, Mus musculus
  siRNA target sequence for 1190006E07Rik (NM_026879.1,284-302).
ccgagcagccttagagaaa

SEQ ID NO: 666590 - DNA, 19 bp, Mus musculus
  siRNA target sequence for 1190006E07Rik (NM_026879.1,315-333).
ctggagttagaaattaaga

SEQ ID NO: 666591 - DNA, 19 bp, Mus musculus
  siRNA target sequence for 1190006E07Rik (NM_026879.1,356-374).
ggaagcgtgcagggtttta

SEQ ID NO: 666592 - DNA, 19 bp, Mus musculus
  siRNA target sequence for 1190006E07Rik (NM_026879.1,360-378).
gcgtgcagggttttagcta

SEQ ID NO: 666593 - DNA, 19 bp, Mus musculus
  siRNA target sequence for 1190006E07Rik (NM_026879.1,361-379).
cgtgcagggttttagctaa

SEQ ID NO: 666594 - DNA, 19 bp, Mus musculus
  siRNA target sequence for 1190006E07Rik (NM_026879.1,387-405).
gtccacctacggaaacaga

SEQ ID NO: 666595 - DNA, 19 bp, Mus musculus
  siRNA target sequence for 1190006E07Rik (NM_026879.1,416-434).
gttcgctgtaagctcaaaa

SEQ ID NO: 666596 - DNA, 19 bp, Mus musculus
  siRNA target sequence for 1190006E07Rik (NM_026879.1,442-460).
ctatgtccacacaaacgaa

SEQ ID NO: 666597 - DNA, 19 bp, Mus musculus
  siRNA target sequence for 1190006E07Rik (NM_026879.1,518-536).
gcaagcagtcaacaagaaa

SEQ ID NO: 666598 - DNA, 19 bp, Mus musculus
  siRNA target sequence for 1190006E07Rik (NM_026879.1,667-685).
gccaggacatcgtgaatca

SEQ ID NO: 666599 - DNA, 19 bp, Mus musculus
  siRNA target sequence for 1190006E07Rik (NM_026879.1,677-695).
cgtgaatcaagttcttgat

SEQ ID NO: 666600 - DNA, 19 bp, Mus musculus
  siRNA target sequence for 1190006E07Rik (NM_026879.1,757-775).
cgtctgcctccacttcaaa

SEQ ID NO: 666601 - DNA, 19 bp, Mus musculus
  siRNA target sequence for 1190006E07Rik (NM_026879.1,772-790).
caaaggctacaatttctga

SEQ ID NO: 666602 - DNA, 19 bp, Mus musculus
  siRNA target sequence for 1190006E07Rik (NM_026879.1,776-794).
ggctacaatttctgatgaa

SEQ ID NO: 666603 - DNA, 19 bp, Mus musculus
  siRNA target sequence for 1190006E07Rik (NM_026879.1,801-819).
gaacgtcaactcaaagctt

SEQ ID NO: 666604 - DNA, 19 bp, Mus musculus
  siRNA target sequence for 1190017O12Rik (NM_138743.1,219-237).
ggcgtgaaaatgtaccaaa

SEQ ID NO: 666605 - DNA, 19 bp, Mus musculus
  siRNA target sequence for 1200011D11Rik (NM_027890.3,57-75).
gccctcctgccttggattt

SEQ ID NO: 666606 - DNA, 19 bp, Mus musculus
  siRNA target sequence for 1200011D11Rik (NM_027890.3,77-95).
gatgctgctctcaacaata

SEQ ID NO: 666607 - DNA, 19 bp, Mus musculus
  siRNA target sequence for 1200011D11Rik (NM_027890.3,191-209).
ccttggcacctgttgtgaa

SEQ ID NO: 666608 - DNA, 19 bp, Mus musculus
  siRNA target sequence for 1200011D11Rik (NM_027890.3,218-236).
ggactactgcctagagatt

SEQ ID NO: 666609 - DNA, 19 bp, Mus musculus
  siRNA target sequence for 1200011D11Rik (NM_027890.3,221-239).
ctactgcctagagatttta

SEQ ID NO: 666610 - DNA, 19 bp, Mus musculus
  siRNA target sequence for 1200011D11Rik (NM_027890.3,270-288).
gacttcgtggtgcaacatt

SEQ ID NO: 666611 - DNA, 19 bp, Mus musculus
  siRNA target sequence for 1200011D11Rik (NM_027890.3,272-290).
cttcgtggtgcaacattta

SEQ ID NO: 666612 - DNA, 19 bp, Mus musculus
  siRNA target sequence for 1200011D11Rik (NM_027890.3,303-321).
cctactgatggggtcattt

SEQ ID NO: 666613 - DNA, 19 bp, Mus musculus
  siRNA target sequence for 1200011D11Rik (NM_027890.3,312-330).
ggggtcatttgcaggttta

SEQ ID NO: 666614 - DNA, 19 bp, Mus musculus
  siRNA target sequence for 1200011D11Rik (NM_027890.3,322-340).
gcaggtttaaggagagtat

SEQ ID NO: 666615 - DNA, 19 bp, Mus musculus
  siRNA target sequence for 1200011D11Rik (NM_027890.3,352-370).
gctatgtcgacgacttcta

SEQ ID NO: 666616 - DNA, 19 bp, Mus musculus
  siRNA target sequence for 1200011D11Rik (NM_027890.3,353-371).
ctatgtcgacgacttctat

SEQ ID NO: 666617 - DNA, 19 bp, Mus musculus
  siRNA target sequence for 1200011D11Rik (NM_027890.3,483-501).
ccctacaaagtgtctgaat

SEQ ID NO: 666618 - DNA, 19 bp, Mus musculus
  siRNA target sequence for 1200011D11Rik (NM_027890.3,525-543).
gagacccattggcaatact

SEQ ID NO: 666619 - DNA, 19 bp, Mus musculus
  siRNA target sequence for 1200011D11Rik (NM_027890.3,1308-1326).
cctgagtgtccccgttata

SEQ ID NO: 666620 - DNA, 19 bp, Mus musculus
  siRNA target sequence for 1200011D11Rik (NM_027890.3,1309-1327).
ctgagtgtccccgttatat

SEQ ID NO: 666621 - DNA, 19 bp, Mus musculus
  siRNA target sequence for 1200011D11Rik (NM_027890.3,1433-1451).
cagcggcaatggcgaatat

SEQ ID NO: 666622 - DNA, 19 bp, Mus musculus
  siRNA target sequence for 1200011D11Rik (NM_027890.3,1435-1453).
gcggcaatggcgaatatgt

SEQ ID NO: 666623 - DNA, 19 bp, Mus musculus
  siRNA target sequence for 1200011D11Rik (NM_027890.3,1557-1575).
gccgtccaagaagacaatt

SEQ ID NO: 666624 - DNA, 19 bp, Mus musculus
  siRNA target sequence for 1200011D11Rik (NM_027890.3,1742-1760).
cctcgaggtcggtgtacaa

SEQ ID NO: 666625 - DNA, 19 bp, Mus musculus
  siRNA target sequence for 1200011D11Rik (NM_027890.3,1823-1841).
cctggggacactcaacaat

SEQ ID NO: 666626 - DNA, 19 bp, Mus musculus
  siRNA target sequence for 1200011D11Rik (NM_027890.3,1824-1842).
ctggggacactcaacaata

SEQ ID NO: 666627 - DNA, 19 bp, Mus musculus
  siRNA target sequence for 1200011D11Rik (NM_027890.3,1972-1990).
ggcttctggtctaccaatt

SEQ ID NO: 666628 - DNA, 19 bp, Mus musculus
  siRNA target sequence for 1200011D11Rik (NM_027890.3,2392-2410).
cggtgctactgagtatcat

SEQ ID NO: 666629 - DNA, 19 bp, Mus musculus
  siRNA target sequence for 1200011D11Rik (NM_027890.3,2430-2448).
gtggcactgatctctatca

SEQ ID NO: 666630 - DNA, 19 bp, Mus musculus
  siRNA target sequence for 1500005A01Rik (NM_033146.1,170-188).
cgagcctacgggaagatgt

SEQ ID NO: 666631 - DNA, 19 bp, Mus musculus
  siRNA target sequence for 1500005A01Rik (NM_033146.1,449-467).
gggcgaattgcagaattct

SEQ ID NO: 666632 - DNA, 19 bp, Mus musculus
  siRNA target sequence for 1500005A01Rik (NM_033146.1,470-488).
cccagggcagtgcttatta

SEQ ID NO: 666633 - DNA, 19 bp, Mus musculus
  siRNA target sequence for 1500005A01Rik (NM_033146.1,474-492).
gggcagtgcttattatgct

SEQ ID NO: 666634 - DNA, 19 bp, Mus musculus
  siRNA target sequence for 1500005A01Rik (NM_033146.1,522-540).
gtgtacctccagtcattgt

SEQ ID NO: 666635 - DNA, 19 bp, Mus musculus
  siRNA target sequence for 1500005A01Rik (NM_033146.1,568-586).
gcccaaggacaagaactta

SEQ ID NO: 666636 - DNA, 19 bp, Mus musculus
  siRNA target sequence for 1500005A01Rik (NM_033146.1,706-724).
caaccagcggcttaacact

SEQ ID NO: 666637 - DNA, 19 bp, Mus musculus
  siRNA target sequence for 1500005A01Rik (NM_033146.1,710-728).
cagcggcttaacactcaaa

SEQ ID NO: 666638 - DNA, 19 bp, Mus musculus
  siRNA target sequence for 1500005A01Rik (NM_033146.1,713-731).
cggcttaacactcaaatca

SEQ ID NO: 666639 - DNA, 19 bp, Mus musculus
  siRNA target sequence for 1500016L11Rik (NM_026885.1,184-202).
gacgccagaggaactactt

SEQ ID NO: 666640 - DNA, 19 bp, Mus musculus
  siRNA target sequence for 1500016L11Rik (NM_026885.1,249-267).
gggaacgacagaaactaga

SEQ ID NO: 666641 - DNA, 19 bp, Mus musculus
  siRNA target sequence for 1500016L11Rik (NM_026885.1,250-268).
ggaacgacagaaactagaa

SEQ ID NO: 666642 - DNA, 19 bp, Mus musculus
  siRNA target sequence for 1500016L11Rik (NM_026885.1,355-373).
ggtgcgtacccggagatat

SEQ ID NO: 666643 - DNA, 19 bp, Mus musculus
  siRNA target sequence for 1500016L11Rik (NM_026885.1,358-376).
gcgtacccggagatatgta

SEQ ID NO: 666644 - DNA, 19 bp, Mus musculus
  siRNA target sequence for 1500016L11Rik (NM_026885.1,367-385).
gagatatgtacgcaagttt

SEQ ID NO: 666645 - DNA, 19 bp, Mus musculus
  siRNA target sequence for 1500016L11Rik (NM_026885.1,369-387).
gatatgtacgcaagtttgt

SEQ ID NO: 666646 - DNA, 19 bp, Mus musculus
  siRNA target sequence for 1500016L11Rik (NM_026885.1,413-431).
gtgtccctcaagatacaga

SEQ ID NO: 666647 - DNA, 19 bp, Mus musculus
  siRNA target sequence for 1500016L11Rik (NM_026885.1,461-479).
gccatgaagggtgttacta

SEQ ID NO: 666648 - DNA, 19 bp, Mus musculus
  siRNA target sequence for 1500016L11Rik (NM_026885.1,462-480).
ccatgaagggtgttactaa

SEQ ID NO: 666649 - DNA, 19 bp, Mus musculus
  siRNA target sequence for 1600019D15Rik (NM_028975.2,202-220).
caattcatgatgaccaata

SEQ ID NO: 666650 - DNA, 19 bp, Mus musculus
  siRNA target sequence for 1600019D15Rik (NM_028975.2,245-263).
ctcgcctgttcacagttta

SEQ ID NO: 666651 - DNA, 19 bp, Mus musculus
  siRNA target sequence for 1600019D15Rik (NM_028975.2,247-265).
cgcctgttcacagtttatt

SEQ ID NO: 666652 - DNA, 19 bp, Mus musculus
  siRNA target sequence for 1600019D15Rik (NM_028975.2,250-268).
ctgttcacagtttattgct

SEQ ID NO: 666653 - DNA, 19 bp, Mus musculus
  siRNA target sequence for 1600019D15Rik (NM_028975.2,301-319).
catgaagcagcgagctttt

SEQ ID NO: 666654 - DNA, 19 bp, Mus musculus
  siRNA target sequence for 1600019D15Rik (NM_028975.2,360-378).
gaggctgcatcagagatta

SEQ ID NO: 666655 - DNA, 19 bp, Mus musculus
  siRNA target sequence for 1600019D15Rik (NM_028975.2,480-498).
cacaatgagtatttttcca

SEQ ID NO: 666656 - DNA, 19 bp, Mus musculus
  siRNA target sequence for 1600019D15Rik (NM_028975.2,523-541).
gctgccacatacactaaga

SEQ ID NO: 666657 - DNA, 19 bp, Mus musculus
  siRNA target sequence for 1600019D15Rik (NM_028975.2,549-567).
ggacgcaaagggttcaaat

SEQ ID NO: 666658 - DNA, 19 bp, Mus musculus
  siRNA target sequence for 1600019D15Rik (NM_028975.2,550-568).
gacgcaaagggttcaaata

SEQ ID NO: 666659 - DNA, 19 bp, Mus musculus
  siRNA target sequence for 1600019D15Rik (NM_028975.2,552-570).
cgcaaagggttcaaatagt

SEQ ID NO: 666660 - DNA, 19 bp, Mus musculus
  siRNA target sequence for 1600019D15Rik (NM_028975.2,554-572).
caaagggttcaaatagttt

SEQ ID NO: 666661 - DNA, 19 bp, Mus musculus
  siRNA target sequence for 1600019D15Rik (NM_028975.2,558-576).
gggttcaaatagtttacct

SEQ ID NO: 666662 - DNA, 19 bp, Mus musculus
  siRNA target sequence for 1600019D15Rik (NM_028975.2,584-602).
gatcattcttggataaatt

SEQ ID NO: 666663 - DNA, 19 bp, Mus musculus
  siRNA target sequence for 1600019D15Rik (NM_028975.2,591-609).
cttggataaattaagtact

SEQ ID NO: 666664 - DNA, 19 bp, Mus musculus
  siRNA target sequence for 1600019D15Rik (NM_028975.2,627-645).
gaaattcatcgcttgtaat

SEQ ID NO: 666665 - DNA, 19 bp, Mus musculus
  siRNA target sequence for 1600019D15Rik (NM_028975.2,654-672).
cttgatgcctgctacagtt

SEQ ID NO: 666666 - DNA, 19 bp, Mus musculus
  siRNA target sequence for 1600019D15Rik (NM_028975.2,698-716).
gtttgctccagccttttat

SEQ ID NO: 666667 - DNA, 19 bp, Mus musculus
  siRNA target sequence for 1600019D15Rik (NM_028975.2,736-754).
cttcgatattcctctagaa

SEQ ID NO: 666668 - DNA, 19 bp, Mus musculus
  siRNA target sequence for 1600019D15Rik (NM_028975.2,760-778).
ccatattgtcggaacttgt

SEQ ID NO: 666669 - DNA, 19 bp, Mus musculus
  siRNA target sequence for 1600019D15Rik (NM_028975.2,761-779).
catattgtcggaacttgtt

SEQ ID NO: 666670 - DNA, 19 bp, Mus musculus
  siRNA target sequence for 1600019D15Rik (NM_028975.2,770-788).
ggaacttgtttaatgaact

SEQ ID NO: 666671 - DNA, 19 bp, Mus musculus
  siRNA target sequence for 1600019D15Rik (NM_028975.2,791-809).
ggattgtggttgaacacat

SEQ ID NO: 666672 - DNA, 19 bp, Mus musculus
  siRNA target sequence for 1600019D15Rik (NM_028975.2,792-810).
gattgtggttgaacacatt

SEQ ID NO: 666673 - DNA, 19 bp, Mus musculus
  siRNA target sequence for 1600019D15Rik (NM_028975.2,796-814).
gtggttgaacacattatta

SEQ ID NO: 666674 - DNA, 19 bp, Mus musculus
  siRNA target sequence for 1600019D15Rik (NM_028975.2,799-817).
gttgaacacattattatga

SEQ ID NO: 666675 - DNA, 19 bp, Mus musculus
  siRNA target sequence for 1600019D15Rik (NM_028975.2,856-874).
cagagcatcgcctttatca

SEQ ID NO: 666676 - DNA, 19 bp, Mus musculus
  siRNA target sequence for 1700018B24Rik (NM_025493.1,110-128).
ggtccgttgacgaatgcat

SEQ ID NO: 666677 - DNA, 19 bp, Mus musculus
  siRNA target sequence for 1700088E04Rik (NM_138581.1,109-127).
gactcggtgaccaaaggaa

SEQ ID NO: 666678 - DNA, 19 bp, Mus musculus
  siRNA target sequence for 1700088E04Rik (NM_138581.1,176-194).
gtgagctgctcagagttat

SEQ ID NO: 666679 - DNA, 19 bp, Mus musculus
  siRNA target sequence for 1700088E04Rik (NM_138581.1,181-199).
ctgctcagagttatgatga

SEQ ID NO: 666680 - DNA, 19 bp, Mus musculus
  siRNA target sequence for 1700088E04Rik (NM_138581.1,202-220).
gagtctaaactgacaaact

SEQ ID NO: 666681 - DNA, 19 bp, Mus musculus
  siRNA target sequence for 1700088E04Rik (NM_138581.1,234-252).
catcatggacaccatgaaa

SEQ ID NO: 666682 - DNA, 19 bp, Mus musculus
  siRNA target sequence for 1700088E04Rik (NM_138581.1,399-417).
ggcgtacagtcgtgaacaa

SEQ ID NO: 666683 - DNA, 19 bp, Mus musculus
  siRNA target sequence for 1700088E04Rik (NM_138581.1,400-418).
gcgtacagtcgtgaacaat

SEQ ID NO: 666684 - DNA, 19 bp, Mus musculus
  siRNA target sequence for 1700088E04Rik (NM_138581.1,401-419).
cgtacagtcgtgaacaatt

SEQ ID NO: 666685 - DNA, 19 bp, Mus musculus
  siRNA target sequence for 1700088E04Rik (NM_138581.1,546-564).
gctggaccggtttgatgaa

SEQ ID NO: 666686 - DNA, 19 bp, Mus musculus
  siRNA target sequence for 1700088E04Rik (NM_138581.1,580-598).
caagacaggaaagaattct

SEQ ID NO: 666687 - DNA, 19 bp, Mus musculus
  siRNA target sequence for 1700088E04Rik (NM_138581.1,674-692).
gggaaatggaggacattga

SEQ ID NO: 666688 - DNA, 19 bp, Mus musculus
  siRNA target sequence for 1810045K17Rik (NM_026435.2,26-44).
gtcgaaggtgtcctttaaa

SEQ ID NO: 666689 - DNA, 19 bp, Mus musculus
  siRNA target sequence for 1810045K17Rik (NM_026435.2,154-172).
cagctacaagtgcgattat

SEQ ID NO: 666690 - DNA, 19 bp, Mus musculus
  siRNA target sequence for 1810045K17Rik (NM_026435.2,156-174).
gctacaagtgcgattatta

SEQ ID NO: 666691 - DNA, 19 bp, Mus musculus
  siRNA target sequence for 1810045K17Rik (NM_026435.2,163-181).
gtgcgattattactaatga

SEQ ID NO: 666692 - DNA, 19 bp, Mus musculus
  siRNA target sequence for 1810045K17Rik (NM_026435.2,175-193).
ctaatgatggaataggaat

SEQ ID NO: 666693 - DNA, 19 bp, Mus musculus
  siRNA target sequence for 2010012F05Rik (NM_029362.2,273-291).
gaagcacggcaccaaaaat

SEQ ID NO: 666694 - DNA, 19 bp, Mus musculus
  siRNA target sequence for 2010012F05Rik (NM_029362.2,696-714).
cgtagccctaccatccaaa

SEQ ID NO: 666695 - DNA, 19 bp, Mus musculus
  siRNA target sequence for 2010012F05Rik (NM_029362.2,739-757).
gatgacgacatgaaggaat

SEQ ID NO: 666696 - DNA, 19 bp, Mus musculus
  siRNA target sequence for 2010110K24Rik (NM_025934.1,43-61).
gtgaatgtagccaagctta

SEQ ID NO: 666697 - DNA, 19 bp, Mus musculus
  siRNA target sequence for 2010110K24Rik (NM_025934.1,114-132).
gaaaaaccatgagattgtt

SEQ ID NO: 666698 - DNA, 19 bp, Mus musculus
  siRNA target sequence for 2010110K24Rik (NM_025934.1,133-151).
ccctgcagtttgattgctt

SEQ ID NO: 666699 - DNA, 19 bp, Mus musculus
  siRNA target sequence for 2010110K24Rik (NM_025934.1,165-183).
gaaacatggtggctgtaat

SEQ ID NO: 666700 - DNA, 19 bp, Mus musculus
  siRNA target sequence for 2010110K24Rik (NM_025934.1,169-187).
catggtggctgtaataaga

SEQ ID NO: 666701 - DNA, 19 bp, Mus musculus
  siRNA target sequence for 2010110K24Rik (NM_025934.1,173-191).
gtggctgtaataagattct

SEQ ID NO: 666702 - DNA, 19 bp, Mus musculus
  siRNA target sequence for 2010110K24Rik (NM_025934.1,177-195).
ctgtaataagattctaaga

SEQ ID NO: 666703 - DNA, 19 bp, Mus musculus
  siRNA target sequence for 2010110K24Rik (NM_025934.1,179-197).
gtaataagattctaagaga

SEQ ID NO: 666704 - DNA, 19 bp, Mus musculus
  siRNA target sequence for 2010110K24Rik (NM_025934.1,244-262).
cagggctatcggttgacaa

SEQ ID NO: 666705 - DNA, 19 bp, Mus musculus
  siRNA target sequence for 2010110K24Rik (NM_025934.1,246-264).
gggctatcggttgacaaat

SEQ ID NO: 666706 - DNA, 19 bp, Mus musculus
  siRNA target sequence for 2010110K24Rik (NM_025934.1,260-278).
caaatgctggctatgatta

SEQ ID NO: 666707 - DNA, 19 bp, Mus musculus
  siRNA target sequence for 2010110K24Rik (NM_025934.1,286-304).
ctgaaaacgctgtcttcta

SEQ ID NO: 666708 - DNA, 19 bp, Mus musculus
  siRNA target sequence for 2010110K24Rik (NM_025934.1,288-306).
gaaaacgctgtcttctaga

SEQ ID NO: 666709 - DNA, 19 bp, Mus musculus
  siRNA target sequence for 2010110K24Rik (NM_025934.1,305-323).
gacaggtagttgaatctgt

SEQ ID NO: 666710 - DNA, 19 bp, Mus musculus
  siRNA target sequence for 2010110K24Rik (NM_025934.1,342-360).
gggcaaagagtcagacatt

SEQ ID NO: 666711 - DNA, 19 bp, Mus musculus
  siRNA target sequence for 2010110K24Rik (NM_025934.1,405-423).
ccacagactcggaagaact

SEQ ID NO: 666712 - DNA, 19 bp, Mus musculus
  siRNA target sequence for 2010110K24Rik (NM_025934.1,406-424).
cacagactcggaagaactt

SEQ ID NO: 666713 - DNA, 19 bp, Mus musculus
  siRNA target sequence for 2010110K24Rik (NM_025934.1,419-437).
gaacttcctttcgaaatct

SEQ ID NO: 666714 - DNA, 19 bp, Mus musculus
  siRNA target sequence for 2010110K24Rik (NM_025934.1,462-480).
gcacaggcacaatgtttct

SEQ ID NO: 666715 - DNA, 19 bp, Mus musculus
  siRNA target sequence for 2010110K24Rik (NM_025934.1,463-481).
cacaggcacaatgtttctt

SEQ ID NO: 666716 - DNA, 19 bp, Mus musculus
  siRNA target sequence for 2010110K24Rik (NM_025934.1,475-493).
gtttcttggctttacttat

SEQ ID NO: 666717 - DNA, 19 bp, Mus musculus
  siRNA target sequence for 2010110K24Rik (NM_025934.1,501-519).
ctcggccatgaaggaattt

SEQ ID NO: 666718 - DNA, 19 bp, Mus musculus
  siRNA target sequence for 2010110K24Rik (NM_025934.1,554-572).
cagttccaaagccaattga

SEQ ID NO: 666719 - DNA, 19 bp, Mus musculus
  siRNA target sequence for 2010110K24Rik (NM_025934.1,559-577).
ccaaagccaattgattata

SEQ ID NO: 666720 - DNA, 19 bp, Mus musculus
  siRNA target sequence for 2010110K24Rik (NM_025934.1,589-607).
gtgatcatggagcttatta

SEQ ID NO: 666721 - DNA, 19 bp, Mus musculus
  siRNA target sequence for 2010110K24Rik (NM_025934.1,591-609).
gatcatggagcttattaat

SEQ ID NO: 666722 - DNA, 19 bp, Mus musculus
  siRNA target sequence for 2010110K24Rik (NM_025934.1,594-612).
catggagcttattaatggt

SEQ ID NO: 666723 - DNA, 19 bp, Mus musculus
  siRNA target sequence for 2010110K24Rik (NM_025934.1,647-665).
ctgcatcagtatatgatga

SEQ ID NO: 666724 - DNA, 19 bp, Mus musculus
  siRNA target sequence for 2010110K24Rik (NM_025934.1,667-685).
gctatggaactgatagtca

SEQ ID NO: 666725 - DNA, 19 bp, Mus musculus
  siRNA target sequence for 2010110K24Rik (NM_025934.1,668-686).
ctatggaactgatagtcaa

SEQ ID NO: 666726 - DNA, 19 bp, Mus musculus
  siRNA target sequence for 2010110K24Rik (NM_025934.1,701-719).
gactgattcatggagattt

SEQ ID NO: 666727 - DNA, 19 bp, Mus musculus
  siRNA target sequence for 2010110K24Rik (NM_025934.1,703-721).
ctgattcatggagatttca

SEQ ID NO: 666728 - DNA, 19 bp, Mus musculus
  siRNA target sequence for 2010110K24Rik (NM_025934.1,705-723).
gattcatggagatttcaat

SEQ ID NO: 666729 - DNA, 19 bp, Mus musculus
  siRNA target sequence for 2010110K24Rik (NM_025934.1,709-727).
catggagatttcaatgaat

SEQ ID NO: 666730 - DNA, 19 bp, Mus musculus
  siRNA target sequence for 2010110K24Rik (NM_025934.1,754-772).
cacatcaccatgattgatt

SEQ ID NO: 666731 - DNA, 19 bp, Mus musculus
  siRNA target sequence for 2010110K24Rik (NM_025934.1,799-817).
ccaaatgctgaatggtatt

SEQ ID NO: 666732 - DNA, 19 bp, Mus musculus
  siRNA target sequence for 2010110K24Rik (NM_025934.1,836-854).
gcattcgagaattcttcat

SEQ ID NO: 666733 - DNA, 19 bp, Mus musculus
  siRNA target sequence for 2010110K24Rik (NM_025934.1,844-862).
gaattcttcatgaaacgtt

SEQ ID NO: 666734 - DNA, 19 bp, Mus musculus
  siRNA target sequence for 2010110K24Rik (NM_025934.1,852-870).
catgaaacgttttagctat

SEQ ID NO: 666735 - DNA, 19 bp, Mus musculus
  siRNA target sequence for 2010110K24Rik (NM_025934.1,906-924).
gaaggaggattctcttgat

SEQ ID NO: 666736 - DNA, 19 bp, Mus musculus
  siRNA target sequence for 2010110K24Rik (NM_025934.1,986-1004).
cagtaggcccagatgataa

SEQ ID NO: 666737 - DNA, 19 bp, Mus musculus
  siRNA target sequence for 2010110K24Rik (NM_025934.1,1076-1094).
ggaggtcagaattggaaaa

SEQ ID NO: 666738 - DNA, 19 bp, Mus musculus
  siRNA target sequence for 2010110K24Rik (NM_025934.1,1259-1277).
cccacaggtcggttactga

SEQ ID NO: 666739 - DNA, 19 bp, Mus musculus
  siRNA target sequence for 2010110K24Rik (NM_025934.1,1287-1305).
ggagagcaggagaactgaa

SEQ ID NO: 666740 - DNA, 19 bp, Mus musculus
  siRNA target sequence for 2010110K24Rik (NM_025934.1,1292-1310).
gcaggagaactgaaaatga

SEQ ID NO: 666741 - DNA, 19 bp, Mus musculus
  siRNA target sequence for 2010110K24Rik (NM_025934.1,1423-1441).
gagagtatgagtagtgtta

SEQ ID NO: 666742 - DNA, 19 bp, Mus musculus
  siRNA target sequence for 2010110K24Rik (NM_025934.1,1438-1456).
gttactcggcatagaacaa

SEQ ID NO: 666743 - DNA, 19 bp, Mus musculus
  siRNA target sequence for 2010110K24Rik (NM_025934.1,1444-1462).
cggcatagaacaagaacat

SEQ ID NO: 666744 - DNA, 19 bp, Mus musculus
  siRNA target sequence for 2010110K24Rik (NM_025934.1,1445-1463).
ggcatagaacaagaacatt

SEQ ID NO: 666745 - DNA, 19 bp, Mus musculus
  siRNA target sequence for 2010110K24Rik (NM_025934.1,1447-1465).
catagaacaagaacattga

SEQ ID NO: 666746 - DNA, 19 bp, Mus musculus
  siRNA target sequence for 2010110K24Rik (NM_025934.1,1487-1505).
ccctaagctgttcaacaat

SEQ ID NO: 666747 - DNA, 19 bp, Mus musculus
  siRNA target sequence for 2210412K09Rik (NM_029814.1,163-181).
ccggctggatgctgaacta

SEQ ID NO: 666748 - DNA, 19 bp, Mus musculus
  siRNA target sequence for 2210412K09Rik (NM_029814.1,250-268).
cctgagagttttaaagcaa

SEQ ID NO: 666749 - DNA, 19 bp, Mus musculus
  siRNA target sequence for 2210412K09Rik (NM_029814.1,251-269).
ctgagagttttaaagcaaa

SEQ ID NO: 666750 - DNA, 19 bp, Mus musculus
  siRNA target sequence for 2210412K09Rik (NM_029814.1,302-320).
gcccaacagtcctttaaca

SEQ ID NO: 666751 - DNA, 19 bp, Mus musculus
  siRNA target sequence for 2210412K09Rik (NM_029814.1,452-470).
gaccagctggaggatatga

SEQ ID NO: 666752 - DNA, 19 bp, Mus musculus
  siRNA target sequence for 2210412K09Rik (NM_029814.1,511-529).
ctacggcaccccagagtta

SEQ ID NO: 666753 - DNA, 19 bp, Mus musculus
  siRNA target sequence for 2210412K09Rik (NM_029814.1,514-532).
cggcaccccagagttagat

SEQ ID NO: 666754 - DNA, 19 bp, Mus musculus
  siRNA target sequence for 2210412K09Rik (NM_029814.1,538-556).
cgacctggaagcagagtta

SEQ ID NO: 666755 - DNA, 19 bp, Mus musculus
  siRNA target sequence for 2210412K09Rik (NM_029814.1,668-686).
ggcgtgctggtggatgaat

SEQ ID NO: 666756 - DNA, 19 bp, Mus musculus
  siRNA target sequence for 2210412K09Rik (NM_029814.1,673-691).
gctggtggatgaatttgga

SEQ ID NO: 666757 - DNA, 19 bp, Mus musculus
  siRNA target sequence for 2310008M20Rik (NM_025512.2,47-65).
ctgccggcagcgagatttt

SEQ ID NO: 666758 - DNA, 19 bp, Mus musculus
  siRNA target sequence for 2310008M20Rik (NM_025512.2,56-74).
gcgagattttcttccattt

SEQ ID NO: 666759 - DNA, 19 bp, Mus musculus
  siRNA target sequence for 2310008M20Rik (NM_025512.2,133-151).
gttgttctgaggtgaatgt

SEQ ID NO: 666760 - DNA, 19 bp, Mus musculus
  siRNA target sequence for 2310010I16Rik (NM_025519.1,65-83).
caagttgggtaagttcttt

SEQ ID NO: 666761 - DNA, 19 bp, Mus musculus
  siRNA target sequence for 2310010I16Rik (NM_025519.1,392-410).
cgcagccaaggccatgaaa

SEQ ID NO: 666762 - DNA, 19 bp, Mus musculus
  siRNA target sequence for 2310010I16Rik (NM_025519.1,403-421).
ccatgaaagcggttcatga

SEQ ID NO: 666763 - DNA, 19 bp, Mus musculus
  siRNA target sequence for 2310010I16Rik (NM_025519.1,422-440).
caacatggacctcaacaaa

SEQ ID NO: 666764 - DNA, 19 bp, Mus musculus
  siRNA target sequence for 2310010I16Rik (NM_025519.1,425-443).
catggacctcaacaaaatt

SEQ ID NO: 666765 - DNA, 19 bp, Mus musculus
  siRNA target sequence for 2310010I16Rik (NM_025519.1,428-446).
ggacctcaacaaaattgat

SEQ ID NO: 666766 - DNA, 19 bp, Mus musculus
  siRNA target sequence for 2310069P03Rik (NM_028002.1,197-215).
cacaatatgtcaagaaaga

SEQ ID NO: 666767 - DNA, 19 bp, Mus musculus
  siRNA target sequence for 2310069P03Rik (NM_028002.1,265-283).
gtgccccgatggttcgata

SEQ ID NO: 666768 - DNA, 19 bp, Mus musculus
  siRNA target sequence for 2310069P03Rik (NM_028002.1,267-285).
gccccgatggttcgatatt

SEQ ID NO: 666769 - DNA, 19 bp, Mus musculus
  siRNA target sequence for 2310069P03Rik (NM_028002.1,269-287).
cccgatggttcgatattca

SEQ ID NO: 666770 - DNA, 19 bp, Mus musculus
  siRNA target sequence for 2310069P03Rik (NM_028002.1,270-288).
ccgatggttcgatattcaa

SEQ ID NO: 666771 - DNA, 19 bp, Mus musculus
  siRNA target sequence for 2310069P03Rik (NM_028002.1,271-289).
cgatggttcgatattcaaa

SEQ ID NO: 666772 - DNA, 19 bp, Mus musculus
  siRNA target sequence for 2310069P03Rik (NM_028002.1,275-293).
ggttcgatattcaaagtta

SEQ ID NO: 666773 - DNA, 19 bp, Mus musculus
  siRNA target sequence for 2310069P03Rik (NM_028002.1,279-297).
cgatattcaaagttagctt

SEQ ID NO: 666774 - DNA, 19 bp, Mus musculus
  siRNA target sequence for 2310069P03Rik (NM_028002.1,294-312).
gcttttagaacattagtaa

SEQ ID NO: 666775 - DNA, 19 bp, Mus musculus
  siRNA target sequence for 2310069P03Rik (NM_028002.1,332-350).
gtgttacacaccaatgata

SEQ ID NO: 666776 - DNA, 19 bp, Mus musculus
  siRNA target sequence for 2310069P03Rik (NM_028002.1,334-352).
gttacacaccaatgataat

SEQ ID NO: 666777 - DNA, 19 bp, Mus musculus
  siRNA target sequence for 2310069P03Rik (NM_028002.1,338-356).
cacaccaatgataattgct

SEQ ID NO: 666778 - DNA, 19 bp, Mus musculus
  siRNA target sequence for 2310069P03Rik (NM_028002.1,357-375).
gctgattttgtcagatcta

SEQ ID NO: 666779 - DNA, 19 bp, Mus musculus
  siRNA target sequence for 2310069P03Rik (NM_028002.1,358-376).
ctgattttgtcagatctat

SEQ ID NO: 666780 - DNA, 19 bp, Mus musculus
  siRNA target sequence for 2310069P03Rik (NM_028002.1,360-378).
gattttgtcagatctataa

SEQ ID NO: 666781 - DNA, 19 bp, Mus musculus
  siRNA target sequence for 2310069P03Rik (NM_028002.1,412-430).
gtgattgcccgttgattgt

SEQ ID NO: 666782 - DNA, 19 bp, Mus musculus
  siRNA target sequence for 2310069P03Rik (NM_028002.1,418-436).
gcccgttgattgttcagtt

SEQ ID NO: 666783 - DNA, 19 bp, Mus musculus
  siRNA target sequence for 2310069P03Rik (NM_028002.1,419-437).
cccgttgattgttcagttt

SEQ ID NO: 666784 - DNA, 19 bp, Mus musculus
  siRNA target sequence for 2310069P03Rik (NM_028002.1,441-459).
gctaatgatgcaagacttt

SEQ ID NO: 666785 - DNA, 19 bp, Mus musculus
  siRNA target sequence for 2310069P03Rik (NM_028002.1,477-495).
ctagtctgtccctatgcaa

SEQ ID NO: 666786 - DNA, 19 bp, Mus musculus
  siRNA target sequence for 2310069P03Rik (NM_028002.1,484-502).
gtccctatgcaaatggaat

SEQ ID NO: 666787 - DNA, 19 bp, Mus musculus
  siRNA target sequence for 2310069P03Rik (NM_028002.1,536-554).
gatggcggacggttatgga

SEQ ID NO: 666788 - DNA, 19 bp, Mus musculus
  siRNA target sequence for 2310069P03Rik (NM_028002.1,552-570).
ggagcttgcttgatcaaca

SEQ ID NO: 666789 - DNA, 19 bp, Mus musculus
  siRNA target sequence for 2310069P03Rik (NM_028002.1,553-571).
gagcttgcttgatcaacaa

SEQ ID NO: 666790 - DNA, 19 bp, Mus musculus
  siRNA target sequence for 2310069P03Rik (NM_028002.1,593-611).
ggtgagacaagtgagaaat

SEQ ID NO: 666791 - DNA, 19 bp, Mus musculus
  siRNA target sequence for 2310069P03Rik (NM_028002.1,668-686).
ggcaagaaccatagatctt

SEQ ID NO: 666792 - DNA, 19 bp, Mus musculus
  siRNA target sequence for 2310069P03Rik (NM_028002.1,713-731).
gtcctggattacagttcat

SEQ ID NO: 666793 - DNA, 19 bp, Mus musculus
  siRNA target sequence for 2310069P03Rik (NM_028002.1,764-782).
ccactacgatgccattaaa

SEQ ID NO: 666794 - DNA, 19 bp, Mus musculus
  siRNA target sequence for 2310069P03Rik (NM_028002.1,765-783).
cactacgatgccattaaaa

SEQ ID NO: 666795 - DNA, 19 bp, Mus musculus
  siRNA target sequence for 2310069P03Rik (NM_028002.1,770-788).
cgatgccattaaaatgata

SEQ ID NO: 666796 - DNA, 19 bp, Mus musculus
  siRNA target sequence for 2310069P03Rik (NM_028002.1,771-789).
gatgccattaaaatgataa

SEQ ID NO: 666797 - DNA, 19 bp, Mus musculus
  siRNA target sequence for 2310069P03Rik (NM_028002.1,802-820).
ctatacccatagttgctaa

SEQ ID NO: 666798 - DNA, 19 bp, Mus musculus
  siRNA target sequence for 2310069P03Rik (NM_028002.1,822-840).
ggagacataagaagcttaa

SEQ ID NO: 666799 - DNA, 19 bp, Mus musculus
  siRNA target sequence for 2310069P03Rik (NM_028002.1,965-983).
ggttgacatctctcttgaa

SEQ ID NO: 666800 - DNA, 19 bp, Mus musculus
  siRNA target sequence for 2310069P03Rik (NM_028002.1,984-1002).
cttggaactccttttatgt

SEQ ID NO: 666801 - DNA, 19 bp, Mus musculus
  siRNA target sequence for 2310069P03Rik (NM_028002.1,1022-1040).
gtacatgatggaaaagata

SEQ ID NO: 666802 - DNA, 19 bp, Mus musculus
  siRNA target sequence for 2310069P03Rik (NM_028002.1,1100-1118).
ctaccttacggaccattat

SEQ ID NO: 666803 - DNA, 19 bp, Mus musculus
  siRNA target sequence for 2310069P03Rik (NM_028002.1,1103-1121).
ccttacggaccattatggt

SEQ ID NO: 666804 - DNA, 19 bp, Mus musculus
  siRNA target sequence for 2310069P03Rik (NM_028002.1,1120-1138).
gtgatgagtcgctttctaa

SEQ ID NO: 666805 - DNA, 19 bp, Mus musculus
  siRNA target sequence for 2310069P03Rik (NM_028002.1,1125-1143).
gagtcgctttctaaatctt

SEQ ID NO: 666806 - DNA, 19 bp, Mus musculus
  siRNA target sequence for 2400003C14Rik (NM_028018.1,121-139).
gagcgcttacgagtcaatt

SEQ ID NO: 666807 - DNA, 19 bp, Mus musculus
  siRNA target sequence for 2400003C14Rik (NM_028018.1,124-142).
cgcttacgagtcaatttga

SEQ ID NO: 666808 - DNA, 19 bp, Mus musculus
  siRNA target sequence for 2400003C14Rik (NM_028018.1,126-144).
cttacgagtcaatttgaga

SEQ ID NO: 666809 - DNA, 19 bp, Mus musculus
  siRNA target sequence for 2400003C14Rik (NM_028018.1,131-149).
gagtcaatttgagattagt

SEQ ID NO: 666810 - DNA, 19 bp, Mus musculus
  siRNA target sequence for 2400003C14Rik (NM_028018.1,141-159).
gagattagttataaatcgt

SEQ ID NO: 666811 - DNA, 19 bp, Mus musculus
  siRNA target sequence for 2400003C14Rik (NM_028018.1,346-364).
ggccttatccagtctatga

SEQ ID NO: 666812 - DNA, 19 bp, Mus musculus
  siRNA target sequence for 2400003C14Rik (NM_028018.1,347-365).
gccttatccagtctatgaa

SEQ ID NO: 666813 - DNA, 19 bp, Mus musculus
  siRNA target sequence for 2400003C14Rik (NM_028018.1,472-490).
gccaaatacagcaaggaat

SEQ ID NO: 666814 - DNA, 19 bp, Mus musculus
  siRNA target sequence for 2400003C14Rik (NM_028018.1,516-534).
gatcgggactgtgaatgat

SEQ ID NO: 666815 - DNA, 19 bp, Mus musculus
  siRNA target sequence for 2400003C14Rik (NM_028018.1,664-682).
ggggtggagacagatctta

SEQ ID NO: 666816 - DNA, 19 bp, Mus musculus
  siRNA target sequence for 2400003C14Rik (NM_028018.1,692-710).
gatttacggacgatgtgaa

SEQ ID NO: 666817 - DNA, 19 bp, Mus musculus
  siRNA target sequence for 2400003C14Rik (NM_028018.1,801-819).
catgccatctccaaatgct

SEQ ID NO: 666818 - DNA, 19 bp, Mus musculus
  siRNA target sequence for 2400003C14Rik (NM_028018.1,843-861).
gggaccatcggatttcagt

SEQ ID NO: 666819 - DNA, 19 bp, Mus musculus
  siRNA target sequence for 2400003C14Rik (NM_028018.1,882-900).
ccaggcctttcctaacatt

SEQ ID NO: 666820 - DNA, 19 bp, Mus musculus
  siRNA target sequence for 2400003C14Rik (NM_028018.1,926-944).
ccccatcctatgaatctgt

SEQ ID NO: 666821 - DNA, 19 bp, Mus musculus
  siRNA target sequence for 2400003C14Rik (NM_028018.1,927-945).
cccatcctatgaatctgtt

SEQ ID NO: 666822 - DNA, 19 bp, Mus musculus
  siRNA target sequence for 2400003C14Rik (NM_028018.1,932-950).
cctatgaatctgttgatga

SEQ ID NO: 666823 - DNA, 19 bp, Mus musculus
  siRNA target sequence for 2400003C14Rik (NM_028018.1,949-967).
gacattaatggtgataaaa

SEQ ID NO: 666824 - DNA, 19 bp, Mus musculus
  siRNA target sequence for 2400003C14Rik (NM_028018.1,1025-1043).
ccagacctgtggataatta

SEQ ID NO: 666825 - DNA, 19 bp, Mus musculus
  siRNA target sequence for 2400003C14Rik (NM_028018.1,1110-1128).
cagcacctcagcatcagaa

SEQ ID NO: 666826 - DNA, 19 bp, Mus musculus
  siRNA target sequence for 2400003C14Rik (NM_028018.1,1121-1139).
catcagaagacatagactt

SEQ ID NO: 666827 - DNA, 19 bp, Mus musculus
  siRNA target sequence for 2610002M06Rik (NM_025921.1,145-163).
gagaaacacttatttaact

SEQ ID NO: 666828 - DNA, 19 bp, Mus musculus
  siRNA target sequence for 2610002M06Rik (NM_025921.1,172-190).
gctgcaaaagaacttaata

SEQ ID NO: 666829 - DNA, 19 bp, Mus musculus
  siRNA target sequence for 2610002M06Rik (NM_025921.1,197-215).
ccaagaagtgtgataaaga

SEQ ID NO: 666830 - DNA, 19 bp, Mus musculus
  siRNA target sequence for 2610002M06Rik (NM_025921.1,249-267).
cattcagaagggcaataca

SEQ ID NO: 666831 - DNA, 19 bp, Mus musculus
  siRNA target sequence for 2610002M06Rik (NM_025921.1,296-314).
caatccgtcagaaaaacca

SEQ ID NO: 666832 - DNA, 19 bp, Mus musculus
  siRNA target sequence for 2610002M06Rik (NM_025921.1,316-334).
gcaatcaatttcttgagaa

SEQ ID NO: 666833 - DNA, 19 bp, Mus musculus
  siRNA target sequence for 2610002M06Rik (NM_025921.1,317-335).
caatcaatttcttgagaat

SEQ ID NO: 666834 - DNA, 19 bp, Mus musculus
  siRNA target sequence for 2610002M06Rik (NM_025921.1,389-407).
gcaaggtgacaaaatccat

SEQ ID NO: 666835 - DNA, 19 bp, Mus musculus
  siRNA target sequence for 2610002M06Rik (NM_025921.1,405-423).
catggcaggtgtagttaaa

SEQ ID NO: 666836 - DNA, 19 bp, Mus musculus
  siRNA target sequence for 2610002M06Rik (NM_025921.1,408-426).
ggcaggtgtagttaaatct

SEQ ID NO: 666837 - DNA, 19 bp, Mus musculus
  siRNA target sequence for 2610002M06Rik (NM_025921.1,409-427).
gcaggtgtagttaaatcta

SEQ ID NO: 666838 - DNA, 19 bp, Mus musculus
  siRNA target sequence for 2610002M06Rik (NM_025921.1,410-428).
caggtgtagttaaatctat

SEQ ID NO: 666839 - DNA, 19 bp, Mus musculus
  siRNA target sequence for 2610002M06Rik (NM_025921.1,450-468).
gaaccttgagaagatttct

SEQ ID NO: 666840 - DNA, 19 bp, Mus musculus
  siRNA target sequence for 2610002M06Rik (NM_025921.1,487-505).
gaacatcagtttgaaacat

SEQ ID NO: 666841 - DNA, 19 bp, Mus musculus
  siRNA target sequence for 2610002M06Rik (NM_025921.1,654-672).
gtctgttggtgcaagtgtt

SEQ ID NO: 666842 - DNA, 19 bp, Mus musculus
  siRNA target sequence for 2610002M06Rik (NM_025921.1,710-728).
ctcgtcttcgtgatcaagt

SEQ ID NO: 666843 - DNA, 19 bp, Mus musculus
  siRNA target sequence for 2610205H19Rik (NM_027430.1,239-257).
ccaccgactcatggataaa

SEQ ID NO: 666844 - DNA, 19 bp, Mus musculus
  siRNA target sequence for 2610205H19Rik (NM_027430.1,306-324).
gcaggccccagaacagttt

SEQ ID NO: 666845 - DNA, 19 bp, Mus musculus
  siRNA target sequence for 2610205H19Rik (NM_027430.1,446-464).
gtcaagatattcacttgta

SEQ ID NO: 666846 - DNA, 19 bp, Mus musculus
  siRNA target sequence for 2610205H19Rik (NM_027430.1,482-500).
gagtttgttcgctgttaat

SEQ ID NO: 666847 - DNA, 19 bp, Mus musculus
  siRNA target sequence for 2610205H19Rik (NM_027430.1,528-546).
cagctgtttcggatttgga

SEQ ID NO: 666848 - DNA, 19 bp, Mus musculus
  siRNA target sequence for 2610205H19Rik (NM_027430.1,533-551).
gtttcggatttggagatat

SEQ ID NO: 666849 - DNA, 19 bp, Mus musculus
  siRNA target sequence for 2700038M07Rik (NM_019653.2,71-89).
cgagggttaacgagaaaga

SEQ ID NO: 666850 - DNA, 19 bp, Mus musculus
  siRNA target sequence for 2700038M07Rik (NM_019653.2,104-122).
gtactataggggaactctt

SEQ ID NO: 666851 - DNA, 19 bp, Mus musculus
  siRNA target sequence for 2700038M07Rik (NM_019653.2,162-180).
gaactggacggttgctttt

SEQ ID NO: 666852 - DNA, 19 bp, Mus musculus
  siRNA target sequence for 2700038M07Rik (NM_019653.2,211-229).
caaggatatcgcatagtga

SEQ ID NO: 666853 - DNA, 19 bp, Mus musculus
  siRNA target sequence for 2700038M07Rik (NM_019653.2,242-260).
ggtcccagtgccgtaagaa

SEQ ID NO: 666854 - DNA, 19 bp, Mus musculus
  siRNA target sequence for 2700038M07Rik (NM_019653.2,249-267).
gtgccgtaagaactttctt

SEQ ID NO: 666855 - DNA, 19 bp, Mus musculus
  siRNA target sequence for 2700038M07Rik (NM_019653.2,270-288).
gcatggttccaaaaatgtt

SEQ ID NO: 666856 - DNA, 19 bp, Mus musculus
  siRNA target sequence for 2700038M07Rik (NM_019653.2,271-289).
catggttccaaaaatgtta

SEQ ID NO: 666857 - DNA, 19 bp, Mus musculus
  siRNA target sequence for 2700038M07Rik (NM_019653.2,291-309).
caattcaagctgtctaaaa

SEQ ID NO: 666858 - DNA, 19 bp, Mus musculus
  siRNA target sequence for 2700038M07Rik (NM_019653.2,326-344).
gtaatggtggtcagaaaaa

SEQ ID NO: 666859 - DNA, 19 bp, Mus musculus
  siRNA target sequence for 2700038M07Rik (NM_019653.2,348-366).
gcctcctgagcacgttata

SEQ ID NO: 666860 - DNA, 19 bp, Mus musculus
  siRNA target sequence for 2700038M07Rik (NM_019653.2,350-368).
ctcctgagcacgttataga

SEQ ID NO: 666861 - DNA, 19 bp, Mus musculus
  siRNA target sequence for 2700038M07Rik (NM_019653.2,352-370).
cctgagcacgttatagact

SEQ ID NO: 666862 - DNA, 19 bp, Mus musculus
  siRNA target sequence for 2700038M07Rik (NM_019653.2,421-439).
cagagtcgttgcgttaata

SEQ ID NO: 666863 - DNA, 19 bp, Mus musculus
  siRNA target sequence for 2700038M07Rik (NM_019653.2,423-441).
gagtcgttgcgttaatata

SEQ ID NO: 666864 - DNA, 19 bp, Mus musculus
  siRNA target sequence for 2700038M07Rik (NM_019653.2,425-443).
gtcgttgcgttaatataga

SEQ ID NO: 666865 - DNA, 19 bp, Mus musculus
  siRNA target sequence for 2700038M07Rik (NM_019653.2,427-445).
cgttgcgttaatatagaat

SEQ ID NO: 666866 - DNA, 19 bp, Mus musculus
  siRNA target sequence for 2700038M07Rik (NM_019653.2,478-496).
ctccttgccacaggattaa

SEQ ID NO: 666867 - DNA, 19 bp, Mus musculus
  siRNA target sequence for 2700038M07Rik (NM_019653.2,510-528).
caaaatctgggatgtatat

SEQ ID NO: 666868 - DNA, 19 bp, Mus musculus
  siRNA target sequence for 2700038M07Rik (NM_019653.2,556-574).
gaccacattgaaatggtta

SEQ ID NO: 666869 - DNA, 19 bp, Mus musculus
  siRNA target sequence for 2700038M07Rik (NM_019653.2,598-616).
gggagcttactccttgtat

SEQ ID NO: 666870 - DNA, 19 bp, Mus musculus
  siRNA target sequence for 2700038M07Rik (NM_019653.2,609-627).
ccttgtatcagcttcaaga

SEQ ID NO: 666871 - DNA, 19 bp, Mus musculus
  siRNA target sequence for 2700038M07Rik (NM_019653.2,641-659).
gagtgtgggacctgaaaga

SEQ ID NO: 666872 - DNA, 19 bp, Mus musculus
  siRNA target sequence for 2700038M07Rik (NM_019653.2,645-663).
gtgggacctgaaagatgat

SEQ ID NO: 666873 - DNA, 19 bp, Mus musculus
  siRNA target sequence for 2700038M07Rik (NM_019653.2,705-723).
gtacagttgtgcattctct

SEQ ID NO: 666874 - DNA, 19 bp, Mus musculus
  siRNA target sequence for 2700038M07Rik (NM_019653.2,763-781).
gcagttttcctttggaata

SEQ ID NO: 666875 - DNA, 19 bp, Mus musculus
  siRNA target sequence for 2700038M07Rik (NM_019653.2,784-802).
gataaatacaccatgatta

SEQ ID NO: 666876 - DNA, 19 bp, Mus musculus
  siRNA target sequence for 2700038M07Rik (NM_019653.2,864-882).
gctagctactgcatcctat

SEQ ID NO: 666877 - DNA, 19 bp, Mus musculus
  siRNA target sequence for 2700038M07Rik (NM_019653.2,879-897).
ctatgacactcgtgtgtat

SEQ ID NO: 666878 - DNA, 19 bp, Mus musculus
  siRNA target sequence for 2700038M07Rik (NM_019653.2,949-967).
ccctcgcccactccaatat

SEQ ID NO: 666879 - DNA, 19 bp, Mus musculus
  siRNA target sequence for 2700038M07Rik (NM_019653.2,950-968).
cctcgcccactccaatatt

SEQ ID NO: 666880 - DNA, 19 bp, Mus musculus
  siRNA target sequence for 2700038M07Rik (NM_019653.2,951-969).
ctcgcccactccaatattt

SEQ ID NO: 666881 - DNA, 19 bp, Mus musculus
  siRNA target sequence for 2700038M07Rik (NM_019653.2,996-1014).
gagagctgtgtctttcagt

SEQ ID NO: 666882 - DNA, 19 bp, Mus musculus
  siRNA target sequence for 2700038M07Rik (NM_019653.2,1059-1077).
gaggttctggagaatcgat

SEQ ID NO: 666883 - DNA, 19 bp, Mus musculus
  siRNA target sequence for 2700038M07Rik (NM_019653.2,1080-1098).
ggattgtccggtacaagtt

SEQ ID NO: 666884 - DNA, 19 bp, Mus musculus
  siRNA target sequence for 2700038M07Rik (NM_019653.2,1204-1222).
gtccctagccttcaacata

SEQ ID NO: 666885 - DNA, 19 bp, Mus musculus
  siRNA target sequence for 2700038M07Rik (NM_019653.2,1206-1224).
ccctagccttcaacatata

SEQ ID NO: 666886 - DNA, 19 bp, Mus musculus
  siRNA target sequence for 2700038M07Rik (NM_019653.2,1207-1225).
cctagccttcaacatatat

SEQ ID NO: 666887 - DNA, 19 bp, Mus musculus
  siRNA target sequence for 2700038M07Rik (NM_019653.2,1219-1237).
catatatgtcgcatgtcaa

SEQ ID NO: 666888 - DNA, 19 bp, Mus musculus
  siRNA target sequence for 2810405I11Rik (NM_024190.1,132-150).
gaaccggagttccaaaaaa

SEQ ID NO: 666889 - DNA, 19 bp, Mus musculus
  siRNA target sequence for 2810405I11Rik (NM_024190.1,171-189).
cgaaaaggccaaaattaaa

SEQ ID NO: 666890 - DNA, 19 bp, Mus musculus
  siRNA target sequence for 2810405I11Rik (NM_024190.1,222-240).
gaggattcacgccgaaaat

SEQ ID NO: 666891 - DNA, 19 bp, Mus musculus
  siRNA target sequence for 2810405I11Rik (NM_024190.1,259-277).
caaggggtgaacttcttga

SEQ ID NO: 666892 - DNA, 19 bp, Mus musculus
  siRNA target sequence for 2810405I11Rik (NM_024190.1,263-281).
gggtgaacttcttgagaat

SEQ ID NO: 666893 - DNA, 19 bp, Mus musculus
  siRNA target sequence for 2810405I11Rik (NM_024190.1,265-283).
gtgaacttcttgagaatga

SEQ ID NO: 666894 - DNA, 19 bp, Mus musculus
  siRNA target sequence for 2810405I11Rik (NM_024190.1,372-390).
gatggacgcgacgttgaaa

SEQ ID NO: 666895 - DNA, 19 bp, Mus musculus
  siRNA target sequence for 2810405I11Rik (NM_024190.1,375-393).
ggacgcgacgttgaaaagt

SEQ ID NO: 666896 - DNA, 19 bp, Mus musculus
  siRNA target sequence for 2810405I11Rik (NM_024190.1,376-394).
gacgcgacgttgaaaagta

SEQ ID NO: 666897 - DNA, 19 bp, Mus musculus
  siRNA target sequence for 2810405I11Rik (NM_024190.1,383-401).
cgttgaaaagtatgaatct

SEQ ID NO: 666898 - DNA, 19 bp, Mus musculus
  siRNA target sequence for 2810405I11Rik (NM_024190.1,413-431).
ccgctttgatggacaaatt

SEQ ID NO: 666899 - DNA, 19 bp, Mus musculus
  siRNA target sequence for 2810405I11Rik (NM_024190.1,416-434).
ctttgatggacaaattcga

SEQ ID NO: 666900 - DNA, 19 bp, Mus musculus
  siRNA target sequence for 2810405I11Rik (NM_024190.1,623-641).
cggctgagcaagatgaact

SEQ ID NO: 666901 - DNA, 19 bp, Mus musculus
  siRNA target sequence for 2810407E01Rik (NM_026995.1,128-146).
cgccgctgtacgcagtttt

SEQ ID NO: 666902 - DNA, 19 bp, Mus musculus
  siRNA target sequence for 2810407E01Rik (NM_026995.1,129-147).
gccgctgtacgcagtttta

SEQ ID NO: 666903 - DNA, 19 bp, Mus musculus
  siRNA target sequence for 2810407E01Rik (NM_026995.1,131-149).
cgctgtacgcagttttaca

SEQ ID NO: 666904 - DNA, 19 bp, Mus musculus
  siRNA target sequence for 2810407E01Rik (NM_026995.1,133-151).
ctgtacgcagttttacaga

SEQ ID NO: 666905 - DNA, 19 bp, Mus musculus
  siRNA target sequence for 2810407E01Rik (NM_026995.1,294-312).
gtacacaggagcaccatat

SEQ ID NO: 666906 - DNA, 19 bp, Mus musculus
  siRNA target sequence for 2810407E01Rik (NM_026995.1,297-315).
cacaggagcaccatatttt

SEQ ID NO: 666907 - DNA, 19 bp, Mus musculus
  siRNA target sequence for 2810407E01Rik (NM_026995.1,320-338).
gaatctcagccttgaaagt

SEQ ID NO: 666908 - DNA, 19 bp, Mus musculus
  siRNA target sequence for 2810407E01Rik (NM_026995.1,617-635).
cagccctcatccatagtta

SEQ ID NO: 666909 - DNA, 19 bp, Mus musculus
  siRNA target sequence for 2810407E01Rik (NM_026995.1,910-928).
cgtgctggaccagagaaaa

SEQ ID NO: 666910 - DNA, 19 bp, Mus musculus
  siRNA target sequence for 2810407E01Rik (NM_026995.1,1025-1043).
caaccactaccgacatgat

SEQ ID NO: 666911 - DNA, 19 bp, Mus musculus
  siRNA target sequence for 2810468K17Rik (NM_028369.1,293-311).
cttccaatggccaaagtgt

SEQ ID NO: 666912 - DNA, 19 bp, Mus musculus
  siRNA target sequence for 2810468K17Rik (NM_028369.1,387-405).
cgtccatacacgttcctat

SEQ ID NO: 666913 - DNA, 19 bp, Mus musculus
  siRNA target sequence for 2810468K17Rik (NM_028369.1,699-717).
ccagaagcatgtgtttgta

SEQ ID NO: 666914 - DNA, 19 bp, Mus musculus
  siRNA target sequence for 2810468K17Rik (NM_028369.1,726-744).
ggcagggaagcctgtgtat

SEQ ID NO: 666915 - DNA, 19 bp, Mus musculus
  siRNA target sequence for 2810468K17Rik (NM_028369.1,850-868).
gatggctacaaggtagtat

SEQ ID NO: 666916 - DNA, 19 bp, Mus musculus
  siRNA target sequence for 2810468K17Rik (NM_028369.1,854-872).
gctacaaggtagtattcgt

SEQ ID NO: 666917 - DNA, 19 bp, Mus musculus
  siRNA target sequence for 2810468K17Rik (NM_028369.1,937-955).
caggagctactgtacatct

SEQ ID NO: 666918 - DNA, 19 bp, Mus musculus
  siRNA target sequence for 2810468K17Rik (NM_028369.1,940-958).
gagctactgtacatctact

SEQ ID NO: 666919 - DNA, 19 bp, Mus musculus
  siRNA target sequence for 2810468K17Rik (NM_028369.1,1239-1257).
ccgcaaggaccaattcctt

SEQ ID NO: 666920 - DNA, 19 bp, Mus musculus
  siRNA target sequence for 2810468K17Rik (NM_028369.1,1276-1294).
ctgcttttcaacctcatta

SEQ ID NO: 666921 - DNA, 19 bp, Mus musculus
  siRNA target sequence for 2810468K17Rik (NM_028369.1,1523-1541).
cgctgcgcacaccttacta

SEQ ID NO: 666922 - DNA, 19 bp, Mus musculus
  siRNA target sequence for 2810468K17Rik (NM_028369.1,1570-1588).
cttcgccacttcctctata

SEQ ID NO: 666923 - DNA, 19 bp, Mus musculus
  siRNA target sequence for 2810468K17Rik (NM_028369.1,1573-1591).
cgccacttcctctataaat

SEQ ID NO: 666924 - DNA, 19 bp, Mus musculus
  siRNA target sequence for 2810468K17Rik (NM_028369.1,1575-1593).
ccacttcctctataaatca

SEQ ID NO: 666925 - DNA, 19 bp, Mus musculus
  siRNA target sequence for 2810468K17Rik (NM_028369.1,1576-1594).
cacttcctctataaatcaa

SEQ ID NO: 666926 - DNA, 19 bp, Mus musculus
  siRNA target sequence for 2810468K17Rik (NM_028369.1,1715-1733).
cactcaagaccatctacta

SEQ ID NO: 666927 - DNA, 19 bp, Mus musculus
  siRNA target sequence for 2810468K17Rik (NM_028369.1,1717-1735).
ctcaagaccatctactaca

SEQ ID NO: 666928 - DNA, 19 bp, Mus musculus
  siRNA target sequence for 3000003F02Rik (NM_172437.1,63-81).
ggtggcatcaggtttaact

SEQ ID NO: 666929 - DNA, 19 bp, Mus musculus
  siRNA target sequence for 3000003F02Rik (NM_172437.1,114-132).
cagggcagcataaaaacct

SEQ ID NO: 666930 - DNA, 19 bp, Mus musculus
  siRNA target sequence for 3000003F02Rik (NM_172437.1,161-179).
cgatgaacagggacagtta

SEQ ID NO: 666931 - DNA, 19 bp, Mus musculus
  siRNA target sequence for 3000003F02Rik (NM_172437.1,165-183).
gaacagggacagttagtca

SEQ ID NO: 666932 - DNA, 19 bp, Mus musculus
  siRNA target sequence for 3000003F02Rik (NM_172437.1,191-209).
caccgatggatctctctat

SEQ ID NO: 666933 - DNA, 19 bp, Mus musculus
  siRNA target sequence for 3000003F02Rik (NM_172437.1,198-216).
ggatctctctatgaaatta

SEQ ID NO: 666934 - DNA, 19 bp, Mus musculus
  siRNA target sequence for 3000003F02Rik (NM_172437.1,202-220).
ctctctatgaaattagtaa

SEQ ID NO: 666935 - DNA, 19 bp, Mus musculus
  siRNA target sequence for 3000003F02Rik (NM_172437.1,225-243).
caatctgaaccgagcaatt

SEQ ID NO: 666936 - DNA, 19 bp, Mus musculus
  siRNA target sequence for 3000003F02Rik (NM_172437.1,229-247).
ctgaaccgagcaattctgt

SEQ ID NO: 666937 - DNA, 19 bp, Mus musculus
  siRNA target sequence for 3000003F02Rik (NM_172437.1,276-294).
gtatccttagaacataaaa

SEQ ID NO: 666938 - DNA, 19 bp, Mus musculus
  siRNA target sequence for 3000003F02Rik (NM_172437.1,354-372).
gactccgagaaagaaaaca

SEQ ID NO: 666939 - DNA, 19 bp, Mus musculus
  siRNA target sequence for 3000003F02Rik (NM_172437.1,414-432).
gatttattacgttcacttt

SEQ ID NO: 666940 - DNA, 19 bp, Mus musculus
  siRNA target sequence for 3000003F02Rik (NM_172437.1,449-467).
cacatcgctgggtcagttt

SEQ ID NO: 666941 - DNA, 19 bp, Mus musculus
  siRNA target sequence for 3000003F02Rik (NM_172437.1,468-486).
gcctgtgacatcaaaagga

SEQ ID NO: 666942 - DNA, 19 bp, Mus musculus
  siRNA target sequence for 3000003F02Rik (NM_172437.1,469-487).
cctgtgacatcaaaaggat

SEQ ID NO: 666943 - DNA, 19 bp, Mus musculus
  siRNA target sequence for 3000003F02Rik (NM_172437.1,491-509).
gaattcacaaactgaatta

SEQ ID NO: 666944 - DNA, 19 bp, Mus musculus
  siRNA target sequence for 3000003F02Rik (NM_172437.1,538-556).
gcaagatccttgacaaaaa

SEQ ID NO: 666945 - DNA, 19 bp, Mus musculus
  siRNA target sequence for 3000003F02Rik (NM_172437.1,582-600).
gtgaggcaggcctttcctt

SEQ ID NO: 666946 - DNA, 19 bp, Mus musculus
  siRNA target sequence for 3000003F02Rik (NM_172437.1,591-609).
gcctttccttttttgatca

SEQ ID NO: 666947 - DNA, 19 bp, Mus musculus
  siRNA target sequence for 3000003F02Rik (NM_172437.1,621-639).
cagggtgaagttgttgtaa

SEQ ID NO: 666948 - DNA, 19 bp, Mus musculus
  siRNA target sequence for 3000003F02Rik (NM_172437.1,623-641).
gggtgaagttgttgtaaaa

SEQ ID NO: 666949 - DNA, 19 bp, Mus musculus
  siRNA target sequence for 3000003F02Rik (NM_172437.1,689-707).
ggctcttggctttttcaaa

SEQ ID NO: 666950 - DNA, 19 bp, Mus musculus
  siRNA target sequence for 3000003F02Rik (NM_172437.1,714-732).
gacgcaaagaaagaaaatt

SEQ ID NO: 666951 - DNA, 19 bp, Mus musculus
  siRNA target sequence for 3000003F02Rik (NM_172437.1,726-744).
gaaaattccaagtttacct

SEQ ID NO: 666952 - DNA, 19 bp, Mus musculus
  siRNA target sequence for 3000003F02Rik (NM_172437.1,772-790).
ggaaggctgtgcaccattt

SEQ ID NO: 666953 - DNA, 19 bp, Mus musculus
  siRNA target sequence for 3000003F02Rik (NM_172437.1,777-795).
gctgtgcaccattttctca

SEQ ID NO: 666954 - DNA, 19 bp, Mus musculus
  siRNA target sequence for 3000003F02Rik (NM_172437.1,778-796).
ctgtgcaccattttctcaa

SEQ ID NO: 666955 - DNA, 19 bp, Mus musculus
  siRNA target sequence for 3000003F02Rik (NM_172437.1,812-830).
cctggtggaaaccaaatct

SEQ ID NO: 666956 - DNA, 19 bp, Mus musculus
  siRNA target sequence for 3000003F02Rik (NM_172437.1,864-882).
gactcagccataactgtaa

SEQ ID NO: 666957 - DNA, 19 bp, Mus musculus
  siRNA target sequence for 3000003F02Rik (NM_172437.1,980-998).
ggagacgttcgaagcaatt

SEQ ID NO: 666958 - DNA, 19 bp, Mus musculus
  siRNA target sequence for 3000003F02Rik (NM_172437.1,989-1007).
cgaagcaattggcttatta

SEQ ID NO: 666959 - DNA, 19 bp, Mus musculus
  siRNA target sequence for 3000003F02Rik (NM_172437.1,1000-1018).
gcttattagccgtcaaact

SEQ ID NO: 666960 - DNA, 19 bp, Mus musculus
  siRNA target sequence for 3000003F02Rik (NM_172437.1,1001-1019).
cttattagccgtcaaactt

SEQ ID NO: 666961 - DNA, 19 bp, Mus musculus
  siRNA target sequence for 3000003F02Rik (NM_172437.1,1009-1027).
ccgtcaaacttggtgttat

SEQ ID NO: 666962 - DNA, 19 bp, Mus musculus
  siRNA target sequence for 3000003F02Rik (NM_172437.1,1010-1028).
cgtcaaacttggtgttatt

SEQ ID NO: 666963 - DNA, 19 bp, Mus musculus
  siRNA target sequence for 3000003F02Rik (NM_172437.1,1023-1041).
gttattccttcggatttca

SEQ ID NO: 666964 - DNA, 19 bp, Mus musculus
  siRNA target sequence for 3000003F02Rik (NM_172437.1,1064-1082).
gagagcaatcacctatcaa

SEQ ID NO: 666965 - DNA, 19 bp, Mus musculus
  siRNA target sequence for 3000003F02Rik (NM_172437.1,1080-1098).
caatcgatggttgttaaaa

SEQ ID NO: 666966 - DNA, 19 bp, Mus musculus
  siRNA target sequence for 3000003F02Rik (NM_172437.1,1084-1102).
cgatggttgttaaaaaagt

SEQ ID NO: 666967 - DNA, 19 bp, Mus musculus
  siRNA target sequence for 3000003F02Rik (NM_172437.1,1103-1121).
gactccggagaggttgaaa

SEQ ID NO: 666968 - DNA, 19 bp, Mus musculus
  siRNA target sequence for 3000003F02Rik (NM_172437.1,1107-1125).
ccggagaggttgaaaagta

SEQ ID NO: 666969 - DNA, 19 bp, Mus musculus
  siRNA target sequence for 3000003F02Rik (NM_172437.1,1112-1130).
gaggttgaaaagtatcaaa

SEQ ID NO: 666970 - DNA, 19 bp, Mus musculus
  siRNA target sequence for 3000003F02Rik (NM_172437.1,1202-1220).
gctcaagggaaatcacttt

SEQ ID NO: 666971 - DNA, 19 bp, Mus musculus
  siRNA target sequence for 3000003F02Rik (NM_172437.1,1241-1259).
gagaaatcagctcaatgat

SEQ ID NO: 666972 - DNA, 19 bp, Mus musculus
  siRNA target sequence for 3000003F02Rik (NM_172437.1,1328-1346).
ctatggaccacagagattt

SEQ ID NO: 666973 - DNA, 19 bp, Mus musculus
  siRNA target sequence for 3000003F02Rik (NM_172437.1,1386-1404).
gctctactgaagaatgaga

SEQ ID NO: 666974 - DNA, 19 bp, Mus musculus
  siRNA target sequence for 3000003F02Rik (NM_172437.1,1387-1405).
ctctactgaagaatgagat

SEQ ID NO: 666975 - DNA, 19 bp, Mus musculus
  siRNA target sequence for 3000003F02Rik (NM_172437.1,1403-1421).
gatggtgaaggccataaaa

SEQ ID NO: 666976 - DNA, 19 bp, Mus musculus
  siRNA target sequence for 3000003F02Rik (NM_172437.1,1442-1460).
cgtggatgatcctgtcaat

SEQ ID NO: 666977 - DNA, 19 bp, Mus musculus
  siRNA target sequence for 3000003F02Rik (NM_172437.1,1443-1461).
gtggatgatcctgtcaata

SEQ ID NO: 666978 - DNA, 19 bp, Mus musculus
  siRNA target sequence for 3000003F02Rik (NM_172437.1,1455-1473).
gtcaataaagcaaagcaat

SEQ ID NO: 666979 - DNA, 19 bp, Mus musculus
  siRNA target sequence for 3000003F02Rik (NM_172437.1,1491-1509).
gatgccaaaggcactcttt

SEQ ID NO: 666980 - DNA, 19 bp, Mus musculus
  siRNA target sequence for 3000003F02Rik (NM_172437.1,1495-1513).
ccaaaggcactctttcact

SEQ ID NO: 666981 - DNA, 19 bp, Mus musculus
  siRNA target sequence for 3000003F02Rik (NM_172437.1,1540-1558).
gtgcgctgctggagtcatt

SEQ ID NO: 666982 - DNA, 19 bp, Mus musculus
  siRNA target sequence for 3000003F02Rik (NM_172437.1,1612-1630).
cccattccatgcgtatatt

SEQ ID NO: 666983 - DNA, 19 bp, Mus musculus
  siRNA target sequence for 3000003F02Rik (NM_172437.1,1614-1632).
cattccatgcgtatattct

SEQ ID NO: 666984 - DNA, 19 bp, Mus musculus
  siRNA target sequence for 3000003F02Rik (NM_172437.1,1734-1752).
gaagatgcggacaagcatt

SEQ ID NO: 666985 - DNA, 19 bp, Mus musculus
  siRNA target sequence for 3000003F02Rik (NM_172437.1,1793-1811).
gtcagcgcacacatatgca

SEQ ID NO: 666986 - DNA, 19 bp, Mus musculus
  siRNA target sequence for 3000003F02Rik (NM_172437.1,2046-2064).
ggtccccactccgatgata

SEQ ID NO: 666987 - DNA, 19 bp, Mus musculus
  siRNA target sequence for 3000003F02Rik (NM_172437.1,2107-2125).
gttacgctactgtttgtct

SEQ ID NO: 666988 - DNA, 19 bp, Mus musculus
  siRNA target sequence for 5033413H12Rik (NM_173015.1,292-310).
ggaggccggaggagataat

SEQ ID NO: 666989 - DNA, 19 bp, Mus musculus
  siRNA target sequence for 5033413H12Rik (NM_173015.1,548-566).
ggagaacctgagagtaact

SEQ ID NO: 666990 - DNA, 19 bp, Mus musculus
  siRNA target sequence for 5033413H12Rik (NM_173015.1,760-778).
cgccatccgtgccatctat

SEQ ID NO: 666991 - DNA, 19 bp, Mus musculus
  siRNA target sequence for 5033413H12Rik (NM_173015.1,882-900).
ctgtacacgcccaaattgt

SEQ ID NO: 666992 - DNA, 19 bp, Mus musculus
  siRNA target sequence for 5033413H12Rik (NM_173015.1,884-902).
gtacacgcccaaattgtga

SEQ ID NO: 666993 - DNA, 19 bp, Mus musculus
  siRNA target sequence for 5033413H12Rik (NM_173015.1,930-948).
gcatcttcgcacataagca

SEQ ID NO: 666994 - DNA, 19 bp, Mus musculus
  siRNA target sequence for 5033413H12Rik (NM_173015.1,939-957).
cacataagcagaactatga

SEQ ID NO: 666995 - DNA, 19 bp, Mus musculus
  siRNA target sequence for 5033413H12Rik (NM_173015.1,1145-1163).
gttggcggtcgactgataa

SEQ ID NO: 666996 - DNA, 19 bp, Mus musculus
  siRNA target sequence for 5033413H12Rik (NM_173015.1,1528-1546).
ccctggcctccggcatttt

SEQ ID NO: 666997 - DNA, 19 bp, Mus musculus
  siRNA target sequence for 5033413H12Rik (NM_173015.1,1532-1550).
ggcctccggcattttctct

SEQ ID NO: 666998 - DNA, 19 bp, Mus musculus
  siRNA target sequence for 5033413H12Rik (NM_173015.1,1533-1551).
gcctccggcattttctcta

SEQ ID NO: 666999 - DNA, 19 bp, Mus musculus
  siRNA target sequence for 5033413H12Rik (NM_173015.1,1579-1597).
ccgccagctgccacagttt

SEQ ID NO: 667000 - DNA, 19 bp, Mus musculus
  siRNA target sequence for 5033413H12Rik (NM_173015.1,1749-1767).
gggtgacttccaagtttga

SEQ ID NO: 667001 - DNA, 19 bp, Mus musculus
  siRNA target sequence for 5033413H12Rik (NM_173015.1,1759-1777).
caagtttgagctctatact

SEQ ID NO: 667002 - DNA, 19 bp, Mus musculus
  siRNA target sequence for 5033413H12Rik (NM_173015.1,1798-1816).
caaggctggtgccatctta

SEQ ID NO: 667003 - DNA, 19 bp, Mus musculus
  siRNA target sequence for 5033413H12Rik (NM_173015.1,1922-1940).
cccaacaatggcttgttca

SEQ ID NO: 667004 - DNA, 19 bp, Mus musculus
  siRNA target sequence for 5730496E24Rik (NM_029398.1,289-307).
gggagtgttttgggatata

SEQ ID NO: 667005 - DNA, 19 bp, Mus musculus
  siRNA target sequence for 5730496E24Rik (NM_029398.1,290-308).
ggagtgttttgggatataa

SEQ ID NO: 667006 - DNA, 19 bp, Mus musculus
  siRNA target sequence for 5730496E24Rik (NM_029398.1,440-458).
ccataatgggtgtgagatt

SEQ ID NO: 667007 - DNA, 19 bp, Mus musculus
  siRNA target sequence for 5730496E24Rik (NM_029398.1,441-459).
cataatgggtgtgagattt

SEQ ID NO: 667008 - DNA, 19 bp, Mus musculus
  siRNA target sequence for 6330407G04Rik (NM_134078.2,148-166).
gatgaggagcgcatgtctt

SEQ ID NO: 667009 - DNA, 19 bp, Mus musculus
  siRNA target sequence for 6330407G04Rik (NM_134078.2,154-172).
gagcgcatgtcttttctgt

SEQ ID NO: 667010 - DNA, 19 bp, Mus musculus
  siRNA target sequence for 6330407G04Rik (NM_134078.2,457-475).
cccctcaagtggactcttt

SEQ ID NO: 667011 - DNA, 19 bp, Mus musculus
  siRNA target sequence for 6330407G04Rik (NM_134078.2,459-477).
cctcaagtggactctttct

SEQ ID NO: 667012 - DNA, 19 bp, Mus musculus
  siRNA target sequence for 6330407G04Rik (NM_134078.2,460-478).
ctcaagtggactctttcta

SEQ ID NO: 667013 - DNA, 19 bp, Mus musculus
  siRNA target sequence for 6330407G04Rik (NM_134078.2,480-498).
catgctgggggatcacaaa

SEQ ID NO: 667014 - DNA, 19 bp, Mus musculus
  siRNA target sequence for 6330407G04Rik (NM_134078.2,824-842).
ctcggaaggtcgagtcttt

SEQ ID NO: 667015 - DNA, 19 bp, Mus musculus
  siRNA target sequence for 6330407G04Rik (NM_134078.2,884-902).
catgccgagcaggaaagaa

SEQ ID NO: 667016 - DNA, 19 bp, Mus musculus
  siRNA target sequence for 6330407G04Rik (NM_134078.2,1133-1151).
gtgacacgcaagatgaagt

SEQ ID NO: 667017 - DNA, 19 bp, Mus musculus
  siRNA target sequence for 6330407G04Rik (NM_134078.2,1174-1192).
gtaaccaatggtttagatt

SEQ ID NO: 667018 - DNA, 19 bp, Mus musculus
  siRNA target sequence for 6330407G04Rik (NM_134078.2,1178-1196).
ccaatggtttagattttga

SEQ ID NO: 667019 - DNA, 19 bp, Mus musculus
  siRNA target sequence for 6330407G04Rik (NM_134078.2,1279-1297).
gagacaacgctttatacca

SEQ ID NO: 667020 - DNA, 19 bp, Mus musculus
  siRNA target sequence for 6330407G04Rik (NM_134078.2,1342-1360).
gaacttgagaaattgtcat

SEQ ID NO: 667021 - DNA, 19 bp, Mus musculus
  siRNA target sequence for 9130011B11Rik (NM_178715.2,205-223).
ggcctgggcctcttctact

SEQ ID NO: 667022 - DNA, 19 bp, Mus musculus
  siRNA target sequence for 9130011B11Rik (NM_178715.2,899-917).
gcacctaccgtgtcaacat

SEQ ID NO: 667023 - DNA, 19 bp, Mus musculus
  siRNA target sequence for 9130011B11Rik (NM_178715.2,910-928).
gtcaacatcacctacaact

SEQ ID NO: 667024 - DNA, 19 bp, Mus musculus
  siRNA target sequence for A130042E20Rik (NM_172550.2,364-382).
gagtttggtgattaaaaat

SEQ ID NO: 667025 - DNA, 19 bp, Mus musculus
  siRNA target sequence for A130042E20Rik (NM_172550.2,416-434).
cttcgcaggaagatggatt

SEQ ID NO: 667026 - DNA, 19 bp, Mus musculus
  siRNA target sequence for A130042E20Rik (NM_172550.2,431-449).
gatttagtcaggagtatct

SEQ ID NO: 667027 - DNA, 19 bp, Mus musculus
  siRNA target sequence for A130042E20Rik (NM_172550.2,448-466).
cttaggagtgaagaaattt

SEQ ID NO: 667028 - DNA, 19 bp, Mus musculus
  siRNA target sequence for A130042E20Rik (NM_172550.2,474-492).
ggatcatctgtgttgacaa

SEQ ID NO: 667029 - DNA, 19 bp, Mus musculus
  siRNA target sequence for A130042E20Rik (NM_172550.2,539-557).
ccaactgacgtgctttctt

SEQ ID NO: 667030 - DNA, 19 bp, Mus musculus
  siRNA target sequence for A130042E20Rik (NM_172550.2,599-617).
ccacactcaccggatgatt

SEQ ID NO: 667031 - DNA, 19 bp, Mus musculus
  siRNA target sequence for A130042E20Rik (NM_172550.2,600-618).
cacactcaccggatgatta

SEQ ID NO: 667032 - DNA, 19 bp, Mus musculus
  siRNA target sequence for A130042E20Rik (NM_172550.2,604-622).
ctcaccggatgattataat

SEQ ID NO: 667033 - DNA, 19 bp, Mus musculus
  siRNA target sequence for A130042E20Rik (NM_172550.2,637-655).
cctaggggtggagtacatt

SEQ ID NO: 667034 - DNA, 19 bp, Mus musculus
  siRNA target sequence for A130042E20Rik (NM_172550.2,755-773).
gccgagtggcaaaagatgt

SEQ ID NO: 667035 - DNA, 19 bp, Mus musculus
  siRNA target sequence for A130042E20Rik (NM_172550.2,758-776).
gagtggcaaaagatgtaca

SEQ ID NO: 667036 - DNA, 19 bp, Mus musculus
  siRNA target sequence for AA517853 (NM_153799.1,158-176).
ggattggctaggcagtatt

SEQ ID NO: 667037 - DNA, 19 bp, Mus musculus
  siRNA target sequence for AA517853 (NM_153799.1,207-225).
gtctaccagggaagagtat

SEQ ID NO: 667038 - DNA, 19 bp, Mus musculus
  siRNA target sequence for AA517853 (NM_153799.1,237-255).
caggtcagccagaccattt

SEQ ID NO: 667039 - DNA, 19 bp, Mus musculus
  siRNA target sequence for AA517853 (NM_153799.1,308-326).
ctttcgggcaggtgatatt

SEQ ID NO: 667040 - DNA, 19 bp, Mus musculus
  siRNA target sequence for AA517853 (NM_153799.1,313-331).
gggcaggtgatattacaga

SEQ ID NO: 667041 - DNA, 19 bp, Mus musculus
  siRNA target sequence for AA517853 (NM_153799.1,315-333).
gcaggtgatattacagaat

SEQ ID NO: 667042 - DNA, 19 bp, Mus musculus
  siRNA target sequence for AA517853 (NM_153799.1,409-427).
ctggtgttgggtaccaaat

SEQ ID NO: 667043 - DNA, 19 bp, Mus musculus
  siRNA target sequence for AA517853 (NM_153799.1,411-429).
ggtgttgggtaccaaatga

SEQ ID NO: 667044 - DNA, 19 bp, Mus musculus
  siRNA target sequence for AA517853 (NM_153799.1,417-435).
gggtaccaaatgagtatca

SEQ ID NO: 667045 - DNA, 19 bp, Mus musculus
  siRNA target sequence for AA517853 (NM_153799.1,576-594).
gacaggcacatggaatctt

SEQ ID NO: 667046 - DNA, 19 bp, Mus musculus
  siRNA target sequence for AA517853 (NM_153799.1,624-642).
cacaactcctggtcatcta

SEQ ID NO: 667047 - DNA, 19 bp, Mus musculus
  siRNA target sequence for AA517853 (NM_153799.1,669-687).
ccaaagaaaagtggtttaa

SEQ ID NO: 667048 - DNA, 19 bp, Mus musculus
  siRNA target sequence for AA517853 (NM_153799.1,747-765).
ccagacacggactttgact

SEQ ID NO: 667049 - DNA, 19 bp, Mus musculus
  siRNA target sequence for AA517853 (NM_153799.1,847-865).
ctcggggtgtcccaaatga

SEQ ID NO: 667050 - DNA, 19 bp, Mus musculus
  siRNA target sequence for AA517853 (NM_153799.1,903-921).
gaatcggagccgattgtgt

SEQ ID NO: 667051 - DNA, 19 bp, Mus musculus
  siRNA target sequence for AA517853 (NM_153799.1,977-995).
cctggtagtcccaagtgtt

SEQ ID NO: 667052 - DNA, 19 bp, Mus musculus
  siRNA target sequence for AA517853 (NM_153799.1,978-996).
ctggtagtcccaagtgttt

SEQ ID NO: 667053 - DNA, 19 bp, Mus musculus
  siRNA target sequence for AA517853 (NM_153799.1,993-1011).
gtttcctatgagctacata

SEQ ID NO: 667054 - DNA, 19 bp, Mus musculus
  siRNA target sequence for AA517853 (NM_153799.1,1116-1134).
cccaacaggttgaatccta

SEQ ID NO: 667055 - DNA, 19 bp, Mus musculus
  siRNA target sequence for AA517853 (NM_153799.1,1117-1135).
ccaacaggttgaatcctaa

SEQ ID NO: 667056 - DNA, 19 bp, Mus musculus
  siRNA target sequence for AA517853 (NM_153799.1,1121-1139).
caggttgaatcctaagaat

SEQ ID NO: 667057 - DNA, 19 bp, Mus musculus
  siRNA target sequence for AA517853 (NM_153799.1,1123-1141).
ggttgaatcctaagaatgt

SEQ ID NO: 667058 - DNA, 19 bp, Mus musculus
  siRNA target sequence for AA517853 (NM_153799.1,1478-1496).
ccctcctgtgcatgaagtt

SEQ ID NO: 667059 - DNA, 19 bp, Mus musculus
  siRNA target sequence for AA517853 (NM_153799.1,1483-1501).
ctgtgcatgaagttgaaca

SEQ ID NO: 667060 - DNA, 19 bp, Mus musculus
  siRNA target sequence for AA517853 (NM_153799.1,1556-1574).
gcacgcaggccgagtctat

SEQ ID NO: 667061 - DNA, 19 bp, Mus musculus
  siRNA target sequence for AA517853 (NM_153799.1,1557-1575).
cacgcaggccgagtctatt

SEQ ID NO: 667062 - DNA, 19 bp, Mus musculus
  siRNA target sequence for AA517853 (NM_153799.1,1560-1578).
gcaggccgagtctatttgt

SEQ ID NO: 667063 - DNA, 19 bp, Mus musculus
  siRNA target sequence for AF155546 (NM_021303.1,519-537).
caggctgttccatgaagtt

SEQ ID NO: 667064 - DNA, 19 bp, Mus musculus
  siRNA target sequence for AF155546 (NM_021303.1,521-539).
ggctgttccatgaagttgt

SEQ ID NO: 667065 - DNA, 19 bp, Mus musculus
  siRNA target sequence for AF155546 (NM_021303.1,603-621).
gttccaggtcgcagatagt

SEQ ID NO: 667066 - DNA, 19 bp, Mus musculus
  siRNA target sequence for AF155546 (NM_021303.1,851-869).
gcagcttggttccttactt

SEQ ID NO: 667067 - DNA, 19 bp, Mus musculus
  siRNA target sequence for AF155546 (NM_021303.1,1006-1024).
ggtcccattctgaagcaaa

SEQ ID NO: 667068 - DNA, 19 bp, Mus musculus
  siRNA target sequence for AF155546 (NM_021303.1,1097-1115).
ggacactgactgaaatgct

SEQ ID NO: 667069 - DNA, 19 bp, Mus musculus
  siRNA target sequence for AF155546 (NM_021303.1,1216-1234).
caccagtctgtgtacaact

SEQ ID NO: 667070 - DNA, 19 bp, Mus musculus
  siRNA target sequence for AF155546 (NM_021303.1,1359-1377).
cactgctcgattttatcca

SEQ ID NO: 667071 - DNA, 19 bp, Mus musculus
  siRNA target sequence for AF155546 (NM_021303.1,1361-1379).
ctgctcgattttatccatt

SEQ ID NO: 667072 - DNA, 19 bp, Mus musculus
  siRNA target sequence for AF155546 (NM_021303.1,1376-1394).
cattgcgcatgcattgtgt

SEQ ID NO: 667073 - DNA, 19 bp, Mus musculus
  siRNA target sequence for AF155546 (NM_021303.1,1447-1465).
cccttcattctcgagattt

SEQ ID NO: 667074 - DNA, 19 bp, Mus musculus
  siRNA target sequence for AF155546 (NM_021303.1,1448-1466).
ccttcattctcgagatttt

SEQ ID NO: 667075 - DNA, 19 bp, Mus musculus
  siRNA target sequence for AF155546 (NM_021303.1,1467-1485).
ccagcaggtggacttcaat

SEQ ID NO: 667076 - DNA, 19 bp, Mus musculus
  siRNA target sequence for AF155546 (NM_021303.1,1505-1523).
gctccaagcccatcaactt

SEQ ID NO: 667077 - DNA, 19 bp, Mus musculus
  siRNA target sequence for AF155546 (NM_021303.1,1598-1616).
gtgaccttattctggaata

SEQ ID NO: 667078 - DNA, 19 bp, Mus musculus
  siRNA target sequence for AF155546 (NM_021303.1,1905-1923).
gatccagctggaaatcagt

SEQ ID NO: 667079 - DNA, 19 bp, Mus musculus
  siRNA target sequence for Apoa1bp (NM_144897.1,148-166).
gcgctgcggtgaagtactt

SEQ ID NO: 667080 - DNA, 19 bp, Mus musculus
  siRNA target sequence for Apoa1bp (NM_144897.1,149-167).
cgctgcggtgaagtactta

SEQ ID NO: 667081 - DNA, 19 bp, Mus musculus
  siRNA target sequence for Apoa1bp (NM_144897.1,150-168).
gctgcggtgaagtacttaa

SEQ ID NO: 667082 - DNA, 19 bp, Mus musculus
  siRNA target sequence for Apoa1bp (NM_144897.1,154-172).
cggtgaagtacttaagtca

SEQ ID NO: 667083 - DNA, 19 bp, Mus musculus
  siRNA target sequence for Apoa1bp (NM_144897.1,201-219).
ctttttaacgagtatcagt

SEQ ID NO: 667084 - DNA, 19 bp, Mus musculus
  siRNA target sequence for Apoa1bp (NM_144897.1,367-385).
gtgcgcgacacctcaaact

SEQ ID NO: 667085 - DNA, 19 bp, Mus musculus
  siRNA target sequence for Apoa1bp (NM_144897.1,369-387).
gcgcgacacctcaaacttt

SEQ ID NO: 667086 - DNA, 19 bp, Mus musculus
  siRNA target sequence for Apoa1bp (NM_144897.1,370-388).
cgcgacacctcaaactttt

SEQ ID NO: 667087 - DNA, 19 bp, Mus musculus
  siRNA target sequence for Apoa1bp (NM_144897.1,371-389).
gcgacacctcaaacttttt

SEQ ID NO: 667088 - DNA, 19 bp, Mus musculus
  siRNA target sequence for Apoa1bp (NM_144897.1,375-393).
cacctcaaactttttggtt

SEQ ID NO: 667089 - DNA, 19 bp, Mus musculus
  siRNA target sequence for Apoa1bp (NM_144897.1,390-408).
ggttaccagccaactatct

SEQ ID NO: 667090 - DNA, 19 bp, Mus musculus
  siRNA target sequence for Apoa1bp (NM_144897.1,391-409).
gttaccagccaactatcta

SEQ ID NO: 667091 - DNA, 19 bp, Mus musculus
  siRNA target sequence for Apoa1bp (NM_144897.1,543-561).
gccatcttcggcttcagtt

SEQ ID NO: 667092 - DNA, 19 bp, Mus musculus
  siRNA target sequence for Apoa1bp (NM_144897.1,615-633).
ctcactgtgcccattgcta

SEQ ID NO: 667093 - DNA, 19 bp, Mus musculus
  siRNA target sequence for Apoa1bp (NM_144897.1,680-698).
cggaatccaaccagactta

SEQ ID NO: 667094 - DNA, 19 bp, Mus musculus
  siRNA target sequence for Apoa1bp (NM_144897.1,682-700).
gaatccaaccagacttact

SEQ ID NO: 667095 - DNA, 19 bp, Mus musculus
  siRNA target sequence for Apoa1bp (NM_144897.1,737-755).
ctttactggccgatatcat

SEQ ID NO: 667096 - DNA, 19 bp, Mus musculus
  siRNA target sequence for Apoa1bp (NM_144897.1,758-776).
ccttgggggtcgctttgta

SEQ ID NO: 667097 - DNA, 19 bp, Mus musculus
  siRNA target sequence for Ars2 (NM_031405.1,28-46).
cgaagacgcagggacaaat

SEQ ID NO: 667098 - DNA, 19 bp, Mus musculus
  siRNA target sequence for Ars2 (NM_031405.1,29-47).
gaagacgcagggacaaatt

SEQ ID NO: 667099 - DNA, 19 bp, Mus musculus
  siRNA target sequence for Ars2 (NM_031405.1,53-71).
gagagcgcagcgattatga

SEQ ID NO: 667100 - DNA, 19 bp, Mus musculus
  siRNA target sequence for Ars2 (NM_031405.1,98-116).
ggcgaggggacgattggaa

SEQ ID NO: 667101 - DNA, 19 bp, Mus musculus
  siRNA target sequence for Ars2 (NM_031405.1,99-117).
gcgaggggacgattggaat

SEQ ID NO: 667102 - DNA, 19 bp, Mus musculus
  siRNA target sequence for Ars2 (NM_031405.1,147-165).
ccgcagtcggggtgaatat

SEQ ID NO: 667103 - DNA, 19 bp, Mus musculus
  siRNA target sequence for Ars2 (NM_031405.1,150-168).
cagtcggggtgaatatcga

SEQ ID NO: 667104 - DNA, 19 bp, Mus musculus
  siRNA target sequence for Ars2 (NM_031405.1,308-326).
ggggtgggggaccaactta

SEQ ID NO: 667105 - DNA, 19 bp, Mus musculus
  siRNA target sequence for Ars2 (NM_031405.1,402-420).
gggcagcatcgcagagatt

SEQ ID NO: 667106 - DNA, 19 bp, Mus musculus
  siRNA target sequence for Ars2 (NM_031405.1,407-425).
gcatcgcagagattgactt

SEQ ID NO: 667107 - DNA, 19 bp, Mus musculus
  siRNA target sequence for Ars2 (NM_031405.1,430-448).
gtgccaccgcccataatga

SEQ ID NO: 667108 - DNA, 19 bp, Mus musculus
  siRNA target sequence for Ars2 (NM_031405.1,433-451).
ccaccgcccataatgaagt

SEQ ID NO: 667109 - DNA, 19 bp, Mus musculus
  siRNA target sequence for Ars2 (NM_031405.1,441-459).
cataatgaagtccttcaaa

SEQ ID NO: 667110 - DNA, 19 bp, Mus musculus
  siRNA target sequence for Ars2 (NM_031405.1,501-519).
ggcagttaaacgctacaat

SEQ ID NO: 667111 - DNA, 19 bp, Mus musculus
  siRNA target sequence for Ars2 (NM_031405.1,583-601).
gagtggttccgatctaagt

SEQ ID NO: 667112 - DNA, 19 bp, Mus musculus
  siRNA target sequence for Ars2 (NM_031405.1,689-707).
gtggctggtttgataacct

SEQ ID NO: 667113 - DNA, 19 bp, Mus musculus
  siRNA target sequence for Ars2 (NM_031405.1,784-802).
gagaacgatctccgaattt

SEQ ID NO: 667114 - DNA, 19 bp, Mus musculus
  siRNA target sequence for Ars2 (NM_031405.1,1278-1296).
catcgcacccaacatttca

SEQ ID NO: 667115 - DNA, 19 bp, Mus musculus
  siRNA target sequence for Ars2 (NM_031405.1,1299-1317).
ggcagagatcatttctctt

SEQ ID NO: 667116 - DNA, 19 bp, Mus musculus
  siRNA target sequence for Ars2 (NM_031405.1,1300-1318).
gcagagatcatttctcttt

SEQ ID NO: 667117 - DNA, 19 bp, Mus musculus
  siRNA target sequence for Ars2 (NM_031405.1,1365-1383).
gccagagaggaggtttttt

SEQ ID NO: 667118 - DNA, 19 bp, Mus musculus
  siRNA target sequence for Ars2 (NM_031405.1,1385-1403).
gccgtggctgggtgacttt

SEQ ID NO: 667119 - DNA, 19 bp, Mus musculus
  siRNA target sequence for Ars2 (NM_031405.1,1386-1404).
ccgtggctgggtgactttt

SEQ ID NO: 667120 - DNA, 19 bp, Mus musculus
  siRNA target sequence for Ars2 (NM_031405.1,1405-1423).
gaccgcagtgttaacatta

SEQ ID NO: 667121 - DNA, 19 bp, Mus musculus
  siRNA target sequence for Ars2 (NM_031405.1,1409-1427).
gcagtgttaacattaagga

SEQ ID NO: 667122 - DNA, 19 bp, Mus musculus
  siRNA target sequence for Ars2 (NM_031405.1,1502-1520).
gtcgtgtccgcaacataaa

SEQ ID NO: 667123 - DNA, 19 bp, Mus musculus
  siRNA target sequence for Ars2 (NM_031405.1,1529-1547).
cacagcacaagcagatagt

SEQ ID NO: 667124 - DNA, 19 bp, Mus musculus
  siRNA target sequence for Ars2 (NM_031405.1,1540-1558).
cagatagtgcgcaatgaca

SEQ ID NO: 667125 - DNA, 19 bp, Mus musculus
  siRNA target sequence for Ars2 (NM_031405.1,1546-1564).
gtgcgcaatgacatcaagt

SEQ ID NO: 667126 - DNA, 19 bp, Mus musculus
  siRNA target sequence for Ars2 (NM_031405.1,1772-1790).
gcaacccagccgagatcaa

SEQ ID NO: 667127 - DNA, 19 bp, Mus musculus
  siRNA target sequence for Ars2 (NM_031405.1,1815-1833).
caaggtcttggataaactt

SEQ ID NO: 667128 - DNA, 19 bp, Mus musculus
  siRNA target sequence for Ars2 (NM_031405.1,1818-1836).
ggtcttggataaacttctt

SEQ ID NO: 667129 - DNA, 19 bp, Mus musculus
  siRNA target sequence for Ars2 (NM_031405.1,1824-1842).
ggataaacttcttctctat

SEQ ID NO: 667130 - DNA, 19 bp, Mus musculus
  siRNA target sequence for Ars2 (NM_031405.1,1880-1898).
gtgagtaccctaatgaaga

SEQ ID NO: 667131 - DNA, 19 bp, Mus musculus
  siRNA target sequence for Ars2 (NM_031405.1,1907-1925).
ccaaccgctgtggcataat

SEQ ID NO: 667132 - DNA, 19 bp, Mus musculus
  siRNA target sequence for Ars2 (NM_031405.1,1944-1962).
gcctcccaaccgaattagt

SEQ ID NO: 667133 - DNA, 19 bp, Mus musculus
  siRNA target sequence for Ars2 (NM_031405.1,1946-1964).
ctcccaaccgaattagtca

SEQ ID NO: 667134 - DNA, 19 bp, Mus musculus
  siRNA target sequence for Ars2 (NM_031405.1,2052-2070).
ccagaagatgggtcgaaaa

SEQ ID NO: 667135 - DNA, 19 bp, Mus musculus
  siRNA target sequence for Ars2 (NM_031405.1,2173-2191).
gagtttgtgcgcaagcata

SEQ ID NO: 667136 - DNA, 19 bp, Mus musculus
  siRNA target sequence for Ars2 (NM_031405.1,2179-2197).
gtgcgcaagcatatcttca

SEQ ID NO: 667137 - DNA, 19 bp, Mus musculus
  siRNA target sequence for Ars2 (NM_031405.1,2181-2199).
gcgcaagcatatcttcaat

SEQ ID NO: 667138 - DNA, 19 bp, Mus musculus
  siRNA target sequence for Ars2 (NM_031405.1,2182-2200).
cgcaagcatatcttcaata

SEQ ID NO: 667139 - DNA, 19 bp, Mus musculus
  siRNA target sequence for Ars2 (NM_031405.1,2232-2250).
ggaggtggcgttcttcaat

SEQ ID NO: 667140 - DNA, 19 bp, Mus musculus
  siRNA target sequence for Ars2 (NM_031405.1,2233-2251).
gaggtggcgttcttcaata

SEQ ID NO: 667141 - DNA, 19 bp, Mus musculus
  siRNA target sequence for Ars2 (NM_031405.1,2236-2254).
gtggcgttcttcaataact

SEQ ID NO: 667142 - DNA, 19 bp, Mus musculus
  siRNA target sequence for Ars2 (NM_031405.1,2238-2256).
ggcgttcttcaataacttt

SEQ ID NO: 667143 - DNA, 19 bp, Mus musculus
  siRNA target sequence for Ars2 (NM_031405.1,2240-2258).
cgttcttcaataactttct

SEQ ID NO: 667144 - DNA, 19 bp, Mus musculus
  siRNA target sequence for Ars2 (NM_031405.1,2495-2513).
gtgggaactatgatgcttt

SEQ ID NO: 667145 - DNA, 19 bp, Mus musculus
  siRNA target sequence for Ars2 (NM_031405.1,2606-2624).
cggatgatgttgacttctt

SEQ ID NO: 667146 - DNA, 19 bp, Mus musculus
  siRNA target sequence for BC005752 (NM_145582.1,610-628).
ctgagacggtgctcatgaa

SEQ ID NO: 667147 - DNA, 19 bp, Mus musculus
  siRNA target sequence for BC005752 (NM_145582.1,761-779).
ccgccatctccgctacttt

SEQ ID NO: 667148 - DNA, 19 bp, Mus musculus
  siRNA target sequence for BC005752 (NM_145582.1,762-780).
cgccatctccgctactttt

SEQ ID NO: 667149 - DNA, 19 bp, Mus musculus
  siRNA target sequence for BC005752 (NM_145582.1,1129-1147).
gcaagcaaccgaaagataa

SEQ ID NO: 667150 - DNA, 19 bp, Mus musculus
  siRNA target sequence for BC006662 (NM_145466.1,292-310).
gtgtgacaggtgagatcta

SEQ ID NO: 667151 - DNA, 19 bp, Mus musculus
  siRNA target sequence for BC006662 (NM_145466.1,332-350).
gcgtttcctggatgacttt

SEQ ID NO: 667152 - DNA, 19 bp, Mus musculus
  siRNA target sequence for BC023823 (NM_153566.1,497-515).
cccctttactcgtcttgtt

SEQ ID NO: 667153 - DNA, 19 bp, Mus musculus
  siRNA target sequence for BC023823 (NM_153566.1,676-694).
ggccaattggggatagtca

SEQ ID NO: 667154 - DNA, 19 bp, Mus musculus
  siRNA target sequence for BC023823 (NM_153566.1,742-760).
ctggaaagtttggcattat

SEQ ID NO: 667155 - DNA, 19 bp, Mus musculus
  siRNA target sequence for C330017I15Rik (NM_178403.2,1557-1575).
gaatatagtctctgcattt

SEQ ID NO: 667156 - DNA, 19 bp, Mus musculus
  siRNA target sequence for C330017I15Rik (NM_178403.2,1577-1595).
gcataattccaagaaacaa

SEQ ID NO: 667157 - DNA, 19 bp, Mus musculus
  siRNA target sequence for C330017I15Rik (NM_178403.2,1589-1607).
gaaacaatcgcttaatgta

SEQ ID NO: 667158 - DNA, 19 bp, Mus musculus
  siRNA target sequence for C330017I15Rik (NM_178403.2,1732-1750).
gatgacgttgacaactact

SEQ ID NO: 667159 - DNA, 19 bp, Mus musculus
  siRNA target sequence for C330017I15Rik (NM_178403.2,1778-1796).
ctgggtttgatgttatcta

SEQ ID NO: 667160 - DNA, 19 bp, Mus musculus
  siRNA target sequence for C330017I15Rik (NM_178403.2,1843-1861).
gacaaccttgatattgaca

SEQ ID NO: 667161 - DNA, 19 bp, Mus musculus
  siRNA target sequence for C330017I15Rik (NM_178403.2,1868-1886).
gacacacgattcgagatta

SEQ ID NO: 667162 - DNA, 19 bp, Mus musculus
  siRNA target sequence for C330017I15Rik (NM_178403.2,1931-1949).
gcgtcagctgggaagttgt

SEQ ID NO: 667163 - DNA, 19 bp, Mus musculus
  siRNA target sequence for C330017I15Rik (NM_178403.2,1932-1950).
cgtcagctgggaagttgtt

SEQ ID NO: 667164 - DNA, 19 bp, Mus musculus
  siRNA target sequence for C330017I15Rik (NM_178403.2,1937-1955).
gctgggaagttgttgcata

SEQ ID NO: 667165 - DNA, 19 bp, Mus musculus
  siRNA target sequence for C330017I15Rik (NM_178403.2,1938-1956).
ctgggaagttgttgcatat

SEQ ID NO: 667166 - DNA, 19 bp, Mus musculus
  siRNA target sequence for C330017I15Rik (NM_178403.2,1940-1958).
gggaagttgttgcatatga

SEQ ID NO: 667167 - DNA, 19 bp, Mus musculus
  siRNA target sequence for C330017I15Rik (NM_178403.2,1941-1959).
ggaagttgttgcatatgat

SEQ ID NO: 667168 - DNA, 19 bp, Mus musculus
  siRNA target sequence for C330017I15Rik (NM_178403.2,1952-1970).
catatgatgatcctaaaat

SEQ ID NO: 667169 - DNA, 19 bp, Mus musculus
  siRNA target sequence for Cyyr1 (NM_144853.1,321-339).
gtcctgcttccgaagttga

SEQ ID NO: 667170 - DNA, 19 bp, Mus musculus
  siRNA target sequence for Cyyr1 (NM_144853.1,430-448).
gctcctactacgcctatat

SEQ ID NO: 667171 - DNA, 19 bp, Mus musculus
  siRNA target sequence for Cyyr1 (NM_144853.1,431-449).
ctcctactacgcctatatt

SEQ ID NO: 667172 - DNA, 19 bp, Mus musculus
  siRNA target sequence for Cyyr1 (NM_144853.1,440-458).
cgcctatattgggaacatt

SEQ ID NO: 667173 - DNA, 19 bp, Mus musculus
  siRNA target sequence for Cyyr1 (NM_144853.1,442-460).
cctatattgggaacattct

SEQ ID NO: 667174 - DNA, 19 bp, Mus musculus
  siRNA target sequence for Cyyr1 (NM_144853.1,620-638).
ggcaccacccccctatact

SEQ ID NO: 667175 - DNA, 19 bp, Mus musculus
  siRNA target sequence for Cyyr1 (NM_144853.1,621-639).
gcaccacccccctatactt

SEQ ID NO: 667176 - DNA, 19 bp, Mus musculus
  siRNA target sequence for Cyyr1 (NM_144853.1,622-640).
caccacccccctatactta

SEQ ID NO: 667177 - DNA, 19 bp, Mus musculus
  siRNA target sequence for Cyyr1 (NM_144853.1,625-643).
cacccccctatacttatga

SEQ ID NO: 667178 - DNA, 19 bp, Mus musculus
  siRNA target sequence for Cyyr1 (NM_144853.1,722-740).
ccctccgtatcctggaaat

SEQ ID NO: 667179 - DNA, 19 bp, Mus musculus
  siRNA target sequence for Cyyr1 (NM_144853.1,726-744).
ccgtatcctggaaatccaa

SEQ ID NO: 667180 - DNA, 19 bp, Mus musculus
  siRNA target sequence for Cyyr1 (NM_144853.1,758-776).
ctcccagaacagaatacgt

SEQ ID NO: 667181 - DNA, 19 bp, Mus musculus
  siRNA target sequence for Cyyr1 (NM_144853.1,764-782).
gaacagaatacgtgacaat

SEQ ID NO: 667182 - DNA, 19 bp, Mus musculus
  siRNA target sequence for D10Wsu52e (NM_145422.1,310-328).
cctgcctggaatagttcat

SEQ ID NO: 667183 - DNA, 19 bp, Mus musculus
  siRNA target sequence for D10Wsu52e (NM_145422.1,426-444).
caggtggtgtcggatttga

SEQ ID NO: 667184 - DNA, 19 bp, Mus musculus
  siRNA target sequence for D10Wsu52e (NM_145422.1,428-446).
ggtggtgtcggatttgata

SEQ ID NO: 667185 - DNA, 19 bp, Mus musculus
  siRNA target sequence for D10Wsu52e (NM_145422.1,429-447).
gtggtgtcggatttgatat

SEQ ID NO: 667186 - DNA, 19 bp, Mus musculus
  siRNA target sequence for D10Wsu52e (NM_145422.1,431-449).
ggtgtcggatttgatatta

SEQ ID NO: 667187 - DNA, 19 bp, Mus musculus
  siRNA target sequence for D10Wsu52e (NM_145422.1,432-450).
gtgtcggatttgatattaa

SEQ ID NO: 667188 - DNA, 19 bp, Mus musculus
  siRNA target sequence for D10Wsu52e (NM_145422.1,434-452).
gtcggatttgatattaact

SEQ ID NO: 667189 - DNA, 19 bp, Mus musculus
  siRNA target sequence for D10Wsu52e (NM_145422.1,455-473).
ggtgtccgcttgctaagaa

SEQ ID NO: 667190 - DNA, 19 bp, Mus musculus
  siRNA target sequence for D10Wsu52e (NM_145422.1,460-478).
ccgcttgctaagaaccaat

SEQ ID NO: 667191 - DNA, 19 bp, Mus musculus
  siRNA target sequence for D10Wsu52e (NM_145422.1,461-479).
cgcttgctaagaaccaatt

SEQ ID NO: 667192 - DNA, 19 bp, Mus musculus
  siRNA target sequence for D10Wsu52e (NM_145422.1,466-484).
gctaagaaccaatttagat

SEQ ID NO: 667193 - DNA, 19 bp, Mus musculus
  siRNA target sequence for D10Wsu52e (NM_145422.1,553-571).
gggatcaaaaggtgtcatt

SEQ ID NO: 667194 - DNA, 19 bp, Mus musculus
  siRNA target sequence for D10Wsu52e (NM_145422.1,558-576).
caaaaggtgtcattccaat

SEQ ID NO: 667195 - DNA, 19 bp, Mus musculus
  siRNA target sequence for D10Wsu52e (NM_145422.1,572-590).
ccaatgaatgccaaagact

SEQ ID NO: 667196 - DNA, 19 bp, Mus musculus
  siRNA target sequence for D10Wsu52e (NM_145422.1,573-591).
caatgaatgccaaagactt

SEQ ID NO: 667197 - DNA, 19 bp, Mus musculus
  siRNA target sequence for D10Wsu52e (NM_145422.1,754-772).
gggagcaggcaaccattat

SEQ ID NO: 667198 - DNA, 19 bp, Mus musculus
  siRNA target sequence for D10Wsu52e (NM_145422.1,762-780).
gcaaccattatgcagaaat

SEQ ID NO: 667199 - DNA, 19 bp, Mus musculus
  siRNA target sequence for D10Wsu52e (NM_145422.1,936-954).
gagacaagattatagtcaa

SEQ ID NO: 667200 - DNA, 19 bp, Mus musculus
  siRNA target sequence for D10Wsu52e (NM_145422.1,968-986).
gcttgtgctcggattgcat

SEQ ID NO: 667201 - DNA, 19 bp, Mus musculus
  siRNA target sequence for D10Wsu52e (NM_145422.1,992-1010).
gagggacaagactatctaa

SEQ ID NO: 667202 - DNA, 19 bp, Mus musculus
  siRNA target sequence for D10Wsu52e (NM_145422.1,1043-1061).
gttaaccgctcctctatga

SEQ ID NO: 667203 - DNA, 19 bp, Mus musculus
  siRNA target sequence for D10Wsu52e (NM_145422.1,1051-1069).
ctcctctatgaccttctta

SEQ ID NO: 667204 - DNA, 19 bp, Mus musculus
  siRNA target sequence for D10Wsu52e (NM_145422.1,1076-1094).
caggcttttgccaaagtct

SEQ ID NO: 667205 - DNA, 19 bp, Mus musculus
  siRNA target sequence for D10Wsu52e (NM_145422.1,1117-1135).
ggacctgcatgtgatctat

SEQ ID NO: 667206 - DNA, 19 bp, Mus musculus
  siRNA target sequence for D10Wsu52e (NM_145422.1,1299-1317).
ccatggggacctgtagtta

SEQ ID NO: 667207 - DNA, 19 bp, Mus musculus
  siRNA target sequence for D10Wsu52e (NM_145422.1,1303-1321).
ggggacctgtagttacgtt

SEQ ID NO: 667208 - DNA, 19 bp, Mus musculus
  siRNA target sequence for D10Wsu52e (NM_145422.1,1398-1416).
caaaatcacgtcgtaactt

SEQ ID NO: 667209 - DNA, 19 bp, Mus musculus
  siRNA target sequence for D10Wsu52e (NM_145422.1,1404-1422).
cacgtcgtaacttagattt

SEQ ID NO: 667210 - DNA, 19 bp, Mus musculus
  siRNA target sequence for D10Wsu52e (NM_145422.1,1500-1518).
caccagagtcctataagaa

SEQ ID NO: 667211 - DNA, 19 bp, Mus musculus
  siRNA target sequence for D10Wsu52e (NM_145422.1,1560-1578).
gcaagaaggccattaaact

SEQ ID NO: 667212 - DNA, 19 bp, Mus musculus
  siRNA target sequence for D10Wsu52e (NM_145422.1,1570-1588).
cattaaactgagaccaatt

SEQ ID NO: 667213 - DNA, 19 bp, Mus musculus
  siRNA target sequence for D10Wsu52e (NM_145422.1,1579-1597).
gagaccaattgctgttatt

SEQ ID NO: 667214 - DNA, 19 bp, Mus musculus
  siRNA target sequence for Es2el (NM_022408.1,738-756).
cgagggtgtccctgatgaa

SEQ ID NO: 667215 - DNA, 19 bp, Mus musculus
  siRNA target sequence for Es2el (NM_022408.1,774-792).
gccgagacagatagtacat

SEQ ID NO: 667216 - DNA, 19 bp, Mus musculus
  siRNA target sequence for Es2el (NM_022408.1,775-793).
ccgagacagatagtacata

SEQ ID NO: 667217 - DNA, 19 bp, Mus musculus
  siRNA target sequence for Es2el (NM_022408.1,776-794).
cgagacagatagtacataa

SEQ ID NO: 667218 - DNA, 19 bp, Mus musculus
  siRNA target sequence for Es2el (NM_022408.1,1023-1041).
cacgcccctgcgagtagaa

SEQ ID NO: 667219 - DNA, 19 bp, Mus musculus
  siRNA target sequence for Es2el (NM_022408.1,1070-1088).
cacctggacccacattcaa

SEQ ID NO: 667220 - DNA, 19 bp, Mus musculus
  siRNA target sequence for Es2el (NM_022408.1,1073-1091).
ctggacccacattcaagat

SEQ ID NO: 667221 - DNA, 19 bp, Mus musculus
  siRNA target sequence for Es2el (NM_022408.1,1171-1189).
gaagcgttgcggagagtta

SEQ ID NO: 667222 - DNA, 19 bp, Mus musculus
  siRNA target sequence for Es2el (NM_022408.1,1453-1471).
cctgcccgacgcaaagctt

SEQ ID NO: 667223 - DNA, 19 bp, Mus musculus
  siRNA target sequence for Gas1 (NM_008086.1,453-471).
cgcggaactcggacaaact

SEQ ID NO: 667224 - DNA, 19 bp, Mus musculus
  siRNA target sequence for Gas1 (NM_008086.1,454-472).
gcggaactcggacaaactt

SEQ ID NO: 667225 - DNA, 19 bp, Mus musculus
  siRNA target sequence for Gas1 (NM_008086.1,455-473).
cggaactcggacaaacttt

SEQ ID NO: 667226 - DNA, 19 bp, Mus musculus
  siRNA target sequence for Gas1 (NM_008086.1,864-882).
gcatctcggcgcttatcca

SEQ ID NO: 667227 - DNA, 19 bp, Mus musculus
  siRNA target sequence for Gas1 (NM_008086.1,1322-1340).
gactactacgacgaagaat

SEQ ID NO: 667228 - DNA, 19 bp, Mus musculus
  siRNA target sequence for Gas1 (NM_008086.1,1324-1342).
ctactacgacgaagaatat

SEQ ID NO: 667229 - DNA, 19 bp, Mus musculus
  siRNA target sequence for Gas8 (NM_018855.1,273-291).
gagaggagcgtaactactt

SEQ ID NO: 667230 - DNA, 19 bp, Mus musculus
  siRNA target sequence for Gas8 (NM_018855.1,410-428).
caggtggagatcaaggtat

SEQ ID NO: 667231 - DNA, 19 bp, Mus musculus
  siRNA target sequence for Gas8 (NM_018855.1,619-637).
gaacctgtgcctgaaacaa

SEQ ID NO: 667232 - DNA, 19 bp, Mus musculus
  siRNA target sequence for Gas8 (NM_018855.1,652-670).
caagatgcgaaatgacttt

SEQ ID NO: 667233 - DNA, 19 bp, Mus musculus
  siRNA target sequence for Gas8 (NM_018855.1,655-673).
gatgcgaaatgactttgaa

SEQ ID NO: 667234 - DNA, 19 bp, Mus musculus
  siRNA target sequence for Gas8 (NM_018855.1,675-693).
ggcaagttcgagaaattga

SEQ ID NO: 667235 - DNA, 19 bp, Mus musculus
  siRNA target sequence for Gas8 (NM_018855.1,828-846).
cggacatcaagaactacta

SEQ ID NO: 667236 - DNA, 19 bp, Mus musculus
  siRNA target sequence for Gas8 (NM_018855.1,1086-1104).
ctgagagggagctaaagga

SEQ ID NO: 667237 - DNA, 19 bp, Mus musculus
  siRNA target sequence for Gas8 (NM_018855.1,1316-1334).
ctggaccccacagcattaa

SEQ ID NO: 667238 - DNA, 19 bp, Mus musculus
  siRNA target sequence for Gas8 (NM_018855.1,1336-1354).
gcttgtgtcccgcaaactt

SEQ ID NO: 667239 - DNA, 19 bp, Mus musculus
  siRNA target sequence for Gas8 (NM_018855.1,1364-1382).
ctagaatcgaagaatacca

SEQ ID NO: 667240 - DNA, 19 bp, Mus musculus
  siRNA target sequence for Gas8 (NM_018855.1,1446-1464).
catatgaggcgaagttact

SEQ ID NO: 667241 - DNA, 19 bp, Mus musculus
  siRNA target sequence for Gas8 (NM_018855.1,1565-1583).
ccctacatagccatcttct

SEQ ID NO: 667242 - DNA, 19 bp, Mus musculus
  siRNA target sequence for Gas8 (NM_018855.1,1607-1625).
cccctctgtccaagtaata

SEQ ID NO: 667243 - DNA, 19 bp, Mus musculus
  siRNA target sequence for Gnb1l (NM_023120.1,166-184).
cgcctggtcccagatttgt

SEQ ID NO: 667244 - DNA, 19 bp, Mus musculus
  siRNA target sequence for Gnb1l (NM_023120.1,207-225).
gtgaacacgctccatttct

SEQ ID NO: 667245 - DNA, 19 bp, Mus musculus
  siRNA target sequence for Gnb1l (NM_023120.1,271-289).
ctcagaatggcctagtaca

SEQ ID NO: 667246 - DNA, 19 bp, Mus musculus
  siRNA target sequence for Gnb1l (NM_023120.1,273-291).
cagaatggcctagtacata

SEQ ID NO: 667247 - DNA, 19 bp, Mus musculus
  siRNA target sequence for Gnb1l (NM_023120.1,288-306).
catatctggagcctacaaa

SEQ ID NO: 667248 - DNA, 19 bp, Mus musculus
  siRNA target sequence for Gnb1l (NM_023120.1,313-331).
gaatagttaccactctaaa

SEQ ID NO: 667249 - DNA, 19 bp, Mus musculus
  siRNA target sequence for Gnb1l (NM_023120.1,548-566).
cagcgacgaggttcagatt

SEQ ID NO: 667250 - DNA, 19 bp, Mus musculus
  siRNA target sequence for Gnb1l (NM_023120.1,550-568).
gcgacgaggttcagattct

SEQ ID NO: 667251 - DNA, 19 bp, Mus musculus
  siRNA target sequence for Gnb1l (NM_023120.1,645-663).
gggctgtggcagactaact

SEQ ID NO: 667252 - DNA, 19 bp, Mus musculus
  siRNA target sequence for Gnb1l (NM_023120.1,692-710).
ctatgaggatggatcagta

SEQ ID NO: 667253 - DNA, 19 bp, Mus musculus
  siRNA target sequence for Gnb1l (NM_023120.1,966-984).
cgcatccgtgtgtttcact

SEQ ID NO: 667254 - DNA, 19 bp, Mus musculus
  siRNA target sequence for Gpr143 (NM_010951.2,298-316).
ggctgcctgggaatcgtta

SEQ ID NO: 667255 - DNA, 19 bp, Mus musculus
  siRNA target sequence for Gpr143 (NM_010951.2,299-317).
gctgcctgggaatcgttat

SEQ ID NO: 667256 - DNA, 19 bp, Mus musculus
  siRNA target sequence for Gpr143 (NM_010951.2,355-373).
gaaaacatttccaatgtga

SEQ ID NO: 667257 - DNA, 19 bp, Mus musculus
  siRNA target sequence for Gpr143 (NM_010951.2,450-468).
ctggtggctcttttgctat

SEQ ID NO: 667258 - DNA, 19 bp, Mus musculus
  siRNA target sequence for Gpr143 (NM_010951.2,459-477).
cttttgctatgcagttgat

SEQ ID NO: 667259 - DNA, 19 bp, Mus musculus
  siRNA target sequence for Gpr143 (NM_010951.2,624-642).
ccatgccatcccccattat

SEQ ID NO: 667260 - DNA, 19 bp, Mus musculus
  siRNA target sequence for Gpr143 (NM_010951.2,628-646).
gccatcccccattatgtca

SEQ ID NO: 667261 - DNA, 19 bp, Mus musculus
  siRNA target sequence for Gpr143 (NM_010951.2,637-655).
cattatgtcaccacatact

SEQ ID NO: 667262 - DNA, 19 bp, Mus musculus
  siRNA target sequence for Gpr143 (NM_010951.2,708-726).
gacttcagtggcctcttta

SEQ ID NO: 667263 - DNA, 19 bp, Mus musculus
  siRNA target sequence for Gpr143 (NM_010951.2,778-796).
gtgatcaagacccgttttt

SEQ ID NO: 667264 - DNA, 19 bp, Mus musculus
  siRNA target sequence for Gpr143 (NM_010951.2,783-801).
caagacccgttttttcaaa

SEQ ID NO: 667265 - DNA, 19 bp, Mus musculus
  siRNA target sequence for Gpr143 (NM_010951.2,788-806).
cccgttttttcaaaataat

SEQ ID NO: 667266 - DNA, 19 bp, Mus musculus
  siRNA target sequence for Gpr143 (NM_010951.2,820-838).
gcatgttggttgtccaata

SEQ ID NO: 667267 - DNA, 19 bp, Mus musculus
  siRNA target sequence for Gpr143 (NM_010951.2,824-842).
gttggttgtccaatatcat

SEQ ID NO: 667268 - DNA, 19 bp, Mus musculus
  siRNA target sequence for Gpr143 (NM_010951.2,834-852).
caatatcatcaatgaaagt

SEQ ID NO: 667269 - DNA, 19 bp, Mus musculus
  siRNA target sequence for Gpr143 (NM_010951.2,919-937).
gctaggaccacatggttta

SEQ ID NO: 667270 - DNA, 19 bp, Mus musculus
  siRNA target sequence for Gpr143 (NM_010951.2,920-938).
ctaggaccacatggtttat

SEQ ID NO: 667271 - DNA, 19 bp, Mus musculus
  siRNA target sequence for Gpr143 (NM_010951.2,923-941).
ggaccacatggtttataat

SEQ ID NO: 667272 - DNA, 19 bp, Mus musculus
  siRNA target sequence for Gpr143 (NM_010951.2,1116-1134).
ccccaggaaggttgtatgt

SEQ ID NO: 667273 - DNA, 19 bp, Mus musculus
  siRNA target sequence for Gpr143 (NM_010951.2,1137-1155).
cgggggacatacttctgat

SEQ ID NO: 667274 - DNA, 19 bp, Mus musculus
  siRNA target sequence for Gpr143 (NM_010951.2,1153-1171).
gatgaggtgctgagcattt

SEQ ID NO: 667275 - DNA, 19 bp, Mus musculus
  siRNA target sequence for Gpr143 (NM_010951.2,1167-1185).
cattttgtctgaagattca

SEQ ID NO: 667276 - DNA, 19 bp, Mus musculus
  siRNA target sequence for Gpr143 (NM_010951.2,1186-1204).
gatgccagtactgttgaaa

SEQ ID NO: 667277 - DNA, 19 bp, Mus musculus
  siRNA target sequence for Gpr143 (NM_010951.2,1220-1238).
ggtcctgcaacataaagga

SEQ ID NO: 667278 - DNA, 19 bp, Mus musculus
  siRNA target sequence for Gpr143 (NM_010951.2,1221-1239).
gtcctgcaacataaaggaa

SEQ ID NO: 667279 - DNA, 19 bp, Mus musculus
  siRNA target sequence for Gt(ROSA)26asSor (NM_008188.2,125-143).
gagagtgcctgggtatgaa

SEQ ID NO: 667280 - DNA, 19 bp, Mus musculus
  siRNA target sequence for Gt(ROSA)26asSor (NM_008188.2,302-320).
gcaaagaccgcggaaagat

SEQ ID NO: 667281 - DNA, 19 bp, Mus musculus
  siRNA target sequence for Gt(ROSA)26asSor (NM_008188.2,307-325).
gaccgcggaaagatctatt

SEQ ID NO: 667282 - DNA, 19 bp, Mus musculus
  siRNA target sequence for Gt(ROSA)26asSor (NM_008188.2,309-327).
ccgcggaaagatctatttt

SEQ ID NO: 667283 - DNA, 19 bp, Mus musculus
  siRNA target sequence for Gt(ROSA)26asSor (NM_008188.2,311-329).
gcggaaagatctattttga

SEQ ID NO: 667284 - DNA, 19 bp, Mus musculus
  siRNA target sequence for Gt(ROSA)26asSor (NM_008188.2,312-330).
cggaaagatctattttgat

SEQ ID NO: 667285 - DNA, 19 bp, Mus musculus
  siRNA target sequence for Gt(ROSA)26asSor (NM_008188.2,313-331).
ggaaagatctattttgata

SEQ ID NO: 667286 - DNA, 19 bp, Mus musculus
  siRNA target sequence for Gt(ROSA)26asSor (NM_008188.2,318-336).
gatctattttgatattgca

SEQ ID NO: 667287 - DNA, 19 bp, Mus musculus
  siRNA target sequence for Gt(ROSA)26asSor (NM_008188.2,362-380).
gtctgagatcagttgataa

SEQ ID NO: 667288 - DNA, 19 bp, Mus musculus
  siRNA target sequence for Gt(ROSA)26asSor (NM_008188.2,368-386).
gatcagttgataacttgtt

SEQ ID NO: 667289 - DNA, 19 bp, Mus musculus
  siRNA target sequence for Gt(ROSA)26asSor (NM_008188.2,390-408).
ggttgttcaggagtttaaa

SEQ ID NO: 667290 - DNA, 19 bp, Mus musculus
  siRNA target sequence for Gt(ROSA)26asSor (NM_008188.2,475-493).
ccatggtcagaccctttaa

SEQ ID NO: 667291 - DNA, 19 bp, Mus musculus
  siRNA target sequence for Gt(ROSA)26asSor (NM_008188.2,476-494).
catggtcagaccctttaaa

SEQ ID NO: 667292 - DNA, 19 bp, Mus musculus
  siRNA target sequence for Gt(ROSA)26asSor (NM_008188.2,479-497).
ggtcagaccctttaaaagt

SEQ ID NO: 667293 - DNA, 19 bp, Mus musculus
  siRNA target sequence for Gt(ROSA)26asSor (NM_008188.2,538-556).
cgcagaaaggcaaatcaga

SEQ ID NO: 667294 - DNA, 19 bp, Mus musculus
  siRNA target sequence for Gt(ROSA)26asSor (NM_008188.2,635-653).
gcacttcagattcacatat

SEQ ID NO: 667295 - DNA, 19 bp, Mus musculus
  siRNA target sequence for Gt(ROSA)26asSor (NM_008188.2,647-665).
cacatatcttggactatta

SEQ ID NO: 667296 - DNA, 19 bp, Mus musculus
  siRNA target sequence for Gt(ROSA)26asSor (NM_008188.2,714-732).
cttgtcgtcttgcaaagat

SEQ ID NO: 667297 - DNA, 19 bp, Mus musculus
  siRNA target sequence for Gt(ROSA)26asSor (NM_008188.2,766-784).
ccacaggtacagaagttta

SEQ ID NO: 667298 - DNA, 19 bp, Mus musculus
  siRNA target sequence for Gt(ROSA)26asSor (NM_008188.2,882-900).
ggctgatatgaccaacttt

SEQ ID NO: 667299 - DNA, 19 bp, Mus musculus
  siRNA target sequence for Gt(ROSA)26asSor (NM_008188.2,918-936).
gaacatccatgataatgaa

SEQ ID NO: 667300 - DNA, 19 bp, Mus musculus
  siRNA target sequence for Gt(ROSA)26asSor (NM_008188.2,924-942).
ccatgataatgaagtcatt

SEQ ID NO: 667301 - DNA, 19 bp, Mus musculus
  siRNA target sequence for Gt(ROSA)26asSor (NM_008188.2,966-984).
gagtctccatcgcagaaat

SEQ ID NO: 667302 - DNA, 19 bp, Mus musculus
  siRNA target sequence for Gt(ROSA)26asSor (NM_008188.2,972-990).
ccatcgcagaaatattaca

SEQ ID NO: 667303 - DNA, 19 bp, Mus musculus
  siRNA target sequence for Gt(ROSA)26asSor (NM_008188.2,1088-1106).
gaacaggggcaataccaat

SEQ ID NO: 667304 - DNA, 19 bp, Mus musculus
  siRNA target sequence for Gt(ROSA)26asSor (NM_008188.2,1118-1136).
ctgagtggtctcactgtta

SEQ ID NO: 667305 - DNA, 19 bp, Mus musculus
  siRNA target sequence for Gt(ROSA)26asSor (NM_008188.2,1122-1140).
gtggtctcactgttaccat

SEQ ID NO: 667306 - DNA, 19 bp, Mus musculus
  siRNA target sequence for Gt(ROSA)26asSor (NM_008188.2,1124-1142).
ggtctcactgttaccatat

SEQ ID NO: 667307 - DNA, 19 bp, Mus musculus
  siRNA target sequence for Gt(ROSA)26asSor (NM_008188.2,1138-1156).
catattgctggggacaata

SEQ ID NO: 667308 - DNA, 19 bp, Mus musculus
  siRNA target sequence for Gt(ROSA)26asSor (NM_008188.2,1203-1221).
gactaagagccagattaaa

SEQ ID NO: 667309 - DNA, 19 bp, Mus musculus
  siRNA target sequence for Gt(ROSA)26asSor (NM_008188.2,1236-1254).
ctggggtttgcccattgat

SEQ ID NO: 667310 - DNA, 19 bp, Mus musculus
  siRNA target sequence for Gt(ROSA)26asSor (NM_008188.2,1375-1393).
gcttgccttcgggaaatga

SEQ ID NO: 667311 - DNA, 19 bp, Mus musculus
  siRNA target sequence for Gt(ROSA)26asSor (NM_008188.2,1436-1454).
ctcaggacaagaaatgttt

SEQ ID NO: 667312 - DNA, 19 bp, Mus musculus
  siRNA target sequence for Gt(ROSA)26asSor (NM_008188.2,1487-1505).
ggcgaaaggtccatgtagt

SEQ ID NO: 667313 - DNA, 19 bp, Mus musculus
  siRNA target sequence for Gt(ROSA)26asSor (NM_008188.2,1523-1541).
gccttcatgctgcagttta

SEQ ID NO: 667314 - DNA, 19 bp, Mus musculus
  siRNA target sequence for Gt(ROSA)26asSor (NM_008188.2,1554-1572).
cactgctcaagcctttgtt

SEQ ID NO: 667315 - DNA, 19 bp, Mus musculus
  siRNA target sequence for Impact (NM_008378.1,118-136).
gcagagtgaagaaatcgaa

SEQ ID NO: 667316 - DNA, 19 bp, Mus musculus
  siRNA target sequence for Impact (NM_008378.1,123-141).
gtgaagaaatcgaagcaat

SEQ ID NO: 667317 - DNA, 19 bp, Mus musculus
  siRNA target sequence for Impact (NM_008378.1,157-175).
cgaggagtggtgtgtcatt

SEQ ID NO: 667318 - DNA, 19 bp, Mus musculus
  siRNA target sequence for Impact (NM_008378.1,160-178).
ggagtggtgtgtcattgat

SEQ ID NO: 667319 - DNA, 19 bp, Mus musculus
  siRNA target sequence for Impact (NM_008378.1,163-181).
gtggtgtgtcattgatgaa

SEQ ID NO: 667320 - DNA, 19 bp, Mus musculus
  siRNA target sequence for Impact (NM_008378.1,165-183).
ggtgtgtcattgatgaaaa

SEQ ID NO: 667321 - DNA, 19 bp, Mus musculus
  siRNA target sequence for Impact (NM_008378.1,176-194).
gatgaaaatgccaaaatat

SEQ ID NO: 667322 - DNA, 19 bp, Mus musculus
  siRNA target sequence for Impact (NM_008378.1,322-340).
gcaagaacgcgcagactta

SEQ ID NO: 667323 - DNA, 19 bp, Mus musculus
  siRNA target sequence for Impact (NM_008378.1,326-344).
gaacgcgcagacttatcga

SEQ ID NO: 667324 - DNA, 19 bp, Mus musculus
  siRNA target sequence for Impact (NM_008378.1,348-366).
gccttgaggagatatatgt

SEQ ID NO: 667325 - DNA, 19 bp, Mus musculus
  siRNA target sequence for Impact (NM_008378.1,368-386).
cacaacatgggtgaatcta

SEQ ID NO: 667326 - DNA, 19 bp, Mus musculus
  siRNA target sequence for Impact (NM_008378.1,370-388).
caacatgggtgaatctatt

SEQ ID NO: 667327 - DNA, 19 bp, Mus musculus
  siRNA target sequence for Impact (NM_008378.1,373-391).
catgggtgaatctattctt

SEQ ID NO: 667328 - DNA, 19 bp, Mus musculus
  siRNA target sequence for Impact (NM_008378.1,378-396).
gtgaatctattctttacca

SEQ ID NO: 667329 - DNA, 19 bp, Mus musculus
  siRNA target sequence for Impact (NM_008378.1,394-412).
ccagtgggtggagaaaata

SEQ ID NO: 667330 - DNA, 19 bp, Mus musculus
  siRNA target sequence for Impact (NM_008378.1,424-442).
gatacagaaatctcagata

SEQ ID NO: 667331 - DNA, 19 bp, Mus musculus
  siRNA target sequence for Impact (NM_008378.1,495-513).
ccgaagaagaccctattct

SEQ ID NO: 667332 - DNA, 19 bp, Mus musculus
  siRNA target sequence for Impact (NM_008378.1,496-514).
cgaagaagaccctattcta

SEQ ID NO: 667333 - DNA, 19 bp, Mus musculus
  siRNA target sequence for Impact (NM_008378.1,602-620).
gctcatggcgttcctatta

SEQ ID NO: 667334 - DNA, 19 bp, Mus musculus
  siRNA target sequence for Impact (NM_008378.1,700-718).
gtacgagaataagaagatt

SEQ ID NO: 667335 - DNA, 19 bp, Mus musculus
  siRNA target sequence for Impact (NM_008378.1,724-742).
cgccacccacaacatctat

SEQ ID NO: 667336 - DNA, 19 bp, Mus musculus
  siRNA target sequence for Kap (NM_010594.1,104-122).
ccccctgtcagaattagtt

SEQ ID NO: 667337 - DNA, 19 bp, Mus musculus
  siRNA target sequence for Kap (NM_010594.1,105-123).
cccctgtcagaattagttt

SEQ ID NO: 667338 - DNA, 19 bp, Mus musculus
  siRNA target sequence for Kap (NM_010594.1,112-130).
cagaattagtttcaatcaa

SEQ ID NO: 667339 - DNA, 19 bp, Mus musculus
  siRNA target sequence for Kap (NM_010594.1,114-132).
gaattagtttcaatcaata

SEQ ID NO: 667340 - DNA, 19 bp, Mus musculus
  siRNA target sequence for Kap (NM_010594.1,128-146).
caataaagaactacagaat

SEQ ID NO: 667341 - DNA, 19 bp, Mus musculus
  siRNA target sequence for Kap (NM_010594.1,177-195).
gaccaactgggatcataca

SEQ ID NO: 667342 - DNA, 19 bp, Mus musculus
  siRNA target sequence for Kap (NM_010594.1,211-229).
ctctagaggattatacaga

SEQ ID NO: 667343 - DNA, 19 bp, Mus musculus
  siRNA target sequence for Kap (NM_010594.1,218-236).
ggattatacagatgatgat

SEQ ID NO: 667344 - DNA, 19 bp, Mus musculus
  siRNA target sequence for Kap (NM_010594.1,271-289).
cgccagccgcaaacaaaca

SEQ ID NO: 667345 - DNA, 19 bp, Mus musculus
  siRNA target sequence for Kap (NM_010594.1,328-346).
ccggctttctggaagaatt

SEQ ID NO: 667346 - DNA, 19 bp, Mus musculus
  siRNA target sequence for Kap (NM_010594.1,365-383).
cacagtgaaaattccatta

SEQ ID NO: 667347 - DNA, 19 bp, Mus musculus
  siRNA target sequence for Kremen (NM_032396.1,277-295).
ggactgggcgagcacaatt

SEQ ID NO: 667348 - DNA, 19 bp, Mus musculus
  siRNA target sequence for Kremen (NM_032396.1,278-296).
gactgggcgagcacaatta

SEQ ID NO: 667349 - DNA, 19 bp, Mus musculus
  siRNA target sequence for Kremen (NM_032396.1,442-460).
ctcacgggcaccagtaaaa

SEQ ID NO: 667350 - DNA, 19 bp, Mus musculus
  siRNA target sequence for Kremen (NM_032396.1,500-518).
gtcggagtcagagattcaa

SEQ ID NO: 667351 - DNA, 19 bp, Mus musculus
  siRNA target sequence for Kremen (NM_032396.1,592-610).
gccagcaccgagtgcaata

SEQ ID NO: 667352 - DNA, 19 bp, Mus musculus
  siRNA target sequence for Kremen (NM_032396.1,594-612).
cagcaccgagtgcaatagt

SEQ ID NO: 667353 - DNA, 19 bp, Mus musculus
  siRNA target sequence for Kremen (NM_032396.1,596-614).
gcaccgagtgcaatagtgt

SEQ ID NO: 667354 - DNA, 19 bp, Mus musculus
  siRNA target sequence for Kremen (NM_032396.1,644-662).
gtggggacggcaggattat

SEQ ID NO: 667355 - DNA, 19 bp, Mus musculus
  siRNA target sequence for Kremen (NM_032396.1,647-665).
gggacggcaggattatcct

SEQ ID NO: 667356 - DNA, 19 bp, Mus musculus
  siRNA target sequence for Kremen (NM_032396.1,685-703).
gcctgcggtgggaactact

SEQ ID NO: 667357 - DNA, 19 bp, Mus musculus
  siRNA target sequence for Kremen (NM_032396.1,793-811).
gcctctcgcatccatttca

SEQ ID NO: 667358 - DNA, 19 bp, Mus musculus
  siRNA target sequence for Kremen (NM_032396.1,797-815).
ctcgcatccatttcaactt

SEQ ID NO: 667359 - DNA, 19 bp, Mus musculus
  siRNA target sequence for Kremen (NM_032396.1,799-817).
cgcatccatttcaacttca

SEQ ID NO: 667360 - DNA, 19 bp, Mus musculus
  siRNA target sequence for Kremen (NM_032396.1,924-942).
caatgtctctctggatttt

SEQ ID NO: 667361 - DNA, 19 bp, Mus musculus
  siRNA target sequence for Kremen (NM_032396.1,957-975).
cttctctgatcgcatcaat

SEQ ID NO: 667362 - DNA, 19 bp, Mus musculus
  siRNA target sequence for Kremen (NM_032396.1,1262-1280).
cagcagttgtcgcaaagat

SEQ ID NO: 667363 - DNA, 19 bp, Mus musculus
  siRNA target sequence for Kremen (NM_032396.1,1287-1305).
gcatgtcacatttaaatct

SEQ ID NO: 667364 - DNA, 19 bp, Mus musculus
  siRNA target sequence for Kremen (NM_032396.1,1360-1378).
ggagatatctggaccattt

SEQ ID NO: 667365 - DNA, 19 bp, Mus musculus
  siRNA target sequence for Kremen (NM_032396.1,1368-1386).
ctggaccattttctatgaa

SEQ ID NO: 667366 - DNA, 19 bp, Mus musculus
  siRNA target sequence for Kremen (NM_032396.1,1384-1402).
gaaccttccactacaatct

SEQ ID NO: 667367 - DNA, 19 bp, Mus musculus
  siRNA target sequence for Kremen (NM_032396.1,1427-1445).
gtcagagtcaacaagatga

SEQ ID NO: 667368 - DNA, 19 bp, Mus musculus
  siRNA target sequence for Lpin1 (NM_015763.2,106-124).
cgggatgcatcgacatcat

SEQ ID NO: 667369 - DNA, 19 bp, Mus musculus
  siRNA target sequence for Lpin1 (NM_015763.2,107-125).
gggatgcatcgacatcatt

SEQ ID NO: 667370 - DNA, 19 bp, Mus musculus
  siRNA target sequence for Lpin1 (NM_015763.2,109-127).
gatgcatcgacatcattgt

SEQ ID NO: 667371 - DNA, 19 bp, Mus musculus
  siRNA target sequence for Lpin1 (NM_015763.2,112-130).
gcatcgacatcattgtcat

SEQ ID NO: 667372 - DNA, 19 bp, Mus musculus
  siRNA target sequence for Lpin1 (NM_015763.2,194-212).
cctccgctcccgagagaaa

SEQ ID NO: 667373 - DNA, 19 bp, Mus musculus
  siRNA target sequence for Lpin1 (NM_015763.2,235-253).
gggagtccgtggatttgca

SEQ ID NO: 667374 - DNA, 19 bp, Mus musculus
  siRNA target sequence for Lpin1 (NM_015763.2,265-283).
gagacaacggagaagcatt

SEQ ID NO: 667375 - DNA, 19 bp, Mus musculus
  siRNA target sequence for Lpin1 (NM_015763.2,269-287).
caacggagaagcatttttt

SEQ ID NO: 667376 - DNA, 19 bp, Mus musculus
  siRNA target sequence for Lpin1 (NM_015763.2,357-375).
ggagctgcgagaatggaaa

SEQ ID NO: 667377 - DNA, 19 bp, Mus musculus
  siRNA target sequence for Lpin1 (NM_015763.2,388-406).
ggaactctgtagacagaat

SEQ ID NO: 667378 - DNA, 19 bp, Mus musculus
  siRNA target sequence for Lpin1 (NM_015763.2,507-525).
gcccagttggacaatctca

SEQ ID NO: 667379 - DNA, 19 bp, Mus musculus
  siRNA target sequence for Lpin1 (NM_015763.2,639-657).
ccaccattccaagatgata

SEQ ID NO: 667380 - DNA, 19 bp, Mus musculus
  siRNA target sequence for Lpin1 (NM_015763.2,666-684).
gaaaacttcccctcgattt

SEQ ID NO: 667381 - DNA, 19 bp, Mus musculus
  siRNA target sequence for Lpin1 (NM_015763.2,692-710).
cccccagtcagcatcgtat

SEQ ID NO: 667382 - DNA, 19 bp, Mus musculus
  siRNA target sequence for Lpin1 (NM_015763.2,862-880).
cctcaacaccaaaaagtga

SEQ ID NO: 667383 - DNA, 19 bp, Mus musculus
  siRNA target sequence for Lpin1 (NM_015763.2,1020-1038).
cggaagactcctgataaaa

SEQ ID NO: 667384 - DNA, 19 bp, Mus musculus
  siRNA target sequence for Lpin1 (NM_015763.2,1021-1039).
ggaagactcctgataaaat

SEQ ID NO: 667385 - DNA, 19 bp, Mus musculus
  siRNA target sequence for Lpin1 (NM_015763.2,1025-1043).
gactcctgataaaatgaat

SEQ ID NO: 667386 - DNA, 19 bp, Mus musculus
  siRNA target sequence for Lpin1 (NM_015763.2,1056-1074).
cacagcgagtcttcagata

SEQ ID NO: 667387 - DNA, 19 bp, Mus musculus
  siRNA target sequence for Lpin1 (NM_015763.2,1058-1076).
cagcgagtcttcagatact

SEQ ID NO: 667388 - DNA, 19 bp, Mus musculus
  siRNA target sequence for Lpin1 (NM_015763.2,1060-1078).
gcgagtcttcagatacttt

SEQ ID NO: 667389 - DNA, 19 bp, Mus musculus
  siRNA target sequence for Lpin1 (NM_015763.2,1138-1156).
cggaaatgcagtttgtgaa

SEQ ID NO: 667390 - DNA, 19 bp, Mus musculus
  siRNA target sequence for Lpin1 (NM_015763.2,1347-1365).
gaagtggcagccctgtatt

SEQ ID NO: 667391 - DNA, 19 bp, Mus musculus
  siRNA target sequence for Lpin1 (NM_015763.2,1577-1595).
ggaacaagccgtgtcatat

SEQ ID NO: 667392 - DNA, 19 bp, Mus musculus
  siRNA target sequence for Lpin1 (NM_015763.2,1585-1603).
ccgtgtcatatcagcaatt

SEQ ID NO: 667393 - DNA, 19 bp, Mus musculus
  siRNA target sequence for Lpin1 (NM_015763.2,1586-1604).
cgtgtcatatcagcaattt

SEQ ID NO: 667394 - DNA, 19 bp, Mus musculus
  siRNA target sequence for Lpin1 (NM_015763.2,1606-1624).
ccgacaaccctgctatcat

SEQ ID NO: 667395 - DNA, 19 bp, Mus musculus
  siRNA target sequence for Lpin1 (NM_015763.2,1650-1668).
gttggcaataagtattaca

SEQ ID NO: 667396 - DNA, 19 bp, Mus musculus
  siRNA target sequence for Lpin1 (NM_015763.2,1653-1671).
ggcaataagtattacaact

SEQ ID NO: 667397 - DNA, 19 bp, Mus musculus
  siRNA target sequence for Lpin1 (NM_015763.2,1740-1758).
gaatccatcatgagagata

SEQ ID NO: 667398 - DNA, 19 bp, Mus musculus
  siRNA target sequence for Lpin1 (NM_015763.2,2025-2043).
cagctgaaaagcttgaagt

SEQ ID NO: 667399 - DNA, 19 bp, Mus musculus
  siRNA target sequence for Lpin1 (NM_015763.2,2147-2165).
catcatctcagatatcgat

SEQ ID NO: 667400 - DNA, 19 bp, Mus musculus
  siRNA target sequence for Lpin1 (NM_015763.2,2163-2181).
gatgggaccatcacaagat

SEQ ID NO: 667401 - DNA, 19 bp, Mus musculus
  siRNA target sequence for Lpin1 (NM_015763.2,2168-2186).
gaccatcacaagatctgat

SEQ ID NO: 667402 - DNA, 19 bp, Mus musculus
  siRNA target sequence for Lpin1 (NM_015763.2,2171-2189).
catcacaagatctgatact

SEQ ID NO: 667403 - DNA, 19 bp, Mus musculus
  siRNA target sequence for Lpin1 (NM_015763.2,2227-2245).
ctcaccagggcattgcaaa

SEQ ID NO: 667404 - DNA, 19 bp, Mus musculus
  siRNA target sequence for Lpin1 (NM_015763.2,2414-2432).
gcacagagaagtgattgaa

SEQ ID NO: 667405 - DNA, 19 bp, Mus musculus
  siRNA target sequence for Lpin1 (NM_015763.2,2525-2543).
ccggcctgctgatgtgtat

SEQ ID NO: 667406 - DNA, 19 bp, Mus musculus
  siRNA target sequence for Lpin1 (NM_015763.2,2526-2544).
cggcctgctgatgtgtatt

SEQ ID NO: 667407 - DNA, 19 bp, Mus musculus
  siRNA target sequence for Lpin1 (NM_015763.2,2559-2577).
ggagtgtccctgaatagga

SEQ ID NO: 667408 - DNA, 19 bp, Mus musculus
  siRNA target sequence for Lpin1 (NM_015763.2,2560-2578).
gagtgtccctgaataggat

SEQ ID NO: 667409 - DNA, 19 bp, Mus musculus
  siRNA target sequence for Lpin1 (NM_015763.2,2667-2685).
cacgtcttcccattgctaa

SEQ ID NO: 667410 - DNA, 19 bp, Mus musculus
  siRNA target sequence for Lpin1 (NM_015763.2,2670-2688).
gtcttcccattgctaaaga

SEQ ID NO: 667411 - DNA, 19 bp, Mus musculus
  siRNA target sequence for Lpin1 (NM_015763.2,2711-2729).
ctgttcagacactttcagt

SEQ ID NO: 667412 - DNA, 19 bp, Mus musculus
  siRNA target sequence for Lpin1 (NM_015763.2,2718-2736).
gacactttcagtaacttca

SEQ ID NO: 667413 - DNA, 19 bp, Mus musculus
  siRNA target sequence for Lpin1 (NM_015763.2,2751-2769).
ccactgccaccttttgaaa

SEQ ID NO: 667414 - DNA, 19 bp, Mus musculus
  siRNA target sequence for Lpin1 (NM_015763.2,2752-2770).
cactgccaccttttgaaaa

SEQ ID NO: 667415 - DNA, 19 bp, Mus musculus
  siRNA target sequence for Magoh (NM_010760.1,94-112).
gcaagttcggtcatgagtt

SEQ ID NO: 667416 - DNA, 19 bp, Mus musculus
  siRNA target sequence for Magoh (NM_010760.1,108-126).
gagttcctggagtttgaat

SEQ ID NO: 667417 - DNA, 19 bp, Mus musculus
  siRNA target sequence for Magoh (NM_010760.1,199-217).
cttatgtgcataaaagtgt

SEQ ID NO: 667418 - DNA, 19 bp, Mus musculus
  siRNA target sequence for Magoh (NM_010760.1,306-324).
caggagcttgaaattgtca

SEQ ID NO: 667419 - DNA, 19 bp, Mus musculus
  siRNA target sequence for Magoh (NM_010760.1,336-354).
cacatttctttcacaacat

SEQ ID NO: 667420 - DNA, 19 bp, Mus musculus
  siRNA target sequence for Magoh (NM_010760.1,397-415).
cggaaggcttgcgagtatt

SEQ ID NO: 667421 - DNA, 19 bp, Mus musculus
  siRNA target sequence for Magoh (NM_010760.1,447-465).
gtcttcagtctgattggat

SEQ ID NO: 667422 - DNA, 19 bp, Mus musculus
  siRNA target sequence for Magoh (NM_010760.1,454-472).
gtctgattggattacactt

SEQ ID NO: 667423 - DNA, 19 bp, Mus musculus
  siRNA target sequence for Mcsp (NM_008574.1,95-113).
cttttaacaccgagaatca

SEQ ID NO: 667424 - DNA, 19 bp, Mus musculus
  siRNA target sequence for Mcsp (NM_008574.1,104-122).
ccgagaatcaagtatggaa

SEQ ID NO: 667425 - DNA, 19 bp, Mus musculus
  siRNA target sequence for Mcsp (NM_008574.1,167-185).
caggaactccaactctaaa

SEQ ID NO: 667426 - DNA, 19 bp, Mus musculus
  siRNA target sequence for Mcsp (NM_008574.1,189-207).
gatgagtgatccatccaaa

SEQ ID NO: 667427 - DNA, 19 bp, Mus musculus
  siRNA target sequence for Mcsp (NM_008574.1,510-528).
gactgagtcagattctgat

SEQ ID NO: 667428 - DNA, 19 bp, Mus musculus
  siRNA target sequence for Mcsp (NM_008574.1,544-562).
ctggagaagggctctcaat

SEQ ID NO: 667429 - DNA, 19 bp, Mus musculus
  siRNA target sequence for Mcsp (NM_008574.1,546-564).
ggagaagggctctcaatca

SEQ ID NO: 667430 - DNA, 19 bp, Mus musculus
  siRNA target sequence for Mesdc2 (NM_023403.2,145-163).
ccacctccacggaaaaaga

SEQ ID NO: 667431 - DNA, 19 bp, Mus musculus
  siRNA target sequence for Muc4 (NM_080457.1,873-891).
cagtacatcactaactaca

SEQ ID NO: 667432 - DNA, 19 bp, Mus musculus
  siRNA target sequence for Muc4 (NM_080457.1,939-957).
cacaactctgaggattact

SEQ ID NO: 667433 - DNA, 19 bp, Mus musculus
  siRNA target sequence for Muc4 (NM_080457.1,941-959).
caactctgaggattactca

SEQ ID NO: 667434 - DNA, 19 bp, Mus musculus
  siRNA target sequence for Muc4 (NM_080457.1,1021-1039).
gtgtcaacactcatcaatt

SEQ ID NO: 667435 - DNA, 19 bp, Mus musculus
  siRNA target sequence for Muc4 (NM_080457.1,1023-1041).
gtcaacactcatcaattca

SEQ ID NO: 667436 - DNA, 19 bp, Mus musculus
  siRNA target sequence for Muc4 (NM_080457.1,1225-1243).
catgctccgaacatgagaa

SEQ ID NO: 667437 - DNA, 19 bp, Mus musculus
  siRNA target sequence for Muc4 (NM_080457.1,1324-1342).
gcaataactactaaagttt

SEQ ID NO: 667438 - DNA, 19 bp, Mus musculus
  siRNA target sequence for Muc4 (NM_080457.1,1403-1421).
gcacgtctactcaggaatt

SEQ ID NO: 667439 - DNA, 19 bp, Mus musculus
  siRNA target sequence for Muc4 (NM_080457.1,1404-1422).
cacgtctactcaggaatta

SEQ ID NO: 667440 - DNA, 19 bp, Mus musculus
  siRNA target sequence for Muc4 (NM_080457.1,1407-1425).
gtctactcaggaattaaca

SEQ ID NO: 667441 - DNA, 19 bp, Mus musculus
  siRNA target sequence for Muc4 (NM_080457.1,1417-1435).
gaattaacatcttcttaca

SEQ ID NO: 667442 - DNA, 19 bp, Mus musculus
  siRNA target sequence for Muc4 (NM_080457.1,1427-1445).
cttcttacagccaacatat

SEQ ID NO: 667443 - DNA, 19 bp, Mus musculus
  siRNA target sequence for Muc4 (NM_080457.1,1430-1448).
cttacagccaacatattca

SEQ ID NO: 667444 - DNA, 19 bp, Mus musculus
  siRNA target sequence for Muc4 (NM_080457.1,1436-1454).
gccaacatattcaaagcaa

SEQ ID NO: 667445 - DNA, 19 bp, Mus musculus
  siRNA target sequence for Muc4 (NM_080457.1,4236-4254).
cacatcacctcaaaatttt

SEQ ID NO: 667446 - DNA, 19 bp, Mus musculus
  siRNA target sequence for Muc4 (NM_080457.1,5111-5129).
cctcacatgacctaattga

SEQ ID NO: 667447 - DNA, 19 bp, Mus musculus
  siRNA target sequence for Muc4 (NM_080457.1,5119-5137).
gacctaattgagacagaaa

SEQ ID NO: 667448 - DNA, 19 bp, Mus musculus
  siRNA target sequence for Muc4 (NM_080457.1,5121-5139).
cctaattgagacagaaaca

SEQ ID NO: 667449 - DNA, 19 bp, Mus musculus
  siRNA target sequence for Muc4 (NM_080457.1,5852-5870).
ccacctcctatgaccaaat

SEQ ID NO: 667450 - DNA, 19 bp, Mus musculus
  siRNA target sequence for Muc4 (NM_080457.1,5853-5871).
cacctcctatgaccaaatt

SEQ ID NO: 667451 - DNA, 19 bp, Mus musculus
  siRNA target sequence for Muc4 (NM_080457.1,5855-5873).
cctcctatgaccaaattca

SEQ ID NO: 667452 - DNA, 19 bp, Mus musculus
  siRNA target sequence for Muc4 (NM_080457.1,6617-6635).
ggggatccactgaattgca

SEQ ID NO: 667453 - DNA, 19 bp, Mus musculus
  siRNA target sequence for Muc4 (NM_080457.1,6618-6636).
gggatccactgaattgcaa

SEQ ID NO: 667454 - DNA, 19 bp, Mus musculus
  siRNA target sequence for Muc4 (NM_080457.1,6623-6641).
ccactgaattgcaaaccat

SEQ ID NO: 667455 - DNA, 19 bp, Mus musculus
  siRNA target sequence for Muc4 (NM_080457.1,6760-6778).
gggtacacaggtgtaacta

SEQ ID NO: 667456 - DNA, 19 bp, Mus musculus
  siRNA target sequence for Muc4 (NM_080457.1,6762-6780).
gtacacaggtgtaactaga

SEQ ID NO: 667457 - DNA, 19 bp, Mus musculus
  siRNA target sequence for Muc4 (NM_080457.1,6786-6804).
cggtgtgatcacatcaaga

SEQ ID NO: 667458 - DNA, 19 bp, Mus musculus
  siRNA target sequence for Muc4 (NM_080457.1,6910-6928).
cccagcacgtctcaaatca

SEQ ID NO: 667459 - DNA, 19 bp, Mus musculus
  siRNA target sequence for Muc4 (NM_080457.1,6937-6955).
ccagacgtgacctcagaaa

SEQ ID NO: 667460 - DNA, 19 bp, Mus musculus
  siRNA target sequence for Muc4 (NM_080457.1,6987-7005).
gacagagtccttttctcat

SEQ ID NO: 667461 - DNA, 19 bp, Mus musculus
  siRNA target sequence for Muc4 (NM_080457.1,7026-7044).
gactacgaagacagacaat

SEQ ID NO: 667462 - DNA, 19 bp, Mus musculus
  siRNA target sequence for Muc4 (NM_080457.1,7177-7195).
gaagtcggagaccagaatt

SEQ ID NO: 667463 - DNA, 19 bp, Mus musculus
  siRNA target sequence for Muc4 (NM_080457.1,7180-7198).
gtcggagaccagaatttgt

SEQ ID NO: 667464 - DNA, 19 bp, Mus musculus
  siRNA target sequence for Muc4 (NM_080457.1,7201-7219).
gccaggactgtggatttta

SEQ ID NO: 667465 - DNA, 19 bp, Mus musculus
  siRNA target sequence for Muc4 (NM_080457.1,7270-7288).
cgggattccttctacgtta

SEQ ID NO: 667466 - DNA, 19 bp, Mus musculus
  siRNA target sequence for Muc4 (NM_080457.1,7278-7296).
cttctacgttacagataat

SEQ ID NO: 667467 - DNA, 19 bp, Mus musculus
  siRNA target sequence for Muc4 (NM_080457.1,7281-7299).
ctacgttacagataatggt

SEQ ID NO: 667468 - DNA, 19 bp, Mus musculus
  siRNA target sequence for Muc4 (NM_080457.1,7289-7307).
cagataatggtcagatcat

SEQ ID NO: 667469 - DNA, 19 bp, Mus musculus
  siRNA target sequence for Muc4 (NM_080457.1,7291-7309).
gataatggtcagatcattt

SEQ ID NO: 667470 - DNA, 19 bp, Mus musculus
  siRNA target sequence for Muc4 (NM_080457.1,7404-7422).
ggctgatgctgatttctct

SEQ ID NO: 667471 - DNA, 19 bp, Mus musculus
  siRNA target sequence for Muc4 (NM_080457.1,7424-7442).
gctccaggggagccatatt

SEQ ID NO: 667472 - DNA, 19 bp, Mus musculus
  siRNA target sequence for Muc4 (NM_080457.1,7430-7448).
ggggagccatattttacca

SEQ ID NO: 667473 - DNA, 19 bp, Mus musculus
  siRNA target sequence for Muc4 (NM_080457.1,7497-7515).
ggagactttgattaatgat

SEQ ID NO: 667474 - DNA, 19 bp, Mus musculus
  siRNA target sequence for Muc4 (NM_080457.1,7594-7612).
gagagctttgggaccaata

SEQ ID NO: 667475 - DNA, 19 bp, Mus musculus
  siRNA target sequence for Muc4 (NM_080457.1,7598-7616).
gctttgggaccaataccta

SEQ ID NO: 667476 - DNA, 19 bp, Mus musculus
  siRNA target sequence for Muc4 (NM_080457.1,7738-7756).
ggagatgggtattttgaaa

SEQ ID NO: 667477 - DNA, 19 bp, Mus musculus
  siRNA target sequence for Muc4 (NM_080457.1,7798-7816).
ccagatcgattcctgaatt

SEQ ID NO: 667478 - DNA, 19 bp, Mus musculus
  siRNA target sequence for Muc4 (NM_080457.1,7801-7819).
gatcgattcctgaattcca

SEQ ID NO: 667479 - DNA, 19 bp, Mus musculus
  siRNA target sequence for Muc4 (NM_080457.1,8106-8124).
cagtccttggcagtttgat

SEQ ID NO: 667480 - DNA, 19 bp, Mus musculus
  siRNA target sequence for Muc4 (NM_080457.1,8265-8283).
catcaccactttggataat

SEQ ID NO: 667481 - DNA, 19 bp, Mus musculus
  siRNA target sequence for Muc4 (NM_080457.1,8326-8344).
caggcccaggacagaaatt

SEQ ID NO: 667482 - DNA, 19 bp, Mus musculus
  siRNA target sequence for Muc4 (NM_080457.1,8328-8346).
ggcccaggacagaaattct

SEQ ID NO: 667483 - DNA, 19 bp, Mus musculus
  siRNA target sequence for Muc4 (NM_080457.1,8384-8402).
ctgccaaggccactaactt

SEQ ID NO: 667484 - DNA, 19 bp, Mus musculus
  siRNA target sequence for Muc4 (NM_080457.1,8407-8425).
gcctttgcggctcaataca

SEQ ID NO: 667485 - DNA, 19 bp, Mus musculus
  siRNA target sequence for Muc4 (NM_080457.1,8408-8426).
cctttgcggctcaatacaa

SEQ ID NO: 667486 - DNA, 19 bp, Mus musculus
  siRNA target sequence for Muc4 (NM_080457.1,8451-8469).
cacggttcagtggtttctt

SEQ ID NO: 667487 - DNA, 19 bp, Mus musculus
  siRNA target sequence for Muc4 (NM_080457.1,8453-8471).
cggttcagtggtttcttga

SEQ ID NO: 667488 - DNA, 19 bp, Mus musculus
  siRNA target sequence for Muc4 (NM_080457.1,8539-8557).
gtcttacccatattcaata

SEQ ID NO: 667489 - DNA, 19 bp, Mus musculus
  siRNA target sequence for Muc4 (NM_080457.1,8664-8682).
cagcctatcagaggaatat

SEQ ID NO: 667490 - DNA, 19 bp, Mus musculus
  siRNA target sequence for Muc4 (NM_080457.1,8667-8685).
cctatcagaggaatatcga

SEQ ID NO: 667491 - DNA, 19 bp, Mus musculus
  siRNA target sequence for Muc4 (NM_080457.1,8668-8686).
ctatcagaggaatatcgaa

SEQ ID NO: 667492 - DNA, 19 bp, Mus musculus
  siRNA target sequence for Muc4 (NM_080457.1,8781-8799).
ggagacccttttcttctat

SEQ ID NO: 667493 - DNA, 19 bp, Mus musculus
  siRNA target sequence for Muc4 (NM_080457.1,8851-8869).
ccgctgcctaccaagttca

SEQ ID NO: 667494 - DNA, 19 bp, Mus musculus
  siRNA target sequence for Muc4 (NM_080457.1,8862-8880).
caagttcacccccatcttt

SEQ ID NO: 667495 - DNA, 19 bp, Mus musculus
  siRNA target sequence for Muc4 (NM_080457.1,8930-8948).
ggtgcaaaggcgacagaaa

SEQ ID NO: 667496 - DNA, 19 bp, Mus musculus
  siRNA target sequence for Muc4 (NM_080457.1,8940-8958).
cgacagaaagtgcatgttt

SEQ ID NO: 667497 - DNA, 19 bp, Mus musculus
  siRNA target sequence for Muc4 (NM_080457.1,8970-8988).
cacgggaaacagaactatt

SEQ ID NO: 667498 - DNA, 19 bp, Mus musculus
  siRNA target sequence for Muc4 (NM_080457.1,8973-8991).
gggaaacagaactattgga

SEQ ID NO: 667499 - DNA, 19 bp, Mus musculus
  siRNA target sequence for Muc4 (NM_080457.1,8997-9015).
caccaattccatccttaat

SEQ ID NO: 667500 - DNA, 19 bp, Mus musculus
  siRNA target sequence for Muc4 (NM_080457.1,8999-9017).
ccaattccatccttaatga

SEQ ID NO: 667501 - DNA, 19 bp, Mus musculus
  siRNA target sequence for Muc4 (NM_080457.1,9046-9064).
cagtacccaccctctatca

SEQ ID NO: 667502 - DNA, 19 bp, Mus musculus
  siRNA target sequence for Muc4 (NM_080457.1,9142-9160).
ctcagcctctccaagaaat

SEQ ID NO: 667503 - DNA, 19 bp, Mus musculus
  siRNA target sequence for Muc4 (NM_080457.1,9245-9263).
gggatgtcaggactaactt

SEQ ID NO: 667504 - DNA, 19 bp, Mus musculus
  siRNA target sequence for Noc4 (NM_010926.1,347-365).
gcgctcaccctgattgact

SEQ ID NO: 667505 - DNA, 19 bp, Mus musculus
  siRNA target sequence for Noc4 (NM_010926.1,362-380).
gactcgtggtgcaaagaca

SEQ ID NO: 667506 - DNA, 19 bp, Mus musculus
  siRNA target sequence for Noc4 (NM_010926.1,391-409).
gatcgctggctattaccaa

SEQ ID NO: 667507 - DNA, 19 bp, Mus musculus
  siRNA target sequence for Noc4 (NM_010926.1,486-504).
gtgatgccgcactcatcat

SEQ ID NO: 667508 - DNA, 19 bp, Mus musculus
  siRNA target sequence for Noc4 (NM_010926.1,653-671).
gacagccgctcctacgaaa

SEQ ID NO: 667509 - DNA, 19 bp, Mus musculus
  siRNA target sequence for Noc4 (NM_010926.1,657-675).
gccgctcctacgaaacact

SEQ ID NO: 667510 - DNA, 19 bp, Mus musculus
  siRNA target sequence for Noc4 (NM_010926.1,667-685).
cgaaacactcgtggatttt

SEQ ID NO: 667511 - DNA, 19 bp, Mus musculus
  siRNA target sequence for ORF11 (NM_021446.1,107-125).
gccgcttcctgaatgtgtt

SEQ ID NO: 667512 - DNA, 19 bp, Mus musculus
  siRNA target sequence for ORF11 (NM_021446.1,108-126).
ccgcttcctgaatgtgtta

SEQ ID NO: 667513 - DNA, 19 bp, Mus musculus
  siRNA target sequence for ORF11 (NM_021446.1,136-154).
ctggttatggtgtccatta

SEQ ID NO: 667514 - DNA, 19 bp, Mus musculus
  siRNA target sequence for ORF11 (NM_021446.1,138-156).
ggttatggtgtccattata

SEQ ID NO: 667515 - DNA, 19 bp, Mus musculus
  siRNA target sequence for ORF11 (NM_021446.1,179-197).
gcttccgagaccacacttt

SEQ ID NO: 667516 - DNA, 19 bp, Mus musculus
  siRNA target sequence for ORF11 (NM_021446.1,180-198).
cttccgagaccacactttt

SEQ ID NO: 667517 - DNA, 19 bp, Mus musculus
  siRNA target sequence for ORF11 (NM_021446.1,184-202).
cgagaccacacttttctct

SEQ ID NO: 667518 - DNA, 19 bp, Mus musculus
  siRNA target sequence for ORF11 (NM_021446.1,221-239).
gcaagccaaaccttgtgaa

SEQ ID NO: 667519 - DNA, 19 bp, Mus musculus
  siRNA target sequence for ORF11 (NM_021446.1,375-393).
cctctcagagttgtttgta

SEQ ID NO: 667520 - DNA, 19 bp, Mus musculus
  siRNA target sequence for ORF11 (NM_021446.1,435-453).
gatggtagcaagtttctca

SEQ ID NO: 667521 - DNA, 19 bp, Mus musculus
  siRNA target sequence for Pcoln3 (NM_145606.1,173-191).
cccttcagcagaaaaatgt

SEQ ID NO: 667522 - DNA, 19 bp, Mus musculus
  siRNA target sequence for Pcoln3 (NM_145606.1,368-386).
gcgccatggaccttcagaa

SEQ ID NO: 667523 - DNA, 19 bp, Mus musculus
  siRNA target sequence for Phemx (NM_020286.2,240-258).
ggtggttgtcattcacttt

SEQ ID NO: 667524 - DNA, 19 bp, Mus musculus
  siRNA target sequence for Phemx (NM_020286.2,297-315).
gaggaacccctatgaaaca

SEQ ID NO: 667525 - DNA, 19 bp, Mus musculus
  siRNA target sequence for Phemx (NM_020286.2,299-317).
ggaacccctatgaaacact

SEQ ID NO: 667526 - DNA, 19 bp, Mus musculus
  siRNA target sequence for Phemx (NM_020286.2,318-336).
gcgctattgggccttctat

SEQ ID NO: 667527 - DNA, 19 bp, Mus musculus
  siRNA target sequence for Phemx (NM_020286.2,320-338).
gctattgggccttctatgt

SEQ ID NO: 667528 - DNA, 19 bp, Mus musculus
  siRNA target sequence for Phemx (NM_020286.2,469-487).
gtggccttctggagattct

SEQ ID NO: 667529 - DNA, 19 bp, Mus musculus
  siRNA target sequence for Phemx (NM_020286.2,514-532).
gtgttggacacctatgact

SEQ ID NO: 667530 - DNA, 19 bp, Mus musculus
  siRNA target sequence for Phemx (NM_020286.2,524-542).
cctatgacttcgtgtatga

SEQ ID NO: 667531 - DNA, 19 bp, Mus musculus
  siRNA target sequence for Phemx (NM_020286.2,718-736).
ctgtggacacactacagta

SEQ ID NO: 667532 - DNA, 19 bp, Mus musculus
  siRNA target sequence for Phemx (NM_020286.2,762-780).
cctggccctcacggtatat

SEQ ID NO: 667533 - DNA, 19 bp, Mus musculus
  siRNA target sequence for Phemx (NM_020286.2,765-783).
ggccctcacggtatatgct

SEQ ID NO: 667534 - DNA, 19 bp, Mus musculus
  siRNA target sequence for Phemx (NM_020286.2,766-784).
gccctcacggtatatgcta

SEQ ID NO: 667535 - DNA, 19 bp, Mus musculus
  siRNA target sequence for Phemx (NM_020286.2,767-785).
ccctcacggtatatgctat

SEQ ID NO: 667536 - DNA, 19 bp, Mus musculus
  siRNA target sequence for Phemx (NM_020286.2,835-853).
gatagaaaaggcagatact

SEQ ID NO: 667537 - DNA, 19 bp, Mus musculus
  siRNA target sequence for Phemx (NM_020286.2,863-881).
caccaagatcccatggttt

SEQ ID NO: 667538 - DNA, 19 bp, Mus musculus
  siRNA target sequence for Phf5a (NM_026737.1,49-67).
catcatccagatttgattt

SEQ ID NO: 667539 - DNA, 19 bp, Mus musculus
  siRNA target sequence for Phf5a (NM_026737.1,97-115).
ggaagactgtgtgaaaaat

SEQ ID NO: 667540 - DNA, 19 bp, Mus musculus
  siRNA target sequence for Phf5a (NM_026737.1,128-146).
gtgtgatctgtgattccta

SEQ ID NO: 667541 - DNA, 19 bp, Mus musculus
  siRNA target sequence for Phf5a (NM_026737.1,159-177).
caccctggtccgcatatgt

SEQ ID NO: 667542 - DNA, 19 bp, Mus musculus
  siRNA target sequence for Phf5a (NM_026737.1,162-180).
cctggtccgcatatgtgat

SEQ ID NO: 667543 - DNA, 19 bp, Mus musculus
  siRNA target sequence for Phf5a (NM_026737.1,235-253).
gtctccgatgcctactact

SEQ ID NO: 667544 - DNA, 19 bp, Mus musculus
  siRNA target sequence for Phf5a (NM_026737.1,239-257).
ccgatgcctactactgtaa

SEQ ID NO: 667545 - DNA, 19 bp, Mus musculus
  siRNA target sequence for Phf5a (NM_026737.1,240-258).
cgatgcctactactgtaaa

SEQ ID NO: 667546 - DNA, 19 bp, Mus musculus
  siRNA target sequence for Phf5a (NM_026737.1,284-302).
gagatggttgtccaaagat

SEQ ID NO: 667547 - DNA, 19 bp, Mus musculus
  siRNA target sequence for Phf5a (NM_026737.1,289-307).
ggttgtccaaagattgtca

SEQ ID NO: 667548 - DNA, 19 bp, Mus musculus
  siRNA target sequence for Phf5a (NM_026737.1,333-351).
gttctatgaacgcaaaaaa

SEQ ID NO: 667549 - DNA, 19 bp, Mus musculus
  siRNA target sequence for Pigf (NM_008838.1,146-164).
gagacttctgtataccaat

SEQ ID NO: 667550 - DNA, 19 bp, Mus musculus
  siRNA target sequence for Pigf (NM_008838.1,150-168).
cttctgtataccaatcttt

SEQ ID NO: 667551 - DNA, 19 bp, Mus musculus
  siRNA target sequence for Pigf (NM_008838.1,172-190).
gcgtattttcaattttcct

SEQ ID NO: 667552 - DNA, 19 bp, Mus musculus
  siRNA target sequence for Pigf (NM_008838.1,173-191).
cgtattttcaattttccta

SEQ ID NO: 667553 - DNA, 19 bp, Mus musculus
  siRNA target sequence for Pigf (NM_008838.1,216-234).
gtggacaacttctcagtat

SEQ ID NO: 667554 - DNA, 19 bp, Mus musculus
  siRNA target sequence for Pigf (NM_008838.1,229-247).
cagtattggaagctcattt

SEQ ID NO: 667555 - DNA, 19 bp, Mus musculus
  siRNA target sequence for Pigf (NM_008838.1,231-249).
gtattggaagctcatttga

SEQ ID NO: 667556 - DNA, 19 bp, Mus musculus
  siRNA target sequence for Pigf (NM_008838.1,287-305).
caatctcttgtcgtactta

SEQ ID NO: 667557 - DNA, 19 bp, Mus musculus
  siRNA target sequence for Pigf (NM_008838.1,296-314).
gtcgtacttagtagtgaaa

SEQ ID NO: 667558 - DNA, 19 bp, Mus musculus
  siRNA target sequence for Pigf (NM_008838.1,306-324).
gtagtgaaaccgaatgtgt

SEQ ID NO: 667559 - DNA, 19 bp, Mus musculus
  siRNA target sequence for Pigf (NM_008838.1,315-333).
ccgaatgtgtcctctaaaa

SEQ ID NO: 667560 - DNA, 19 bp, Mus musculus
  siRNA target sequence for Pigf (NM_008838.1,337-355).
gttcattgtcacataaggt

SEQ ID NO: 667561 - DNA, 19 bp, Mus musculus
  siRNA target sequence for Pigf (NM_008838.1,354-372).
gtaacgcgagctttgaaat

SEQ ID NO: 667562 - DNA, 19 bp, Mus musculus
  siRNA target sequence for Pigf (NM_008838.1,446-464).
gttggtgctggaaacgttt

SEQ ID NO: 667563 - DNA, 19 bp, Mus musculus
  siRNA target sequence for Pigf (NM_008838.1,449-467).
ggtgctggaaacgttttta

SEQ ID NO: 667564 - DNA, 19 bp, Mus musculus
  siRNA target sequence for Pigf (NM_008838.1,452-470).
gctggaaacgtttttattt

SEQ ID NO: 667565 - DNA, 19 bp, Mus musculus
  siRNA target sequence for Pigf (NM_008838.1,472-490).
cagttgttttgtctacttt

SEQ ID NO: 667566 - DNA, 19 bp, Mus musculus
  siRNA target sequence for Pigf (NM_008838.1,482-500).
gtctacttttactacagta

SEQ ID NO: 667567 - DNA, 19 bp, Mus musculus
  siRNA target sequence for Pigf (NM_008838.1,498-516).
gtaccttgtctctgtttgt

SEQ ID NO: 667568 - DNA, 19 bp, Mus musculus
  siRNA target sequence for Pigf (NM_008838.1,519-537).
ggaccaaacctcaaagcat

SEQ ID NO: 667569 - DNA, 19 bp, Mus musculus
  siRNA target sequence for Pigf (NM_008838.1,577-595).
gggagaatagtcttcagat

SEQ ID NO: 667570 - DNA, 19 bp, Mus musculus
  siRNA target sequence for Pigf (NM_008838.1,591-609).
cagatcactacaatttcta

SEQ ID NO: 667571 - DNA, 19 bp, Mus musculus
  siRNA target sequence for Psmd9 (NM_026000.1,124-142).
gcgacatccaggatctgat

SEQ ID NO: 667572 - DNA, 19 bp, Mus musculus
  siRNA target sequence for Psmd9 (NM_026000.1,166-184).
cggagatcaaggctaatta

SEQ ID NO: 667573 - DNA, 19 bp, Mus musculus
  siRNA target sequence for Psmd9 (NM_026000.1,188-206).
cgtcctggagagccaaaaa

SEQ ID NO: 667574 - DNA, 19 bp, Mus musculus
  siRNA target sequence for Psmd9 (NM_026000.1,283-301).
cagcaaggcacaacatcat

SEQ ID NO: 667575 - DNA, 19 bp, Mus musculus
  siRNA target sequence for Psmd9 (NM_026000.1,285-303).
gcaaggcacaacatcatct

SEQ ID NO: 667576 - DNA, 19 bp, Mus musculus
  siRNA target sequence for Psmd9 (NM_026000.1,657-675).
cagctcagactgattccaa

SEQ ID NO: 667577 - DNA, 19 bp, Mus musculus
  siRNA target sequence for Psmd9 (NM_026000.1,696-714).
ctgctggcgctgcaacatt

SEQ ID NO: 667578 - DNA, 19 bp, Mus musculus
  siRNA target sequence for Psmd9 (NM_026000.1,698-716).
gctggcgctgcaacattat

SEQ ID NO: 667579 - DNA, 19 bp, Mus musculus
  siRNA target sequence for Psmd9 (NM_026000.1,699-717).
ctggcgctgcaacattatt

SEQ ID NO: 667580 - DNA, 19 bp, Mus musculus
  siRNA target sequence for Psmd9 (NM_026000.1,702-720).
gcgctgcaacattattcct

SEQ ID NO: 667581 - DNA, 19 bp, Mus musculus
  siRNA target sequence for Rga (NM_009057.1,115-133).
gcagactctttcctttcta

SEQ ID NO: 667582 - DNA, 19 bp, Mus musculus
  siRNA target sequence for Rga (NM_009057.1,179-197).
cggacctcaggcatatgca

SEQ ID NO: 667583 - DNA, 19 bp, Mus musculus
  siRNA target sequence for Rga (NM_009057.1,289-307).
ggagatgggacccttatca

SEQ ID NO: 667584 - DNA, 19 bp, Mus musculus
  siRNA target sequence for Rga (NM_009057.1,290-308).
gagatgggacccttatcat

SEQ ID NO: 667585 - DNA, 19 bp, Mus musculus
  siRNA target sequence for Rga (NM_009057.1,325-343).
gccgtgcttcagactcttt

SEQ ID NO: 667586 - DNA, 19 bp, Mus musculus
  siRNA target sequence for Rga (NM_009057.1,326-344).
ccgtgcttcagactcttta

SEQ ID NO: 667587 - DNA, 19 bp, Mus musculus
  siRNA target sequence for Rga (NM_009057.1,424-442).
ctgggttatggctactttt

SEQ ID NO: 667588 - DNA, 19 bp, Mus musculus
  siRNA target sequence for Rga (NM_009057.1,542-560).
ccaagatcgttcagactaa

SEQ ID NO: 667589 - DNA, 19 bp, Mus musculus
  siRNA target sequence for Rga (NM_009057.1,543-561).
caagatcgttcagactaaa

SEQ ID NO: 667590 - DNA, 19 bp, Mus musculus
  siRNA target sequence for Rga (NM_009057.1,546-564).
gatcgttcagactaaatca

SEQ ID NO: 667591 - DNA, 19 bp, Mus musculus
  siRNA target sequence for Rga (NM_009057.1,638-656).
gcctccgagacccatacat

SEQ ID NO: 667592 - DNA, 19 bp, Mus musculus
  siRNA target sequence for Riok3 (NM_024182.2,317-335).
ctttccctgaagttgttgt

SEQ ID NO: 667593 - DNA, 19 bp, Mus musculus
  siRNA target sequence for Riok3 (NM_024182.2,347-365).
cattcatttctggagaaaa

SEQ ID NO: 667594 - DNA, 19 bp, Mus musculus
  siRNA target sequence for Riok3 (NM_024182.2,403-421).
ctacagatggaatttgaca

SEQ ID NO: 667595 - DNA, 19 bp, Mus musculus
  siRNA target sequence for Riok3 (NM_024182.2,469-487).
gatagcaaagtttccattt

SEQ ID NO: 667596 - DNA, 19 bp, Mus musculus
  siRNA target sequence for Riok3 (NM_024182.2,473-491).
gcaaagtttccatttcgtt

SEQ ID NO: 667597 - DNA, 19 bp, Mus musculus
  siRNA target sequence for Riok3 (NM_024182.2,602-620).
ctcccaaaaagggttttat

SEQ ID NO: 667598 - DNA, 19 bp, Mus musculus
  siRNA target sequence for Riok3 (NM_024182.2,648-666).
gcatgatgaagtagtatgt

SEQ ID NO: 667599 - DNA, 19 bp, Mus musculus
  siRNA target sequence for Riok3 (NM_024182.2,745-763).
ctatccaaccacgttttta

SEQ ID NO: 667600 - DNA, 19 bp, Mus musculus
  siRNA target sequence for Riok3 (NM_024182.2,806-824).
cccgtctacacgagaagaa

SEQ ID NO: 667601 - DNA, 19 bp, Mus musculus
  siRNA target sequence for Riok3 (NM_024182.2,814-832).
cacgagaagaaggaacatt

SEQ ID NO: 667602 - DNA, 19 bp, Mus musculus
  siRNA target sequence for Riok3 (NM_024182.2,857-875).
ctaagacacgcttacttat

SEQ ID NO: 667603 - DNA, 19 bp, Mus musculus
  siRNA target sequence for Riok3 (NM_024182.2,861-879).
gacacgcttacttatgtat

SEQ ID NO: 667604 - DNA, 19 bp, Mus musculus
  siRNA target sequence for Riok3 (NM_024182.2,863-881).
cacgcttacttatgtataa

SEQ ID NO: 667605 - DNA, 19 bp, Mus musculus
  siRNA target sequence for Riok3 (NM_024182.2,895-913).
ggaatgttggagacaatca

SEQ ID NO: 667606 - DNA, 19 bp, Mus musculus
  siRNA target sequence for Riok3 (NM_024182.2,964-982).
gggagcctggaggatgaaa

SEQ ID NO: 667607 - DNA, 19 bp, Mus musculus
  siRNA target sequence for Riok3 (NM_024182.2,984-1002).
ggaagatggtaaagctata

SEQ ID NO: 667608 - DNA, 19 bp, Mus musculus
  siRNA target sequence for Riok3 (NM_024182.2,1093-1111).
gatcgcttcagtaaactaa

SEQ ID NO: 667609 - DNA, 19 bp, Mus musculus
  siRNA target sequence for Riok3 (NM_024182.2,1108-1126).
ctaaatccacgtaagatca

SEQ ID NO: 667610 - DNA, 19 bp, Mus musculus
  siRNA target sequence for Riok3 (NM_024182.2,1187-1205).
cttgtccaacagttgtact

SEQ ID NO: 667611 - DNA, 19 bp, Mus musculus
  siRNA target sequence for Riok3 (NM_024182.2,1193-1211).
caacagttgtactgcttaa

SEQ ID NO: 667612 - DNA, 19 bp, Mus musculus
  siRNA target sequence for Riok3 (NM_024182.2,1232-1250).
ctttcattggccatgatca

SEQ ID NO: 667613 - DNA, 19 bp, Mus musculus
  siRNA target sequence for Riok3 (NM_024182.2,1256-1274).
cagcccctaaattaaaaga

SEQ ID NO: 667614 - DNA, 19 bp, Mus musculus
  siRNA target sequence for Riok3 (NM_024182.2,1259-1277).
cccctaaattaaaagaagt

SEQ ID NO: 667615 - DNA, 19 bp, Mus musculus
  siRNA target sequence for Riok3 (NM_024182.2,1308-1326).
ctactatcagactcttcat

SEQ ID NO: 667616 - DNA, 19 bp, Mus musculus
  siRNA target sequence for Riok3 (NM_024182.2,1332-1350).
gcagcaattatataacgaa

SEQ ID NO: 667617 - DNA, 19 bp, Mus musculus
  siRNA target sequence for Riok3 (NM_024182.2,1336-1354).
caattatataacgaatgta

SEQ ID NO: 667618 - DNA, 19 bp, Mus musculus
  siRNA target sequence for Riok3 (NM_024182.2,1366-1384).
gctgacctcagcgagtata

SEQ ID NO: 667619 - DNA, 19 bp, Mus musculus
  siRNA target sequence for Riok3 (NM_024182.2,1367-1385).
ctgacctcagcgagtataa

SEQ ID NO: 667620 - DNA, 19 bp, Mus musculus
  siRNA target sequence for Riok3 (NM_024182.2,1369-1387).
gacctcagcgagtataaca

SEQ ID NO: 667621 - DNA, 19 bp, Mus musculus
  siRNA target sequence for Riok3 (NM_024182.2,1372-1390).
ctcagcgagtataacatgt

SEQ ID NO: 667622 - DNA, 19 bp, Mus musculus
  siRNA target sequence for Riok3 (NM_024182.2,1474-1492).
cgtgactgtaggaatgttt

SEQ ID NO: 667623 - DNA, 19 bp, Mus musculus
  siRNA target sequence for Riok3 (NM_024182.2,1553-1571).
ctgtttctggcctgaacat

SEQ ID NO: 667624 - DNA, 19 bp, Mus musculus
  siRNA target sequence for Riok3 (NM_024182.2,1569-1587).
catctcggcagacaatgaa

SEQ ID NO: 667625 - DNA, 19 bp, Mus musculus
  siRNA target sequence for Rtn2 (NM_013648.4,186-204).
cttcgcccactgcaaagaa

SEQ ID NO: 667626 - DNA, 19 bp, Mus musculus
  siRNA target sequence for Rtn2 (NM_013648.4,198-216).
caaagaagctccatctaca

SEQ ID NO: 667627 - DNA, 19 bp, Mus musculus
  siRNA target sequence for Rtn2 (NM_013648.4,348-366).
gctgaccttttcctacatt

SEQ ID NO: 667628 - DNA, 19 bp, Mus musculus
  siRNA target sequence for Rtn2 (NM_013648.4,396-414).
ccgtagggactcagttgtt

SEQ ID NO: 667629 - DNA, 19 bp, Mus musculus
  siRNA target sequence for Rtn2 (NM_013648.4,943-961).
gaccaatcagaattcatgt

SEQ ID NO: 667630 - DNA, 19 bp, Mus musculus
  siRNA target sequence for Rtn2 (NM_013648.4,1277-1295).
cacagctacggcatttctt

SEQ ID NO: 667631 - DNA, 19 bp, Mus musculus
  siRNA target sequence for Rtn2 (NM_013648.4,1487-1505).
gccacatcaaagctaagat

SEQ ID NO: 667632 - DNA, 19 bp, Mus musculus
  siRNA target sequence for Rtn2 (NM_013648.4,1499-1517).
ctaagatccgagctaagat

SEQ ID NO: 667633 - DNA, 19 bp, Mus musculus
  siRNA target sequence for Rtn3 (NM_053076.1,297-315).
gtgcacgatctgattttct

SEQ ID NO: 667634 - DNA, 19 bp, Mus musculus
  siRNA target sequence for Rtn3 (NM_053076.1,375-393).
ctggcagccttcagtgtta

SEQ ID NO: 667635 - DNA, 19 bp, Mus musculus
  siRNA target sequence for Rtn3 (NM_053076.1,452-470).
ctataagtctgtcattcaa

SEQ ID NO: 667636 - DNA, 19 bp, Mus musculus
  siRNA target sequence for Rtn3 (NM_053076.1,538-556).
cagaagctttccacaacta

SEQ ID NO: 667637 - DNA, 19 bp, Mus musculus
  siRNA target sequence for Rtn3 (NM_053076.1,544-562).
ctttccacaactacatgaa

SEQ ID NO: 667638 - DNA, 19 bp, Mus musculus
  siRNA target sequence for Rtn3 (NM_053076.1,587-605).
ggccctcaaactcattatt

SEQ ID NO: 667639 - DNA, 19 bp, Mus musculus
  siRNA target sequence for Rtn3 (NM_053076.1,659-677).
gtggctgatgacctatgtt

SEQ ID NO: 667640 - DNA, 19 bp, Mus musculus
  siRNA target sequence for Rtn3 (NM_053076.1,746-764).
ctatgagaagtataagaca

SEQ ID NO: 667641 - DNA, 19 bp, Mus musculus
  siRNA target sequence for Rtn3 (NM_053076.1,752-770).
gaagtataagacacagatt

SEQ ID NO: 667642 - DNA, 19 bp, Mus musculus
  siRNA target sequence for Rtn3 (NM_053076.1,792-810).
cgggatcagaccaagtcaa

SEQ ID NO: 667643 - DNA, 19 bp, Mus musculus
  siRNA target sequence for Rtn3 (NM_053076.1,793-811).
gggatcagaccaagtcaat

SEQ ID NO: 667644 - DNA, 19 bp, Mus musculus
  siRNA target sequence for Rtn3 (NM_053076.1,794-812).
ggatcagaccaagtcaatt

SEQ ID NO: 667645 - DNA, 19 bp, Mus musculus
  siRNA target sequence for Sbds (NM_023248.1,206-224).
cgaaatcgcctgctataaa

SEQ ID NO: 667646 - DNA, 19 bp, Mus musculus
  siRNA target sequence for Sbds (NM_023248.1,241-259).
ggcggagtggcgtggaaaa

SEQ ID NO: 667647 - DNA, 19 bp, Mus musculus
  siRNA target sequence for Sbds (NM_023248.1,242-260).
gcggagtggcgtggaaaaa

SEQ ID NO: 667648 - DNA, 19 bp, Mus musculus
  siRNA target sequence for Sbds (NM_023248.1,278-296).
gcagacccattcagtgttt

SEQ ID NO: 667649 - DNA, 19 bp, Mus musculus
  siRNA target sequence for Sbds (NM_023248.1,281-299).
gacccattcagtgtttgta

SEQ ID NO: 667650 - DNA, 19 bp, Mus musculus
  siRNA target sequence for Sbds (NM_023248.1,769-787).
gctgcttcagagaaattga

SEQ ID NO: 667651 - DNA, 19 bp, Mus musculus
  siRNA target sequence for Sbds (NM_023248.1,778-796).
gagaaattgatgagctaat

SEQ ID NO: 667652 - DNA, 19 bp, Mus musculus
  siRNA target sequence for Sca10 (NM_016843.1,342-360).
gagagtcctggatatctta

SEQ ID NO: 667653 - DNA, 19 bp, Mus musculus
  siRNA target sequence for Sca10 (NM_016843.1,344-362).
gagtcctggatatcttaaa

SEQ ID NO: 667654 - DNA, 19 bp, Mus musculus
  siRNA target sequence for Sca10 (NM_016843.1,346-364).
gtcctggatatcttaaaga

SEQ ID NO: 667655 - DNA, 19 bp, Mus musculus
  siRNA target sequence for Sca10 (NM_016843.1,357-375).
cttaaagaagtctactcat

SEQ ID NO: 667656 - DNA, 19 bp, Mus musculus
  siRNA target sequence for Sca10 (NM_016843.1,401-419).
cctcccaagtggaacatct

SEQ ID NO: 667657 - DNA, 19 bp, Mus musculus
  siRNA target sequence for Sca10 (NM_016843.1,430-448).
ctgcagctaatcactgaat

SEQ ID NO: 667658 - DNA, 19 bp, Mus musculus
  siRNA target sequence for Sca10 (NM_016843.1,463-481).
cggaatgcttgtatagagt

SEQ ID NO: 667659 - DNA, 19 bp, Mus musculus
  siRNA target sequence for Sca10 (NM_016843.1,524-542).
gagttgctgttgatttggt

SEQ ID NO: 667660 - DNA, 19 bp, Mus musculus
  siRNA target sequence for Sca10 (NM_016843.1,568-586).
gaacaagactccttgttga

SEQ ID NO: 667661 - DNA, 19 bp, Mus musculus
  siRNA target sequence for Sca10 (NM_016843.1,576-594).
ctccttgttgacagctttt

SEQ ID NO: 667662 - DNA, 19 bp, Mus musculus
  siRNA target sequence for Sca10 (NM_016843.1,579-597).
cttgttgacagcttttcga

SEQ ID NO: 667663 - DNA, 19 bp, Mus musculus
  siRNA target sequence for Sca10 (NM_016843.1,595-613).
cgatgtggcctgcagtttt

SEQ ID NO: 667664 - DNA, 19 bp, Mus musculus
  siRNA target sequence for Sca10 (NM_016843.1,596-614).
gatgtggcctgcagttttt

SEQ ID NO: 667665 - DNA, 19 bp, Mus musculus
  siRNA target sequence for Sca10 (NM_016843.1,618-636).
caacgttgcctcacgaaat

SEQ ID NO: 667666 - DNA, 19 bp, Mus musculus
  siRNA target sequence for Sca10 (NM_016843.1,621-639).
cgttgcctcacgaaatgaa

SEQ ID NO: 667667 - DNA, 19 bp, Mus musculus
  siRNA target sequence for Sca10 (NM_016843.1,722-740).
cctactgttccatgattct

SEQ ID NO: 667668 - DNA, 19 bp, Mus musculus
  siRNA target sequence for Sca10 (NM_016843.1,749-767).
ctcttaatgctgaaaggat

SEQ ID NO: 667669 - DNA, 19 bp, Mus musculus
  siRNA target sequence for Sca10 (NM_016843.1,781-799).
gagaacctcaatattgcaa

SEQ ID NO: 667670 - DNA, 19 bp, Mus musculus
  siRNA target sequence for Sca10 (NM_016843.1,783-801).
gaacctcaatattgcaatt

SEQ ID NO: 667671 - DNA, 19 bp, Mus musculus
  siRNA target sequence for Sca10 (NM_016843.1,838-856).
gagtggccgttcttgatta

SEQ ID NO: 667672 - DNA, 19 bp, Mus musculus
  siRNA target sequence for Sca10 (NM_016843.1,843-861).
gccgttcttgattatttca

SEQ ID NO: 667673 - DNA, 19 bp, Mus musculus
  siRNA target sequence for Sca10 (NM_016843.1,845-863).
cgttcttgattatttcaga

SEQ ID NO: 667674 - DNA, 19 bp, Mus musculus
  siRNA target sequence for Sca10 (NM_016843.1,881-899).
cggaactggtggaagctat

SEQ ID NO: 667675 - DNA, 19 bp, Mus musculus
  siRNA target sequence for Sca10 (NM_016843.1,926-944).
ggatcacactgttagacat

SEQ ID NO: 667676 - DNA, 19 bp, Mus musculus
  siRNA target sequence for Sca10 (NM_016843.1,927-945).
gatcacactgttagacata

SEQ ID NO: 667677 - DNA, 19 bp, Mus musculus
  siRNA target sequence for Sca10 (NM_016843.1,1005-1023).
gcgccatgccgagttgatt

SEQ ID NO: 667678 - DNA, 19 bp, Mus musculus
  siRNA target sequence for Sca10 (NM_016843.1,1009-1027).
catgccgagttgattgcaa

SEQ ID NO: 667679 - DNA, 19 bp, Mus musculus
  siRNA target sequence for Sca10 (NM_016843.1,1014-1032).
cgagttgattgcaaactca

SEQ ID NO: 667680 - DNA, 19 bp, Mus musculus
  siRNA target sequence for Sca10 (NM_016843.1,1015-1033).
gagttgattgcaaactcat

SEQ ID NO: 667681 - DNA, 19 bp, Mus musculus
  siRNA target sequence for Sca10 (NM_016843.1,1046-1064).
gcaggaacgtgctgaagtt

SEQ ID NO: 667682 - DNA, 19 bp, Mus musculus
  siRNA target sequence for Sca10 (NM_016843.1,1092-1110).
ggaagccctggttacgatt

SEQ ID NO: 667683 - DNA, 19 bp, Mus musculus
  siRNA target sequence for Sca10 (NM_016843.1,1188-1206).
ggaacgcgtgattgatgtt

SEQ ID NO: 667684 - DNA, 19 bp, Mus musculus
  siRNA target sequence for Sca10 (NM_016843.1,1189-1207).
gaacgcgtgattgatgttt

SEQ ID NO: 667685 - DNA, 19 bp, Mus musculus
  siRNA target sequence for Sca10 (NM_016843.1,1194-1212).
cgtgattgatgttttacga

SEQ ID NO: 667686 - DNA, 19 bp, Mus musculus
  siRNA target sequence for Sca10 (NM_016843.1,1253-1271).
gtccctcagactctctaaa

SEQ ID NO: 667687 - DNA, 19 bp, Mus musculus
  siRNA target sequence for Sca10 (NM_016843.1,1257-1275).
ctcagactctctaaaagca

SEQ ID NO: 667688 - DNA, 19 bp, Mus musculus
  siRNA target sequence for Sca10 (NM_016843.1,1318-1336).
ctcatccgtctgattggaa

SEQ ID NO: 667689 - DNA, 19 bp, Mus musculus
  siRNA target sequence for Sca10 (NM_016843.1,1320-1338).
catccgtctgattggaaat

SEQ ID NO: 667690 - DNA, 19 bp, Mus musculus
  siRNA target sequence for Sca10 (NM_016843.1,1324-1342).
cgtctgattggaaatctgt

SEQ ID NO: 667691 - DNA, 19 bp, Mus musculus
  siRNA target sequence for Sca10 (NM_016843.1,1424-1442).
gacaacaacccctttatga

SEQ ID NO: 667692 - DNA, 19 bp, Mus musculus
  siRNA target sequence for Shfdg1 (NM_009169.1,124-142).
ctgggctggcttagatgaa

SEQ ID NO: 667693 - DNA, 19 bp, Mus musculus
  siRNA target sequence for Shfdg1 (NM_009169.1,155-173).
catgtctgggaggataatt

SEQ ID NO: 667694 - DNA, 19 bp, Mus musculus
  siRNA target sequence for Snap25 (NM_011428.2,432-450).
gtccctgtaacaagcttaa

SEQ ID NO: 667695 - DNA, 19 bp, Mus musculus
  siRNA target sequence for Tmem8 (NM_021793.1,253-271).
ggctggactggtatctgaa

SEQ ID NO: 667696 - DNA, 19 bp, Mus musculus
  siRNA target sequence for Tmem8 (NM_021793.1,509-527).
catatcagggcattgttga

SEQ ID NO: 667697 - DNA, 19 bp, Mus musculus
  siRNA target sequence for Tmem8 (NM_021793.1,645-663).
caacctgtgcctacatctt

SEQ ID NO: 667698 - DNA, 19 bp, Mus musculus
  siRNA target sequence for Tmem8 (NM_021793.1,861-879).
caaccaccctgcctagaaa

SEQ ID NO: 667699 - DNA, 19 bp, Mus musculus
  siRNA target sequence for Tmem8 (NM_021793.1,954-972).
ggtggttacaagtgacatt

SEQ ID NO: 667700 - DNA, 19 bp, Mus musculus
  siRNA target sequence for Tmem8 (NM_021793.1,955-973).
gtggttacaagtgacattt

SEQ ID NO: 667701 - DNA, 19 bp, Mus musculus
  siRNA target sequence for Tmem8 (NM_021793.1,1019-1037).
gctgtctttacagtatgta

SEQ ID NO: 667702 - DNA, 19 bp, Mus musculus
  siRNA target sequence for Tmem8 (NM_021793.1,1047-1065).
gtgtgaccatccatcatct

SEQ ID NO: 667703 - DNA, 19 bp, Mus musculus
  siRNA target sequence for Tmem8 (NM_021793.1,1049-1067).
gtgaccatccatcatctta

SEQ ID NO: 667704 - DNA, 19 bp, Mus musculus
  siRNA target sequence for Tmem8 (NM_021793.1,1051-1069).
gaccatccatcatcttata

SEQ ID NO: 667705 - DNA, 19 bp, Mus musculus
  siRNA target sequence for Tmem8 (NM_021793.1,1054-1072).
catccatcatcttatacaa

SEQ ID NO: 667706 - DNA, 19 bp, Mus musculus
  siRNA target sequence for Tmem8 (NM_021793.1,1285-1303).
gcagctccgccttgataca

SEQ ID NO: 667707 - DNA, 19 bp, Mus musculus
  siRNA target sequence for Tmem8 (NM_021793.1,1334-1352).
gtcctgaggactaacaaga

SEQ ID NO: 667708 - DNA, 19 bp, Mus musculus
  siRNA target sequence for Tmem8 (NM_021793.1,1375-1393).
ggtagcagcttgtgtgaat

SEQ ID NO: 667709 - DNA, 19 bp, Mus musculus
  siRNA target sequence for Tmem8 (NM_021793.1,1454-1472).
ggctaccccatgtttctga

SEQ ID NO: 667710 - DNA, 19 bp, Mus musculus
  siRNA target sequence for Tmem8 (NM_021793.1,1591-1609).
cgtggagaccatcttgtat

SEQ ID NO: 667711 - DNA, 19 bp, Mus musculus
  siRNA target sequence for Tmem8 (NM_021793.1,1650-1668).
gtctcctgctccgtagata

SEQ ID NO: 667712 - DNA, 19 bp, Mus musculus
  siRNA target sequence for Tmem8 (NM_021793.1,1661-1679).
cgtagatacggctatgtgt

SEQ ID NO: 667713 - DNA, 19 bp, Mus musculus
  siRNA target sequence for Tmem8 (NM_021793.1,1662-1680).
gtagatacggctatgtgta

SEQ ID NO: 667714 - DNA, 19 bp, Mus musculus
  siRNA target sequence for Tmem8 (NM_021793.1,1918-1936).
gttgtgcatcctcagttat

SEQ ID NO: 667715 - DNA, 19 bp, Mus musculus
  siRNA target sequence for Tmem8 (NM_021793.1,1978-1996).
cacctgggtgaccattctt

SEQ ID NO: 667716 - DNA, 19 bp, Mus musculus
  siRNA target sequence for Tmem8 (NM_021793.1,2085-2103).
ggggcatctggaacttgat

SEQ ID NO: 667717 - DNA, 19 bp, Mus musculus
  siRNA target sequence for Tmem8 (NM_021793.1,2106-2124).
gaccttgcgtctttgcttt

SEQ ID NO: 667718 - DNA, 19 bp, Mus musculus
  siRNA target sequence for Tmem8 (NM_021793.1,2236-2254).
cgttggcatcgccatgtat

SEQ ID NO: 667719 - DNA, 19 bp, Mus musculus
  siRNA target sequence for Tmem8 (NM_021793.1,2237-2255).
gttggcatcgccatgtata

SEQ ID NO: 667720 - DNA, 19 bp, Mus musculus
  siRNA target sequence for Tmem8 (NM_021793.1,2240-2258).
ggcatcgccatgtatactt

SEQ ID NO: 667721 - DNA, 19 bp, Mus musculus
  siRNA target sequence for Tmem8 (NM_021793.1,2242-2260).
catcgccatgtatacttca

SEQ ID NO: 667722 - DNA, 19 bp, Mus musculus
  siRNA target sequence for Tmem8 (NM_021793.1,2246-2264).
gccatgtatacttcaatga

SEQ ID NO: 667723 - DNA, 19 bp, Mus musculus
  siRNA target sequence for Tmem8 (NM_021793.1,2268-2286).
ccagtgacaattactacta

SEQ ID NO: 667724 - DNA, 19 bp, Mus musculus
  siRNA target sequence for Tmem8 (NM_021793.1,2409-2427).
ggaatgatcgggatgagtt

SEQ ID NO: 667725 - DNA, 19 bp, Mus musculus
  siRNA target sequence for Tmem8 (NM_021793.1,2414-2432).
gatcgggatgagttgtaca

SEQ ID NO: 667726 - DNA, 19 bp, Mus musculus
  siRNA target sequence for Tnn (NM_177839.2,203-221).
gagcaacaggtcactgtta

SEQ ID NO: 667727 - DNA, 19 bp, Mus musculus
  siRNA target sequence for Tnn (NM_177839.2,218-236).
gttagccacacctacaaga

SEQ ID NO: 667728 - DNA, 19 bp, Mus musculus
  siRNA target sequence for Tnn (NM_177839.2,250-268).
gtctgctctggttcaagta

SEQ ID NO: 667729 - DNA, 19 bp, Mus musculus
  siRNA target sequence for Tnn (NM_177839.2,329-347).
ggggaggagcagaacatta

SEQ ID NO: 667730 - DNA, 19 bp, Mus musculus
  siRNA target sequence for Tnn (NM_177839.2,335-353).
gagcagaacattatcttca

SEQ ID NO: 667731 - DNA, 19 bp, Mus musculus
  siRNA target sequence for Tnn (NM_177839.2,371-389).
cagacaccgcagaagaatt

SEQ ID NO: 667732 - DNA, 19 bp, Mus musculus
  siRNA target sequence for Tnn (NM_177839.2,415-433).
cctgctagcccggatgaaa

SEQ ID NO: 667733 - DNA, 19 bp, Mus musculus
  siRNA target sequence for Tnn (NM_177839.2,416-434).
ctgctagcccggatgaaaa

SEQ ID NO: 667734 - DNA, 19 bp, Mus musculus
  siRNA target sequence for Tnn (NM_177839.2,822-840).
gtgacactggcgagtgtta

SEQ ID NO: 667735 - DNA, 19 bp, Mus musculus
  siRNA target sequence for Tnn (NM_177839.2,824-842).
gacactggcgagtgttact

SEQ ID NO: 667736 - DNA, 19 bp, Mus musculus
  siRNA target sequence for Tnn (NM_177839.2,1028-1046).
gagcagcacacctatgaca

SEQ ID NO: 667737 - DNA, 19 bp, Mus musculus
  siRNA target sequence for Tnn (NM_177839.2,1060-1078).
gcctggaaccaagtacata

SEQ ID NO: 667738 - DNA, 19 bp, Mus musculus
  siRNA target sequence for Tnn (NM_177839.2,1062-1080).
ctggaaccaagtacatagt

SEQ ID NO: 667739 - DNA, 19 bp, Mus musculus
  siRNA target sequence for Tnn (NM_177839.2,1083-1101).
ccctgcgcaacgtgaagaa

SEQ ID NO: 667740 - DNA, 19 bp, Mus musculus
  siRNA target sequence for Tnn (NM_177839.2,1084-1102).
cctgcgcaacgtgaagaaa

SEQ ID NO: 667741 - DNA, 19 bp, Mus musculus
  siRNA target sequence for Tnn (NM_177839.2,1088-1106).
cgcaacgtgaagaaagaca

SEQ ID NO: 667742 - DNA, 19 bp, Mus musculus
  siRNA target sequence for Tnn (NM_177839.2,1156-1174).
gggcacagcctgggtaaat

SEQ ID NO: 667743 - DNA, 19 bp, Mus musculus
  siRNA target sequence for Tnn (NM_177839.2,1158-1176).
gcacagcctgggtaaatga

SEQ ID NO: 667744 - DNA, 19 bp, Mus musculus
  siRNA target sequence for Tnn (NM_177839.2,1159-1177).
cacagcctgggtaaatgaa

SEQ ID NO: 667745 - DNA, 19 bp, Mus musculus
  siRNA target sequence for Tnn (NM_177839.2,1221-1239).
ctgaggtggactattacaa

SEQ ID NO: 667746 - DNA, 19 bp, Mus musculus
  siRNA target sequence for Tnn (NM_177839.2,1333-1351).
gcagcctggaacggaatat

SEQ ID NO: 667747 - DNA, 19 bp, Mus musculus
  siRNA target sequence for Tnn (NM_177839.2,1334-1352).
cagcctggaacggaatata

SEQ ID NO: 667748 - DNA, 19 bp, Mus musculus
  siRNA target sequence for Tnn (NM_177839.2,1340-1358).
ggaacggaatataaaatca

SEQ ID NO: 667749 - DNA, 19 bp, Mus musculus
  siRNA target sequence for Tnn (NM_177839.2,1405-1423).
gaatggcaggacagaaatt

SEQ ID NO: 667750 - DNA, 19 bp, Mus musculus
  siRNA target sequence for Tnn (NM_177839.2,1434-1452).
ccaatgtggtcacaaatca

SEQ ID NO: 667751 - DNA, 19 bp, Mus musculus
  siRNA target sequence for Tnn (NM_177839.2,1490-1508).
gtgagggctgacatagaca

SEQ ID NO: 667752 - DNA, 19 bp, Mus musculus
  siRNA target sequence for Tnn (NM_177839.2,1494-1512).
gggctgacatagacaagta

SEQ ID NO: 667753 - DNA, 19 bp, Mus musculus
  siRNA target sequence for Tnn (NM_177839.2,1604-1622).
ggagaggcctacaaagtct

SEQ ID NO: 667754 - DNA, 19 bp, Mus musculus
  siRNA target sequence for Tnn (NM_177839.2,1605-1623).
gagaggcctacaaagtctt

SEQ ID NO: 667755 - DNA, 19 bp, Mus musculus
  siRNA target sequence for Tnn (NM_177839.2,1610-1628).
gcctacaaagtctttgtgt

SEQ ID NO: 667756 - DNA, 19 bp, Mus musculus
  siRNA target sequence for Tnn (NM_177839.2,2014-2032).
ccctgttcaggccaacatt

SEQ ID NO: 667757 - DNA, 19 bp, Mus musculus
  siRNA target sequence for Tnn (NM_177839.2,2595-2613).
gcgagaccagggaatttct

SEQ ID NO: 667758 - DNA, 19 bp, Mus musculus
  siRNA target sequence for Tnn (NM_177839.2,2615-2633).
gttgggaaggaccaaacaa

SEQ ID NO: 667759 - DNA, 19 bp, Mus musculus
  siRNA target sequence for Tnn (NM_177839.2,3295-3313).
caatcaggtgaccgaaaat

SEQ ID NO: 667760 - DNA, 19 bp, Mus musculus
  siRNA target sequence for Tnn (NM_177839.2,3334-3352).
cccggtgcaggctgatatt

SEQ ID NO: 667761 - DNA, 19 bp, Mus musculus
  siRNA target sequence for Tnn (NM_177839.2,3336-3354).
cggtgcaggctgatattga

SEQ ID NO: 667762 - DNA, 19 bp, Mus musculus
  siRNA target sequence for Tnn (NM_177839.2,3709-3727).
gaaaccaggcatggaatat

SEQ ID NO: 667763 - DNA, 19 bp, Mus musculus
  siRNA target sequence for Tnn (NM_177839.2,3765-3783).
gcaagaaggctgataccaa

SEQ ID NO: 667764 - DNA, 19 bp, Mus musculus
  siRNA target sequence for Tnn (NM_177839.2,3819-3837).
gtccgttcggggtaacaca

SEQ ID NO: 667765 - DNA, 19 bp, Mus musculus
  siRNA target sequence for Tnn (NM_177839.2,3821-3839).
ccgttcggggtaacacatt

SEQ ID NO: 667766 - DNA, 19 bp, Mus musculus
  siRNA target sequence for Tnn (NM_177839.2,3823-3841).
gttcggggtaacacattct

SEQ ID NO: 667767 - DNA, 19 bp, Mus musculus
  siRNA target sequence for Tnn (NM_177839.2,3862-3880).
gcccccatctgctcaaatt

SEQ ID NO: 667768 - DNA, 19 bp, Mus musculus
  siRNA target sequence for Tnn (NM_177839.2,3944-3962).
ggccagcagagatttgaat

SEQ ID NO: 667769 - DNA, 19 bp, Mus musculus
  siRNA target sequence for Tnn (NM_177839.2,3945-3963).
gccagcagagatttgaatt

SEQ ID NO: 667770 - DNA, 19 bp, Mus musculus
  siRNA target sequence for Tnn (NM_177839.2,3949-3967).
gcagagatttgaattgcaa

SEQ ID NO: 667771 - DNA, 19 bp, Mus musculus
  siRNA target sequence for Tnn (NM_177839.2,4039-4057).
gtctaccaccctttctaca

SEQ ID NO: 667772 - DNA, 19 bp, Mus musculus
  siRNA target sequence for Tnn (NM_177839.2,4249-4267).
caagcgttggcggagttat

SEQ ID NO: 667773 - DNA, 19 bp, Mus musculus
  siRNA target sequence for Tnn (NM_177839.2,4252-4270).
gcgttggcggagttatgta

SEQ ID NO: 667774 - DNA, 19 bp, Mus musculus
  siRNA target sequence for Tnn (NM_177839.2,4254-4272).
gttggcggagttatgtaga

SEQ ID NO: 667775 - DNA, 19 bp, Mus musculus
  siRNA target sequence for Tnn (NM_177839.2,4261-4279).
gagttatgtagaaggtttt

SEQ ID NO: 667776 - DNA, 19 bp, Mus musculus
  siRNA target sequence for Tnn (NM_177839.2,4369-4387).
cttacagactttcaatgaa

SEQ ID NO: 667777 - DNA, 19 bp, Mus musculus
  siRNA target sequence for Tnn (NM_177839.2,4389-4407).
ctgcctacgctgtatatga

SEQ ID NO: 667778 - DNA, 19 bp, Mus musculus
  siRNA target sequence for Tnn (NM_177839.2,4391-4409).
gcctacgctgtatatgatt

SEQ ID NO: 667779 - DNA, 19 bp, Mus musculus
  siRNA target sequence for Tnn (NM_177839.2,4392-4410).
cctacgctgtatatgattt

SEQ ID NO: 667780 - DNA, 19 bp, Mus musculus
  siRNA target sequence for Tnn (NM_177839.2,4445-4463).
ctgtcggttgggaaataca

SEQ ID NO: 667781 - DNA, 19 bp, Mus musculus
  siRNA target sequence for Tnn (NM_177839.2,4447-4465).
gtcggttgggaaatacaga

SEQ ID NO: 667782 - DNA, 19 bp, Mus musculus
  siRNA target sequence for Tnn (NM_177839.2,4493-4511).
cacaatggatggaagttca

SEQ ID NO: 667783 - DNA, 19 bp, Mus musculus
  siRNA target sequence for Tnn (NM_177839.2,4503-4521).
ggaagttcacgacttttga

SEQ ID NO: 667784 - DNA, 19 bp, Mus musculus
  siRNA target sequence for Tnn (NM_177839.2,4744-4762).
gaagcgctccataggaaaa

SEQ ID NO: 667785 - DNA, 19 bp, Mus musculus
  siRNA target sequence for Tnn (NM_177839.2,4748-4766).
cgctccataggaaaagcaa

SEQ ID NO: 667786 - DNA, 19 bp, Mus musculus
  siRNA target sequence for Tparl (NM_011626.1,417-435).
ccagtcgccccagttcata

SEQ ID NO: 667787 - DNA, 19 bp, Mus musculus
  siRNA target sequence for Tparl (NM_011626.1,425-443).
cccagttcataccaacaaa

SEQ ID NO: 667788 - DNA, 19 bp, Mus musculus
  siRNA target sequence for Tparl (NM_011626.1,459-477).
cagacgaatctgggattta

SEQ ID NO: 667789 - DNA, 19 bp, Mus musculus
  siRNA target sequence for Tparl (NM_011626.1,463-481).
cgaatctgggatttatcca

SEQ ID NO: 667790 - DNA, 19 bp, Mus musculus
  siRNA target sequence for Tparl (NM_011626.1,464-482).
gaatctgggatttatccat

SEQ ID NO: 667791 - DNA, 19 bp, Mus musculus
  siRNA target sequence for Tparl (NM_011626.1,522-540).
ctcggcgacaagacgtttt

SEQ ID NO: 667792 - DNA, 19 bp, Mus musculus
  siRNA target sequence for Tparl (NM_011626.1,525-543).
ggcgacaagacgtttttca

SEQ ID NO: 667793 - DNA, 19 bp, Mus musculus
  siRNA target sequence for Tparl (NM_011626.1,526-544).
gcgacaagacgtttttcat

SEQ ID NO: 667794 - DNA, 19 bp, Mus musculus
  siRNA target sequence for Tparl (NM_011626.1,527-545).
cgacaagacgtttttcata

SEQ ID NO: 667795 - DNA, 19 bp, Mus musculus
  siRNA target sequence for Tparl (NM_011626.1,619-637).
catgcttgtcggttttgtt

SEQ ID NO: 667796 - DNA, 19 bp, Mus musculus
  siRNA target sequence for Tparl (NM_011626.1,654-672).
gtcatccccagggtgtata

SEQ ID NO: 667797 - DNA, 19 bp, Mus musculus
  siRNA target sequence for Tparl (NM_011626.1,661-679).
ccagggtgtatacatacta

SEQ ID NO: 667798 - DNA, 19 bp, Mus musculus
  siRNA target sequence for Tparl (NM_011626.1,688-706).
ctgcactcttcgccatttt

SEQ ID NO: 667799 - DNA, 19 bp, Mus musculus
  siRNA target sequence for Tparl (NM_011626.1,771-789).
gaagtccaagcagagttaa

SEQ ID NO: 667800 - DNA, 19 bp, Mus musculus
  siRNA target sequence for Tparl (NM_011626.1,870-888).
cagaaaaagtggttacatt

SEQ ID NO: 667801 - DNA, 19 bp, Mus musculus
  siRNA target sequence for Tparl (NM_011626.1,906-924).
gttcaagcgctcacattaa

SEQ ID NO: 667802 - DNA, 19 bp, Mus musculus
  siRNA target sequence for Tparl (NM_011626.1,909-927).
caagcgctcacattaacgt

SEQ ID NO: 667803 - DNA, 19 bp, Mus musculus
  siRNA target sequence for Tparl (NM_011626.1,1060-1078).
ggatgatagcgcaaaagat

SEQ ID NO: 667804 - DNA, 19 bp, Mus musculus
  siRNA target sequence for Tparl (NM_011626.1,1081-1099).
ctgtccgaactgtgacaat

SEQ ID NO: 667805 - DNA, 19 bp, Mus musculus
  siRNA target sequence for Tparl (NM_011626.1,1083-1101).
gtccgaactgtgacaatca

SEQ ID NO: 667806 - DNA, 19 bp, Mus musculus
  siRNA target sequence for Tparl (NM_011626.1,1113-1131).
gtatttttggcgtttgcat

SEQ ID NO: 667807 - DNA, 19 bp, Mus musculus
  siRNA target sequence for Vmd2l1 (NM_145388.1,246-264).
gagaagcttgtcatatact

SEQ ID NO: 667808 - DNA, 19 bp, Mus musculus
  siRNA target sequence for Vmd2l1 (NM_145388.1,280-298).
gcctcatccccgtctcttt

SEQ ID NO: 667809 - DNA, 19 bp, Mus musculus
  siRNA target sequence for Vmd2l1 (NM_145388.1,284-302).
catccccgtctctttcgta

SEQ ID NO: 667810 - DNA, 19 bp, Mus musculus
  siRNA target sequence for Vmd2l1 (NM_145388.1,531-549).
gtcgaggctggatttatga

SEQ ID NO: 667811 - DNA, 19 bp, Mus musculus
  siRNA target sequence for Vmd2l1 (NM_145388.1,666-684).
gacaacagtgccctaaagt

SEQ ID NO: 667812 - DNA, 19 bp, Mus musculus
  siRNA target sequence for Vmd2l1 (NM_145388.1,721-739).
gtgggatgctgtttcacta

SEQ ID NO: 667813 - DNA, 19 bp, Mus musculus
  siRNA target sequence for Vmd2l1 (NM_145388.1,735-753).
cactacgactggattagca

SEQ ID NO: 667814 - DNA, 19 bp, Mus musculus
  siRNA target sequence for Vmd2l1 (NM_145388.1,737-755).
ctacgactggattagcata

SEQ ID NO: 667815 - DNA, 19 bp, Mus musculus
  siRNA target sequence for Vmd2l1 (NM_145388.1,870-888).
ctatgcgtacccatcttca

SEQ ID NO: 667816 - DNA, 19 bp, Mus musculus
  siRNA target sequence for Vmd2l1 (NM_145388.1,968-986).
cgactttgagaccaacttt

SEQ ID NO: 667817 - DNA, 19 bp, Mus musculus
  siRNA target sequence for Vmd2l1 (NM_145388.1,1142-1160).
gggctccacctttgatata

SEQ ID NO: 667818 - DNA, 19 bp, Mus musculus
  siRNA target sequence for Vmd2l1 (NM_145388.1,1297-1315).
cgctgttaaggcgtaaaaa

SEQ ID NO: 667819 - DNA, 19 bp, Mus musculus
  siRNA target sequence for Vmd2l1 (NM_145388.1,1299-1317).
ctgttaaggcgtaaaaaca

SEQ ID NO: 667820 - DNA, 19 bp, Mus musculus
  siRNA target sequence for Vmd2l1 (NM_145388.1,1482-1500).
ccaactcctgaacctttta

SEQ ID NO: 667821 - DNA, 19 bp, Mus musculus
  siRNA target sequence for 1200014P03Rik (NM_029091.1,175-193).
ccctacacagtgaacatca

SEQ ID NO: 667822 - DNA, 19 bp, Mus musculus
  siRNA target sequence for 1200014P03Rik (NM_029091.1,210-228).
ctgtcccacaccattgagt

SEQ ID NO: 667823 - DNA, 19 bp, Mus musculus
  siRNA target sequence for 1200014P03Rik (NM_029091.1,1102-1120).
ccctcctatgtcaaaacca

SEQ ID NO: 667824 - DNA, 19 bp, Mus musculus
  siRNA target sequence for 1200014P03Rik (NM_029091.1,1133-1151).
ggcggtggaacgctattat

SEQ ID NO: 667825 - DNA, 19 bp, Mus musculus
  siRNA target sequence for 1200014P03Rik (NM_029091.1,1135-1153).
cggtggaacgctattatca

SEQ ID NO: 667826 - DNA, 19 bp, Mus musculus
  siRNA target sequence for 1200014P03Rik (NM_029091.1,1154-1172).
gcgggcactagccatctat

SEQ ID NO: 667827 - DNA, 19 bp, Mus musculus
  siRNA target sequence for 1200014P03Rik (NM_029091.1,1186-1204).
ggccagacaaccctaatgt

SEQ ID NO: 667828 - DNA, 19 bp, Mus musculus
  siRNA target sequence for 1200014P03Rik (NM_029091.1,1203-1221).
gtagctcggaccaagaata

SEQ ID NO: 667829 - DNA, 19 bp, Mus musculus
  siRNA target sequence for 1200014P03Rik (NM_029091.1,1264-1282).
ccgaggctctgtacaaaga

SEQ ID NO: 667830 - DNA, 19 bp, Mus musculus
  siRNA target sequence for 1200014P03Rik (NM_029091.1,1458-1476).
gtgaacactactctgaaaa

SEQ ID NO: 667831 - DNA, 19 bp, Mus musculus
  siRNA target sequence for 1200014P03Rik (NM_029091.1,1835-1853).
ggcctcgctgaactactta

SEQ ID NO: 667832 - DNA, 19 bp, Mus musculus
  siRNA target sequence for 1200014P03Rik (NM_029091.1,1836-1854).
gcctcgctgaactacttaa

SEQ ID NO: 667833 - DNA, 19 bp, Mus musculus
  siRNA target sequence for 3632410F03Rik (NM_028721.1,99-117).
ctctgcctcatcaacgtta

SEQ ID NO: 667834 - DNA, 19 bp, Mus musculus
  siRNA target sequence for 3632410F03Rik (NM_028721.1,103-121).
gcctcatcaacgttagtca

SEQ ID NO: 667835 - DNA, 19 bp, Mus musculus
  siRNA target sequence for 3632410F03Rik (NM_028721.1,107-125).
catcaacgttagtcacaat

SEQ ID NO: 667836 - DNA, 19 bp, Mus musculus
  siRNA target sequence for 3632410F03Rik (NM_028721.1,192-210).
gttcacagtttacacaaaa

SEQ ID NO: 667837 - DNA, 19 bp, Mus musculus
  siRNA target sequence for 3632410F03Rik (NM_028721.1,300-318).
gccctcgtgtcttcatata

SEQ ID NO: 667838 - DNA, 19 bp, Mus musculus
  siRNA target sequence for 3632410F03Rik (NM_028721.1,310-328).
cttcatatagggaaaagct

SEQ ID NO: 667839 - DNA, 19 bp, Mus musculus
  siRNA target sequence for 3632410F03Rik (NM_028721.1,540-558).
gcgaccgagtactttgagt

SEQ ID NO: 667840 - DNA, 19 bp, Mus musculus
  siRNA target sequence for 3632410F03Rik (NM_028721.1,602-620).
gtgcctagccgacctatat

SEQ ID NO: 667841 - DNA, 19 bp, Mus musculus
  siRNA target sequence for 3632410F03Rik (NM_028721.1,604-622).
gcctagccgacctatatga

SEQ ID NO: 667842 - DNA, 19 bp, Mus musculus
  siRNA target sequence for 3632410F03Rik (NM_028721.1,605-623).
cctagccgacctatatgaa

SEQ ID NO: 667843 - DNA, 19 bp, Mus musculus
  siRNA target sequence for 3632410F03Rik (NM_028721.1,606-624).
ctagccgacctatatgaaa

SEQ ID NO: 667844 - DNA, 19 bp, Mus musculus
  siRNA target sequence for 3632410F03Rik (NM_028721.1,789-807).
gatgcggagcagctgtata

SEQ ID NO: 667845 - DNA, 19 bp, Mus musculus
  siRNA target sequence for 3632410F03Rik (NM_028721.1,908-926).
gtacgaacaagctgaacat

SEQ ID NO: 667846 - DNA, 19 bp, Mus musculus
  siRNA target sequence for 3632410F03Rik (NM_028721.1,1128-1146).
ctgaagcgttccttggaaa

SEQ ID NO: 667847 - DNA, 19 bp, Mus musculus
  siRNA target sequence for 3632410F03Rik (NM_028721.1,1183-1201).
gcgcacagtccctgaataa

SEQ ID NO: 667848 - DNA, 19 bp, Mus musculus
  siRNA target sequence for 3632410F03Rik (NM_028721.1,1186-1204).
cacagtccctgaataacct

SEQ ID NO: 667849 - DNA, 19 bp, Mus musculus
  siRNA target sequence for 3632410F03Rik (NM_028721.1,1206-1224).
gcagctctttgcaatgaga

SEQ ID NO: 667850 - DNA, 19 bp, Mus musculus
  siRNA target sequence for 3632410F03Rik (NM_028721.1,1318-1336).
ccgtgaagcaccttgcaat

SEQ ID NO: 667851 - DNA, 19 bp, Mus musculus
  siRNA target sequence for 3632410F03Rik (NM_028721.1,1326-1344).
caccttgcaatcttgtata

SEQ ID NO: 667852 - DNA, 19 bp, Mus musculus
  siRNA target sequence for 3632410F03Rik (NM_028721.1,1329-1347).
cttgcaatcttgtataaga

SEQ ID NO: 667853 - DNA, 19 bp, Mus musculus
  siRNA target sequence for 3632410F03Rik (NM_028721.1,1368-1386).
gctgtacctctgtatgaat

SEQ ID NO: 667854 - DNA, 19 bp, Mus musculus
  siRNA target sequence for 3632410F03Rik (NM_028721.1,1369-1387).
ctgtacctctgtatgaatt

SEQ ID NO: 667855 - DNA, 19 bp, Mus musculus
  siRNA target sequence for 3632410F03Rik (NM_028721.1,1379-1397).
gtatgaattggctgttgaa

SEQ ID NO: 667856 - DNA, 19 bp, Mus musculus
  siRNA target sequence for 3632410F03Rik (NM_028721.1,1392-1410).
gttgaaattcggcagaaat

SEQ ID NO: 667857 - DNA, 19 bp, Mus musculus
  siRNA target sequence for 3632410F03Rik (NM_028721.1,1434-1452).
gtagctactgccttggtaa

SEQ ID NO: 667858 - DNA, 19 bp, Mus musculus
  siRNA target sequence for 3632410F03Rik (NM_028721.1,1437-1455).
gctactgccttggtaaact

SEQ ID NO: 667859 - DNA, 19 bp, Mus musculus
  siRNA target sequence for 3632410F03Rik (NM_028721.1,1438-1456).
ctactgccttggtaaactt

SEQ ID NO: 667860 - DNA, 19 bp, Mus musculus
  siRNA target sequence for 3632410F03Rik (NM_028721.1,1496-1514).
cctgccactatatgaaaga

SEQ ID NO: 667861 - DNA, 19 bp, Mus musculus
  siRNA target sequence for 3632410F03Rik (NM_028721.1,1503-1521).
ctatatgaaagagcattaa

SEQ ID NO: 667862 - DNA, 19 bp, Mus musculus
  siRNA target sequence for 3632410F03Rik (NM_028721.1,1554-1572).
cctcgagttggagaaacat

SEQ ID NO: 667863 - DNA, 19 bp, Mus musculus
  siRNA target sequence for 3632410F03Rik (NM_028721.1,1555-1573).
ctcgagttggagaaacatt

SEQ ID NO: 667864 - DNA, 19 bp, Mus musculus
  siRNA target sequence for 3632410F03Rik (NM_028721.1,1557-1575).
cgagttggagaaacattga

SEQ ID NO: 667865 - DNA, 19 bp, Mus musculus
  siRNA target sequence for 3632410F03Rik (NM_028721.1,1639-1657).
gggcaatggagataaaaga

SEQ ID NO: 667866 - DNA, 19 bp, Mus musculus
  siRNA target sequence for 3632410F03Rik (NM_028721.1,1689-1707).
ccttcaaggcagtcatcaa

SEQ ID NO: 667867 - DNA, 19 bp, Mus musculus
  siRNA target sequence for 4432416O06Rik (NM_029851.1,257-275).
cttgctagtgctgaaagaa

SEQ ID NO: 667868 - DNA, 19 bp, Mus musculus
  siRNA target sequence for 4432416O06Rik (NM_029851.1,311-329).
ggtcaagctgatttagcaa

SEQ ID NO: 667869 - DNA, 19 bp, Mus musculus
  siRNA target sequence for 4432416O06Rik (NM_029851.1,359-377).
ggagattggctctgtttga

SEQ ID NO: 667870 - DNA, 19 bp, Mus musculus
  siRNA target sequence for 4432416O06Rik (NM_029851.1,418-436).
gaaggaattgaatactctt

SEQ ID NO: 667871 - DNA, 19 bp, Mus musculus
  siRNA target sequence for 4432416O06Rik (NM_029851.1,460-478).
gtggctcactgcagaagtt

SEQ ID NO: 667872 - DNA, 19 bp, Mus musculus
  siRNA target sequence for 4432416O06Rik (NM_029851.1,473-491).
gaagttcatcccaacttta

SEQ ID NO: 667873 - DNA, 19 bp, Mus musculus
  siRNA target sequence for 4432416O06Rik (NM_029851.1,483-501).
ccaactttacccccatatt

SEQ ID NO: 667874 - DNA, 19 bp, Mus musculus
  siRNA target sequence for 4432416O06Rik (NM_029851.1,484-502).
caactttacccccatatta

SEQ ID NO: 667875 - DNA, 19 bp, Mus musculus
  siRNA target sequence for 4432416O06Rik (NM_029851.1,494-512).
cccatattactccaatcaa

SEQ ID NO: 667876 - DNA, 19 bp, Mus musculus
  siRNA target sequence for 4432416O06Rik (NM_029851.1,515-533).
ctgaagataacatatgagt

SEQ ID NO: 667877 - DNA, 19 bp, Mus musculus
  siRNA target sequence for 4432416O06Rik (NM_029851.1,553-571).
gaatttgatgcgcacttat

SEQ ID NO: 667878 - DNA, 19 bp, Mus musculus
  siRNA target sequence for 4432416O06Rik (NM_029851.1,616-634).
ccgagctcatgctcttttt

SEQ ID NO: 667879 - DNA, 19 bp, Mus musculus
  siRNA target sequence for 4432416O06Rik (NM_029851.1,617-635).
cgagctcatgctcttttta

SEQ ID NO: 667880 - DNA, 19 bp, Mus musculus
  siRNA target sequence for 4432416O06Rik (NM_029851.1,620-638).
gctcatgctctttttagct

SEQ ID NO: 667881 - DNA, 19 bp, Mus musculus
  siRNA target sequence for 4432416O06Rik (NM_029851.1,626-644).
gctctttttagcttagcat

SEQ ID NO: 667882 - DNA, 19 bp, Mus musculus
  siRNA target sequence for 4432416O06Rik (NM_029851.1,688-706).
gggttggaccaagttttat

SEQ ID NO: 667883 - DNA, 19 bp, Mus musculus
  siRNA target sequence for 4432416O06Rik (NM_029851.1,693-711).
ggaccaagttttatgagtt

SEQ ID NO: 667884 - DNA, 19 bp, Mus musculus
  siRNA target sequence for 4432416O06Rik (NM_029851.1,694-712).
gaccaagttttatgagttt

SEQ ID NO: 667885 - DNA, 19 bp, Mus musculus
  siRNA target sequence for 4432416O06Rik (NM_029851.1,754-772).
gctcttcgatggtaccaaa

SEQ ID NO: 667886 - DNA, 19 bp, Mus musculus
  siRNA target sequence for 4432416O06Rik (NM_029851.1,757-775).
cttcgatggtaccaaagat

SEQ ID NO: 667887 - DNA, 19 bp, Mus musculus
  siRNA target sequence for 4432416O06Rik (NM_029851.1,760-778).
cgatggtaccaaagatgta

SEQ ID NO: 667888 - DNA, 19 bp, Mus musculus
  siRNA target sequence for 4432416O06Rik (NM_029851.1,796-814).
cggcttacttgaaaattct

SEQ ID NO: 667889 - DNA, 19 bp, Mus musculus
  siRNA target sequence for 4432416O06Rik (NM_029851.1,821-839).
ggaggacgtgtagataact

SEQ ID NO: 667890 - DNA, 19 bp, Mus musculus
  siRNA target sequence for 4432416O06Rik (NM_029851.1,822-840).
gaggacgtgtagataacta

SEQ ID NO: 667891 - DNA, 19 bp, Mus musculus
  siRNA target sequence for 4432416O06Rik (NM_029851.1,824-842).
ggacgtgtagataactatt

SEQ ID NO: 667892 - DNA, 19 bp, Mus musculus
  siRNA target sequence for 4432416O06Rik (NM_029851.1,825-843).
gacgtgtagataactattt

SEQ ID NO: 667893 - DNA, 19 bp, Mus musculus
  siRNA target sequence for 4432416O06Rik (NM_029851.1,874-892).
gcagttttttaattcttca

SEQ ID NO: 667894 - DNA, 19 bp, Mus musculus
  siRNA target sequence for 4432416O06Rik (NM_029851.1,953-971).
ccaaactcgtgcagcattt

SEQ ID NO: 667895 - DNA, 19 bp, Mus musculus
  siRNA target sequence for 4432416O06Rik (NM_029851.1,1111-1129).
ggtcacagccggttgcaaa

SEQ ID NO: 667896 - DNA, 19 bp, Mus musculus
  siRNA target sequence for 4432416O06Rik (NM_029851.1,1112-1130).
gtcacagccggttgcaaat

SEQ ID NO: 667897 - DNA, 19 bp, Mus musculus
  siRNA target sequence for 4432416O06Rik (NM_029851.1,1118-1136).
gccggttgcaaatttgaca

SEQ ID NO: 667898 - DNA, 19 bp, Mus musculus
  siRNA target sequence for 4432416O06Rik (NM_029851.1,1125-1143).
gcaaatttgacagagaaat

SEQ ID NO: 667899 - DNA, 19 bp, Mus musculus
  siRNA target sequence for 4432416O06Rik (NM_029851.1,1137-1155).
gagaaatctggtctaatga

SEQ ID NO: 667900 - DNA, 19 bp, Mus musculus
  siRNA target sequence for 4432416O06Rik (NM_029851.1,1144-1162).
ctggtctaatgaactttct

SEQ ID NO: 667901 - DNA, 19 bp, Mus musculus
  siRNA target sequence for 4432416O06Rik (NM_029851.1,1164-1182).
cagttctgaatctttggaa

SEQ ID NO: 667902 - DNA, 19 bp, Mus musculus
  siRNA target sequence for 4432416O06Rik (NM_029851.1,1192-1210).
ccagaattcaaacctaatt

SEQ ID NO: 667903 - DNA, 19 bp, Mus musculus
  siRNA target sequence for 4432416O06Rik (NM_029851.1,1204-1222).
cctaattcatcaaaaagta

SEQ ID NO: 667904 - DNA, 19 bp, Mus musculus
  siRNA target sequence for 4432416O06Rik (NM_029851.1,1241-1259).
caaggatctccaatattat

SEQ ID NO: 667905 - DNA, 19 bp, Mus musculus
  siRNA target sequence for 4432416O06Rik (NM_029851.1,1244-1262).
ggatctccaatattatcgt

SEQ ID NO: 667906 - DNA, 19 bp, Mus musculus
  siRNA target sequence for 4432416O06Rik (NM_029851.1,1245-1263).
gatctccaatattatcgtt

SEQ ID NO: 667907 - DNA, 19 bp, Mus musculus
  siRNA target sequence for 4432416O06Rik (NM_029851.1,1250-1268).
ccaatattatcgttcatca

SEQ ID NO: 667908 - DNA, 19 bp, Mus musculus
  siRNA target sequence for 4432416O06Rik (NM_029851.1,1251-1269).
caatattatcgttcatcat

SEQ ID NO: 667909 - DNA, 19 bp, Mus musculus
  siRNA target sequence for 4432416O06Rik (NM_029851.1,1267-1285).
cattcttgagcagttcaat

SEQ ID NO: 667910 - DNA, 19 bp, Mus musculus
  siRNA target sequence for 4432416O06Rik (NM_029851.1,1286-1304).
gccatccgcttggtacaaa

SEQ ID NO: 667911 - DNA, 19 bp, Mus musculus
  siRNA target sequence for 4432416O06Rik (NM_029851.1,1288-1306).
catccgcttggtacaaagt

SEQ ID NO: 667912 - DNA, 19 bp, Mus musculus
  siRNA target sequence for 4432416O06Rik (NM_029851.1,1339-1357).
catcaggggaactacttta

SEQ ID NO: 667913 - DNA, 19 bp, Mus musculus
  siRNA target sequence for 4432416O06Rik (NM_029851.1,1479-1497).
gaacccttgcaattcagaa

SEQ ID NO: 667914 - DNA, 19 bp, Mus musculus
  siRNA target sequence for 4432416O06Rik (NM_029851.1,1561-1579).
ccatccggacacattcctt

SEQ ID NO: 667915 - DNA, 19 bp, Mus musculus
  siRNA target sequence for 4432416O06Rik (NM_029851.1,1567-1585).
ggacacattccttaatgct

SEQ ID NO: 667916 - DNA, 19 bp, Mus musculus
  siRNA target sequence for 4432416O06Rik (NM_029851.1,1826-1844).
cctgatgagtgcatctctt

SEQ ID NO: 667917 - DNA, 19 bp, Mus musculus
  siRNA target sequence for 4432416O06Rik (NM_029851.1,1836-1854).
gcatctctttgcctgttta

SEQ ID NO: 667918 - DNA, 19 bp, Mus musculus
  siRNA target sequence for 4432416O06Rik (NM_029851.1,1879-1897).
ggtgaccaacattgatgtt

SEQ ID NO: 667919 - DNA, 19 bp, Mus musculus
  siRNA target sequence for 4432416O06Rik (NM_029851.1,1936-1954).
ggcagcgctgtttcttaaa

SEQ ID NO: 667920 - DNA, 19 bp, Mus musculus
  siRNA target sequence for 4432416O06Rik (NM_029851.1,1937-1955).
gcagcgctgtttcttaaaa

SEQ ID NO: 667921 - DNA, 19 bp, Mus musculus
  siRNA target sequence for 6720463E02Rik (NM_026556.2,381-399).
gacattgctgcctatatca

SEQ ID NO: 667922 - DNA, 19 bp, Mus musculus
  siRNA target sequence for 6720463E02Rik (NM_026556.2,479-497).
gacaaagcacttcatctat

SEQ ID NO: 667923 - DNA, 19 bp, Mus musculus
  siRNA target sequence for B230373P09Rik (NM_177336.2,1232-1250).
ctgctgtgtgtccgtatta

SEQ ID NO: 667924 - DNA, 19 bp, Mus musculus
  siRNA target sequence for B230373P09Rik (NM_177336.2,1239-1257).
gtgtccgtattatgatgaa

SEQ ID NO: 667925 - DNA, 19 bp, Mus musculus
  siRNA target sequence for B230373P09Rik (NM_177336.2,1277-1295).
gctgagtggcgctatctct

SEQ ID NO: 667926 - DNA, 19 bp, Mus musculus
  siRNA target sequence for B230373P09Rik (NM_177336.2,1278-1296).
ctgagtggcgctatctctt

SEQ ID NO: 667927 - DNA, 19 bp, Mus musculus
  siRNA target sequence for B230373P09Rik (NM_177336.2,1335-1353).
caccacagtggctatcaga

SEQ ID NO: 667928 - DNA, 19 bp, Mus musculus
  siRNA target sequence for B230373P09Rik (NM_177336.2,1591-1609).
cctggaaccccgcttcatt

SEQ ID NO: 667929 - DNA, 19 bp, Mus musculus
  siRNA target sequence for B230373P09Rik (NM_177336.2,1613-1631).
ccccagacagccaatctgt

SEQ ID NO: 667930 - DNA, 19 bp, Mus musculus
  siRNA target sequence for B230373P09Rik (NM_177336.2,1821-1839).
gcaagtgggtcttctttca

SEQ ID NO: 667931 - DNA, 19 bp, Mus musculus
  siRNA target sequence for B230373P09Rik (NM_177336.2,1880-1898).
cgtctcatcgagcatatca

SEQ ID NO: 667932 - DNA, 19 bp, Mus musculus
  siRNA target sequence for B230373P09Rik (NM_177336.2,1881-1899).
gtctcatcgagcatatcaa

SEQ ID NO: 667933 - DNA, 19 bp, Mus musculus
  siRNA target sequence for B230373P09Rik (NM_177336.2,2012-2030).
ggcgtcaaagccaatctgt

SEQ ID NO: 667934 - DNA, 19 bp, Mus musculus
  siRNA target sequence for B230373P09Rik (NM_177336.2,2013-2031).
gcgtcaaagccaatctgtt

SEQ ID NO: 667935 - DNA, 19 bp, Mus musculus
  siRNA target sequence for B230373P09Rik (NM_177336.2,2027-2045).
ctgttgaagtcctacaaca

SEQ ID NO: 667936 - DNA, 19 bp, Mus musculus
  siRNA target sequence for B230373P09Rik (NM_177336.2,2132-2150).
gcacttgaacgccgtaaat

SEQ ID NO: 667937 - DNA, 19 bp, Mus musculus
  siRNA target sequence for B230373P09Rik (NM_177336.2,2133-2151).
cacttgaacgccgtaaatt

SEQ ID NO: 667938 - DNA, 19 bp, Mus musculus
  siRNA target sequence for B230373P09Rik (NM_177336.2,2208-2226).
gcattagccagctcaagat

SEQ ID NO: 667939 - DNA, 19 bp, Mus musculus
  siRNA target sequence for B230373P09Rik (NM_177336.2,2245-2263).
ggacatcccctataaggtt

SEQ ID NO: 667940 - DNA, 19 bp, Mus musculus
  siRNA target sequence for B230373P09Rik (NM_177336.2,2253-2271).
cctataaggttctcaagta

SEQ ID NO: 667941 - DNA, 19 bp, Mus musculus
  siRNA target sequence for B230373P09Rik (NM_177336.2,2321-2339).
cgccgttgtgtcatgaaca

SEQ ID NO: 667942 - DNA, 19 bp, Mus musculus
  siRNA target sequence for B230373P09Rik (NM_177336.2,2424-2442).
cctatgacctcaatggata

SEQ ID NO: 667943 - DNA, 19 bp, Mus musculus
  siRNA target sequence for B230373P09Rik (NM_177336.2,2438-2456).
ggatacctctcctacatca

SEQ ID NO: 667944 - DNA, 19 bp, Mus musculus
  siRNA target sequence for B230373P09Rik (NM_177336.2,2439-2457).
gatacctctcctacatcaa

SEQ ID NO: 667945 - DNA, 19 bp, Mus musculus
  siRNA target sequence for B230373P09Rik (NM_177336.2,2455-2473).
caagagccttcctctcaat

SEQ ID NO: 667946 - DNA, 19 bp, Mus musculus
  siRNA target sequence for B230373P09Rik (NM_177336.2,2460-2478).
gccttcctctcaatgacat

SEQ ID NO: 667947 - DNA, 19 bp, Mus musculus
  siRNA target sequence for B230373P09Rik (NM_177336.2,2470-2488).
caatgacatgcctgagatt

SEQ ID NO: 667948 - DNA, 19 bp, Mus musculus
  siRNA target sequence for B230373P09Rik (NM_177336.2,2498-2516).
catgacaacgccaacatca

SEQ ID NO: 667949 - DNA, 19 bp, Mus musculus
  siRNA target sequence for B230373P09Rik (NM_177336.2,2693-2711).
ctgtacgaggagtcaatga

SEQ ID NO: 667950 - DNA, 19 bp, Mus musculus
  siRNA target sequence for B230373P09Rik (NM_177336.2,2723-2741).
gtacaagaggtcattaggt

SEQ ID NO: 667951 - DNA, 19 bp, Mus musculus
  siRNA target sequence for B230373P09Rik (NM_177336.2,2729-2747).
gaggtcattaggtacaaca

SEQ ID NO: 667952 - DNA, 19 bp, Mus musculus
  siRNA target sequence for B230373P09Rik (NM_177336.2,2780-2798).
gacatgctcaaggcaatta

SEQ ID NO: 667953 - DNA, 19 bp, Mus musculus
  siRNA target sequence for B230373P09Rik (NM_177336.2,2936-2954).
cgcctggacttcatgcatt

SEQ ID NO: 667954 - DNA, 19 bp, Mus musculus
  siRNA target sequence for B230373P09Rik (NM_177336.2,3024-3042).
caggcactctacagaactt

SEQ ID NO: 667955 - DNA, 19 bp, Mus musculus
  siRNA target sequence for B230373P09Rik (NM_177336.2,3047-3065).
cgaaagttcgtcatctcta

SEQ ID NO: 667956 - DNA, 19 bp, Mus musculus
  siRNA target sequence for B230373P09Rik (NM_177336.2,3048-3066).
gaaagttcgtcatctctat

SEQ ID NO: 667957 - DNA, 19 bp, Mus musculus
  siRNA target sequence for B230373P09Rik (NM_177336.2,3072-3090).
ccatcacctttgatttcaa

SEQ ID NO: 667958 - DNA, 19 bp, Mus musculus
  siRNA target sequence for B230373P09Rik (NM_177336.2,3098-3116).
cccgaggcgtcatcagaaa

SEQ ID NO: 667959 - DNA, 19 bp, Mus musculus
  siRNA target sequence for B230373P09Rik (NM_177336.2,3099-3117).
ccgaggcgtcatcagaaat

SEQ ID NO: 667960 - DNA, 19 bp, Mus musculus
  siRNA target sequence for B230373P09Rik (NM_177336.2,3100-3118).
cgaggcgtcatcagaaatt

SEQ ID NO: 667961 - DNA, 19 bp, Mus musculus
  siRNA target sequence for B230373P09Rik (NM_177336.2,3101-3119).
gaggcgtcatcagaaatta

SEQ ID NO: 667962 - DNA, 19 bp, Mus musculus
  siRNA target sequence for B230373P09Rik (NM_177336.2,3173-3191).
cgctgggactccatgaatt

SEQ ID NO: 667963 - DNA, 19 bp, Mus musculus
  siRNA target sequence for B230373P09Rik (NM_177336.2,3174-3192).
gctgggactccatgaattt

SEQ ID NO: 667964 - DNA, 19 bp, Mus musculus
  siRNA target sequence for B230373P09Rik (NM_177336.2,3209-3227).
cggcccaaagagctgtata

SEQ ID NO: 667965 - DNA, 19 bp, Mus musculus
  siRNA target sequence for B230373P09Rik (NM_177336.2,3246-3264).
ggctcttgccagaagctaa

SEQ ID NO: 667966 - DNA, 19 bp, Mus musculus
  siRNA target sequence for B230373P09Rik (NM_177336.2,3392-3410).
cctcagcgacactggataa

SEQ ID NO: 667967 - DNA, 19 bp, Mus musculus
  siRNA target sequence for BC017147 (NM_146182.1,392-410).
ctagcccaagagaacacat

SEQ ID NO: 667968 - DNA, 19 bp, Mus musculus
  siRNA target sequence for BC017147 (NM_146182.1,1161-1179).
ggccacaggacccaaatgt

SEQ ID NO: 667969 - DNA, 19 bp, Mus musculus
  siRNA target sequence for BC017147 (NM_146182.1,1172-1190).
ccaaatgtggccaagacta

SEQ ID NO: 667970 - DNA, 19 bp, Mus musculus
  siRNA target sequence for BC017147 (NM_146182.1,1308-1326).
gcacagcaggcgatacaca

SEQ ID NO: 667971 - DNA, 19 bp, Mus musculus
  siRNA target sequence for BC017147 (NM_146182.1,1359-1377).
ctaagctccgggaatccat

SEQ ID NO: 667972 - DNA, 19 bp, Mus musculus
  siRNA target sequence for BC017147 (NM_146182.1,1449-1467).
gagccatgtcactcaatat

SEQ ID NO: 667973 - DNA, 19 bp, Mus musculus
  siRNA target sequence for BC017147 (NM_146182.1,1452-1470).
ccatgtcactcaatatgct

SEQ ID NO: 667974 - DNA, 19 bp, Mus musculus
  siRNA target sequence for BC017147 (NM_146182.1,1552-1570).
gagcatcagcacacaagat

SEQ ID NO: 667975 - DNA, 19 bp, Mus musculus
  siRNA target sequence for BC017147 (NM_146182.1,1554-1572).
gcatcagcacacaagatct

SEQ ID NO: 667976 - DNA, 19 bp, Mus musculus
  siRNA target sequence for Klc2 (NM_008451.1,202-220).
cggtgatccagggtttaga

SEQ ID NO: 667977 - DNA, 19 bp, Mus musculus
  siRNA target sequence for Klc2 (NM_008451.1,204-222).
gtgatccagggtttagaga

SEQ ID NO: 667978 - DNA, 19 bp, Mus musculus
  siRNA target sequence for Klc2 (NM_008451.1,537-555).
cagcacctgctattcatga

SEQ ID NO: 667979 - DNA, 19 bp, Mus musculus
  siRNA target sequence for Klc2 (NM_008451.1,930-948).
ctggctatccgggaaaaga

SEQ ID NO: 667980 - DNA, 19 bp, Mus musculus
  siRNA target sequence for Klc2 (NM_008451.1,932-950).
ggctatccgggaaaagaca

SEQ ID NO: 667981 - DNA, 19 bp, Mus musculus
  siRNA target sequence for Klc2 (NM_008451.1,1008-1026).
ggcaaacggggcaagtaca

SEQ ID NO: 667982 - DNA, 19 bp, Mus musculus
  siRNA target sequence for Klc2 (NM_008451.1,1009-1027).
gcaaacggggcaagtacaa

SEQ ID NO: 667983 - DNA, 19 bp, Mus musculus
  siRNA target sequence for Klc2 (NM_008451.1,1595-1613).
caaggtggtagaactgtta

SEQ ID NO: 667984 - DNA, 19 bp, Mus musculus
  siRNA target sequence for Klc2 (NM_008451.1,1860-1878).
cttaacttccttaacaaga

SEQ ID NO: 667985 - DNA, 19 bp, Mus musculus
  siRNA target sequence for Kns2 (NM_008450.1,115-133).
catggtgtacataaaggaa

SEQ ID NO: 667986 - DNA, 19 bp, Mus musculus
  siRNA target sequence for Kns2 (NM_008450.1,883-901).
cagggatcagaacaagtat

SEQ ID NO: 667987 - DNA, 19 bp, Mus musculus
  siRNA target sequence for Kns2 (NM_008450.1,885-903).
gggatcagaacaagtataa

SEQ ID NO: 667988 - DNA, 19 bp, Mus musculus
  siRNA target sequence for Kns2 (NM_008450.1,886-904).
ggatcagaacaagtataaa

SEQ ID NO: 667989 - DNA, 19 bp, Mus musculus
  siRNA target sequence for Kns2 (NM_008450.1,932-950).
ctggctatccgcgagaaaa

SEQ ID NO: 667990 - DNA, 19 bp, Mus musculus
  siRNA target sequence for Kns2 (NM_008450.1,1010-1028).
ggtaagcgagggaagtaca

SEQ ID NO: 667991 - DNA, 19 bp, Mus musculus
  siRNA target sequence for Kns2 (NM_008450.1,1033-1051).
ggcggagccgctgtgtaaa

SEQ ID NO: 667992 - DNA, 19 bp, Mus musculus
  siRNA target sequence for Kns2 (NM_008450.1,1036-1054).
ggagccgctgtgtaaacga

SEQ ID NO: 667993 - DNA, 19 bp, Mus musculus
  siRNA target sequence for Kns2 (NM_008450.1,1094-1112).
cctgatgttgccaaacagt

SEQ ID NO: 667994 - DNA, 19 bp, Mus musculus
  siRNA target sequence for Kns2 (NM_008450.1,1153-1171).
cgaggaggtggagtattat

SEQ ID NO: 667995 - DNA, 19 bp, Mus musculus
  siRNA target sequence for Kns2 (NM_008450.1,1255-1273).
ctcctgttatctgaaacaa

SEQ ID NO: 667996 - DNA, 19 bp, Mus musculus
  siRNA target sequence for Kns2 (NM_008450.1,1414-1432).
ggacgggtcggcttttgga

SEQ ID NO: 667997 - DNA, 19 bp, Mus musculus
  siRNA target sequence for Kns2 (NM_008450.1,1513-1531).
ccgacggcaggggaagttt

SEQ ID NO: 667998 - DNA, 19 bp, Mus musculus
  siRNA target sequence for Kns2 (NM_008450.1,1515-1533).
gacggcaggggaagtttga

SEQ ID NO: 667999 - DNA, 19 bp, Mus musculus
  siRNA target sequence for Kns2 (NM_008450.1,1605-1623).
gagtggctgaagtgctaaa

SEQ ID NO: 668000 - DNA, 19 bp, Mus musculus
  siRNA target sequence for Kns2 (NM_008450.1,1653-1671).
gccgggagagtctcaatat

SEQ ID NO: 668001 - DNA, 19 bp, Mus musculus
  siRNA target sequence for 2310042E05Rik (NM_027151.1,141-159).
ggaatgagccagacgttta

SEQ ID NO: 668002 - DNA, 19 bp, Mus musculus
  siRNA target sequence for 2310042E05Rik (NM_027151.1,142-160).
gaatgagccagacgtttat

SEQ ID NO: 668003 - DNA, 19 bp, Mus musculus
  siRNA target sequence for 2310042E05Rik (NM_027151.1,219-237).
gcacaagcgtggaacacat

SEQ ID NO: 668004 - DNA, 19 bp, Mus musculus
  siRNA target sequence for 2310042E05Rik (NM_027151.1,222-240).
caagcgtggaacacatcat

SEQ ID NO: 668005 - DNA, 19 bp, Mus musculus
  siRNA target sequence for 2310042E05Rik (NM_027151.1,225-243).
gcgtggaacacatcattgt

SEQ ID NO: 668006 - DNA, 19 bp, Mus musculus
  siRNA target sequence for 2310042E05Rik (NM_027151.1,254-272).
gctgcctacgacaagttca

SEQ ID NO: 668007 - DNA, 19 bp, Mus musculus
  siRNA target sequence for 2310042E05Rik (NM_027151.1,255-273).
ctgcctacgacaagttcaa

SEQ ID NO: 668008 - DNA, 19 bp, Mus musculus
  siRNA target sequence for 2310042E05Rik (NM_027151.1,606-624).
cagacggagccctagctaa

SEQ ID NO: 668009 - DNA, 19 bp, Mus musculus
  siRNA target sequence for 2310042E05Rik (NM_027151.1,709-727).
cagcctggtcacctatgaa

SEQ ID NO: 668010 - DNA, 19 bp, Mus musculus
  siRNA target sequence for 2310042E05Rik (NM_027151.1,757-775).
ctctcaagctgccaaagtt

SEQ ID NO: 668011 - DNA, 19 bp, Mus musculus
  siRNA target sequence for 2310042E05Rik (NM_027151.1,1028-1046).
gtgcaccagctctatgaga

SEQ ID NO: 668012 - DNA, 19 bp, Mus musculus
  siRNA target sequence for 2310042E05Rik (NM_027151.1,1183-1201).
ggccagttcccttaaggat

SEQ ID NO: 668013 - DNA, 19 bp, Mus musculus
  siRNA target sequence for 2310042E05Rik (NM_027151.1,1185-1203).
ccagttcccttaaggataa

SEQ ID NO: 668014 - DNA, 19 bp, Mus musculus
  siRNA target sequence for 2310042E05Rik (NM_027151.1,1186-1204).
cagttcccttaaggataat

SEQ ID NO: 668015 - DNA, 19 bp, Mus musculus
  siRNA target sequence for 2310042E05Rik (NM_027151.1,1230-1248).
caacgatgcgtgaaaactt

SEQ ID NO: 668016 - DNA, 19 bp, Mus musculus
  siRNA target sequence for Dctn1 (NM_007835.1,1048-1066).
ggctgaaatcgaagagaaa

SEQ ID NO: 668017 - DNA, 19 bp, Mus musculus
  siRNA target sequence for Dctn1 (NM_007835.1,1350-1368).
ccgaccggaacctgaatct

SEQ ID NO: 668018 - DNA, 19 bp, Mus musculus
  siRNA target sequence for Dctn1 (NM_007835.1,1351-1369).
cgaccggaacctgaatcta

SEQ ID NO: 668019 - DNA, 19 bp, Mus musculus
  siRNA target sequence for Dctn1 (NM_007835.1,1594-1612).
ccacctacaggatgtcaat

SEQ ID NO: 668020 - DNA, 19 bp, Mus musculus
  siRNA target sequence for Dctn1 (NM_007835.1,1665-1683).
cgccagagacttttgattt

SEQ ID NO: 668021 - DNA, 19 bp, Mus musculus
  siRNA target sequence for Dctn1 (NM_007835.1,1849-1867).
gctcatgccccgactcatt

SEQ ID NO: 668022 - DNA, 19 bp, Mus musculus
  siRNA target sequence for Dctn1 (NM_007835.1,1850-1868).
ctcatgccccgactcattt

SEQ ID NO: 668023 - DNA, 19 bp, Mus musculus
  siRNA target sequence for Dctn1 (NM_007835.1,2101-2119).
ccacgagcgctccttagat

SEQ ID NO: 668024 - DNA, 19 bp, Mus musculus
  siRNA target sequence for Dctn1 (NM_007835.1,2102-2120).
cacgagcgctccttagatt

SEQ ID NO: 668025 - DNA, 19 bp, Mus musculus
  siRNA target sequence for Dctn1 (NM_007835.1,2371-2389).
ccgagacctggaaacatca

SEQ ID NO: 668026 - DNA, 19 bp, Mus musculus
  siRNA target sequence for Dctn1 (NM_007835.1,2372-2390).
cgagacctggaaacatcat

SEQ ID NO: 668027 - DNA, 19 bp, Mus musculus
  siRNA target sequence for Dctn1 (NM_007835.1,2377-2395).
cctggaaacatcatgtagt

SEQ ID NO: 668028 - DNA, 19 bp, Mus musculus
  siRNA target sequence for Dctn1 (NM_007835.1,2705-2723).
ctcatcagcacgatgaaca

SEQ ID NO: 668029 - DNA, 19 bp, Mus musculus
  siRNA target sequence for Dctn1 (NM_007835.1,2779-2797).
gcctcctccggttgaactt

SEQ ID NO: 668030 - DNA, 19 bp, Mus musculus
  siRNA target sequence for Dctn1 (NM_007835.1,2855-2873).
gaggatcgagagacagtta

SEQ ID NO: 668031 - DNA, 19 bp, Mus musculus
  siRNA target sequence for Dctn1 (NM_007835.1,2858-2876).
gatcgagagacagttatca

SEQ ID NO: 668032 - DNA, 19 bp, Mus musculus
  siRNA target sequence for Dctn1 (NM_007835.1,2983-3001).
cgagcgaatcgagaaagtt

SEQ ID NO: 668033 - DNA, 19 bp, Mus musculus
  siRNA target sequence for Dctn1 (NM_007835.1,3404-3422).
ctgcatgttgcaaagcttt

SEQ ID NO: 668034 - DNA, 19 bp, Mus musculus
  siRNA target sequence for Dctn1 (NM_007835.1,3526-3544).
ccacgtggtggatatcact

SEQ ID NO: 668035 - DNA, 19 bp, Mus musculus
  siRNA target sequence for Dctn1 (NM_007835.1,3567-3585).
gcccgtcagctcagcttat

SEQ ID NO: 668036 - DNA, 19 bp, Mus musculus
  siRNA target sequence for Dncic2 (NM_010064.1,80-98).
gtcggacaaaagtgattta

SEQ ID NO: 668037 - DNA, 19 bp, Mus musculus
  siRNA target sequence for Dncic2 (NM_010064.1,82-100).
cggacaaaagtgatttaaa

SEQ ID NO: 668038 - DNA, 19 bp, Mus musculus
  siRNA target sequence for Dncic2 (NM_010064.1,103-121).
ctgagttggaacgtaagaa

SEQ ID NO: 668039 - DNA, 19 bp, Mus musculus
  siRNA target sequence for Dncic2 (NM_010064.1,123-141).
caacggttggcccaaatca

SEQ ID NO: 668040 - DNA, 19 bp, Mus musculus
  siRNA target sequence for Dncic2 (NM_010064.1,222-240).
gaagagtctgatcttgaaa

SEQ ID NO: 668041 - DNA, 19 bp, Mus musculus
  siRNA target sequence for Dncic2 (NM_010064.1,255-273).
gctgaggcattgcttcaaa

SEQ ID NO: 668042 - DNA, 19 bp, Mus musculus
  siRNA target sequence for Dncic2 (NM_010064.1,270-288).
caaagcatgggactaacta

SEQ ID NO: 668043 - DNA, 19 bp, Mus musculus
  siRNA target sequence for Dncic2 (NM_010064.1,286-304).
ctacggactcccctattgt

SEQ ID NO: 668044 - DNA, 19 bp, Mus musculus
  siRNA target sequence for Dncic2 (NM_010064.1,391-409).
ctagacgaggacctattaa

SEQ ID NO: 668045 - DNA, 19 bp, Mus musculus
  siRNA target sequence for Dncic2 (NM_010064.1,394-412).
gacgaggacctattaaact

SEQ ID NO: 668046 - DNA, 19 bp, Mus musculus
  siRNA target sequence for Dncic2 (NM_010064.1,411-429).
cttggaatggccaaaatta

SEQ ID NO: 668047 - DNA, 19 bp, Mus musculus
  siRNA target sequence for Dncic2 (NM_010064.1,419-437).
ggccaaaattactcaagtt

SEQ ID NO: 668048 - DNA, 19 bp, Mus musculus
  siRNA target sequence for Dncic2 (NM_010064.1,448-466).
ctcgagaaatcgtcacata

SEQ ID NO: 668049 - DNA, 19 bp, Mus musculus
  siRNA target sequence for Dncic2 (NM_010064.1,450-468).
cgagaaatcgtcacataca

SEQ ID NO: 668050 - DNA, 19 bp, Mus musculus
  siRNA target sequence for Dncic2 (NM_010064.1,453-471).
gaaatcgtcacatacacaa

SEQ ID NO: 668051 - DNA, 19 bp, Mus musculus
  siRNA target sequence for Dncic2 (NM_010064.1,458-476).
cgtcacatacacaaaggaa

SEQ ID NO: 668052 - DNA, 19 bp, Mus musculus
  siRNA target sequence for Dncic2 (NM_010064.1,587-605).
cgaagagaatgatagcaaa

SEQ ID NO: 668053 - DNA, 19 bp, Mus musculus
  siRNA target sequence for Dncic2 (NM_010064.1,606-624).
gctccacctcatgaactaa

SEQ ID NO: 668054 - DNA, 19 bp, Mus musculus
  siRNA target sequence for Dncic2 (NM_010064.1,680-698).
ccattctacgagaattgta

SEQ ID NO: 668055 - DNA, 19 bp, Mus musculus
  siRNA target sequence for Dncic2 (NM_010064.1,783-801).
ggtgctaagctgtcattaa

SEQ ID NO: 668056 - DNA, 19 bp, Mus musculus
  siRNA target sequence for Dncic2 (NM_010064.1,784-802).
gtgctaagctgtcattaaa

SEQ ID NO: 668057 - DNA, 19 bp, Mus musculus
  siRNA target sequence for Dncic2 (NM_010064.1,796-814).
cattaaatcgacagttctt

SEQ ID NO: 668058 - DNA, 19 bp, Mus musculus
  siRNA target sequence for Dncic2 (NM_010064.1,827-845).
gtcaaagcatcgagttgtt

SEQ ID NO: 668059 - DNA, 19 bp, Mus musculus
  siRNA target sequence for Dncic2 (NM_010064.1,833-851).
gcatcgagttgttagttgt

SEQ ID NO: 668060 - DNA, 19 bp, Mus musculus
  siRNA target sequence for Dncic2 (NM_010064.1,834-852).
catcgagttgttagttgtt

SEQ ID NO: 668061 - DNA, 19 bp, Mus musculus
  siRNA target sequence for Dncic2 (NM_010064.1,885-903).
gtggcttcctataataaca

SEQ ID NO: 668062 - DNA, 19 bp, Mus musculus
  siRNA target sequence for Dncic2 (NM_010064.1,887-905).
ggcttcctataataacaat

SEQ ID NO: 668063 - DNA, 19 bp, Mus musculus
  siRNA target sequence for Dncic2 (NM_010064.1,889-907).
cttcctataataacaatga

SEQ ID NO: 668064 - DNA, 19 bp, Mus musculus
  siRNA target sequence for Dncic2 (NM_010064.1,933-951).
gtggccctcgtgtggaata

SEQ ID NO: 668065 - DNA, 19 bp, Mus musculus
  siRNA target sequence for Dncic2 (NM_010064.1,936-954).
gccctcgtgtggaatatga

SEQ ID NO: 668066 - DNA, 19 bp, Mus musculus
  siRNA target sequence for Dncic2 (NM_010064.1,992-1010).
ccagtcagctgtaatgtct

SEQ ID NO: 668067 - DNA, 19 bp, Mus musculus
  siRNA target sequence for Dncic2 (NM_010064.1,1012-1030).
ctacatttgcaaaatttca

SEQ ID NO: 668068 - DNA, 19 bp, Mus musculus
  siRNA target sequence for Dncic2 (NM_010064.1,1080-1098).
gataaccgcagcaataaaa

SEQ ID NO: 668069 - DNA, 19 bp, Mus musculus
  siRNA target sequence for Dncic2 (NM_010064.1,1085-1103).
ccgcagcaataaaagaact

SEQ ID NO: 668070 - DNA, 19 bp, Mus musculus
  siRNA target sequence for Dncic2 (NM_010064.1,1183-1201).
ctcacaatctgattagcat

SEQ ID NO: 668071 - DNA, 19 bp, Mus musculus
  siRNA target sequence for Dncic2 (NM_010064.1,1246-1264).
cccatccacaggatagcat

SEQ ID NO: 668072 - DNA, 19 bp, Mus musculus
  siRNA target sequence for Dncic2 (NM_010064.1,1318-1336).
ctgttggagacgtcaacaa

SEQ ID NO: 668073 - DNA, 19 bp, Mus musculus
  siRNA target sequence for Dncic2 (NM_010064.1,1320-1338).
gttggagacgtcaacaact

SEQ ID NO: 668074 - DNA, 19 bp, Mus musculus
  siRNA target sequence for Dncic2 (NM_010064.1,1388-1406).
cagcaaagctggaatcagt

SEQ ID NO: 668075 - DNA, 19 bp, Mus musculus
  siRNA target sequence for Dncic2 (NM_010064.1,1487-1505).
gtttgtcacttcgtctttt

SEQ ID NO: 668076 - DNA, 19 bp, Mus musculus
  siRNA target sequence for Dncic2 (NM_010064.1,1491-1509).
gtcacttcgtcttttgact

SEQ ID NO: 668077 - DNA, 19 bp, Mus musculus
  siRNA target sequence for Dncic2 (NM_010064.1,1506-1524).
gactggacagttaaacttt

SEQ ID NO: 668078 - DNA, 19 bp, Mus musculus
  siRNA target sequence for Dncic2 (NM_010064.1,1525-1543).
ggacaactaagaataacaa

SEQ ID NO: 668079 - DNA, 19 bp, Mus musculus
  siRNA target sequence for Dncic2 (NM_010064.1,1546-1564).
ctttgtactcatttgaaga

SEQ ID NO: 668080 - DNA, 19 bp, Mus musculus
  siRNA target sequence for Dncic2 (NM_010064.1,1550-1568).
gtactcatttgaagataat

SEQ ID NO: 668081 - DNA, 19 bp, Mus musculus
  siRNA target sequence for Dncic2 (NM_010064.1,1553-1571).
ctcatttgaagataattca

SEQ ID NO: 668082 - DNA, 19 bp, Mus musculus
  siRNA target sequence for Dncic2 (NM_010064.1,1639-1657).
ggagactggatctatggaa

SEQ ID NO: 668083 - DNA, 19 bp, Mus musculus
  siRNA target sequence for Dncic2 (NM_010064.1,1640-1658).
gagactggatctatggaat

SEQ ID NO: 668084 - DNA, 19 bp, Mus musculus
  siRNA target sequence for Dncic2 (NM_010064.1,1644-1662).
ctggatctatggaatctca

SEQ ID NO: 668085 - DNA, 19 bp, Mus musculus
  siRNA target sequence for Dncic2 (NM_010064.1,1808-1826).
cgctgttccccgaaatgat

SEQ ID NO: 668086 - DNA, 19 bp, Mus musculus
  siRNA target sequence for Dncic2 (NM_010064.1,1845-1863).
cgaacactcgcagaaatta

SEQ ID NO: 668087 - DNA, 19 bp, Mus musculus
  siRNA target sequence for Dnajb1 (NM_018808.1,315-333).
gcaagcgcgagattttcga

SEQ ID NO: 668088 - DNA, 19 bp, Mus musculus
  siRNA target sequence for Dnajb1 (NM_018808.1,392-410).
gctaatggtacctctttca

SEQ ID NO: 668089 - DNA, 19 bp, Mus musculus
  siRNA target sequence for Dnajb1 (NM_018808.1,402-420).
cctctttcagctacacatt

SEQ ID NO: 668090 - DNA, 19 bp, Mus musculus
  siRNA target sequence for Dnajb1 (NM_018808.1,515-533).
gacattgatgacacattct

SEQ ID NO: 668091 - DNA, 19 bp, Mus musculus
  siRNA target sequence for Dnajb1 (NM_018808.1,528-546).
cattctctagctttccaat

SEQ ID NO: 668092 - DNA, 19 bp, Mus musculus
  siRNA target sequence for Dnajb1 (NM_018808.1,557-575).
ggcttcaccaacatgaact

SEQ ID NO: 668093 - DNA, 19 bp, Mus musculus
  siRNA target sequence for Dnajb1 (NM_018808.1,720-738).
gaaagagcattcgaaatga

SEQ ID NO: 668094 - DNA, 19 bp, Mus musculus
  siRNA target sequence for Dnajb1 (NM_018808.1,814-832).
ccagacctcgaacaacatt

SEQ ID NO: 668095 - DNA, 19 bp, Mus musculus
  siRNA target sequence for Dnajb1 (NM_018808.1,836-854).
gcagacatcgtctttgttt

SEQ ID NO: 668096 - DNA, 19 bp, Mus musculus
  siRNA target sequence for Dnajb1 (NM_018808.1,839-857).
gacatcgtctttgttttaa

SEQ ID NO: 668097 - DNA, 19 bp, Mus musculus
  siRNA target sequence for Dnajb1 (NM_018808.1,860-878).
gacaagccacacaatatct

SEQ ID NO: 668098 - DNA, 19 bp, Mus musculus
  siRNA target sequence for Dnajb1 (NM_018808.1,866-884).
ccacacaatatcttcaaga

SEQ ID NO: 668099 - DNA, 19 bp, Mus musculus
  siRNA target sequence for Dnajb1 (NM_018808.1,978-996).
ccatccctgttgtattcaa

SEQ ID NO: 668100 - DNA, 19 bp, Mus musculus
  siRNA target sequence for Dnajb1 (NM_018808.1,982-1000).
ccctgttgtattcaaagat

SEQ ID NO: 668101 - DNA, 19 bp, Mus musculus
  siRNA target sequence for Dnajb1 (NM_018808.1,1071-1089).
gtggagaccttgttatcga

SEQ ID NO: 668102 - DNA, 19 bp, Mus musculus
  siRNA target sequence for Dnajb1 (NM_018808.1,1078-1096).
ccttgttatcgagtttgaa

SEQ ID NO: 668103 - DNA, 19 bp, Mus musculus
  siRNA target sequence for Dnajb1 (NM_018808.1,1099-1117).
gatcttcccggaaaggatt

SEQ ID NO: 668104 - DNA, 19 bp, Mus musculus
  siRNA target sequence for Dnajc4 (NM_020566.1,112-130).
gcggtctgtccctactaat

SEQ ID NO: 668105 - DNA, 19 bp, Mus musculus
  siRNA target sequence for Dnajc4 (NM_020566.1,113-131).
cggtctgtccctactaatt

SEQ ID NO: 668106 - DNA, 19 bp, Mus musculus
  siRNA target sequence for Dnajc4 (NM_020566.1,117-135).
ctgtccctactaattacta

SEQ ID NO: 668107 - DNA, 19 bp, Mus musculus
  siRNA target sequence for Dnajc4 (NM_020566.1,121-139).
ccctactaattactatgaa

SEQ ID NO: 668108 - DNA, 19 bp, Mus musculus
  siRNA target sequence for Dnajc4 (NM_020566.1,122-140).
cctactaattactatgaat

SEQ ID NO: 668109 - DNA, 19 bp, Mus musculus
  siRNA target sequence for Dnajc4 (NM_020566.1,123-141).
ctactaattactatgaatt

SEQ ID NO: 668110 - DNA, 19 bp, Mus musculus
  siRNA target sequence for Dnajc4 (NM_020566.1,126-144).
ctaattactatgaattgtt

SEQ ID NO: 668111 - DNA, 19 bp, Mus musculus
  siRNA target sequence for Dnajc4 (NM_020566.1,166-184).
cgctgaagagattaaacgt

SEQ ID NO: 668112 - DNA, 19 bp, Mus musculus
  siRNA target sequence for Dnajc4 (NM_020566.1,262-280).
gctgaatgaggcatatcga

SEQ ID NO: 668113 - DNA, 19 bp, Mus musculus
  siRNA target sequence for Dnajc4 (NM_020566.1,295-313).
ggaaagtcgtcgtaactat

SEQ ID NO: 668114 - DNA, 19 bp, Mus musculus
  siRNA target sequence for Dnajc4 (NM_020566.1,332-350).
gccagtcctccaaagtctt

SEQ ID NO: 668115 - DNA, 19 bp, Mus musculus
  siRNA target sequence for Dnajc4 (NM_020566.1,357-375).
gcacagccgagcctaagta

SEQ ID NO: 668116 - DNA, 19 bp, Mus musculus
  siRNA target sequence for Dnajc4 (NM_020566.1,358-376).
cacagccgagcctaagtat

SEQ ID NO: 668117 - DNA, 19 bp, Mus musculus
  siRNA target sequence for Dnajc4 (NM_020566.1,404-422).
ccccccaacgctcaatact

SEQ ID NO: 668118 - DNA, 19 bp, Mus musculus
  siRNA target sequence for Hspb2 (NM_024441.1,34-52).
gccactgccgagtacgaat

SEQ ID NO: 668119 - DNA, 19 bp, Mus musculus
  siRNA target sequence for Hspb2 (NM_024441.1,35-53).
ccactgccgagtacgaatt

SEQ ID NO: 668120 - DNA, 19 bp, Mus musculus
  siRNA target sequence for Hspb2 (NM_024441.1,36-54).
cactgccgagtacgaattt

SEQ ID NO: 668121 - DNA, 19 bp, Mus musculus
  siRNA target sequence for Hspb2 (NM_024441.1,126-144).
cctctatcacggctactat

SEQ ID NO: 668122 - DNA, 19 bp, Mus musculus
  siRNA target sequence for Hspb2 (NM_024441.1,464-482).
cggaagtcaatgaagtcta

SEQ ID NO: 668123 - DNA, 19 bp, Mus musculus
  siRNA target sequence for Hspb3 (NM_019960.1,246-264).
gactgcagactggatcata

SEQ ID NO: 668124 - DNA, 19 bp, Mus musculus
  siRNA target sequence for Hspb3 (NM_019960.1,250-268).
gcagactggatcatacact

SEQ ID NO: 668125 - DNA, 19 bp, Mus musculus
  siRNA target sequence for Hspb3 (NM_019960.1,251-269).
cagactggatcatacacta

SEQ ID NO: 668126 - DNA, 19 bp, Mus musculus
  siRNA target sequence for Hspb3 (NM_019960.1,253-271).
gactggatcatacactata

SEQ ID NO: 668127 - DNA, 19 bp, Mus musculus
  siRNA target sequence for Hspb3 (NM_019960.1,289-307).
ccatcgaggacctgagtaa

SEQ ID NO: 668128 - DNA, 19 bp, Mus musculus
  siRNA target sequence for Hspb3 (NM_019960.1,491-509).
ggacgaacacgggtttata

SEQ ID NO: 668129 - DNA, 19 bp, Mus musculus
  siRNA target sequence for Hspb3 (NM_019960.1,492-510).
gacgaacacgggtttatat

SEQ ID NO: 668130 - DNA, 19 bp, Mus musculus
  siRNA target sequence for Hspb3 (NM_019960.1,546-564).
ggagtcgaaaccaaagatt

SEQ ID NO: 668131 - DNA, 19 bp, Mus musculus
  siRNA target sequence for Hspb3 (NM_019960.1,547-565).
gagtcgaaaccaaagattt

SEQ ID NO: 668132 - DNA, 19 bp, Mus musculus
  siRNA target sequence for Hspb3 (NM_019960.1,549-567).
gtcgaaaccaaagatttgt

SEQ ID NO: 668133 - DNA, 19 bp, Mus musculus
  siRNA target sequence for Hspb3 (NM_019960.1,551-569).
cgaaaccaaagatttgtct

SEQ ID NO: 668134 - DNA, 19 bp, Mus musculus
  siRNA target sequence for Hspb3 (NM_019960.1,593-611).
cttggtggtggaagtcaaa

SEQ ID NO: 668135 - DNA, 19 bp, Mus musculus
  siRNA target sequence for Hspb7 (NM_013868.2,1133-1151).
ggctttgagcatgttttca

SEQ ID NO: 668136 - DNA, 19 bp, Mus musculus
  siRNA target sequence for Hspb7 (NM_013868.2,1215-1233).
ggccaaggaaacatcaaga

SEQ ID NO: 668137 - DNA, 19 bp, Mus musculus
  siRNA target sequence for Hspb7 (NM_013868.2,1241-1259).
ggatgcctacgagtttaca

SEQ ID NO: 668138 - DNA, 19 bp, Mus musculus
  siRNA target sequence for Hspb7 (NM_013868.2,1490-1508).
gaccttccggactgagata

SEQ ID NO: 668139 - DNA, 19 bp, Mus musculus
  siRNA target sequence for AW049829 (NM_153571.1,259-277).
cagggtggacgttacgaaa

SEQ ID NO: 668140 - DNA, 19 bp, Mus musculus
  siRNA target sequence for AW049829 (NM_153571.1,262-280).
ggtggacgttacgaaactt

SEQ ID NO: 668141 - DNA, 19 bp, Mus musculus
  siRNA target sequence for AW049829 (NM_153571.1,332-350).
caaaagtctcagactgaaa

SEQ ID NO: 668142 - DNA, 19 bp, Mus musculus
  siRNA target sequence for AW049829 (NM_153571.1,382-400).
gaatgatgcctataagact

SEQ ID NO: 668143 - DNA, 19 bp, Mus musculus
  siRNA target sequence for AW049829 (NM_153571.1,412-430).
cctgaccagaggactatat

SEQ ID NO: 668144 - DNA, 19 bp, Mus musculus
  siRNA target sequence for AW049829 (NM_153571.1,423-441).
gactatatcttctaaagct

SEQ ID NO: 668145 - DNA, 19 bp, Mus musculus
  siRNA target sequence for AW049829 (NM_153571.1,486-504).
gtcagttccttgtggaaat

SEQ ID NO: 668146 - DNA, 19 bp, Mus musculus
  siRNA target sequence for AW049829 (NM_153571.1,664-682).
gagatacttttcgaacata

SEQ ID NO: 668147 - DNA, 19 bp, Mus musculus
  siRNA target sequence for AW049829 (NM_153571.1,670-688).
cttttcgaacatagaagaa

SEQ ID NO: 668148 - DNA, 19 bp, Mus musculus
  siRNA target sequence for Grpel2 (NM_021296.1,207-225).
ggctcaaagctgttaaact

SEQ ID NO: 668149 - DNA, 19 bp, Mus musculus
  siRNA target sequence for Grpel2 (NM_021296.1,262-280).
gagagctgtcgctgattgt

SEQ ID NO: 668150 - DNA, 19 bp, Mus musculus
  siRNA target sequence for Grpel2 (NM_021296.1,264-282).
gagctgtcgctgattgtga

SEQ ID NO: 668151 - DNA, 19 bp, Mus musculus
  siRNA target sequence for Grpel2 (NM_021296.1,271-289).
cgctgattgtgaaaacata

SEQ ID NO: 668152 - DNA, 19 bp, Mus musculus
  siRNA target sequence for Grpel2 (NM_021296.1,311-329).
gtggaagacgcgaagatat

SEQ ID NO: 668153 - DNA, 19 bp, Mus musculus
  siRNA target sequence for Grpel2 (NM_021296.1,313-331).
ggaagacgcgaagatattt

SEQ ID NO: 668154 - DNA, 19 bp, Mus musculus
  siRNA target sequence for Grpel2 (NM_021296.1,431-449).
cgcactctggaaaaagtct

SEQ ID NO: 668155 - DNA, 19 bp, Mus musculus
  siRNA target sequence for Grpel2 (NM_021296.1,479-497).
ctgaaaagcgtatttacca

SEQ ID NO: 668156 - DNA, 19 bp, Mus musculus
  siRNA target sequence for Grpel2 (NM_021296.1,500-518).
catggcctagagaaaatga

SEQ ID NO: 668157 - DNA, 19 bp, Mus musculus
  siRNA target sequence for Grpel2 (NM_021296.1,517-535).
gacacccatcggtgacaaa

SEQ ID NO: 668158 - DNA, 19 bp, Mus musculus
  siRNA target sequence for Grpel2 (NM_021296.1,519-537).
cacccatcggtgacaaata

SEQ ID NO: 668159 - DNA, 19 bp, Mus musculus
  siRNA target sequence for Grpel2 (NM_021296.1,522-540).
ccatcggtgacaaatacga

SEQ ID NO: 668160 - DNA, 19 bp, Mus musculus
  siRNA target sequence for Grpel2 (NM_021296.1,594-612).
ctggcaccgtggcattagt

SEQ ID NO: 668161 - DNA, 19 bp, Mus musculus
  siRNA target sequence for Grpel2 (NM_021296.1,632-650).
cttcatggccgcaccatta

SEQ ID NO: 668162 - DNA, 19 bp, Mus musculus
  siRNA target sequence for Tbca (NM_009321.1,55-73).
gaggcgattggtcaaagaa

SEQ ID NO: 668163 - DNA, 19 bp, Mus musculus
  siRNA target sequence for Tbca (NM_009321.1,58-76).
gcgattggtcaaagaaaga

SEQ ID NO: 668164 - DNA, 19 bp, Mus musculus
  siRNA target sequence for Tbca (NM_009321.1,60-78).
gattggtcaaagaaagagt

SEQ ID NO: 668165 - DNA, 19 bp, Mus musculus
  siRNA target sequence for 1700008A05Rik (NM_025489.1,111-129).
caaagacagcggactttgt

SEQ ID NO: 668166 - DNA, 19 bp, Mus musculus
  siRNA target sequence for 1700008A05Rik (NM_025489.1,117-135).
cagcggactttgtcaacat

SEQ ID NO: 668167 - DNA, 19 bp, Mus musculus
  siRNA target sequence for 1700008A05Rik (NM_025489.1,119-137).
gcggactttgtcaacatca

SEQ ID NO: 668168 - DNA, 19 bp, Mus musculus
  siRNA target sequence for 1700008A05Rik (NM_025489.1,173-191).
gggagcatcatgtgaagaa

SEQ ID NO: 668169 - DNA, 19 bp, Mus musculus
  siRNA target sequence for 1700008A05Rik (NM_025489.1,259-277).
ctgctgagaagtttaaaga

SEQ ID NO: 668170 - DNA, 19 bp, Mus musculus
  siRNA target sequence for 1700008A05Rik (NM_025489.1,372-390).
ggagatgaaaacgttaaca

SEQ ID NO: 668171 - DNA, 19 bp, Mus musculus
  siRNA target sequence for 1700008A05Rik (NM_025489.1,375-393).
gatgaaaacgttaacacat

SEQ ID NO: 668172 - DNA, 19 bp, Mus musculus
  siRNA target sequence for 1700008A05Rik (NM_025489.1,422-440).
gaccctgttcatcatcatt

SEQ ID NO: 668173 - DNA, 19 bp, Mus musculus
  siRNA target sequence for 1700008A05Rik (NM_025489.1,444-462).
ctcttgaccggctgctatt

SEQ ID NO: 668174 - DNA, 19 bp, Mus musculus
  siRNA target sequence for 1700008A05Rik (NM_025489.1,449-467).
gaccggctgctatttttgt

SEQ ID NO: 668175 - DNA, 19 bp, Mus musculus
  siRNA target sequence for 1700008A05Rik (NM_025489.1,504-522).
cattgtcggcccaaatcat

SEQ ID NO: 668176 - DNA, 19 bp, Mus musculus
  siRNA target sequence for 1700008A05Rik (NM_025489.1,612-630).
gttctccagcctacaaata

SEQ ID NO: 668177 - DNA, 19 bp, Mus musculus
  siRNA target sequence for 1700008A05Rik (NM_025489.1,621-639).
cctacaaatacaaatgaga

SEQ ID NO: 668178 - DNA, 19 bp, Mus musculus
  siRNA target sequence for 1700008A05Rik (NM_025489.1,655-673).
gagaaggatctcgaagtta

SEQ ID NO: 668179 - DNA, 19 bp, Mus musculus
  siRNA target sequence for 1700014P03Rik (NM_153527.2,99-117).
cagaagatgcccagatcaa

SEQ ID NO: 668180 - DNA, 19 bp, Mus musculus
  siRNA target sequence for 1700014P03Rik (NM_153527.2,169-187).
gccgggtgcaccagagata

SEQ ID NO: 668181 - DNA, 19 bp, Mus musculus
  siRNA target sequence for 1700014P03Rik (NM_153527.2,170-188).
ccgggtgcaccagagatat

SEQ ID NO: 668182 - DNA, 19 bp, Mus musculus
  siRNA target sequence for 1700014P03Rik (NM_153527.2,171-189).
cgggtgcaccagagatatt

SEQ ID NO: 668183 - DNA, 19 bp, Mus musculus
  siRNA target sequence for 1700014P03Rik (NM_153527.2,173-191).
ggtgcaccagagatattca

SEQ ID NO: 668184 - DNA, 19 bp, Mus musculus
  siRNA target sequence for 1700014P03Rik (NM_153527.2,174-192).
gtgcaccagagatattcaa

SEQ ID NO: 668185 - DNA, 19 bp, Mus musculus
  siRNA target sequence for 1700014P03Rik (NM_153527.2,237-255).
gaggcatctatgacaagtt

SEQ ID NO: 668186 - DNA, 19 bp, Mus musculus
  siRNA target sequence for 1700014P03Rik (NM_153527.2,376-394).
caaccccttcagcgaattt

SEQ ID NO: 668187 - DNA, 19 bp, Mus musculus
  siRNA target sequence for 1700014P03Rik (NM_153527.2,379-397).
ccccttcagcgaatttttt

SEQ ID NO: 668188 - DNA, 19 bp, Mus musculus
  siRNA target sequence for 1700014P03Rik (NM_153527.2,381-399).
ccttcagcgaattttttga

SEQ ID NO: 668189 - DNA, 19 bp, Mus musculus
  siRNA target sequence for 1700014P03Rik (NM_153527.2,444-462).
gcagaggcgtccagaaaca

SEQ ID NO: 668190 - DNA, 19 bp, Mus musculus
  siRNA target sequence for 1700014P03Rik (NM_153527.2,447-465).
gaggcgtccagaaacaaga

SEQ ID NO: 668191 - DNA, 19 bp, Mus musculus
  siRNA target sequence for 1700014P03Rik (NM_153527.2,511-529).
ctttggctgcaccaaaaaa

SEQ ID NO: 668192 - DNA, 19 bp, Mus musculus
  siRNA target sequence for 1700014P03Rik (NM_153527.2,538-556).
ctcccgaagggtactaaat

SEQ ID NO: 668193 - DNA, 19 bp, Mus musculus
  siRNA target sequence for 1700014P03Rik (NM_153527.2,540-558).
cccgaagggtactaaatga

SEQ ID NO: 668194 - DNA, 19 bp, Mus musculus
  siRNA target sequence for 1700014P03Rik (NM_153527.2,848-866).
gtccaccctaagtacttca

SEQ ID NO: 668195 - DNA, 19 bp, Mus musculus
  siRNA target sequence for 2010306G19Rik (NM_025926.1,267-285).
cccggacaagaacaaatct

SEQ ID NO: 668196 - DNA, 19 bp, Mus musculus
  siRNA target sequence for 2010306G19Rik (NM_025926.1,331-349).
gtactgagtgatcctaaaa

SEQ ID NO: 668197 - DNA, 19 bp, Mus musculus
  siRNA target sequence for 2010306G19Rik (NM_025926.1,353-371).
gagaaatatatgatcagtt

SEQ ID NO: 668198 - DNA, 19 bp, Mus musculus
  siRNA target sequence for 2010306G19Rik (NM_025926.1,421-439).
ggtaccttcaggtacactt

SEQ ID NO: 668199 - DNA, 19 bp, Mus musculus
  siRNA target sequence for 2010306G19Rik (NM_025926.1,422-440).
gtaccttcaggtacacttt

SEQ ID NO: 668200 - DNA, 19 bp, Mus musculus
  siRNA target sequence for 2010306G19Rik (NM_025926.1,479-497).
gaggttccaacccttttga

SEQ ID NO: 668201 - DNA, 19 bp, Mus musculus
  siRNA target sequence for 2010306G19Rik (NM_025926.1,485-503).
ccaacccttttgaaatctt

SEQ ID NO: 668202 - DNA, 19 bp, Mus musculus
  siRNA target sequence for 2010306G19Rik (NM_025926.1,519-537).
gggtggaggtcgagattct

SEQ ID NO: 668203 - DNA, 19 bp, Mus musculus
  siRNA target sequence for 2010306G19Rik (NM_025926.1,577-595).
ggattcagcatgaatggat

SEQ ID NO: 668204 - DNA, 19 bp, Mus musculus
  siRNA target sequence for 2010306G19Rik (NM_025926.1,618-636).
gggaccctcccgtctcaaa

SEQ ID NO: 668205 - DNA, 19 bp, Mus musculus
  siRNA target sequence for 2010306G19Rik (NM_025926.1,620-638).
gaccctcccgtctcaaaca

SEQ ID NO: 668206 - DNA, 19 bp, Mus musculus
  siRNA target sequence for 2010306G19Rik (NM_025926.1,623-641).
cctcccgtctcaaacaaga

SEQ ID NO: 668207 - DNA, 19 bp, Mus musculus
  siRNA target sequence for 2010306G19Rik (NM_025926.1,644-662).
ctcccattattcatgaact

SEQ ID NO: 668208 - DNA, 19 bp, Mus musculus
  siRNA target sequence for 2010306G19Rik (NM_025926.1,667-685).
gtatcgcttgaagaaatat

SEQ ID NO: 668209 - DNA, 19 bp, Mus musculus
  siRNA target sequence for 2010306G19Rik (NM_025926.1,705-723).
gatgaagatttctcgaaaa

SEQ ID NO: 668210 - DNA, 19 bp, Mus musculus
  siRNA target sequence for 2010306G19Rik (NM_025926.1,708-726).
gaagatttctcgaaaaaga

SEQ ID NO: 668211 - DNA, 19 bp, Mus musculus
  siRNA target sequence for 2010306G19Rik (NM_025926.1,733-751).
cctgacggaaggagttaca

SEQ ID NO: 668212 - DNA, 19 bp, Mus musculus
  siRNA target sequence for 2010306G19Rik (NM_025926.1,752-770).
gatctgaggacaaaattct

SEQ ID NO: 668213 - DNA, 19 bp, Mus musculus
  siRNA target sequence for 2010306G19Rik (NM_025926.1,820-838).
ccgagggaaggcgatgaaa

SEQ ID NO: 668214 - DNA, 19 bp, Mus musculus
  siRNA target sequence for 2010306G19Rik (NM_025926.1,822-840).
gagggaaggcgatgaaaca

SEQ ID NO: 668215 - DNA, 19 bp, Mus musculus
  siRNA target sequence for 2010306G19Rik (NM_025926.1,829-847).
ggcgatgaaacaccaaata

SEQ ID NO: 668216 - DNA, 19 bp, Mus musculus
  siRNA target sequence for 2010306G19Rik (NM_025926.1,831-849).
cgatgaaacaccaaatagt

SEQ ID NO: 668217 - DNA, 19 bp, Mus musculus
  siRNA target sequence for 2010306G19Rik (NM_025926.1,832-850).
gatgaaacaccaaatagta

SEQ ID NO: 668218 - DNA, 19 bp, Mus musculus
  siRNA target sequence for 2010306G19Rik (NM_025926.1,905-923).
gagacggatcaaatatagt

SEQ ID NO: 668219 - DNA, 19 bp, Mus musculus
  siRNA target sequence for 2010306G19Rik (NM_025926.1,907-925).
gacggatcaaatatagttt

SEQ ID NO: 668220 - DNA, 19 bp, Mus musculus
  siRNA target sequence for 2010306G19Rik (NM_025926.1,909-927).
cggatcaaatatagtttat

SEQ ID NO: 668221 - DNA, 19 bp, Mus musculus
  siRNA target sequence for 2010306G19Rik (NM_025926.1,910-928).
ggatcaaatatagtttata

SEQ ID NO: 668222 - DNA, 19 bp, Mus musculus
  siRNA target sequence for 2010306G19Rik (NM_025926.1,968-986).
cacttaatgtgccaacaat

SEQ ID NO: 668223 - DNA, 19 bp, Mus musculus
  siRNA target sequence for 2010306G19Rik (NM_025926.1,1038-1056).
gaggagaagagttattgga

SEQ ID NO: 668224 - DNA, 19 bp, Mus musculus
  siRNA target sequence for 2010306G19Rik (NM_025926.1,1041-1059).
gagaagagttattggatat

SEQ ID NO: 668225 - DNA, 19 bp, Mus musculus
  siRNA target sequence for 2010306G19Rik (NM_025926.1,1089-1107).
gcgtggcgacctactgata

SEQ ID NO: 668226 - DNA, 19 bp, Mus musculus
  siRNA target sequence for 2010306G19Rik (NM_025926.1,1093-1111).
ggcgacctactgatagaat

SEQ ID NO: 668227 - DNA, 19 bp, Mus musculus
  siRNA target sequence for 2010306G19Rik (NM_025926.1,1094-1112).
gcgacctactgatagaatt

SEQ ID NO: 668228 - DNA, 19 bp, Mus musculus
  siRNA target sequence for 2010306G19Rik (NM_025926.1,1098-1116).
cctactgatagaatttgat

SEQ ID NO: 668229 - DNA, 19 bp, Mus musculus
  siRNA target sequence for 2010306G19Rik (NM_025926.1,1122-1140).
cttcccagacgtcatatct

SEQ ID NO: 668230 - DNA, 19 bp, Mus musculus
  siRNA target sequence for 2010306G19Rik (NM_025926.1,1134-1152).
catatctgcagcatccaaa

SEQ ID NO: 668231 - DNA, 19 bp, Mus musculus
  siRNA target sequence for 2610100K07Rik (NM_025996.1,550-568).
cagccggcaaccagagttt

SEQ ID NO: 668232 - DNA, 19 bp, Mus musculus
  siRNA target sequence for 2610100K07Rik (NM_025996.1,647-665).
ccccgaagaagaaagtgtt

SEQ ID NO: 668233 - DNA, 19 bp, Mus musculus
  siRNA target sequence for 2610100K07Rik (NM_025996.1,678-696).
cgtgcagcgtgctacttga

SEQ ID NO: 668234 - DNA, 19 bp, Mus musculus
  siRNA target sequence for 2610100K07Rik (NM_025996.1,679-697).
gtgcagcgtgctacttgaa

SEQ ID NO: 668235 - DNA, 19 bp, Mus musculus
  siRNA target sequence for 2610100K07Rik (NM_025996.1,703-721).
ggaactgcacagattgcat

SEQ ID NO: 668236 - DNA, 19 bp, Mus musculus
  siRNA target sequence for 2610100K07Rik (NM_025996.1,776-794).
gcgcagagcatctgcatat

SEQ ID NO: 668237 - DNA, 19 bp, Mus musculus
  siRNA target sequence for 2610100K07Rik (NM_025996.1,814-832).
ccctggcctacgttgacta

SEQ ID NO: 668238 - DNA, 19 bp, Mus musculus
  siRNA target sequence for 2610100K07Rik (NM_025996.1,816-834).
ctggcctacgttgactata

SEQ ID NO: 668239 - DNA, 19 bp, Mus musculus
  siRNA target sequence for 2610100K07Rik (NM_025996.1,821-839).
ctacgttgactataagact

SEQ ID NO: 668240 - DNA, 19 bp, Mus musculus
  siRNA target sequence for 2610100K07Rik (NM_025996.1,838-856).
ctgtgctgcagatcgataa

SEQ ID NO: 668241 - DNA, 19 bp, Mus musculus
  siRNA target sequence for 2610100K07Rik (NM_025996.1,840-858).
gtgctgcagatcgataaca

SEQ ID NO: 668242 - DNA, 19 bp, Mus musculus
  siRNA target sequence for 2610100K07Rik (NM_025996.1,842-860).
gctgcagatcgataacagt

SEQ ID NO: 668243 - DNA, 19 bp, Mus musculus
  siRNA target sequence for 2610100K07Rik (NM_025996.1,879-897).
ggcatcaacagaataacca

SEQ ID NO: 668244 - DNA, 19 bp, Mus musculus
  siRNA target sequence for 2610100K07Rik (NM_025996.1,950-968).
ccctgtggtgcctgtttca

SEQ ID NO: 668245 - DNA, 19 bp, Mus musculus
  siRNA target sequence for 2610100K07Rik (NM_025996.1,988-1006).
ccttgccttcagataacca

SEQ ID NO: 668246 - DNA, 19 bp, Mus musculus
  siRNA target sequence for 2610100K07Rik (NM_025996.1,1011-1029).
gagacagctaaaaccaaat

SEQ ID NO: 668247 - DNA, 19 bp, Mus musculus
  siRNA target sequence for 2610100K07Rik (NM_025996.1,1128-1146).
ggcaaccataagaaagcta

SEQ ID NO: 668248 - DNA, 19 bp, Mus musculus
  siRNA target sequence for 2610100K07Rik (NM_025996.1,1129-1147).
gcaaccataagaaagctat

SEQ ID NO: 668249 - DNA, 19 bp, Mus musculus
  siRNA target sequence for 2610100K07Rik (NM_025996.1,1130-1148).
caaccataagaaagctatt

SEQ ID NO: 668250 - DNA, 19 bp, Mus musculus
  siRNA target sequence for 2610100K07Rik (NM_025996.1,1182-1200).
ctggagtctgccacataca

SEQ ID NO: 668251 - DNA, 19 bp, Mus musculus
  siRNA target sequence for 2610100K07Rik (NM_025996.1,1275-1293).
ctggatgggaagaatgtaa

SEQ ID NO: 668252 - DNA, 19 bp, Mus musculus
  siRNA target sequence for 2610100K07Rik (NM_025996.1,1363-1381).
gcagcctcctacaaattga

SEQ ID NO: 668253 - DNA, 19 bp, Mus musculus
  siRNA target sequence for 3110002K08Rik (NM_133726.1,224-242).
gtaccacctgctactcata

SEQ ID NO: 668254 - DNA, 19 bp, Mus musculus
  siRNA target sequence for 3110002K08Rik (NM_133726.1,562-580).
cagtgtctttgtcaaacta

SEQ ID NO: 668255 - DNA, 19 bp, Mus musculus
  siRNA target sequence for 3110002K08Rik (NM_133726.1,769-787).
ccaacctcgggctcaaaaa

SEQ ID NO: 668256 - DNA, 19 bp, Mus musculus
  siRNA target sequence for 3110002K08Rik (NM_133726.1,957-975).
ggggaatgcctggtaattt

SEQ ID NO: 668257 - DNA, 19 bp, Mus musculus
  siRNA target sequence for 3110002K08Rik (NM_133726.1,958-976).
gggaatgcctggtaatttt

SEQ ID NO: 668258 - DNA, 19 bp, Mus musculus
  siRNA target sequence for 5730551F12Rik (NM_028873.2,138-156).
ggtacctccctcagtacat

SEQ ID NO: 668259 - DNA, 19 bp, Mus musculus
  siRNA target sequence for 5730551F12Rik (NM_028873.2,164-182).
ctctgtggaccccgaaata

SEQ ID NO: 668260 - DNA, 19 bp, Mus musculus
  siRNA target sequence for 5730551F12Rik (NM_028873.2,174-192).
cccgaaatactttcattct

SEQ ID NO: 668261 - DNA, 19 bp, Mus musculus
  siRNA target sequence for 5730551F12Rik (NM_028873.2,213-231).
gagactgctcctaatggta

SEQ ID NO: 668262 - DNA, 19 bp, Mus musculus
  siRNA target sequence for 5730551F12Rik (NM_028873.2,359-377).
gagcgagacaggttcagaa

SEQ ID NO: 668263 - DNA, 19 bp, Mus musculus
  siRNA target sequence for 5730551F12Rik (NM_028873.2,431-449).
ggatgggagtccttctttt

SEQ ID NO: 668264 - DNA, 19 bp, Mus musculus
  siRNA target sequence for 5730551F12Rik (NM_028873.2,490-508).
gagtccccgaaggaactta

SEQ ID NO: 668265 - DNA, 19 bp, Mus musculus
  siRNA target sequence for 5730551F12Rik (NM_028873.2,492-510).
gtccccgaaggaacttact

SEQ ID NO: 668266 - DNA, 19 bp, Mus musculus
  siRNA target sequence for 5730551F12Rik (NM_028873.2,673-691).
ggcagaagcaccgttttct

SEQ ID NO: 668267 - DNA, 19 bp, Mus musculus
  siRNA target sequence for 5730551F12Rik (NM_028873.2,675-693).
cagaagcaccgttttctga

SEQ ID NO: 668268 - DNA, 19 bp, Mus musculus
  siRNA target sequence for 5730551F12Rik (NM_028873.2,747-765).
catcggctggcccgaaaaa

SEQ ID NO: 668269 - DNA, 19 bp, Mus musculus
  siRNA target sequence for 5730551F12Rik (NM_028873.2,750-768).
cggctggcccgaaaaagaa

SEQ ID NO: 668270 - DNA, 19 bp, Mus musculus
  siRNA target sequence for 5730551F12Rik (NM_028873.2,803-821).
gggagtagaggaactatgt

SEQ ID NO: 668271 - DNA, 19 bp, Mus musculus
  siRNA target sequence for 5730551F12Rik (NM_028873.2,842-860).
ctggtggctgattgaactt

SEQ ID NO: 668272 - DNA, 19 bp, Mus musculus
  siRNA target sequence for 5730551F12Rik (NM_028873.2,844-862).
ggtggctgattgaacttct

SEQ ID NO: 668273 - DNA, 19 bp, Mus musculus
  siRNA target sequence for 5730551F12Rik (NM_028873.2,889-907).
cctgtggccatctcattta

SEQ ID NO: 668274 - DNA, 19 bp, Mus musculus
  siRNA target sequence for 5730551F12Rik (NM_028873.2,928-946).
gcagtgacctggacctttt

SEQ ID NO: 668275 - DNA, 19 bp, Mus musculus
  siRNA target sequence for 5730551F12Rik (NM_028873.2,929-947).
cagtgacctggaccttttt

SEQ ID NO: 668276 - DNA, 19 bp, Mus musculus
  siRNA target sequence for 5730551F12Rik (NM_028873.2,1040-1058).
gctgctcatccgtattctt

SEQ ID NO: 668277 - DNA, 19 bp, Mus musculus
  siRNA target sequence for 5730551F12Rik (NM_028873.2,1041-1059).
ctgctcatccgtattctta

SEQ ID NO: 668278 - DNA, 19 bp, Mus musculus
  siRNA target sequence for 5730551F12Rik (NM_028873.2,1061-1079).
ggtagtgggtgctttccta

SEQ ID NO: 668279 - DNA, 19 bp, Mus musculus
  siRNA target sequence for 5730551F12Rik (NM_028873.2,1201-1219).
cagccttgcatcattgctt

SEQ ID NO: 668280 - DNA, 19 bp, Mus musculus
  siRNA target sequence for 5730551F12Rik (NM_028873.2,1216-1234).
gcttgactctgctgaaaga

SEQ ID NO: 668281 - DNA, 19 bp, Mus musculus
  siRNA target sequence for 5730551F12Rik (NM_028873.2,1254-1272).
ctggtaaggttaatacagt

SEQ ID NO: 668282 - DNA, 19 bp, Mus musculus
  siRNA target sequence for 5730551F12Rik (NM_028873.2,1287-1305).
ctgccctgggtcaaacaga

SEQ ID NO: 668283 - DNA, 19 bp, Mus musculus
  siRNA target sequence for 5730551F12Rik (NM_028873.2,1446-1464).
gcatccgacactgaactaa

SEQ ID NO: 668284 - DNA, 19 bp, Mus musculus
  siRNA target sequence for 5730551F12Rik (NM_028873.2,1477-1495).
ggcagctagcagtaatggt

SEQ ID NO: 668285 - DNA, 19 bp, Mus musculus
  siRNA target sequence for 5730551F12Rik (NM_028873.2,1493-1511).
ggtccatcctgataaaaat

SEQ ID NO: 668286 - DNA, 19 bp, Mus musculus
  siRNA target sequence for 5730551F12Rik (NM_028873.2,1575-1593).
ccagagaggcggaaggaat

SEQ ID NO: 668287 - DNA, 19 bp, Mus musculus
  siRNA target sequence for 5730551F12Rik (NM_028873.2,1582-1600).
ggcggaaggaatatgagat

SEQ ID NO: 668288 - DNA, 19 bp, Mus musculus
  siRNA target sequence for 5730551F12Rik (NM_028873.2,1622-1640).
gctcagccggtcagtgaat

SEQ ID NO: 668289 - DNA, 19 bp, Mus musculus
  siRNA target sequence for 5730551F12Rik (NM_028873.2,1627-1645).
gccggtcagtgaatgagtt

SEQ ID NO: 668290 - DNA, 19 bp, Mus musculus
  siRNA target sequence for 5730551F12Rik (NM_028873.2,1628-1646).
ccggtcagtgaatgagttt

SEQ ID NO: 668291 - DNA, 19 bp, Mus musculus
  siRNA target sequence for 5730551F12Rik (NM_028873.2,1630-1648).
ggtcagtgaatgagtttct

SEQ ID NO: 668292 - DNA, 19 bp, Mus musculus
  siRNA target sequence for 5730551F12Rik (NM_028873.2,1819-1837).
gcatgctgggcctcaagat

SEQ ID NO: 668293 - DNA, 19 bp, Mus musculus
  siRNA target sequence for 5730551F12Rik (NM_028873.2,1828-1846).
gcctcaagatcacttactt

SEQ ID NO: 668294 - DNA, 19 bp, Mus musculus
  siRNA target sequence for 5730551F12Rik (NM_028873.2,1904-1922).
gggtatctccccagatact

SEQ ID NO: 668295 - DNA, 19 bp, Mus musculus
  siRNA target sequence for 5730551F12Rik (NM_028873.2,1906-1924).
gtatctccccagatactca

SEQ ID NO: 668296 - DNA, 19 bp, Mus musculus
  siRNA target sequence for 5730551F12Rik (NM_028873.2,1929-1947).
gttccttaccacatctcat

SEQ ID NO: 668297 - DNA, 19 bp, Mus musculus
  siRNA target sequence for 5730551F12Rik (NM_028873.2,2005-2023).
ctgctgacctgcaggattt

SEQ ID NO: 668298 - DNA, 19 bp, Mus musculus
  siRNA target sequence for 5730551F12Rik (NM_028873.2,2027-2045).
gagccggatctttcaagta

SEQ ID NO: 668299 - DNA, 19 bp, Mus musculus
  siRNA target sequence for 5730551F12Rik (NM_028873.2,2155-2173).
ctaaacggcggaagaaagt

SEQ ID NO: 668300 - DNA, 19 bp, Mus musculus
  siRNA target sequence for C80913 (NM_011274.2,287-305).
ggcgacaactggtttgcaa

SEQ ID NO: 668301 - DNA, 19 bp, Mus musculus
  siRNA target sequence for C80913 (NM_011274.2,288-306).
gcgacaactggtttgcaaa

SEQ ID NO: 668302 - DNA, 19 bp, Mus musculus
  siRNA target sequence for C80913 (NM_011274.2,340-358).
gcatcggaaagaacatgta

SEQ ID NO: 668303 - DNA, 19 bp, Mus musculus
  siRNA target sequence for C80913 (NM_011274.2,341-359).
catcggaaagaacatgtaa

SEQ ID NO: 668304 - DNA, 19 bp, Mus musculus
  siRNA target sequence for C80913 (NM_011274.2,441-459).
gtgatgctgcaggtgattt

SEQ ID NO: 668305 - DNA, 19 bp, Mus musculus
  siRNA target sequence for C80913 (NM_011274.2,530-548).
cattccaaaccaaaaactt

SEQ ID NO: 668306 - DNA, 19 bp, Mus musculus
  siRNA target sequence for C80913 (NM_011274.2,658-676).
gggtgaacttgaaagtaaa

SEQ ID NO: 668307 - DNA, 19 bp, Mus musculus
  siRNA target sequence for C80913 (NM_011274.2,677-695).
cctgatactgtgattgcaa

SEQ ID NO: 668308 - DNA, 19 bp, Mus musculus
  siRNA target sequence for C80913 (NM_011274.2,782-800).
gccgccagcagctgtaaaa

SEQ ID NO: 668309 - DNA, 19 bp, Mus musculus
  siRNA target sequence for C80913 (NM_011274.2,823-841).
ccctaatggtcaagtcaat

SEQ ID NO: 668310 - DNA, 19 bp, Mus musculus
  siRNA target sequence for C80913 (NM_011274.2,824-842).
cctaatggtcaagtcaata

SEQ ID NO: 668311 - DNA, 19 bp, Mus musculus
  siRNA target sequence for C80913 (NM_011274.2,836-854).
gtcaatagtctgaactatt

SEQ ID NO: 668312 - DNA, 19 bp, Mus musculus
  siRNA target sequence for C80913 (NM_011274.2,999-1017).
ctcatactgttgaacctaa

SEQ ID NO: 668313 - DNA, 19 bp, Mus musculus
  siRNA target sequence for C80913 (NM_011274.2,1001-1019).
catactgttgaacctaaaa

SEQ ID NO: 668314 - DNA, 19 bp, Mus musculus
  siRNA target sequence for C80913 (NM_011274.2,1081-1099).
caaacggaaacgaaagagt

SEQ ID NO: 668315 - DNA, 19 bp, Mus musculus
  siRNA target sequence for C80913 (NM_011274.2,1138-1156).
caagagtcctgctgatatt

SEQ ID NO: 668316 - DNA, 19 bp, Mus musculus
  siRNA target sequence for C80913 (NM_011274.2,1447-1465).
ctccctagcaccatactca

SEQ ID NO: 668317 - DNA, 19 bp, Mus musculus
  siRNA target sequence for Cabc1 (NM_023341.1,930-948).
ggcagagtgctgacttcat

SEQ ID NO: 668318 - DNA, 19 bp, Mus musculus
  siRNA target sequence for Cabc1 (NM_023341.1,1120-1138).
ggcccagagcattaacagt

SEQ ID NO: 668319 - DNA, 19 bp, Mus musculus
  siRNA target sequence for Cabc1 (NM_023341.1,1297-1315).
ggaccatcccttcttctat

SEQ ID NO: 668320 - DNA, 19 bp, Mus musculus
  siRNA target sequence for Cabc1 (NM_023341.1,1424-1442).
gagatctgctacaacattt

SEQ ID NO: 668321 - DNA, 19 bp, Mus musculus
  siRNA target sequence for Cabc1 (NM_023341.1,1452-1470).
gcctgagagagctgtttga

SEQ ID NO: 668322 - DNA, 19 bp, Mus musculus
  siRNA target sequence for Cabc1 (NM_023341.1,1490-1508).
gaccccaactggtccaatt

SEQ ID NO: 668323 - DNA, 19 bp, Mus musculus
  siRNA target sequence for Cabc1 (NM_023341.1,1494-1512).
ccaactggtccaatttctt

SEQ ID NO: 668324 - DNA, 19 bp, Mus musculus
  siRNA target sequence for Cabc1 (NM_023341.1,1498-1516).
ctggtccaatttcttttat

SEQ ID NO: 668325 - DNA, 19 bp, Mus musculus
  siRNA target sequence for Cabc1 (NM_023341.1,1500-1518).
ggtccaatttcttttatga

SEQ ID NO: 668326 - DNA, 19 bp, Mus musculus
  siRNA target sequence for Cabc1 (NM_023341.1,1546-1564).
ggacttcggcgcaactaga

SEQ ID NO: 668327 - DNA, 19 bp, Mus musculus
  siRNA target sequence for Cabc1 (NM_023341.1,1549-1567).
cttcggcgcaactagagaa

SEQ ID NO: 668328 - DNA, 19 bp, Mus musculus
  siRNA target sequence for Cabc1 (NM_023341.1,1552-1570).
cggcgcaactagagaatat

SEQ ID NO: 668329 - DNA, 19 bp, Mus musculus
  siRNA target sequence for Cabc1 (NM_023341.1,1554-1572).
gcgcaactagagaatatga

SEQ ID NO: 668330 - DNA, 19 bp, Mus musculus
  siRNA target sequence for Cabc1 (NM_023341.1,1701-1719).
ctcacctggatgctattct

SEQ ID NO: 668331 - DNA, 19 bp, Mus musculus
  siRNA target sequence for Cabc1 (NM_023341.1,1928-1946).
gaggaagcgtacagtaact

SEQ ID NO: 668332 - DNA, 19 bp, Mus musculus
  siRNA target sequence for Cabc1 (NM_023341.1,1931-1949).
gaagcgtacagtaactact

SEQ ID NO: 668333 - DNA, 19 bp, Mus musculus
  siRNA target sequence for Cdc37 (NM_016742.2,101-119).
cgagacgcaccccaacata

SEQ ID NO: 668334 - DNA, 19 bp, Mus musculus
  siRNA target sequence for Cdc37 (NM_016742.2,401-419).
ggacacgctcagcaaagat

SEQ ID NO: 668335 - DNA, 19 bp, Mus musculus
  siRNA target sequence for Cdc37 (NM_016742.2,480-498).
gcaagggagcagaaacaca

SEQ ID NO: 668336 - DNA, 19 bp, Mus musculus
  siRNA target sequence for Cdc37 (NM_016742.2,495-513).
cacaagaccttcgttgaaa

SEQ ID NO: 668337 - DNA, 19 bp, Mus musculus
  siRNA target sequence for Cdc37 (NM_016742.2,497-515).
caagaccttcgttgaaaaa

SEQ ID NO: 668338 - DNA, 19 bp, Mus musculus
  siRNA target sequence for Cdc37 (NM_016742.2,500-518).
gaccttcgttgaaaaatat

SEQ ID NO: 668339 - DNA, 19 bp, Mus musculus
  siRNA target sequence for Cdc37 (NM_016742.2,506-524).
cgttgaaaaatatgagaaa

SEQ ID NO: 668340 - DNA, 19 bp, Mus musculus
  siRNA target sequence for Cdc37 (NM_016742.2,519-537).
gagaaacagatcaagcatt

SEQ ID NO: 668341 - DNA, 19 bp, Mus musculus
  siRNA target sequence for Cdc37 (NM_016742.2,691-709).
ccatggtgatgcagtttat

SEQ ID NO: 668342 - DNA, 19 bp, Mus musculus
  siRNA target sequence for Cdc37 (NM_016742.2,692-710).
catggtgatgcagtttatt

SEQ ID NO: 668343 - DNA, 19 bp, Mus musculus
  siRNA target sequence for Cdc37 (NM_016742.2,747-765).
gcctgcttccggcagtttt

SEQ ID NO: 668344 - DNA, 19 bp, Mus musculus
  siRNA target sequence for Cdc37 (NM_016742.2,748-766).
cctgcttccggcagttttt

SEQ ID NO: 668345 - DNA, 19 bp, Mus musculus
  siRNA target sequence for Cdc37 (NM_016742.2,781-799).
ccgctgaccaccagtacat

SEQ ID NO: 668346 - DNA, 19 bp, Mus musculus
  siRNA target sequence for Cdc37 (NM_016742.2,797-815).
catggagggcttcaagtat

SEQ ID NO: 668347 - DNA, 19 bp, Mus musculus
  siRNA target sequence for Cdc37 (NM_016742.2,800-818).
ggagggcttcaagtatgaa

SEQ ID NO: 668348 - DNA, 19 bp, Mus musculus
  siRNA target sequence for Cdc37 (NM_016742.2,853-871).
ccaagctgcgaatagagaa

SEQ ID NO: 668349 - DNA, 19 bp, Mus musculus
  siRNA target sequence for Cdc37 (NM_016742.2,933-951).
cccgtggaggtctacgaat

SEQ ID NO: 668350 - DNA, 19 bp, Mus musculus
  siRNA target sequence for Cdc37 (NM_016742.2,1030-1048).
ccactgatgccaagtatca

SEQ ID NO: 668351 - DNA, 19 bp, Mus musculus
  siRNA target sequence for Chaf1a (NM_013733.2,137-155).
gccgtggattgcaaagaca

SEQ ID NO: 668352 - DNA, 19 bp, Mus musculus
  siRNA target sequence for Chaf1a (NM_013733.2,166-184).
cccagtgaagaggttaata

SEQ ID NO: 668353 - DNA, 19 bp, Mus musculus
  siRNA target sequence for Chaf1a (NM_013733.2,168-186).
cagtgaagaggttaataca

SEQ ID NO: 668354 - DNA, 19 bp, Mus musculus
  siRNA target sequence for Chaf1a (NM_013733.2,275-293).
gtcccggatctacaattgt

SEQ ID NO: 668355 - DNA, 19 bp, Mus musculus
  siRNA target sequence for Chaf1a (NM_013733.2,277-295).
cccggatctacaattgtct

SEQ ID NO: 668356 - DNA, 19 bp, Mus musculus
  siRNA target sequence for Chaf1a (NM_013733.2,278-296).
ccggatctacaattgtctt

SEQ ID NO: 668357 - DNA, 19 bp, Mus musculus
  siRNA target sequence for Chaf1a (NM_013733.2,279-297).
cggatctacaattgtcttt

SEQ ID NO: 668358 - DNA, 19 bp, Mus musculus
  siRNA target sequence for Chaf1a (NM_013733.2,332-350).
cacgtaggcttgagtacaa

SEQ ID NO: 668359 - DNA, 19 bp, Mus musculus
  siRNA target sequence for Chaf1a (NM_013733.2,371-389).
cccattgatagcttcttga

SEQ ID NO: 668360 - DNA, 19 bp, Mus musculus
  siRNA target sequence for Chaf1a (NM_013733.2,381-399).
gcttcttgagggcaacaat

SEQ ID NO: 668361 - DNA, 19 bp, Mus musculus
  siRNA target sequence for Chaf1a (NM_013733.2,411-429).
cgagtgtggtcattatcga

SEQ ID NO: 668362 - DNA, 19 bp, Mus musculus
  siRNA target sequence for Chaf1a (NM_013733.2,467-485).
gagggccacagtgaactaa

SEQ ID NO: 668363 - DNA, 19 bp, Mus musculus
  siRNA target sequence for Chaf1a (NM_013733.2,643-661).
ctgtcaggctggttcacta

SEQ ID NO: 668364 - DNA, 19 bp, Mus musculus
  siRNA target sequence for Chaf1a (NM_013733.2,700-718).
ccccaccaaggagttatca

SEQ ID NO: 668365 - DNA, 19 bp, Mus musculus
  siRNA target sequence for Chaf1a (NM_013733.2,701-719).
cccaccaaggagttatcaa

SEQ ID NO: 668366 - DNA, 19 bp, Mus musculus
  siRNA target sequence for Chaf1a (NM_013733.2,731-749).
gcaggggatctcctattta

SEQ ID NO: 668367 - DNA, 19 bp, Mus musculus
  siRNA target sequence for Chaf1a (NM_013733.2,732-750).
caggggatctcctatttat

SEQ ID NO: 668368 - DNA, 19 bp, Mus musculus
  siRNA target sequence for Chaf1a (NM_013733.2,806-824).
gcctctcttcccatgatgt

SEQ ID NO: 668369 - DNA, 19 bp, Mus musculus
  siRNA target sequence for Chaf1a (NM_013733.2,839-857).
gtcacttcagagagtgaaa

SEQ ID NO: 668370 - DNA, 19 bp, Mus musculus
  siRNA target sequence for Chaf1a (NM_013733.2,999-1017).
gagttgccaagaactttgt

SEQ ID NO: 668371 - DNA, 19 bp, Mus musculus
  siRNA target sequence for Chaf1a (NM_013733.2,1362-1380).
cagagatcactcgattctt

SEQ ID NO: 668372 - DNA, 19 bp, Mus musculus
  siRNA target sequence for Chaf1a (NM_013733.2,1419-1437).
ccggttcctgtggtaagtt

SEQ ID NO: 668373 - DNA, 19 bp, Mus musculus
  siRNA target sequence for Chaf1a (NM_013733.2,1420-1438).
cggttcctgtggtaagttt

SEQ ID NO: 668374 - DNA, 19 bp, Mus musculus
  siRNA target sequence for Chaf1a (NM_013733.2,1440-1458).
ccccctttgaaatcaaaga

SEQ ID NO: 668375 - DNA, 19 bp, Mus musculus
  siRNA target sequence for Chaf1a (NM_013733.2,1940-1958).
gtgccccatgggtacttat

SEQ ID NO: 668376 - DNA, 19 bp, Mus musculus
  siRNA target sequence for Chaf1a (NM_013733.2,1942-1960).
gccccatgggtacttatct

SEQ ID NO: 668377 - DNA, 19 bp, Mus musculus
  siRNA target sequence for Chaf1a (NM_013733.2,2084-2102).
gtgcacgtgggatgtgtat

SEQ ID NO: 668378 - DNA, 19 bp, Mus musculus
  siRNA target sequence for Chaf1a (NM_013733.2,2124-2142).
gcacgagttccgacttgaa

SEQ ID NO: 668379 - DNA, 19 bp, Mus musculus
  siRNA target sequence for Chaf1a (NM_013733.2,2258-2276).
ctgctacatggcaatgtga

SEQ ID NO: 668380 - DNA, 19 bp, Mus musculus
  siRNA target sequence for Chaf1a (NM_013733.2,2407-2425).
gctgaagcgccttatctct

SEQ ID NO: 668381 - DNA, 19 bp, Mus musculus
  siRNA target sequence for Chaf1a (NM_013733.2,2572-2590).
cagtggcagtgcttctact

SEQ ID NO: 668382 - DNA, 19 bp, Mus musculus
  siRNA target sequence for Chaf1a (NM_013733.2,2602-2620).
ccagagcacacctatgcta

SEQ ID NO: 668383 - DNA, 19 bp, Mus musculus
  siRNA target sequence for Chaf1a (NM_013733.2,2607-2625).
gcacacctatgctactcaa

SEQ ID NO: 668384 - DNA, 19 bp, Mus musculus
  siRNA target sequence for Chaf1a (NM_013733.2,2649-2667).
gcatcacgcagtttatgaa

SEQ ID NO: 668385 - DNA, 19 bp, Mus musculus
  siRNA target sequence for Chaf1a (NM_013733.2,2747-2765).
gacacagactgtatgatca

SEQ ID NO: 668386 - DNA, 19 bp, Mus musculus
  siRNA target sequence for Chaf1a (NM_013733.2,2749-2767).
cacagactgtatgatcata

SEQ ID NO: 668387 - DNA, 19 bp, Mus musculus
  siRNA target sequence for Dnaja2 (NM_019794.1,109-127).
ccgaaagttagccaaagaa

SEQ ID NO: 668388 - DNA, 19 bp, Mus musculus
  siRNA target sequence for Dnaja2 (NM_019794.1,110-128).
cgaaagttagccaaagaat

SEQ ID NO: 668389 - DNA, 19 bp, Mus musculus
  siRNA target sequence for Dnaja2 (NM_019794.1,146-164).
ccaaatgctggagacaaat

SEQ ID NO: 668390 - DNA, 19 bp, Mus musculus
  siRNA target sequence for Dnaja2 (NM_019794.1,266-284).
ggcggtggcatggatgata

SEQ ID NO: 668391 - DNA, 19 bp, Mus musculus
  siRNA target sequence for Dnaja2 (NM_019794.1,267-285).
gcggtggcatggatgatat

SEQ ID NO: 668392 - DNA, 19 bp, Mus musculus
  siRNA target sequence for Dnaja2 (NM_019794.1,270-288).
gtggcatggatgatatctt

SEQ ID NO: 668393 - DNA, 19 bp, Mus musculus
  siRNA target sequence for Dnaja2 (NM_019794.1,325-343).
gggcaatcagagtagaagt

SEQ ID NO: 668394 - DNA, 19 bp, Mus musculus
  siRNA target sequence for Dnaja2 (NM_019794.1,370-388).
catgatgcatccactaaaa

SEQ ID NO: 668395 - DNA, 19 bp, Mus musculus
  siRNA target sequence for Dnaja2 (NM_019794.1,373-391).
gatgcatccactaaaagta

SEQ ID NO: 668396 - DNA, 19 bp, Mus musculus
  siRNA target sequence for Dnaja2 (NM_019794.1,376-394).
gcatccactaaaagtatct

SEQ ID NO: 668397 - DNA, 19 bp, Mus musculus
  siRNA target sequence for Dnaja2 (NM_019794.1,377-395).
catccactaaaagtatctt

SEQ ID NO: 668398 - DNA, 19 bp, Mus musculus
  siRNA target sequence for Dnaja2 (NM_019794.1,481-499).
gtctggagctgttcagaaa

SEQ ID NO: 668399 - DNA, 19 bp, Mus musculus
  siRNA target sequence for Dnaja2 (NM_019794.1,485-503).
ggagctgttcagaaatgca

SEQ ID NO: 668400 - DNA, 19 bp, Mus musculus
  siRNA target sequence for Dnaja2 (NM_019794.1,516-534).
gtcgaggtgtgcgcattat

SEQ ID NO: 668401 - DNA, 19 bp, Mus musculus
  siRNA target sequence for Dnaja2 (NM_019794.1,518-536).
cgaggtgtgcgcattatga

SEQ ID NO: 668402 - DNA, 19 bp, Mus musculus
  siRNA target sequence for Dnaja2 (NM_019794.1,519-537).
gaggtgtgcgcattatgat

SEQ ID NO: 668403 - DNA, 19 bp, Mus musculus
  siRNA target sequence for Dnaja2 (NM_019794.1,577-595).
cgtgtgctccgactgtaat

SEQ ID NO: 668404 - DNA, 19 bp, Mus musculus
  siRNA target sequence for Dnaja2 (NM_019794.1,580-598).
gtgctccgactgtaatgga

SEQ ID NO: 668405 - DNA, 19 bp, Mus musculus
  siRNA target sequence for Dnaja2 (NM_019794.1,604-622).
ggaggtcatcaatgaaaaa

SEQ ID NO: 668406 - DNA, 19 bp, Mus musculus
  siRNA target sequence for Dnaja2 (NM_019794.1,625-643).
ccgctgtaaaaaatgtgaa

SEQ ID NO: 668407 - DNA, 19 bp, Mus musculus
  siRNA target sequence for Dnaja2 (NM_019794.1,704-722).
catggacagaggattacgt

SEQ ID NO: 668408 - DNA, 19 bp, Mus musculus
  siRNA target sequence for Dnaja2 (NM_019794.1,810-828).
gagatgggaatgatttgca

SEQ ID NO: 668409 - DNA, 19 bp, Mus musculus
  siRNA target sequence for Dnaja2 (NM_019794.1,812-830).
gatgggaatgatttgcata

SEQ ID NO: 668410 - DNA, 19 bp, Mus musculus
  siRNA target sequence for Dnaja2 (NM_019794.1,826-844).
gcatatgacatataagata

SEQ ID NO: 668411 - DNA, 19 bp, Mus musculus
  siRNA target sequence for Dnaja2 (NM_019794.1,899-917).
cgtcagattgtggtgaaat

SEQ ID NO: 668412 - DNA, 19 bp, Mus musculus
  siRNA target sequence for Dnaja2 (NM_019794.1,921-939).
cccctggcaaagtaattga

SEQ ID NO: 668413 - DNA, 19 bp, Mus musculus
  siRNA target sequence for Dnaja2 (NM_019794.1,922-940).
ccctggcaaagtaattgaa

SEQ ID NO: 668414 - DNA, 19 bp, Mus musculus
  siRNA target sequence for Dnaja2 (NM_019794.1,971-989).
ggaatgccacagtatcgta

SEQ ID NO: 668415 - DNA, 19 bp, Mus musculus
  siRNA target sequence for Dnaja2 (NM_019794.1,972-990).
gaatgccacagtatcgtaa

SEQ ID NO: 668416 - DNA, 19 bp, Mus musculus
  siRNA target sequence for Dnaja2 (NM_019794.1,982-1000).
gtatcgtaatccctttgaa

SEQ ID NO: 668417 - DNA, 19 bp, Mus musculus
  siRNA target sequence for Dnaja2 (NM_019794.1,1048-1066).
ctggatcaacccagacaaa

SEQ ID NO: 668418 - DNA, 19 bp, Mus musculus
  siRNA target sequence for Dnaja2 (NM_019794.1,1051-1069).
gatcaacccagacaaactt

SEQ ID NO: 668419 - DNA, 19 bp, Mus musculus
  siRNA target sequence for Dnaja2 (NM_019794.1,1054-1072).
caacccagacaaactttct

SEQ ID NO: 668420 - DNA, 19 bp, Mus musculus
  siRNA target sequence for Dnaja2 (NM_019794.1,1058-1076).
ccagacaaactttctgaat

SEQ ID NO: 668421 - DNA, 19 bp, Mus musculus
  siRNA target sequence for Dnaja2 (NM_019794.1,1098-1116).
gaccagaagttcctaatgt

SEQ ID NO: 668422 - DNA, 19 bp, Mus musculus
  siRNA target sequence for Dnaja2 (NM_019794.1,1139-1157).
gagcttcaggaatttgata

SEQ ID NO: 668423 - DNA, 19 bp, Mus musculus
  siRNA target sequence for Dnaja2 (NM_019794.1,1183-1201).
gagacgtgaagcctataat

SEQ ID NO: 668424 - DNA, 19 bp, Mus musculus
  siRNA target sequence for Dnaja2 (NM_019794.1,1187-1205).
cgtgaagcctataatgata

SEQ ID NO: 668425 - DNA, 19 bp, Mus musculus
  siRNA target sequence for Dnaja4 (NM_021422.2,221-239).
cgtccccggaggagatcaa

SEQ ID NO: 668426 - DNA, 19 bp, Mus musculus
  siRNA target sequence for Dnaja4 (NM_021422.2,287-305).
cggatgagggcgagaagtt

SEQ ID NO: 668427 - DNA, 19 bp, Mus musculus
  siRNA target sequence for Dnaja4 (NM_021422.2,294-312).
gggcgagaagtttaaactt

SEQ ID NO: 668428 - DNA, 19 bp, Mus musculus
  siRNA target sequence for Dnaja4 (NM_021422.2,297-315).
cgagaagtttaaacttata

SEQ ID NO: 668429 - DNA, 19 bp, Mus musculus
  siRNA target sequence for Dnaja4 (NM_021422.2,374-392).
gagaacaggcaattaaaga

SEQ ID NO: 668430 - DNA, 19 bp, Mus musculus
  siRNA target sequence for Dnaja4 (NM_021422.2,403-421).
ggcagccccagcttctctt

SEQ ID NO: 668431 - DNA, 19 bp, Mus musculus
  siRNA target sequence for Dnaja4 (NM_021422.2,454-472).
ggtggaggacggatgacta

SEQ ID NO: 668432 - DNA, 19 bp, Mus musculus
  siRNA target sequence for Dnaja4 (NM_021422.2,552-570).
ggccctccagaaaaatgta

SEQ ID NO: 668433 - DNA, 19 bp, Mus musculus
  siRNA target sequence for Dnaja4 (NM_021422.2,553-571).
gccctccagaaaaatgtaa

SEQ ID NO: 668434 - DNA, 19 bp, Mus musculus
  siRNA target sequence for Dnaja4 (NM_021422.2,554-572).
ccctccagaaaaatgtaat

SEQ ID NO: 668435 - DNA, 19 bp, Mus musculus
  siRNA target sequence for Dnaja4 (NM_021422.2,782-800).
gagagaagaagatcattga

SEQ ID NO: 668436 - DNA, 19 bp, Mus musculus
  siRNA target sequence for Dnaja4 (NM_021422.2,822-840).
gaaggatgggcaaaagata

SEQ ID NO: 668437 - DNA, 19 bp, Mus musculus
  siRNA target sequence for Dnaja4 (NM_021422.2,826-844).
gatgggcaaaagatactgt

SEQ ID NO: 668438 - DNA, 19 bp, Mus musculus
  siRNA target sequence for Dnaja4 (NM_021422.2,876-894).
ggaccctggcgatgtgata

SEQ ID NO: 668439 - DNA, 19 bp, Mus musculus
  siRNA target sequence for Dnaja4 (NM_021422.2,877-895).
gaccctggcgatgtgataa

SEQ ID NO: 668440 - DNA, 19 bp, Mus musculus
  siRNA target sequence for Dnaja4 (NM_021422.2,879-897).
ccctggcgatgtgataatt

SEQ ID NO: 668441 - DNA, 19 bp, Mus musculus
  siRNA target sequence for Dnaja4 (NM_021422.2,938-956).
gccaggatctgatcatgaa

SEQ ID NO: 668442 - DNA, 19 bp, Mus musculus
  siRNA target sequence for Dnaja4 (NM_021422.2,939-957).
ccaggatctgatcatgaaa

SEQ ID NO: 668443 - DNA, 19 bp, Mus musculus
  siRNA target sequence for Dnaja4 (NM_021422.2,1018-1036).
gatcgagtccttgtcattt

SEQ ID NO: 668444 - DNA, 19 bp, Mus musculus
  siRNA target sequence for Dnaja4 (NM_021422.2,1021-1039).
cgagtccttgtcatttcat

SEQ ID NO: 668445 - DNA, 19 bp, Mus musculus
  siRNA target sequence for Dnaja4 (NM_021422.2,1024-1042).
gtccttgtcatttcatcta

SEQ ID NO: 668446 - DNA, 19 bp, Mus musculus
  siRNA target sequence for Dnaja4 (NM_021422.2,1063-1081).
catggggacctgaagtgta

SEQ ID NO: 668447 - DNA, 19 bp, Mus musculus
  siRNA target sequence for Dnaja4 (NM_021422.2,1092-1110).
ggggatgcccatctacaaa

SEQ ID NO: 668448 - DNA, 19 bp, Mus musculus
  siRNA target sequence for Dnaja4 (NM_021422.2,1122-1140).
gaagggggtgatgatcata

SEQ ID NO: 668449 - DNA, 19 bp, Mus musculus
  siRNA target sequence for Dnaja4 (NM_021422.2,1126-1144).
ggggtgatgatcatacagt

SEQ ID NO: 668450 - DNA, 19 bp, Mus musculus
  siRNA target sequence for Dnajb10 (NM_020266.1,71-89).
catcctactacgagattct

SEQ ID NO: 668451 - DNA, 19 bp, Mus musculus
  siRNA target sequence for Dnajb10 (NM_020266.1,74-92).
cctactacgagattctaga

SEQ ID NO: 668452 - DNA, 19 bp, Mus musculus
  siRNA target sequence for Dnajb10 (NM_020266.1,163-181).
gacaagaacccggataata

SEQ ID NO: 668453 - DNA, 19 bp, Mus musculus
  siRNA target sequence for Dnajb10 (NM_020266.1,165-183).
caagaacccggataataaa

SEQ ID NO: 668454 - DNA, 19 bp, Mus musculus
  siRNA target sequence for Dnajb10 (NM_020266.1,219-237).
ggcctatgaagtactatct

SEQ ID NO: 668455 - DNA, 19 bp, Mus musculus
  siRNA target sequence for Dnajb10 (NM_020266.1,445-463).
cctgccaactccgatttct

SEQ ID NO: 668456 - DNA, 19 bp, Mus musculus
  siRNA target sequence for Dnajb10 (NM_020266.1,499-517).
gctttccgctccgtttcta

SEQ ID NO: 668457 - DNA, 19 bp, Mus musculus
  siRNA target sequence for Dnajb10 (NM_020266.1,575-593).
ggcaggagcgggtagaagt

SEQ ID NO: 668458 - DNA, 19 bp, Mus musculus
  siRNA target sequence for Dnajb10 (NM_178055.2,312-330).
gcacaaacgggagatctat

SEQ ID NO: 668459 - DNA, 19 bp, Mus musculus
  siRNA target sequence for Dnajb10 (NM_178055.2,425-443).
gtagccccgaggaagtctt

SEQ ID NO: 668460 - DNA, 19 bp, Mus musculus
  siRNA target sequence for Dnajb10 (NM_178055.2,457-475).
gggagcggagacccttttt

SEQ ID NO: 668461 - DNA, 19 bp, Mus musculus
  siRNA target sequence for Dnajb10 (NM_178055.2,459-477).
gagcggagaccctttttca

SEQ ID NO: 668462 - DNA, 19 bp, Mus musculus
  siRNA target sequence for Dnajb10 (NM_178055.2,461-479).
gcggagaccctttttcaga

SEQ ID NO: 668463 - DNA, 19 bp, Mus musculus
  siRNA target sequence for Dnajb12 (NM_019965.2,106-124).
gaagccgagcgctgtatca

SEQ ID NO: 668464 - DNA, 19 bp, Mus musculus
  siRNA target sequence for Dnajb12 (NM_019965.2,228-246).
cgagtccctcaaccaaaaa

SEQ ID NO: 668465 - DNA, 19 bp, Mus musculus
  siRNA target sequence for Dnajb12 (NM_019965.2,231-249).
gtccctcaaccaaaaacca

SEQ ID NO: 668466 - DNA, 19 bp, Mus musculus
  siRNA target sequence for Dnajb12 (NM_019965.2,403-421).
gtcaagcagtgtaaagatt

SEQ ID NO: 668467 - DNA, 19 bp, Mus musculus
  siRNA target sequence for Dnajb12 (NM_019965.2,482-500).
gcaagctggccctcaagtt

SEQ ID NO: 668468 - DNA, 19 bp, Mus musculus
  siRNA target sequence for Dnajb12 (NM_019965.2,527-545).
gggccactgaagctttcaa

SEQ ID NO: 668469 - DNA, 19 bp, Mus musculus
  siRNA target sequence for Dnajb12 (NM_019965.2,691-709).
gaagacctctttaacatgt

SEQ ID NO: 668470 - DNA, 19 bp, Mus musculus
  siRNA target sequence for Dnajb12 (NM_019965.2,723-741).
ctttccttccagtaacgtt

SEQ ID NO: 668471 - DNA, 19 bp, Mus musculus
  siRNA target sequence for Dnajb12 (NM_019965.2,731-749).
ccagtaacgttcatgtcta

SEQ ID NO: 668472 - DNA, 19 bp, Mus musculus
  siRNA target sequence for Dnajb12 (NM_019965.2,1008-1026).
gggctccagcctcaaaaca

SEQ ID NO: 668473 - DNA, 19 bp, Mus musculus
  siRNA target sequence for Dnajb12 (NM_019965.2,1110-1128).
gtaccgagcccgctacttt

SEQ ID NO: 668474 - DNA, 19 bp, Mus musculus
  siRNA target sequence for Dnajb12 (NM_019965.2,1164-1182).
gggcaccccgagttgcaat

SEQ ID NO: 668475 - DNA, 19 bp, Mus musculus
  siRNA target sequence for Dnajb3 (NM_008299.1,223-241).
caggcctacgaggtcttat

SEQ ID NO: 668476 - DNA, 19 bp, Mus musculus
  siRNA target sequence for Dnajb3 (NM_008299.1,425-443).
gagacccccttgagaactt

SEQ ID NO: 668477 - DNA, 19 bp, Mus musculus
  siRNA target sequence for Dnajb3 (NM_008299.1,427-445).
gacccccttgagaactttt

SEQ ID NO: 668478 - DNA, 19 bp, Mus musculus
  siRNA target sequence for Dnajb3 (NM_008299.1,531-549).
gggtggcttcgcttcgtta

SEQ ID NO: 668479 - DNA, 19 bp, Mus musculus
  siRNA target sequence for Dnajb3 (NM_008299.1,535-553).
ggcttcgcttcgttagata

SEQ ID NO: 668480 - DNA, 19 bp, Mus musculus
  siRNA target sequence for Dnajb3 (NM_008299.1,537-555).
cttcgcttcgttagatact

SEQ ID NO: 668481 - DNA, 19 bp, Mus musculus
  siRNA target sequence for Dnajb3 (NM_008299.1,546-564).
gttagatactggattcaca

SEQ ID NO: 668482 - DNA, 19 bp, Mus musculus
  siRNA target sequence for Dnajb3 (NM_008299.1,650-668).
caacctccaccgaaataat

SEQ ID NO: 668483 - DNA, 19 bp, Mus musculus
  siRNA target sequence for Dnajb3 (NM_008299.1,654-672).
ctccaccgaaataattaat

SEQ ID NO: 668484 - DNA, 19 bp, Mus musculus
  siRNA target sequence for Dnajb3 (NM_008299.1,774-792).
gcagctgcttcgcatcaat

SEQ ID NO: 668485 - DNA, 19 bp, Mus musculus
  siRNA target sequence for Dnajb3 (NM_008299.1,775-793).
cagctgcttcgcatcaata

SEQ ID NO: 668486 - DNA, 19 bp, Mus musculus
  siRNA target sequence for Dnajb3 (NM_008299.1,777-795).
gctgcttcgcatcaatact

SEQ ID NO: 668487 - DNA, 19 bp, Mus musculus
  siRNA target sequence for Dnajb5 (NM_019874.3,326-344).
ccggtggctcctttcacta

SEQ ID NO: 668488 - DNA, 19 bp, Mus musculus
  siRNA target sequence for Dnajb5 (NM_019874.3,361-379).
cctcatgccacctttgctt

SEQ ID NO: 668489 - DNA, 19 bp, Mus musculus
  siRNA target sequence for Dnajb5 (NM_019874.3,391-409).
ggctccaaccccttcgata

SEQ ID NO: 668490 - DNA, 19 bp, Mus musculus
  siRNA target sequence for Dnajb5 (NM_019874.3,395-413).
ccaaccccttcgatatctt

SEQ ID NO: 668491 - DNA, 19 bp, Mus musculus
  siRNA target sequence for Dnajb5 (NM_019874.3,691-709).
gtgcgcaccgaggacaaaa

SEQ ID NO: 668492 - DNA, 19 bp, Mus musculus
  siRNA target sequence for Dnajb5 (NM_019874.3,902-920).
gtggctgcaccgtgaacat

SEQ ID NO: 668493 - DNA, 19 bp, Mus musculus
  siRNA target sequence for Dnajb5 (NM_019874.3,915-933).
gaacattcccaccattgat

SEQ ID NO: 668494 - DNA, 19 bp, Mus musculus
  siRNA target sequence for Dnajb5 (NM_019874.3,972-990).
gccaggcaccgtgaaaaga

SEQ ID NO: 668495 - DNA, 19 bp, Mus musculus
  siRNA target sequence for Dnajb5 (NM_019874.3,1032-1050).
gcggggagacctcattgtt

SEQ ID NO: 668496 - DNA, 19 bp, Mus musculus
  siRNA target sequence for Dnajb5 (NM_019874.3,1063-1081).
cgattcccagacagattaa

SEQ ID NO: 668497 - DNA, 19 bp, Mus musculus
  siRNA target sequence for Dnajb5 (NM_019874.3,1087-1105).
cagacacggcagatcctta

SEQ ID NO: 668498 - DNA, 19 bp, Mus musculus
  siRNA target sequence for Dnajb7 (NM_021317.1,142-160).
ggtggactattatgaagtt

SEQ ID NO: 668499 - DNA, 19 bp, Mus musculus
  siRNA target sequence for Dnajb7 (NM_021317.1,145-163).
ggactattatgaagttcta

SEQ ID NO: 668500 - DNA, 19 bp, Mus musculus
  siRNA target sequence for Dnajb7 (NM_021317.1,180-198).
cgtcaccagaagacattaa

SEQ ID NO: 668501 - DNA, 19 bp, Mus musculus
  siRNA target sequence for Dnajb7 (NM_021317.1,193-211).
cattaaaagagcttatcgt

SEQ ID NO: 668502 - DNA, 19 bp, Mus musculus
  siRNA target sequence for Dnajb7 (NM_021317.1,209-227).
cgtaaagtagcacttaaat

SEQ ID NO: 668503 - DNA, 19 bp, Mus musculus
  siRNA target sequence for Dnajb7 (NM_021317.1,229-247).
gcatcctgataaaaatcca

SEQ ID NO: 668504 - DNA, 19 bp, Mus musculus
  siRNA target sequence for Dnajb7 (NM_021317.1,260-278).
gaagcggagcgaaaattca

SEQ ID NO: 668505 - DNA, 19 bp, Mus musculus
  siRNA target sequence for Dnajb7 (NM_021317.1,264-282).
cggagcgaaaattcaaaga

SEQ ID NO: 668506 - DNA, 19 bp, Mus musculus
  siRNA target sequence for Dnajb7 (NM_021317.1,265-283).
ggagcgaaaattcaaagaa

SEQ ID NO: 668507 - DNA, 19 bp, Mus musculus
  siRNA target sequence for Dnajb7 (NM_021317.1,314-332).
gttgagaaacgggacattt

SEQ ID NO: 668508 - DNA, 19 bp, Mus musculus
  siRNA target sequence for Dnajb7 (NM_021317.1,392-410).
cgtgagtaccgcttcacat

SEQ ID NO: 668509 - DNA, 19 bp, Mus musculus
  siRNA target sequence for Dnajb7 (NM_021317.1,393-411).
gtgagtaccgcttcacatt

SEQ ID NO: 668510 - DNA, 19 bp, Mus musculus
  siRNA target sequence for Dnajb7 (NM_021317.1,420-438).
cagacgatgtctttaagga

SEQ ID NO: 668511 - DNA, 19 bp, Mus musculus
  siRNA target sequence for Dnajb7 (NM_021317.1,486-504).
ccctcgagggccttttaaa

SEQ ID NO: 668512 - DNA, 19 bp, Mus musculus
  siRNA target sequence for Dnajb7 (NM_021317.1,491-509).
gagggccttttaaacagtt

SEQ ID NO: 668513 - DNA, 19 bp, Mus musculus
  siRNA target sequence for Dnajb7 (NM_021317.1,601-619).
cgacacagggtattcatct

SEQ ID NO: 668514 - DNA, 19 bp, Mus musculus
  siRNA target sequence for Dnajb7 (NM_021317.1,604-622).
cacagggtattcatcttat

SEQ ID NO: 668515 - DNA, 19 bp, Mus musculus
  siRNA target sequence for Dnajb7 (NM_021317.1,606-624).
cagggtattcatcttatgt

SEQ ID NO: 668516 - DNA, 19 bp, Mus musculus
  siRNA target sequence for Dnajb7 (NM_021317.1,608-626).
gggtattcatcttatgttt

SEQ ID NO: 668517 - DNA, 19 bp, Mus musculus
  siRNA target sequence for Dnajb7 (NM_021317.1,638-656).
gagggccttacgtcattct

SEQ ID NO: 668518 - DNA, 19 bp, Mus musculus
  siRNA target sequence for Dnajb7 (NM_021317.1,640-658).
gggccttacgtcattctct

SEQ ID NO: 668519 - DNA, 19 bp, Mus musculus
  siRNA target sequence for Dnajb7 (NM_021317.1,641-659).
ggccttacgtcattctctt

SEQ ID NO: 668520 - DNA, 19 bp, Mus musculus
  siRNA target sequence for Dnajb7 (NM_021317.1,680-698).
ctggaatgggcaactatat

SEQ ID NO: 668521 - DNA, 19 bp, Mus musculus
  siRNA target sequence for Dnajb7 (NM_021317.1,690-708).
caactatatacccattaca

SEQ ID NO: 668522 - DNA, 19 bp, Mus musculus
  siRNA target sequence for Dnajb7 (NM_021317.1,707-725).
caccttcaggcaaagttat

SEQ ID NO: 668523 - DNA, 19 bp, Mus musculus
  siRNA target sequence for Dnajb7 (NM_021317.1,709-727).
ccttcaggcaaagttatta

SEQ ID NO: 668524 - DNA, 19 bp, Mus musculus
  siRNA target sequence for Dnajb7 (NM_021317.1,710-728).
cttcaggcaaagttattaa

SEQ ID NO: 668525 - DNA, 19 bp, Mus musculus
  siRNA target sequence for Dnajb8 (NM_019964.1,232-250).
gaagtgctgggtgtacaat

SEQ ID NO: 668526 - DNA, 19 bp, Mus musculus
  siRNA target sequence for Dnajb8 (NM_019964.1,235-253).
gtgctgggtgtacaatcaa

SEQ ID NO: 668527 - DNA, 19 bp, Mus musculus
  siRNA target sequence for Dnajb8 (NM_019964.1,302-320).
gttggcaccctgacaagaa

SEQ ID NO: 668528 - DNA, 19 bp, Mus musculus
  siRNA target sequence for Dnajb8 (NM_019964.1,315-333).
caagaaccccgacaacaaa

SEQ ID NO: 668529 - DNA, 19 bp, Mus musculus
  siRNA target sequence for Dnajb8 (NM_019964.1,321-339).
ccccgacaacaaagaagaa

SEQ ID NO: 668530 - DNA, 19 bp, Mus musculus
  siRNA target sequence for Dnajb8 (NM_019964.1,365-383).
ccgaagcctacgaagtctt

SEQ ID NO: 668531 - DNA, 19 bp, Mus musculus
  siRNA target sequence for Dnajb8 (NM_019964.1,379-397).
gtcttgtcagactctaaga

SEQ ID NO: 668532 - DNA, 19 bp, Mus musculus
  siRNA target sequence for Dnajb8 (NM_019964.1,495-513).
ccgaaatcctgaggatatt

SEQ ID NO: 668533 - DNA, 19 bp, Mus musculus
  siRNA target sequence for Dnajb8 (NM_019964.1,529-547).
gggggactggacccttttt

SEQ ID NO: 668534 - DNA, 19 bp, Mus musculus
  siRNA target sequence for Dnajb8 (NM_019964.1,841-859).
ggacagctccggtcagtaa

SEQ ID NO: 668535 - DNA, 19 bp, Mus musculus
  siRNA target sequence for Dnajb8 (NM_019964.1,849-867).
ccggtcagtaactgtcaat

SEQ ID NO: 668536 - DNA, 19 bp, Mus musculus
  siRNA target sequence for Dnajc5 (NM_016775.1,16-34).
cagcgctcactctctactt

SEQ ID NO: 668537 - DNA, 19 bp, Mus musculus
  siRNA target sequence for Dnajc5 (NM_016775.1,29-47).
ctacttccggggaatcatt

SEQ ID NO: 668538 - DNA, 19 bp, Mus musculus
  siRNA target sequence for Dnajc5 (NM_016775.1,32-50).
cttccggggaatcattata

SEQ ID NO: 668539 - DNA, 19 bp, Mus musculus
  siRNA target sequence for Dnajc5 (NM_016775.1,35-53).
ccggggaatcattatacca

SEQ ID NO: 668540 - DNA, 19 bp, Mus musculus
  siRNA target sequence for Dnajc5 (NM_016775.1,36-54).
cggggaatcattataccat

SEQ ID NO: 668541 - DNA, 19 bp, Mus musculus
  siRNA target sequence for Dnajc5 (NM_016775.1,76-94).
gcaacctcagatgacatta

SEQ ID NO: 668542 - DNA, 19 bp, Mus musculus
  siRNA target sequence for Dnajc5 (NM_016775.1,154-172).
gaggctgcagacaagttta

SEQ ID NO: 668543 - DNA, 19 bp, Mus musculus
  siRNA target sequence for Dnajc5 (NM_016775.1,199-217).
ctgacagacgccacgaaaa

SEQ ID NO: 668544 - DNA, 19 bp, Mus musculus
  siRNA target sequence for Dnajc5 (NM_016775.1,201-219).
gacagacgccacgaaaaga

SEQ ID NO: 668545 - DNA, 19 bp, Mus musculus
  siRNA target sequence for Dnajc5 (NM_016775.1,203-221).
cagacgccacgaaaagaaa

SEQ ID NO: 668546 - DNA, 19 bp, Mus musculus
  siRNA target sequence for Dnajc5 (NM_016775.1,205-223).
gacgccacgaaaagaaaca

SEQ ID NO: 668547 - DNA, 19 bp, Mus musculus
  siRNA target sequence for Dnajc5 (NM_016775.1,207-225).
cgccacgaaaagaaacatt

SEQ ID NO: 668548 - DNA, 19 bp, Mus musculus
  siRNA target sequence for Dnajc5 (NM_016775.1,239-257).
gctcgctggggctctatgt

SEQ ID NO: 668549 - DNA, 19 bp, Mus musculus
  siRNA target sequence for Dnajc5 (NM_016775.1,314-332).
gggccaaggcgctgtttgt

SEQ ID NO: 668550 - DNA, 19 bp, Mus musculus
  siRNA target sequence for Dnajc5 (NM_016775.1,321-339).
ggcgctgtttgttgtttgt

SEQ ID NO: 668551 - DNA, 19 bp, Mus musculus
  siRNA target sequence for Dnajc5 (NM_016775.1,577-595).
cacaccgacgggttcaact

SEQ ID NO: 668552 - DNA, 19 bp, Mus musculus
  siRNA target sequence for Grpel1 (NM_024478.2,87-105).
gttgtgcacagctacgaaa

SEQ ID NO: 668553 - DNA, 19 bp, Mus musculus
  siRNA target sequence for Grpel1 (NM_024478.2,92-110).
gcacagctacgaaacagaa

SEQ ID NO: 668554 - DNA, 19 bp, Mus musculus
  siRNA target sequence for Grpel1 (NM_024478.2,295-313).
gtagaggaggccaagttat

SEQ ID NO: 668555 - DNA, 19 bp, Mus musculus
  siRNA target sequence for Grpel1 (NM_024478.2,371-389).
caacccagagtgttccaaa

SEQ ID NO: 668556 - DNA, 19 bp, Mus musculus
  siRNA target sequence for Grpel1 (NM_024478.2,413-431).
ctcacctgaagagtcttta

SEQ ID NO: 668557 - DNA, 19 bp, Mus musculus
  siRNA target sequence for Grpel1 (NM_024478.2,574-592).
ggcactgtggcactagtta

SEQ ID NO: 668558 - DNA, 19 bp, Mus musculus
  siRNA target sequence for Grpel1 (NM_024478.2,578-596).
ctgtggcactagttagtaa

SEQ ID NO: 668559 - DNA, 19 bp, Mus musculus
  siRNA target sequence for H2-Ke2 (NM_010385.1,279-297).
gaaggacttgagtaaatct

SEQ ID NO: 668560 - DNA, 19 bp, Mus musculus
  siRNA target sequence for H2-Ke2 (NM_010385.1,325-343).
cagctaacggaaaacaata

SEQ ID NO: 668561 - DNA, 19 bp, Mus musculus
  siRNA target sequence for H2-Ke2 (NM_010385.1,374-392).
gatccaacgtggtctttaa

SEQ ID NO: 668562 - DNA, 19 bp, Mus musculus
  siRNA target sequence for H2-Ke2 (NM_010385.1,399-417).
gggacccgtgcttgtcaaa

SEQ ID NO: 668563 - DNA, 19 bp, Mus musculus
  siRNA target sequence for H2-Ke2 (NM_010385.1,475-493).
gaaatcaagcgctacgaat

SEQ ID NO: 668564 - DNA, 19 bp, Mus musculus
  siRNA target sequence for Ii (NM_010545.2,719-737).
cgtccaatgtccatggata

SEQ ID NO: 668565 - DNA, 19 bp, Mus musculus
  siRNA target sequence for Ii (NM_010545.2,720-738).
gtccaatgtccatggataa

SEQ ID NO: 668566 - DNA, 19 bp, Mus musculus
  siRNA target sequence for Ii (NM_010545.2,722-740).
ccaatgtccatggataaca

SEQ ID NO: 668567 - DNA, 19 bp, Mus musculus
  siRNA target sequence for Ii (NM_010545.2,893-911).
ggcgtgaactggaagatct

SEQ ID NO: 668568 - DNA, 19 bp, Mus musculus
  siRNA target sequence for Ii (NM_010545.2,894-912).
gcgtgaactggaagatctt

SEQ ID NO: 668569 - DNA, 19 bp, Mus musculus
  siRNA target sequence for Jdp1 (NM_013888.1,373-391).
gtgaaaacttcgatgcatt

SEQ ID NO: 668570 - DNA, 19 bp, Mus musculus
  siRNA target sequence for Jdp1 (NM_013888.1,446-464).
ccagctcagttccaaacaa

SEQ ID NO: 668571 - DNA, 19 bp, Mus musculus
  siRNA target sequence for Jdp1 (NM_013888.1,652-670).
ctgcggaagttcagaaact

SEQ ID NO: 668572 - DNA, 19 bp, Mus musculus
  siRNA target sequence for Jdp1 (NM_013888.1,654-672).
gcggaagttcagaaactat

SEQ ID NO: 668573 - DNA, 19 bp, Mus musculus
  siRNA target sequence for Ndufaf1 (NM_027175.2,271-289).
gcaatgtcttccattcaca

SEQ ID NO: 668574 - DNA, 19 bp, Mus musculus
  siRNA target sequence for Ndufaf1 (NM_027175.2,297-315).
gactggcatttacattcat

SEQ ID NO: 668575 - DNA, 19 bp, Mus musculus
  siRNA target sequence for Ndufaf1 (NM_027175.2,327-345).
gaggccaagggctgcatta

SEQ ID NO: 668576 - DNA, 19 bp, Mus musculus
  siRNA target sequence for Ndufaf1 (NM_027175.2,330-348).
gccaagggctgcattacct

SEQ ID NO: 668577 - DNA, 19 bp, Mus musculus
  siRNA target sequence for Ndufaf1 (NM_027175.2,336-354).
ggctgcattacctccattt

SEQ ID NO: 668578 - DNA, 19 bp, Mus musculus
  siRNA target sequence for Ndufaf1 (NM_027175.2,380-398).
cttccagtagtcttcagaa

SEQ ID NO: 668579 - DNA, 19 bp, Mus musculus
  siRNA target sequence for Ndufaf1 (NM_027175.2,383-401).
ccagtagtcttcagaaaaa

SEQ ID NO: 668580 - DNA, 19 bp, Mus musculus
  siRNA target sequence for Ndufaf1 (NM_027175.2,438-456).
gactgaagagggcttacaa

SEQ ID NO: 668581 - DNA, 19 bp, Mus musculus
  siRNA target sequence for Ndufaf1 (NM_027175.2,499-517).
gacaggacacctgaagtta

SEQ ID NO: 668582 - DNA, 19 bp, Mus musculus
  siRNA target sequence for Ndufaf1 (NM_027175.2,501-519).
caggacacctgaagttagt

SEQ ID NO: 668583 - DNA, 19 bp, Mus musculus
  siRNA target sequence for Ndufaf1 (NM_027175.2,504-522).
gacacctgaagttagtttt

SEQ ID NO: 668584 - DNA, 19 bp, Mus musculus
  siRNA target sequence for Ndufaf1 (NM_027175.2,610-628).
ccattacaagaggtcataa

SEQ ID NO: 668585 - DNA, 19 bp, Mus musculus
  siRNA target sequence for Ndufaf1 (NM_027175.2,648-666).
ctggcagtttcgtgaaaaa

SEQ ID NO: 668586 - DNA, 19 bp, Mus musculus
  siRNA target sequence for Ndufaf1 (NM_027175.2,650-668).
ggcagtttcgtgaaaaaga

SEQ ID NO: 668587 - DNA, 19 bp, Mus musculus
  siRNA target sequence for Ndufaf1 (NM_027175.2,681-699).
gtggatagtgacttctgat

SEQ ID NO: 668588 - DNA, 19 bp, Mus musculus
  siRNA target sequence for Ndufaf1 (NM_027175.2,702-720).
gacaattggaggtagaagt

SEQ ID NO: 668589 - DNA, 19 bp, Mus musculus
  siRNA target sequence for Ndufaf1 (NM_027175.2,750-768).
ccgaagtgccctgctttat

SEQ ID NO: 668590 - DNA, 19 bp, Mus musculus
  siRNA target sequence for Ndufaf1 (NM_027175.2,795-813).
ggatggggacagtagacaa

SEQ ID NO: 668591 - DNA, 19 bp, Mus musculus
  siRNA target sequence for Ndufaf1 (NM_027175.2,796-814).
gatggggacagtagacaaa

SEQ ID NO: 668592 - DNA, 19 bp, Mus musculus
  siRNA target sequence for Ndufaf1 (NM_027175.2,877-895).
gattggtcccagttcaata

SEQ ID NO: 668593 - DNA, 19 bp, Mus musculus
  siRNA target sequence for Ndufaf1 (NM_027175.2,922-940).
ggacggccttggatggtaa

SEQ ID NO: 668594 - DNA, 19 bp, Mus musculus
  siRNA target sequence for Ndufaf1 (NM_027175.2,923-941).
gacggccttggatggtaaa

SEQ ID NO: 668595 - DNA, 19 bp, Mus musculus
  siRNA target sequence for Ndufaf1 (NM_027175.2,925-943).
cggccttggatggtaaata

SEQ ID NO: 668596 - DNA, 19 bp, Mus musculus
  siRNA target sequence for Ndufaf1 (NM_027175.2,1094-1112).
cactcgtattggacaagat

SEQ ID NO: 668597 - DNA, 19 bp, Mus musculus
  siRNA target sequence for Ndufaf1 (NM_027175.2,1107-1125).
caagatctcttctatagga

SEQ ID NO: 668598 - DNA, 19 bp, Mus musculus
  siRNA target sequence for Ndufaf1 (NM_027175.2,1151-1169).
gaccattcttcctggaaat

SEQ ID NO: 668599 - DNA, 19 bp, Mus musculus
  siRNA target sequence for Ndufaf1 (NM_027175.2,1176-1194).
cattggtgtgtttactgat

SEQ ID NO: 668600 - DNA, 19 bp, Mus musculus
  siRNA target sequence for ORF28 (NM_138664.1,447-465).
cgacgtcagggagtctttt

SEQ ID NO: 668601 - DNA, 19 bp, Mus musculus
  siRNA target sequence for ORF28 (NM_138664.1,489-507).
cccagacagcggttctagt

SEQ ID NO: 668602 - DNA, 19 bp, Mus musculus
  siRNA target sequence for ORF28 (NM_138664.1,558-576).
gctgtcccatgcgataaaa

SEQ ID NO: 668603 - DNA, 19 bp, Mus musculus
  siRNA target sequence for ORF28 (NM_138664.1,653-671).
ctcagcaccgacattactt

SEQ ID NO: 668604 - DNA, 19 bp, Mus musculus
  siRNA target sequence for ORF28 (NM_138664.1,655-673).
cagcaccgacattacttaa

SEQ ID NO: 668605 - DNA, 19 bp, Mus musculus
  siRNA target sequence for ORF28 (NM_138664.1,658-676).
caccgacattacttaagct

SEQ ID NO: 668606 - DNA, 19 bp, Mus musculus
  siRNA target sequence for ORF28 (NM_138664.1,753-771).
gcaggtgatggaataccaa

SEQ ID NO: 668607 - DNA, 19 bp, Mus musculus
  siRNA target sequence for ORF28 (NM_138664.1,754-772).
caggtgatggaataccaaa

SEQ ID NO: 668608 - DNA, 19 bp, Mus musculus
  siRNA target sequence for ORF28 (NM_138664.1,837-855).
gcaacagaagataactcaa

SEQ ID NO: 668609 - DNA, 19 bp, Mus musculus
  siRNA target sequence for ORF28 (NM_138664.1,953-971).
ctggctgctcatatattga

SEQ ID NO: 668610 - DNA, 19 bp, Mus musculus
  siRNA target sequence for ORF28 (NM_138664.1,982-1000).
cacaacctgaaccgaatat

SEQ ID NO: 668611 - DNA, 19 bp, Mus musculus
  siRNA target sequence for ORF28 (NM_138664.1,990-1008).
gaaccgaatattgatagat

SEQ ID NO: 668612 - DNA, 19 bp, Mus musculus
  siRNA target sequence for ORF28 (NM_138664.1,993-1011).
ccgaatattgatagataat

SEQ ID NO: 668613 - DNA, 19 bp, Mus musculus
  siRNA target sequence for ORF28 (NM_138664.1,1069-1087).
ctccgagaagcgcttttaa

SEQ ID NO: 668614 - DNA, 19 bp, Mus musculus
  siRNA target sequence for ORF28 (NM_138664.1,1075-1093).
gaagcgcttttaatgtcta

SEQ ID NO: 668615 - DNA, 19 bp, Mus musculus
  siRNA target sequence for ORF28 (NM_138664.1,1149-1167).
gtgtgagcagtttcaagaa

SEQ ID NO: 668616 - DNA, 19 bp, Mus musculus
  siRNA target sequence for ORF28 (NM_138664.1,1182-1200).
gaacaagcgaattaatgat

SEQ ID NO: 668617 - DNA, 19 bp, Mus musculus
  siRNA target sequence for ORF28 (NM_138664.1,1189-1207).
cgaattaatgatttcaact

SEQ ID NO: 668618 - DNA, 19 bp, Mus musculus
  siRNA target sequence for ORF28 (NM_138664.1,1229-1247).
ggcagaaagtccattttga

SEQ ID NO: 668619 - DNA, 19 bp, Mus musculus
  siRNA target sequence for ORF28 (NM_138664.1,1239-1257).
ccattttgacgcacagaaa

SEQ ID NO: 668620 - DNA, 19 bp, Mus musculus
  siRNA target sequence for ORF28 (NM_138664.1,1246-1264).
gacgcacagaaagaaatta

SEQ ID NO: 668621 - DNA, 19 bp, Mus musculus
  siRNA target sequence for ORF28 (NM_138664.1,1290-1308).
cttcgtagaagcaaacgaa

SEQ ID NO: 668622 - DNA, 19 bp, Mus musculus
  siRNA target sequence for ORF28 (NM_138664.1,1333-1351).
gttagccagggagaagaat

SEQ ID NO: 668623 - DNA, 19 bp, Mus musculus
  siRNA target sequence for ORF28 (NM_138664.1,1366-1384).
gtcaaggcaggctttctaa

SEQ ID NO: 668624 - DNA, 19 bp, Mus musculus
  siRNA target sequence for ORF28 (NM_138664.1,1389-1407).
gctaaatctgtggaaatct

SEQ ID NO: 668625 - DNA, 19 bp, Mus musculus
  siRNA target sequence for ORF28 (NM_138664.1,1390-1408).
ctaaatctgtggaaatcta

SEQ ID NO: 668626 - DNA, 19 bp, Mus musculus
  siRNA target sequence for Pfdn2 (NM_011070.2,63-81).
gtcggcggaacaggtaatt

SEQ ID NO: 668627 - DNA, 19 bp, Mus musculus
  siRNA target sequence for Pfdn2 (NM_011070.2,234-252).
ggtggagcggactgtcaaa

SEQ ID NO: 668628 - DNA, 19 bp, Mus musculus
  siRNA target sequence for Pfdn2 (NM_011070.2,335-353).
gcaaagaactgaacgaatt

SEQ ID NO: 668629 - DNA, 19 bp, Mus musculus
  siRNA target sequence for Pfdn5 (NM_020031.1,134-152).
cctcttgagcacattgaca

SEQ ID NO: 668630 - DNA, 19 bp, Mus musculus
  siRNA target sequence for Pfdn5 (NM_020031.1,173-191).
cacatttgggtggaagatt

SEQ ID NO: 668631 - DNA, 19 bp, Mus musculus
  siRNA target sequence for Pfdn5 (NM_020031.1,175-193).
catttgggtggaagatttt

SEQ ID NO: 668632 - DNA, 19 bp, Mus musculus
  siRNA target sequence for Pfdn5 (NM_020031.1,213-231).
gcgcagtcgattaacatca

SEQ ID NO: 668633 - DNA, 19 bp, Mus musculus
  siRNA target sequence for Wbscr18 (NM_025362.2,664-682).
gtcgtccttttccttatct

SEQ ID NO: 668634 - DNA, 19 bp, Mus musculus
  siRNA target sequence for Prdx5 (NM_012021.1,103-121).
cagagcaggccggaaagaa

SEQ ID NO: 668635 - DNA, 19 bp, Mus musculus
  siRNA target sequence for Prdx5 (NM_012021.1,266-284).
ggcaagaaaggtgttttgt

SEQ ID NO: 668636 - DNA, 19 bp, Mus musculus
  siRNA target sequence for Prdx5 (NM_012021.1,267-285).
gcaagaaaggtgttttgtt

SEQ ID NO: 668637 - DNA, 19 bp, Mus musculus
  siRNA target sequence for Prdx5 (NM_012021.1,385-403).
ggcctgtctgagcgttaat

SEQ ID NO: 668638 - DNA, 19 bp, Mus musculus
  siRNA target sequence for Prdx5 (NM_012021.1,387-405).
cctgtctgagcgttaatga

SEQ ID NO: 668639 - DNA, 19 bp, Mus musculus
  siRNA target sequence for Prdx5 (NM_012021.1,489-507).
ggaaggcgacagacttatt

SEQ ID NO: 668640 - DNA, 19 bp, Mus musculus
  siRNA target sequence for Prdx5 (NM_012021.1,536-554).
gggaatcgtcggctgaaaa

SEQ ID NO: 668641 - DNA, 19 bp, Mus musculus
  siRNA target sequence for Prdx5 (NM_012021.1,555-573).
ggttctccatggtgataga

SEQ ID NO: 668642 - DNA, 19 bp, Mus musculus
  siRNA target sequence for Idb1 (NM_010495.1,335-353).
catgtaatcgactacatca

SEQ ID NO: 668643 - DNA, 19 bp, Mus musculus
  siRNA target sequence for Idb1 (NM_010495.1,488-506).
gccgacgatcgcatcttgt

SEQ ID NO: 668644 - DNA, 19 bp, Mus musculus
  siRNA target sequence for 1110032C13Rik (NM_018820.3,646-664).
ctgtttgaggacatcgata

SEQ ID NO: 668645 - DNA, 19 bp, Mus musculus
  siRNA target sequence for 1110032C13Rik (NM_018820.3,669-687).
catgtacgacagtgaactt

SEQ ID NO: 668646 - DNA, 19 bp, Mus musculus
  siRNA target sequence for 1110032C13Rik (NM_018820.3,675-693).
cgacagtgaactttggtta

SEQ ID NO: 668647 - DNA, 19 bp, Mus musculus
  siRNA target sequence for 2610301I15Rik (NM_026456.2,291-309).
cctcacatgtgctatcaaa

SEQ ID NO: 668648 - DNA, 19 bp, Mus musculus
  siRNA target sequence for 2610301I15Rik (NM_026456.2,373-391).
cccaattgcacctgaaatt

SEQ ID NO: 668649 - DNA, 19 bp, Mus musculus
  siRNA target sequence for AB041541 (NM_021372.1,478-496).
ggctggaaggcaaaatcgt

SEQ ID NO: 668650 - DNA, 19 bp, Mus musculus
  siRNA target sequence for AB041541 (NM_021372.1,511-529).
gtccatccagggtgtctta

SEQ ID NO: 668651 - DNA, 19 bp, Mus musculus
  siRNA target sequence for AB041541 (NM_021372.1,513-531).
ccatccagggtgtcttaca

SEQ ID NO: 668652 - DNA, 19 bp, Mus musculus
  siRNA target sequence for AB041541 (NM_021372.1,532-550).
ccttacagcgccagactat

SEQ ID NO: 668653 - DNA, 19 bp, Mus musculus
  siRNA target sequence for AB041541 (NM_021372.1,537-555).
cagcgccagactatcttca

SEQ ID NO: 668654 - DNA, 19 bp, Mus musculus
  siRNA target sequence for AB041541 (NM_021372.1,540-558).
cgccagactatcttcaaca

SEQ ID NO: 668655 - DNA, 19 bp, Mus musculus
  siRNA target sequence for AB041541 (NM_021372.1,562-580).
cccttatgaaactgtataa

SEQ ID NO: 668656 - DNA, 19 bp, Mus musculus
  siRNA target sequence for AB041541 (NM_021372.1,616-634).
ctgtcttaattaacaacat

SEQ ID NO: 668657 - DNA, 19 bp, Mus musculus
  siRNA target sequence for AB041541 (NM_021372.1,824-842).
cgacaacgatgacactttt

SEQ ID NO: 668658 - DNA, 19 bp, Mus musculus
  siRNA target sequence for AB041541 (NM_021372.1,1063-1081).
cagatgactcacgattcat

SEQ ID NO: 668659 - DNA, 19 bp, Mus musculus
  siRNA target sequence for AB041541 (NM_021372.1,1157-1175).
gtttgctgacattgataca

SEQ ID NO: 668660 - DNA, 19 bp, Mus musculus
  siRNA target sequence for AB041541 (NM_021372.1,1170-1188).
gatacatccatgtacgatt

SEQ ID NO: 668661 - DNA, 19 bp, Mus musculus
  siRNA target sequence for AB041541 (NM_021372.1,1174-1192).
catccatgtacgattttga

SEQ ID NO: 668662 - DNA, 19 bp, Mus musculus
  siRNA target sequence for AB041541 (NM_021372.1,1210-1228).
cggggacagcctcaaagat

SEQ ID NO: 668663 - DNA, 19 bp, Mus musculus
  siRNA target sequence for AB041541 (NM_021372.1,1321-1339).
cggagctggaccacatcat

SEQ ID NO: 668664 - DNA, 19 bp, Mus musculus
  siRNA target sequence for Aes (NM_010347.1,82-100).
cctcagcagctcaagttca

SEQ ID NO: 668665 - DNA, 19 bp, Mus musculus
  siRNA target sequence for Aes (NM_010347.1,264-282).
gcacaaacaggcggaaatt

SEQ ID NO: 668666 - DNA, 19 bp, Mus musculus
  siRNA target sequence for Aes (NM_010347.1,312-330).
ggttctgccctatttgtca

SEQ ID NO: 668667 - DNA, 19 bp, Mus musculus
  siRNA target sequence for Ccnc (NM_016746.1,186-204).
cactatttgcagtggattt

SEQ ID NO: 668668 - DNA, 19 bp, Mus musculus
  siRNA target sequence for Ccnc (NM_016746.1,302-320).
ccaagcattaggtgaacat

SEQ ID NO: 668669 - DNA, 19 bp, Mus musculus
  siRNA target sequence for Ccnc (NM_016746.1,306-324).
gcattaggtgaacatctta

SEQ ID NO: 668670 - DNA, 19 bp, Mus musculus
  siRNA target sequence for Ccnc (NM_016746.1,307-325).
cattaggtgaacatcttaa

SEQ ID NO: 668671 - DNA, 19 bp, Mus musculus
  siRNA target sequence for Ccnc (NM_016746.1,312-330).
ggtgaacatcttaaattaa

SEQ ID NO: 668672 - DNA, 19 bp, Mus musculus
  siRNA target sequence for Ccnc (NM_016746.1,345-363).
gctactgctacagtctatt

SEQ ID NO: 668673 - DNA, 19 bp, Mus musculus
  siRNA target sequence for Ccnc (NM_016746.1,346-364).
ctactgctacagtctattt

SEQ ID NO: 668674 - DNA, 19 bp, Mus musculus
  siRNA target sequence for Ccnc (NM_016746.1,349-367).
ctgctacagtctatttcaa

SEQ ID NO: 668675 - DNA, 19 bp, Mus musculus
  siRNA target sequence for Ccnc (NM_016746.1,351-369).
gctacagtctatttcaaga

SEQ ID NO: 668676 - DNA, 19 bp, Mus musculus
  siRNA target sequence for Ccnc (NM_016746.1,397-415).
gtatagatcctgtattaat

SEQ ID NO: 668677 - DNA, 19 bp, Mus musculus
  siRNA target sequence for Ccnc (NM_016746.1,439-457).
catccaaagtagaggaatt

SEQ ID NO: 668678 - DNA, 19 bp, Mus musculus
  siRNA target sequence for Ccnc (NM_016746.1,558-576).
catatactagaatgtgaat

SEQ ID NO: 668679 - DNA, 19 bp, Mus musculus
  siRNA target sequence for Ccnc (NM_016746.1,601-619).
gttgcttgatagtgtatca

SEQ ID NO: 668680 - DNA, 19 bp, Mus musculus
  siRNA target sequence for Ccnc (NM_016746.1,608-626).
gatagtgtatcatccttat

SEQ ID NO: 668681 - DNA, 19 bp, Mus musculus
  siRNA target sequence for Ccnc (NM_016746.1,691-709).
ggatagtgaatgataccta

SEQ ID NO: 668682 - DNA, 19 bp, Mus musculus
  siRNA target sequence for Ccnc (NM_016746.1,740-758).
gttcatgatcgctttagct

SEQ ID NO: 668683 - DNA, 19 bp, Mus musculus
  siRNA target sequence for Ccnc (NM_016746.1,775-793).
gtgtcgtacaacagaaaga

SEQ ID NO: 668684 - DNA, 19 bp, Mus musculus
  siRNA target sequence for Ccnc (NM_016746.1,805-823).
ggtttgcagaactttctgt

SEQ ID NO: 668685 - DNA, 19 bp, Mus musculus
  siRNA target sequence for Ccnc (NM_016746.1,905-923).
gatggcaactattcttagt

SEQ ID NO: 668686 - DNA, 19 bp, Mus musculus
  siRNA target sequence for Ccnc (NM_016746.1,909-927).
gcaactattcttagtaaga

SEQ ID NO: 668687 - DNA, 19 bp, Mus musculus
  siRNA target sequence for Ccnc (NM_016746.1,910-928).
caactattcttagtaagat

SEQ ID NO: 668688 - DNA, 19 bp, Mus musculus
  siRNA target sequence for Ccnc (NM_016746.1,963-981).
gagcagggtccaaatggaa

SEQ ID NO: 668689 - DNA, 19 bp, Mus musculus
  siRNA target sequence for Ccnk (NM_009832.1,216-234).
gcacacaccctcacaactt

SEQ ID NO: 668690 - DNA, 19 bp, Mus musculus
  siRNA target sequence for Ccnk (NM_009832.1,274-292).
gagggggctcgcttcatct

SEQ ID NO: 668691 - DNA, 19 bp, Mus musculus
  siRNA target sequence for Ccnk (NM_009832.1,276-294).
gggggctcgcttcatcttt

SEQ ID NO: 668692 - DNA, 19 bp, Mus musculus
  siRNA target sequence for Ccnk (NM_009832.1,279-297).
ggctcgcttcatctttgat

SEQ ID NO: 668693 - DNA, 19 bp, Mus musculus
  siRNA target sequence for Ccnk (NM_009832.1,305-323).
cacgtttggggttacacta

SEQ ID NO: 668694 - DNA, 19 bp, Mus musculus
  siRNA target sequence for Ccnk (NM_009832.1,308-326).
gtttggggttacactatga

SEQ ID NO: 668695 - DNA, 19 bp, Mus musculus
  siRNA target sequence for Ccnk (NM_009832.1,358-376).
cgattttatatgttccatt

SEQ ID NO: 668696 - DNA, 19 bp, Mus musculus
  siRNA target sequence for Ccnk (NM_009832.1,404-422).
caggagcttgttgtctttt

SEQ ID NO: 668697 - DNA, 19 bp, Mus musculus
  siRNA target sequence for Ccnk (NM_009832.1,439-457).
gaggaaacgccaaaaaagt

SEQ ID NO: 668698 - DNA, 19 bp, Mus musculus
  siRNA target sequence for Ccnk (NM_009832.1,442-460).
gaaacgccaaaaaagtgta

SEQ ID NO: 668699 - DNA, 19 bp, Mus musculus
  siRNA target sequence for Ccnk (NM_009832.1,476-494).
cggctcgtagtttattaaa

SEQ ID NO: 668700 - DNA, 19 bp, Mus musculus
  siRNA target sequence for Ccnk (NM_009832.1,477-495).
ggctcgtagtttattaaat

SEQ ID NO: 668701 - DNA, 19 bp, Mus musculus
  siRNA target sequence for Ccnk (NM_009832.1,479-497).
ctcgtagtttattaaatga

SEQ ID NO: 668702 - DNA, 19 bp, Mus musculus
  siRNA target sequence for Ccnk (NM_009832.1,543-561).
ggtgttggagaggatctta

SEQ ID NO: 668703 - DNA, 19 bp, Mus musculus
  siRNA target sequence for Ccnk (NM_009832.1,565-583).
cagaccataaagtttgact

SEQ ID NO: 668704 - DNA, 19 bp, Mus musculus
  siRNA target sequence for Ccnk (NM_009832.1,567-585).
gaccataaagtttgactta

SEQ ID NO: 668705 - DNA, 19 bp, Mus musculus
  siRNA target sequence for Ccnk (NM_009832.1,606-624).
gttcctgctcaaatatgca

SEQ ID NO: 668706 - DNA, 19 bp, Mus musculus
  siRNA target sequence for Ccnk (NM_009832.1,627-645).
gcagctcaaaggtgataaa

SEQ ID NO: 668707 - DNA, 19 bp, Mus musculus
  siRNA target sequence for Ccnk (NM_009832.1,740-758).
ctgtcgcagtaatgtatct

SEQ ID NO: 668708 - DNA, 19 bp, Mus musculus
  siRNA target sequence for Ccnk (NM_009832.1,760-778).
gcgggacgtttgtgcaaat

SEQ ID NO: 668709 - DNA, 19 bp, Mus musculus
  siRNA target sequence for Ccnk (NM_009832.1,761-779).
cgggacgtttgtgcaaatt

SEQ ID NO: 668710 - DNA, 19 bp, Mus musculus
  siRNA target sequence for Ccnk (NM_009832.1,795-813).
gacctccaaacccatgtat

SEQ ID NO: 668711 - DNA, 19 bp, Mus musculus
  siRNA target sequence for Ccnk (NM_009832.1,825-843).
ggagcagttcgttcaagat

SEQ ID NO: 668712 - DNA, 19 bp, Mus musculus
  siRNA target sequence for Ccnk (NM_009832.1,1463-1481).
gcctgcagtccatgatgaa

SEQ ID NO: 668713 - DNA, 19 bp, Mus musculus
  siRNA target sequence for Ccnt1 (NM_009833.1,24-42).
caacaagcggtggtatttt

SEQ ID NO: 668714 - DNA, 19 bp, Mus musculus
  siRNA target sequence for Ccnt1 (NM_009833.1,27-45).
caagcggtggtattttact

SEQ ID NO: 668715 - DNA, 19 bp, Mus musculus
  siRNA target sequence for Ccnt1 (NM_009833.1,83-101).
gcgtggactccgataaaga

SEQ ID NO: 668716 - DNA, 19 bp, Mus musculus
  siRNA target sequence for Ccnt1 (NM_009833.1,84-102).
cgtggactccgataaagaa

SEQ ID NO: 668717 - DNA, 19 bp, Mus musculus
  siRNA target sequence for Ccnt1 (NM_009833.1,162-180).
ctcacaactgacgatcaat

SEQ ID NO: 668718 - DNA, 19 bp, Mus musculus
  siRNA target sequence for Ccnt1 (NM_009833.1,171-189).
gacgatcaatactgctata

SEQ ID NO: 668719 - DNA, 19 bp, Mus musculus
  siRNA target sequence for Ccnt1 (NM_009833.1,173-191).
cgatcaatactgctatagt

SEQ ID NO: 668720 - DNA, 19 bp, Mus musculus
  siRNA target sequence for Ccnt1 (NM_009833.1,174-192).
gatcaatactgctatagta

SEQ ID NO: 668721 - DNA, 19 bp, Mus musculus
  siRNA target sequence for Ccnt1 (NM_009833.1,198-216).
gcaccgattctacatgatt

SEQ ID NO: 668722 - DNA, 19 bp, Mus musculus
  siRNA target sequence for Ccnt1 (NM_009833.1,202-220).
cgattctacatgattcagt

SEQ ID NO: 668723 - DNA, 19 bp, Mus musculus
  siRNA target sequence for Ccnt1 (NM_009833.1,219-237).
gtcttttacacagtttcat

SEQ ID NO: 668724 - DNA, 19 bp, Mus musculus
  siRNA target sequence for Ccnt1 (NM_009833.1,261-279).
cttgtttctagcagcaaaa

SEQ ID NO: 668725 - DNA, 19 bp, Mus musculus
  siRNA target sequence for Ccnt1 (NM_009833.1,272-290).
cagcaaaagtagaagaaca

SEQ ID NO: 668726 - DNA, 19 bp, Mus musculus
  siRNA target sequence for Ccnt1 (NM_009833.1,363-381).
gaggagtgaggcttaccta

SEQ ID NO: 668727 - DNA, 19 bp, Mus musculus
  siRNA target sequence for Ccnt1 (NM_009833.1,372-390).
ggcttacctacaacaagtt

SEQ ID NO: 668728 - DNA, 19 bp, Mus musculus
  siRNA target sequence for Ccnt1 (NM_009833.1,374-392).
cttacctacaacaagttca

SEQ ID NO: 668729 - DNA, 19 bp, Mus musculus
  siRNA target sequence for Ccnt1 (NM_009833.1,426-444).
gaccttagggtttgaacta

SEQ ID NO: 668730 - DNA, 19 bp, Mus musculus
  siRNA target sequence for Ccnt1 (NM_009833.1,429-447).
cttagggtttgaactaaca

SEQ ID NO: 668731 - DNA, 19 bp, Mus musculus
  siRNA target sequence for Ccnt1 (NM_009833.1,460-478).
catacacatgtggtaaagt

SEQ ID NO: 668732 - DNA, 19 bp, Mus musculus
  siRNA target sequence for Ccnt1 (NM_009833.1,694-712).
gaactgttagatgaattga

SEQ ID NO: 668733 - DNA, 19 bp, Mus musculus
  siRNA target sequence for Ccnt1 (NM_009833.1,703-721).
gatgaattgacacatgaat

SEQ ID NO: 668734 - DNA, 19 bp, Mus musculus
  siRNA target sequence for Ccnt1 (NM_009833.1,841-859).
cagacaatcctcaatatga

SEQ ID NO: 668735 - DNA, 19 bp, Mus musculus
  siRNA target sequence for Ccnt1 (NM_009833.1,879-897).
cacaactatcgcaggatta

SEQ ID NO: 668736 - DNA, 19 bp, Mus musculus
  siRNA target sequence for Ccnt1 (NM_009833.1,881-899).
caactatcgcaggattaat

SEQ ID NO: 668737 - DNA, 19 bp, Mus musculus
  siRNA target sequence for Ccnt1 (NM_009833.1,906-924).
gtcaactgcgtctacaagt

SEQ ID NO: 668738 - DNA, 19 bp, Mus musculus
  siRNA target sequence for Ccnt1 (NM_009833.1,952-970).
gagtcatcgagcagtctaa

SEQ ID NO: 668739 - DNA, 19 bp, Mus musculus
  siRNA target sequence for Ccnt1 (NM_009833.1,954-972).
gtcatcgagcagtctaact

SEQ ID NO: 668740 - DNA, 19 bp, Mus musculus
  siRNA target sequence for Ccnt1 (NM_009833.1,1010-1028).
cccaacctccgtttaaact

SEQ ID NO: 668741 - DNA, 19 bp, Mus musculus
  siRNA target sequence for Ccnt1 (NM_009833.1,1050-1068).
gactagtgagagtttagca

SEQ ID NO: 668742 - DNA, 19 bp, Mus musculus
  siRNA target sequence for Ccnt1 (NM_009833.1,1055-1073).
gtgagagtttagcacttat

SEQ ID NO: 668743 - DNA, 19 bp, Mus musculus
  siRNA target sequence for Ccnt1 (NM_009833.1,1067-1085).
cacttattggcgttgatca

SEQ ID NO: 668744 - DNA, 19 bp, Mus musculus
  siRNA target sequence for Ccnt1 (NM_009833.1,1069-1087).
cttattggcgttgatcatt

SEQ ID NO: 668745 - DNA, 19 bp, Mus musculus
  siRNA target sequence for Ccnt1 (NM_009833.1,1144-1162).
gtgccatctgctaaggttt

SEQ ID NO: 668746 - DNA, 19 bp, Mus musculus
  siRNA target sequence for Ccnt1 (NM_009833.1,1181-1199).
caaagcacgcggaagagtt

SEQ ID NO: 668747 - DNA, 19 bp, Mus musculus
  siRNA target sequence for Ccnt1 (NM_009833.1,1256-1274).
cgtatgctgcccagaatct

SEQ ID NO: 668748 - DNA, 19 bp, Mus musculus
  siRNA target sequence for Ccnt1 (NM_009833.1,1287-1305).
cagccattcttcagttatt

SEQ ID NO: 668749 - DNA, 19 bp, Mus musculus
  siRNA target sequence for Ccnt1 (NM_009833.1,1315-1333).
cccattgagagctcagaaa

SEQ ID NO: 668750 - DNA, 19 bp, Mus musculus
  siRNA target sequence for Ccnt1 (NM_009833.1,1353-1371).
ggataaggctgacaaatca

SEQ ID NO: 668751 - DNA, 19 bp, Mus musculus
  siRNA target sequence for Ccnt1 (NM_009833.1,1465-1483).
ggggataagcacaattcca

SEQ ID NO: 668752 - DNA, 19 bp, Mus musculus
  siRNA target sequence for Ccnt1 (NM_009833.1,1466-1484).
gggataagcacaattccat

SEQ ID NO: 668753 - DNA, 19 bp, Mus musculus
  siRNA target sequence for Ccnt1 (NM_009833.1,1611-1629).
gagcaaacgcccaagtgat

SEQ ID NO: 668754 - DNA, 19 bp, Mus musculus
  siRNA target sequence for Ccnt1 (NM_009833.1,1677-1695).
cttgtccagtactttgtct

SEQ ID NO: 668755 - DNA, 19 bp, Mus musculus
  siRNA target sequence for Ccnt1 (NM_009833.1,1856-1874).
gtggcctgcccttttcaca

SEQ ID NO: 668756 - DNA, 19 bp, Mus musculus
  siRNA target sequence for Ccnt1 (NM_009833.1,1889-1907).
ctcgagttcctcatatgaa

SEQ ID NO: 668757 - DNA, 19 bp, Mus musculus
  siRNA target sequence for Ccnt1 (NM_009833.1,1941-1959).
caacgcaactcagtcaata

SEQ ID NO: 668758 - DNA, 19 bp, Mus musculus
  siRNA target sequence for Ccnt1 (NM_009833.1,1944-1962).
cgcaactcagtcaatagat

SEQ ID NO: 668759 - DNA, 19 bp, Mus musculus
  siRNA target sequence for Ccnt1 (NM_009833.1,1949-1967).
ctcagtcaatagattatca

SEQ ID NO: 668760 - DNA, 19 bp, Mus musculus
  siRNA target sequence for Ccnt1 (NM_009833.1,2046-2064).
ccactcttatggtgaatat

SEQ ID NO: 668761 - DNA, 19 bp, Mus musculus
  siRNA target sequence for Ccnt1 (NM_009833.1,2047-2065).
cactcttatggtgaatata

SEQ ID NO: 668762 - DNA, 19 bp, Mus musculus
  siRNA target sequence for Ccnt1 (NM_009833.1,2051-2069).
cttatggtgaatatatgaa

SEQ ID NO: 668763 - DNA, 19 bp, Mus musculus
  siRNA target sequence for Cebpa-rs1 (NM_009882.1,160-178).
gcacaaagcaagattacct

SEQ ID NO: 668764 - DNA, 19 bp, Mus musculus
  siRNA target sequence for Cebpa-rs1 (NM_009882.1,161-179).
cacaaagcaagattacctt

SEQ ID NO: 668765 - DNA, 19 bp, Mus musculus
  siRNA target sequence for Cebpa-rs1 (NM_009882.1,163-181).
caaagcaagattaccttat

SEQ ID NO: 668766 - DNA, 19 bp, Mus musculus
  siRNA target sequence for Cebpa-rs1 (NM_009882.1,221-239).
gggcaaaaagggaaccatt

SEQ ID NO: 668767 - DNA, 19 bp, Mus musculus
  siRNA target sequence for Cebpa-rs1 (NM_009882.1,235-253).
ccattgacgaccttcaaca

SEQ ID NO: 668768 - DNA, 19 bp, Mus musculus
  siRNA target sequence for Cebpa-rs1 (NM_009882.1,236-254).
cattgacgaccttcaacaa

SEQ ID NO: 668769 - DNA, 19 bp, Mus musculus
  siRNA target sequence for Cebpa-rs1 (NM_009882.1,255-273).
ggtgaactggagtcattta

SEQ ID NO: 668770 - DNA, 19 bp, Mus musculus
  siRNA target sequence for Cebpa-rs1 (NM_009882.1,263-281).
ggagtcatttattcagaat

SEQ ID NO: 668771 - DNA, 19 bp, Mus musculus
  siRNA target sequence for Cebpa-rs1 (NM_009882.1,290-308).
ggccaaatactcaaagtct

SEQ ID NO: 668772 - DNA, 19 bp, Mus musculus
  siRNA target sequence for Cebpa-rs1 (NM_009882.1,291-309).
gccaaatactcaaagtctt

SEQ ID NO: 668773 - DNA, 19 bp, Mus musculus
  siRNA target sequence for Cebpa-rs1 (NM_009882.1,502-520).
ccgatgtgtttgaatttct

SEQ ID NO: 668774 - DNA, 19 bp, Mus musculus
  siRNA target sequence for Cebpa-rs1 (NM_009882.1,503-521).
cgatgtgtttgaatttcta

SEQ ID NO: 668775 - DNA, 19 bp, Mus musculus
  siRNA target sequence for Cebpa-rs1 (NM_009882.1,569-587).
ggagtacagcggtgagtat

SEQ ID NO: 668776 - DNA, 19 bp, Mus musculus
  siRNA target sequence for Cebpa-rs1 (NM_009882.1,570-588).
gagtacagcggtgagtatt

SEQ ID NO: 668777 - DNA, 19 bp, Mus musculus
  siRNA target sequence for Cebpa-rs1 (NM_009882.1,651-669).
gagcacgaagtcagcttat

SEQ ID NO: 668778 - DNA, 19 bp, Mus musculus
  siRNA target sequence for Cebpa-rs1 (NM_009882.1,654-672).
cacgaagtcagcttattca

SEQ ID NO: 668779 - DNA, 19 bp, Mus musculus
  siRNA target sequence for Cebpa-rs1 (NM_009882.1,660-678).
gtcagcttattcaagagta

SEQ ID NO: 668780 - DNA, 19 bp, Mus musculus
  siRNA target sequence for Cebpa-rs1 (NM_009882.1,815-833).
cctgatgagccttgtgaaa

SEQ ID NO: 668781 - DNA, 19 bp, Mus musculus
  siRNA target sequence for Cebpa-rs1 (NM_009882.1,915-933).
cggaagctccgggttttca

SEQ ID NO: 668782 - DNA, 19 bp, Mus musculus
  siRNA target sequence for Cebpa-rs1 (NM_009882.1,980-998).
ggactcgagagatagaaga

SEQ ID NO: 668783 - DNA, 19 bp, Mus musculus
  siRNA target sequence for Cebpa-rs1 (NM_009882.1,986-1004).
gagagatagaagactgata

SEQ ID NO: 668784 - DNA, 19 bp, Mus musculus
  siRNA target sequence for Cebpa-rs1 (NM_009882.1,988-1006).
gagatagaagactgatact

SEQ ID NO: 668785 - DNA, 19 bp, Mus musculus
  siRNA target sequence for Cebpa-rs1 (NM_009882.1,990-1008).
gatagaagactgatactgt

SEQ ID NO: 668786 - DNA, 19 bp, Mus musculus
  siRNA target sequence for Cebpa-rs1 (NM_009882.1,997-1015).
gactgatactgtggtatta

SEQ ID NO: 668787 - DNA, 19 bp, Mus musculus
  siRNA target sequence for Cebpa-rs1 (NM_009882.1,1053-1071).
caggtcctcgagactttaa

SEQ ID NO: 668788 - DNA, 19 bp, Mus musculus
  siRNA target sequence for Cebpa-rs1 (NM_009882.1,1055-1073).
ggtcctcgagactttaagt

SEQ ID NO: 668789 - DNA, 19 bp, Mus musculus
  siRNA target sequence for Cebpa-rs1 (NM_009882.1,1058-1076).
cctcgagactttaagtcat

SEQ ID NO: 668790 - DNA, 19 bp, Mus musculus
  siRNA target sequence for Cebpa-rs1 (NM_009882.1,1061-1079).
cgagactttaagtcatgat

SEQ ID NO: 668791 - DNA, 19 bp, Mus musculus
  siRNA target sequence for Cebpa-rs1 (NM_009882.1,1186-1204).
gagatcctcagaacagaat

SEQ ID NO: 668792 - DNA, 19 bp, Mus musculus
  siRNA target sequence for Cebpa-rs1 (NM_009882.1,1196-1214).
gaacagaattgctacgaaa

SEQ ID NO: 668793 - DNA, 19 bp, Mus musculus
  siRNA target sequence for Cebpa-rs1 (NM_009882.1,1210-1228).
cgaaagcctcccatctgtt

SEQ ID NO: 668794 - DNA, 19 bp, Mus musculus
  siRNA target sequence for Cebpa-rs1 (NM_009882.1,1242-1260).
cggaagcatcccaatatga

SEQ ID NO: 668795 - DNA, 19 bp, Mus musculus
  siRNA target sequence for Cebpa-rs1 (NM_009882.1,1243-1261).
ggaagcatcccaatatgaa

SEQ ID NO: 668796 - DNA, 19 bp, Mus musculus
  siRNA target sequence for Cebpa-rs1 (NM_009882.1,1289-1307).
gctactcttccgctcaaat

SEQ ID NO: 668797 - DNA, 19 bp, Mus musculus
  siRNA target sequence for Cebpa-rs1 (NM_009882.1,1323-1341).
cagtattatgcaatttgct

SEQ ID NO: 668798 - DNA, 19 bp, Mus musculus
  siRNA target sequence for Cited2 (NM_010828.1,728-746).
gtgcttatgtccttagtga

SEQ ID NO: 668799 - DNA, 19 bp, Mus musculus
  siRNA target sequence for Cited2 (NM_010828.1,730-748).
gcttatgtccttagtgata

SEQ ID NO: 668800 - DNA, 19 bp, Mus musculus
  siRNA target sequence for D11Ertd530e (NM_199196.1,462-480).
ctgaccacgagcttttcct

SEQ ID NO: 668801 - DNA, 19 bp, Mus musculus
  siRNA target sequence for D11Ertd530e (NM_199196.1,533-551).
cttatcgcaccaatatttt

SEQ ID NO: 668802 - DNA, 19 bp, Mus musculus
  siRNA target sequence for D11Ertd530e (NM_199196.1,675-693).
gcttgtctgcacatttgca

SEQ ID NO: 668803 - DNA, 19 bp, Mus musculus
  siRNA target sequence for D11Ertd530e (NM_199196.1,791-809).
gtttgccacaaaaaaagga

SEQ ID NO: 668804 - DNA, 19 bp, Mus musculus
  siRNA target sequence for D11Ertd530e (NM_199196.1,811-829).
ggatgtaagttgtccaata

SEQ ID NO: 668805 - DNA, 19 bp, Mus musculus
  siRNA target sequence for D11Ertd530e (NM_199196.1,812-830).
gatgtaagttgtccaataa

SEQ ID NO: 668806 - DNA, 19 bp, Mus musculus
  siRNA target sequence for D11Ertd530e (NM_199196.1,865-883).
gaatcctgacctcaatcaa

SEQ ID NO: 668807 - DNA, 19 bp, Mus musculus
  siRNA target sequence for D11Ertd530e (NM_199196.1,869-887).
cctgacctcaatcaaacaa

SEQ ID NO: 668808 - DNA, 19 bp, Mus musculus
  siRNA target sequence for D11Ertd530e (NM_199196.1,870-888).
ctgacctcaatcaaacaaa

SEQ ID NO: 668809 - DNA, 19 bp, Mus musculus
  siRNA target sequence for D11Ertd530e (NM_199196.1,910-928).
ggcagtttccagtaatgaa

SEQ ID NO: 668810 - DNA, 19 bp, Mus musculus
  siRNA target sequence for D11Ertd530e (NM_199196.1,926-944).
gaatttgaacctagtaaca

SEQ ID NO: 668811 - DNA, 19 bp, Mus musculus
  siRNA target sequence for D11Ertd530e (NM_199196.1,936-954).
ctagtaacagccatatggt

SEQ ID NO: 668812 - DNA, 19 bp, Mus musculus
  siRNA target sequence for D11Ertd530e (NM_199196.1,999-1017).
gagaatttaatggaatgat

SEQ ID NO: 668813 - DNA, 19 bp, Mus musculus
  siRNA target sequence for D11Ertd530e (NM_199196.1,1001-1019).
gaatttaatggaatgatta

SEQ ID NO: 668814 - DNA, 19 bp, Mus musculus
  siRNA target sequence for D11Ertd530e (NM_199196.1,1029-1047).
ccaatgaaaatattgatgt

SEQ ID NO: 668815 - DNA, 19 bp, Mus musculus
  siRNA target sequence for D11Ertd530e (NM_199196.1,1112-1130).
caaatgacagtttttgaca

SEQ ID NO: 668816 - DNA, 19 bp, Mus musculus
  siRNA target sequence for D11Ertd530e (NM_199196.1,1135-1153).
caggcgtttacagctttta

SEQ ID NO: 668817 - DNA, 19 bp, Mus musculus
  siRNA target sequence for D11Ertd530e (NM_199196.1,1138-1156).
gcgtttacagcttttagat

SEQ ID NO: 668818 - DNA, 19 bp, Mus musculus
  siRNA target sequence for D11Ertd530e (NM_199196.1,1147-1165).
gcttttagatggggaatat

SEQ ID NO: 668819 - DNA, 19 bp, Mus musculus
  siRNA target sequence for D11Ertd530e (NM_199196.1,1186-1204).
ggaagaatgtccaataagt

SEQ ID NO: 668820 - DNA, 19 bp, Mus musculus
  siRNA target sequence for D11Ertd530e (NM_199196.1,1187-1205).
gaagaatgtccaataagta

SEQ ID NO: 668821 - DNA, 19 bp, Mus musculus
  siRNA target sequence for D11Ertd530e (NM_199196.1,1190-1208).
gaatgtccaataagtaaga

SEQ ID NO: 668822 - DNA, 19 bp, Mus musculus
  siRNA target sequence for D11Ertd530e (NM_199196.1,1212-1230).
gagcaacatgggagacaat

SEQ ID NO: 668823 - DNA, 19 bp, Mus musculus
  siRNA target sequence for D11Ertd530e (NM_199196.1,1269-1287).
ctcagggacctacattaca

SEQ ID NO: 668824 - DNA, 19 bp, Mus musculus
  siRNA target sequence for D11Ertd530e (NM_199196.1,1271-1289).
cagggacctacattacaat

SEQ ID NO: 668825 - DNA, 19 bp, Mus musculus
  siRNA target sequence for D11Ertd530e (NM_199196.1,1273-1291).
gggacctacattacaattt

SEQ ID NO: 668826 - DNA, 19 bp, Mus musculus
  siRNA target sequence for D11Ertd530e (NM_199196.1,1278-1296).
ctacattacaatttactct

SEQ ID NO: 668827 - DNA, 19 bp, Mus musculus
  siRNA target sequence for D11Ertd530e (NM_199196.1,1305-1323).
caggagaaaccaacgataa

SEQ ID NO: 668828 - DNA, 19 bp, Mus musculus
  siRNA target sequence for D11Ertd530e (NM_199196.1,1307-1325).
ggagaaaccaacgataagt

SEQ ID NO: 668829 - DNA, 19 bp, Mus musculus
  siRNA target sequence for D11Ertd530e (NM_199196.1,1310-1328).
gaaaccaacgataagtcta

SEQ ID NO: 668830 - DNA, 19 bp, Mus musculus
  siRNA target sequence for D11Ertd530e (NM_199196.1,1345-1363).
gcctcttgccactagaaat

SEQ ID NO: 668831 - DNA, 19 bp, Mus musculus
  siRNA target sequence for D11Ertd530e (NM_199196.1,1346-1364).
cctcttgccactagaaatt

SEQ ID NO: 668832 - DNA, 19 bp, Mus musculus
  siRNA target sequence for D11Ertd530e (NM_199196.1,1371-1389).
gccttcatcaggaaaataa

SEQ ID NO: 668833 - DNA, 19 bp, Mus musculus
  siRNA target sequence for D11Ertd530e (NM_199196.1,1410-1428).
cacaaactattgctgttaa

SEQ ID NO: 668834 - DNA, 19 bp, Mus musculus
  siRNA target sequence for D11Ertd530e (NM_199196.1,1468-1486).
ggataattcaaatgaaagt

SEQ ID NO: 668835 - DNA, 19 bp, Mus musculus
  siRNA target sequence for D11Ertd530e (NM_199196.1,1485-1503).
gtcgccagaagttaagaat

SEQ ID NO: 668836 - DNA, 19 bp, Mus musculus
  siRNA target sequence for D11Ertd530e (NM_199196.1,1487-1505).
cgccagaagttaagaatat

SEQ ID NO: 668837 - DNA, 19 bp, Mus musculus
  siRNA target sequence for D11Ertd530e (NM_199196.1,1488-1506).
gccagaagttaagaatatt

SEQ ID NO: 668838 - DNA, 19 bp, Mus musculus
  siRNA target sequence for D11Ertd530e (NM_199196.1,1511-1529).
cagttcctttataacaata

SEQ ID NO: 668839 - DNA, 19 bp, Mus musculus
  siRNA target sequence for D11Ertd530e (NM_199196.1,1583-1601).
ctgaactgccgtaaactgt

SEQ ID NO: 668840 - DNA, 19 bp, Mus musculus
  siRNA target sequence for D11Ertd530e (NM_199196.1,1585-1603).
gaactgccgtaaactgtat

SEQ ID NO: 668841 - DNA, 19 bp, Mus musculus
  siRNA target sequence for D11Ertd530e (NM_199196.1,1590-1608).
gccgtaaactgtatagctt

SEQ ID NO: 668842 - DNA, 19 bp, Mus musculus
  siRNA target sequence for D11Ertd530e (NM_199196.1,1591-1609).
ccgtaaactgtatagctta

SEQ ID NO: 668843 - DNA, 19 bp, Mus musculus
  siRNA target sequence for D11Ertd530e (NM_199196.1,1600-1618).
gtatagcttactcaaacat

SEQ ID NO: 668844 - DNA, 19 bp, Mus musculus
  siRNA target sequence for D11Ertd530e (NM_199196.1,1605-1623).
gcttactcaaacatctaaa

SEQ ID NO: 668845 - DNA, 19 bp, Mus musculus
  siRNA target sequence for D11Ertd530e (NM_199196.1,1635-1653).
gcaggttcatcttcaatta

SEQ ID NO: 668846 - DNA, 19 bp, Mus musculus
  siRNA target sequence for D11Ertd530e (NM_199196.1,1638-1656).
ggttcatcttcaattacgt

SEQ ID NO: 668847 - DNA, 19 bp, Mus musculus
  siRNA target sequence for D11Ertd530e (NM_199196.1,1642-1660).
catcttcaattacgtatat

SEQ ID NO: 668848 - DNA, 19 bp, Mus musculus
  siRNA target sequence for D11Ertd530e (NM_199196.1,1645-1663).
cttcaattacgtatatcat

SEQ ID NO: 668849 - DNA, 19 bp, Mus musculus
  siRNA target sequence for D11Ertd530e (NM_199196.1,1654-1672).
cgtatatcatccaaaaggt

SEQ ID NO: 668850 - DNA, 19 bp, Mus musculus
  siRNA target sequence for D11Ertd530e (NM_199196.1,1673-1691).
gctaggatagatgtttcaa

SEQ ID NO: 668851 - DNA, 19 bp, Mus musculus
  siRNA target sequence for D11Ertd530e (NM_199196.1,1674-1692).
ctaggatagatgtttcaat

SEQ ID NO: 668852 - DNA, 19 bp, Mus musculus
  siRNA target sequence for D11Ertd530e (NM_199196.1,1682-1700).
gatgtttcaatcaatgagt

SEQ ID NO: 668853 - DNA, 19 bp, Mus musculus
  siRNA target sequence for D11Ertd530e (NM_199196.1,1742-1760).
cgccaacctggatttgctt

SEQ ID NO: 668854 - DNA, 19 bp, Mus musculus
  siRNA target sequence for D11Ertd530e (NM_199196.1,1766-1784).
cgaaatggaccggtaaaga

SEQ ID NO: 668855 - DNA, 19 bp, Mus musculus
  siRNA target sequence for D11Ertd530e (NM_199196.1,1788-1806).
cacctatcacacatattct

SEQ ID NO: 668856 - DNA, 19 bp, Mus musculus
  siRNA target sequence for D11Ertd530e (NM_199196.1,1833-1851).
caagcatgtcggagtttct

SEQ ID NO: 668857 - DNA, 19 bp, Mus musculus
  siRNA target sequence for D11Ertd530e (NM_199196.1,1836-1854).
gcatgtcggagtttcttga

SEQ ID NO: 668858 - DNA, 19 bp, Mus musculus
  siRNA target sequence for D11Ertd530e (NM_199196.1,1837-1855).
catgtcggagtttcttgaa

SEQ ID NO: 668859 - DNA, 19 bp, Mus musculus
  siRNA target sequence for D11Ertd530e (NM_199196.1,1840-1858).
gtcggagtttcttgaatct

SEQ ID NO: 668860 - DNA, 19 bp, Mus musculus
  siRNA target sequence for D11Ertd530e (NM_199196.1,1898-1916).
ggccacaatcgtctctatt

SEQ ID NO: 668861 - DNA, 19 bp, Mus musculus
  siRNA target sequence for D11Ertd530e (NM_199196.1,1910-1928).
ctctatttccacagtgata

SEQ ID NO: 668862 - DNA, 19 bp, Mus musculus
  siRNA target sequence for D11Ertd530e (NM_199196.1,1937-1955).
cctcttcggccacaagaaa

SEQ ID NO: 668863 - DNA, 19 bp, Mus musculus
  siRNA target sequence for D11Ertd530e (NM_199196.1,2201-2219).
gtcagcatgcatgacttta

SEQ ID NO: 668864 - DNA, 19 bp, Mus musculus
  siRNA target sequence for D11Ertd530e (NM_199196.1,2222-2240).
cttattagcataatgtcaa

SEQ ID NO: 668865 - DNA, 19 bp, Mus musculus
  siRNA target sequence for D11Ertd530e (NM_199196.1,2263-2281).
ccgagaaatgcagcaaaaa

SEQ ID NO: 668866 - DNA, 19 bp, Mus musculus
  siRNA target sequence for D11Ertd530e (NM_199196.1,2351-2369).
ggattcagtgaaactaact

SEQ ID NO: 668867 - DNA, 19 bp, Mus musculus
  siRNA target sequence for Daxx (NM_007829.1,30-48).
caccgatgacagcatcatt

SEQ ID NO: 668868 - DNA, 19 bp, Mus musculus
  siRNA target sequence for Daxx (NM_007829.1,32-50).
ccgatgacagcatcattgt

SEQ ID NO: 668869 - DNA, 19 bp, Mus musculus
  siRNA target sequence for Daxx (NM_007829.1,39-57).
cagcatcattgtacttgat

SEQ ID NO: 668870 - DNA, 19 bp, Mus musculus
  siRNA target sequence for Daxx (NM_007829.1,213-231).
gtgctacaagttggataat

SEQ ID NO: 668871 - DNA, 19 bp, Mus musculus
  siRNA target sequence for Daxx (NM_007829.1,215-233).
gctacaagttggataatga

SEQ ID NO: 668872 - DNA, 19 bp, Mus musculus
  siRNA target sequence for Daxx (NM_007829.1,621-639).
gctgctggcactgtatgta

SEQ ID NO: 668873 - DNA, 19 bp, Mus musculus
  siRNA target sequence for Daxx (NM_007829.1,691-709).
gacccagactcctcgtatt

SEQ ID NO: 668874 - DNA, 19 bp, Mus musculus
  siRNA target sequence for Daxx (NM_007829.1,695-713).
cagactcctcgtatttgca

SEQ ID NO: 668875 - DNA, 19 bp, Mus musculus
  siRNA target sequence for Daxx (NM_007829.1,840-858).
ggtcaacaggcgcattgaa

SEQ ID NO: 668876 - DNA, 19 bp, Mus musculus
  siRNA target sequence for Daxx (NM_007829.1,850-868).
cgcattgaacggctcatta

SEQ ID NO: 668877 - DNA, 19 bp, Mus musculus
  siRNA target sequence for Daxx (NM_007829.1,851-869).
gcattgaacggctcattaa

SEQ ID NO: 668878 - DNA, 19 bp, Mus musculus
  siRNA target sequence for Daxx (NM_007829.1,882-900).
ggacaccttccccgattat

SEQ ID NO: 668879 - DNA, 19 bp, Mus musculus
  siRNA target sequence for Daxx (NM_007829.1,885-903).
caccttccccgattatgga

SEQ ID NO: 668880 - DNA, 19 bp, Mus musculus
  siRNA target sequence for Daxx (NM_007829.1,1025-1043).
gccacctggatctcatcta

SEQ ID NO: 668881 - DNA, 19 bp, Mus musculus
  siRNA target sequence for Daxx (NM_007829.1,1120-1138).
cgccttcgggaaaatcgaa

SEQ ID NO: 668882 - DNA, 19 bp, Mus musculus
  siRNA target sequence for Daxx (NM_007829.1,1533-1551).
cacatcgccttcagacttt

SEQ ID NO: 668883 - DNA, 19 bp, Mus musculus
  siRNA target sequence for Daxx (NM_007829.1,1535-1553).
catcgccttcagacttttt

SEQ ID NO: 668884 - DNA, 19 bp, Mus musculus
  siRNA target sequence for Daxx (NM_007829.1,1596-1614).
cgaggggcagcaaaagaga

SEQ ID NO: 668885 - DNA, 19 bp, Mus musculus
  siRNA target sequence for Daxx (NM_007829.1,1840-1858).
gctgtggttacctctacat

SEQ ID NO: 668886 - DNA, 19 bp, Mus musculus
  siRNA target sequence for Daxx (NM_007829.1,1953-1971).
gttaggaaacagctatata

SEQ ID NO: 668887 - DNA, 19 bp, Mus musculus
  siRNA target sequence for Daxx (NM_007829.1,2160-2178).
gtctctccggcagtgtatt

SEQ ID NO: 668888 - DNA, 19 bp, Mus musculus
  siRNA target sequence for Daxx (NM_007829.1,2162-2180).
ctctccggcagtgtattta

SEQ ID NO: 668889 - DNA, 19 bp, Mus musculus
  siRNA target sequence for Daxx (NM_007829.1,2164-2182).
ctccggcagtgtatttata

SEQ ID NO: 668890 - DNA, 19 bp, Mus musculus
  siRNA target sequence for Daxx (NM_007829.1,2167-2185).
cggcagtgtatttataaga

SEQ ID NO: 668891 - DNA, 19 bp, Mus musculus
  siRNA target sequence for Ell (NM_007924.1,157-175).
gaccttccatccgatttga

SEQ ID NO: 668892 - DNA, 19 bp, Mus musculus
  siRNA target sequence for Ell (NM_007924.1,435-453).
cgaagtgccatcgtcatta

SEQ ID NO: 668893 - DNA, 19 bp, Mus musculus
  siRNA target sequence for Ell (NM_007924.1,436-454).
gaagtgccatcgtcattaa

SEQ ID NO: 668894 - DNA, 19 bp, Mus musculus
  siRNA target sequence for Ell (NM_007924.1,463-481).
gccgatacatggggaaaaa

SEQ ID NO: 668895 - DNA, 19 bp, Mus musculus
  siRNA target sequence for Ell (NM_007924.1,538-556).
gtgctacccccattaacct

SEQ ID NO: 668896 - DNA, 19 bp, Mus musculus
  siRNA target sequence for Ell (NM_007924.1,779-797).
gcaggactgcatgtacaaa

SEQ ID NO: 668897 - DNA, 19 bp, Mus musculus
  siRNA target sequence for Ell (NM_007924.1,949-967).
ggcctacagacttcattga

SEQ ID NO: 668898 - DNA, 19 bp, Mus musculus
  siRNA target sequence for Ell (NM_007924.1,1467-1485).
ccggactatttgctgaaat

SEQ ID NO: 668899 - DNA, 19 bp, Mus musculus
  siRNA target sequence for Ell (NM_007924.1,1468-1486).
cggactatttgctgaaata

SEQ ID NO: 668900 - DNA, 19 bp, Mus musculus
  siRNA target sequence for Ell (NM_007924.1,1511-1529).
gcgtcagagctacaagaat

SEQ ID NO: 668901 - DNA, 19 bp, Mus musculus
  siRNA target sequence for Ell (NM_007924.1,1746-1764).
cgcaagctggcgcacatta

SEQ ID NO: 668902 - DNA, 19 bp, Mus musculus
  siRNA target sequence for Ell (NM_007924.1,1747-1765).
gcaagctggcgcacattaa

SEQ ID NO: 668903 - DNA, 19 bp, Mus musculus
  siRNA target sequence for Ell (NM_007924.1,1766-1784).
gaggctcatcgcagagtat

SEQ ID NO: 668904 - DNA, 19 bp, Mus musculus
  siRNA target sequence for Ell (NM_007924.1,1768-1786).
ggctcatcgcagagtatga

SEQ ID NO: 668905 - DNA, 19 bp, Mus musculus
  siRNA target sequence for Gabpb1 (NM_010249.1,149-167).
ggggaagaagcttttagaa

SEQ ID NO: 668906 - DNA, 19 bp, Mus musculus
  siRNA target sequence for Gabpb1 (NM_010249.1,189-207).
gatgaagttcgcattttga

SEQ ID NO: 668907 - DNA, 19 bp, Mus musculus
  siRNA target sequence for Gabpb1 (NM_010249.1,270-288).
cagtatgggcatttctcta

SEQ ID NO: 668908 - DNA, 19 bp, Mus musculus
  siRNA target sequence for Gabpb1 (NM_010249.1,286-304).
ctaccacagaggttcttct

SEQ ID NO: 668909 - DNA, 19 bp, Mus musculus
  siRNA target sequence for Gabpb1 (NM_010249.1,303-321).
ctccgagccggtgtaagta

SEQ ID NO: 668910 - DNA, 19 bp, Mus musculus
  siRNA target sequence for Gabpb1 (NM_010249.1,305-323).
ccgagccggtgtaagtaga

SEQ ID NO: 668911 - DNA, 19 bp, Mus musculus
  siRNA target sequence for Gabpb1 (NM_010249.1,374-392).
gggccatgccaacatagta

SEQ ID NO: 668912 - DNA, 19 bp, Mus musculus
  siRNA target sequence for Gabpb1 (NM_010249.1,376-394).
gccatgccaacatagtaga

SEQ ID NO: 668913 - DNA, 19 bp, Mus musculus
  siRNA target sequence for Gabpb1 (NM_010249.1,381-399).
gccaacatagtagaagttt

SEQ ID NO: 668914 - DNA, 19 bp, Mus musculus
  siRNA target sequence for Gabpb1 (NM_010249.1,382-400).
ccaacatagtagaagtttt

SEQ ID NO: 668915 - DNA, 19 bp, Mus musculus
  siRNA target sequence for Gabpb1 (NM_010249.1,420-438).
gtcaatgcaaaggatatgt

SEQ ID NO: 668916 - DNA, 19 bp, Mus musculus
  siRNA target sequence for Gabpb1 (NM_010249.1,422-440).
caatgcaaaggatatgtta

SEQ ID NO: 668917 - DNA, 19 bp, Mus musculus
  siRNA target sequence for Gabpb1 (NM_010249.1,456-474).
cattgggcaacagaacata

SEQ ID NO: 668918 - DNA, 19 bp, Mus musculus
  siRNA target sequence for Gabpb1 (NM_010249.1,483-501).
gaggtggtggagcttttaa

SEQ ID NO: 668919 - DNA, 19 bp, Mus musculus
  siRNA target sequence for Gabpb1 (NM_010249.1,489-507).
gtggagcttttaatcaaat

SEQ ID NO: 668920 - DNA, 19 bp, Mus musculus
  siRNA target sequence for Gabpb1 (NM_010249.1,522-540).
cacacgcagagtaaatttt

SEQ ID NO: 668921 - DNA, 19 bp, Mus musculus
  siRNA target sequence for Gabpb1 (NM_010249.1,579-597).
gaagatttagcagagatat

SEQ ID NO: 668922 - DNA, 19 bp, Mus musculus
  siRNA target sequence for Gabpb1 (NM_010249.1,591-609).
gagatattacagattgcta

SEQ ID NO: 668923 - DNA, 19 bp, Mus musculus
  siRNA target sequence for Gabpb1 (NM_010249.1,607-625).
ctatgcagaaccaaatcaa

SEQ ID NO: 668924 - DNA, 19 bp, Mus musculus
  siRNA target sequence for Gabpb1 (NM_010249.1,724-742).
gagtatctgctgttcagtt

SEQ ID NO: 668925 - DNA, 19 bp, Mus musculus
  siRNA target sequence for Gabpb1 (NM_010249.1,752-770).
ctctacgtcagtattagct

SEQ ID NO: 668926 - DNA, 19 bp, Mus musculus
  siRNA target sequence for Gabpb1 (NM_010249.1,873-891).
gcaattcagcaagtagtta

SEQ ID NO: 668927 - DNA, 19 bp, Mus musculus
  siRNA target sequence for Gabpb1 (NM_010249.1,895-913).
cagggggtcagcaagtcat

SEQ ID NO: 668928 - DNA, 19 bp, Mus musculus
  siRNA target sequence for Gabpb1 (NM_010249.1,905-923).
gcaagtcatcacgatagtt

SEQ ID NO: 668929 - DNA, 19 bp, Mus musculus
  siRNA target sequence for Gabpb1 (NM_010249.1,906-924).
caagtcatcacgatagtta

SEQ ID NO: 668930 - DNA, 19 bp, Mus musculus
  siRNA target sequence for Gabpb1 (NM_010249.1,911-929).
catcacgatagttacagat

SEQ ID NO: 668931 - DNA, 19 bp, Mus musculus
  siRNA target sequence for Gabpb1 (NM_010249.1,916-934).
cgatagttacagatggaat

SEQ ID NO: 668932 - DNA, 19 bp, Mus musculus
  siRNA target sequence for Gabpb1 (NM_010249.1,971-989).
gatgggtcagcccatcatt

SEQ ID NO: 668933 - DNA, 19 bp, Mus musculus
  siRNA target sequence for Gabpb1 (NM_010249.1,975-993).
ggtcagcccatcattgtga

SEQ ID NO: 668934 - DNA, 19 bp, Mus musculus
  siRNA target sequence for Gabpb1 (NM_010249.1,999-1017).
cccgatggacagcaagtat

SEQ ID NO: 668935 - DNA, 19 bp, Mus musculus
  siRNA target sequence for Gabpb1 (NM_010249.1,1000-1018).
ccgatggacagcaagtatt

SEQ ID NO: 668936 - DNA, 19 bp, Mus musculus
  siRNA target sequence for Gabpb1 (NM_010249.1,1081-1099).
gacagtgtatggaaataat

SEQ ID NO: 668937 - DNA, 19 bp, Mus musculus
  siRNA target sequence for Gabpb1 (NM_010249.1,1109-1127).
ggtggaatgtgcagaaatt

SEQ ID NO: 668938 - DNA, 19 bp, Mus musculus
  siRNA target sequence for Gabpb1 (NM_010249.1,1112-1130).
ggaatgtgcagaaattgaa

SEQ ID NO: 668939 - DNA, 19 bp, Mus musculus
  siRNA target sequence for Gabpb1 (NM_010249.1,1140-1158).
cttatacccggtgtgtttt

SEQ ID NO: 668940 - DNA, 19 bp, Mus musculus
  siRNA target sequence for Gtf2h1 (NM_008186.2,205-223).
ggcgacttcatcagaagaa

SEQ ID NO: 668941 - DNA, 19 bp, Mus musculus
  siRNA target sequence for Gtf2h1 (NM_008186.2,333-351).
gccatatgtatgcagatat

SEQ ID NO: 668942 - DNA, 19 bp, Mus musculus
  siRNA target sequence for Gtf2h1 (NM_008186.2,334-352).
ccatatgtatgcagatatt

SEQ ID NO: 668943 - DNA, 19 bp, Mus musculus
  siRNA target sequence for Gtf2h1 (NM_008186.2,335-353).
catatgtatgcagatatta

SEQ ID NO: 668944 - DNA, 19 bp, Mus musculus
  siRNA target sequence for Gtf2h1 (NM_008186.2,367-385).
cagtccagagggaaaagct

SEQ ID NO: 668945 - DNA, 19 bp, Mus musculus
  siRNA target sequence for Gtf2h1 (NM_008186.2,369-387).
gtccagagggaaaagctaa

SEQ ID NO: 668946 - DNA, 19 bp, Mus musculus
  siRNA target sequence for Gtf2h1 (NM_008186.2,378-396).
gaaaagctaaaatacaact

SEQ ID NO: 668947 - DNA, 19 bp, Mus musculus
  siRNA target sequence for Gtf2h1 (NM_008186.2,445-463).
cgaaagcacggcagtgaaa

SEQ ID NO: 668948 - DNA, 19 bp, Mus musculus
  siRNA target sequence for Gtf2h1 (NM_008186.2,623-641).
gaattctgggccaatcgtt

SEQ ID NO: 668949 - DNA, 19 bp, Mus musculus
  siRNA target sequence for Gtf2h1 (NM_008186.2,630-648).
gggccaatcgtttaaatgt

SEQ ID NO: 668950 - DNA, 19 bp, Mus musculus
  siRNA target sequence for Gtf2h1 (NM_008186.2,633-651).
ccaatcgtttaaatgtgaa

SEQ ID NO: 668951 - DNA, 19 bp, Mus musculus
  siRNA target sequence for Gtf2h1 (NM_008186.2,649-667).
gaatgcaacagatagttct

SEQ ID NO: 668952 - DNA, 19 bp, Mus musculus
  siRNA target sequence for Gtf2h1 (NM_008186.2,682-700).
gcaggatgttggtatttct

SEQ ID NO: 668953 - DNA, 19 bp, Mus musculus
  siRNA target sequence for Gtf2h1 (NM_008186.2,727-745).
ccaaacggatggctgtaat

SEQ ID NO: 668954 - DNA, 19 bp, Mus musculus
  siRNA target sequence for Gtf2h1 (NM_008186.2,746-764).
ggtctgagatataatttaa

SEQ ID NO: 668955 - DNA, 19 bp, Mus musculus
  siRNA target sequence for Gtf2h1 (NM_008186.2,749-767).
ctgagatataatttaactt

SEQ ID NO: 668956 - DNA, 19 bp, Mus musculus
  siRNA target sequence for Gtf2h1 (NM_008186.2,793-811).
gacctatccagcagtaaaa

SEQ ID NO: 668957 - DNA, 19 bp, Mus musculus
  siRNA target sequence for Gtf2h1 (NM_008186.2,795-813).
cctatccagcagtaaaaat

SEQ ID NO: 668958 - DNA, 19 bp, Mus musculus
  siRNA target sequence for Gtf2h1 (NM_008186.2,800-818).
ccagcagtaaaaatgaaat

SEQ ID NO: 668959 - DNA, 19 bp, Mus musculus
  siRNA target sequence for Gtf2h1 (NM_008186.2,890-908).
cacagggaccgactaaata

SEQ ID NO: 668960 - DNA, 19 bp, Mus musculus
  siRNA target sequence for Gtf2h1 (NM_008186.2,892-910).
cagggaccgactaaataca

SEQ ID NO: 668961 - DNA, 19 bp, Mus musculus
  siRNA target sequence for Gtf2h1 (NM_008186.2,1100-1118).
gctgccatcatcaaaaggt

SEQ ID NO: 668962 - DNA, 19 bp, Mus musculus
  siRNA target sequence for Gtf2h1 (NM_008186.2,1104-1122).
ccatcatcaaaaggtttaa

SEQ ID NO: 668963 - DNA, 19 bp, Mus musculus
  siRNA target sequence for Gtf2h1 (NM_008186.2,1198-1216).
cagcgtggatgggaattct

SEQ ID NO: 668964 - DNA, 19 bp, Mus musculus
  siRNA target sequence for Gtf2h1 (NM_008186.2,1209-1227).
ggaattctggggatacaga

SEQ ID NO: 668965 - DNA, 19 bp, Mus musculus
  siRNA target sequence for Gtf2h1 (NM_008186.2,1261-1279).
gcaggagtccattgaatat

SEQ ID NO: 668966 - DNA, 19 bp, Mus musculus
  siRNA target sequence for Gtf2h1 (NM_008186.2,1283-1301).
gacttgggaaacaacaatt

SEQ ID NO: 668967 - DNA, 19 bp, Mus musculus
  siRNA target sequence for Gtf2h1 (NM_008186.2,1311-1329).
cgattgcactgaatctcaa

SEQ ID NO: 668968 - DNA, 19 bp, Mus musculus
  siRNA target sequence for Gtf2h1 (NM_008186.2,1333-1351).
gtcagacaggtattaccat

SEQ ID NO: 668969 - DNA, 19 bp, Mus musculus
  siRNA target sequence for Gtf2h1 (NM_008186.2,1352-1370).
ggtcctactccaattcagt

SEQ ID NO: 668970 - DNA, 19 bp, Mus musculus
  siRNA target sequence for Gtf2h1 (NM_008186.2,1549-1567).
ccagatggtgccaaacgat

SEQ ID NO: 668971 - DNA, 19 bp, Mus musculus
  siRNA target sequence for Gtf2h1 (NM_008186.2,1550-1568).
cagatggtgccaaacgata

SEQ ID NO: 668972 - DNA, 19 bp, Mus musculus
  siRNA target sequence for Gtf2h1 (NM_008186.2,1552-1570).
gatggtgccaaacgatatt

SEQ ID NO: 668973 - DNA, 19 bp, Mus musculus
  siRNA target sequence for Gtf2h1 (NM_008186.2,1565-1583).
gatattcagtctgaattga

SEQ ID NO: 668974 - DNA, 19 bp, Mus musculus
  siRNA target sequence for Gtf2h1 (NM_008186.2,1571-1589).
cagtctgaattgaaacact

SEQ ID NO: 668975 - DNA, 19 bp, Mus musculus
  siRNA target sequence for Gtf2h1 (NM_008186.2,1575-1593).
ctgaattgaaacacttgta

SEQ ID NO: 668976 - DNA, 19 bp, Mus musculus
  siRNA target sequence for Gtf2h1 (NM_008186.2,1607-1625).
gaacttctgcggcattttt

SEQ ID NO: 668977 - DNA, 19 bp, Mus musculus
  siRNA target sequence for Gtf2h1 (NM_008186.2,1618-1636).
gcatttttggtcttgcttt

SEQ ID NO: 668978 - DNA, 19 bp, Mus musculus
  siRNA target sequence for Gtf2h1 (NM_008186.2,1690-1708).
ggaacggttccaagttaca

SEQ ID NO: 668979 - DNA, 19 bp, Mus musculus
  siRNA target sequence for Gtf2h1 (NM_008186.2,1732-1750).
gattcggaggcagtattta

SEQ ID NO: 668980 - DNA, 19 bp, Mus musculus
  siRNA target sequence for Gtf2h1 (NM_008186.2,1741-1759).
gcagtatttaagcacaaat

SEQ ID NO: 668981 - DNA, 19 bp, Mus musculus
  siRNA target sequence for Gtf2h1 (NM_008186.2,1752-1770).
gcacaaatctggtaagtca

SEQ ID NO: 668982 - DNA, 19 bp, Mus musculus
  siRNA target sequence for Hira (NM_010435.1,405-423).
gacgagaaggatgaaaata

SEQ ID NO: 668983 - DNA, 19 bp, Mus musculus
  siRNA target sequence for Hira (NM_010435.1,539-557).
gaagcgggctacgtacatt

SEQ ID NO: 668984 - DNA, 19 bp, Mus musculus
  siRNA target sequence for Hira (NM_010435.1,634-652).
gtcactcaggcgatgtgat

SEQ ID NO: 668985 - DNA, 19 bp, Mus musculus
  siRNA target sequence for Hira (NM_010435.1,688-706).
cctcatgcagcgtggataa

SEQ ID NO: 668986 - DNA, 19 bp, Mus musculus
  siRNA target sequence for Hira (NM_010435.1,702-720).
gataacactgttgtcattt

SEQ ID NO: 668987 - DNA, 19 bp, Mus musculus
  siRNA target sequence for Hira (NM_010435.1,707-725).
cactgttgtcatttggaat

SEQ ID NO: 668988 - DNA, 19 bp, Mus musculus
  siRNA target sequence for Hira (NM_010435.1,769-787).
ctggcttagtaaaaggttt

SEQ ID NO: 668989 - DNA, 19 bp, Mus musculus
  siRNA target sequence for Hira (NM_010435.1,790-808).
cttgggatcccgttggtaa

SEQ ID NO: 668990 - DNA, 19 bp, Mus musculus
  siRNA target sequence for Hira (NM_010435.1,793-811).
gggatcccgttggtaaata

SEQ ID NO: 668991 - DNA, 19 bp, Mus musculus
  siRNA target sequence for Hira (NM_010435.1,831-849).
gatcgaagtttgaaggtat

SEQ ID NO: 668992 - DNA, 19 bp, Mus musculus
  siRNA target sequence for Hira (NM_010435.1,881-899).
catcaccaagccttttgat

SEQ ID NO: 668993 - DNA, 19 bp, Mus musculus
  siRNA target sequence for Hira (NM_010435.1,907-925).
gaggaacgacgcatgttct

SEQ ID NO: 668994 - DNA, 19 bp, Mus musculus
  siRNA target sequence for Hira (NM_010435.1,918-936).
catgttctccggcttagtt

SEQ ID NO: 668995 - DNA, 19 bp, Mus musculus
  siRNA target sequence for Hira (NM_010435.1,997-1015).
ctcagatcatcgaaagaga

SEQ ID NO: 668996 - DNA, 19 bp, Mus musculus
  siRNA target sequence for Hira (NM_010435.1,1059-1077).
gtgactgttgtgaaattca

SEQ ID NO: 668997 - DNA, 19 bp, Mus musculus
  siRNA target sequence for Hira (NM_010435.1,1177-1195).
ctgtctggctcacatgttt

SEQ ID NO: 668998 - DNA, 19 bp, Mus musculus
  siRNA target sequence for Hira (NM_010435.1,1179-1197).
gtctggctcacatgtttga

SEQ ID NO: 668999 - DNA, 19 bp, Mus musculus
  siRNA target sequence for Hira (NM_010435.1,1230-1248).
gacaagtccatcatggata

SEQ ID NO: 669000 - DNA, 19 bp, Mus musculus
  siRNA target sequence for Hira (NM_010435.1,1232-1250).
caagtccatcatggatatt

SEQ ID NO: 669001 - DNA, 19 bp, Mus musculus
  siRNA target sequence for Hira (NM_010435.1,1302-1320).
gtggcgttccttgatttct

SEQ ID NO: 669002 - DNA, 19 bp, Mus musculus
  siRNA target sequence for Hira (NM_010435.1,1391-1409).
gagcctggcaataatgact

SEQ ID NO: 669003 - DNA, 19 bp, Mus musculus
  siRNA target sequence for Hira (NM_010435.1,1627-1645).
gaatcacgcctctttgcat

SEQ ID NO: 669004 - DNA, 19 bp, Mus musculus
  siRNA target sequence for Hira (NM_010435.1,1843-1861).
ctgtcagtaaggacagtat

SEQ ID NO: 669005 - DNA, 19 bp, Mus musculus
  siRNA target sequence for Hira (NM_010435.1,1845-1863).
gtcagtaaggacagtatga

SEQ ID NO: 669006 - DNA, 19 bp, Mus musculus
  siRNA target sequence for Ifi16 (NM_008329.1,1241-1259).
gtgaaccgaaagaacacaa

SEQ ID NO: 669007 - DNA, 19 bp, Mus musculus
  siRNA target sequence for Ifi16 (NM_008329.1,1364-1382).
cacctgaaaacaattgaca

SEQ ID NO: 669008 - DNA, 19 bp, Mus musculus
  siRNA target sequence for Ifi16 (NM_008329.1,1717-1735).
cgttaatccaagaatggtt

SEQ ID NO: 669009 - DNA, 19 bp, Mus musculus
  siRNA target sequence for Ifi16 (NM_008329.1,1718-1736).
gttaatccaagaatggtta

SEQ ID NO: 669010 - DNA, 19 bp, Mus musculus
  siRNA target sequence for Ikbkg (NM_010547.1,90-108).
catgctgggtgaagaatct

SEQ ID NO: 669011 - DNA, 19 bp, Mus musculus
  siRNA target sequence for Ikbkg (NM_010547.1,506-524).
ccaaggatcggcaagcttt

SEQ ID NO: 669012 - DNA, 19 bp, Mus musculus
  siRNA target sequence for Ikbkg (NM_010547.1,533-551).
ggattcgagcagttagtga

SEQ ID NO: 669013 - DNA, 19 bp, Mus musculus
  siRNA target sequence for Ikbkg (NM_010547.1,733-751).
gactacgacagccacatta

SEQ ID NO: 669014 - DNA, 19 bp, Mus musculus
  siRNA target sequence for Ikbkg (NM_010547.1,817-835).
gtagccaaacaggaattga

SEQ ID NO: 669015 - DNA, 19 bp, Mus musculus
  siRNA target sequence for Ikbkg (NM_010547.1,859-877).
gagcagcacaagattgtga

SEQ ID NO: 669016 - DNA, 19 bp, Mus musculus
  siRNA target sequence for Ikbkg (NM_010547.1,901-919).
gcccaggcggatatctaca

SEQ ID NO: 669017 - DNA, 19 bp, Mus musculus
  siRNA target sequence for Ikbkg (NM_010547.1,1000-1018).
ctgcagcgcgagttcaaca

SEQ ID NO: 669018 - DNA, 19 bp, Mus musculus
  siRNA target sequence for Ikbkg (NM_010547.1,1043-1061).
cagccaggattgaggatat

SEQ ID NO: 669019 - DNA, 19 bp, Mus musculus
  siRNA target sequence for Ikbkg (NM_010547.1,1045-1063).
gccaggattgaggatatga

SEQ ID NO: 669020 - DNA, 19 bp, Mus musculus
  siRNA target sequence for Ikbkg (NM_010547.1,1184-1202).
gtccgaagtgccagtatca

SEQ ID NO: 669021 - DNA, 19 bp, Mus musculus
  siRNA target sequence for Ikbkg (NM_010547.1,1234-1252).
gtcatggagtgcatagagt

SEQ ID NO: 669022 - DNA, 19 bp, Mus musculus
  siRNA target sequence for Madh6 (NM_008542.2,1148-1166).
ctcctcctgaccagtacaa

SEQ ID NO: 669023 - DNA, 19 bp, Mus musculus
  siRNA target sequence for Madh6 (NM_008542.2,1171-1189).
ctggatctgtccgattcta

SEQ ID NO: 669024 - DNA, 19 bp, Mus musculus
  siRNA target sequence for Madh6 (NM_008542.2,1173-1191).
ggatctgtccgattctaca

SEQ ID NO: 669025 - DNA, 19 bp, Mus musculus
  siRNA target sequence for Madh6 (NM_008542.2,1174-1192).
gatctgtccgattctacat

SEQ ID NO: 669026 - DNA, 19 bp, Mus musculus
  siRNA target sequence for Madh6 (NM_008542.2,1177-1195).
ctgtccgattctacattgt

SEQ ID NO: 669027 - DNA, 19 bp, Mus musculus
  siRNA target sequence for Madh6 (NM_008542.2,1179-1197).
gtccgattctacattgtct

SEQ ID NO: 669028 - DNA, 19 bp, Mus musculus
  siRNA target sequence for Madh6 (NM_008542.2,1181-1199).
ccgattctacattgtctta

SEQ ID NO: 669029 - DNA, 19 bp, Mus musculus
  siRNA target sequence for Madh7 (NM_008543.1,1723-1741).
cgcactcggtgctcaagaa

SEQ ID NO: 669030 - DNA, 19 bp, Mus musculus
  siRNA target sequence for Madh7 (NM_008543.1,1724-1742).
gcactcggtgctcaagaaa

SEQ ID NO: 669031 - DNA, 19 bp, Mus musculus
  siRNA target sequence for Madh7 (NM_008543.1,2285-2303).
cctggatatcttctatgat

SEQ ID NO: 669032 - DNA, 19 bp, Mus musculus
  siRNA target sequence for Madh7 (NM_008543.1,2337-2355).
ctcaattcggacaacaaga

SEQ ID NO: 669033 - DNA, 19 bp, Mus musculus
  siRNA target sequence for Madh7 (NM_008543.1,2443-2461).
gcagttaccccatcttcat

SEQ ID NO: 669034 - DNA, 19 bp, Mus musculus
  siRNA target sequence for Madh7 (NM_008543.1,2497-2515).
cgctgttggtgcacaaagt

SEQ ID NO: 669035 - DNA, 19 bp, Mus musculus
  siRNA target sequence for Madh7 (NM_008543.1,2530-2548).
ccatcaaggcttttgacta

SEQ ID NO: 669036 - DNA, 19 bp, Mus musculus
  siRNA target sequence for Madh7 (NM_008543.1,2531-2549).
catcaaggcttttgactat

SEQ ID NO: 669037 - DNA, 19 bp, Mus musculus
  siRNA target sequence for Madh7 (NM_008543.1,2537-2555).
ggcttttgactatgagaaa

SEQ ID NO: 669038 - DNA, 19 bp, Mus musculus
  siRNA target sequence for Madh7 (NM_008543.1,2653-2671).
gctacacccgccagttcat

SEQ ID NO: 669039 - DNA, 19 bp, Mus musculus
  siRNA target sequence for Madh9 (NM_019483.2,575-593).
cctcgccaggccatgtgtt

SEQ ID NO: 669040 - DNA, 19 bp, Mus musculus
  siRNA target sequence for Madh9 (NM_019483.2,576-594).
ctcgccaggccatgtgttt

SEQ ID NO: 669041 - DNA, 19 bp, Mus musculus
  siRNA target sequence for Madh9 (NM_019483.2,644-662).
cagacagtccctatcaaca

SEQ ID NO: 669042 - DNA, 19 bp, Mus musculus
  siRNA target sequence for Madh9 (NM_019483.2,712-730).
gttgcctactacgaactaa

SEQ ID NO: 669043 - DNA, 19 bp, Mus musculus
  siRNA target sequence for Madh9 (NM_019483.2,715-733).
gcctactacgaactaaaca

SEQ ID NO: 669044 - DNA, 19 bp, Mus musculus
  siRNA target sequence for Madh9 (NM_019483.2,716-734).
cctactacgaactaaacaa

SEQ ID NO: 669045 - DNA, 19 bp, Mus musculus
  siRNA target sequence for Madh9 (NM_019483.2,764-782).
cgcggagcgtgctcataga

SEQ ID NO: 669046 - DNA, 19 bp, Mus musculus
  siRNA target sequence for Madh9 (NM_019483.2,786-804).
cttcaccgacccttccaat

SEQ ID NO: 669047 - DNA, 19 bp, Mus musculus
  siRNA target sequence for Madh9 (NM_019483.2,800-818).
ccaataacaggaataggtt

SEQ ID NO: 669048 - DNA, 19 bp, Mus musculus
  siRNA target sequence for Madh9 (NM_019483.2,846-864).
cagaaactcgaccatagaa

SEQ ID NO: 669049 - DNA, 19 bp, Mus musculus
  siRNA target sequence for Madh9 (NM_019483.2,848-866).
gaaactcgaccatagaaaa

SEQ ID NO: 669050 - DNA, 19 bp, Mus musculus
  siRNA target sequence for Madh9 (NM_019483.2,1025-1043).
gcagcctcaaggtcttcaa

SEQ ID NO: 669051 - DNA, 19 bp, Mus musculus
  siRNA target sequence for Madh9 (NM_019483.2,1077-1095).
cgtgcaccacggctttgaa

SEQ ID NO: 669052 - DNA, 19 bp, Mus musculus
  siRNA target sequence for Madh9 (NM_019483.2,1260-1278).
cccacacaaccctatctct

SEQ ID NO: 669053 - DNA, 19 bp, Mus musculus
  siRNA target sequence for Mjd (NM_029705.1,89-107).
cctattgcaaggagagtat

SEQ ID NO: 669054 - DNA, 19 bp, Mus musculus
  siRNA target sequence for Mjd (NM_029705.1,90-108).
ctattgcaaggagagtatt

SEQ ID NO: 669055 - DNA, 19 bp, Mus musculus
  siRNA target sequence for Mjd (NM_029705.1,119-137).
ggagctatcctcaattgca

SEQ ID NO: 669056 - DNA, 19 bp, Mus musculus
  siRNA target sequence for Mjd (NM_029705.1,192-210).
gaagactaccgcacatttt

SEQ ID NO: 669057 - DNA, 19 bp, Mus musculus
  siRNA target sequence for Mjd (NM_029705.1,237-255).
gacagcggctttttctcta

SEQ ID NO: 669058 - DNA, 19 bp, Mus musculus
  siRNA target sequence for Mjd (NM_029705.1,241-259).
gcggctttttctctattca

SEQ ID NO: 669059 - DNA, 19 bp, Mus musculus
  siRNA target sequence for Mjd (NM_029705.1,242-260).
cggctttttctctattcaa

SEQ ID NO: 669060 - DNA, 19 bp, Mus musculus
  siRNA target sequence for Mjd (NM_029705.1,253-271).
ctattcaagttataagcaa

SEQ ID NO: 669061 - DNA, 19 bp, Mus musculus
  siRNA target sequence for Mjd (NM_029705.1,282-300).
gtttggggtttagaactaa

SEQ ID NO: 669062 - DNA, 19 bp, Mus musculus
  siRNA target sequence for Mjd (NM_029705.1,328-346).
ggctcagaattgatcctat

SEQ ID NO: 669063 - DNA, 19 bp, Mus musculus
  siRNA target sequence for Mjd (NM_029705.1,330-348).
ctcagaattgatcctataa

SEQ ID NO: 669064 - DNA, 19 bp, Mus musculus
  siRNA target sequence for Mjd (NM_029705.1,334-352).
gaattgatcctataaacga

SEQ ID NO: 669065 - DNA, 19 bp, Mus musculus
  siRNA target sequence for Mjd (NM_029705.1,339-357).
gatcctataaacgaaagat

SEQ ID NO: 669066 - DNA, 19 bp, Mus musculus
  siRNA target sequence for Mjd (NM_029705.1,351-369).
gaaagatcctttatatgca

SEQ ID NO: 669067 - DNA, 19 bp, Mus musculus
  siRNA target sequence for Mjd (NM_029705.1,405-423).
ggcaagcagtggtttaact

SEQ ID NO: 669068 - DNA, 19 bp, Mus musculus
  siRNA target sequence for Mjd (NM_029705.1,406-424).
gcaagcagtggtttaactt

SEQ ID NO: 669069 - DNA, 19 bp, Mus musculus
  siRNA target sequence for Mjd (NM_029705.1,415-433).
ggtttaacttgaattctct

SEQ ID NO: 669070 - DNA, 19 bp, Mus musculus
  siRNA target sequence for Mjd (NM_029705.1,434-452).
gttgacgggtccagaatta

SEQ ID NO: 669071 - DNA, 19 bp, Mus musculus
  siRNA target sequence for Mjd (NM_029705.1,437-455).
gacgggtccagaattaata

SEQ ID NO: 669072 - DNA, 19 bp, Mus musculus
  siRNA target sequence for Mjd (NM_029705.1,440-458).
gggtccagaattaatatca

SEQ ID NO: 669073 - DNA, 19 bp, Mus musculus
  siRNA target sequence for Mjd (NM_029705.1,444-462).
ccagaattaatatcagata

SEQ ID NO: 669074 - DNA, 19 bp, Mus musculus
  siRNA target sequence for Mjd (NM_029705.1,463-481).
catacctcgcactattctt

SEQ ID NO: 669075 - DNA, 19 bp, Mus musculus
  siRNA target sequence for Mjd (NM_029705.1,492-510).
cagcaagaaggttattcta

SEQ ID NO: 669076 - DNA, 19 bp, Mus musculus
  siRNA target sequence for Mjd (NM_029705.1,494-512).
gcaagaaggttattctata

SEQ ID NO: 669077 - DNA, 19 bp, Mus musculus
  siRNA target sequence for Mjd (NM_029705.1,495-513).
caagaaggttattctatat

SEQ ID NO: 669078 - DNA, 19 bp, Mus musculus
  siRNA target sequence for Mjd (NM_029705.1,524-542).
gggtgatctgccagattgt

SEQ ID NO: 669079 - DNA, 19 bp, Mus musculus
  siRNA target sequence for Mjd (NM_029705.1,581-599).
gatgcatcgaccaaaactt

SEQ ID NO: 669080 - DNA, 19 bp, Mus musculus
  siRNA target sequence for Mjd (NM_029705.1,584-602).
gcatcgaccaaaacttatt

SEQ ID NO: 669081 - DNA, 19 bp, Mus musculus
  siRNA target sequence for Mjd (NM_029705.1,650-668).
cctggagcgcgtcttagaa

SEQ ID NO: 669082 - DNA, 19 bp, Mus musculus
  siRNA target sequence for Mjd (NM_029705.1,673-691).
ctgatgggtcgggcatatt

SEQ ID NO: 669083 - DNA, 19 bp, Mus musculus
  siRNA target sequence for Mjd (NM_029705.1,685-703).
gcatatttgatgaagatga

SEQ ID NO: 669084 - DNA, 19 bp, Mus musculus
  siRNA target sequence for Mjd (NM_029705.1,716-734).
gagggctctagccataagt

SEQ ID NO: 669085 - DNA, 19 bp, Mus musculus
  siRNA target sequence for Mjd (NM_029705.1,727-745).
ccataagtcgccaggaaat

SEQ ID NO: 669086 - DNA, 19 bp, Mus musculus
  siRNA target sequence for Mjd (NM_029705.1,778-796).
gggccattcagctcagtat

SEQ ID NO: 669087 - DNA, 19 bp, Mus musculus
  siRNA target sequence for Mjd (NM_029705.1,875-893).
gagacgagaagcctacttt

SEQ ID NO: 669088 - DNA, 19 bp, Mus musculus
  siRNA target sequence for Mjd (NM_029705.1,877-895).
gacgagaagcctactttga

SEQ ID NO: 669089 - DNA, 19 bp, Mus musculus
  siRNA target sequence for Mjd (NM_029705.1,879-897).
cgagaagcctactttgaaa

SEQ ID NO: 669090 - DNA, 19 bp, Mus musculus
  siRNA target sequence for Mjd (NM_029705.1,954-972).
gaaagaccgaccacaagtt

SEQ ID NO: 669091 - DNA, 19 bp, Mus musculus
  siRNA target sequence for Mjd (NM_029705.1,1040-1058).
gaccatgtctttagaaact

SEQ ID NO: 669092 - DNA, 19 bp, Mus musculus
  siRNA target sequence for Mllt1 (NM_022328.2,353-371).
gcttcatcatgctcattga

SEQ ID NO: 669093 - DNA, 19 bp, Mus musculus
  siRNA target sequence for Mllt1 (NM_022328.2,354-372).
cttcatcatgctcattgaa

SEQ ID NO: 669094 - DNA, 19 bp, Mus musculus
  siRNA target sequence for Mllt1 (NM_022328.2,416-434).
cctacgacctgtttctcaa

SEQ ID NO: 669095 - DNA, 19 bp, Mus musculus
  siRNA target sequence for Mllt1 (NM_022328.2,526-544).
gctggaggggtgatggtaa

SEQ ID NO: 669096 - DNA, 19 bp, Mus musculus
  siRNA target sequence for Mllt1 (NM_022328.2,527-545).
ctggaggggtgatggtaat

SEQ ID NO: 669097 - DNA, 19 bp, Mus musculus
  siRNA target sequence for Mllt1 (NM_022328.2,968-986).
cgaagctcagcgccaaaaa

SEQ ID NO: 669098 - DNA, 19 bp, Mus musculus
  siRNA target sequence for Mllt1 (NM_022328.2,1514-1532).
gcagcaagcccgaaaagat

SEQ ID NO: 669099 - DNA, 19 bp, Mus musculus
  siRNA target sequence for Mllt1 (NM_022328.2,1624-1642).
cagcagattgtcaatctga

SEQ ID NO: 669100 - DNA, 19 bp, Mus musculus
  siRNA target sequence for Mllt1 (NM_022328.2,1647-1665).
ggagactggccacttcaat

SEQ ID NO: 669101 - DNA, 19 bp, Mus musculus
  siRNA target sequence for Mllt1 (NM_022328.2,1679-1697).
ccttcgactttgacctttt

SEQ ID NO: 669102 - DNA, 19 bp, Mus musculus
  siRNA target sequence for Mllt3 (NM_027326.2,361-379).
cttccctaggccaaaaaga

SEQ ID NO: 669103 - DNA, 19 bp, Mus musculus
  siRNA target sequence for Mllt3 (NM_027326.2,384-402).
gcaaagacccaccttacaa

SEQ ID NO: 669104 - DNA, 19 bp, Mus musculus
  siRNA target sequence for Mllt3 (NM_027326.2,393-411).
caccttacaaggtagaaga

SEQ ID NO: 669105 - DNA, 19 bp, Mus musculus
  siRNA target sequence for Mllt3 (NM_027326.2,475-493).
gaaagtccgctttgattat

SEQ ID NO: 669106 - DNA, 19 bp, Mus musculus
  siRNA target sequence for Mllt3 (NM_027326.2,479-497).
gtccgctttgattatgact

SEQ ID NO: 669107 - DNA, 19 bp, Mus musculus
  siRNA target sequence for Mllt3 (NM_027326.2,481-499).
ccgctttgattatgactta

SEQ ID NO: 669108 - DNA, 19 bp, Mus musculus
  siRNA target sequence for Mllt3 (NM_027326.2,482-500).
cgctttgattatgacttat

SEQ ID NO: 669109 - DNA, 19 bp, Mus musculus
  siRNA target sequence for Mllt3 (NM_027326.2,483-501).
gctttgattatgacttatt

SEQ ID NO: 669110 - DNA, 19 bp, Mus musculus
  siRNA target sequence for Mllt3 (NM_027326.2,516-534).
gccacccaccagtgaatca

SEQ ID NO: 669111 - DNA, 19 bp, Mus musculus
  siRNA target sequence for Mllt3 (NM_027326.2,535-553).
cctccgctgtgagaaacta

SEQ ID NO: 669112 - DNA, 19 bp, Mus musculus
  siRNA target sequence for Mllt3 (NM_027326.2,536-554).
ctccgctgtgagaaactaa

SEQ ID NO: 669113 - DNA, 19 bp, Mus musculus
  siRNA target sequence for Mllt3 (NM_027326.2,538-556).
ccgctgtgagaaactaact

SEQ ID NO: 669114 - DNA, 19 bp, Mus musculus
  siRNA target sequence for Mllt3 (NM_027326.2,543-561).
gtgagaaactaactttcaa

SEQ ID NO: 669115 - DNA, 19 bp, Mus musculus
  siRNA target sequence for Mllt3 (NM_027326.2,545-563).
gagaaactaactttcaata

SEQ ID NO: 669116 - DNA, 19 bp, Mus musculus
  siRNA target sequence for Mllt3 (NM_027326.2,610-628).
ccctaacaggagcattcat

SEQ ID NO: 669117 - DNA, 19 bp, Mus musculus
  siRNA target sequence for Mllt3 (NM_027326.2,611-629).
cctaacaggagcattcata

SEQ ID NO: 669118 - DNA, 19 bp, Mus musculus
  siRNA target sequence for Mllt3 (NM_027326.2,715-733).
cagtagtaccagtttttca

SEQ ID NO: 669119 - DNA, 19 bp, Mus musculus
  siRNA target sequence for Mllt3 (NM_027326.2,817-835).
cagggatcacaacaaatct

SEQ ID NO: 669120 - DNA, 19 bp, Mus musculus
  siRNA target sequence for Mllt3 (NM_027326.2,944-962).
gcagacagtaacttactca

SEQ ID NO: 669121 - DNA, 19 bp, Mus musculus
  siRNA target sequence for Mllt3 (NM_027326.2,1056-1074).
gtagctcggaggctttatt

SEQ ID NO: 669122 - DNA, 19 bp, Mus musculus
  siRNA target sequence for Mllt3 (NM_027326.2,1059-1077).
gctcggaggctttatttaa

SEQ ID NO: 669123 - DNA, 19 bp, Mus musculus
  siRNA target sequence for Mllt3 (NM_027326.2,1118-1136).
gctgacaaaaaacagataa

SEQ ID NO: 669124 - DNA, 19 bp, Mus musculus
  siRNA target sequence for Mllt3 (NM_027326.2,1160-1178).
ggaaaggtcaaaattgaga

SEQ ID NO: 669125 - DNA, 19 bp, Mus musculus
  siRNA target sequence for Mllt3 (NM_027326.2,1358-1376).
cctttaaggtcgatcatga

SEQ ID NO: 669126 - DNA, 19 bp, Mus musculus
  siRNA target sequence for Mllt3 (NM_027326.2,1359-1377).
ctttaaggtcgatcatgaa

SEQ ID NO: 669127 - DNA, 19 bp, Mus musculus
  siRNA target sequence for Mllt3 (NM_027326.2,1375-1393).
gaaagatctgcattctgat

SEQ ID NO: 669128 - DNA, 19 bp, Mus musculus
  siRNA target sequence for Mllt3 (NM_027326.2,1582-1600).
ccagatccttgaagtgaaa

SEQ ID NO: 669129 - DNA, 19 bp, Mus musculus
  siRNA target sequence for Mllt3 (NM_027326.2,1617-1635).
gcaaatcagataagcaaat

SEQ ID NO: 669130 - DNA, 19 bp, Mus musculus
  siRNA target sequence for Mllt3 (NM_027326.2,1618-1636).
caaatcagataagcaaata

SEQ ID NO: 669131 - DNA, 19 bp, Mus musculus
  siRNA target sequence for Mllt3 (NM_027326.2,1724-1742).
cagcagatcgtgaacctta

SEQ ID NO: 669132 - DNA, 19 bp, Mus musculus
  siRNA target sequence for Mllt3 (NM_027326.2,1757-1775).
cactttcatattacgaata

SEQ ID NO: 669133 - DNA, 19 bp, Mus musculus
  siRNA target sequence for Mllt3 (NM_027326.2,1759-1777).
ctttcatattacgaataca

SEQ ID NO: 669134 - DNA, 19 bp, Mus musculus
  siRNA target sequence for Mllt3 (NM_027326.2,1763-1781).
catattacgaatacaacat

SEQ ID NO: 669135 - DNA, 19 bp, Mus musculus
  siRNA target sequence for Mllt3 (NM_027326.2,1770-1788).
cgaatacaacatttgattt

SEQ ID NO: 669136 - DNA, 19 bp, Mus musculus
  siRNA target sequence for Mllt3 (NM_027326.2,1798-1816).
ctcgctggacaaaactaca

SEQ ID NO: 669137 - DNA, 19 bp, Mus musculus
  siRNA target sequence for Mllt3 (NM_027326.2,1812-1830).
ctacagtccgtaaattaca

SEQ ID NO: 669138 - DNA, 19 bp, Mus musculus
  siRNA target sequence for Mllt3 (NM_029931.1,478-496).
gacaagatcgtgaacctta

SEQ ID NO: 669139 - DNA, 19 bp, Mus musculus
  siRNA target sequence for Mnat1 (NM_008612.1,326-344).
cagggtacaactctttgaa

SEQ ID NO: 669140 - DNA, 19 bp, Mus musculus
  siRNA target sequence for Mnat1 (NM_008612.1,342-360).
gaagatcccactgttgata

SEQ ID NO: 669141 - DNA, 19 bp, Mus musculus
  siRNA target sequence for Mnat1 (NM_008612.1,420-438).
cctagtttaagagagtata

SEQ ID NO: 669142 - DNA, 19 bp, Mus musculus
  siRNA target sequence for Mnat1 (NM_008612.1,421-439).
ctagtttaagagagtataa

SEQ ID NO: 669143 - DNA, 19 bp, Mus musculus
  siRNA target sequence for Mnat1 (NM_008612.1,456-474).
gtggaggaaatcgttttca

SEQ ID NO: 669144 - DNA, 19 bp, Mus musculus
  siRNA target sequence for Mnat1 (NM_008612.1,462-480).
gaaatcgttttcaatttga

SEQ ID NO: 669145 - DNA, 19 bp, Mus musculus
  siRNA target sequence for Mnat1 (NM_008612.1,491-509).
ggatttggagaacactaaa

SEQ ID NO: 669146 - DNA, 19 bp, Mus musculus
  siRNA target sequence for Mnat1 (NM_008612.1,689-707).
caagcaggcctttttagat

SEQ ID NO: 669147 - DNA, 19 bp, Mus musculus
  siRNA target sequence for Mnat1 (NM_008612.1,740-758).
gctcctggcgcagcataaa

SEQ ID NO: 669148 - DNA, 19 bp, Mus musculus
  siRNA target sequence for Mnat1 (NM_008612.1,744-762).
ctggcgcagcataaagaca

SEQ ID NO: 669149 - DNA, 19 bp, Mus musculus
  siRNA target sequence for Mnat1 (NM_008612.1,914-932).
gacctgtggcccacaagtt

SEQ ID NO: 669150 - DNA, 19 bp, Mus musculus
  siRNA target sequence for Mnat1 (NM_008612.1,999-1017).
cttgctggcggctatactt

SEQ ID NO: 669151 - DNA, 19 bp, Mus musculus
  siRNA target sequence for Mnat1 (NM_008612.1,1007-1025).
cggctatacttcttctctt

SEQ ID NO: 669152 - DNA, 19 bp, Mus musculus
  siRNA target sequence for Mycbp (NM_019660.1,96-114).
gacacgctgacgaaagtgt

SEQ ID NO: 669153 - DNA, 19 bp, Mus musculus
  siRNA target sequence for Mycbp (NM_019660.1,116-134).
ggtagccttatatgaagaa

SEQ ID NO: 669154 - DNA, 19 bp, Mus musculus
  siRNA target sequence for Mycbp (NM_019660.1,149-167).
cagtgctctggatttttta

SEQ ID NO: 669155 - DNA, 19 bp, Mus musculus
  siRNA target sequence for Mycbp (NM_019660.1,191-209).
cccggaaaacccagaaata

SEQ ID NO: 669156 - DNA, 19 bp, Mus musculus
  siRNA target sequence for Mycbp (NM_019660.1,210-228).
gagctcgttcgcctagaat

SEQ ID NO: 669157 - DNA, 19 bp, Mus musculus
  siRNA target sequence for Mycbp (NM_019660.1,245-263).
gaaatatgaagctactgta

SEQ ID NO: 669158 - DNA, 19 bp, Mus musculus
  siRNA target sequence for Mycbp (NM_019660.1,286-304).
caaagcttgttcagtatga

SEQ ID NO: 669159 - DNA, 19 bp, Mus musculus
  siRNA target sequence for Nab1 (NM_008667.2,209-227).
ggggagctgcagctgtata

SEQ ID NO: 669160 - DNA, 19 bp, Mus musculus
  siRNA target sequence for Nab1 (NM_008667.2,214-232).
gctgcagctgtatagaata

SEQ ID NO: 669161 - DNA, 19 bp, Mus musculus
  siRNA target sequence for Nab1 (NM_008667.2,215-233).
ctgcagctgtatagaatat

SEQ ID NO: 669162 - DNA, 19 bp, Mus musculus
  siRNA target sequence for Nab1 (NM_008667.2,397-415).
gagagactgggttacaaat

SEQ ID NO: 669163 - DNA, 19 bp, Mus musculus
  siRNA target sequence for Nab1 (NM_008667.2,454-472).
cagtagcatacccatctat

SEQ ID NO: 669164 - DNA, 19 bp, Mus musculus
  siRNA target sequence for Nab1 (NM_008667.2,456-474).
gtagcatacccatctataa

SEQ ID NO: 669165 - DNA, 19 bp, Mus musculus
  siRNA target sequence for Nab1 (NM_008667.2,500-518).
ctggggatatcctgcaata

SEQ ID NO: 669166 - DNA, 19 bp, Mus musculus
  siRNA target sequence for Nab1 (NM_008667.2,537-555).
gctcccgagagccacattt

SEQ ID NO: 669167 - DNA, 19 bp, Mus musculus
  siRNA target sequence for Nab1 (NM_008667.2,538-556).
ctcccgagagccacattta

SEQ ID NO: 669168 - DNA, 19 bp, Mus musculus
  siRNA target sequence for Nab1 (NM_008667.2,610-628).
gtcagaagtgggaagttta

SEQ ID NO: 669169 - DNA, 19 bp, Mus musculus
  siRNA target sequence for Nab1 (NM_008667.2,678-696).
ctgaaagcgagcatagtct

SEQ ID NO: 669170 - DNA, 19 bp, Mus musculus
  siRNA target sequence for Nab1 (NM_008667.2,799-817).
ccccacactgcccaaaagt

SEQ ID NO: 669171 - DNA, 19 bp, Mus musculus
  siRNA target sequence for Nab1 (NM_008667.2,801-819).
ccacactgcccaaaagtga

SEQ ID NO: 669172 - DNA, 19 bp, Mus musculus
  siRNA target sequence for Nab1 (NM_008667.2,836-854).
gagctgctgaagaacaata

SEQ ID NO: 669173 - DNA, 19 bp, Mus musculus
  siRNA target sequence for Nab1 (NM_008667.2,865-883).
caaaatgatcggtcacata

SEQ ID NO: 669174 - DNA, 19 bp, Mus musculus
  siRNA target sequence for Nab1 (NM_008667.2,947-965).
gggcgatttgactccaaaa

SEQ ID NO: 669175 - DNA, 19 bp, Mus musculus
  siRNA target sequence for Nab1 (NM_008667.2,949-967).
gcgatttgactccaaaaga

SEQ ID NO: 669176 - DNA, 19 bp, Mus musculus
  siRNA target sequence for Nab1 (NM_008667.2,950-968).
cgatttgactccaaaagaa

SEQ ID NO: 669177 - DNA, 19 bp, Mus musculus
  siRNA target sequence for Nab1 (NM_008667.2,1084-1102).
gcaggtttctcgagaagtt

SEQ ID NO: 669178 - DNA, 19 bp, Mus musculus
  siRNA target sequence for Nab1 (NM_008667.2,1085-1103).
caggtttctcgagaagtta

SEQ ID NO: 669179 - DNA, 19 bp, Mus musculus
  siRNA target sequence for Nab1 (NM_008667.2,1094-1112).
cgagaagttacctacaagt

SEQ ID NO: 669180 - DNA, 19 bp, Mus musculus
  siRNA target sequence for Nab1 (NM_008667.2,1095-1113).
gagaagttacctacaagta

SEQ ID NO: 669181 - DNA, 19 bp, Mus musculus
  siRNA target sequence for Nab1 (NM_008667.2,1266-1284).
gttcacagcaggctgaaaa

SEQ ID NO: 669182 - DNA, 19 bp, Mus musculus
  siRNA target sequence for Nab1 (NM_008667.2,1555-1573).
gagccttgggattctaaaa

SEQ ID NO: 669183 - DNA, 19 bp, Mus musculus
  siRNA target sequence for Nab1 (NM_008667.2,1557-1575).
gccttgggattctaaaaga

SEQ ID NO: 669184 - DNA, 19 bp, Mus musculus
  siRNA target sequence for Nab2 (NM_008668.1,588-606).
ccagcatcccacttttcaa

SEQ ID NO: 669185 - DNA, 19 bp, Mus musculus
  siRNA target sequence for Nab2 (NM_008668.1,676-694).
gggcagtgctcgaagcttt

SEQ ID NO: 669186 - DNA, 19 bp, Mus musculus
  siRNA target sequence for Nab2 (NM_008668.1,1017-1035).
ccctgttgaagctgaataa

SEQ ID NO: 669187 - DNA, 19 bp, Mus musculus
  siRNA target sequence for Nab2 (NM_008668.1,1252-1270).
ctcactgtcccgacaagta

SEQ ID NO: 669188 - DNA, 19 bp, Mus musculus
  siRNA target sequence for Nab2 (NM_008668.1,1277-1295).
gagagcacctatctttctt

SEQ ID NO: 669189 - DNA, 19 bp, Mus musculus
  siRNA target sequence for Nab2 (NM_008668.1,1311-1329).
ggcttcactctgaagaatt

SEQ ID NO: 669190 - DNA, 19 bp, Mus musculus
  siRNA target sequence for Nab2 (NM_008668.1,1753-1771).
ccgcaggagcagcgttaaa

SEQ ID NO: 669191 - DNA, 19 bp, Mus musculus
  siRNA target sequence for Nab2 (NM_008668.1,1755-1773).
gcaggagcagcgttaaagt

SEQ ID NO: 669192 - DNA, 19 bp, Mus musculus
  siRNA target sequence for Pcqap (NM_033609.1,51-69).
gaagctggtcagccaaatt

SEQ ID NO: 669193 - DNA, 19 bp, Mus musculus
  siRNA target sequence for Pcqap (NM_033609.1,89-107).
ctggtgtggcccacagtaa

SEQ ID NO: 669194 - DNA, 19 bp, Mus musculus
  siRNA target sequence for Pcqap (NM_033609.1,104-122).
gtaaatctagcaaggatat

SEQ ID NO: 669195 - DNA, 19 bp, Mus musculus
  siRNA target sequence for Pcqap (NM_033609.1,146-164).
ccaagacccgggatgagta

SEQ ID NO: 669196 - DNA, 19 bp, Mus musculus
  siRNA target sequence for Pcqap (NM_033609.1,147-165).
caagacccgggatgagtat

SEQ ID NO: 669197 - DNA, 19 bp, Mus musculus
  siRNA target sequence for Pcqap (NM_033609.1,171-189).
ccttgtggcccgactcatt

SEQ ID NO: 669198 - DNA, 19 bp, Mus musculus
  siRNA target sequence for Pcqap (NM_033609.1,172-190).
cttgtggcccgactcatta

SEQ ID NO: 669199 - DNA, 19 bp, Mus musculus
  siRNA target sequence for Pcqap (NM_033609.1,178-196).
gcccgactcattatccatt

SEQ ID NO: 669200 - DNA, 19 bp, Mus musculus
  siRNA target sequence for Pcqap (NM_033609.1,179-197).
cccgactcattatccattt

SEQ ID NO: 669201 - DNA, 19 bp, Mus musculus
  siRNA target sequence for Pcqap (NM_033609.1,192-210).
ccatttccgagatattcat

SEQ ID NO: 669202 - DNA, 19 bp, Mus musculus
  siRNA target sequence for Pcqap (NM_033609.1,193-211).
catttccgagatattcata

SEQ ID NO: 669203 - DNA, 19 bp, Mus musculus
  siRNA target sequence for Pcqap (NM_033609.1,199-217).
cgagatattcataacaaga

SEQ ID NO: 669204 - DNA, 19 bp, Mus musculus
  siRNA target sequence for Pcqap (NM_033609.1,661-679).
cagcagcacctgattaagt

SEQ ID NO: 669205 - DNA, 19 bp, Mus musculus
  siRNA target sequence for Pcqap (NM_033609.1,672-690).
gattaagttgcatcatcaa

SEQ ID NO: 669206 - DNA, 19 bp, Mus musculus
  siRNA target sequence for Pcqap (NM_033609.1,692-710).
gccagcaacaacagataca

SEQ ID NO: 669207 - DNA, 19 bp, Mus musculus
  siRNA target sequence for Pcqap (NM_033609.1,914-932).
cccccattgctcaaaacca

SEQ ID NO: 669208 - DNA, 19 bp, Mus musculus
  siRNA target sequence for Pcqap (NM_033609.1,1388-1406).
gctcacagcccaactctaa

SEQ ID NO: 669209 - DNA, 19 bp, Mus musculus
  siRNA target sequence for Pcqap (NM_033609.1,1389-1407).
ctcacagcccaactctaat

SEQ ID NO: 669210 - DNA, 19 bp, Mus musculus
  siRNA target sequence for Pcqap (NM_033609.1,1513-1531).
ccttcccctggacctttaa

SEQ ID NO: 669211 - DNA, 19 bp, Mus musculus
  siRNA target sequence for Pcqap (NM_033609.1,1600-1618).
ctggacaagctgaagcaat

SEQ ID NO: 669212 - DNA, 19 bp, Mus musculus
  siRNA target sequence for Pcqap (NM_033609.1,1636-1654).
cccctgcgacgcatgatca

SEQ ID NO: 669213 - DNA, 19 bp, Mus musculus
  siRNA target sequence for Pcqap (NM_033609.1,1637-1655).
ccctgcgacgcatgatcaa

SEQ ID NO: 669214 - DNA, 19 bp, Mus musculus
  siRNA target sequence for Pcqap (NM_033609.1,1913-1931).
ccctgtaccgcacatttgt

SEQ ID NO: 669215 - DNA, 19 bp, Mus musculus
  siRNA target sequence for Pou2af1 (NM_011136.1,404-422).
caccctacacggagtatgt

SEQ ID NO: 669216 - DNA, 19 bp, Mus musculus
  siRNA target sequence for Pou2af1 (NM_011136.1,406-424).
ccctacacggagtatgtgt

SEQ ID NO: 669217 - DNA, 19 bp, Mus musculus
  siRNA target sequence for Pou2af1 (NM_011136.1,446-464).
cctactccactgacatgta

SEQ ID NO: 669218 - DNA, 19 bp, Mus musculus
  siRNA target sequence for Pou2af1 (NM_011136.1,527-545).
ctccaccactcatcactaa

SEQ ID NO: 669219 - DNA, 19 bp, Mus musculus
  siRNA target sequence for Pou2af1 (NM_011136.1,530-548).
caccactcatcactaatgt

SEQ ID NO: 669220 - DNA, 19 bp, Mus musculus
  siRNA target sequence for Pou2af1 (NM_011136.1,660-678).
ctccagcctgcagtatcaa

SEQ ID NO: 669221 - DNA, 19 bp, Mus musculus
  siRNA target sequence for Ptf1a (NM_018809.1,359-377).
gccaccagctacacgaata

SEQ ID NO: 669222 - DNA, 19 bp, Mus musculus
  siRNA target sequence for Ptf1a (NM_018809.1,361-379).
caccagctacacgaatact

SEQ ID NO: 669223 - DNA, 19 bp, Mus musculus
  siRNA target sequence for Ptf1a (NM_018809.1,760-778).
cccacgctaccctacgaaa

SEQ ID NO: 669224 - DNA, 19 bp, Mus musculus
  siRNA target sequence for Ptf1a (NM_018809.1,761-779).
ccacgctaccctacgaaaa

SEQ ID NO: 669225 - DNA, 19 bp, Mus musculus
  siRNA target sequence for Ptf1a (NM_018809.1,811-829).
gccataggctacattaact

SEQ ID NO: 669226 - DNA, 19 bp, Mus musculus
  siRNA target sequence for Ptf1a (NM_018809.1,812-830).
ccataggctacattaactt

SEQ ID NO: 669227 - DNA, 19 bp, Mus musculus
  siRNA target sequence for Ptf1a (NM_018809.1,937-955).
caggcccagaaggttatca

SEQ ID NO: 669228 - DNA, 19 bp, Mus musculus
  siRNA target sequence for Ptf1a (NM_018809.1,1121-1139).
gtaaatctttcgacaacat

SEQ ID NO: 669229 - DNA, 19 bp, Mus musculus
  siRNA target sequence for Ptf1a (NM_018809.1,1127-1145).
ctttcgacaacatagagaa

SEQ ID NO: 669230 - DNA, 19 bp, Mus musculus
  siRNA target sequence for Rnf12 (NM_011276.2,308-326).
gaactcagattctaacgat

SEQ ID NO: 669231 - DNA, 19 bp, Mus musculus
  siRNA target sequence for Rnf12 (NM_011276.2,315-333).
gattctaacgataaaggaa

SEQ ID NO: 669232 - DNA, 19 bp, Mus musculus
  siRNA target sequence for Rnf12 (NM_011276.2,348-366).
gctcagcgcagaagtcaaa

SEQ ID NO: 669233 - DNA, 19 bp, Mus musculus
  siRNA target sequence for Rnf12 (NM_011276.2,349-367).
ctcagcgcagaagtcaaat

SEQ ID NO: 669234 - DNA, 19 bp, Mus musculus
  siRNA target sequence for Rnf12 (NM_011276.2,353-371).
gcgcagaagtcaaatggat

SEQ ID NO: 669235 - DNA, 19 bp, Mus musculus
  siRNA target sequence for Rnf12 (NM_011276.2,390-408).
gctttctatcaatttgtga

SEQ ID NO: 669236 - DNA, 19 bp, Mus musculus
  siRNA target sequence for Rnf12 (NM_011276.2,391-409).
ctttctatcaatttgtgaa

SEQ ID NO: 669237 - DNA, 19 bp, Mus musculus
  siRNA target sequence for Rnf12 (NM_011276.2,420-438).
gaagaagattatagactta

SEQ ID NO: 669238 - DNA, 19 bp, Mus musculus
  siRNA target sequence for Rnf12 (NM_011276.2,433-451).
gacttatgagagacaacaa

SEQ ID NO: 669239 - DNA, 19 bp, Mus musculus
  siRNA target sequence for Rnf12 (NM_011276.2,491-509).
gctcagaagactacaacaa

SEQ ID NO: 669240 - DNA, 19 bp, Mus musculus
  siRNA target sequence for Rnf12 (NM_011276.2,529-547).
cacagagccccgatgaaaa

SEQ ID NO: 669241 - DNA, 19 bp, Mus musculus
  siRNA target sequence for Rnf12 (NM_011276.2,533-551).
gagccccgatgaaaataga

SEQ ID NO: 669242 - DNA, 19 bp, Mus musculus
  siRNA target sequence for Rnf12 (NM_011276.2,556-574).
gagagtcttcagatgatgt

SEQ ID NO: 669243 - DNA, 19 bp, Mus musculus
  siRNA target sequence for Rnf12 (NM_011276.2,575-593).
gaccaacagtgattctata

SEQ ID NO: 669244 - DNA, 19 bp, Mus musculus
  siRNA target sequence for Rnf12 (NM_011276.2,577-595).
ccaacagtgattctataat

SEQ ID NO: 669245 - DNA, 19 bp, Mus musculus
  siRNA target sequence for Rnf12 (NM_011276.2,578-596).
caacagtgattctataata

SEQ ID NO: 669246 - DNA, 19 bp, Mus musculus
  siRNA target sequence for Rnf12 (NM_011276.2,581-599).
cagtgattctataatagat

SEQ ID NO: 669247 - DNA, 19 bp, Mus musculus
  siRNA target sequence for Rnf12 (NM_011276.2,612-630).
gtcagacagactggaaata

SEQ ID NO: 669248 - DNA, 19 bp, Mus musculus
  siRNA target sequence for Rnf12 (NM_011276.2,618-636).
cagactggaaatacaacaa

SEQ ID NO: 669249 - DNA, 19 bp, Mus musculus
  siRNA target sequence for Rnf12 (NM_011276.2,620-638).
gactggaaatacaacaaga

SEQ ID NO: 669250 - DNA, 19 bp, Mus musculus
  siRNA target sequence for Rnf12 (NM_011276.2,672-690).
gtgagccggactaatccaa

SEQ ID NO: 669251 - DNA, 19 bp, Mus musculus
  siRNA target sequence for Rnf12 (NM_011276.2,745-763).
gccaaacttccgagaatga

SEQ ID NO: 669252 - DNA, 19 bp, Mus musculus
  siRNA target sequence for Rnf12 (NM_011276.2,746-764).
ccaaacttccgagaatgaa

SEQ ID NO: 669253 - DNA, 19 bp, Mus musculus
  siRNA target sequence for Rnf12 (NM_011276.2,747-765).
caaacttccgagaatgaaa

SEQ ID NO: 669254 - DNA, 19 bp, Mus musculus
  siRNA target sequence for Rnf12 (NM_011276.2,775-793).
ccactaggcgtcttagtgt

SEQ ID NO: 669255 - DNA, 19 bp, Mus musculus
  siRNA target sequence for Rnf12 (NM_011276.2,776-794).
cactaggcgtcttagtgta

SEQ ID NO: 669256 - DNA, 19 bp, Mus musculus
  siRNA target sequence for Rnf12 (NM_011276.2,781-799).
ggcgtcttagtgtagaaaa

SEQ ID NO: 669257 - DNA, 19 bp, Mus musculus
  siRNA target sequence for Rnf12 (NM_011276.2,989-1007).
ccctctgcagccaacaagt

SEQ ID NO: 669258 - DNA, 19 bp, Mus musculus
  siRNA target sequence for Rnf12 (NM_011276.2,998-1016).
gccaacaagtgaaattcca

SEQ ID NO: 669259 - DNA, 19 bp, Mus musculus
  siRNA target sequence for Rnf12 (NM_011276.2,1053-1071).
gagcctgaaggaagttcta

SEQ ID NO: 669260 - DNA, 19 bp, Mus musculus
  siRNA target sequence for Rnf12 (NM_011276.2,1091-1109).
cctgagacagcagatatct

SEQ ID NO: 669261 - DNA, 19 bp, Mus musculus
  siRNA target sequence for Rnf12 (NM_011276.2,1231-1249).
caaccatagttcttgatct

SEQ ID NO: 669262 - DNA, 19 bp, Mus musculus
  siRNA target sequence for Rnf12 (NM_011276.2,1234-1252).
ccatagttcttgatcttca

SEQ ID NO: 669263 - DNA, 19 bp, Mus musculus
  siRNA target sequence for Rnf12 (NM_011276.2,1235-1253).
catagttcttgatcttcaa

SEQ ID NO: 669264 - DNA, 19 bp, Mus musculus
  siRNA target sequence for Rnf12 (NM_011276.2,1261-1279).
gagttcgtcctggagaata

SEQ ID NO: 669265 - DNA, 19 bp, Mus musculus
  siRNA target sequence for Rnf12 (NM_011276.2,1275-1293).
gaataccggcagagagata

SEQ ID NO: 669266 - DNA, 19 bp, Mus musculus
  siRNA target sequence for Rnf12 (NM_011276.2,1284-1302).
cagagagatagtatagcta

SEQ ID NO: 669267 - DNA, 19 bp, Mus musculus
  siRNA target sequence for Rnf12 (NM_011276.2,1326-1344).
gctccgaacaacacagtta

SEQ ID NO: 669268 - DNA, 19 bp, Mus musculus
  siRNA target sequence for Rnf12 (NM_011276.2,1329-1347).
ccgaacaacacagttactt

SEQ ID NO: 669269 - DNA, 19 bp, Mus musculus
  siRNA target sequence for Rnf12 (NM_011276.2,1330-1348).
cgaacaacacagttactta

SEQ ID NO: 669270 - DNA, 19 bp, Mus musculus
  siRNA target sequence for Rnf12 (NM_011276.2,1331-1349).
gaacaacacagttacttat

SEQ ID NO: 669271 - DNA, 19 bp, Mus musculus
  siRNA target sequence for Rnf12 (NM_011276.2,1365-1383).
ggttttaggcgtacctttt

SEQ ID NO: 669272 - DNA, 19 bp, Mus musculus
  siRNA target sequence for Rnf12 (NM_011276.2,1408-1426).
gaacctatgtgagtactat

SEQ ID NO: 669273 - DNA, 19 bp, Mus musculus
  siRNA target sequence for Rnf12 (NM_011276.2,1420-1438).
gtactatcaggattcctat

SEQ ID NO: 669274 - DNA, 19 bp, Mus musculus
  siRNA target sequence for Rnf12 (NM_011276.2,1458-1476).
ggattaagtgaaactacat

SEQ ID NO: 669275 - DNA, 19 bp, Mus musculus
  siRNA target sequence for Rnf12 (NM_011276.2,1471-1489).
ctacatctgttgcaattca

SEQ ID NO: 669276 - DNA, 19 bp, Mus musculus
  siRNA target sequence for Rnf12 (NM_011276.2,1492-1510).
ccatgttaaggcagataat

SEQ ID NO: 669277 - DNA, 19 bp, Mus musculus
  siRNA target sequence for Rnf12 (NM_011276.2,1522-1540).
gtgagctaagctactttat

SEQ ID NO: 669278 - DNA, 19 bp, Mus musculus
  siRNA target sequence for Rnf12 (NM_011276.2,1524-1542).
gagctaagctactttatgt

SEQ ID NO: 669279 - DNA, 19 bp, Mus musculus
  siRNA target sequence for Rnf12 (NM_011276.2,1541-1559).
gtacagtgacagtgattca

SEQ ID NO: 669280 - DNA, 19 bp, Mus musculus
  siRNA target sequence for Rnf12 (NM_011276.2,1573-1591).
cagtctccagccgaaatgt

SEQ ID NO: 669281 - DNA, 19 bp, Mus musculus
  siRNA target sequence for Rnf12 (NM_011276.2,1599-1617).
gtagagtcacggaatggaa

SEQ ID NO: 669282 - DNA, 19 bp, Mus musculus
  siRNA target sequence for Rnf12 (NM_011276.2,1676-1694).
cagttcaagtggtgaaagt

SEQ ID NO: 669283 - DNA, 19 bp, Mus musculus
  siRNA target sequence for Rnf12 (NM_011276.2,1715-1733).
gttcgaaggcagtagtgaa

SEQ ID NO: 669284 - DNA, 19 bp, Mus musculus
  siRNA target sequence for Rnf12 (NM_011276.2,1778-1796).
cccagtcacatttgatgaa

SEQ ID NO: 669285 - DNA, 19 bp, Mus musculus
  siRNA target sequence for Rnf12 (NM_011276.2,1814-1832).
ccttagtctggctcagttt

SEQ ID NO: 669286 - DNA, 19 bp, Mus musculus
  siRNA target sequence for Rnf12 (NM_011276.2,1889-1907).
cgataacttggcaatgaga

SEQ ID NO: 669287 - DNA, 19 bp, Mus musculus
  siRNA target sequence for Rnf12 (NM_011276.2,1969-1987).
gcaacaaacttcgtaaact

SEQ ID NO: 669288 - DNA, 19 bp, Mus musculus
  siRNA target sequence for Rnf12 (NM_011276.2,2024-2042).
ccgctggttgtctgagaat

SEQ ID NO: 669289 - DNA, 19 bp, Mus musculus
  siRNA target sequence for Rnf4 (NM_011278.1,333-351).
gcgtggtggaactgtgaat

SEQ ID NO: 669290 - DNA, 19 bp, Mus musculus
  siRNA target sequence for Rnf4 (NM_011278.1,389-407).
cgacccctgaggtttcctt

SEQ ID NO: 669291 - DNA, 19 bp, Mus musculus
  siRNA target sequence for Rnf4 (NM_011278.1,456-474).
ggacctcacctgtgaatct

SEQ ID NO: 669292 - DNA, 19 bp, Mus musculus
  siRNA target sequence for Rnf4 (NM_011278.1,457-475).
gacctcacctgtgaatctt

SEQ ID NO: 669293 - DNA, 19 bp, Mus musculus
  siRNA target sequence for Rnf4 (NM_011278.1,493-511).
gacctgactcacaatgact

SEQ ID NO: 669294 - DNA, 19 bp, Mus musculus
  siRNA target sequence for Rnf4 (NM_011278.1,723-741).
ggatggatactctgagatt

SEQ ID NO: 669295 - DNA, 19 bp, Mus musculus
  siRNA target sequence for Rnf4 (NM_011278.1,744-762).
gcagaatgggcgtctcatt

SEQ ID NO: 669296 - DNA, 19 bp, Mus musculus
  siRNA target sequence for Rnf4 (NM_011278.1,747-765).
gaatgggcgtctcattgtt

SEQ ID NO: 669297 - DNA, 19 bp, Mus musculus
  siRNA target sequence for Rnf4 (NM_011278.1,751-769).
gggcgtctcattgtttcta

SEQ ID NO: 669298 - DNA, 19 bp, Mus musculus
  siRNA target sequence for Rnf4 (NM_011278.1,753-771).
gcgtctcattgtttctaca

SEQ ID NO: 669299 - DNA, 19 bp, Mus musculus
  siRNA target sequence for Rnf4 (NM_011278.1,804-822).
ccgtgattcccttaagaat

SEQ ID NO: 669300 - DNA, 19 bp, Mus musculus
  siRNA target sequence for Rnf4 (NM_011278.1,845-863).
ggaaaaagatcaaccataa

SEQ ID NO: 669301 - DNA, 19 bp, Mus musculus
  siRNA target sequence for Rnf4 (NM_011278.1,864-882).
gcggtaccaccccatttat

SEQ ID NO: 669302 - DNA, 19 bp, Mus musculus
  siRNA target sequence for Rnf4 (NM_011278.1,865-883).
cggtaccaccccatttata

SEQ ID NO: 669303 - DNA, 19 bp, Mus musculus
  siRNA target sequence for Rnf4 (NM_011278.1,867-885).
gtaccaccccatttatata

SEQ ID NO: 669304 - DNA, 19 bp, Mus musculus
  siRNA target sequence for Sap18 (NM_009119.1,46-64).
gcgttacccaggaggaaat

SEQ ID NO: 669305 - DNA, 19 bp, Mus musculus
  siRNA target sequence for Sin3a (NM_011378.1,467-485).
gggagcacagaggcttttt

SEQ ID NO: 669306 - DNA, 19 bp, Mus musculus
  siRNA target sequence for Sin3a (NM_011378.1,631-649).
cgccatagcagcagttcat

SEQ ID NO: 669307 - DNA, 19 bp, Mus musculus
  siRNA target sequence for Sin3a (NM_011378.1,632-650).
gccatagcagcagttcata

SEQ ID NO: 669308 - DNA, 19 bp, Mus musculus
  siRNA target sequence for Sin3a (NM_011378.1,823-841).
gcctcaggtctacaatgat

SEQ ID NO: 669309 - DNA, 19 bp, Mus musculus
  siRNA target sequence for Sin3a (NM_011378.1,825-843).
ctcaggtctacaatgattt

SEQ ID NO: 669310 - DNA, 19 bp, Mus musculus
  siRNA target sequence for Sin3a (NM_011378.1,900-918).
gccgagtgtcccagctatt

SEQ ID NO: 669311 - DNA, 19 bp, Mus musculus
  siRNA target sequence for Sin3a (NM_011378.1,901-919).
ccgagtgtcccagctattt

SEQ ID NO: 669312 - DNA, 19 bp, Mus musculus
  siRNA target sequence for Sin3a (NM_011378.1,902-920).
cgagtgtcccagctattta

SEQ ID NO: 669313 - DNA, 19 bp, Mus musculus
  siRNA target sequence for Sin3a (NM_011378.1,903-921).
gagtgtcccagctatttaa

SEQ ID NO: 669314 - DNA, 19 bp, Mus musculus
  siRNA target sequence for Sin3a (NM_011378.1,924-942).
gccaccctgatctgatcat

SEQ ID NO: 669315 - DNA, 19 bp, Mus musculus
  siRNA target sequence for Sin3a (NM_011378.1,961-979).
gcctcctggctacaaaatt

SEQ ID NO: 669316 - DNA, 19 bp, Mus musculus
  siRNA target sequence for Sin3a (NM_011378.1,1156-1174).
caagccttcccaactacaa

SEQ ID NO: 669317 - DNA, 19 bp, Mus musculus
  siRNA target sequence for Sin3a (NM_011378.1,1250-1268).
cacacaccagtgacaatct

SEQ ID NO: 669318 - DNA, 19 bp, Mus musculus
  siRNA target sequence for Sin3a (NM_011378.1,1303-1321).
gcctgtggagtttaatcat

SEQ ID NO: 669319 - DNA, 19 bp, Mus musculus
  siRNA target sequence for Sin3a (NM_011378.1,1383-1401).
cattcttggagattttgca

SEQ ID NO: 669320 - DNA, 19 bp, Mus musculus
  siRNA target sequence for Sin3a (NM_011378.1,1447-1465).
ctacactccagctttgact

SEQ ID NO: 669321 - DNA, 19 bp, Mus musculus
  siRNA target sequence for Sin3a (NM_011378.1,1551-1569).
ccaacagctcagtgctttt

SEQ ID NO: 669322 - DNA, 19 bp, Mus musculus
  siRNA target sequence for Sin3a (NM_011378.1,1564-1582).
gcttttaagcaaaacaact

SEQ ID NO: 669323 - DNA, 19 bp, Mus musculus
  siRNA target sequence for Sin3a (NM_011378.1,1730-1748).
cccaaactgatgagtctaa

SEQ ID NO: 669324 - DNA, 19 bp, Mus musculus
  siRNA target sequence for Sin3a (NM_011378.1,1743-1761).
gtctaaaagagtcttcaat

SEQ ID NO: 669325 - DNA, 19 bp, Mus musculus
  siRNA target sequence for Sin3a (NM_011378.1,1781-1799).
ggtgttggaacggaatcat

SEQ ID NO: 669326 - DNA, 19 bp, Mus musculus
  siRNA target sequence for Sin3a (NM_011378.1,1782-1800).
gtgttggaacggaatcatt

SEQ ID NO: 669327 - DNA, 19 bp, Mus musculus
  siRNA target sequence for Sin3a (NM_011378.1,1784-1802).
gttggaacggaatcattat

SEQ ID NO: 669328 - DNA, 19 bp, Mus musculus
  siRNA target sequence for Sin3a (NM_011378.1,1787-1805).
ggaacggaatcattatttt

SEQ ID NO: 669329 - DNA, 19 bp, Mus musculus
  siRNA target sequence for Sin3a (NM_011378.1,1791-1809).
cggaatcattattttttga

SEQ ID NO: 669330 - DNA, 19 bp, Mus musculus
  siRNA target sequence for Sin3a (NM_011378.1,1792-1810).
ggaatcattattttttgat

SEQ ID NO: 669331 - DNA, 19 bp, Mus musculus
  siRNA target sequence for Sin3a (NM_011378.1,1833-1851).
gtgcagaggcctatgaaaa

SEQ ID NO: 669332 - DNA, 19 bp, Mus musculus
  siRNA target sequence for Sin3a (NM_011378.1,1941-1959).
ctgaattgtttaattggtt

SEQ ID NO: 669333 - DNA, 19 bp, Mus musculus
  siRNA target sequence for Sin3a (NM_011378.1,1996-2014).
ggaaagctttccaaaggaa

SEQ ID NO: 669334 - DNA, 19 bp, Mus musculus
  siRNA target sequence for Sin3a (NM_011378.1,2080-2098).
ccgagccctaccgaaaagt

SEQ ID NO: 669335 - DNA, 19 bp, Mus musculus
  siRNA target sequence for Sin3a (NM_011378.1,2130-2148).
ctctgtgtaaagaggtttt

SEQ ID NO: 669336 - DNA, 19 bp, Mus musculus
  siRNA target sequence for Sin3a (NM_011378.1,2238-2256).
gttgtgaagatgaacgatt

SEQ ID NO: 669337 - DNA, 19 bp, Mus musculus
  siRNA target sequence for Sin3a (NM_011378.1,2269-2287).
ggttcttgagaccaatctt

SEQ ID NO: 669338 - DNA, 19 bp, Mus musculus
  siRNA target sequence for Sin3a (NM_011378.1,2289-2307).
caacaatccgggttttaga

SEQ ID NO: 669339 - DNA, 19 bp, Mus musculus
  siRNA target sequence for Sin3a (NM_011378.1,2296-2314).
ccgggttttagaagcaata

SEQ ID NO: 669340 - DNA, 19 bp, Mus musculus
  siRNA target sequence for Sin3a (NM_011378.1,2298-2316).
gggttttagaagcaataca

SEQ ID NO: 669341 - DNA, 19 bp, Mus musculus
  siRNA target sequence for Sin3a (NM_011378.1,2351-2369).
gccaaatttcgcttggata

SEQ ID NO: 669342 - DNA, 19 bp, Mus musculus
  siRNA target sequence for Sin3a (NM_011378.1,2352-2370).
ccaaatttcgcttggataa

SEQ ID NO: 669343 - DNA, 19 bp, Mus musculus
  siRNA target sequence for Sin3a (NM_011378.1,2379-2397).
gaggcacgtccgaagtcat

SEQ ID NO: 669344 - DNA, 19 bp, Mus musculus
  siRNA target sequence for Sin3a (NM_011378.1,2427-2445).
ctgacaaagcagctgatat

SEQ ID NO: 669345 - DNA, 19 bp, Mus musculus
  siRNA target sequence for Sin3a (NM_011378.1,2483-2501).
ccgattgtccttaaaaggt

SEQ ID NO: 669346 - DNA, 19 bp, Mus musculus
  siRNA target sequence for Sin3a (NM_011378.1,2489-2507).
gtccttaaaaggttgaaga

SEQ ID NO: 669347 - DNA, 19 bp, Mus musculus
  siRNA target sequence for Sin3a (NM_011378.1,2640-2658).
ggtctaagagcttactcaa

SEQ ID NO: 669348 - DNA, 19 bp, Mus musculus
  siRNA target sequence for Sin3a (NM_011378.1,2846-2864).
caaatcatgcaccatttca

SEQ ID NO: 669349 - DNA, 19 bp, Mus musculus
  siRNA target sequence for Sin3a (NM_011378.1,2946-2964).
caacaggagcacctaagaa

SEQ ID NO: 669350 - DNA, 19 bp, Mus musculus
  siRNA target sequence for Sin3a (NM_011378.1,2995-3013).
gtccaagttgctatttagt

SEQ ID NO: 669351 - DNA, 19 bp, Mus musculus
  siRNA target sequence for Sin3a (NM_011378.1,3001-3019).
gttgctatttagtaacaca

SEQ ID NO: 669352 - DNA, 19 bp, Mus musculus
  siRNA target sequence for Sin3a (NM_011378.1,3012-3030).
gtaacacagcagctcaaaa

SEQ ID NO: 669353 - DNA, 19 bp, Mus musculus
  siRNA target sequence for Sin3a (NM_011378.1,3036-3054).
gagggatggatgaagtata

SEQ ID NO: 669354 - DNA, 19 bp, Mus musculus
  siRNA target sequence for Sin3a (NM_011378.1,3039-3057).
ggatggatgaagtatataa

SEQ ID NO: 669355 - DNA, 19 bp, Mus musculus
  siRNA target sequence for Sin3a (NM_011378.1,3044-3062).
gatgaagtatataaccttt

SEQ ID NO: 669356 - DNA, 19 bp, Mus musculus
  siRNA target sequence for Sin3a (NM_011378.1,3068-3086).
gtcaataacaattggtata

SEQ ID NO: 669357 - DNA, 19 bp, Mus musculus
  siRNA target sequence for Sin3a (NM_011378.1,3095-3113).
cgactgcatcaaattctct

SEQ ID NO: 669358 - DNA, 19 bp, Mus musculus
  siRNA target sequence for Sin3a (NM_011378.1,3118-3136).
gaggctgctacggatttgt

SEQ ID NO: 669359 - DNA, 19 bp, Mus musculus
  siRNA target sequence for Sin3a (NM_011378.1,3189-3207).
gggaggtgctaggcataaa

SEQ ID NO: 669360 - DNA, 19 bp, Mus musculus
  siRNA target sequence for Sin3a (NM_011378.1,3208-3226).
gcgagacaagagtgatagt

SEQ ID NO: 669361 - DNA, 19 bp, Mus musculus
  siRNA target sequence for Sin3a (NM_011378.1,3250-3268).
ggaacctatggatgttgat

SEQ ID NO: 669362 - DNA, 19 bp, Mus musculus
  siRNA target sequence for Sin3a (NM_011378.1,3255-3273).
ctatggatgttgatgtaga

SEQ ID NO: 669363 - DNA, 19 bp, Mus musculus
  siRNA target sequence for Sin3a (NM_011378.1,3325-3343).
catagactcatcacagtat

SEQ ID NO: 669364 - DNA, 19 bp, Mus musculus
  siRNA target sequence for Sin3a (NM_011378.1,3386-3404).
gcctttactatggacaaat

SEQ ID NO: 669365 - DNA, 19 bp, Mus musculus
  siRNA target sequence for Sin3a (NM_011378.1,3388-3406).
ctttactatggacaaatta

SEQ ID NO: 669366 - DNA, 19 bp, Mus musculus
  siRNA target sequence for Sin3a (NM_011378.1,3393-3411).
ctatggacaaattaatcca

SEQ ID NO: 669367 - DNA, 19 bp, Mus musculus
  siRNA target sequence for Sin3a (NM_011378.1,3458-3476).
gtgcaggttactgatcttt

SEQ ID NO: 669368 - DNA, 19 bp, Mus musculus
  siRNA target sequence for Sin3a (NM_011378.1,3461-3479).
caggttactgatctttact

SEQ ID NO: 669369 - DNA, 19 bp, Mus musculus
  siRNA target sequence for Sin3a (NM_011378.1,3565-3583).
ggcagagcagcttatgtca

SEQ ID NO: 669370 - DNA, 19 bp, Mus musculus
  siRNA target sequence for Sin3a (NM_011378.1,3595-3613).
cttcaagctaatgttcatt

SEQ ID NO: 669371 - DNA, 19 bp, Mus musculus
  siRNA target sequence for Sin3a (NM_011378.1,3704-3722).
gactacgtggagcgatata

SEQ ID NO: 669372 - DNA, 19 bp, Mus musculus
  siRNA target sequence for Sin3a (NM_011378.1,3709-3727).
cgtggagcgatatatgagt

SEQ ID NO: 669373 - DNA, 19 bp, Mus musculus
  siRNA target sequence for Sin3a (NM_011378.1,3710-3728).
gtggagcgatatatgagtt

SEQ ID NO: 669374 - DNA, 19 bp, Mus musculus
  siRNA target sequence for Sin3a (NM_011378.1,3715-3733).
gcgatatatgagttctgat

SEQ ID NO: 669375 - DNA, 19 bp, Mus musculus
  siRNA target sequence for Sin3a (NM_011378.1,3716-3734).
cgatatatgagttctgata

SEQ ID NO: 669376 - DNA, 19 bp, Mus musculus
  siRNA target sequence for Sin3a (NM_011378.1,3724-3742).
gagttctgatactacttct

SEQ ID NO: 669377 - DNA, 19 bp, Mus musculus
  siRNA target sequence for Sin3a (NM_011378.1,3931-3949).
gatggtatatgtgatcaaa

SEQ ID NO: 669378 - DNA, 19 bp, Mus musculus
  siRNA target sequence for Sin3a (NM_011378.1,4037-4055).
caggcctgggtggataaat

SEQ ID NO: 669379 - DNA, 19 bp, Mus musculus
  siRNA target sequence for Sin3a (NM_011378.1,4143-4161).
ccaccacctgtgatacaga

SEQ ID NO: 669380 - DNA, 19 bp, Mus musculus
  siRNA target sequence for Sin3a (NM_011378.1,4177-4195).
gagcattaacaaatatcgt

SEQ ID NO: 669381 - DNA, 19 bp, Mus musculus
  siRNA target sequence for Sin3a (NM_011378.1,4196-4214).
gtcaaatacggcacagtat

SEQ ID NO: 669382 - DNA, 19 bp, Mus musculus
  siRNA target sequence for Sin3b (NM_009188.1,276-294).
cctcatcgtggggtttaat

SEQ ID NO: 669383 - DNA, 19 bp, Mus musculus
  siRNA target sequence for Sin3b (NM_009188.1,279-297).
catcgtggggtttaatgct

SEQ ID NO: 669384 - DNA, 19 bp, Mus musculus
  siRNA target sequence for Sin3b (NM_009188.1,305-323).
cgcttggataccgtataga

SEQ ID NO: 669385 - DNA, 19 bp, Mus musculus
  siRNA target sequence for Sin3b (NM_009188.1,307-325).
cttggataccgtatagaca

SEQ ID NO: 669386 - DNA, 19 bp, Mus musculus
  siRNA target sequence for Sin3b (NM_009188.1,482-500).
ctatcagctatgtgaacaa

SEQ ID NO: 669387 - DNA, 19 bp, Mus musculus
  siRNA target sequence for Sin3b (NM_009188.1,632-650).
cagaggtggccaatctttt

SEQ ID NO: 669388 - DNA, 19 bp, Mus musculus
  siRNA target sequence for Sin3b (NM_009188.1,700-718).
gcaaagcggtccctgttta

SEQ ID NO: 669389 - DNA, 19 bp, Mus musculus
  siRNA target sequence for Sin3b (NM_009188.1,727-745).
gggtcgtgcgagatgaaca

SEQ ID NO: 669390 - DNA, 19 bp, Mus musculus
  siRNA target sequence for Sin3b (NM_009188.1,948-966).
ggaggtatatgagaacttt

SEQ ID NO: 669391 - DNA, 19 bp, Mus musculus
  siRNA target sequence for Sin3b (NM_009188.1,972-990).
ctgcattgcgctcttcaat

SEQ ID NO: 669392 - DNA, 19 bp, Mus musculus
  siRNA target sequence for Sin3b (NM_009188.1,1074-1092).
gtccttcctaggagtgaaa

SEQ ID NO: 669393 - DNA, 19 bp, Mus musculus
  siRNA target sequence for Sin3b (NM_009188.1,1101-1119).
ctttgcaccacctatgagt

SEQ ID NO: 669394 - DNA, 19 bp, Mus musculus
  siRNA target sequence for Sin3b (NM_009188.1,1161-1179).
gtcttgtaagcgaatagga

SEQ ID NO: 669395 - DNA, 19 bp, Mus musculus
  siRNA target sequence for Sin3b (NM_009188.1,1229-1247).
gaaggactgccatttgcaa

SEQ ID NO: 669396 - DNA, 19 bp, Mus musculus
  siRNA target sequence for Sin3b (NM_009188.1,1245-1263).
caaggaggtcctgaatgat

SEQ ID NO: 669397 - DNA, 19 bp, Mus musculus
  siRNA target sequence for Sin3b (NM_009188.1,1248-1266).
ggaggtcctgaatgataca

SEQ ID NO: 669398 - DNA, 19 bp, Mus musculus
  siRNA target sequence for Sin3b (NM_009188.1,1249-1267).
gaggtcctgaatgatacat

SEQ ID NO: 669399 - DNA, 19 bp, Mus musculus
  siRNA target sequence for Sin3b (NM_009188.1,1586-1604).
ctgtgcctgtcgttctgaa

SEQ ID NO: 669400 - DNA, 19 bp, Mus musculus
  siRNA target sequence for Sin3b (NM_009188.1,1645-1663).
cagggcttcaacaagatct

SEQ ID NO: 669401 - DNA, 19 bp, Mus musculus
  siRNA target sequence for Sin3b (NM_009188.1,1832-1850).
gcgagccgcaccttatctt

SEQ ID NO: 669402 - DNA, 19 bp, Mus musculus
  siRNA target sequence for Sin3b (NM_009188.1,1889-1907).
cactcatcagctactatgt

SEQ ID NO: 669403 - DNA, 19 bp, Mus musculus
  siRNA target sequence for Sin3b (NM_009188.1,2130-2148).
cgatgtgtacagtctgttt

SEQ ID NO: 669404 - DNA, 19 bp, Mus musculus
  siRNA target sequence for Sin3b (NM_009188.1,2484-2502).
caagctagtgcagaacatt

SEQ ID NO: 669405 - DNA, 19 bp, Mus musculus
  siRNA target sequence for Sin3b (NM_009188.1,2626-2644).
cgggagactagctatcagt

SEQ ID NO: 669406 - DNA, 19 bp, Mus musculus
  siRNA target sequence for Sin3b (NM_009188.1,2818-2836).
ggtgcatccagctcatcta

SEQ ID NO: 669407 - DNA, 19 bp, Mus musculus
  siRNA target sequence for Smarcb1 (NM_011418.1,257-275).
gacggggagttctacatga

SEQ ID NO: 669408 - DNA, 19 bp, Mus musculus
  siRNA target sequence for Smarcb1 (NM_011418.1,279-297).
gctccgaggtgggaaacta

SEQ ID NO: 669409 - DNA, 19 bp, Mus musculus
  siRNA target sequence for Smarcb1 (NM_011418.1,291-309).
gaaactacctgcgtatgtt

SEQ ID NO: 669410 - DNA, 19 bp, Mus musculus
  siRNA target sequence for Smarcb1 (NM_011418.1,311-329).
cgaggttctctgtacaaga

SEQ ID NO: 669411 - DNA, 19 bp, Mus musculus
  siRNA target sequence for Smarcb1 (NM_011418.1,314-332).
ggttctctgtacaagagat

SEQ ID NO: 669412 - DNA, 19 bp, Mus musculus
  siRNA target sequence for Smarcb1 (NM_011418.1,315-333).
gttctctgtacaagagata

SEQ ID NO: 669413 - DNA, 19 bp, Mus musculus
  siRNA target sequence for Smarcb1 (NM_011418.1,497-515).
ggcaatgacgagaagtaca

SEQ ID NO: 669414 - DNA, 19 bp, Mus musculus
  siRNA target sequence for Smarcb1 (NM_011418.1,498-516).
gcaatgacgagaagtacaa

SEQ ID NO: 669415 - DNA, 19 bp, Mus musculus
  siRNA target sequence for Smarcb1 (NM_011418.1,657-675).
gcatgggtcgggacaagaa

SEQ ID NO: 669416 - DNA, 19 bp, Mus musculus
  siRNA target sequence for Smarcb1 (NM_011418.1,791-809).
ctgcgagacgcttttacct

SEQ ID NO: 669417 - DNA, 19 bp, Mus musculus
  siRNA target sequence for Smarcb1 (NM_011418.1,1033-1051).
gtgggacatgtcagagaaa

SEQ ID NO: 669418 - DNA, 19 bp, Mus musculus
  siRNA target sequence for Smarcb1 (NM_011418.1,1202-1220).
gagattgccatccgaaata

SEQ ID NO: 669419 - DNA, 19 bp, Mus musculus
  siRNA target sequence for Smarcb1 (NM_011418.1,1292-1310).
gatcaagataggaacacaa

SEQ ID NO: 669420 - DNA, 19 bp, Mus musculus
  siRNA target sequence for Tceb2 (NM_026305.1,90-108).
gcaccgtgttcgaactgaa

SEQ ID NO: 669421 - DNA, 19 bp, Mus musculus
  siRNA target sequence for Tceb3 (NM_013736.2,251-269).
gttccagtagagcgaaata

SEQ ID NO: 669422 - DNA, 19 bp, Mus musculus
  siRNA target sequence for Tceb3 (NM_013736.2,255-273).
cagtagagcgaaatagtga

SEQ ID NO: 669423 - DNA, 19 bp, Mus musculus
  siRNA target sequence for Tceb3 (NM_013736.2,502-520).
caaagtgtcaccaccatat

SEQ ID NO: 669424 - DNA, 19 bp, Mus musculus
  siRNA target sequence for Tceb3 (NM_013736.2,506-524).
gtgtcaccaccatattctt

SEQ ID NO: 669425 - DNA, 19 bp, Mus musculus
  siRNA target sequence for Tceb3 (NM_013736.2,529-547).
ccccgagtcatctgactat

SEQ ID NO: 669426 - DNA, 19 bp, Mus musculus
  siRNA target sequence for Tceb3 (NM_013736.2,542-560).
gactatggccatgttcaat

SEQ ID NO: 669427 - DNA, 19 bp, Mus musculus
  siRNA target sequence for Tceb3 (NM_013736.2,1008-1026).
ccgagaaagccaaatctga

SEQ ID NO: 669428 - DNA, 19 bp, Mus musculus
  siRNA target sequence for Tceb3 (NM_013736.2,1012-1030).
gaaagccaaatctgacaaa

SEQ ID NO: 669429 - DNA, 19 bp, Mus musculus
  siRNA target sequence for Tceb3 (NM_013736.2,1121-1139).
gctcaggaggggaaagtaa

SEQ ID NO: 669430 - DNA, 19 bp, Mus musculus
  siRNA target sequence for Tceb3 (NM_013736.2,1126-1144).
ggaggggaaagtaagaact

SEQ ID NO: 669431 - DNA, 19 bp, Mus musculus
  siRNA target sequence for Tceb3 (NM_013736.2,1127-1145).
gaggggaaagtaagaacta

SEQ ID NO: 669432 - DNA, 19 bp, Mus musculus
  siRNA target sequence for Tceb3 (NM_013736.2,1333-1351).
ctctaaaagcactagtaaa

SEQ ID NO: 669433 - DNA, 19 bp, Mus musculus
  siRNA target sequence for Tceb3 (NM_013736.2,1544-1562).
cagccaaagcgaaaagctt

SEQ ID NO: 669434 - DNA, 19 bp, Mus musculus
  siRNA target sequence for Tceb3 (NM_013736.2,1601-1619).
ggacgcagaatgaattcta

SEQ ID NO: 669435 - DNA, 19 bp, Mus musculus
  siRNA target sequence for Tceb3 (NM_013736.2,1649-1667).
gcctatctccccaaaatga

SEQ ID NO: 669436 - DNA, 19 bp, Mus musculus
  siRNA target sequence for Tceb3 (NM_013736.2,1686-1704).
gtatccgggtgcttaagaa

SEQ ID NO: 669437 - DNA, 19 bp, Mus musculus
  siRNA target sequence for Tceb3 (NM_013736.2,1690-1708).
ccgggtgcttaagaataat

SEQ ID NO: 669438 - DNA, 19 bp, Mus musculus
  siRNA target sequence for Tceb3 (NM_013736.2,1691-1709).
cgggtgcttaagaataata

SEQ ID NO: 669439 - DNA, 19 bp, Mus musculus
  siRNA target sequence for Tceb3 (NM_013736.2,1692-1710).
gggtgcttaagaataatat

SEQ ID NO: 669440 - DNA, 19 bp, Mus musculus
  siRNA target sequence for Tceb3 (NM_013736.2,1731-1749).
gaggagtcccctattctgt

SEQ ID NO: 669441 - DNA, 19 bp, Mus musculus
  siRNA target sequence for Tceb3 (NM_013736.2,1738-1756).
cccctattctgttcttgaa

SEQ ID NO: 669442 - DNA, 19 bp, Mus musculus
  siRNA target sequence for Tceb3 (NM_013736.2,1792-1810).
ccggatagaggaatgcaat

SEQ ID NO: 669443 - DNA, 19 bp, Mus musculus
  siRNA target sequence for Tceb3 (NM_013736.2,1799-1817).
gaggaatgcaatcatgtat

SEQ ID NO: 669444 - DNA, 19 bp, Mus musculus
  siRNA target sequence for Tceb3 (NM_013736.2,1802-1820).
gaatgcaatcatgtattaa

SEQ ID NO: 669445 - DNA, 19 bp, Mus musculus
  siRNA target sequence for Tceb3 (NM_013736.2,1854-1872).
gtcaccgagactttaagga

SEQ ID NO: 669446 - DNA, 19 bp, Mus musculus
  siRNA target sequence for Tceb3 (NM_013736.2,1941-1959).
ggctgcgcctgctcacaaa

SEQ ID NO: 669447 - DNA, 19 bp, Mus musculus
  siRNA target sequence for Tceb3 (NM_013736.2,1946-1964).
cgcctgctcacaaacaaca

SEQ ID NO: 669448 - DNA, 19 bp, Mus musculus
  siRNA target sequence for Tceb3 (NM_013736.2,1947-1965).
gcctgctcacaaacaacat

SEQ ID NO: 669449 - DNA, 19 bp, Mus musculus
  siRNA target sequence for Tceb3 (NM_013736.2,1968-1986).
gctctgctcatgccaataa

SEQ ID NO: 669450 - DNA, 19 bp, Mus musculus
  siRNA target sequence for Tceb3 (NM_013736.2,2029-2047).
ggccaagccaccaagagat

SEQ ID NO: 669451 - DNA, 19 bp, Mus musculus
  siRNA target sequence for Tceb3 (NM_013736.2,2093-2111).
cctgagaaagtcaggataa

SEQ ID NO: 669452 - DNA, 19 bp, Mus musculus
  siRNA target sequence for Tceb3 (NM_013736.2,2113-2131).
gccagcgccatatacaaca

SEQ ID NO: 669453 - DNA, 19 bp, Mus musculus
  siRNA target sequence for Tceb3 (NM_013736.2,2303-2321).
gccaagaccattaaagcat

SEQ ID NO: 669454 - DNA, 19 bp, Mus musculus
  siRNA target sequence for Tceb3 (NM_013736.2,2304-2322).
ccaagaccattaaagcatt

SEQ ID NO: 669455 - DNA, 19 bp, Mus musculus
  siRNA target sequence for Tle2 (NM_019725.1,193-211).
ctcagtactggaaatctgt

SEQ ID NO: 669456 - DNA, 19 bp, Mus musculus
  siRNA target sequence for Tle2 (NM_019725.1,258-276).
gcctcaagctagaatgtga

SEQ ID NO: 669457 - DNA, 19 bp, Mus musculus
  siRNA target sequence for Tle2 (NM_019725.1,403-421).
gtcctacggactcaacatt

SEQ ID NO: 669458 - DNA, 19 bp, Mus musculus
  siRNA target sequence for Tle2 (NM_019725.1,875-893).
ctgtcagggccttatgaca

SEQ ID NO: 669459 - DNA, 19 bp, Mus musculus
  siRNA target sequence for Tle2 (NM_019725.1,898-916).
ggaagacaagagtgactat

SEQ ID NO: 669460 - DNA, 19 bp, Mus musculus
  siRNA target sequence for Tle2 (NM_019725.1,899-917).
gaagacaagagtgactata

SEQ ID NO: 669461 - DNA, 19 bp, Mus musculus
  siRNA target sequence for Tle2 (NM_019725.1,1778-1796).
gccagtaccctgtccattt

SEQ ID NO: 669462 - DNA, 19 bp, Mus musculus
  siRNA target sequence for Tle2 (NM_019725.1,1982-2000).
gccagctgcatcgacatat

SEQ ID NO: 669463 - DNA, 19 bp, Mus musculus
  siRNA target sequence for Tle2 (NM_019725.1,1986-2004).
gctgcatcgacatatcaga

SEQ ID NO: 669464 - DNA, 19 bp, Mus musculus
  siRNA target sequence for Tle2 (NM_019725.1,2311-2329).
ctatggggccagcattttt

SEQ ID NO: 669465 - DNA, 19 bp, Mus musculus
  siRNA target sequence for Tle2 (NM_019725.1,2332-2350).
gtccaaagaatcatcttct

SEQ ID NO: 669466 - DNA, 19 bp, Mus musculus
  siRNA target sequence for Tle2 (NM_019725.1,2407-2425).
caagaaggccactgtgtat

SEQ ID NO: 669467 - DNA, 19 bp, Mus musculus
  siRNA target sequence for Tle3 (NM_009389.1,380-398).
gcctcaaagtggagtatga

SEQ ID NO: 669468 - DNA, 19 bp, Mus musculus
  siRNA target sequence for Tle3 (NM_009389.1,430-448).
cgccattatgtgatgtact

SEQ ID NO: 669469 - DNA, 19 bp, Mus musculus
  siRNA target sequence for Tle3 (NM_009389.1,431-449).
gccattatgtgatgtacta

SEQ ID NO: 669470 - DNA, 19 bp, Mus musculus
  siRNA target sequence for Tle3 (NM_009389.1,432-450).
ccattatgtgatgtactat

SEQ ID NO: 669471 - DNA, 19 bp, Mus musculus
  siRNA target sequence for Tle3 (NM_009389.1,453-471).
gatgtcctatggcttgaat

SEQ ID NO: 669472 - DNA, 19 bp, Mus musculus
  siRNA target sequence for Tle3 (NM_009389.1,456-474).
gtcctatggcttgaatatt

SEQ ID NO: 669473 - DNA, 19 bp, Mus musculus
  siRNA target sequence for Tle3 (NM_009389.1,515-533).
caatcctagcccagatcat

SEQ ID NO: 669474 - DNA, 19 bp, Mus musculus
  siRNA target sequence for Tle3 (NM_009389.1,838-856).
gagtccagcacgaacaatt

SEQ ID NO: 669475 - DNA, 19 bp, Mus musculus
  siRNA target sequence for Tle3 (NM_009389.1,933-951).
gcggaaggcggaagagaaa

SEQ ID NO: 669476 - DNA, 19 bp, Mus musculus
  siRNA target sequence for Tle3 (NM_009389.1,1083-1101).
ccgtggtctgaagaaagat

SEQ ID NO: 669477 - DNA, 19 bp, Mus musculus
  siRNA target sequence for Tle3 (NM_009389.1,1164-1182).
ccttggtcataatgacaaa

SEQ ID NO: 669478 - DNA, 19 bp, Mus musculus
  siRNA target sequence for Tle3 (NM_009389.1,1165-1183).
cttggtcataatgacaaat

SEQ ID NO: 669479 - DNA, 19 bp, Mus musculus
  siRNA target sequence for Tle3 (NM_009389.1,1168-1186).
ggtcataatgacaaatctt

SEQ ID NO: 669480 - DNA, 19 bp, Mus musculus
  siRNA target sequence for Tle3 (NM_009389.1,1291-1309).
ggcatggacccgataggta

SEQ ID NO: 669481 - DNA, 19 bp, Mus musculus
  siRNA target sequence for Tle3 (NM_009389.1,1292-1310).
gcatggacccgataggtat

SEQ ID NO: 669482 - DNA, 19 bp, Mus musculus
  siRNA target sequence for Tle3 (NM_009389.1,1293-1311).
catggacccgataggtata

SEQ ID NO: 669483 - DNA, 19 bp, Mus musculus
  siRNA target sequence for Tle3 (NM_009389.1,1377-1395).
gagccaccacgagatgaat

SEQ ID NO: 669484 - DNA, 19 bp, Mus musculus
  siRNA target sequence for Tle3 (NM_009389.1,1977-1995).
ctcggctccagcctgttat

SEQ ID NO: 669485 - DNA, 19 bp, Mus musculus
  siRNA target sequence for Tle3 (NM_009389.1,2198-2216).
gtgaaggacggcagttaca

SEQ ID NO: 669486 - DNA, 19 bp, Mus musculus
  siRNA target sequence for Tle3 (NM_009389.1,2321-2339).
ctaagcccgacaaatacca

SEQ ID NO: 669487 - DNA, 19 bp, Mus musculus
  siRNA target sequence for Tle3 (NM_009389.1,2485-2503).
gtcttgagctgtgacattt

SEQ ID NO: 669488 - DNA, 19 bp, Mus musculus
  siRNA target sequence for Tle3 (NM_009389.1,2507-2525).
cggatgacaaatatattgt

SEQ ID NO: 669489 - DNA, 19 bp, Mus musculus
  siRNA target sequence for Tle6 (NM_053254.1,192-210).
ccttatccagtcggtattt

SEQ ID NO: 669490 - DNA, 19 bp, Mus musculus
  siRNA target sequence for Tle6 (NM_053254.1,243-261).
gcagcgtcgtctctgaaat

SEQ ID NO: 669491 - DNA, 19 bp, Mus musculus
  siRNA target sequence for Tle6 (NM_053254.1,246-264).
gcgtcgtctctgaaatgat

SEQ ID NO: 669492 - DNA, 19 bp, Mus musculus
  siRNA target sequence for Tle6 (NM_053254.1,311-329).
gcgatagagcgcttcagta

SEQ ID NO: 669493 - DNA, 19 bp, Mus musculus
  siRNA target sequence for Tle6 (NM_053254.1,352-370).
gaacaagatgagtattggt

SEQ ID NO: 669494 - DNA, 19 bp, Mus musculus
  siRNA target sequence for Tle6 (NM_053254.1,494-512).
cagcaccccaagttcaaaa

SEQ ID NO: 669495 - DNA, 19 bp, Mus musculus
  siRNA target sequence for Tle6 (NM_053254.1,807-825).
cagctcttctagattatta

SEQ ID NO: 669496 - DNA, 19 bp, Mus musculus
  siRNA target sequence for Tle6 (NM_053254.1,867-885).
cttctggaagagctgataa

SEQ ID NO: 669497 - DNA, 19 bp, Mus musculus
  siRNA target sequence for Tle6 (NM_053254.1,906-924).
ggggctctgaagtcttaga

SEQ ID NO: 669498 - DNA, 19 bp, Mus musculus
  siRNA target sequence for Tle6 (NM_053254.1,908-926).
ggctctgaagtcttagaga

SEQ ID NO: 669499 - DNA, 19 bp, Mus musculus
  siRNA target sequence for Tle6 (NM_053254.1,946-964).
cacagcactctggcaatta

SEQ ID NO: 669500 - DNA, 19 bp, Mus musculus
  siRNA target sequence for Tle6 (NM_053254.1,948-966).
cagcactctggcaattaga

SEQ ID NO: 669501 - DNA, 19 bp, Mus musculus
  siRNA target sequence for Tle6 (NM_053254.1,1130-1148).
ccagaaagccacttgaaat

SEQ ID NO: 669502 - DNA, 19 bp, Mus musculus
  siRNA target sequence for Tle6 (NM_053254.1,1384-1402).
cctacggactcaggaaata

SEQ ID NO: 669503 - DNA, 19 bp, Mus musculus
  siRNA target sequence for Tle6 (NM_053254.1,1388-1406).
cggactcaggaaatagtca

SEQ ID NO: 669504 - DNA, 19 bp, Mus musculus
  siRNA target sequence for Tle6 (NM_053254.1,1411-1429).
cctcaaaggccctaccaat

SEQ ID NO: 669505 - DNA, 19 bp, Mus musculus
  siRNA target sequence for Tle6 (NM_053254.1,1412-1430).
ctcaaaggccctaccaatt

SEQ ID NO: 669506 - DNA, 19 bp, Mus musculus
  siRNA target sequence for Tle6 (NM_053254.1,1721-1739).
gtcggtatgggcaacttca

SEQ ID NO: 669507 - DNA, 19 bp, Mus musculus
  siRNA target sequence for Zfp198 (NM_029498.2,88-106).
cagtgggaacgttagaact

SEQ ID NO: 669508 - DNA, 19 bp, Mus musculus
  siRNA target sequence for Zfp198 (NM_029498.2,154-172).
gtctcacgaacgtaggaaa

SEQ ID NO: 669509 - DNA, 19 bp, Mus musculus
  siRNA target sequence for Zfp198 (NM_029498.2,156-174).
ctcacgaacgtaggaaatt

SEQ ID NO: 669510 - DNA, 19 bp, Mus musculus
  siRNA target sequence for Zfp198 (NM_029498.2,160-178).
cgaacgtaggaaattcatt

SEQ ID NO: 669511 - DNA, 19 bp, Mus musculus
  siRNA target sequence for Zfp198 (NM_029498.2,161-179).
gaacgtaggaaattcattt

SEQ ID NO: 669512 - DNA, 19 bp, Mus musculus
  siRNA target sequence for Zfp198 (NM_029498.2,164-182).
cgtaggaaattcatttagt

SEQ ID NO: 669513 - DNA, 19 bp, Mus musculus
  siRNA target sequence for Zfp198 (NM_029498.2,184-202).
gcccacctaatcctttagt

SEQ ID NO: 669514 - DNA, 19 bp, Mus musculus
  siRNA target sequence for Zfp198 (NM_029498.2,186-204).
ccacctaatcctttagtgt

SEQ ID NO: 669515 - DNA, 19 bp, Mus musculus
  siRNA target sequence for Zfp198 (NM_029498.2,201-219).
gtgtctagatctagtaagt

SEQ ID NO: 669516 - DNA, 19 bp, Mus musculus
  siRNA target sequence for Zfp198 (NM_029498.2,224-242).
gaactcatcagtagaagat

SEQ ID NO: 669517 - DNA, 19 bp, Mus musculus
  siRNA target sequence for Zfp198 (NM_029498.2,227-245).
ctcatcagtagaagatgat

SEQ ID NO: 669518 - DNA, 19 bp, Mus musculus
  siRNA target sequence for Zfp198 (NM_029498.2,306-324).
gatcaaagacccataacat

SEQ ID NO: 669519 - DNA, 19 bp, Mus musculus
  siRNA target sequence for Zfp198 (NM_029498.2,355-373).
gaaacgatcccaaaattct

SEQ ID NO: 669520 - DNA, 19 bp, Mus musculus
  siRNA target sequence for Zfp198 (NM_029498.2,396-414).
ccgcaaaagggcagtgtaa

SEQ ID NO: 669521 - DNA, 19 bp, Mus musculus
  siRNA target sequence for Zfp198 (NM_029498.2,406-424).
gcagtgtaagcgagacaat

SEQ ID NO: 669522 - DNA, 19 bp, Mus musculus
  siRNA target sequence for Zfp198 (NM_029498.2,407-425).
cagtgtaagcgagacaatt

SEQ ID NO: 669523 - DNA, 19 bp, Mus musculus
  siRNA target sequence for Zfp198 (NM_029498.2,409-427).
gtgtaagcgagacaattgt

SEQ ID NO: 669524 - DNA, 19 bp, Mus musculus
  siRNA target sequence for Zfp198 (NM_029498.2,411-429).
gtaagcgagacaattgtta

SEQ ID NO: 669525 - DNA, 19 bp, Mus musculus
  siRNA target sequence for Zfp198 (NM_029498.2,415-433).
gcgagacaattgttattga

SEQ ID NO: 669526 - DNA, 19 bp, Mus musculus
  siRNA target sequence for Zfp198 (NM_029498.2,416-434).
cgagacaattgttattgat

SEQ ID NO: 669527 - DNA, 19 bp, Mus musculus
  siRNA target sequence for Zfp198 (NM_029498.2,443-461).
ggacatggaaacaaatcaa

SEQ ID NO: 669528 - DNA, 19 bp, Mus musculus
  siRNA target sequence for Zfp198 (NM_029498.2,496-514).
ggagaccttctgaaactaa

SEQ ID NO: 669529 - DNA, 19 bp, Mus musculus
  siRNA target sequence for Zfp198 (NM_029498.2,520-538).
gaactaatgatgtggattt

SEQ ID NO: 669530 - DNA, 19 bp, Mus musculus
  siRNA target sequence for Zfp198 (NM_029498.2,547-565).
ccactttttcaagaagtaa

SEQ ID NO: 669531 - DNA, 19 bp, Mus musculus
  siRNA target sequence for Zfp198 (NM_029498.2,572-590).
cgcaggagtgagtaacagt

SEQ ID NO: 669532 - DNA, 19 bp, Mus musculus
  siRNA target sequence for Zfp198 (NM_029498.2,579-597).
gtgagtaacagtggtatta

SEQ ID NO: 669533 - DNA, 19 bp, Mus musculus
  siRNA target sequence for Zfp198 (NM_029498.2,606-624).
ccagactcggagattcaga

SEQ ID NO: 669534 - DNA, 19 bp, Mus musculus
  siRNA target sequence for Zfp198 (NM_029498.2,613-631).
cggagattcagattgctaa

SEQ ID NO: 669535 - DNA, 19 bp, Mus musculus
  siRNA target sequence for Zfp198 (NM_029498.2,621-639).
cagattgctaatgttacaa

SEQ ID NO: 669536 - DNA, 19 bp, Mus musculus
  siRNA target sequence for Zfp198 (NM_029498.2,669-687).
gatggccagctagaaagta

SEQ ID NO: 669537 - DNA, 19 bp, Mus musculus
  siRNA target sequence for Zfp198 (NM_029498.2,674-692).
ccagctagaaagtactgat

SEQ ID NO: 669538 - DNA, 19 bp, Mus musculus
  siRNA target sequence for Zfp198 (NM_029498.2,693-711).
gggagagatatgaacttaa

SEQ ID NO: 669539 - DNA, 19 bp, Mus musculus
  siRNA target sequence for Zfp198 (NM_029498.2,694-712).
ggagagatatgaacttaat

SEQ ID NO: 669540 - DNA, 19 bp, Mus musculus
  siRNA target sequence for Zfp198 (NM_029498.2,699-717).
gatatgaacttaatgatta

SEQ ID NO: 669541 - DNA, 19 bp, Mus musculus
  siRNA target sequence for Zfp198 (NM_029498.2,776-794).
cagtaactttggtgtgaat

SEQ ID NO: 669542 - DNA, 19 bp, Mus musculus
  siRNA target sequence for Zfp198 (NM_029498.2,787-805).
gtgtgaatatacaaacgta

SEQ ID NO: 669543 - DNA, 19 bp, Mus musculus
  siRNA target sequence for Zfp198 (NM_029498.2,866-884).
gaatgttgcaggagatgta

SEQ ID NO: 669544 - DNA, 19 bp, Mus musculus
  siRNA target sequence for Zfp198 (NM_029498.2,899-917).
gtctgcacctcatcacaat

SEQ ID NO: 669545 - DNA, 19 bp, Mus musculus
  siRNA target sequence for Zfp198 (NM_029498.2,1177-1195).
caaagaaactctgtgttat

SEQ ID NO: 669546 - DNA, 19 bp, Mus musculus
  siRNA target sequence for Zfp198 (NM_029498.2,1181-1199).
gaaactctgtgttatgtgt

SEQ ID NO: 669547 - DNA, 19 bp, Mus musculus
  siRNA target sequence for Zfp198 (NM_029498.2,1196-1214).
gtgtaaaaaagatataact

SEQ ID NO: 669548 - DNA, 19 bp, Mus musculus
  siRNA target sequence for Zfp198 (NM_029498.2,1256-1274).
gtccttccaagaattttgt

SEQ ID NO: 669549 - DNA, 19 bp, Mus musculus
  siRNA target sequence for Zfp198 (NM_029498.2,1263-1281).
caagaattttgtagtacat

SEQ ID NO: 669550 - DNA, 19 bp, Mus musculus
  siRNA target sequence for Zfp198 (NM_029498.2,1282-1300).
cttgtttgtctctctatga

SEQ ID NO: 669551 - DNA, 19 bp, Mus musculus
  siRNA target sequence for Zfp198 (NM_029498.2,1317-1335).
gctaaaggagctctaaata

SEQ ID NO: 669552 - DNA, 19 bp, Mus musculus
  siRNA target sequence for Zfp198 (NM_029498.2,1318-1336).
ctaaaggagctctaaataa

SEQ ID NO: 669553 - DNA, 19 bp, Mus musculus
  siRNA target sequence for Zfp198 (NM_029498.2,1326-1344).
gctctaaataaatcaagat

SEQ ID NO: 669554 - DNA, 19 bp, Mus musculus
  siRNA target sequence for Zfp198 (NM_029498.2,1345-1363).
gcacaatctgtggcaaatt

SEQ ID NO: 669555 - DNA, 19 bp, Mus musculus
  siRNA target sequence for Zfp198 (NM_029498.2,1346-1364).
cacaatctgtggcaaatta

SEQ ID NO: 669556 - DNA, 19 bp, Mus musculus
  siRNA target sequence for Zfp198 (NM_029498.2,1368-1386).
gagattcgccatgaagtta

SEQ ID NO: 669557 - DNA, 19 bp, Mus musculus
  siRNA target sequence for Zfp198 (NM_029498.2,1370-1388).
gattcgccatgaagttagt

SEQ ID NO: 669558 - DNA, 19 bp, Mus musculus
  siRNA target sequence for Zfp198 (NM_029498.2,1414-1432).
gcagtgaccactgctttaa

SEQ ID NO: 669559 - DNA, 19 bp, Mus musculus
  siRNA target sequence for Zfp198 (NM_029498.2,1448-1466).
caatggtctgataatgaat

SEQ ID NO: 669560 - DNA, 19 bp, Mus musculus
  siRNA target sequence for Zfp198 (NM_029498.2,1471-1489).
gtgagcagtgcggagaata

SEQ ID NO: 669561 - DNA, 19 bp, Mus musculus
  siRNA target sequence for Zfp198 (NM_029498.2,1473-1491).
gagcagtgcggagaatatt

SEQ ID NO: 669562 - DNA, 19 bp, Mus musculus
  siRNA target sequence for Zfp198 (NM_029498.2,1498-1516).
gtaaaggtgctgggaataa

SEQ ID NO: 669563 - DNA, 19 bp, Mus musculus
  siRNA target sequence for Zfp198 (NM_029498.2,1625-1643).
catgcaggactctttctta

SEQ ID NO: 669564 - DNA, 19 bp, Mus musculus
  siRNA target sequence for Zfp198 (NM_029498.2,1662-1680).
ggaaaactgacaacttgta

SEQ ID NO: 669565 - DNA, 19 bp, Mus musculus
  siRNA target sequence for Zfp198 (NM_029498.2,1689-1707).
cgaacacagtgcaggtttt

SEQ ID NO: 669566 - DNA, 19 bp, Mus musculus
  siRNA target sequence for Zfp198 (NM_029498.2,1690-1708).
gaacacagtgcaggttttt

SEQ ID NO: 669567 - DNA, 19 bp, Mus musculus
  siRNA target sequence for Zfp198 (NM_029498.2,1695-1713).
cagtgcaggttttttgata

SEQ ID NO: 669568 - DNA, 19 bp, Mus musculus
  siRNA target sequence for Zfp198 (NM_029498.2,1700-1718).
caggttttttgatatgact

SEQ ID NO: 669569 - DNA, 19 bp, Mus musculus
  siRNA target sequence for Zfp198 (NM_029498.2,1721-1739).
gtgcataggtcctaatgga

SEQ ID NO: 669570 - DNA, 19 bp, Mus musculus
  siRNA target sequence for Zfp198 (NM_029498.2,1723-1741).
gcataggtcctaatggata

SEQ ID NO: 669571 - DNA, 19 bp, Mus musculus
  siRNA target sequence for Zfp198 (NM_029498.2,1724-1742).
cataggtcctaatggatat

SEQ ID NO: 669572 - DNA, 19 bp, Mus musculus
  siRNA target sequence for Zfp198 (NM_029498.2,1729-1747).
gtcctaatggatatatgga

SEQ ID NO: 669573 - DNA, 19 bp, Mus musculus
  siRNA target sequence for Zfp198 (NM_029498.2,1737-1755).
ggatatatggagccatatt

SEQ ID NO: 669574 - DNA, 19 bp, Mus musculus
  siRNA target sequence for Zfp198 (NM_029498.2,1801-1819).
cacaaagtttgggaattat

SEQ ID NO: 669575 - DNA, 19 bp, Mus musculus
  siRNA target sequence for Zfp198 (NM_029498.2,1872-1890).
gatggaaaactgtataact

SEQ ID NO: 669576 - DNA, 19 bp, Mus musculus
  siRNA target sequence for Zfp198 (NM_029498.2,1881-1899).
ctgtataacttttgcaatt

SEQ ID NO: 669577 - DNA, 19 bp, Mus musculus
  siRNA target sequence for Zfp198 (NM_029498.2,1900-1918).
ccagttgtgtggctaaatt

SEQ ID NO: 669578 - DNA, 19 bp, Mus musculus
  siRNA target sequence for Zfp198 (NM_029498.2,1931-1949).
catgcagtcatctccaaat

SEQ ID NO: 669579 - DNA, 19 bp, Mus musculus
  siRNA target sequence for Zfp198 (NM_029498.2,1942-1960).
ctccaaatggccagtttgt

SEQ ID NO: 669580 - DNA, 19 bp, Mus musculus
  siRNA target sequence for Zfp198 (NM_029498.2,1971-1989).
gatattcagctgaaatgca

SEQ ID NO: 669581 - DNA, 19 bp, Mus musculus
  siRNA target sequence for Zfp198 (NM_029498.2,1980-1998).
ctgaaatgcaactactgta

SEQ ID NO: 669582 - DNA, 19 bp, Mus musculus
  siRNA target sequence for Zfp198 (NM_029498.2,1982-2000).
gaaatgcaactactgtaaa

SEQ ID NO: 669583 - DNA, 19 bp, Mus musculus
  siRNA target sequence for Zfp198 (NM_029498.2,2071-2089).
gctcagatgactataagaa

SEQ ID NO: 669584 - DNA, 19 bp, Mus musculus
  siRNA target sequence for Zfp198 (NM_029498.2,2087-2105).
gaagttgcattgcatagtt

SEQ ID NO: 669585 - DNA, 19 bp, Mus musculus
  siRNA target sequence for Zfp198 (NM_029498.2,2090-2108).
gttgcattgcatagttaca

SEQ ID NO: 669586 - DNA, 19 bp, Mus musculus
  siRNA target sequence for Zfp198 (NM_029498.2,2103-2121).
gttacatattgcgaatact

SEQ ID NO: 669587 - DNA, 19 bp, Mus musculus
  siRNA target sequence for Zfp198 (NM_029498.2,2165-2183).
cgttaagagacctttctgt

SEQ ID NO: 669588 - DNA, 19 bp, Mus musculus
  siRNA target sequence for Zfp198 (NM_029498.2,2166-2184).
gttaagagacctttctgta

SEQ ID NO: 669589 - DNA, 19 bp, Mus musculus
  siRNA target sequence for Zfp198 (NM_029498.2,2191-2209).
gctgcaagctattatacaa

SEQ ID NO: 669590 - DNA, 19 bp, Mus musculus
  siRNA target sequence for Zfp198 (NM_029498.2,2220-2238).
gcaagacgattaggattaa

SEQ ID NO: 669591 - DNA, 19 bp, Mus musculus
  siRNA target sequence for Zfp198 (NM_029498.2,2279-2297).
gggagccactaaagaactt

SEQ ID NO: 669592 - DNA, 19 bp, Mus musculus
  siRNA target sequence for Zfp198 (NM_029498.2,2325-2343).
gaagactgctgtaagaaat

SEQ ID NO: 669593 - DNA, 19 bp, Mus musculus
  siRNA target sequence for Zfp198 (NM_029498.2,2415-2433).
cagtggcgtggcgaaatga

SEQ ID NO: 669594 - DNA, 19 bp, Mus musculus
  siRNA target sequence for Zfp198 (NM_029498.2,2417-2435).
gtggcgtggcgaaatgaaa

SEQ ID NO: 669595 - DNA, 19 bp, Mus musculus
  siRNA target sequence for Zfp198 (NM_029498.2,2419-2437).
ggcgtggcgaaatgaaaca

SEQ ID NO: 669596 - DNA, 19 bp, Mus musculus
  siRNA target sequence for Zfp198 (NM_029498.2,2421-2439).
cgtggcgaaatgaaacatt

SEQ ID NO: 669597 - DNA, 19 bp, Mus musculus
  siRNA target sequence for Zfp198 (NM_029498.2,2422-2440).
gtggcgaaatgaaacattt

SEQ ID NO: 669598 - DNA, 19 bp, Mus musculus
  siRNA target sequence for Zfp198 (NM_029498.2,2426-2444).
cgaaatgaaacatttctgt

SEQ ID NO: 669599 - DNA, 19 bp, Mus musculus
  siRNA target sequence for Zfp198 (NM_029498.2,2453-2471).
ctgcttactacgtttctat

SEQ ID NO: 669600 - DNA, 19 bp, Mus musculus
  siRNA target sequence for Zfp198 (NM_029498.2,2456-2474).
cttactacgtttctattgt

SEQ ID NO: 669601 - DNA, 19 bp, Mus musculus
  siRNA target sequence for Zfp198 (NM_029498.2,2509-2527).
gacctgaaaacctacatta

SEQ ID NO: 669602 - DNA, 19 bp, Mus musculus
  siRNA target sequence for Zfp198 (NM_029498.2,2541-2559).
cagacgtcccgaaccaaaa

SEQ ID NO: 669603 - DNA, 19 bp, Mus musculus
  siRNA target sequence for Zfp198 (NM_029498.2,2546-2564).
gtcccgaaccaaaatgaca

SEQ ID NO: 669604 - DNA, 19 bp, Mus musculus
  siRNA target sequence for Zfp198 (NM_029498.2,2584-2602).
ctcctacaccaaacaaaga

SEQ ID NO: 669605 - DNA, 19 bp, Mus musculus
  siRNA target sequence for Zfp198 (NM_029498.2,2616-2634).
gcaattctttgcaaacctt

SEQ ID NO: 669606 - DNA, 19 bp, Mus musculus
  siRNA target sequence for Zfp198 (NM_029498.2,2627-2645).
caaacctttaacaatgaca

SEQ ID NO: 669607 - DNA, 19 bp, Mus musculus
  siRNA target sequence for Zfp198 (NM_029498.2,2664-2682).
cctcacatgcagaccaaat

SEQ ID NO: 669608 - DNA, 19 bp, Mus musculus
  siRNA target sequence for Zfp198 (NM_029498.2,2667-2685).
cacatgcagaccaaatctt

SEQ ID NO: 669609 - DNA, 19 bp, Mus musculus
  siRNA target sequence for Zfp198 (NM_029498.2,2669-2687).
catgcagaccaaatcttgt

SEQ ID NO: 669610 - DNA, 19 bp, Mus musculus
  siRNA target sequence for Zfp198 (NM_029498.2,2763-2781).
cacatgtacagccagaata

SEQ ID NO: 669611 - DNA, 19 bp, Mus musculus
  siRNA target sequence for Zfp198 (NM_029498.2,2768-2786).
gtacagccagaatattcct

SEQ ID NO: 669612 - DNA, 19 bp, Mus musculus
  siRNA target sequence for Zfp198 (NM_029498.2,2876-2894).
ggacctcaaaagcaaagtt

SEQ ID NO: 669613 - DNA, 19 bp, Mus musculus
  siRNA target sequence for Zfp198 (NM_029498.2,2901-2919).
gatcctcttgattcagaat

SEQ ID NO: 669614 - DNA, 19 bp, Mus musculus
  siRNA target sequence for Zfp198 (NM_029498.2,2964-2982).
gaggcatccaacatcaata

SEQ ID NO: 669615 - DNA, 19 bp, Mus musculus
  siRNA target sequence for Zfp198 (NM_029498.2,2966-2984).
ggcatccaacatcaatagt

SEQ ID NO: 669616 - DNA, 19 bp, Mus musculus
  siRNA target sequence for Zfp198 (NM_029498.2,2975-2993).
catcaatagtgtaattatt

SEQ ID NO: 669617 - DNA, 19 bp, Mus musculus
  siRNA target sequence for Zfp198 (NM_029498.2,3002-3020).
cataattggctcagatctt

SEQ ID NO: 669618 - DNA, 19 bp, Mus musculus
  siRNA target sequence for Zfp198 (NM_029498.2,3029-3047).
ctctgacccagatatacaa

SEQ ID NO: 669619 - DNA, 19 bp, Mus musculus
  siRNA target sequence for Zfp198 (NM_029498.2,3053-3071).
catgcccgatgtaccatat

SEQ ID NO: 669620 - DNA, 19 bp, Mus musculus
  siRNA target sequence for Zfp198 (NM_029498.2,3056-3074).
gcccgatgtaccatatgaa

SEQ ID NO: 669621 - DNA, 19 bp, Mus musculus
  siRNA target sequence for Zfp198 (NM_029498.2,3108-3126).
gctgcagaggagcttgata

SEQ ID NO: 669622 - DNA, 19 bp, Mus musculus
  siRNA target sequence for Zfp198 (NM_029498.2,3109-3127).
ctgcagaggagcttgatat

SEQ ID NO: 669623 - DNA, 19 bp, Mus musculus
  siRNA target sequence for Zfp198 (NM_029498.2,3179-3197).
gcccagacctcgatctaaa

SEQ ID NO: 669624 - DNA, 19 bp, Mus musculus
  siRNA target sequence for Zfp198 (NM_029498.2,3180-3198).
cccagacctcgatctaaaa

SEQ ID NO: 669625 - DNA, 19 bp, Mus musculus
  siRNA target sequence for Zfp198 (NM_029498.2,3181-3199).
ccagacctcgatctaaaaa

SEQ ID NO: 669626 - DNA, 19 bp, Mus musculus
  siRNA target sequence for Zfp198 (NM_029498.2,3229-3247).
gataccagtctcatgatga

SEQ ID NO: 669627 - DNA, 19 bp, Mus musculus
  siRNA target sequence for Zfp198 (NM_029498.2,3233-3251).
ccagtctcatgatgatagt

SEQ ID NO: 669628 - DNA, 19 bp, Mus musculus
  siRNA target sequence for Zfp198 (NM_029498.2,3234-3252).
cagtctcatgatgatagtt

SEQ ID NO: 669629 - DNA, 19 bp, Mus musculus
  siRNA target sequence for Zfp198 (NM_029498.2,3268-3286).
gcagctttcctttcaagta

SEQ ID NO: 669630 - DNA, 19 bp, Mus musculus
  siRNA target sequence for Zfp198 (NM_029498.2,3308-3326).
gaaacattgggtcaaaact

SEQ ID NO: 669631 - DNA, 19 bp, Mus musculus
  siRNA target sequence for Zfp198 (NM_029498.2,3320-3338).
caaaactaggcaacttgat

SEQ ID NO: 669632 - DNA, 19 bp, Mus musculus
  siRNA target sequence for Zfp198 (NM_029498.2,3325-3343).
ctaggcaacttgatgaaga

SEQ ID NO: 669633 - DNA, 19 bp, Mus musculus
  siRNA target sequence for Zfp198 (NM_029498.2,3350-3368).
ggtattagatgagctaaaa

SEQ ID NO: 669634 - DNA, 19 bp, Mus musculus
  siRNA target sequence for Zfp198 (NM_029498.2,3362-3380).
gctaaaatcctctaaatca

SEQ ID NO: 669635 - DNA, 19 bp, Mus musculus
  siRNA target sequence for Zfp198 (NM_029498.2,3370-3388).
cctctaaatcagtaaagtt

SEQ ID NO: 669636 - DNA, 19 bp, Mus musculus
  siRNA target sequence for Zfp198 (NM_029498.2,3413-3431).
cacagctgagcttaactat

SEQ ID NO: 669637 - DNA, 19 bp, Mus musculus
  siRNA target sequence for Zfp198 (NM_029498.2,3432-3450).
gggttagcccattttgtca

SEQ ID NO: 669638 - DNA, 19 bp, Mus musculus
  siRNA target sequence for Zfp198 (NM_029498.2,3433-3451).
ggttagcccattttgtcaa

SEQ ID NO: 669639 - DNA, 19 bp, Mus musculus
  siRNA target sequence for Zfp198 (NM_029498.2,3434-3452).
gttagcccattttgtcaat

SEQ ID NO: 669640 - DNA, 19 bp, Mus musculus
  siRNA target sequence for Zfp198 (NM_029498.2,3438-3456).
gcccattttgtcaatgaga

SEQ ID NO: 669641 - DNA, 19 bp, Mus musculus
  siRNA target sequence for Zfp198 (NM_029498.2,3455-3473).
gatcagacgaccaaatgga

SEQ ID NO: 669642 - DNA, 19 bp, Mus musculus
  siRNA target sequence for Zfp198 (NM_029498.2,3462-3480).
cgaccaaatggagagaatt

SEQ ID NO: 669643 - DNA, 19 bp, Mus musculus
  siRNA target sequence for Zfp198 (NM_029498.2,3463-3481).
gaccaaatggagagaatta

SEQ ID NO: 669644 - DNA, 19 bp, Mus musculus
  siRNA target sequence for Zfp198 (NM_029498.2,3524-3542).
gtacttatgtggtagtaat

SEQ ID NO: 669645 - DNA, 19 bp, Mus musculus
  siRNA target sequence for Zfp198 (NM_029498.2,3527-3545).
cttatgtggtagtaatcga

SEQ ID NO: 669646 - DNA, 19 bp, Mus musculus
  siRNA target sequence for Zfp198 (NM_029498.2,3630-3648).
cttccagatgggtcaattt

SEQ ID NO: 669647 - DNA, 19 bp, Mus musculus
  siRNA target sequence for Zfp198 (NM_029498.2,3633-3651).
ccagatgggtcaattttct

SEQ ID NO: 669648 - DNA, 19 bp, Mus musculus
  siRNA target sequence for Zfp198 (NM_029498.2,3652-3670).
ctcgagttgaagaagacta

SEQ ID NO: 669649 - DNA, 19 bp, Mus musculus
  siRNA target sequence for Zfp198 (NM_029498.2,3666-3684).
gactatctctggaggataa

SEQ ID NO: 669650 - DNA, 19 bp, Mus musculus
  siRNA target sequence for Zfp198 (NM_029498.2,3674-3692).
ctggaggataaaacaacta

SEQ ID NO: 669651 - DNA, 19 bp, Mus musculus
  siRNA target sequence for Zfp198 (NM_029498.2,3705-3723).
ccagtagcacttttgaata

SEQ ID NO: 669652 - DNA, 19 bp, Mus musculus
  siRNA target sequence for Zfp198 (NM_029498.2,3714-3732).
cttttgaataccctattct

SEQ ID NO: 669653 - DNA, 19 bp, Mus musculus
  siRNA target sequence for Zfp198 (NM_029498.2,3731-3749).
ctactttaacactaagtat

SEQ ID NO: 669654 - DNA, 19 bp, Mus musculus
  siRNA target sequence for Zfp198 (NM_029498.2,3796-3814).
ctgtgtttaggcattggaa

SEQ ID NO: 669655 - DNA, 19 bp, Mus musculus
  siRNA target sequence for Zfp198 (NM_029498.2,3973-3991).
gatgtcctgtgaaaatgtt

SEQ ID NO: 669656 - DNA, 19 bp, Mus musculus
  siRNA target sequence for Zfp198 (NM_029498.2,3993-4011).
gaatgctacttgtctaaaa

SEQ ID NO: 669657 - DNA, 19 bp, Mus musculus
  siRNA target sequence for Zfp198 (NM_029498.2,4012-4030).
gtccacagaaccttaatca

SEQ ID NO: 669658 - DNA, 19 bp, Mus musculus
  siRNA target sequence for Zfp198 (NM_029498.2,4014-4032).
ccacagaaccttaatcaga

SEQ ID NO: 669659 - DNA, 19 bp, Mus musculus
  siRNA target sequence for Zfp198 (NM_029498.2,4113-4131).
cggaacaccttggaaaata

SEQ ID NO: 669660 - DNA, 19 bp, Mus musculus
  siRNA target sequence for Zfp198 (NM_029498.2,4133-4151).
gcttgtacgggttcttcta

SEQ ID NO: 669661 - DNA, 19 bp, Mus musculus
  siRNA target sequence for Zfp198 (NM_029498.2,4137-4155).
gtacgggttcttctagtaa

SEQ ID NO: 669662 - DNA, 19 bp, Mus musculus
  siRNA target sequence for Zfp198 (NM_029498.2,4142-4160).
ggttcttctagtaaaagat

SEQ ID NO: 669663 - DNA, 19 bp, Mus musculus
  siRNA target sequence for Zfp198 (NM_029498.2,4143-4161).
gttcttctagtaaaagata

SEQ ID NO: 669664 - DNA, 19 bp, Mus musculus
  siRNA target sequence for Crsp7 (NM_027485.1,460-478).
gactagggaagctcatcaa

SEQ ID NO: 669665 - DNA, 19 bp, Mus musculus
  siRNA target sequence for Crsp7 (NM_027485.1,466-484).
ggaagctcatcaatgatgt

SEQ ID NO: 669666 - DNA, 19 bp, Mus musculus
  siRNA target sequence for Crsp7 (NM_027485.1,674-692).
catccatgacctgaagaat

SEQ ID NO: 669667 - DNA, 19 bp, Mus musculus
  siRNA target sequence for Polr2h (NM_145632.1,105-123).
catcctgttcgaggatatt

SEQ ID NO: 669668 - DNA, 19 bp, Mus musculus
  siRNA target sequence for Polr2h (NM_145632.1,111-129).
gttcgaggatattttcgat

SEQ ID NO: 669669 - DNA, 19 bp, Mus musculus
  siRNA target sequence for Polr2h (NM_145632.1,141-159).
cgacccagaaggcaagaaa

SEQ ID NO: 669670 - DNA, 19 bp, Mus musculus
  siRNA target sequence for Polr2h (NM_145632.1,142-160).
gacccagaaggcaagaaat

SEQ ID NO: 669671 - DNA, 19 bp, Mus musculus
  siRNA target sequence for Polr2h (NM_145632.1,178-196).
ctgcactgtgagagtgaat

SEQ ID NO: 669672 - DNA, 19 bp, Mus musculus
  siRNA target sequence for Polr2h (NM_145632.1,204-222).
gatggacctcatcttagat

SEQ ID NO: 669673 - DNA, 19 bp, Mus musculus
  siRNA target sequence for Polr2h (NM_145632.1,207-225).
ggacctcatcttagatgta

SEQ ID NO: 669674 - DNA, 19 bp, Mus musculus
  siRNA target sequence for Polr2h (NM_145632.1,211-229).
ctcatcttagatgtaaaca

SEQ ID NO: 669675 - DNA, 19 bp, Mus musculus
  siRNA target sequence for Polr2h (NM_145632.1,213-231).
catcttagatgtaaacatt

SEQ ID NO: 669676 - DNA, 19 bp, Mus musculus
  siRNA target sequence for Smarcd1 (NM_031842.1,327-345).
gcagcaggcggtccaaaat

SEQ ID NO: 669677 - DNA, 19 bp, Mus musculus
  siRNA target sequence for Smarcd1 (NM_031842.1,330-348).
gcaggcggtccaaaatcga

SEQ ID NO: 669678 - DNA, 19 bp, Mus musculus
  siRNA target sequence for Smarcd1 (NM_031842.1,331-349).
caggcggtccaaaatcgaa

SEQ ID NO: 669679 - DNA, 19 bp, Mus musculus
  siRNA target sequence for Smarcd1 (NM_031842.1,333-351).
ggcggtccaaaatcgaaat

SEQ ID NO: 669680 - DNA, 19 bp, Mus musculus
  siRNA target sequence for Smarcd1 (NM_031842.1,337-355).
gtccaaaatcgaaatcaca

SEQ ID NO: 669681 - DNA, 19 bp, Mus musculus
  siRNA target sequence for Smarcd1 (NM_031842.1,339-357).
ccaaaatcgaaatcacaat

SEQ ID NO: 669682 - DNA, 19 bp, Mus musculus
  siRNA target sequence for Smarcd1 (NM_031842.1,347-365).
gaaatcacaatgcaaagaa

SEQ ID NO: 669683 - DNA, 19 bp, Mus musculus
  siRNA target sequence for Smarcd1 (NM_031842.1,479-497).
ggaagcggctagatatcca

SEQ ID NO: 669684 - DNA, 19 bp, Mus musculus
  siRNA target sequence for Smarcd1 (NM_031842.1,529-547).
cggaagctgcgaattttca

SEQ ID NO: 669685 - DNA, 19 bp, Mus musculus
  siRNA target sequence for Smarcd1 (NM_031842.1,538-556).
cgaattttcatttctaaca

SEQ ID NO: 669686 - DNA, 19 bp, Mus musculus
  siRNA target sequence for Smarcd1 (NM_031842.1,546-564).
catttctaacacgttcaat

SEQ ID NO: 669687 - DNA, 19 bp, Mus musculus
  siRNA target sequence for Smarcd1 (NM_031842.1,810-828).
gcggccaggagatgtgaat

SEQ ID NO: 669688 - DNA, 19 bp, Mus musculus
  siRNA target sequence for Smarcd1 (NM_031842.1,813-831).
gccaggagatgtgaatgta

SEQ ID NO: 669689 - DNA, 19 bp, Mus musculus
  siRNA target sequence for Smarcd1 (NM_031842.1,948-966).
gtggcagtatattaaaaca

SEQ ID NO: 669690 - DNA, 19 bp, Mus musculus
  siRNA target sequence for Smarcd1 (NM_031842.1,950-968).
ggcagtatattaaaacaca

SEQ ID NO: 669691 - DNA, 19 bp, Mus musculus
  siRNA target sequence for Smarcd1 (NM_031842.1,981-999).
ccctcacgagcgagagttt

SEQ ID NO: 669692 - DNA, 19 bp, Mus musculus
  siRNA target sequence for Smarcd1 (NM_031842.1,983-1001).
ctcacgagcgagagtttgt

SEQ ID NO: 669693 - DNA, 19 bp, Mus musculus
  siRNA target sequence for Smarcd1 (NM_031842.1,1069-1087).
cggctccacgccttgctta

SEQ ID NO: 669694 - DNA, 19 bp, Mus musculus
  siRNA target sequence for Smarcd1 (NM_031842.1,1070-1088).
ggctccacgccttgcttat

SEQ ID NO: 669695 - DNA, 19 bp, Mus musculus
  siRNA target sequence for Smarcd1 (NM_031842.1,1298-1316).
cccagcgagagttcatgtt

SEQ ID NO: 669696 - DNA, 19 bp, Mus musculus
  siRNA target sequence for Smarcd1 (NM_031842.1,1300-1318).
cagcgagagttcatgttga

SEQ ID NO: 669697 - DNA, 19 bp, Mus musculus
  siRNA target sequence for Smarcd1 (NM_031842.1,1417-1435).
cgtcgtgctgagttctact

SEQ ID NO: 669698 - DNA, 19 bp, Mus musculus
  siRNA target sequence for Smarcd1 (NM_031842.1,1456-1474).
gctgtgtgccgatacttct

SEQ ID NO: 669699 - DNA, 19 bp, Mus musculus
  siRNA target sequence for Smarcd1 (NM_031842.1,1457-1475).
ctgtgtgccgatacttcta

SEQ ID NO: 669700 - DNA, 19 bp, Mus musculus
  siRNA target sequence for Smarcd1 (NM_031842.1,1459-1477).
gtgtgccgatacttctact

SEQ ID NO: 669701 - DNA, 19 bp, Mus musculus
  siRNA target sequence for Smarcd1 (NM_031842.1,1515-1533).
cctgggaatccgaaacaca

SEQ ID NO: 669702 - DNA, 19 bp, Mus musculus
  siRNA target sequence for Smarcd1 (NM_031842.1,1516-1534).
ctgggaatccgaaacacat

SEQ ID NO: 669703 - DNA, 19 bp, Mus musculus
  siRNA target sequence for Dclre1a (NM_018831.2,182-200).
ccaaacccgtacatccaaa

SEQ ID NO: 669704 - DNA, 19 bp, Mus musculus
  siRNA target sequence for Dclre1a (NM_018831.2,183-201).
caaacccgtacatccaaat

SEQ ID NO: 669705 - DNA, 19 bp, Mus musculus
  siRNA target sequence for Dclre1a (NM_018831.2,187-205).
cccgtacatccaaataatt

SEQ ID NO: 669706 - DNA, 19 bp, Mus musculus
  siRNA target sequence for Dclre1a (NM_018831.2,189-207).
cgtacatccaaataattgt

SEQ ID NO: 669707 - DNA, 19 bp, Mus musculus
  siRNA target sequence for Dclre1a (NM_018831.2,386-404).
gtcagcagtctcaaaacaa

SEQ ID NO: 669708 - DNA, 19 bp, Mus musculus
  siRNA target sequence for Dclre1a (NM_018831.2,408-426).
gacaacaccgaaaaagcaa

SEQ ID NO: 669709 - DNA, 19 bp, Mus musculus
  siRNA target sequence for Dclre1a (NM_018831.2,415-433).
ccgaaaaagcaacatagaa

SEQ ID NO: 669710 - DNA, 19 bp, Mus musculus
  siRNA target sequence for Dclre1a (NM_018831.2,467-485).
gccctgtttatgatggata

SEQ ID NO: 669711 - DNA, 19 bp, Mus musculus
  siRNA target sequence for Dclre1a (NM_018831.2,530-548).
cgccccagtggcatgtgtt

SEQ ID NO: 669712 - DNA, 19 bp, Mus musculus
  siRNA target sequence for Dclre1a (NM_018831.2,558-576).
ggattctccacctatctct

SEQ ID NO: 669713 - DNA, 19 bp, Mus musculus
  siRNA target sequence for Dclre1a (NM_018831.2,589-607).
cccgagggtttgctatgta

SEQ ID NO: 669714 - DNA, 19 bp, Mus musculus
  siRNA target sequence for Dclre1a (NM_018831.2,600-618).
gctatgtacttccacaatt

SEQ ID NO: 669715 - DNA, 19 bp, Mus musculus
  siRNA target sequence for Dclre1a (NM_018831.2,612-630).
cacaattccttcccattat

SEQ ID NO: 669716 - DNA, 19 bp, Mus musculus
  siRNA target sequence for Dclre1a (NM_018831.2,656-674).
ctcaaagtcgagatagcaa

SEQ ID NO: 669717 - DNA, 19 bp, Mus musculus
  siRNA target sequence for Dclre1a (NM_018831.2,753-771).
ggaaagacgctctatgact

SEQ ID NO: 669718 - DNA, 19 bp, Mus musculus
  siRNA target sequence for Dclre1a (NM_018831.2,781-799).
gagaacttaagaaaagtct

SEQ ID NO: 669719 - DNA, 19 bp, Mus musculus
  siRNA target sequence for Dclre1a (NM_018831.2,796-814).
gtctcagatcactctttgt

SEQ ID NO: 669720 - DNA, 19 bp, Mus musculus
  siRNA target sequence for Dclre1a (NM_018831.2,802-820).
gatcactctttgttgatga

SEQ ID NO: 669721 - DNA, 19 bp, Mus musculus
  siRNA target sequence for Dclre1a (NM_018831.2,819-837).
gatgcagtatctagaaaca

SEQ ID NO: 669722 - DNA, 19 bp, Mus musculus
  siRNA target sequence for Dclre1a (NM_018831.2,822-840).
gcagtatctagaaacatct

SEQ ID NO: 669723 - DNA, 19 bp, Mus musculus
  siRNA target sequence for Dclre1a (NM_018831.2,958-976).
cttgctgaggttgcattaa

SEQ ID NO: 669724 - DNA, 19 bp, Mus musculus
  siRNA target sequence for Dclre1a (NM_018831.2,961-979).
gctgaggttgcattaaaca

SEQ ID NO: 669725 - DNA, 19 bp, Mus musculus
  siRNA target sequence for Dclre1a (NM_018831.2,971-989).
cattaaacagccaaagcaa

SEQ ID NO: 669726 - DNA, 19 bp, Mus musculus
  siRNA target sequence for Dclre1a (NM_018831.2,1157-1175).
ctgccatatttgaaaacct

SEQ ID NO: 669727 - DNA, 19 bp, Mus musculus
  siRNA target sequence for Dclre1a (NM_018831.2,1268-1286).
gtacactaagtgactcttt

SEQ ID NO: 669728 - DNA, 19 bp, Mus musculus
  siRNA target sequence for Dclre1a (NM_018831.2,1382-1400).
gaggtgctgcttctaatta

SEQ ID NO: 669729 - DNA, 19 bp, Mus musculus
  siRNA target sequence for Dclre1a (NM_018831.2,1419-1437).
gctcgacgagccagaaaaa

SEQ ID NO: 669730 - DNA, 19 bp, Mus musculus
  siRNA target sequence for Dclre1a (NM_018831.2,1420-1438).
ctcgacgagccagaaaaat

SEQ ID NO: 669731 - DNA, 19 bp, Mus musculus
  siRNA target sequence for Dclre1a (NM_018831.2,1440-1458).
cctctcacttgcatcaagt

SEQ ID NO: 669732 - DNA, 19 bp, Mus musculus
  siRNA target sequence for Dclre1a (NM_018831.2,1454-1472).
caagtcatcagcaacagaa

SEQ ID NO: 669733 - DNA, 19 bp, Mus musculus
  siRNA target sequence for Dclre1a (NM_018831.2,1500-1518).
gacttctctgccgttactt

SEQ ID NO: 669734 - DNA, 19 bp, Mus musculus
  siRNA target sequence for Dclre1a (NM_018831.2,1527-1545).
caggtcaaagccacttgaa

SEQ ID NO: 669735 - DNA, 19 bp, Mus musculus
  siRNA target sequence for Dclre1a (NM_018831.2,1720-1738).
ccgagccaaccgtctaaga

SEQ ID NO: 669736 - DNA, 19 bp, Mus musculus
  siRNA target sequence for Dclre1a (NM_018831.2,1721-1739).
cgagccaaccgtctaagaa

SEQ ID NO: 669737 - DNA, 19 bp, Mus musculus
  siRNA target sequence for Dclre1a (NM_018831.2,1722-1740).
gagccaaccgtctaagaaa

SEQ ID NO: 669738 - DNA, 19 bp, Mus musculus
  siRNA target sequence for Dclre1a (NM_018831.2,1725-1743).
ccaaccgtctaagaaagta

SEQ ID NO: 669739 - DNA, 19 bp, Mus musculus
  siRNA target sequence for Dclre1a (NM_018831.2,1726-1744).
caaccgtctaagaaagtaa

SEQ ID NO: 669740 - DNA, 19 bp, Mus musculus
  siRNA target sequence for Dclre1a (NM_018831.2,1729-1747).
ccgtctaagaaagtaatga

SEQ ID NO: 669741 - DNA, 19 bp, Mus musculus
  siRNA target sequence for Dclre1a (NM_018831.2,1755-1773).
ggatataggcgtgtttttt

SEQ ID NO: 669742 - DNA, 19 bp, Mus musculus
  siRNA target sequence for Dclre1a (NM_018831.2,1806-1824).
gagggaaagcgcatcagaa

SEQ ID NO: 669743 - DNA, 19 bp, Mus musculus
  siRNA target sequence for Dclre1a (NM_018831.2,1846-1864).
gtgagtcccaaccaaaaga

SEQ ID NO: 669744 - DNA, 19 bp, Mus musculus
  siRNA target sequence for Dclre1a (NM_018831.2,1898-1916).
ctctgagtgacttagagtt

SEQ ID NO: 669745 - DNA, 19 bp, Mus musculus
  siRNA target sequence for Dclre1a (NM_018831.2,1902-1920).
gagtgacttagagtttgat

SEQ ID NO: 669746 - DNA, 19 bp, Mus musculus
  siRNA target sequence for Dclre1a (NM_018831.2,1972-1990).
cggcaacatcgaagaaaga

SEQ ID NO: 669747 - DNA, 19 bp, Mus musculus
  siRNA target sequence for Dclre1a (NM_018831.2,1978-1996).
catcgaagaaagagacata

SEQ ID NO: 669748 - DNA, 19 bp, Mus musculus
  siRNA target sequence for Dclre1a (NM_018831.2,1989-2007).
gagacataaaacgtcaaat

SEQ ID NO: 669749 - DNA, 19 bp, Mus musculus
  siRNA target sequence for Dclre1a (NM_018831.2,2039-2057).
caggtcacctcatgaacaa

SEQ ID NO: 669750 - DNA, 19 bp, Mus musculus
  siRNA target sequence for Dclre1a (NM_018831.2,2119-2137).
cagagagggaacatgaaca

SEQ ID NO: 669751 - DNA, 19 bp, Mus musculus
  siRNA target sequence for Dclre1a (NM_018831.2,2177-2195).
gtccgttctataagagaat

SEQ ID NO: 669752 - DNA, 19 bp, Mus musculus
  siRNA target sequence for Dclre1a (NM_018831.2,2265-2283).
cacacatttccattctgat

SEQ ID NO: 669753 - DNA, 19 bp, Mus musculus
  siRNA target sequence for Dclre1a (NM_018831.2,2320-2338).
gtctattgcagcgagataa

SEQ ID NO: 669754 - DNA, 19 bp, Mus musculus
  siRNA target sequence for Dclre1a (NM_018831.2,2322-2340).
ctattgcagcgagataaca

SEQ ID NO: 669755 - DNA, 19 bp, Mus musculus
  siRNA target sequence for Dclre1a (NM_018831.2,2332-2350).
gagataacaggcaatctgt

SEQ ID NO: 669756 - DNA, 19 bp, Mus musculus
  siRNA target sequence for Dclre1a (NM_018831.2,2365-2383).
cgagtgcaagagcaataca

SEQ ID NO: 669757 - DNA, 19 bp, Mus musculus
  siRNA target sequence for Dclre1a (NM_018831.2,2366-2384).
gagtgcaagagcaatacat

SEQ ID NO: 669758 - DNA, 19 bp, Mus musculus
  siRNA target sequence for Dclre1a (NM_018831.2,2465-2483).
ctaccatgatccttttcca

SEQ ID NO: 669759 - DNA, 19 bp, Mus musculus
  siRNA target sequence for Dclre1a (NM_018831.2,2489-2507).
ccaacggtgctgtcatact

SEQ ID NO: 669760 - DNA, 19 bp, Mus musculus
  siRNA target sequence for Dclre1a (NM_018831.2,2621-2639).
cgtcacagcaggaggttat

SEQ ID NO: 669761 - DNA, 19 bp, Mus musculus
  siRNA target sequence for Dclre1a (NM_018831.2,2624-2642).
cacagcaggaggttatcca

SEQ ID NO: 669762 - DNA, 19 bp, Mus musculus
  siRNA target sequence for Dclre1a (NM_018831.2,2661-2679).
ctttgaggctgtaactcta

SEQ ID NO: 669763 - DNA, 19 bp, Mus musculus
  siRNA target sequence for Dclre1a (NM_018831.2,2742-2760).
cattgccgatgttttaggt

SEQ ID NO: 669764 - DNA, 19 bp, Mus musculus
  siRNA target sequence for Dclre1a (NM_018831.2,2747-2765).
ccgatgttttaggttcaaa

SEQ ID NO: 669765 - DNA, 19 bp, Mus musculus
  siRNA target sequence for Dclre1a (NM_018831.2,2772-2790).
catgtcccaagaaaagtat

SEQ ID NO: 669766 - DNA, 19 bp, Mus musculus
  siRNA target sequence for Dclre1a (NM_018831.2,2799-2817).
gcagtgcctcaatatacca

SEQ ID NO: 669767 - DNA, 19 bp, Mus musculus
  siRNA target sequence for Dclre1a (NM_018831.2,2844-2862).
catgtgcgactctttggtt

SEQ ID NO: 669768 - DNA, 19 bp, Mus musculus
  siRNA target sequence for Dclre1a (NM_018831.2,2868-2886).
cctcccaatgatgcaaatt

SEQ ID NO: 669769 - DNA, 19 bp, Mus musculus
  siRNA target sequence for Dclre1a (NM_018831.2,2869-2887).
ctcccaatgatgcaaatta

SEQ ID NO: 669770 - DNA, 19 bp, Mus musculus
  siRNA target sequence for Dclre1a (NM_018831.2,2871-2889).
cccaatgatgcaaattaat

SEQ ID NO: 669771 - DNA, 19 bp, Mus musculus
  siRNA target sequence for Dclre1a (NM_018831.2,2919-2937).
gtgtggtgggaaatacgat

SEQ ID NO: 669772 - DNA, 19 bp, Mus musculus
  siRNA target sequence for Dclre1a (NM_018831.2,2926-2944).
gggaaatacgatcagattt

SEQ ID NO: 669773 - DNA, 19 bp, Mus musculus
  siRNA target sequence for Dclre1a (NM_018831.2,2963-2981).
gatggacacactctaacaa

SEQ ID NO: 669774 - DNA, 19 bp, Mus musculus
  siRNA target sequence for Dclre1a (NM_018831.2,2967-2985).
gacacactctaacaacata

SEQ ID NO: 669775 - DNA, 19 bp, Mus musculus
  siRNA target sequence for Dclre1a (NM_018831.2,2987-3005).
ctagcacagcggatattat

SEQ ID NO: 669776 - DNA, 19 bp, Mus musculus
  siRNA target sequence for Dclre1a (NM_018831.2,3007-3025).
ccccagacaagaggaaata

SEQ ID NO: 669777 - DNA, 19 bp, Mus musculus
  siRNA target sequence for Dclre1a (NM_018831.2,3009-3027).
ccagacaagaggaaatata

SEQ ID NO: 669778 - DNA, 19 bp, Mus musculus
  siRNA target sequence for Dclre1a (NM_018831.2,3010-3028).
cagacaagaggaaatatat

SEQ ID NO: 669779 - DNA, 19 bp, Mus musculus
  siRNA target sequence for Dclre1a (NM_018831.2,3059-3077).
gcagctacttagaaatgaa

SEQ ID NO: 669780 - DNA, 19 bp, Mus musculus
  siRNA target sequence for Dclre1a (NM_018831.2,3146-3164).
ggaacacgatggagaaata

SEQ ID NO: 669781 - DNA, 19 bp, Mus musculus
  siRNA target sequence for Dclre1a (NM_018831.2,3152-3170).
cgatggagaaatactttaa

SEQ ID NO: 669782 - DNA, 19 bp, Mus musculus
  siRNA target sequence for Fancc (NM_007985.1,399-417).
ccagaaggacacttgtctt

SEQ ID NO: 669783 - DNA, 19 bp, Mus musculus
  siRNA target sequence for Fancc (NM_007985.1,492-510).
ggaaaggttccccacaatt

SEQ ID NO: 669784 - DNA, 19 bp, Mus musculus
  siRNA target sequence for Fancc (NM_007985.1,568-586).
caaaaaattgtaatatggt

SEQ ID NO: 669785 - DNA, 19 bp, Mus musculus
  siRNA target sequence for Fancc (NM_007985.1,577-595).
gtaatatggtgcttatgtt

SEQ ID NO: 669786 - DNA, 19 bp, Mus musculus
  siRNA target sequence for Fancc (NM_007985.1,644-662).
cgtggatccggggtttgtt

SEQ ID NO: 669787 - DNA, 19 bp, Mus musculus
  siRNA target sequence for Fancc (NM_007985.1,645-663).
gtggatccggggtttgtta

SEQ ID NO: 669788 - DNA, 19 bp, Mus musculus
  siRNA target sequence for Fancc (NM_007985.1,651-669).
ccggggtttgttatctcat

SEQ ID NO: 669789 - DNA, 19 bp, Mus musculus
  siRNA target sequence for Fancc (NM_007985.1,656-674).
gtttgttatctcatgtact

SEQ ID NO: 669790 - DNA, 19 bp, Mus musculus
  siRNA target sequence for Fancc (NM_007985.1,670-688).
gtactttctgcattcagat

SEQ ID NO: 669791 - DNA, 19 bp, Mus musculus
  siRNA target sequence for Fancc (NM_007985.1,707-725).
gtctttttaccaaaagtct

SEQ ID NO: 669792 - DNA, 19 bp, Mus musculus
  siRNA target sequence for Fancc (NM_007985.1,727-745).
ggatatgagtctattgatt

SEQ ID NO: 669793 - DNA, 19 bp, Mus musculus
  siRNA target sequence for Fancc (NM_007985.1,747-765).
ctatcctagtttgcttaaa

SEQ ID NO: 669794 - DNA, 19 bp, Mus musculus
  siRNA target sequence for Fancc (NM_007985.1,752-770).
ctagtttgcttaaaaatat

SEQ ID NO: 669795 - DNA, 19 bp, Mus musculus
  siRNA target sequence for Fancc (NM_007985.1,838-856).
gctcctgagcgcatgatgt

SEQ ID NO: 669796 - DNA, 19 bp, Mus musculus
  siRNA target sequence for Fancc (NM_007985.1,979-997).
gtaaatgaggccttcttgt

SEQ ID NO: 669797 - DNA, 19 bp, Mus musculus
  siRNA target sequence for Fancc (NM_007985.1,989-1007).
ccttcttgtcggaaaaaat

SEQ ID NO: 669798 - DNA, 19 bp, Mus musculus
  siRNA target sequence for Fancc (NM_007985.1,990-1008).
cttcttgtcggaaaaaatt

SEQ ID NO: 669799 - DNA, 19 bp, Mus musculus
  siRNA target sequence for Fancc (NM_007985.1,993-1011).
cttgtcggaaaaaattgtt

SEQ ID NO: 669800 - DNA, 19 bp, Mus musculus
  siRNA target sequence for Fancc (NM_007985.1,1070-1088).
caacgctgcatctttttga

SEQ ID NO: 669801 - DNA, 19 bp, Mus musculus
  siRNA target sequence for Fancc (NM_007985.1,1073-1091).
cgctgcatctttttgaaaa

SEQ ID NO: 669802 - DNA, 19 bp, Mus musculus
  siRNA target sequence for Fancc (NM_007985.1,1230-1248).
cggagccccagaagtacta

SEQ ID NO: 669803 - DNA, 19 bp, Mus musculus
  siRNA target sequence for Fancc (NM_007985.1,1471-1489).
ccgcgaaatccctttgaga

SEQ ID NO: 669804 - DNA, 19 bp, Mus musculus
  siRNA target sequence for Fancc (NM_007985.1,1480-1498).
ccctttgagagctggtttt

SEQ ID NO: 669805 - DNA, 19 bp, Mus musculus
  siRNA target sequence for Fancc (NM_007985.1,1586-1604).
ggctcttggtgttctatta

SEQ ID NO: 669806 - DNA, 19 bp, Mus musculus
  siRNA target sequence for Fancc (NM_007985.1,1588-1606).
ctcttggtgttctattaca

SEQ ID NO: 669807 - DNA, 19 bp, Mus musculus
  siRNA target sequence for Fancc (NM_007985.1,1645-1663).
gtggagctgaaggtattaa

SEQ ID NO: 669808 - DNA, 19 bp, Mus musculus
  siRNA target sequence for Fancc (NM_007985.1,1774-1792).
gtcagacgccttcttctta

SEQ ID NO: 669809 - DNA, 19 bp, Mus musculus
  siRNA target sequence for Fancc (NM_007985.1,1842-1860).
cacccatggtccgactttt

SEQ ID NO: 669810 - DNA, 19 bp, Mus musculus
  siRNA target sequence for Fancc (NM_007985.1,1844-1862).
cccatggtccgacttttga

SEQ ID NO: 669811 - DNA, 19 bp, Mus musculus
  siRNA target sequence for Fancc (NM_007985.1,1846-1864).
catggtccgacttttgaga

SEQ ID NO: 669812 - DNA, 19 bp, Mus musculus
  siRNA target sequence for Fancc (NM_007985.1,1952-1970).
cccacacggatgctgtaat

SEQ ID NO: 669813 - DNA, 19 bp, Mus musculus
  siRNA target sequence for Fancc (NM_007985.1,1990-2008).
cttgaccagaccttgtaca

SEQ ID NO: 669814 - DNA, 19 bp, Mus musculus
  siRNA target sequence for Fancc (NM_007985.1,1993-2011).
gaccagaccttgtacagat

SEQ ID NO: 669815 - DNA, 19 bp, Mus musculus
  siRNA target sequence for Fancc (NM_007985.1,2007-2025).
cagatcacaacatctttgt

SEQ ID NO: 669816 - DNA, 19 bp, Mus musculus
  siRNA target sequence for Fancc (NM_007985.1,2009-2027).
gatcacaacatctttgtgt

SEQ ID NO: 669817 - DNA, 19 bp, Mus musculus
  siRNA target sequence for Rad23a (NM_009010.2,83-101).
cgtcaccatcacccttaaa

SEQ ID NO: 669818 - DNA, 19 bp, Mus musculus
  siRNA target sequence for Rad23a (NM_009010.2,84-102).
gtcaccatcacccttaaaa

SEQ ID NO: 669819 - DNA, 19 bp, Mus musculus
  siRNA target sequence for Rad23a (NM_009010.2,88-106).
ccatcacccttaaaacgtt

SEQ ID NO: 669820 - DNA, 19 bp, Mus musculus
  siRNA target sequence for Rad23a (NM_009010.2,139-157).
ctgacgagacggtaaaggt

SEQ ID NO: 669821 - DNA, 19 bp, Mus musculus
  siRNA target sequence for Rad23a (NM_009010.2,668-686).
cttgctcacgggaattcca

SEQ ID NO: 669822 - DNA, 19 bp, Mus musculus
  siRNA target sequence for Rad23a (NM_009010.2,800-818).
gaacatgcggcaagtgatt

SEQ ID NO: 669823 - DNA, 19 bp, Mus musculus
  siRNA target sequence for Rad23a (NM_009010.2,898-916).
gtcaccaggagcagttcat

SEQ ID NO: 669824 - DNA, 19 bp, Mus musculus
  siRNA target sequence for Rad23a (NM_009010.2,947-965).
ggcggacatctctgatgta

SEQ ID NO: 669825 - DNA, 19 bp, Mus musculus
  siRNA target sequence for Rad23a (NM_009010.2,949-967).
cggacatctctgatgtaga

SEQ ID NO: 669826 - DNA, 19 bp, Mus musculus
  siRNA target sequence for Rad23a (NM_009010.2,993-1011).
gaggccccacagatgaact

SEQ ID NO: 669827 - DNA, 19 bp, Mus musculus
  siRNA target sequence for Rad23a (NM_009010.2,996-1014).
gccccacagatgaactata

SEQ ID NO: 669828 - DNA, 19 bp, Mus musculus
  siRNA target sequence for Rad23a (NM_009010.2,997-1015).
ccccacagatgaactatat

SEQ ID NO: 669829 - DNA, 19 bp, Mus musculus
  siRNA target sequence for Rad23a (NM_009010.2,1092-1110).
gcctacttcgcgtgtgaaa

SEQ ID NO: 669830 - DNA, 19 bp, Mus musculus
  siRNA target sequence for Rad23a (NM_009010.2,1093-1111).
cctacttcgcgtgtgaaaa

SEQ ID NO: 669831 - DNA, 19 bp, Mus musculus
  siRNA target sequence for Rad23a (NM_009010.2,1094-1112).
ctacttcgcgtgtgaaaaa

SEQ ID NO: 669832 - DNA, 19 bp, Mus musculus
  siRNA target sequence for Rad23a (NM_009010.2,1139-1157).
cctgagtcagaactttgat

SEQ ID NO: 669833 - DNA, 19 bp, Mus musculus
  siRNA target sequence for Rad23a (NM_009010.2,1142-1160).
gagtcagaactttgatgat

SEQ ID NO: 669834 - DNA, 19 bp, Mus musculus
  siRNA target sequence for Rad23a (NM_009010.2,1144-1162).
gtcagaactttgatgatga

SEQ ID NO: 669835 - DNA, 19 bp, Mus musculus
  siRNA target sequence for Rad23b (NM_009011.2,372-390).
gacggtaaaggcattgaaa

SEQ ID NO: 669836 - DNA, 19 bp, Mus musculus
  siRNA target sequence for Rad23b (NM_009011.2,428-446).
cggtagcaggtcagaagtt

SEQ ID NO: 669837 - DNA, 19 bp, Mus musculus
  siRNA target sequence for Rad23b (NM_009011.2,429-447).
ggtagcaggtcagaagtta

SEQ ID NO: 669838 - DNA, 19 bp, Mus musculus
  siRNA target sequence for Rad23b (NM_009011.2,433-451).
gcaggtcagaagttaattt

SEQ ID NO: 669839 - DNA, 19 bp, Mus musculus
  siRNA target sequence for Rad23b (NM_009011.2,434-452).
caggtcagaagttaattta

SEQ ID NO: 669840 - DNA, 19 bp, Mus musculus
  siRNA target sequence for Rad23b (NM_009011.2,479-497).
ctgctctcaaagaatataa

SEQ ID NO: 669841 - DNA, 19 bp, Mus musculus
  siRNA target sequence for Rad23b (NM_009011.2,519-537).
ggtggttatggtgacaaaa

SEQ ID NO: 669842 - DNA, 19 bp, Mus musculus
  siRNA target sequence for Rad23b (NM_009011.2,821-839).
cttcccggtcaaatctttt

SEQ ID NO: 669843 - DNA, 19 bp, Mus musculus
  siRNA target sequence for Rad23b (NM_009011.2,824-842).
cccggtcaaatctttttga

SEQ ID NO: 669844 - DNA, 19 bp, Mus musculus
  siRNA target sequence for Rad23b (NM_009011.2,825-843).
ccggtcaaatctttttgaa

SEQ ID NO: 669845 - DNA, 19 bp, Mus musculus
  siRNA target sequence for Rad23b (NM_009011.2,868-886).
ggtcagtcttatgagaata

SEQ ID NO: 669846 - DNA, 19 bp, Mus musculus
  siRNA target sequence for Rad23b (NM_009011.2,889-907).
gtaactgagatcatgtcaa

SEQ ID NO: 669847 - DNA, 19 bp, Mus musculus
  siRNA target sequence for Rad23b (NM_009011.2,900-918).
catgtcaatgggctatgaa

SEQ ID NO: 669848 - DNA, 19 bp, Mus musculus
  siRNA target sequence for Rad23b (NM_009011.2,911-929).
gctatgaacgagaacaagt

SEQ ID NO: 669849 - DNA, 19 bp, Mus musculus
  siRNA target sequence for Rad23b (NM_009011.2,962-980).
ctgacagagctgtggaata

SEQ ID NO: 669850 - DNA, 19 bp, Mus musculus
  siRNA target sequence for Rad23b (NM_009011.2,966-984).
cagagctgtggaatatctt

SEQ ID NO: 669851 - DNA, 19 bp, Mus musculus
  siRNA target sequence for Rad23b (NM_009011.2,970-988).
gctgtggaatatcttctaa

SEQ ID NO: 669852 - DNA, 19 bp, Mus musculus
  siRNA target sequence for Rad23b (NM_009011.2,1123-1141).
ggaggccacccccttgaat

SEQ ID NO: 669853 - DNA, 19 bp, Mus musculus
  siRNA target sequence for Rad23b (NM_009011.2,1124-1142).
gaggccacccccttgaatt

SEQ ID NO: 669854 - DNA, 19 bp, Mus musculus
  siRNA target sequence for Rad23b (NM_009011.2,1127-1145).
gccacccccttgaattttt

SEQ ID NO: 669855 - DNA, 19 bp, Mus musculus
  siRNA target sequence for Rad23b (NM_009011.2,1149-1167).
gaatcagcctcagtttcaa

SEQ ID NO: 669856 - DNA, 19 bp, Mus musculus
  siRNA target sequence for Rad23b (NM_009011.2,1264-1282).
caacaccaggagcatttta

SEQ ID NO: 669857 - DNA, 19 bp, Mus musculus
  siRNA target sequence for Rad23b (NM_009011.2,1391-1409).
gtgggcacatgaattacat

SEQ ID NO: 669858 - DNA, 19 bp, Mus musculus
  siRNA target sequence for Rad23b (NM_009011.2,1395-1413).
gcacatgaattacattcaa

SEQ ID NO: 669859 - DNA, 19 bp, Mus musculus
  siRNA target sequence for Rad23b (NM_009011.2,1401-1419).
gaattacattcaagtaaca

SEQ ID NO: 669860 - DNA, 19 bp, Mus musculus
  siRNA target sequence for Rad23b (NM_009011.2,1445-1463).
ggttaaaggcattaggatt

SEQ ID NO: 669861 - DNA, 19 bp, Mus musculus
  siRNA target sequence for Rad23b (NM_009011.2,1472-1490).
gacttgtgattcaagcata

SEQ ID NO: 669862 - DNA, 19 bp, Mus musculus
  siRNA target sequence for Rad23b (NM_009011.2,1474-1492).
cttgtgattcaagcatatt

SEQ ID NO: 669863 - DNA, 19 bp, Mus musculus
  siRNA target sequence for Rad23b (NM_009011.2,1518-1536).
ggctgccaactttcttcta

SEQ ID NO: 669864 - DNA, 19 bp, Mus musculus
  siRNA target sequence for Gtf2h2 (NM_022011.2,233-251).
gatcacttaaagctacaat

SEQ ID NO: 669865 - DNA, 19 bp, Mus musculus
  siRNA target sequence for Gtf2h2 (NM_022011.2,236-254).
cacttaaagctacaataga

SEQ ID NO: 669866 - DNA, 19 bp, Mus musculus
  siRNA target sequence for Gtf2h2 (NM_022011.2,302-320).
gacaagtccgacttggaat

SEQ ID NO: 669867 - DNA, 19 bp, Mus musculus
  siRNA target sequence for Gtf2h2 (NM_022011.2,353-371).
cgagaacaatggaagatca

SEQ ID NO: 669868 - DNA, 19 bp, Mus musculus
  siRNA target sequence for Gtf2h2 (NM_022011.2,372-390).
ggatttaaagcccaataga

SEQ ID NO: 669869 - DNA, 19 bp, Mus musculus
  siRNA target sequence for Gtf2h2 (NM_022011.2,408-426).
gttgctggaatactttgta

SEQ ID NO: 669870 - DNA, 19 bp, Mus musculus
  siRNA target sequence for Gtf2h2 (NM_022011.2,448-466).
cctatcagtcagattggaa

SEQ ID NO: 669871 - DNA, 19 bp, Mus musculus
  siRNA target sequence for Gtf2h2 (NM_022011.2,449-467).
ctatcagtcagattggaat

SEQ ID NO: 669872 - DNA, 19 bp, Mus musculus
  siRNA target sequence for Gtf2h2 (NM_022011.2,459-477).
gattggaataattgtaact

SEQ ID NO: 669873 - DNA, 19 bp, Mus musculus
  siRNA target sequence for Gtf2h2 (NM_022011.2,463-481).
ggaataattgtaactaaga

SEQ ID NO: 669874 - DNA, 19 bp, Mus musculus
  siRNA target sequence for Gtf2h2 (NM_022011.2,571-589).
ggagaaccatcgctctata

SEQ ID NO: 669875 - DNA, 19 bp, Mus musculus
  siRNA target sequence for Gtf2h2 (NM_022011.2,572-590).
gagaaccatcgctctataa

SEQ ID NO: 669876 - DNA, 19 bp, Mus musculus
  siRNA target sequence for Gtf2h2 (NM_022011.2,574-592).
gaaccatcgctctataatt

SEQ ID NO: 669877 - DNA, 19 bp, Mus musculus
  siRNA target sequence for Gtf2h2 (NM_022011.2,577-595).
ccatcgctctataattcct

SEQ ID NO: 669878 - DNA, 19 bp, Mus musculus
  siRNA target sequence for Gtf2h2 (NM_022011.2,578-596).
catcgctctataattcctt

SEQ ID NO: 669879 - DNA, 19 bp, Mus musculus
  siRNA target sequence for Gtf2h2 (NM_022011.2,603-621).
ggctatgcagaccctaaaa

SEQ ID NO: 669880 - DNA, 19 bp, Mus musculus
  siRNA target sequence for Gtf2h2 (NM_022011.2,605-623).
ctatgcagaccctaaaaca

SEQ ID NO: 669881 - DNA, 19 bp, Mus musculus
  siRNA target sequence for Gtf2h2 (NM_022011.2,624-642).
catgcctggacatacaagt

SEQ ID NO: 669882 - DNA, 19 bp, Mus musculus
  siRNA target sequence for Gtf2h2 (NM_022011.2,646-664).
gaagtgctcatcatcttca

SEQ ID NO: 669883 - DNA, 19 bp, Mus musculus
  siRNA target sequence for Gtf2h2 (NM_022011.2,680-698).
gtgatccatctaatattta

SEQ ID NO: 669884 - DNA, 19 bp, Mus musculus
  siRNA target sequence for Gtf2h2 (NM_022011.2,689-707).
ctaatatttacgatctcat

SEQ ID NO: 669885 - DNA, 19 bp, Mus musculus
  siRNA target sequence for Gtf2h2 (NM_022011.2,734-752).
gagtgtctgttattggatt

SEQ ID NO: 669886 - DNA, 19 bp, Mus musculus
  siRNA target sequence for Gtf2h2 (NM_022011.2,757-775).
gcggaggttcgagtttgta

SEQ ID NO: 669887 - DNA, 19 bp, Mus musculus
  siRNA target sequence for Gtf2h2 (NM_022011.2,759-777).
ggaggttcgagtttgtact

SEQ ID NO: 669888 - DNA, 19 bp, Mus musculus
  siRNA target sequence for Gtf2h2 (NM_022011.2,762-780).
ggttcgagtttgtactgta

SEQ ID NO: 669889 - DNA, 19 bp, Mus musculus
  siRNA target sequence for Gtf2h2 (NM_022011.2,799-817).
ggcacataccatgttatct

SEQ ID NO: 669890 - DNA, 19 bp, Mus musculus
  siRNA target sequence for Gtf2h2 (NM_022011.2,803-821).
cataccatgttatcttaga

SEQ ID NO: 669891 - DNA, 19 bp, Mus musculus
  siRNA target sequence for Gtf2h2 (NM_022011.2,827-845).
cccattacaaggagttgtt

SEQ ID NO: 669892 - DNA, 19 bp, Mus musculus
  siRNA target sequence for Gtf2h2 (NM_022011.2,882-900).
ctccgagtgctcactcatt

SEQ ID NO: 669893 - DNA, 19 bp, Mus musculus
  siRNA target sequence for Gtf2h2 (NM_022011.2,908-926).
gattccctcagcataccat

SEQ ID NO: 669894 - DNA, 19 bp, Mus musculus
  siRNA target sequence for Gtf2h2 (NM_022011.2,919-937).
cataccattgcttctttgt

SEQ ID NO: 669895 - DNA, 19 bp, Mus musculus
  siRNA target sequence for Gtf2h2 (NM_022011.2,963-981).
cagcatggcgcatttggat

SEQ ID NO: 669896 - DNA, 19 bp, Mus musculus
  siRNA target sequence for Gtf2h2 (NM_022011.2,965-983).
gcatggcgcatttggataa

SEQ ID NO: 669897 - DNA, 19 bp, Mus musculus
  siRNA target sequence for Gtf2h2 (NM_022011.2,970-988).
gcgcatttggataacaaca

SEQ ID NO: 669898 - DNA, 19 bp, Mus musculus
  siRNA target sequence for Gtf2h2 (NM_022011.2,1030-1048).
cagtgccgagcaaagtact

SEQ ID NO: 669899 - DNA, 19 bp, Mus musculus
  siRNA target sequence for Gtf2h2 (NM_022011.2,1050-1068).
cgagcttcctgttgaatgt

SEQ ID NO: 669900 - DNA, 19 bp, Mus musculus
  siRNA target sequence for Gtf2h2 (NM_022011.2,1057-1075).
cctgttgaatgtaaaatat

SEQ ID NO: 669901 - DNA, 19 bp, Mus musculus
  siRNA target sequence for Gtf2h2 (NM_022011.2,1192-1210).
ggatgtcagggggaattga

SEQ ID NO: 669902 - DNA, 19 bp, Mus musculus
  siRNA target sequence for Gtf2h2 (NM_022011.2,1193-1211).
gatgtcagggggaattgaa

SEQ ID NO: 669903 - DNA, 19 bp, Mus musculus
  siRNA target sequence for Gtf2h2 (NM_022011.2,1209-1227).
gaaagaccaacatgtctat

SEQ ID NO: 669904 - DNA, 19 bp, Mus musculus
  siRNA target sequence for Gtf2h2 (NM_022011.2,1213-1231).
gaccaacatgtctatgttt

SEQ ID NO: 669905 - DNA, 19 bp, Mus musculus
  siRNA target sequence for Gtf2h2 (NM_022011.2,1233-1251).
cacagtgtgccaaaatgtt

SEQ ID NO: 669906 - DNA, 19 bp, Mus musculus
  siRNA target sequence for Gtf2h2 (NM_022011.2,1279-1297).
catgactctctccattgtt

SEQ ID NO: 669907 - DNA, 19 bp, Mus musculus
  siRNA target sequence for Poli (NM_011972.1,149-167).
gggccacctacacaaatct

SEQ ID NO: 669908 - DNA, 19 bp, Mus musculus
  siRNA target sequence for Poli (NM_011972.1,166-184).
ctcttcgtcgagagtcata

SEQ ID NO: 669909 - DNA, 19 bp, Mus musculus
  siRNA target sequence for Poli (NM_011972.1,168-186).
cttcgtcgagagtcatagt

SEQ ID NO: 669910 - DNA, 19 bp, Mus musculus
  siRNA target sequence for Poli (NM_011972.1,190-208).
cgtagatctggattgcttt

SEQ ID NO: 669911 - DNA, 19 bp, Mus musculus
  siRNA target sequence for Poli (NM_011972.1,226-244).
gatctccaacccagaatta

SEQ ID NO: 669912 - DNA, 19 bp, Mus musculus
  siRNA target sequence for Poli (NM_011972.1,260-278).
ggtgtgcaacagaaatact

SEQ ID NO: 669913 - DNA, 19 bp, Mus musculus
  siRNA target sequence for Poli (NM_011972.1,261-279).
gtgtgcaacagaaatactt

SEQ ID NO: 669914 - DNA, 19 bp, Mus musculus
  siRNA target sequence for Poli (NM_011972.1,280-298).
ggtggttacctgcaactat

SEQ ID NO: 669915 - DNA, 19 bp, Mus musculus
  siRNA target sequence for Poli (NM_011972.1,283-301).
ggttacctgcaactatgaa

SEQ ID NO: 669916 - DNA, 19 bp, Mus musculus
  siRNA target sequence for Poli (NM_011972.1,549-567).
ctgtgttcggccatgttta

SEQ ID NO: 669917 - DNA, 19 bp, Mus musculus
  siRNA target sequence for Poli (NM_011972.1,551-569).
gtgttcggccatgtttaca

SEQ ID NO: 669918 - DNA, 19 bp, Mus musculus
  siRNA target sequence for Poli (NM_011972.1,553-571).
gttcggccatgtttacaat

SEQ ID NO: 669919 - DNA, 19 bp, Mus musculus
  siRNA target sequence for Poli (NM_011972.1,643-661).
gcgggaagccatgtataat

SEQ ID NO: 669920 - DNA, 19 bp, Mus musculus
  siRNA target sequence for Poli (NM_011972.1,645-663).
gggaagccatgtataatca

SEQ ID NO: 669921 - DNA, 19 bp, Mus musculus
  siRNA target sequence for Poli (NM_011972.1,684-702).
ccggagtggctcctaataa

SEQ ID NO: 669922 - DNA, 19 bp, Mus musculus
  siRNA target sequence for Poli (NM_011972.1,685-703).
cggagtggctcctaataaa

SEQ ID NO: 669923 - DNA, 19 bp, Mus musculus
  siRNA target sequence for Poli (NM_011972.1,687-705).
gagtggctcctaataaact

SEQ ID NO: 669924 - DNA, 19 bp, Mus musculus
  siRNA target sequence for Poli (NM_011972.1,689-707).
gtggctcctaataaactct

SEQ ID NO: 669925 - DNA, 19 bp, Mus musculus
  siRNA target sequence for Poli (NM_011972.1,751-769).
ggtcttactacctgaaagt

SEQ ID NO: 669926 - DNA, 19 bp, Mus musculus
  siRNA target sequence for Poli (NM_011972.1,752-770).
gtcttactacctgaaagtt

SEQ ID NO: 669927 - DNA, 19 bp, Mus musculus
  siRNA target sequence for Poli (NM_011972.1,754-772).
cttactacctgaaagttgt

SEQ ID NO: 669928 - DNA, 19 bp, Mus musculus
  siRNA target sequence for Poli (NM_011972.1,789-807).
gtttgaaccacataaagga

SEQ ID NO: 669929 - DNA, 19 bp, Mus musculus
  siRNA target sequence for Poli (NM_011972.1,812-830).
cctggtatcggctataaaa

SEQ ID NO: 669930 - DNA, 19 bp, Mus musculus
  siRNA target sequence for Poli (NM_011972.1,834-852).
ccaagcgtctcgaagttct

SEQ ID NO: 669931 - DNA, 19 bp, Mus musculus
  siRNA target sequence for Poli (NM_011972.1,855-873).
gaatcaatagtgttcatga

SEQ ID NO: 669932 - DNA, 19 bp, Mus musculus
  siRNA target sequence for Poli (NM_011972.1,983-1001).
gggccaccacagtccttta

SEQ ID NO: 669933 - DNA, 19 bp, Mus musculus
  siRNA target sequence for Poli (NM_011972.1,985-1003).
gccaccacagtcctttagt

SEQ ID NO: 669934 - DNA, 19 bp, Mus musculus
  siRNA target sequence for Poli (NM_011972.1,1101-1119).
gaaggaagccccatacagt

SEQ ID NO: 669935 - DNA, 19 bp, Mus musculus
  siRNA target sequence for Poli (NM_011972.1,1105-1123).
gaagccccatacagtaaga

SEQ ID NO: 669936 - DNA, 19 bp, Mus musculus
  siRNA target sequence for Poli (NM_011972.1,1110-1128).
cccatacagtaagattagt

SEQ ID NO: 669937 - DNA, 19 bp, Mus musculus
  siRNA target sequence for Poli (NM_011972.1,1132-1150).
ccgtcggtactctgacaaa

SEQ ID NO: 669938 - DNA, 19 bp, Mus musculus
  siRNA target sequence for Poli (NM_011972.1,1134-1152).
gtcggtactctgacaaaca

SEQ ID NO: 669939 - DNA, 19 bp, Mus musculus
  siRNA target sequence for Poli (NM_011972.1,1136-1154).
cggtactctgacaaacact

SEQ ID NO: 669940 - DNA, 19 bp, Mus musculus
  siRNA target sequence for Poli (NM_011972.1,1184-1202).
ccatcccacgtcattcaga

SEQ ID NO: 669941 - DNA, 19 bp, Mus musculus
  siRNA target sequence for Poli (NM_011972.1,1185-1203).
catcccacgtcattcagaa

SEQ ID NO: 669942 - DNA, 19 bp, Mus musculus
  siRNA target sequence for Poli (NM_011972.1,1188-1206).
cccacgtcattcagaagtt

SEQ ID NO: 669943 - DNA, 19 bp, Mus musculus
  siRNA target sequence for Poli (NM_011972.1,1189-1207).
ccacgtcattcagaagtta

SEQ ID NO: 669944 - DNA, 19 bp, Mus musculus
  siRNA target sequence for Poli (NM_011972.1,1204-1222).
gttagggacaggaaatcat

SEQ ID NO: 669945 - DNA, 19 bp, Mus musculus
  siRNA target sequence for Poli (NM_011972.1,1227-1245).
ccatgcctcccctgattga

SEQ ID NO: 669946 - DNA, 19 bp, Mus musculus
  siRNA target sequence for Poli (NM_011972.1,1228-1246).
catgcctcccctgattgat

SEQ ID NO: 669947 - DNA, 19 bp, Mus musculus
  siRNA target sequence for Poli (NM_011972.1,1236-1254).
ccctgattgatatccttat

SEQ ID NO: 669948 - DNA, 19 bp, Mus musculus
  siRNA target sequence for Poli (NM_011972.1,1238-1256).
ctgattgatatccttatga

SEQ ID NO: 669949 - DNA, 19 bp, Mus musculus
  siRNA target sequence for Poli (NM_011972.1,1335-1353).
ccctgagcagtgctaagaa

SEQ ID NO: 669950 - DNA, 19 bp, Mus musculus
  siRNA target sequence for Poli (NM_011972.1,1336-1354).
cctgagcagtgctaagaaa

SEQ ID NO: 669951 - DNA, 19 bp, Mus musculus
  siRNA target sequence for Poli (NM_011972.1,1471-1489).
ggattgtctaccaagtaga

SEQ ID NO: 669952 - DNA, 19 bp, Mus musculus
  siRNA target sequence for Poli (NM_011972.1,1472-1490).
gattgtctaccaagtagaa

SEQ ID NO: 669953 - DNA, 19 bp, Mus musculus
  siRNA target sequence for Poli (NM_011972.1,1612-1630).
gcaacttccagcagatatt

SEQ ID NO: 669954 - DNA, 19 bp, Mus musculus
  siRNA target sequence for Poli (NM_011972.1,1703-1721).
gcctctagaggagtattgt

SEQ ID NO: 669955 - DNA, 19 bp, Mus musculus
  siRNA target sequence for Poli (NM_011972.1,1705-1723).
ctctagaggagtattgtct

SEQ ID NO: 669956 - DNA, 19 bp, Mus musculus
  siRNA target sequence for Poli (NM_011972.1,1754-1772).
cgcttaagccccagagata

SEQ ID NO: 669957 - DNA, 19 bp, Mus musculus
  siRNA target sequence for Poli (NM_011972.1,1864-1882).
cggaaaggactgttcctat

SEQ ID NO: 669958 - DNA, 19 bp, Mus musculus
  siRNA target sequence for Poli (NM_011972.1,1865-1883).
ggaaaggactgttcctatt

SEQ ID NO: 669959 - DNA, 19 bp, Mus musculus
  siRNA target sequence for Poli (NM_011972.1,1870-1888).
ggactgttcctattacata

SEQ ID NO: 669960 - DNA, 19 bp, Mus musculus
  siRNA target sequence for Poli (NM_011972.1,1977-1995).
gtttccattcctttcctaa

SEQ ID NO: 669961 - DNA, 19 bp, Mus musculus
  siRNA target sequence for Poli (NM_011972.1,2062-2080).
ctctcaccagggactagaa

SEQ ID NO: 669962 - DNA, 19 bp, Mus musculus
  siRNA target sequence for Poli (NM_011972.1,2144-2162).
gacattgatccgcaagttt

SEQ ID NO: 669963 - DNA, 19 bp, Mus musculus
  siRNA target sequence for Polk (NM_012048.1,235-253).
cgcatgggactaaacgata

SEQ ID NO: 669964 - DNA, 19 bp, Mus musculus
  siRNA target sequence for Polk (NM_012048.1,236-254).
gcatgggactaaacgataa

SEQ ID NO: 669965 - DNA, 19 bp, Mus musculus
  siRNA target sequence for Polk (NM_012048.1,240-258).
gggactaaacgataacaaa

SEQ ID NO: 669966 - DNA, 19 bp, Mus musculus
  siRNA target sequence for Polk (NM_012048.1,262-280).
ggcatggaagggttggata

SEQ ID NO: 669967 - DNA, 19 bp, Mus musculus
  siRNA target sequence for Polk (NM_012048.1,263-281).
gcatggaagggttggataa

SEQ ID NO: 669968 - DNA, 19 bp, Mus musculus
  siRNA target sequence for Polk (NM_012048.1,271-289).
gggttggataaggagaaaa

SEQ ID NO: 669969 - DNA, 19 bp, Mus musculus
  siRNA target sequence for Polk (NM_012048.1,351-369).
ggaaaagcaagtcaatcaa

SEQ ID NO: 669970 - DNA, 19 bp, Mus musculus
  siRNA target sequence for Polk (NM_012048.1,428-446).
ctcaattacaggttgacaa

SEQ ID NO: 669971 - DNA, 19 bp, Mus musculus
  siRNA target sequence for Polk (NM_012048.1,430-448).
caattacaggttgacaaat

SEQ ID NO: 669972 - DNA, 19 bp, Mus musculus
  siRNA target sequence for Polk (NM_012048.1,436-454).
caggttgacaaatttgcaa

SEQ ID NO: 669973 - DNA, 19 bp, Mus musculus
  siRNA target sequence for Polk (NM_012048.1,466-484).
cggaaccggaatttgaaca

SEQ ID NO: 669974 - DNA, 19 bp, Mus musculus
  siRNA target sequence for Polk (NM_012048.1,468-486).
gaaccggaatttgaacaat

SEQ ID NO: 669975 - DNA, 19 bp, Mus musculus
  siRNA target sequence for Polk (NM_012048.1,472-490).
cggaatttgaacaatacca

SEQ ID NO: 669976 - DNA, 19 bp, Mus musculus
  siRNA target sequence for Polk (NM_012048.1,474-492).
gaatttgaacaataccata

SEQ ID NO: 669977 - DNA, 19 bp, Mus musculus
  siRNA target sequence for Polk (NM_012048.1,536-554).
gggacaacccggaactgaa

SEQ ID NO: 669978 - DNA, 19 bp, Mus musculus
  siRNA target sequence for Polk (NM_012048.1,585-603).
catgttggctacttcgaat

SEQ ID NO: 669979 - DNA, 19 bp, Mus musculus
  siRNA target sequence for Polk (NM_012048.1,591-609).
ggctacttcgaattaccat

SEQ ID NO: 669980 - DNA, 19 bp, Mus musculus
  siRNA target sequence for Polk (NM_012048.1,632-650).
cagccatgccaggatttat

SEQ ID NO: 669981 - DNA, 19 bp, Mus musculus
  siRNA target sequence for Polk (NM_012048.1,682-700).
gtgcccccaaactttgaca

SEQ ID NO: 669982 - DNA, 19 bp, Mus musculus
  siRNA target sequence for Polk (NM_012048.1,688-706).
ccaaactttgacaaatata

SEQ ID NO: 669983 - DNA, 19 bp, Mus musculus
  siRNA target sequence for Polk (NM_012048.1,710-728).
ctgtgagtaaggaggttaa

SEQ ID NO: 669984 - DNA, 19 bp, Mus musculus
  siRNA target sequence for Polk (NM_012048.1,720-738).
ggaggttaaggagatactt

SEQ ID NO: 669985 - DNA, 19 bp, Mus musculus
  siRNA target sequence for Polk (NM_012048.1,777-795).
cgaagcctacttgaatata

SEQ ID NO: 669986 - DNA, 19 bp, Mus musculus
  siRNA target sequence for Polk (NM_012048.1,820-838).
gattggcctgaggacaaaa

SEQ ID NO: 669987 - DNA, 19 bp, Mus musculus
  siRNA target sequence for Polk (NM_012048.1,931-949).
ccgctgctttttgaagata

SEQ ID NO: 669988 - DNA, 19 bp, Mus musculus
  siRNA target sequence for Polk (NM_012048.1,1068-1086).
ggaaattcgcttcagaatt

SEQ ID NO: 669989 - DNA, 19 bp, Mus musculus
  siRNA target sequence for Polk (NM_012048.1,1075-1093).
cgcttcagaattgaacaaa

SEQ ID NO: 669990 - DNA, 19 bp, Mus musculus
  siRNA target sequence for Polk (NM_012048.1,1126-1144).
cccaatacaatgttagcaa

SEQ ID NO: 669991 - DNA, 19 bp, Mus musculus
  siRNA target sequence for Polk (NM_012048.1,1127-1145).
ccaatacaatgttagcaaa

SEQ ID NO: 669992 - DNA, 19 bp, Mus musculus
  siRNA target sequence for Polk (NM_012048.1,1141-1159).
gcaaaagtgtgcagtgata

SEQ ID NO: 669993 - DNA, 19 bp, Mus musculus
  siRNA target sequence for Polk (NM_012048.1,1142-1160).
caaaagtgtgcagtgataa

SEQ ID NO: 669994 - DNA, 19 bp, Mus musculus
  siRNA target sequence for Polk (NM_012048.1,1202-1220).
gcgcggtgatggacttcat

SEQ ID NO: 669995 - DNA, 19 bp, Mus musculus
  siRNA target sequence for Polk (NM_012048.1,1204-1222).
gcggtgatggacttcatca

SEQ ID NO: 669996 - DNA, 19 bp, Mus musculus
  siRNA target sequence for Polk (NM_012048.1,1281-1299).
ggctctcgggattgttact

SEQ ID NO: 669997 - DNA, 19 bp, Mus musculus
  siRNA target sequence for Polk (NM_012048.1,1282-1300).
gctctcgggattgttactt

SEQ ID NO: 669998 - DNA, 19 bp, Mus musculus
  siRNA target sequence for Polk (NM_012048.1,1449-1467).
cagtgagataagtaagaca

SEQ ID NO: 669999 - DNA, 19 bp, Mus musculus
  siRNA target sequence for Polk (NM_012048.1,1540-1558).
ggaagaaccgtcaccatta

SEQ ID NO: 670000 - DNA, 19 bp, Mus musculus
  siRNA target sequence for Polk (NM_012048.1,1541-1559).
gaagaaccgtcaccattaa

SEQ ID NO: 670001 - DNA, 19 bp, Mus musculus
  siRNA target sequence for Polk (NM_012048.1,1656-1674).
gctaaggacagaagttaat

SEQ ID NO: 670002 - DNA, 19 bp, Mus musculus
  siRNA target sequence for Polk (NM_012048.1,1707-1725).
gatgggtgtccgaatgtct

SEQ ID NO: 670003 - DNA, 19 bp, Mus musculus
  siRNA target sequence for Polk (NM_012048.1,1711-1729).
ggtgtccgaatgtctactt

SEQ ID NO: 670004 - DNA, 19 bp, Mus musculus
  siRNA target sequence for Polk (NM_012048.1,1712-1730).
gtgtccgaatgtctacttt

SEQ ID NO: 670005 - DNA, 19 bp, Mus musculus
  siRNA target sequence for Polk (NM_012048.1,1714-1732).
gtccgaatgtctacttttt

SEQ ID NO: 670006 - DNA, 19 bp, Mus musculus
  siRNA target sequence for Polk (NM_012048.1,1759-1777).
caaaggagcatcattggtt

SEQ ID NO: 670007 - DNA, 19 bp, Mus musculus
  siRNA target sequence for Polk (NM_012048.1,1763-1781).
ggagcatcattggtttctt

SEQ ID NO: 670008 - DNA, 19 bp, Mus musculus
  siRNA target sequence for Polk (NM_012048.1,1764-1782).
gagcatcattggtttctta

SEQ ID NO: 670009 - DNA, 19 bp, Mus musculus
  siRNA target sequence for Polk (NM_012048.1,1805-1823).
catctactggggatagtct

SEQ ID NO: 670010 - DNA, 19 bp, Mus musculus
  siRNA target sequence for Polk (NM_012048.1,1813-1831).
ggggatagtctagacaaaa

SEQ ID NO: 670011 - DNA, 19 bp, Mus musculus
  siRNA target sequence for Polk (NM_012048.1,1868-1886).
ctcataagaagagtttctt

SEQ ID NO: 670012 - DNA, 19 bp, Mus musculus
  siRNA target sequence for Polk (NM_012048.1,1888-1906).
gataaaaagcgatcagaaa

SEQ ID NO: 670013 - DNA, 19 bp, Mus musculus
  siRNA target sequence for Polk (NM_012048.1,1921-1939).
caagacacatccagatgta

SEQ ID NO: 670014 - DNA, 19 bp, Mus musculus
  siRNA target sequence for Polk (NM_012048.1,1943-1961).
ctgcgggtcagcaagcttt

SEQ ID NO: 670015 - DNA, 19 bp, Mus musculus
  siRNA target sequence for Polk (NM_012048.1,1946-1964).
cgggtcagcaagctttaca

SEQ ID NO: 670016 - DNA, 19 bp, Mus musculus
  siRNA target sequence for Polk (NM_012048.1,1971-1989).
ggaaccatcccaagcatta

SEQ ID NO: 670017 - DNA, 19 bp, Mus musculus
  siRNA target sequence for Polk (NM_012048.1,1972-1990).
gaaccatcccaagcattaa

SEQ ID NO: 670018 - DNA, 19 bp, Mus musculus
  siRNA target sequence for Polk (NM_012048.1,2088-2106).
ggaagcctttaatgaacat

SEQ ID NO: 670019 - DNA, 19 bp, Mus musculus
  siRNA target sequence for Polk (NM_012048.1,2285-2303).
ggacggaagacagatcatt

SEQ ID NO: 670020 - DNA, 19 bp, Mus musculus
  siRNA target sequence for Polk (NM_012048.1,2288-2306).
cggaagacagatcattgaa

SEQ ID NO: 670021 - DNA, 19 bp, Mus musculus
  siRNA target sequence for Polk (NM_012048.1,2315-2333).
ggatggacactctagagaa

SEQ ID NO: 670022 - DNA, 19 bp, Mus musculus
  siRNA target sequence for Polk (NM_012048.1,2349-2367).
ggaatgtcctgatattcca

SEQ ID NO: 670023 - DNA, 19 bp, Mus musculus
  siRNA target sequence for Polk (NM_012048.1,2368-2386).
gacaagtcttgtcctatat

SEQ ID NO: 670024 - DNA, 19 bp, Mus musculus
  siRNA target sequence for Polk (NM_012048.1,2381-2399).
ctatatcactggaaaatga

SEQ ID NO: 670025 - DNA, 19 bp, Mus musculus
  siRNA target sequence for Polk (NM_012048.1,2475-2493).
gtgtcctgtttgtaaccta

SEQ ID NO: 670026 - DNA, 19 bp, Mus musculus
  siRNA target sequence for Polk (NM_012048.1,2509-2527).
gatcttaccctcttcaaca

SEQ ID NO: 670027 - DNA, 19 bp, Mus musculus
  siRNA target sequence for Polk (NM_012048.1,2641-2659).
gcttcaggaaggaccaaaa

SEQ ID NO: 670028 - DNA, 19 bp, Mus musculus
  siRNA target sequence for Polk (NM_012048.1,2721-2739).
cacccttgatggatttttt

SEQ ID NO: 670029 - DNA, 19 bp, Mus musculus
  siRNA target sequence for Polk (NM_012048.1,2723-2741).
cccttgatggattttttaa

SEQ ID NO: 670030 - DNA, 19 bp, Mus musculus
  siRNA target sequence for Rad52 (NM_011236.1,168-186).
caaccatcctccctttgtt

SEQ ID NO: 670031 - DNA, 19 bp, Mus musculus
  siRNA target sequence for Rad52 (NM_011236.1,220-238).
cagtatacagcggatgaat

SEQ ID NO: 670032 - DNA, 19 bp, Mus musculus
  siRNA target sequence for Rad52 (NM_011236.1,271-289).
ctgggtccagagtacatta

SEQ ID NO: 670033 - DNA, 19 bp, Mus musculus
  siRNA target sequence for Rad52 (NM_011236.1,274-292).
ggtccagagtacattagca

SEQ ID NO: 670034 - DNA, 19 bp, Mus musculus
  siRNA target sequence for Rad52 (NM_011236.1,310-328).
ggtcagaaggtgtgttata

SEQ ID NO: 670035 - DNA, 19 bp, Mus musculus
  siRNA target sequence for Rad52 (NM_011236.1,311-329).
gtcagaaggtgtgttatat

SEQ ID NO: 670036 - DNA, 19 bp, Mus musculus
  siRNA target sequence for Rad52 (NM_011236.1,315-333).
gaaggtgtgttatattgaa

SEQ ID NO: 670037 - DNA, 19 bp, Mus musculus
  siRNA target sequence for Rad52 (NM_011236.1,331-349).
gaaggtcatcgggtaatta

SEQ ID NO: 670038 - DNA, 19 bp, Mus musculus
  siRNA target sequence for Rad52 (NM_011236.1,335-353).
gtcatcgggtaattaatct

SEQ ID NO: 670039 - DNA, 19 bp, Mus musculus
  siRNA target sequence for Rad52 (NM_011236.1,398-416).
cccagcaaaatgtggattt

SEQ ID NO: 670040 - DNA, 19 bp, Mus musculus
  siRNA target sequence for Rad52 (NM_011236.1,424-442).
ctcaacaatggcaagttct

SEQ ID NO: 670041 - DNA, 19 bp, Mus musculus
  siRNA target sequence for Rad52 (NM_011236.1,444-462).
cgtgggagtctgtgcattt

SEQ ID NO: 670042 - DNA, 19 bp, Mus musculus
  siRNA target sequence for Rad52 (NM_011236.1,447-465).
gggagtctgtgcatttgta

SEQ ID NO: 670043 - DNA, 19 bp, Mus musculus
  siRNA target sequence for Rad52 (NM_011236.1,501-519).
cgtgggctatggagttagt

SEQ ID NO: 670044 - DNA, 19 bp, Mus musculus
  siRNA target sequence for Rad52 (NM_011236.1,518-536).
gtgagggcctccgttcaaa

SEQ ID NO: 670045 - DNA, 19 bp, Mus musculus
  siRNA target sequence for Rad52 (NM_011236.1,588-606).
gcgagcactcaggagtttt

SEQ ID NO: 670046 - DNA, 19 bp, Mus musculus
  siRNA target sequence for Rad52 (NM_011236.1,679-697).
cctcttgatgtggatttaa

SEQ ID NO: 670047 - DNA, 19 bp, Mus musculus
  siRNA target sequence for Rad52 (NM_011236.1,682-700).
cttgatgtggatttaacta

SEQ ID NO: 670048 - DNA, 19 bp, Mus musculus
  siRNA target sequence for Rad52 (NM_011236.1,747-765).
caacagctgccgacagaat

SEQ ID NO: 670049 - DNA, 19 bp, Mus musculus
  siRNA target sequence for Rad52 (NM_011236.1,755-773).
gccgacagaatgaagcatt

SEQ ID NO: 670050 - DNA, 19 bp, Mus musculus
  siRNA target sequence for Rad52 (NM_011236.1,823-841).
ccacatgactcgaacatta

SEQ ID NO: 670051 - DNA, 19 bp, Mus musculus
  siRNA target sequence for Rad52 (NM_011236.1,1017-1035).
caagcatgcggcagtactt

SEQ ID NO: 670052 - DNA, 19 bp, Mus musculus
  siRNA target sequence for Rad52 (NM_011236.1,1098-1116).
cgtctttccagataacctt

SEQ ID NO: 670053 - DNA, 19 bp, Mus musculus
  siRNA target sequence for Rad52 (NM_011236.1,1137-1155).
ggaccttactccagactta

SEQ ID NO: 670054 - DNA, 19 bp, Mus musculus
  siRNA target sequence for Rad52 (NM_011236.1,1204-1222).
gccactcgaaccttcaaca

SEQ ID NO: 670055 - DNA, 19 bp, Mus musculus
  siRNA target sequence for Rad52 (NM_011236.1,1205-1223).
ccactcgaaccttcaacaa

SEQ ID NO: 670056 - DNA, 19 bp, Mus musculus
  siRNA target sequence for Rad52 (NM_011236.1,1230-1248).
cagcgtcccacatatccat

SEQ ID NO: 670057 - DNA, 19 bp, Mus musculus
  siRNA target sequence for Rbbp4 (NM_009030.1,816-834).
ctgctccacgagtctctat

SEQ ID NO: 670058 - DNA, 19 bp, Mus musculus
  siRNA target sequence for Rbbp4 (NM_009030.1,818-836).
gctccacgagtctctattt

SEQ ID NO: 670059 - DNA, 19 bp, Mus musculus
  siRNA target sequence for Rbbp4 (NM_009030.1,1191-1209).
ggcccaccagaattgttgt

SEQ ID NO: 670060 - DNA, 19 bp, Mus musculus
  siRNA target sequence for Rbbp4 (NM_009030.1,1192-1210).
gcccaccagaattgttgtt

SEQ ID NO: 670061 - DNA, 19 bp, Mus musculus
  siRNA target sequence for Rbbp4 (NM_009030.1,1193-1211).
cccaccagaattgttgttt

SEQ ID NO: 670062 - DNA, 19 bp, Mus musculus
  siRNA target sequence for Rbbp4 (NM_009030.1,1194-1212).
ccaccagaattgttgttta

SEQ ID NO: 670063 - DNA, 19 bp, Mus musculus
  siRNA target sequence for Rbbp4 (NM_009030.1,1195-1213).
caccagaattgttgtttat

SEQ ID NO: 670064 - DNA, 19 bp, Mus musculus
  siRNA target sequence for Cdc45l (NM_009862.1,577-595).
gcctgatgaagacagtata

SEQ ID NO: 670065 - DNA, 19 bp, Mus musculus
  siRNA target sequence for Cdc45l (NM_009862.1,619-637).
gccagtgaacgttgtgaat

SEQ ID NO: 670066 - DNA, 19 bp, Mus musculus
  siRNA target sequence for Cdc45l (NM_009862.1,621-639).
cagtgaacgttgtgaatgt

SEQ ID NO: 670067 - DNA, 19 bp, Mus musculus
  siRNA target sequence for Cdc45l (NM_009862.1,628-646).
cgttgtgaatgtgtacaat

SEQ ID NO: 670068 - DNA, 19 bp, Mus musculus
  siRNA target sequence for Cdc45l (NM_009862.1,649-667).
cactcagatcaaattgctt

SEQ ID NO: 670069 - DNA, 19 bp, Mus musculus
  siRNA target sequence for Cdc45l (NM_009862.1,698-716).
gcctacgacgacatcttta

SEQ ID NO: 670070 - DNA, 19 bp, Mus musculus
  siRNA target sequence for Cdc45l (NM_009862.1,700-718).
ctacgacgacatctttaga

SEQ ID NO: 670071 - DNA, 19 bp, Mus musculus
  siRNA target sequence for Cdc45l (NM_009862.1,703-721).
cgacgacatctttagagat

SEQ ID NO: 670072 - DNA, 19 bp, Mus musculus
  siRNA target sequence for Cdc45l (NM_009862.1,778-796).
gaagcgcacacggttagaa

SEQ ID NO: 670073 - DNA, 19 bp, Mus musculus
  siRNA target sequence for Cdc45l (NM_009862.1,872-890).
gactacgagcagtatgaat

SEQ ID NO: 670074 - DNA, 19 bp, Mus musculus
  siRNA target sequence for Cdc45l (NM_009862.1,874-892).
ctacgagcagtatgaatat

SEQ ID NO: 670075 - DNA, 19 bp, Mus musculus
  siRNA target sequence for Cdc45l (NM_009862.1,877-895).
cgagcagtatgaatattat

SEQ ID NO: 670076 - DNA, 19 bp, Mus musculus
  siRNA target sequence for Cdc45l (NM_009862.1,923-941).
gacctggcgtggatgatgt

SEQ ID NO: 670077 - DNA, 19 bp, Mus musculus
  siRNA target sequence for Cdc45l (NM_009862.1,1021-1039).
gaagtacgtgactgatgtt

SEQ ID NO: 670078 - DNA, 19 bp, Mus musculus
  siRNA target sequence for Cdc45l (NM_009862.1,1053-1071).
gtcatgtgtcccgtcataa

SEQ ID NO: 670079 - DNA, 19 bp, Mus musculus
  siRNA target sequence for Cdc45l (NM_009862.1,1160-1178).
cactggtccctccatgaaa

SEQ ID NO: 670080 - DNA, 19 bp, Mus musculus
  siRNA target sequence for Cdc45l (NM_009862.1,1200-1218).
cagcagccaggtttaagct

SEQ ID NO: 670081 - DNA, 19 bp, Mus musculus
  siRNA target sequence for Cdc45l (NM_009862.1,1286-1304).
gtcaagcagaaatttcagt

SEQ ID NO: 670082 - DNA, 19 bp, Mus musculus
  siRNA target sequence for Cdc45l (NM_009862.1,1325-1343).
gggaatctgcgagaaatga

SEQ ID NO: 670083 - DNA, 19 bp, Mus musculus
  siRNA target sequence for Cdc45l (NM_009862.1,1326-1344).
ggaatctgcgagaaatgat

SEQ ID NO: 670084 - DNA, 19 bp, Mus musculus
  siRNA target sequence for Cdc45l (NM_009862.1,1327-1345).
gaatctgcgagaaatgatt

SEQ ID NO: 670085 - DNA, 19 bp, Mus musculus
  siRNA target sequence for Cdc45l (NM_009862.1,1390-1408).
gactttcagcattcagttt

SEQ ID NO: 670086 - DNA, 19 bp, Mus musculus
  siRNA target sequence for Cdc45l (NM_009862.1,1403-1421).
cagtttgggttcaagcata

SEQ ID NO: 670087 - DNA, 19 bp, Mus musculus
  siRNA target sequence for Cdc45l (NM_009862.1,1410-1428).
ggttcaagcataaattcct

SEQ ID NO: 670088 - DNA, 19 bp, Mus musculus
  siRNA target sequence for Cdc45l (NM_009862.1,1533-1551).
gtaacctggacaagctata

SEQ ID NO: 670089 - DNA, 19 bp, Mus musculus
  siRNA target sequence for Cdc45l (NM_009862.1,1679-1697).
gatgtcaccctgttttcca

SEQ ID NO: 670090 - DNA, 19 bp, Mus musculus
  siRNA target sequence for Cdc45l (NM_009862.1,1851-1869).
ctgatagctcggatagaaa

SEQ ID NO: 670091 - DNA, 19 bp, Mus musculus
  siRNA target sequence for Cdc45l (NM_009862.1,1853-1871).
gatagctcggatagaaaga

SEQ ID NO: 670092 - DNA, 19 bp, Mus musculus
  siRNA target sequence for Cdc45l (NM_009862.1,1860-1878).
cggatagaaagaacttttt

SEQ ID NO: 670093 - DNA, 19 bp, Mus musculus
  siRNA target sequence for Cdc45l (NM_009862.1,1914-1932).
gctctcggactctacacaa

SEQ ID NO: 670094 - DNA, 19 bp, Mus musculus
  siRNA target sequence for Cdc45l (NM_009862.1,1915-1933).
ctctcggactctacacaat

SEQ ID NO: 670095 - DNA, 19 bp, Mus musculus
  siRNA target sequence for Cdc45l (NM_009862.1,1917-1935).
ctcggactctacacaatta

SEQ ID NO: 670096 - DNA, 19 bp, Mus musculus
  siRNA target sequence for Cdc45l (NM_009862.1,1921-1939).
gactctacacaattacttt

SEQ ID NO: 670097 - DNA, 19 bp, Mus musculus
  siRNA target sequence for Orc2l (NM_008765.2,212-230).
gcactctgcagttaaagga

SEQ ID NO: 670098 - DNA, 19 bp, Mus musculus
  siRNA target sequence for Orc2l (NM_008765.2,337-355).
gtcaatccccagaaagtaa

SEQ ID NO: 670099 - DNA, 19 bp, Mus musculus
  siRNA target sequence for Orc2l (NM_008765.2,343-361).
ccccagaaagtaataaaga

SEQ ID NO: 670100 - DNA, 19 bp, Mus musculus
  siRNA target sequence for Orc2l (NM_008765.2,409-427).
cagaactacgtgaaagtct

SEQ ID NO: 670101 - DNA, 19 bp, Mus musculus
  siRNA target sequence for Orc2l (NM_008765.2,429-447).
gggaagaaatattcaagaa

SEQ ID NO: 670102 - DNA, 19 bp, Mus musculus
  siRNA target sequence for Orc2l (NM_008765.2,466-484).
gctaaagatggtaggaata

SEQ ID NO: 670103 - DNA, 19 bp, Mus musculus
  siRNA target sequence for Orc2l (NM_008765.2,467-485).
ctaaagatggtaggaataa

SEQ ID NO: 670104 - DNA, 19 bp, Mus musculus
  siRNA target sequence for Orc2l (NM_008765.2,525-543).
gactaaattggctttagaa

SEQ ID NO: 670105 - DNA, 19 bp, Mus musculus
  siRNA target sequence for Orc2l (NM_008765.2,527-545).
ctaaattggctttagaact

SEQ ID NO: 670106 - DNA, 19 bp, Mus musculus
  siRNA target sequence for Orc2l (NM_008765.2,586-604).
gatcctgaaatcacaaaaa

SEQ ID NO: 670107 - DNA, 19 bp, Mus musculus
  siRNA target sequence for Orc2l (NM_008765.2,646-664).
gctccactggtgaacaata

SEQ ID NO: 670108 - DNA, 19 bp, Mus musculus
  siRNA target sequence for Orc2l (NM_008765.2,649-667).
ccactggtgaacaataaca

SEQ ID NO: 670109 - DNA, 19 bp, Mus musculus
  siRNA target sequence for Orc2l (NM_008765.2,836-854).
gtcaaggtcagaatagact

SEQ ID NO: 670110 - DNA, 19 bp, Mus musculus
  siRNA target sequence for Orc2l (NM_008765.2,911-929).
cgagtgacttggtagaaga

SEQ ID NO: 670111 - DNA, 19 bp, Mus musculus
  siRNA target sequence for Orc2l (NM_008765.2,937-955).
gaagcccatagtagttcaa

SEQ ID NO: 670112 - DNA, 19 bp, Mus musculus
  siRNA target sequence for Orc2l (NM_008765.2,941-959).
cccatagtagttcaaaagt

SEQ ID NO: 670113 - DNA, 19 bp, Mus musculus
  siRNA target sequence for Orc2l (NM_008765.2,1020-1038).
gcataacttactgagaaaa

SEQ ID NO: 670114 - DNA, 19 bp, Mus musculus
  siRNA target sequence for Orc2l (NM_008765.2,1152-1170).
ggggtccaagagagattta

SEQ ID NO: 670115 - DNA, 19 bp, Mus musculus
  siRNA target sequence for Orc2l (NM_008765.2,1154-1172).
ggtccaagagagatttact

SEQ ID NO: 670116 - DNA, 19 bp, Mus musculus
  siRNA target sequence for Orc2l (NM_008765.2,1155-1173).
gtccaagagagatttacta

SEQ ID NO: 670117 - DNA, 19 bp, Mus musculus
  siRNA target sequence for Orc2l (NM_008765.2,1157-1175).
ccaagagagatttactaga

SEQ ID NO: 670118 - DNA, 19 bp, Mus musculus
  siRNA target sequence for Orc2l (NM_008765.2,1158-1176).
caagagagatttactagaa

SEQ ID NO: 670119 - DNA, 19 bp, Mus musculus
  siRNA target sequence for Orc2l (NM_008765.2,1194-1212).
gcttcaagattccattcat

SEQ ID NO: 670120 - DNA, 19 bp, Mus musculus
  siRNA target sequence for Orc2l (NM_008765.2,1205-1223).
ccattcatgttgtcatcaa

SEQ ID NO: 670121 - DNA, 19 bp, Mus musculus
  siRNA target sequence for Orc2l (NM_008765.2,1238-1256).
gcgtcagtgtgaaatcaat

SEQ ID NO: 670122 - DNA, 19 bp, Mus musculus
  siRNA target sequence for Orc2l (NM_008765.2,1260-1278).
gaactctataactgaagat

SEQ ID NO: 670123 - DNA, 19 bp, Mus musculus
  siRNA target sequence for Orc2l (NM_008765.2,1288-1306).
catgtgggtactttccaaa

SEQ ID NO: 670124 - DNA, 19 bp, Mus musculus
  siRNA target sequence for Orc2l (NM_008765.2,1315-1333).
gatcagcgggactggataa

SEQ ID NO: 670125 - DNA, 19 bp, Mus musculus
  siRNA target sequence for Orc2l (NM_008765.2,1318-1336).
cagcgggactggataataa

SEQ ID NO: 670126 - DNA, 19 bp, Mus musculus
  siRNA target sequence for Orc2l (NM_008765.2,1323-1341).
ggactggataataaacaga

SEQ ID NO: 670127 - DNA, 19 bp, Mus musculus
  siRNA target sequence for Orc2l (NM_008765.2,1324-1342).
gactggataataaacagat

SEQ ID NO: 670128 - DNA, 19 bp, Mus musculus
  siRNA target sequence for Orc2l (NM_008765.2,1375-1393).
cttatccacaatttggata

SEQ ID NO: 670129 - DNA, 19 bp, Mus musculus
  siRNA target sequence for Orc2l (NM_008765.2,1389-1407).
ggatagccaaatgttaaga

SEQ ID NO: 670130 - DNA, 19 bp, Mus musculus
  siRNA target sequence for Orc2l (NM_008765.2,1445-1463).
cattacataacgtgtatct

SEQ ID NO: 670131 - DNA, 19 bp, Mus musculus
  siRNA target sequence for Orc2l (NM_008765.2,1533-1551).
gctttggtatgaaactact

SEQ ID NO: 670132 - DNA, 19 bp, Mus musculus
  siRNA target sequence for Orc2l (NM_008765.2,1534-1552).
ctttggtatgaaactacta

SEQ ID NO: 670133 - DNA, 19 bp, Mus musculus
  siRNA target sequence for Orc2l (NM_008765.2,1538-1556).
ggtatgaaactactacata

SEQ ID NO: 670134 - DNA, 19 bp, Mus musculus
  siRNA target sequence for Orc2l (NM_008765.2,1553-1571).
catacagtccttatactga

SEQ ID NO: 670135 - DNA, 19 bp, Mus musculus
  siRNA target sequence for Orc2l (NM_008765.2,1570-1588).
gaagaaacctcctatgaga

SEQ ID NO: 670136 - DNA, 19 bp, Mus musculus
  siRNA target sequence for Orc2l (NM_008765.2,1612-1630).
ggatctctgccacttagtt

SEQ ID NO: 670137 - DNA, 19 bp, Mus musculus
  siRNA target sequence for Orc2l (NM_008765.2,1661-1679).
ccaatgcaagggggatttt

SEQ ID NO: 670138 - DNA, 19 bp, Mus musculus
  siRNA target sequence for Orc2l (NM_008765.2,1672-1690).
gggattttcaggctactta

SEQ ID NO: 670139 - DNA, 19 bp, Mus musculus
  siRNA target sequence for Orc2l (NM_008765.2,1761-1779).
gtgtagggaagcattcctt

SEQ ID NO: 670140 - DNA, 19 bp, Mus musculus
  siRNA target sequence for Orc2l (NM_008765.2,1766-1784).
gggaagcattccttgttaa

SEQ ID NO: 670141 - DNA, 19 bp, Mus musculus
  siRNA target sequence for Orc2l (NM_008765.2,1800-1818).
ccgagcccagttaactgaa

SEQ ID NO: 670142 - DNA, 19 bp, Mus musculus
  siRNA target sequence for Orc2l (NM_008765.2,1801-1819).
cgagcccagttaactgaat

SEQ ID NO: 670143 - DNA, 19 bp, Mus musculus
  siRNA target sequence for Orc2l (NM_008765.2,1804-1822).
gcccagttaactgaattta

SEQ ID NO: 670144 - DNA, 19 bp, Mus musculus
  siRNA target sequence for Orc2l (NM_008765.2,1824-1842).
ggaccacaaacttataaga

SEQ ID NO: 670145 - DNA, 19 bp, Mus musculus
  siRNA target sequence for Orc2l (NM_008765.2,1883-1901).
ctgttgacagcggaatatt

SEQ ID NO: 670146 - DNA, 19 bp, Mus musculus
  siRNA target sequence for Orc2l (NM_008765.2,1892-1910).
gcggaatattggctgattt

SEQ ID NO: 670147 - DNA, 19 bp, Mus musculus
  siRNA target sequence for Orc2l (NM_008765.2,1894-1912).
ggaatattggctgatttct

SEQ ID NO: 670148 - DNA, 19 bp, Mus musculus
  siRNA target sequence for Orc2l (NM_008765.2,1895-1913).
gaatattggctgatttctt

SEQ ID NO: 670149 - DNA, 19 bp, Mus musculus
  siRNA target sequence for Pola2 (NM_008893.2,436-454).
gaagacatgccttactgta

SEQ ID NO: 670150 - DNA, 19 bp, Mus musculus
  siRNA target sequence for Pola2 (NM_008893.2,452-470).
gtagacatcctgaactctt

SEQ ID NO: 670151 - DNA, 19 bp, Mus musculus
  siRNA target sequence for Pola2 (NM_008893.2,457-475).
catcctgaactcttttgaa

SEQ ID NO: 670152 - DNA, 19 bp, Mus musculus
  siRNA target sequence for Pola2 (NM_008893.2,478-496).
cgaggttctgaacaaaaaa

SEQ ID NO: 670153 - DNA, 19 bp, Mus musculus
  siRNA target sequence for Pola2 (NM_008893.2,598-616).
gaccctcctaagctcttat

SEQ ID NO: 670154 - DNA, 19 bp, Mus musculus
  siRNA target sequence for Pola2 (NM_008893.2,602-620).
ctcctaagctcttatacca

SEQ ID NO: 670155 - DNA, 19 bp, Mus musculus
  siRNA target sequence for Pola2 (NM_008893.2,660-678).
cagaaacccccctaaccaa

SEQ ID NO: 670156 - DNA, 19 bp, Mus musculus
  siRNA target sequence for Pola2 (NM_008893.2,662-680).
gaaacccccctaaccaaaa

SEQ ID NO: 670157 - DNA, 19 bp, Mus musculus
  siRNA target sequence for Pola2 (NM_008893.2,741-759).
ctaccccctcccagaaata

SEQ ID NO: 670158 - DNA, 19 bp, Mus musculus
  siRNA target sequence for Pola2 (NM_008893.2,929-947).
gaagttctgaccagtaaga

SEQ ID NO: 670159 - DNA, 19 bp, Mus musculus
  siRNA target sequence for Pola2 (NM_008893.2,1014-1032).
cagcgcaagagcctgttat

SEQ ID NO: 670160 - DNA, 19 bp, Mus musculus
  siRNA target sequence for Pola2 (NM_008893.2,1017-1035).
cgcaagagcctgttattct

SEQ ID NO: 670161 - DNA, 19 bp, Mus musculus
  siRNA target sequence for Pola2 (NM_008893.2,1135-1153).
ggacctatcggaactcaaa

SEQ ID NO: 670162 - DNA, 19 bp, Mus musculus
  siRNA target sequence for Pola2 (NM_008893.2,1169-1187).
cctggacaggttgtaatta

SEQ ID NO: 670163 - DNA, 19 bp, Mus musculus
  siRNA target sequence for Pola2 (NM_008893.2,1173-1191).
gacaggttgtaattatgga

SEQ ID NO: 670164 - DNA, 19 bp, Mus musculus
  siRNA target sequence for Pola2 (NM_008893.2,1204-1222).
cactggtaggagacttact

SEQ ID NO: 670165 - DNA, 19 bp, Mus musculus
  siRNA target sequence for Pola2 (NM_008893.2,1243-1261).
cgtgccacttccgttctat

SEQ ID NO: 670166 - DNA, 19 bp, Mus musculus
  siRNA target sequence for Pola2 (NM_008893.2,1255-1273).
gttctatcagcctactgaa

SEQ ID NO: 670167 - DNA, 19 bp, Mus musculus
  siRNA target sequence for Pola2 (NM_008893.2,1281-1299).
gagcttctgagcagactat

SEQ ID NO: 670168 - DNA, 19 bp, Mus musculus
  siRNA target sequence for Pola2 (NM_008893.2,1413-1431).
gacctttcctggatgctaa

SEQ ID NO: 670169 - DNA, 19 bp, Mus musculus
  siRNA target sequence for Pola2 (NM_008893.2,1456-1474).
gttgacaagcccattcgaa

SEQ ID NO: 670170 - DNA, 19 bp, Mus musculus
  siRNA target sequence for Pola2 (NM_008893.2,1466-1484).
ccattcgaagacgttttca

SEQ ID NO: 670171 - DNA, 19 bp, Mus musculus
  siRNA target sequence for Pola2 (NM_008893.2,1467-1485).
cattcgaagacgttttcaa

SEQ ID NO: 670172 - DNA, 19 bp, Mus musculus
  siRNA target sequence for Pola2 (NM_008893.2,1472-1490).
gaagacgttttcaagcaat

SEQ ID NO: 670173 - DNA, 19 bp, Mus musculus
  siRNA target sequence for Pola2 (NM_008893.2,1525-1543).
cggctcccaccttgtcttt

SEQ ID NO: 670174 - DNA, 19 bp, Mus musculus
  siRNA target sequence for Pola2 (NM_008893.2,1652-1670).
ccctgcagcctctccataa

SEQ ID NO: 670175 - DNA, 19 bp, Mus musculus
  siRNA target sequence for Pola2 (NM_008893.2,1653-1671).
cctgcagcctctccataaa

SEQ ID NO: 670176 - DNA, 19 bp, Mus musculus
  siRNA target sequence for Pola2 (NM_008893.2,1745-1763).
gggacgtcagacagattca

SEQ ID NO: 670177 - DNA, 19 bp, Mus musculus
  siRNA target sequence for Pola2 (NM_008893.2,1758-1776).
gattcagccgagtccttaa

SEQ ID NO: 670178 - DNA, 19 bp, Mus musculus
  siRNA target sequence for Pola2 (NM_008893.2,1764-1782).
gccgagtccttaagcatat

SEQ ID NO: 670179 - DNA, 19 bp, Mus musculus
  siRNA target sequence for Pola2 (NM_008893.2,1767-1785).
gagtccttaagcatatcct

SEQ ID NO: 670180 - DNA, 19 bp, Mus musculus
  siRNA target sequence for Pola2 (NM_008893.2,1794-1812).
gaagttactacccacttta

SEQ ID NO: 670181 - DNA, 19 bp, Mus musculus
  siRNA target sequence for Pola2 (NM_008893.2,1833-1851).
ccatagactacgagaactt

SEQ ID NO: 670182 - DNA, 19 bp, Mus musculus
  siRNA target sequence for Pola2 (NM_008893.2,1838-1856).
gactacgagaacttctata

SEQ ID NO: 670183 - DNA, 19 bp, Mus musculus
  siRNA target sequence for Pola2 (NM_008893.2,1872-1890).
cggtcacccccgatgtctt

SEQ ID NO: 670184 - DNA, 19 bp, Mus musculus
  siRNA target sequence for Pola2 (NM_008893.2,1876-1894).
cacccccgatgtcttcata

SEQ ID NO: 670185 - DNA, 19 bp, Mus musculus
  siRNA target sequence for Pola2 (NM_008893.2,1900-1918).
gtccgagctgagatacttt

SEQ ID NO: 670186 - DNA, 19 bp, Mus musculus
  siRNA target sequence for Pola2 (NM_008893.2,1902-1920).
ccgagctgagatactttgt

SEQ ID NO: 670187 - DNA, 19 bp, Mus musculus
  siRNA target sequence for Pola2 (NM_008893.2,1904-1922).
gagctgagatactttgtga

SEQ ID NO: 670188 - DNA, 19 bp, Mus musculus
  siRNA target sequence for Pola2 (NM_008893.2,2058-2076).
cagcgcaggtggtcagaat

SEQ ID NO: 670189 - DNA, 19 bp, Mus musculus
  siRNA target sequence for Rad51ap1 (NM_009013.1,138-156).
cacctgtaaacaagtcaaa

SEQ ID NO: 670190 - DNA, 19 bp, Mus musculus
  siRNA target sequence for Rad51ap1 (NM_009013.1,163-181).
gccaaaggtattaaagcaa

SEQ ID NO: 670191 - DNA, 19 bp, Mus musculus
  siRNA target sequence for Rad51ap1 (NM_009013.1,188-206).
ccaaaacctaacttgaaga

SEQ ID NO: 670192 - DNA, 19 bp, Mus musculus
  siRNA target sequence for Rad51ap1 (NM_009013.1,277-295).
ccaaagaggtctagaagtt

SEQ ID NO: 670193 - DNA, 19 bp, Mus musculus
  siRNA target sequence for Rad51ap1 (NM_009013.1,478-496).
ggacgcctcgagtgttgaa

SEQ ID NO: 670194 - DNA, 19 bp, Mus musculus
  siRNA target sequence for Rad51ap1 (NM_009013.1,663-681).
gtgtgagaagaagtaaaga

SEQ ID NO: 670195 - DNA, 19 bp, Mus musculus
  siRNA target sequence for Rad51ap1 (NM_009013.1,754-772).
ggcatcagtgacttcagta

SEQ ID NO: 670196 - DNA, 19 bp, Mus musculus
  siRNA target sequence for Rad51ap1 (NM_009013.1,846-864).
ctaggaaaccagcaataat

SEQ ID NO: 670197 - DNA, 19 bp, Mus musculus
  siRNA target sequence for Rad51ap1 (NM_009013.1,999-1017).
cccgattagcgccagttaa

SEQ ID NO: 670198 - DNA, 19 bp, Mus musculus
  siRNA target sequence for Rnmt (NM_026440.2,122-140).
gtcccctccaggtggtaat

SEQ ID NO: 670199 - DNA, 19 bp, Mus musculus
  siRNA target sequence for Rnmt (NM_026440.2,124-142).
cccctccaggtggtaatga

SEQ ID NO: 670200 - DNA, 19 bp, Mus musculus
  siRNA target sequence for Rnmt (NM_026440.2,161-179).
gcagaggcttccagaaaat

SEQ ID NO: 670201 - DNA, 19 bp, Mus musculus
  siRNA target sequence for Rnmt (NM_026440.2,162-180).
cagaggcttccagaaaata

SEQ ID NO: 670202 - DNA, 19 bp, Mus musculus
  siRNA target sequence for Rnmt (NM_026440.2,195-213).
caagtagatcagccaaaaa

SEQ ID NO: 670203 - DNA, 19 bp, Mus musculus
  siRNA target sequence for Rnmt (NM_026440.2,224-242).
gtttggggaggatcttgta

SEQ ID NO: 670204 - DNA, 19 bp, Mus musculus
  siRNA target sequence for Rnmt (NM_026440.2,237-255).
cttgtagagcaaaattcga

SEQ ID NO: 670205 - DNA, 19 bp, Mus musculus
  siRNA target sequence for Rnmt (NM_026440.2,254-272).
gagttatgtgcaagattct

SEQ ID NO: 670206 - DNA, 19 bp, Mus musculus
  siRNA target sequence for Rnmt (NM_026440.2,286-304).
ggaaacttgatgttgaaat

SEQ ID NO: 670207 - DNA, 19 bp, Mus musculus
  siRNA target sequence for Rnmt (NM_026440.2,394-412).
cccttggtaggcttaacca

SEQ ID NO: 670208 - DNA, 19 bp, Mus musculus
  siRNA target sequence for Rnmt (NM_026440.2,490-508).
ccgtggctgcccactataa

SEQ ID NO: 670209 - DNA, 19 bp, Mus musculus
  siRNA target sequence for Rnmt (NM_026440.2,491-509).
cgtggctgcccactataat

SEQ ID NO: 670210 - DNA, 19 bp, Mus musculus
  siRNA target sequence for Rnmt (NM_026440.2,527-545).
cctggcgaagcgtagtcaa

SEQ ID NO: 670211 - DNA, 19 bp, Mus musculus
  siRNA target sequence for Rnmt (NM_026440.2,528-546).
ctggcgaagcgtagtcaaa

SEQ ID NO: 670212 - DNA, 19 bp, Mus musculus
  siRNA target sequence for Rnmt (NM_026440.2,530-548).
ggcgaagcgtagtcaaagt

SEQ ID NO: 670213 - DNA, 19 bp, Mus musculus
  siRNA target sequence for Rnmt (NM_026440.2,538-556).
gtagtcaaagtcgcatttt

SEQ ID NO: 670214 - DNA, 19 bp, Mus musculus
  siRNA target sequence for Rnmt (NM_026440.2,549-567).
cgcattttttacctaagaa

SEQ ID NO: 670215 - DNA, 19 bp, Mus musculus
  siRNA target sequence for Rnmt (NM_026440.2,580-598).
ggattaaaagtattctgat

SEQ ID NO: 670216 - DNA, 19 bp, Mus musculus
  siRNA target sequence for Rnmt (NM_026440.2,601-619).
gggaaattttagaaaaggt

SEQ ID NO: 670217 - DNA, 19 bp, Mus musculus
  siRNA target sequence for Rnmt (NM_026440.2,612-630).
gaaaaggtacgacaaagaa

SEQ ID NO: 670218 - DNA, 19 bp, Mus musculus
  siRNA target sequence for Rnmt (NM_026440.2,634-652).
cccgtgacatcactgtttt

SEQ ID NO: 670219 - DNA, 19 bp, Mus musculus
  siRNA target sequence for Rnmt (NM_026440.2,723-741).
gctgatatcgctgatattt

SEQ ID NO: 670220 - DNA, 19 bp, Mus musculus
  siRNA target sequence for Rnmt (NM_026440.2,726-744).
gatatcgctgatatttcta

SEQ ID NO: 670221 - DNA, 19 bp, Mus musculus
  siRNA target sequence for Rnmt (NM_026440.2,731-749).
cgctgatatttctatgaaa

SEQ ID NO: 670222 - DNA, 19 bp, Mus musculus
  siRNA target sequence for Rnmt (NM_026440.2,762-780).
cgttacgaagacatgagat

SEQ ID NO: 670223 - DNA, 19 bp, Mus musculus
  siRNA target sequence for Rnmt (NM_026440.2,776-794).
gagatgtcgtcgcgataat

SEQ ID NO: 670224 - DNA, 19 bp, Mus musculus
  siRNA target sequence for Rnmt (NM_026440.2,778-796).
gatgtcgtcgcgataatga

SEQ ID NO: 670225 - DNA, 19 bp, Mus musculus
  siRNA target sequence for Rnmt (NM_026440.2,784-802).
gtcgcgataatgagcatat

SEQ ID NO: 670226 - DNA, 19 bp, Mus musculus
  siRNA target sequence for Rnmt (NM_026440.2,832-850).
gttcaaaggaacttttggt

SEQ ID NO: 670227 - DNA, 19 bp, Mus musculus
  siRNA target sequence for Rnmt (NM_026440.2,933-951).
caggcggatacgatgctta

SEQ ID NO: 670228 - DNA, 19 bp, Mus musculus
  siRNA target sequence for Rnmt (NM_026440.2,936-954).
gcggatacgatgcttagaa

SEQ ID NO: 670229 - DNA, 19 bp, Mus musculus
  siRNA target sequence for Rnmt (NM_026440.2,937-955).
cggatacgatgcttagaaa

SEQ ID NO: 670230 - DNA, 19 bp, Mus musculus
  siRNA target sequence for Rnmt (NM_026440.2,938-956).
ggatacgatgcttagaaat

SEQ ID NO: 670231 - DNA, 19 bp, Mus musculus
  siRNA target sequence for Rnmt (NM_026440.2,993-1011).
ggcaccactcccaatagct

SEQ ID NO: 670232 - DNA, 19 bp, Mus musculus
  siRNA target sequence for Rnmt (NM_026440.2,998-1016).
cactcccaatagctttgaa

SEQ ID NO: 670233 - DNA, 19 bp, Mus musculus
  siRNA target sequence for Rnmt (NM_026440.2,1004-1022).
caatagctttgaactgata

SEQ ID NO: 670234 - DNA, 19 bp, Mus musculus
  siRNA target sequence for Rnmt (NM_026440.2,1062-1080).
gaaatatacactgtgaaat

SEQ ID NO: 670235 - DNA, 19 bp, Mus musculus
  siRNA target sequence for Rnmt (NM_026440.2,1101-1119).
cctttatttggctgcaaat

SEQ ID NO: 670236 - DNA, 19 bp, Mus musculus
  siRNA target sequence for Rnmt (NM_026440.2,1191-1209).
gcaaagaagtataatatga

SEQ ID NO: 670237 - DNA, 19 bp, Mus musculus
  siRNA target sequence for Rnmt (NM_026440.2,1401-1419).
cctctgggaaccttaagta

SEQ ID NO: 670238 - DNA, 19 bp, Mus musculus
  siRNA target sequence for Rnmt (NM_026440.2,1402-1420).
ctctgggaaccttaagtaa

SEQ ID NO: 670239 - DNA, 19 bp, Mus musculus
  siRNA target sequence for Rnmt (NM_026440.2,1404-1422).
ctgggaaccttaagtaagt

SEQ ID NO: 670240 - DNA, 19 bp, Mus musculus
  siRNA target sequence for Rnmt (NM_026440.2,1406-1424).
gggaaccttaagtaagtca

SEQ ID NO: 670241 - DNA, 19 bp, Mus musculus
  siRNA target sequence for Rnmt (NM_026440.2,1429-1447).
gggaagctacaagtatcta

SEQ ID NO: 670242 - DNA, 19 bp, Mus musculus
  siRNA target sequence for 2610031L17Rik (NM_133701.1,176-194).
ctgctcgggatgcaaatga

SEQ ID NO: 670243 - DNA, 19 bp, Mus musculus
  siRNA target sequence for 2610031L17Rik (NM_133701.1,214-232).
gccccaccagggaagagaa

SEQ ID NO: 670244 - DNA, 19 bp, Mus musculus
  siRNA target sequence for 2610031L17Rik (NM_133701.1,237-255).
gggggaccagatgaagaaa

SEQ ID NO: 670245 - DNA, 19 bp, Mus musculus
  siRNA target sequence for 2610031L17Rik (NM_133701.1,296-314).
ccaactacgatgagtttaa

SEQ ID NO: 670246 - DNA, 19 bp, Mus musculus
  siRNA target sequence for 2610031L17Rik (NM_133701.1,386-404).
cagctctggataaaaggat

SEQ ID NO: 670247 - DNA, 19 bp, Mus musculus
  siRNA target sequence for 2610031L17Rik (NM_133701.1,477-495).
caaaatccagcagcaattt

SEQ ID NO: 670248 - DNA, 19 bp, Mus musculus
  siRNA target sequence for 2610031L17Rik (NM_133701.1,556-574).
gttggcgatgccagaaaca

SEQ ID NO: 670249 - DNA, 19 bp, Mus musculus
  siRNA target sequence for 2610031L17Rik (NM_133701.1,583-601).
cggaacccacgttatgaga

SEQ ID NO: 670250 - DNA, 19 bp, Mus musculus
  siRNA target sequence for 2610031L17Rik (NM_133701.1,584-602).
ggaacccacgttatgagaa

SEQ ID NO: 670251 - DNA, 19 bp, Mus musculus
  siRNA target sequence for 2610031L17Rik (NM_133701.1,670-688).
gatccccgacagactcaat

SEQ ID NO: 670252 - DNA, 19 bp, Mus musculus
  siRNA target sequence for 2610031L17Rik (NM_133701.1,675-693).
ccgacagactcaatttgga

SEQ ID NO: 670253 - DNA, 19 bp, Mus musculus
  siRNA target sequence for 2610031L17Rik (NM_133701.1,795-813).
gattggccaggcaaggaat

SEQ ID NO: 670254 - DNA, 19 bp, Mus musculus
  siRNA target sequence for 2610031L17Rik (NM_133701.1,883-901).
ggctacctgacagatctaa

SEQ ID NO: 670255 - DNA, 19 bp, Mus musculus
  siRNA target sequence for 2610031L17Rik (NM_133701.1,884-902).
gctacctgacagatctaaa

SEQ ID NO: 670256 - DNA, 19 bp, Mus musculus
  siRNA target sequence for 2610031L17Rik (NM_133701.1,949-967).
gcacgactacttctcaaat

SEQ ID NO: 670257 - DNA, 19 bp, Mus musculus
  siRNA target sequence for 2610031L17Rik (NM_133701.1,953-971).
gactacttctcaaatctgt

SEQ ID NO: 670258 - DNA, 19 bp, Mus musculus
  siRNA target sequence for 2610031L17Rik (NM_133701.1,994-1012).
ccaccagcttggattgcat

SEQ ID NO: 670259 - DNA, 19 bp, Mus musculus
  siRNA target sequence for 2610031L17Rik (NM_133701.1,1045-1063).
caagtagctcgaaacctta

SEQ ID NO: 670260 - DNA, 19 bp, Mus musculus
  siRNA target sequence for 2610031L17Rik (NM_133701.1,1051-1069).
gctcgaaaccttattatga

SEQ ID NO: 670261 - DNA, 19 bp, Mus musculus
  siRNA target sequence for 2610031L17Rik (NM_133701.1,1052-1070).
ctcgaaaccttattatgaa

SEQ ID NO: 670262 - DNA, 19 bp, Mus musculus
  siRNA target sequence for 2610031L17Rik (NM_133701.1,1085-1103).
gccccaagagtgaagatgt

SEQ ID NO: 670263 - DNA, 19 bp, Mus musculus
  siRNA target sequence for 2610031L17Rik (NM_133701.1,1107-1125).
gctagaagcagctaggtta

SEQ ID NO: 670264 - DNA, 19 bp, Mus musculus
  siRNA target sequence for 2610031L17Rik (NM_133701.1,1176-1194).
cccgcagtctgttaggatt

SEQ ID NO: 670265 - DNA, 19 bp, Mus musculus
  siRNA target sequence for 2610031L17Rik (NM_133701.1,1177-1195).
ccgcagtctgttaggattt

SEQ ID NO: 670266 - DNA, 19 bp, Mus musculus
  siRNA target sequence for 2610031L17Rik (NM_133701.1,1178-1196).
cgcagtctgttaggattta

SEQ ID NO: 670267 - DNA, 19 bp, Mus musculus
  siRNA target sequence for 2610031L17Rik (NM_133701.1,1220-1238).
cagacattcgagcaaagaa

SEQ ID NO: 670268 - DNA, 19 bp, Mus musculus
  siRNA target sequence for 2610031L17Rik (NM_133701.1,1380-1398).
gcttgctttggcaagacta

SEQ ID NO: 670269 - DNA, 19 bp, Mus musculus
  siRNA target sequence for 2610031L17Rik (NM_133701.1,1384-1402).
gctttggcaagactagaaa

SEQ ID NO: 670270 - DNA, 19 bp, Mus musculus
  siRNA target sequence for 2610031L17Rik (NM_133701.1,1414-1432).
gctcgcaaggtcttaaata

SEQ ID NO: 670271 - DNA, 19 bp, Mus musculus
  siRNA target sequence for 2610031L17Rik (NM_133701.1,1553-1571).
gggccaatggtgtagagat

SEQ ID NO: 670272 - DNA, 19 bp, Mus musculus
  siRNA target sequence for 2610031L17Rik (NM_133701.1,1556-1574).
ccaatggtgtagagatcaa

SEQ ID NO: 670273 - DNA, 19 bp, Mus musculus
  siRNA target sequence for 2610031L17Rik (NM_133701.1,1800-1818).
gttacgagctgcctacttt

SEQ ID NO: 670274 - DNA, 19 bp, Mus musculus
  siRNA target sequence for 2610031L17Rik (NM_133701.1,2084-2102).
cacccactgcccgtgtatt

SEQ ID NO: 670275 - DNA, 19 bp, Mus musculus
  siRNA target sequence for 2610031L17Rik (NM_133701.1,2086-2104).
cccactgcccgtgtattca

SEQ ID NO: 670276 - DNA, 19 bp, Mus musculus
  siRNA target sequence for 2610031L17Rik (NM_133701.1,2092-2110).
gcccgtgtattcatgaagt

SEQ ID NO: 670277 - DNA, 19 bp, Mus musculus
  siRNA target sequence for 2610031L17Rik (NM_133701.1,2319-2337).
ccgactagaggaaaagatt

SEQ ID NO: 670278 - DNA, 19 bp, Mus musculus
  siRNA target sequence for 2610031L17Rik (NM_133701.1,2348-2366).
cacgtgctcgggccatttt

SEQ ID NO: 670279 - DNA, 19 bp, Mus musculus
  siRNA target sequence for 2610031L17Rik (NM_133701.1,2351-2369).
gtgctcgggccattttaga

SEQ ID NO: 670280 - DNA, 19 bp, Mus musculus
  siRNA target sequence for 2610031L17Rik (NM_133701.1,2353-2371).
gctcgggccattttagaga

SEQ ID NO: 670281 - DNA, 19 bp, Mus musculus
  siRNA target sequence for 2610031L17Rik (NM_133701.1,2354-2372).
ctcgggccattttagagaa

SEQ ID NO: 670282 - DNA, 19 bp, Mus musculus
  siRNA target sequence for 2610031L17Rik (NM_133701.1,2605-2623).
gctgtggctaagttgttct

SEQ ID NO: 670283 - DNA, 19 bp, Mus musculus
  siRNA target sequence for 2610031L17Rik (NM_133701.1,2807-2825).
gtgctgtgtccaaggatat

SEQ ID NO: 670284 - DNA, 19 bp, Mus musculus
  siRNA target sequence for 2610031L17Rik (NM_133701.1,2840-2858).
ggaagattggggaaatcct

SEQ ID NO: 670285 - DNA, 19 bp, Mus musculus
  siRNA target sequence for Crnkl1 (NM_025820.1,119-137).
gggaaacagcgcattccta

SEQ ID NO: 670286 - DNA, 19 bp, Mus musculus
  siRNA target sequence for Crnkl1 (NM_025820.1,120-138).
ggaaacagcgcattcctaa

SEQ ID NO: 670287 - DNA, 19 bp, Mus musculus
  siRNA target sequence for Crnkl1 (NM_025820.1,368-386).
gaggaaagtctaaaggaaa

SEQ ID NO: 670288 - DNA, 19 bp, Mus musculus
  siRNA target sequence for Crnkl1 (NM_025820.1,422-440).
gatgtcgactaccgaaata

SEQ ID NO: 670289 - DNA, 19 bp, Mus musculus
  siRNA target sequence for Crnkl1 (NM_025820.1,425-443).
gtcgactaccgaaatatta

SEQ ID NO: 670290 - DNA, 19 bp, Mus musculus
  siRNA target sequence for Crnkl1 (NM_025820.1,750-768).
ggatcaagtacgcaagatt

SEQ ID NO: 670291 - DNA, 19 bp, Mus musculus
  siRNA target sequence for Crnkl1 (NM_025820.1,751-769).
gatcaagtacgcaagattt

SEQ ID NO: 670292 - DNA, 19 bp, Mus musculus
  siRNA target sequence for Crnkl1 (NM_025820.1,754-772).
caagtacgcaagatttgaa

SEQ ID NO: 670293 - DNA, 19 bp, Mus musculus
  siRNA target sequence for Crnkl1 (NM_025820.1,1008-1026).
ggaggggtatagaagacat

SEQ ID NO: 670294 - DNA, 19 bp, Mus musculus
  siRNA target sequence for Crnkl1 (NM_025820.1,1088-1106).
gatgcatggtttgattatt

SEQ ID NO: 670295 - DNA, 19 bp, Mus musculus
  siRNA target sequence for Crnkl1 (NM_025820.1,1294-1312).
gtctttggaactaattcct

SEQ ID NO: 670296 - DNA, 19 bp, Mus musculus
  siRNA target sequence for Crnkl1 (NM_025820.1,1701-1719).
gaaacctttaccgacaatt

SEQ ID NO: 670297 - DNA, 19 bp, Mus musculus
  siRNA target sequence for Crnkl1 (NM_025820.1,1901-1919).
gatgaatttggcacagtat

SEQ ID NO: 670298 - DNA, 19 bp, Mus musculus
  siRNA target sequence for Crnkl1 (NM_025820.1,2002-2020).
cgggtgggaagaatactat

SEQ ID NO: 670299 - DNA, 19 bp, Mus musculus
  siRNA target sequence for Crnkl1 (NM_025820.1,2004-2022).
ggtgggaagaatactatga

SEQ ID NO: 670300 - DNA, 19 bp, Mus musculus
  siRNA target sequence for Crnkl1 (NM_025820.1,2007-2025).
gggaagaatactatgacta

SEQ ID NO: 670301 - DNA, 19 bp, Mus musculus
  siRNA target sequence for Crnkl1 (NM_025820.1,2149-2167).
gagtgaatcctcatctttt

SEQ ID NO: 670302 - DNA, 19 bp, Mus musculus
  siRNA target sequence for Sf3b1 (NM_031179.1,150-168).
gccaagactcacgaagata

SEQ ID NO: 670303 - DNA, 19 bp, Mus musculus
  siRNA target sequence for Sf3b1 (NM_031179.1,151-169).
ccaagactcacgaagatat

SEQ ID NO: 670304 - DNA, 19 bp, Mus musculus
  siRNA target sequence for Sf3b1 (NM_031179.1,155-173).
gactcacgaagatatcgaa

SEQ ID NO: 670305 - DNA, 19 bp, Mus musculus
  siRNA target sequence for Sf3b1 (NM_031179.1,175-193).
cacagattcgagaaattca

SEQ ID NO: 670306 - DNA, 19 bp, Mus musculus
  siRNA target sequence for Sf3b1 (NM_031179.1,283-301).
gcagatttgctggatatgt

SEQ ID NO: 670307 - DNA, 19 bp, Mus musculus
  siRNA target sequence for Sf3b1 (NM_031179.1,291-309).
gctggatatgtgacatcaa

SEQ ID NO: 670308 - DNA, 19 bp, Mus musculus
  siRNA target sequence for Sf3b1 (NM_031179.1,316-334).
caactgaacttgaagatga

SEQ ID NO: 670309 - DNA, 19 bp, Mus musculus
  siRNA target sequence for Sf3b1 (NM_031179.1,336-354).
gacgatgactactcatcat

SEQ ID NO: 670310 - DNA, 19 bp, Mus musculus
  siRNA target sequence for Sf3b1 (NM_031179.1,361-379).
gcttgctcggtcagaagaa

SEQ ID NO: 670311 - DNA, 19 bp, Mus musculus
  siRNA target sequence for Sf3b1 (NM_031179.1,397-415).
ccgtggcgttgcttaatga

SEQ ID NO: 670312 - DNA, 19 bp, Mus musculus
  siRNA target sequence for Sf3b1 (NM_031179.1,398-416).
cgtggcgttgcttaatgat

SEQ ID NO: 670313 - DNA, 19 bp, Mus musculus
  siRNA target sequence for Sf3b1 (NM_031179.1,399-417).
gtggcgttgcttaatgata

SEQ ID NO: 670314 - DNA, 19 bp, Mus musculus
  siRNA target sequence for Sf3b1 (NM_031179.1,401-419).
ggcgttgcttaatgatata

SEQ ID NO: 670315 - DNA, 19 bp, Mus musculus
  siRNA target sequence for Sf3b1 (NM_031179.1,404-422).
gttgcttaatgatatacca

SEQ ID NO: 670316 - DNA, 19 bp, Mus musculus
  siRNA target sequence for Sf3b1 (NM_031179.1,425-443).
gtcaacagagcagtatgat

SEQ ID NO: 670317 - DNA, 19 bp, Mus musculus
  siRNA target sequence for Sf3b1 (NM_031179.1,430-448).
cagagcagtatgatccatt

SEQ ID NO: 670318 - DNA, 19 bp, Mus musculus
  siRNA target sequence for Sf3b1 (NM_031179.1,434-452).
gcagtatgatccatttgct

SEQ ID NO: 670319 - DNA, 19 bp, Mus musculus
  siRNA target sequence for Sf3b1 (NM_031179.1,455-473).
gcatcgtcctccaaagatt

SEQ ID NO: 670320 - DNA, 19 bp, Mus musculus
  siRNA target sequence for Sf3b1 (NM_031179.1,474-492).
gccgatcgggaagatgaat

SEQ ID NO: 670321 - DNA, 19 bp, Mus musculus
  siRNA target sequence for Sf3b1 (NM_031179.1,475-493).
ccgatcgggaagatgaata

SEQ ID NO: 670322 - DNA, 19 bp, Mus musculus
  siRNA target sequence for Sf3b1 (NM_031179.1,500-518).
gcataggcggaccatgata

SEQ ID NO: 670323 - DNA, 19 bp, Mus musculus
  siRNA target sequence for Sf3b1 (NM_031179.1,526-544).
cagagcgtcttgatccttt

SEQ ID NO: 670324 - DNA, 19 bp, Mus musculus
  siRNA target sequence for Sf3b1 (NM_031179.1,586-604).
gaacctacatggatgttat

SEQ ID NO: 670325 - DNA, 19 bp, Mus musculus
  siRNA target sequence for Sf3b1 (NM_031179.1,596-614).
ggatgttatgcgagaacaa

SEQ ID NO: 670326 - DNA, 19 bp, Mus musculus
  siRNA target sequence for Sf3b1 (NM_031179.1,600-618).
gttatgcgagaacaacatt

SEQ ID NO: 670327 - DNA, 19 bp, Mus musculus
  siRNA target sequence for Sf3b1 (NM_031179.1,605-623).
gcgagaacaacatttgact

SEQ ID NO: 670328 - DNA, 19 bp, Mus musculus
  siRNA target sequence for Sf3b1 (NM_031179.1,606-624).
cgagaacaacatttgacta

SEQ ID NO: 670329 - DNA, 19 bp, Mus musculus
  siRNA target sequence for Sf3b1 (NM_031179.1,634-652).
gagaaattaggcaacaact

SEQ ID NO: 670330 - DNA, 19 bp, Mus musculus
  siRNA target sequence for Sf3b1 (NM_031179.1,643-661).
ggcaacaactagcagaaaa

SEQ ID NO: 670331 - DNA, 19 bp, Mus musculus
  siRNA target sequence for Sf3b1 (NM_031179.1,644-662).
gcaacaactagcagaaaaa

SEQ ID NO: 670332 - DNA, 19 bp, Mus musculus
  siRNA target sequence for Sf3b1 (NM_031179.1,708-726).
cagcctccctcaaaacgaa

SEQ ID NO: 670333 - DNA, 19 bp, Mus musculus
  siRNA target sequence for Sf3b1 (NM_031179.1,765-783).
gccactcccaaaaagctat

SEQ ID NO: 670334 - DNA, 19 bp, Mus musculus
  siRNA target sequence for Sf3b1 (NM_031179.1,808-826).
ctgggcataccccatcttt

SEQ ID NO: 670335 - DNA, 19 bp, Mus musculus
  siRNA target sequence for Sf3b1 (NM_031179.1,812-830).
gcataccccatctttaaga

SEQ ID NO: 670336 - DNA, 19 bp, Mus musculus
  siRNA target sequence for Sf3b1 (NM_031179.1,839-857).
gacaccgggtcgtgcaaaa

SEQ ID NO: 670337 - DNA, 19 bp, Mus musculus
  siRNA target sequence for Sf3b1 (NM_031179.1,875-893).
cgcaaccccaggctcaaaa

SEQ ID NO: 670338 - DNA, 19 bp, Mus musculus
  siRNA target sequence for Sf3b1 (NM_031179.1,877-895).
caaccccaggctcaaaaat

SEQ ID NO: 670339 - DNA, 19 bp, Mus musculus
  siRNA target sequence for Sf3b1 (NM_031179.1,900-918).
gaccctacaccgagtcata

SEQ ID NO: 670340 - DNA, 19 bp, Mus musculus
  siRNA target sequence for Sf3b1 (NM_031179.1,902-920).
ccctacaccgagtcataca

SEQ ID NO: 670341 - DNA, 19 bp, Mus musculus
  siRNA target sequence for Sf3b1 (NM_031179.1,1306-1324).
gagaaattgatgaacgaaa

SEQ ID NO: 670342 - DNA, 19 bp, Mus musculus
  siRNA target sequence for Sf3b1 (NM_031179.1,1321-1339).
gaaaccgcccactttctga

SEQ ID NO: 670343 - DNA, 19 bp, Mus musculus
  siRNA target sequence for Sf3b1 (NM_031179.1,1325-1343).
ccgcccactttctgatgaa

SEQ ID NO: 670344 - DNA, 19 bp, Mus musculus
  siRNA target sequence for Sf3b1 (NM_031179.1,1327-1345).
gcccactttctgatgaaga

SEQ ID NO: 670345 - DNA, 19 bp, Mus musculus
  siRNA target sequence for Sf3b1 (NM_031179.1,1492-1510).
ctatgaaaagtgtcaatga

SEQ ID NO: 670346 - DNA, 19 bp, Mus musculus
  siRNA target sequence for Sf3b1 (NM_031179.1,1511-1529).
ccagccatctgggaatctt

SEQ ID NO: 670347 - DNA, 19 bp, Mus musculus
  siRNA target sequence for Sf3b1 (NM_031179.1,1581-1599).
gtagatgaatcaacactta

SEQ ID NO: 670348 - DNA, 19 bp, Mus musculus
  siRNA target sequence for Sf3b1 (NM_031179.1,1657-1675).
gtacacctccaatgagaaa

SEQ ID NO: 670349 - DNA, 19 bp, Mus musculus
  siRNA target sequence for Sf3b1 (NM_031179.1,1676-1694).
ggctgccttacgtcagatt

SEQ ID NO: 670350 - DNA, 19 bp, Mus musculus
  siRNA target sequence for Sf3b1 (NM_031179.1,1677-1695).
gctgccttacgtcagatta

SEQ ID NO: 670351 - DNA, 19 bp, Mus musculus
  siRNA target sequence for Sf3b1 (NM_031179.1,1681-1699).
ccttacgtcagattactga

SEQ ID NO: 670352 - DNA, 19 bp, Mus musculus
  siRNA target sequence for Sf3b1 (NM_031179.1,1682-1700).
cttacgtcagattactgat

SEQ ID NO: 670353 - DNA, 19 bp, Mus musculus
  siRNA target sequence for Sf3b1 (NM_031179.1,1720-1738).
ctggaccactgtttaacca

SEQ ID NO: 670354 - DNA, 19 bp, Mus musculus
  siRNA target sequence for Sf3b1 (NM_031179.1,1772-1790).
ggatcaagagcgacattta

SEQ ID NO: 670355 - DNA, 19 bp, Mus musculus
  siRNA target sequence for Sf3b1 (NM_031179.1,1781-1799).
gcgacatttacttgtgaaa

SEQ ID NO: 670356 - DNA, 19 bp, Mus musculus
  siRNA target sequence for Sf3b1 (NM_031179.1,1791-1809).
cttgtgaaagttattgata

SEQ ID NO: 670357 - DNA, 19 bp, Mus musculus
  siRNA target sequence for Sf3b1 (NM_031179.1,1794-1812).
gtgaaagttattgatagaa

SEQ ID NO: 670358 - DNA, 19 bp, Mus musculus
  siRNA target sequence for Sf3b1 (NM_031179.1,1871-1889).
cgagccactgttgattgat

SEQ ID NO: 670359 - DNA, 19 bp, Mus musculus
  siRNA target sequence for Sf3b1 (NM_031179.1,1874-1892).
gccactgttgattgatgaa

SEQ ID NO: 670360 - DNA, 19 bp, Mus musculus
  siRNA target sequence for Sf3b1 (NM_031179.1,1878-1896).
ctgttgattgatgaagatt

SEQ ID NO: 670361 - DNA, 19 bp, Mus musculus
  siRNA target sequence for Sf3b1 (NM_031179.1,1910-1928).
ggaaggccgagagattatt

SEQ ID NO: 670362 - DNA, 19 bp, Mus musculus
  siRNA target sequence for Sf3b1 (NM_031179.1,1911-1929).
gaaggccgagagattattt

SEQ ID NO: 670363 - DNA, 19 bp, Mus musculus
  siRNA target sequence for Sf3b1 (NM_031179.1,1914-1932).
ggccgagagattatttcta

SEQ ID NO: 670364 - DNA, 19 bp, Mus musculus
  siRNA target sequence for Sf3b1 (NM_031179.1,1915-1933).
gccgagagattatttctaa

SEQ ID NO: 670365 - DNA, 19 bp, Mus musculus
  siRNA target sequence for Sf3b1 (NM_031179.1,1916-1934).
ccgagagattatttctaat

SEQ ID NO: 670366 - DNA, 19 bp, Mus musculus
  siRNA target sequence for Sf3b1 (NM_031179.1,1945-1963).
ctgctggtctggctactat

SEQ ID NO: 670367 - DNA, 19 bp, Mus musculus
  siRNA target sequence for Sf3b1 (NM_031179.1,1948-1966).
ctggtctggctactatgat

SEQ ID NO: 670368 - DNA, 19 bp, Mus musculus
  siRNA target sequence for Sf3b1 (NM_031179.1,1950-1968).
ggtctggctactatgattt

SEQ ID NO: 670369 - DNA, 19 bp, Mus musculus
  siRNA target sequence for Sf3b1 (NM_031179.1,1953-1971).
ctggctactatgatttcta

SEQ ID NO: 670370 - DNA, 19 bp, Mus musculus
  siRNA target sequence for Sf3b1 (NM_031179.1,1973-1991).
catgagacctgatatagat

SEQ ID NO: 670371 - DNA, 19 bp, Mus musculus
  siRNA target sequence for Sf3b1 (NM_031179.1,2088-2106).
gtgtgcaaaagcaagaagt

SEQ ID NO: 670372 - DNA, 19 bp, Mus musculus
  siRNA target sequence for Sf3b1 (NM_031179.1,2115-2133).
gcgaggcacactggtatta

SEQ ID NO: 670373 - DNA, 19 bp, Mus musculus
  siRNA target sequence for Sf3b1 (NM_031179.1,2116-2134).
cgaggcacactggtattaa

SEQ ID NO: 670374 - DNA, 19 bp, Mus musculus
  siRNA target sequence for Sf3b1 (NM_031179.1,2119-2137).
ggcacactggtattaagat

SEQ ID NO: 670375 - DNA, 19 bp, Mus musculus
  siRNA target sequence for Sf3b1 (NM_031179.1,2120-2138).
gcacactggtattaagatt

SEQ ID NO: 670376 - DNA, 19 bp, Mus musculus
  siRNA target sequence for Sf3b1 (NM_031179.1,2123-2141).
cactggtattaagattgta

SEQ ID NO: 670377 - DNA, 19 bp, Mus musculus
  siRNA target sequence for Sf3b1 (NM_031179.1,2128-2146).
gtattaagattgtacaaca

SEQ ID NO: 670378 - DNA, 19 bp, Mus musculus
  siRNA target sequence for Sf3b1 (NM_031179.1,2195-2213).
ggttgaaatcattgaacat

SEQ ID NO: 670379 - DNA, 19 bp, Mus musculus
  siRNA target sequence for Sf3b1 (NM_031179.1,2279-2297).
ggcagcaactccttatggt

SEQ ID NO: 670380 - DNA, 19 bp, Mus musculus
  siRNA target sequence for Sf3b1 (NM_031179.1,2280-2298).
gcagcaactccttatggta

SEQ ID NO: 670381 - DNA, 19 bp, Mus musculus
  siRNA target sequence for Sf3b1 (NM_031179.1,2281-2299).
cagcaactccttatggtat

SEQ ID NO: 670382 - DNA, 19 bp, Mus musculus
  siRNA target sequence for Sf3b1 (NM_031179.1,2284-2302).
caactccttatggtattga

SEQ ID NO: 670383 - DNA, 19 bp, Mus musculus
  siRNA target sequence for Sf3b1 (NM_031179.1,2290-2308).
cttatggtattgagtcttt

SEQ ID NO: 670384 - DNA, 19 bp, Mus musculus
  siRNA target sequence for Sf3b1 (NM_031179.1,2295-2313).
ggtattgagtcttttgatt

SEQ ID NO: 670385 - DNA, 19 bp, Mus musculus
  siRNA target sequence for Sf3b1 (NM_031179.1,2378-2396).
gaaggctattgggtatctt

SEQ ID NO: 670386 - DNA, 19 bp, Mus musculus
  siRNA target sequence for Sf3b1 (NM_031179.1,2415-2433).
gaatatgccaactactata

SEQ ID NO: 670387 - DNA, 19 bp, Mus musculus
  siRNA target sequence for Sf3b1 (NM_031179.1,2423-2441).
caactactatactagagaa

SEQ ID NO: 670388 - DNA, 19 bp, Mus musculus
  siRNA target sequence for Sf3b1 (NM_031179.1,2530-2548).
ctgatggtgtagaagcaaa

SEQ ID NO: 670389 - DNA, 19 bp, Mus musculus
  siRNA target sequence for Sf3b1 (NM_031179.1,2535-2553).
ggtgtagaagcaaactaca

SEQ ID NO: 670390 - DNA, 19 bp, Mus musculus
  siRNA target sequence for Sf3b1 (NM_031179.1,2536-2554).
gtgtagaagcaaactacat

SEQ ID NO: 670391 - DNA, 19 bp, Mus musculus
  siRNA target sequence for Sf3b1 (NM_031179.1,2538-2556).
gtagaagcaaactacatta

SEQ ID NO: 670392 - DNA, 19 bp, Mus musculus
  siRNA target sequence for Sf3b1 (NM_031179.1,2549-2567).
ctacattaaaacagagatt

SEQ ID NO: 670393 - DNA, 19 bp, Mus musculus
  siRNA target sequence for Sf3b1 (NM_031179.1,2628-2646).
cgacagttagttgatacaa

SEQ ID NO: 670394 - DNA, 19 bp, Mus musculus
  siRNA target sequence for Sf3b1 (NM_031179.1,2647-2665).
ctgtggagttggcaaacaa

SEQ ID NO: 670395 - DNA, 19 bp, Mus musculus
  siRNA target sequence for Sf3b1 (NM_031179.1,2673-2691).
gcagcagagatcatatcta

SEQ ID NO: 670396 - DNA, 19 bp, Mus musculus
  siRNA target sequence for Sf3b1 (NM_031179.1,2681-2699).
gatcatatctaggattgtt

SEQ ID NO: 670397 - DNA, 19 bp, Mus musculus
  siRNA target sequence for Sf3b1 (NM_031179.1,2684-2702).
catatctaggattgttgat

SEQ ID NO: 670398 - DNA, 19 bp, Mus musculus
  siRNA target sequence for Sf3b1 (NM_031179.1,2689-2707).
ctaggattgttgatgatct

SEQ ID NO: 670399 - DNA, 19 bp, Mus musculus
  siRNA target sequence for Sf3b1 (NM_031179.1,2692-2710).
ggattgttgatgatctgaa

SEQ ID NO: 670400 - DNA, 19 bp, Mus musculus
  siRNA target sequence for Sf3b1 (NM_031179.1,2756-2774).
gaaaattatgggtaatcta

SEQ ID NO: 670401 - DNA, 19 bp, Mus musculus
  siRNA target sequence for Sf3b1 (NM_031179.1,2779-2797).
cagcagatattgaccataa

SEQ ID NO: 670402 - DNA, 19 bp, Mus musculus
  siRNA target sequence for Sf3b1 (NM_031179.1,2817-2835).
gatggtattctctatgctt

SEQ ID NO: 670403 - DNA, 19 bp, Mus musculus
  siRNA target sequence for Sf3b1 (NM_031179.1,2846-2864).
gactacagaggattcagta

SEQ ID NO: 670404 - DNA, 19 bp, Mus musculus
  siRNA target sequence for Sf3b1 (NM_031179.1,2848-2866).
ctacagaggattcagtaat

SEQ ID NO: 670405 - DNA, 19 bp, Mus musculus
  siRNA target sequence for Sf3b1 (NM_031179.1,2851-2869).
cagaggattcagtaatgtt

SEQ ID NO: 670406 - DNA, 19 bp, Mus musculus
  siRNA target sequence for Sf3b1 (NM_031179.1,2874-2892).
ggctttggcacagtagtta

SEQ ID NO: 670407 - DNA, 19 bp, Mus musculus
  siRNA target sequence for Sf3b1 (NM_031179.1,2875-2893).
gctttggcacagtagttaa

SEQ ID NO: 670408 - DNA, 19 bp, Mus musculus
  siRNA target sequence for Sf3b1 (NM_031179.1,2876-2894).
ctttggcacagtagttaat

SEQ ID NO: 670409 - DNA, 19 bp, Mus musculus
  siRNA target sequence for Sf3b1 (NM_031179.1,2902-2920).
gcaaacgagtcaaaccata

SEQ ID NO: 670410 - DNA, 19 bp, Mus musculus
  siRNA target sequence for Sf3b1 (NM_031179.1,2930-2948).
gatctgtggtacagtttta

SEQ ID NO: 670411 - DNA, 19 bp, Mus musculus
  siRNA target sequence for Sf3b1 (NM_031179.1,2951-2969).
gcgtttaaataacaaatca

SEQ ID NO: 670412 - DNA, 19 bp, Mus musculus
  siRNA target sequence for Sf3b1 (NM_031179.1,3006-3024).
cgaactgctgttgttatga

SEQ ID NO: 670413 - DNA, 19 bp, Mus musculus
  siRNA target sequence for Sf3b1 (NM_031179.1,3007-3025).
gaactgctgttgttatgaa

SEQ ID NO: 670414 - DNA, 19 bp, Mus musculus
  siRNA target sequence for Sf3b1 (NM_031179.1,3026-3044).
gacttgtcaagaggaaaaa

SEQ ID NO: 670415 - DNA, 19 bp, Mus musculus
  siRNA target sequence for Sf3b1 (NM_031179.1,3087-3105).
gaagagtaccctgaagtat

SEQ ID NO: 670416 - DNA, 19 bp, Mus musculus
  siRNA target sequence for Sf3b1 (NM_031179.1,3144-3162).
gtaataggtatgcataaga

SEQ ID NO: 670417 - DNA, 19 bp, Mus musculus
  siRNA target sequence for Sf3b1 (NM_031179.1,3161-3179).
gatgacaccaccaattaaa

SEQ ID NO: 670418 - DNA, 19 bp, Mus musculus
  siRNA target sequence for Sf3b1 (NM_031179.1,3166-3184).
caccaccaattaaagatct

SEQ ID NO: 670419 - DNA, 19 bp, Mus musculus
  siRNA target sequence for Sf3b1 (NM_031179.1,3265-3283).
ctgacaggggagctgaata

SEQ ID NO: 670420 - DNA, 19 bp, Mus musculus
  siRNA target sequence for Sf3b1 (NM_031179.1,3269-3287).
caggggagctgaatatgta

SEQ ID NO: 670421 - DNA, 19 bp, Mus musculus
  siRNA target sequence for Sf3b1 (NM_031179.1,3297-3315).
gaatggatgaggatttgct

SEQ ID NO: 670422 - DNA, 19 bp, Mus musculus
  siRNA target sequence for Sf3b1 (NM_031179.1,3318-3336).
gagcttttagagctcttaa

SEQ ID NO: 670423 - DNA, 19 bp, Mus musculus
  siRNA target sequence for Sf3b1 (NM_031179.1,3357-3375).
cgaagagctaccgtcaata

SEQ ID NO: 670424 - DNA, 19 bp, Mus musculus
  siRNA target sequence for Sf3b1 (NM_031179.1,3361-3379).
gagctaccgtcaatacatt

SEQ ID NO: 670425 - DNA, 19 bp, Mus musculus
  siRNA target sequence for Sf3b1 (NM_031179.1,3367-3385).
ccgtcaatacatttggtta

SEQ ID NO: 670426 - DNA, 19 bp, Mus musculus
  siRNA target sequence for Sf3b1 (NM_031179.1,3368-3386).
cgtcaatacatttggttat

SEQ ID NO: 670427 - DNA, 19 bp, Mus musculus
  siRNA target sequence for Sf3b1 (NM_031179.1,3369-3387).
gtcaatacatttggttata

SEQ ID NO: 670428 - DNA, 19 bp, Mus musculus
  siRNA target sequence for Sf3b1 (NM_031179.1,3524-3542).
gcctgccttaatgaatgaa

SEQ ID NO: 670429 - DNA, 19 bp, Mus musculus
  siRNA target sequence for Sf3b1 (NM_031179.1,3525-3543).
cctgccttaatgaatgaat

SEQ ID NO: 670430 - DNA, 19 bp, Mus musculus
  siRNA target sequence for Sf3b1 (NM_031179.1,3564-3582).
gtgcaaaatggagtgttaa

SEQ ID NO: 670431 - DNA, 19 bp, Mus musculus
  siRNA target sequence for Sf3b1 (NM_031179.1,3566-3584).
gcaaaatggagtgttaaaa

SEQ ID NO: 670432 - DNA, 19 bp, Mus musculus
  siRNA target sequence for Sf3b1 (NM_031179.1,3592-3610).
ccttcttgtttgagtatat

SEQ ID NO: 670433 - DNA, 19 bp, Mus musculus
  siRNA target sequence for Sf3b1 (NM_031179.1,3620-3638).
ggggaaagactacatctat

SEQ ID NO: 670434 - DNA, 19 bp, Mus musculus
  siRNA target sequence for Sf3b1 (NM_031179.1,3798-3816).
gagacatctccccatgtaa

SEQ ID NO: 670435 - DNA, 19 bp, Mus musculus
  siRNA target sequence for Sf3b1 (NM_031179.1,3842-3860).
gggcctgagggttgctatt

SEQ ID NO: 670436 - DNA, 19 bp, Mus musculus
  siRNA target sequence for Sf3b1 (NM_031179.1,3871-3889).
gaatgttgcagtattgctt

SEQ ID NO: 670437 - DNA, 19 bp, Mus musculus
  siRNA target sequence for Sf3b1 (NM_031179.1,3914-3932).
gaaagtcagagacgtatat

SEQ ID NO: 670438 - DNA, 19 bp, Mus musculus
  siRNA target sequence for Sf3b1 (NM_031179.1,3918-3936).
gtcagagacgtatattgga

SEQ ID NO: 670439 - DNA, 19 bp, Mus musculus
  siRNA target sequence for Sf3b1 (NM_031179.1,3920-3938).
cagagacgtatattggaaa

SEQ ID NO: 670440 - DNA, 19 bp, Mus musculus
  siRNA target sequence for Sf3b1 (NM_031179.1,3922-3940).
gagacgtatattggaaaat

SEQ ID NO: 670441 - DNA, 19 bp, Mus musculus
  siRNA target sequence for Sf3b1 (NM_031179.1,3924-3942).
gacgtatattggaaaattt

SEQ ID NO: 670442 - DNA, 19 bp, Mus musculus
  siRNA target sequence for Sf3b1 (NM_031179.1,3982-4000).
cacattacccacgaatcta

SEQ ID NO: 670443 - DNA, 19 bp, Mus musculus
  siRNA target sequence for Sf3b1 (NM_031179.1,3984-4002).
cattacccacgaatctaca

SEQ ID NO: 670444 - DNA, 19 bp, Mus musculus
  siRNA target sequence for Sf3b1 (NM_031179.1,4005-4023).
gacgataagaacacctata

SEQ ID NO: 670445 - DNA, 19 bp, Mus musculus
  siRNA target sequence for 2700082D03Rik (NM_026031.1,112-130).
gccagcctggctttcgaaa

SEQ ID NO: 670446 - DNA, 19 bp, Mus musculus
  siRNA target sequence for 2700082D03Rik (NM_026031.1,171-189).
cgtgcaaatgactatcata

SEQ ID NO: 670447 - DNA, 19 bp, Mus musculus
  siRNA target sequence for 2700082D03Rik (NM_026031.1,172-190).
gtgcaaatgactatcataa

SEQ ID NO: 670448 - DNA, 19 bp, Mus musculus
  siRNA target sequence for 2700082D03Rik (NM_026031.1,239-257).
cccagatgaattctactat

SEQ ID NO: 670449 - DNA, 19 bp, Mus musculus
  siRNA target sequence for 2700082D03Rik (NM_026031.1,240-258).
ccagatgaattctactata

SEQ ID NO: 670450 - DNA, 19 bp, Mus musculus
  siRNA target sequence for 2700082D03Rik (NM_026031.1,246-264).
gaattctactataaaatga

SEQ ID NO: 670451 - DNA, 19 bp, Mus musculus
  siRNA target sequence for 2700082D03Rik (NM_026031.1,389-407).
ggcgaagaaaattgaaaga

SEQ ID NO: 670452 - DNA, 19 bp, Mus musculus
  siRNA target sequence for 2700082D03Rik (NM_026031.1,390-408).
gcgaagaaaattgaaagat

SEQ ID NO: 670453 - DNA, 19 bp, Mus musculus
  siRNA target sequence for 2700082D03Rik (NM_026031.1,485-503).
ggaagttgaacggtttgat

SEQ ID NO: 670454 - DNA, 19 bp, Mus musculus
  siRNA target sequence for 2700082D03Rik (NM_026031.1,537-555).
gttgacagggtctacaata

SEQ ID NO: 670455 - DNA, 19 bp, Mus musculus
  siRNA target sequence for 2700082D03Rik (NM_026031.1,718-736).
gcaaagacctcatggataa

SEQ ID NO: 670456 - DNA, 19 bp, Mus musculus
  siRNA target sequence for 2700082D03Rik (NM_026031.1,794-812).
ccagactcgccgaaaacgt

SEQ ID NO: 670457 - DNA, 19 bp, Mus musculus
  siRNA target sequence for 2700082D03Rik (NM_026031.1,795-813).
cagactcgccgaaaacgtt

SEQ ID NO: 670458 - DNA, 19 bp, Mus musculus
  siRNA target sequence for Grcc2f (NM_013536.1,113-131).
cctcgtgagcggcgatttt

SEQ ID NO: 670459 - DNA, 19 bp, Mus musculus
  siRNA target sequence for Grcc2f (NM_013536.1,117-135).
gtgagcggcgattttcagt

SEQ ID NO: 670460 - DNA, 19 bp, Mus musculus
  siRNA target sequence for Grcc2f (NM_013536.1,248-266).
gtcaaggtagggaaaactt

SEQ ID NO: 670461 - DNA, 19 bp, Mus musculus
  siRNA target sequence for Grcc2f (NM_013536.1,288-306).
ggcacaagtccatgttgtt

SEQ ID NO: 670462 - DNA, 19 bp, Mus musculus
  siRNA target sequence for Grcc2f (NM_013536.1,290-308).
cacaagtccatgttgttga

SEQ ID NO: 670463 - DNA, 19 bp, Mus musculus
  siRNA target sequence for Grcc2f (NM_013536.1,533-551).
gacggccctcagaagctat

SEQ ID NO: 670464 - DNA, 19 bp, Mus musculus
  siRNA target sequence for Grcc2f (NM_013536.1,548-566).
ctattgaaggtaattaaga

SEQ ID NO: 670465 - DNA, 19 bp, Mus musculus
  siRNA target sequence for Grcc2f (NM_013536.1,586-604).
cccagttggctgtatgaaa

SEQ ID NO: 670466 - DNA, 19 bp, Mus musculus
  siRNA target sequence for Grcc2f (NM_013536.1,587-605).
ccagttggctgtatgaaaa

SEQ ID NO: 670467 - DNA, 19 bp, Mus musculus
  siRNA target sequence for Grcc2f (NM_013536.1,588-606).
cagttggctgtatgaaaat

SEQ ID NO: 670468 - DNA, 19 bp, Mus musculus
  siRNA target sequence for Grcc2f (NM_013536.1,660-678).
gtagtgacccagttgtgtt

SEQ ID NO: 670469 - DNA, 19 bp, Mus musculus
  siRNA target sequence for Grcc2f (NM_013536.1,765-783).
cgcttacctgtgctaaagt

SEQ ID NO: 670470 - DNA, 19 bp, Mus musculus
  siRNA target sequence for Wdr4 (NM_021322.1,140-158).
ggccacgccagaagataaa

SEQ ID NO: 670471 - DNA, 19 bp, Mus musculus
  siRNA target sequence for Wdr4 (NM_021322.1,221-239).
gtctggccgctattttgct

SEQ ID NO: 670472 - DNA, 19 bp, Mus musculus
  siRNA target sequence for Wdr4 (NM_021322.1,225-243).
ggccgctattttgctttaa

SEQ ID NO: 670473 - DNA, 19 bp, Mus musculus
  siRNA target sequence for Wdr4 (NM_021322.1,227-245).
ccgctattttgctttaaca

SEQ ID NO: 670474 - DNA, 19 bp, Mus musculus
  siRNA target sequence for Wdr4 (NM_021322.1,238-256).
ctttaacagatgacagtaa

SEQ ID NO: 670475 - DNA, 19 bp, Mus musculus
  siRNA target sequence for Wdr4 (NM_021322.1,251-269).
cagtaagcgtctgattctt

SEQ ID NO: 670476 - DNA, 19 bp, Mus musculus
  siRNA target sequence for Wdr4 (NM_021322.1,263-281).
gattcttttccgtacaaaa

SEQ ID NO: 670477 - DNA, 19 bp, Mus musculus
  siRNA target sequence for Wdr4 (NM_021322.1,267-285).
cttttccgtacaaaaccat

SEQ ID NO: 670478 - DNA, 19 bp, Mus musculus
  siRNA target sequence for Wdr4 (NM_021322.1,493-511).
ctgcagaccgggatgagaa

SEQ ID NO: 670479 - DNA, 19 bp, Mus musculus
  siRNA target sequence for Wdr4 (NM_021322.1,538-556).
cgcatagcatcgagtcttt

SEQ ID NO: 670480 - DNA, 19 bp, Mus musculus
  siRNA target sequence for Wdr4 (NM_021322.1,540-558).
catagcatcgagtctttct

SEQ ID NO: 670481 - DNA, 19 bp, Mus musculus
  siRNA target sequence for Wdr4 (NM_021322.1,560-578).
cctgggacacactgagttt

SEQ ID NO: 670482 - DNA, 19 bp, Mus musculus
  siRNA target sequence for Wdr4 (NM_021322.1,1075-1093).
gcttccgcagcctgtacaa

SEQ ID NO: 670483 - DNA, 19 bp, Mus musculus
  siRNA target sequence for Wdr4 (NM_021322.1,1112-1130).
gacctcttacctgaagaaa

SEQ ID NO: 670484 - DNA, 19 bp, Mus musculus
  siRNA target sequence for Wdr4 (NM_021322.1,1192-1210).
ccccggaacagaccaaaaa

SEQ ID NO: 670485 - DNA, 19 bp, Mus musculus
  siRNA target sequence for Wdr4 (NM_021322.1,1221-1239).
ggccagtcagcccttagtt

SEQ ID NO: 670486 - DNA, 19 bp, Mus musculus
  siRNA target sequence for 4732497O03Rik (NM_144826.2,88-106).
gataattcaggaacgtata

SEQ ID NO: 670487 - DNA, 19 bp, Mus musculus
  siRNA target sequence for 4732497O03Rik (NM_144826.2,188-206).
gcttccgacctagaataca

SEQ ID NO: 670488 - DNA, 19 bp, Mus musculus
  siRNA target sequence for 4732497O03Rik (NM_144826.2,189-207).
cttccgacctagaatacaa

SEQ ID NO: 670489 - DNA, 19 bp, Mus musculus
  siRNA target sequence for 4732497O03Rik (NM_144826.2,192-210).
ccgacctagaatacaaaat

SEQ ID NO: 670490 - DNA, 19 bp, Mus musculus
  siRNA target sequence for 4732497O03Rik (NM_144826.2,193-211).
cgacctagaatacaaaata

SEQ ID NO: 670491 - DNA, 19 bp, Mus musculus
  siRNA target sequence for 4732497O03Rik (NM_144826.2,196-214).
cctagaatacaaaatacat

SEQ ID NO: 670492 - DNA, 19 bp, Mus musculus
  siRNA target sequence for 4732497O03Rik (NM_144826.2,232-250).
ggaagactttatcaactat

SEQ ID NO: 670493 - DNA, 19 bp, Mus musculus
  siRNA target sequence for 4732497O03Rik (NM_144826.2,238-256).
ctttatcaactatgttcaa

SEQ ID NO: 670494 - DNA, 19 bp, Mus musculus
  siRNA target sequence for 4732497O03Rik (NM_144826.2,406-424).
ctggctctcctatatagtt

SEQ ID NO: 670495 - DNA, 19 bp, Mus musculus
  siRNA target sequence for 4732497O03Rik (NM_144826.2,408-426).
ggctctcctatatagtttt

SEQ ID NO: 670496 - DNA, 19 bp, Mus musculus
  siRNA target sequence for 4732497O03Rik (NM_144826.2,410-428).
ctctcctatatagttttct

SEQ ID NO: 670497 - DNA, 19 bp, Mus musculus
  siRNA target sequence for 4732497O03Rik (NM_144826.2,450-468).
ctcaccttagcaagatatt

SEQ ID NO: 670498 - DNA, 19 bp, Mus musculus
  siRNA target sequence for 4732497O03Rik (NM_144826.2,479-497).
cttgccattcactcaaaca

SEQ ID NO: 670499 - DNA, 19 bp, Mus musculus
  siRNA target sequence for 4732497O03Rik (NM_144826.2,539-557).
gaccgcttgtcttcagaaa

SEQ ID NO: 670500 - DNA, 19 bp, Mus musculus
  siRNA target sequence for 4732497O03Rik (NM_144826.2,554-572).
gaaagtgccaggcagttat

SEQ ID NO: 670501 - DNA, 19 bp, Mus musculus
  siRNA target sequence for 4732497O03Rik (NM_144826.2,601-619).
gtgtccaaagctctatcaa

SEQ ID NO: 670502 - DNA, 19 bp, Mus musculus
  siRNA target sequence for 4732497O03Rik (NM_144826.2,603-621).
gtccaaagctctatcaaga

SEQ ID NO: 670503 - DNA, 19 bp, Mus musculus
  siRNA target sequence for 4732497O03Rik (NM_144826.2,606-624).
caaagctctatcaagaata

SEQ ID NO: 670504 - DNA, 19 bp, Mus musculus
  siRNA target sequence for 4732497O03Rik (NM_144826.2,610-628).
gctctatcaagaatacttt

SEQ ID NO: 670505 - DNA, 19 bp, Mus musculus
  siRNA target sequence for 4732497O03Rik (NM_144826.2,611-629).
ctctatcaagaatacttta

SEQ ID NO: 670506 - DNA, 19 bp, Mus musculus
  siRNA target sequence for 4732497O03Rik (NM_144826.2,736-754).
cgagttggcacggatcatt

SEQ ID NO: 670507 - DNA, 19 bp, Mus musculus
  siRNA target sequence for 4732497O03Rik (NM_144826.2,737-755).
gagttggcacggatcattt

SEQ ID NO: 670508 - DNA, 19 bp, Mus musculus
  siRNA target sequence for 4732497O03Rik (NM_144826.2,739-757).
gttggcacggatcatttat

SEQ ID NO: 670509 - DNA, 19 bp, Mus musculus
  siRNA target sequence for 4732497O03Rik (NM_144826.2,742-760).
ggcacggatcatttataaa

SEQ ID NO: 670510 - DNA, 19 bp, Mus musculus
  siRNA target sequence for 4732497O03Rik (NM_144826.2,891-909).
cactcacttgggattatgt

SEQ ID NO: 670511 - DNA, 19 bp, Mus musculus
  siRNA target sequence for 4732497O03Rik (NM_144826.2,934-952).
gtcccaaccaggtgaagaa

SEQ ID NO: 670512 - DNA, 19 bp, Mus musculus
  siRNA target sequence for 4732497O03Rik (NM_144826.2,1065-1083).
gttacatcaccttttgctt

SEQ ID NO: 670513 - DNA, 19 bp, Mus musculus
  siRNA target sequence for 4732497O03Rik (NM_144826.2,1262-1280).
gctgggaccgaattgttca

SEQ ID NO: 670514 - DNA, 19 bp, Mus musculus
  siRNA target sequence for 4732497O03Rik (NM_144826.2,1310-1328).
ctccaggtgctcattgact

SEQ ID NO: 670515 - DNA, 19 bp, Mus musculus
  siRNA target sequence for 4732497O03Rik (NM_144826.2,1316-1334).
gtgctcattgactcaaaga

SEQ ID NO: 670516 - DNA, 19 bp, Mus musculus
  siRNA target sequence for 4732497O03Rik (NM_144826.2,1452-1470).
cggaagccatctttaagaa

SEQ ID NO: 670517 - DNA, 19 bp, Mus musculus
  siRNA target sequence for 4732497O03Rik (NM_144826.2,1457-1475).
gccatctttaagaaagcta

SEQ ID NO: 670518 - DNA, 19 bp, Mus musculus
  siRNA target sequence for 4732497O03Rik (NM_144826.2,1538-1556).
cggagtggaggctacaaaa

SEQ ID NO: 670519 - DNA, 19 bp, Mus musculus
  siRNA target sequence for 4732497O03Rik (NM_144826.2,1539-1557).
ggagtggaggctacaaaaa

SEQ ID NO: 670520 - DNA, 19 bp, Mus musculus
  siRNA target sequence for 4732497O03Rik (NM_144826.2,1561-1579).
cagagcagtgtttaaaagt

SEQ ID NO: 670521 - DNA, 19 bp, Mus musculus
  siRNA target sequence for 4732497O03Rik (NM_144826.2,1593-1611).
gtccattttcggttgagtt

SEQ ID NO: 670522 - DNA, 19 bp, Mus musculus
  siRNA target sequence for 4732497O03Rik (NM_144826.2,1595-1613).
ccattttcggttgagtttt

SEQ ID NO: 670523 - DNA, 19 bp, Mus musculus
  siRNA target sequence for 4732497O03Rik (NM_144826.2,1596-1614).
cattttcggttgagttttt

SEQ ID NO: 670524 - DNA, 19 bp, Mus musculus
  siRNA target sequence for 4732497O03Rik (NM_144826.2,1646-1664).
gaaccctgcaagatggtaa

SEQ ID NO: 670525 - DNA, 19 bp, Mus musculus
  siRNA target sequence for 4732497O03Rik (NM_144826.2,1650-1668).
cctgcaagatggtaaacct

SEQ ID NO: 670526 - DNA, 19 bp, Mus musculus
  siRNA target sequence for 4732497O03Rik (NM_144826.2,1705-1723).
gacttcagattctgatctt

SEQ ID NO: 670527 - DNA, 19 bp, Mus musculus
  siRNA target sequence for 4732497O03Rik (NM_144826.2,1716-1734).
ctgatctttggatggatta

SEQ ID NO: 670528 - DNA, 19 bp, Mus musculus
  siRNA target sequence for 4732497O03Rik (NM_144826.2,1718-1736).
gatctttggatggattaca

SEQ ID NO: 670529 - DNA, 19 bp, Mus musculus
  siRNA target sequence for 4732497O03Rik (NM_144826.2,1753-1771).
ccatcccttcggtaaacct

SEQ ID NO: 670530 - DNA, 19 bp, Mus musculus
  siRNA target sequence for 4732497O03Rik (NM_144826.2,1774-1792).
gaactgcggacagatctat

SEQ ID NO: 670531 - DNA, 19 bp, Mus musculus
  siRNA target sequence for 4732497O03Rik (NM_144826.2,1789-1807).
ctattggcgagccatgaaa

SEQ ID NO: 670532 - DNA, 19 bp, Mus musculus
  siRNA target sequence for 4732497O03Rik (NM_144826.2,1794-1812).
ggcgagccatgaaaatgtt

SEQ ID NO: 670533 - DNA, 19 bp, Mus musculus
  siRNA target sequence for Cstf3 (NM_145529.1,174-192).
ggagcaggcagcggaatat

SEQ ID NO: 670534 - DNA, 19 bp, Mus musculus
  siRNA target sequence for Cstf3 (NM_145529.1,222-240).
gaaattagaagaaaatcca

SEQ ID NO: 670535 - DNA, 19 bp, Mus musculus
  siRNA target sequence for Cstf3 (NM_145529.1,278-296).
cacagaatcaacctataga

SEQ ID NO: 670536 - DNA, 19 bp, Mus musculus
  siRNA target sequence for Cstf3 (NM_145529.1,280-298).
cagaatcaacctatagaca

SEQ ID NO: 670537 - DNA, 19 bp, Mus musculus
  siRNA target sequence for Cstf3 (NM_145529.1,282-300).
gaatcaacctatagacaaa

SEQ ID NO: 670538 - DNA, 19 bp, Mus musculus
  siRNA target sequence for Cstf3 (NM_145529.1,354-372).
ctggaaactgtacattgaa

SEQ ID NO: 670539 - DNA, 19 bp, Mus musculus
  siRNA target sequence for Cstf3 (NM_145529.1,363-381).
gtacattgaagcagagatt

SEQ ID NO: 670540 - DNA, 19 bp, Mus musculus
  siRNA target sequence for Cstf3 (NM_145529.1,397-415).
gacaaggttgaaaagctat

SEQ ID NO: 670541 - DNA, 19 bp, Mus musculus
  siRNA target sequence for Cstf3 (NM_145529.1,455-473).
ggaagtgttatctttcata

SEQ ID NO: 670542 - DNA, 19 bp, Mus musculus
  siRNA target sequence for Cstf3 (NM_145529.1,519-537).
ggctcaagcttatgacttt

SEQ ID NO: 670543 - DNA, 19 bp, Mus musculus
  siRNA target sequence for Cstf3 (NM_145529.1,532-550).
gactttgcactagataaaa

SEQ ID NO: 670544 - DNA, 19 bp, Mus musculus
  siRNA target sequence for Cstf3 (NM_145529.1,539-557).
cactagataaaattggaat

SEQ ID NO: 670545 - DNA, 19 bp, Mus musculus
  siRNA target sequence for Cstf3 (NM_145529.1,574-592).
cagatttgggtggattaca

SEQ ID NO: 670546 - DNA, 19 bp, Mus musculus
  siRNA target sequence for Cstf3 (NM_145529.1,583-601).
gtggattacatcaatttct

SEQ ID NO: 670547 - DNA, 19 bp, Mus musculus
  siRNA target sequence for Cstf3 (NM_145529.1,585-603).
ggattacatcaatttctta

SEQ ID NO: 670548 - DNA, 19 bp, Mus musculus
  siRNA target sequence for Cstf3 (NM_145529.1,650-668).
ctgctgtccgaagagttta

SEQ ID NO: 670549 - DNA, 19 bp, Mus musculus
  siRNA target sequence for Cstf3 (NM_145529.1,653-671).
ctgtccgaagagtttatca

SEQ ID NO: 670550 - DNA, 19 bp, Mus musculus
  siRNA target sequence for Cstf3 (NM_145529.1,673-691).
cgaggttgtgttaatccaa

SEQ ID NO: 670551 - DNA, 19 bp, Mus musculus
  siRNA target sequence for Cstf3 (NM_145529.1,682-700).
gttaatccaatgatcaaca

SEQ ID NO: 670552 - DNA, 19 bp, Mus musculus
  siRNA target sequence for Cstf3 (NM_145529.1,716-734).
gagactacaacaagtatga

SEQ ID NO: 670553 - DNA, 19 bp, Mus musculus
  siRNA target sequence for Cstf3 (NM_145529.1,738-756).
gggtatcaatattcattta

SEQ ID NO: 670554 - DNA, 19 bp, Mus musculus
  siRNA target sequence for Cstf3 (NM_145529.1,778-796).
cggagtagagactacatga

SEQ ID NO: 670555 - DNA, 19 bp, Mus musculus
  siRNA target sequence for Cstf3 (NM_145529.1,779-797).
ggagtagagactacatgaa

SEQ ID NO: 670556 - DNA, 19 bp, Mus musculus
  siRNA target sequence for Cstf3 (NM_145529.1,803-821).
gacgtgtagcaaaggaata

SEQ ID NO: 670557 - DNA, 19 bp, Mus musculus
  siRNA target sequence for Cstf3 (NM_145529.1,823-841).
gagacagtcatgaaaggtt

SEQ ID NO: 670558 - DNA, 19 bp, Mus musculus
  siRNA target sequence for Cstf3 (NM_145529.1,1023-1041).
ccctgatatctggtatgaa

SEQ ID NO: 670559 - DNA, 19 bp, Mus musculus
  siRNA target sequence for Cstf3 (NM_145529.1,1067-1085).
gtaagctgcttgcagaaaa

SEQ ID NO: 670560 - DNA, 19 bp, Mus musculus
  siRNA target sequence for Cstf3 (NM_145529.1,1115-1133).
gtgacgaagctgctaatat

SEQ ID NO: 670561 - DNA, 19 bp, Mus musculus
  siRNA target sequence for Cstf3 (NM_145529.1,1117-1135).
gacgaagctgctaatattt

SEQ ID NO: 670562 - DNA, 19 bp, Mus musculus
  siRNA target sequence for Cstf3 (NM_145529.1,1142-1160).
gagccataagcacgttatt

SEQ ID NO: 670563 - DNA, 19 bp, Mus musculus
  siRNA target sequence for Cstf3 (NM_145529.1,1144-1162).
gccataagcacgttattaa

SEQ ID NO: 670564 - DNA, 19 bp, Mus musculus
  siRNA target sequence for Cstf3 (NM_145529.1,1154-1172).
cgttattaaagaagaacat

SEQ ID NO: 670565 - DNA, 19 bp, Mus musculus
  siRNA target sequence for Cstf3 (NM_145529.1,1201-1219).
gaagagagtcgcatgaagt

SEQ ID NO: 670566 - DNA, 19 bp, Mus musculus
  siRNA target sequence for Cstf3 (NM_145529.1,1224-1242).
gaaggttcacagtatatat

SEQ ID NO: 670567 - DNA, 19 bp, Mus musculus
  siRNA target sequence for Cstf3 (NM_145529.1,1270-1288).
gaccccaccttagtatata

SEQ ID NO: 670568 - DNA, 19 bp, Mus musculus
  siRNA target sequence for Cstf3 (NM_145529.1,1307-1325).
caaggagagcagaaggtat

SEQ ID NO: 670569 - DNA, 19 bp, Mus musculus
  siRNA target sequence for Cstf3 (NM_145529.1,1370-1388).
ggacccgccatcatgtcta

SEQ ID NO: 670570 - DNA, 19 bp, Mus musculus
  siRNA target sequence for Cstf3 (NM_145529.1,1371-1389).
gacccgccatcatgtctat

SEQ ID NO: 670571 - DNA, 19 bp, Mus musculus
  siRNA target sequence for Cstf3 (NM_145529.1,1374-1392).
ccgccatcatgtctatgta

SEQ ID NO: 670572 - DNA, 19 bp, Mus musculus
  siRNA target sequence for Cstf3 (NM_145529.1,1375-1393).
cgccatcatgtctatgtaa

SEQ ID NO: 670573 - DNA, 19 bp, Mus musculus
  siRNA target sequence for Cstf3 (NM_145529.1,1377-1395).
ccatcatgtctatgtaact

SEQ ID NO: 670574 - DNA, 19 bp, Mus musculus
  siRNA target sequence for Cstf3 (NM_145529.1,1399-1417).
gccctcatggaatattact

SEQ ID NO: 670575 - DNA, 19 bp, Mus musculus
  siRNA target sequence for Cstf3 (NM_145529.1,1401-1419).
cctcatggaatattactgt

SEQ ID NO: 670576 - DNA, 19 bp, Mus musculus
  siRNA target sequence for Cstf3 (NM_145529.1,1519-1537).
cacctcaatgaggacaata

SEQ ID NO: 670577 - DNA, 19 bp, Mus musculus
  siRNA target sequence for Cstf3 (NM_145529.1,1521-1539).
cctcaatgaggacaataat

SEQ ID NO: 670578 - DNA, 19 bp, Mus musculus
  siRNA target sequence for Cstf3 (NM_145529.1,1608-1626).
ggctcgatttctagctttt

SEQ ID NO: 670579 - DNA, 19 bp, Mus musculus
  siRNA target sequence for Cstf3 (NM_145529.1,1610-1628).
ctcgatttctagcttttga

SEQ ID NO: 670580 - DNA, 19 bp, Mus musculus
  siRNA target sequence for Cstf3 (NM_145529.1,1640-1658).
gtgatttagctagtatact

SEQ ID NO: 670581 - DNA, 19 bp, Mus musculus
  siRNA target sequence for Cstf3 (NM_145529.1,1642-1660).
gatttagctagtatactca

SEQ ID NO: 670582 - DNA, 19 bp, Mus musculus
  siRNA target sequence for Cstf3 (NM_145529.1,1718-1736).
ctttactggtggacagata

SEQ ID NO: 670583 - DNA, 19 bp, Mus musculus
  siRNA target sequence for Cstf3 (NM_145529.1,1760-1778).
gttctgcaagtgaactcaa

SEQ ID NO: 670584 - DNA, 19 bp, Mus musculus
  siRNA target sequence for Cstf3 (NM_145529.1,1850-1868).
ccatagtgcctgttctgaa

SEQ ID NO: 670585 - DNA, 19 bp, Mus musculus
  siRNA target sequence for Cstf3 (NM_145529.1,1925-1943).
catttcagccacgacattt

SEQ ID NO: 670586 - DNA, 19 bp, Mus musculus
  siRNA target sequence for Cstf3 (NM_145529.1,1996-2014).
gccgctgttgttttgatga

SEQ ID NO: 670587 - DNA, 19 bp, Mus musculus
  siRNA target sequence for Cstf3 (NM_145529.1,2113-2131).
gaagccgtgaggatcatca

SEQ ID NO: 670588 - DNA, 19 bp, Mus musculus
  siRNA target sequence for Cstf3 (NM_145529.1,2180-2198).
gtagtgctgtactgactaa

SEQ ID NO: 670589 - DNA, 19 bp, Mus musculus
  siRNA target sequence for Cstf3 (NM_145529.1,2210-2228).
ggcccaacgaggattcaga

SEQ ID NO: 670590 - DNA, 19 bp, Mus musculus
  siRNA target sequence for Cstf3 (NM_145529.1,2258-2276).
cccctgttcatgacattta

SEQ ID NO: 670591 - DNA, 19 bp, Mus musculus
  siRNA target sequence for Cstf3 (NM_145529.1,2286-2304).
gcagcagaagcgaatacga

SEQ ID NO: 670592 - DNA, 19 bp, Mus musculus
  siRNA target sequence for 0610008F14Rik (NM_025313.1,232-250).
ccccgacgcaggtgttctt

SEQ ID NO: 670593 - DNA, 19 bp, Mus musculus
  siRNA target sequence for 0610008F14Rik (NM_025313.1,372-390).
gacggcaccacgactaagt

SEQ ID NO: 670594 - DNA, 19 bp, Mus musculus
  siRNA target sequence for 0610008F14Rik (NM_025313.1,376-394).
gcaccacgactaagtactt

SEQ ID NO: 670595 - DNA, 19 bp, Mus musculus
  siRNA target sequence for 0610008F14Rik (NM_025313.1,377-395).
caccacgactaagtacttt

SEQ ID NO: 670596 - DNA, 19 bp, Mus musculus
  siRNA target sequence for 0610008F14Rik (NM_025313.1,379-397).
ccacgactaagtactttgt

SEQ ID NO: 670597 - DNA, 19 bp, Mus musculus
  siRNA target sequence for 0610008F14Rik (NM_025313.1,404-422).
cggctccgtcactgtgaat

SEQ ID NO: 670598 - DNA, 19 bp, Mus musculus
  siRNA target sequence for 0610008F14Rik (NM_025313.1,437-455).
gcagttactagctgaagaa

SEQ ID NO: 670599 - DNA, 19 bp, Mus musculus
  siRNA target sequence for D11Bwg0554e (NM_029502.1,382-400).
cacaatgcgcacaattgga

SEQ ID NO: 670600 - DNA, 19 bp, Mus musculus
  siRNA target sequence for D11Bwg0554e (NM_029502.1,412-430).
cagcgcatctctcattaca

SEQ ID NO: 670601 - DNA, 19 bp, Mus musculus
  siRNA target sequence for D11Bwg0554e (NM_029502.1,480-498).
gtaccgaatcgcagtcatt

SEQ ID NO: 670602 - DNA, 19 bp, Mus musculus
  siRNA target sequence for D11Bwg0554e (NM_029502.1,539-557).
cttggtttagctaccttaa

SEQ ID NO: 670603 - DNA, 19 bp, Mus musculus
  siRNA target sequence for D11Bwg0554e (NM_029502.1,542-560).
ggtttagctaccttaagaa

SEQ ID NO: 670604 - DNA, 19 bp, Mus musculus
  siRNA target sequence for D11Bwg0554e (NM_029502.1,543-561).
gtttagctaccttaagaaa

SEQ ID NO: 670605 - DNA, 19 bp, Mus musculus
  siRNA target sequence for D11Bwg0554e (NM_029502.1,682-700).
gtcttcaatgggaaactct

SEQ ID NO: 670606 - DNA, 19 bp, Mus musculus
  siRNA target sequence for D11Bwg0554e (NM_029502.1,758-776).
cctgggtgatcctttctga

SEQ ID NO: 670607 - DNA, 19 bp, Mus musculus
  siRNA target sequence for 2810055C14Rik (NM_019996.2,152-170).
gcgcaccggtgtcacatta

SEQ ID NO: 670608 - DNA, 19 bp, Mus musculus
  siRNA target sequence for 2810055C14Rik (NM_019996.2,153-171).
cgcaccggtgtcacattat

SEQ ID NO: 670609 - DNA, 19 bp, Mus musculus
  siRNA target sequence for 2810055C14Rik (NM_019996.2,164-182).
cacattatcggactgttaa

SEQ ID NO: 670610 - DNA, 19 bp, Mus musculus
  siRNA target sequence for 2810055C14Rik (NM_019996.2,195-213).
cagcgaggagagtctagat

SEQ ID NO: 670611 - DNA, 19 bp, Mus musculus
  siRNA target sequence for 2810055C14Rik (NM_019996.2,217-235).
gatgacgattgctctcttt

SEQ ID NO: 670612 - DNA, 19 bp, Mus musculus
  siRNA target sequence for 2810055C14Rik (NM_019996.2,246-264).
gcgacagaagtgtcataat

SEQ ID NO: 670613 - DNA, 19 bp, Mus musculus
  siRNA target sequence for 2810055C14Rik (NM_019996.2,247-265).
cgacagaagtgtcataata

SEQ ID NO: 670614 - DNA, 19 bp, Mus musculus
  siRNA target sequence for 2810055C14Rik (NM_019996.2,295-313).
ggaccaagtggtcagaaaa

SEQ ID NO: 670615 - DNA, 19 bp, Mus musculus
  siRNA target sequence for 2810055C14Rik (NM_019996.2,399-417).
cggcatcttgggaatggaa

SEQ ID NO: 670616 - DNA, 19 bp, Mus musculus
  siRNA target sequence for 2810055C14Rik (NM_019996.2,437-455).
ggcagtctgagacctataa

SEQ ID NO: 670617 - DNA, 19 bp, Mus musculus
  siRNA target sequence for 2810055C14Rik (NM_019996.2,441-459).
gtctgagacctataactat

SEQ ID NO: 670618 - DNA, 19 bp, Mus musculus
  siRNA target sequence for 2810055C14Rik (NM_019996.2,447-465).
gacctataactatttgctt

SEQ ID NO: 670619 - DNA, 19 bp, Mus musculus
  siRNA target sequence for 2810055C14Rik (NM_019996.2,467-485).
ctaagaaacttgctaagaa

SEQ ID NO: 670620 - DNA, 19 bp, Mus musculus
  siRNA target sequence for 2810055C14Rik (NM_019996.2,487-505).
gaatctcaagagtacacaa

SEQ ID NO: 670621 - DNA, 19 bp, Mus musculus
  siRNA target sequence for 2810055C14Rik (NM_019996.2,493-511).
caagagtacacaaaggaat

SEQ ID NO: 670622 - DNA, 19 bp, Mus musculus
  siRNA target sequence for 2810055C14Rik (NM_019996.2,507-525).
ggaattagacaaagatcta

SEQ ID NO: 670623 - DNA, 19 bp, Mus musculus
  siRNA target sequence for 2810055C14Rik (NM_019996.2,622-640).
ggtaacagagtggaaatga

SEQ ID NO: 670624 - DNA, 19 bp, Mus musculus
  siRNA target sequence for 2810055C14Rik (NM_019996.2,623-641).
gtaacagagtggaaatgaa

SEQ ID NO: 670625 - DNA, 19 bp, Mus musculus
  siRNA target sequence for 2810055C14Rik (NM_019996.2,672-690).
ggatgctcccgagaaagta

SEQ ID NO: 670626 - DNA, 19 bp, Mus musculus
  siRNA target sequence for 2810055C14Rik (NM_019996.2,741-759).
ccgagtagtgaggatactt

SEQ ID NO: 670627 - DNA, 19 bp, Mus musculus
  siRNA target sequence for 2810055C14Rik (NM_019996.2,794-812).
cagctgaagtcgagcaaaa

SEQ ID NO: 670628 - DNA, 19 bp, Mus musculus
  siRNA target sequence for 2810055C14Rik (NM_019996.2,808-826).
caaaatggtggtcttttca

SEQ ID NO: 670629 - DNA, 19 bp, Mus musculus
  siRNA target sequence for 2810055C14Rik (NM_019996.2,855-873).
cggtggagtctttctgaat

SEQ ID NO: 670630 - DNA, 19 bp, Mus musculus
  siRNA target sequence for 2810055C14Rik (NM_019996.2,916-934).
gacattttctacgttgaaa

SEQ ID NO: 670631 - DNA, 19 bp, Mus musculus
  siRNA target sequence for 2810055C14Rik (NM_019996.2,1044-1062).
cacatctcgagaaacgttt

SEQ ID NO: 670632 - DNA, 19 bp, Mus musculus
  siRNA target sequence for 2810055C14Rik (NM_019996.2,1058-1076).
cgtttgcaagtgacactaa

SEQ ID NO: 670633 - DNA, 19 bp, Mus musculus
  siRNA target sequence for Hus1 (NM_008316.2,55-73).
cctggcttgtctgaatcat

SEQ ID NO: 670634 - DNA, 19 bp, Mus musculus
  siRNA target sequence for Hus1 (NM_008316.2,59-77).
gcttgtctgaatcatttca

SEQ ID NO: 670635 - DNA, 19 bp, Mus musculus
  siRNA target sequence for Hus1 (NM_008316.2,78-96).
cacgagtcagtaacatgat

SEQ ID NO: 670636 - DNA, 19 bp, Mus musculus
  siRNA target sequence for Hus1 (NM_008316.2,205-223).
gcaggagaacttttttagt

SEQ ID NO: 670637 - DNA, 19 bp, Mus musculus
  siRNA target sequence for Hus1 (NM_008316.2,256-274).
caacgagatttatttagaa

SEQ ID NO: 670638 - DNA, 19 bp, Mus musculus
  siRNA target sequence for Hus1 (NM_008316.2,259-277).
cgagatttatttagaatta

SEQ ID NO: 670639 - DNA, 19 bp, Mus musculus
  siRNA target sequence for Hus1 (NM_008316.2,272-290).
gaattaacgtcggaaaact

SEQ ID NO: 670640 - DNA, 19 bp, Mus musculus
  siRNA target sequence for Hus1 (NM_008316.2,411-429).
gaatcgtggtgcatgatat

SEQ ID NO: 670641 - DNA, 19 bp, Mus musculus
  siRNA target sequence for Hus1 (NM_008316.2,594-612).
gagaattaaacctaaagat

SEQ ID NO: 670642 - DNA, 19 bp, Mus musculus
  siRNA target sequence for Hus1 (NM_008316.2,628-646).
gtgtgtgactactcatttt

SEQ ID NO: 670643 - DNA, 19 bp, Mus musculus
  siRNA target sequence for Hus1 (NM_008316.2,639-657).
ctcattttaaggatcttga

SEQ ID NO: 670644 - DNA, 19 bp, Mus musculus
  siRNA target sequence for Hus1 (NM_008316.2,675-693).
ctgacagtgtctctcaaaa

SEQ ID NO: 670645 - DNA, 19 bp, Mus musculus
  siRNA target sequence for Hus1 (NM_008316.2,715-733).
caaggtgcacattgacata

SEQ ID NO: 670646 - DNA, 19 bp, Mus musculus
  siRNA target sequence for Hus1 (NM_008316.2,836-854).
gacgtctcccttcagtatt

SEQ ID NO: 670647 - DNA, 19 bp, Mus musculus
  siRNA target sequence for Ube4a (NM_145400.2,632-650).
caactcaacatcaatcaca

SEQ ID NO: 670648 - DNA, 19 bp, Mus musculus
  siRNA target sequence for Ube4a (NM_145400.2,685-703).
cagtgatccaagcttgaaa

SEQ ID NO: 670649 - DNA, 19 bp, Mus musculus
  siRNA target sequence for Ube4a (NM_145400.2,767-785).
caagactggcttgatatga

SEQ ID NO: 670650 - DNA, 19 bp, Mus musculus
  siRNA target sequence for Ube4a (NM_145400.2,775-793).
gcttgatatgagcaatgtt

SEQ ID NO: 670651 - DNA, 19 bp, Mus musculus
  siRNA target sequence for Ube4a (NM_145400.2,799-817).
ggccatctttgctcgatta

SEQ ID NO: 670652 - DNA, 19 bp, Mus musculus
  siRNA target sequence for Ube4a (NM_145400.2,801-819).
ccatctttgctcgattatt

SEQ ID NO: 670653 - DNA, 19 bp, Mus musculus
  siRNA target sequence for Ube4a (NM_145400.2,805-823).
ctttgctcgattattgctt

SEQ ID NO: 670654 - DNA, 19 bp, Mus musculus
  siRNA target sequence for Ube4a (NM_145400.2,899-917).
gagaggcacatcttctgtt

SEQ ID NO: 670655 - DNA, 19 bp, Mus musculus
  siRNA target sequence for Ube4a (NM_145400.2,946-964).
ggaagagattaccaaagtt

SEQ ID NO: 670656 - DNA, 19 bp, Mus musculus
  siRNA target sequence for Ube4a (NM_145400.2,1073-1091).
caactggtagatttgatgt

SEQ ID NO: 670657 - DNA, 19 bp, Mus musculus
  siRNA target sequence for Ube4a (NM_145400.2,1107-1125).
gagcccattttgaagatgt

SEQ ID NO: 670658 - DNA, 19 bp, Mus musculus
  siRNA target sequence for Ube4a (NM_145400.2,1171-1189).
ggaggttcgaacatttcct

SEQ ID NO: 670659 - DNA, 19 bp, Mus musculus
  siRNA target sequence for Ube4a (NM_145400.2,1266-1284).
catatctggacattcttct

SEQ ID NO: 670660 - DNA, 19 bp, Mus musculus
  siRNA target sequence for Ube4a (NM_145400.2,1310-1328).
gccaaggtgtttttagaat

SEQ ID NO: 670661 - DNA, 19 bp, Mus musculus
  siRNA target sequence for Ube4a (NM_145400.2,1347-1365).
ccagcaatgggcagatgta

SEQ ID NO: 670662 - DNA, 19 bp, Mus musculus
  siRNA target sequence for Ube4a (NM_145400.2,1350-1368).
gcaatgggcagatgtatca

SEQ ID NO: 670663 - DNA, 19 bp, Mus musculus
  siRNA target sequence for Ube4a (NM_145400.2,1393-1411).
gaatatctcgtgcttgtta

SEQ ID NO: 670664 - DNA, 19 bp, Mus musculus
  siRNA target sequence for Ube4a (NM_145400.2,1399-1417).
ctcgtgcttgttaaagact

SEQ ID NO: 670665 - DNA, 19 bp, Mus musculus
  siRNA target sequence for Ube4a (NM_145400.2,1416-1434).
ctccgggtgtggtagagaa

SEQ ID NO: 670666 - DNA, 19 bp, Mus musculus
  siRNA target sequence for Ube4a (NM_145400.2,1470-1488).
ctcaggagatcaaagtaca

SEQ ID NO: 670667 - DNA, 19 bp, Mus musculus
  siRNA target sequence for Ube4a (NM_145400.2,1655-1673).
cccgaaatcttcttccaaa

SEQ ID NO: 670668 - DNA, 19 bp, Mus musculus
  siRNA target sequence for Ube4a (NM_145400.2,1656-1674).
ccgaaatcttcttccaaat

SEQ ID NO: 670669 - DNA, 19 bp, Mus musculus
  siRNA target sequence for Ube4a (NM_145400.2,1755-1773).
cccggctcctcacctttaa

SEQ ID NO: 670670 - DNA, 19 bp, Mus musculus
  siRNA target sequence for Ube4a (NM_145400.2,1925-1943).
gccctgacagagtatacct

SEQ ID NO: 670671 - DNA, 19 bp, Mus musculus
  siRNA target sequence for Ube4a (NM_145400.2,1926-1944).
ccctgacagagtatacctt

SEQ ID NO: 670672 - DNA, 19 bp, Mus musculus
  siRNA target sequence for Ube4a (NM_145400.2,1941-1959).
ccttgtacttgggatttca

SEQ ID NO: 670673 - DNA, 19 bp, Mus musculus
  siRNA target sequence for Ube4a (NM_145400.2,2081-2099).
ctgatgaccatctatctct

SEQ ID NO: 670674 - DNA, 19 bp, Mus musculus
  siRNA target sequence for Ube4a (NM_145400.2,2123-2141).
ccccagatgctgcaaaact

SEQ ID NO: 670675 - DNA, 19 bp, Mus musculus
  siRNA target sequence for Ube4a (NM_145400.2,2203-2221).
ctcccagccaatagaacta

SEQ ID NO: 670676 - DNA, 19 bp, Mus musculus
  siRNA target sequence for Ube4a (NM_145400.2,2254-2272).
ggcttatgtgccagaattt

SEQ ID NO: 670677 - DNA, 19 bp, Mus musculus
  siRNA target sequence for Ube4a (NM_145400.2,2255-2273).
gcttatgtgccagaatttt

SEQ ID NO: 670678 - DNA, 19 bp, Mus musculus
  siRNA target sequence for Ube4a (NM_145400.2,2377-2395).
cattttcactggaagcata

SEQ ID NO: 670679 - DNA, 19 bp, Mus musculus
  siRNA target sequence for Ube4a (NM_145400.2,2385-2403).
ctggaagcatagaaagaat

SEQ ID NO: 670680 - DNA, 19 bp, Mus musculus
  siRNA target sequence for Ube4a (NM_145400.2,2586-2604).
caggggacccccatcaatt

SEQ ID NO: 670681 - DNA, 19 bp, Mus musculus
  siRNA target sequence for Ube4a (NM_145400.2,2589-2607).
gggacccccatcaatttga

SEQ ID NO: 670682 - DNA, 19 bp, Mus musculus
  siRNA target sequence for Ube4a (NM_145400.2,2590-2608).
ggacccccatcaatttgaa

SEQ ID NO: 670683 - DNA, 19 bp, Mus musculus
  siRNA target sequence for Ube4a (NM_145400.2,2595-2613).
cccatcaatttgaacagaa

SEQ ID NO: 670684 - DNA, 19 bp, Mus musculus
  siRNA target sequence for Ube4a (NM_145400.2,2630-2648).
cctatgtatcccatcctaa

SEQ ID NO: 670685 - DNA, 19 bp, Mus musculus
  siRNA target sequence for Ube4a (NM_145400.2,2656-2674).
gtgggggacagattgctat

SEQ ID NO: 670686 - DNA, 19 bp, Mus musculus
  siRNA target sequence for Ube4a (NM_145400.2,2670-2688).
gctatcgggagagcattaa

SEQ ID NO: 670687 - DNA, 19 bp, Mus musculus
  siRNA target sequence for Ube4a (NM_145400.2,2675-2693).
cgggagagcattaaggatt

SEQ ID NO: 670688 - DNA, 19 bp, Mus musculus
  siRNA target sequence for Ube4a (NM_145400.2,2696-2714).
gctgactatgcctctaaga

SEQ ID NO: 670689 - DNA, 19 bp, Mus musculus
  siRNA target sequence for Ube4a (NM_145400.2,2697-2715).
ctgactatgcctctaagaa

SEQ ID NO: 670690 - DNA, 19 bp, Mus musculus
  siRNA target sequence for Ube4a (NM_145400.2,2699-2717).
gactatgcctctaagaatt

SEQ ID NO: 670691 - DNA, 19 bp, Mus musculus
  siRNA target sequence for Ube4a (NM_145400.2,2701-2719).
ctatgcctctaagaattta

SEQ ID NO: 670692 - DNA, 19 bp, Mus musculus
  siRNA target sequence for Ube4a (NM_145400.2,2709-2727).
ctaagaatttagaagctat

SEQ ID NO: 670693 - DNA, 19 bp, Mus musculus
  siRNA target sequence for Ube4a (NM_145400.2,2713-2731).
gaatttagaagctatgaat

SEQ ID NO: 670694 - DNA, 19 bp, Mus musculus
  siRNA target sequence for Ube4a (NM_145400.2,2738-2756).
ctgttcctccgatttctta

SEQ ID NO: 670695 - DNA, 19 bp, Mus musculus
  siRNA target sequence for Ube4a (NM_145400.2,2747-2765).
cgatttcttaacctgttaa

SEQ ID NO: 670696 - DNA, 19 bp, Mus musculus
  siRNA target sequence for Ube4a (NM_145400.2,2912-2930).
cagctggcacggttccata

SEQ ID NO: 670697 - DNA, 19 bp, Mus musculus
  siRNA target sequence for Ube4a (NM_145400.2,2915-2933).
ctggcacggttccataaca

SEQ ID NO: 670698 - DNA, 19 bp, Mus musculus
  siRNA target sequence for Ube4a (NM_145400.2,2919-2937).
cacggttccataacatcat

SEQ ID NO: 670699 - DNA, 19 bp, Mus musculus
  siRNA target sequence for Ube4a (NM_145400.2,2921-2939).
cggttccataacatcatgt

SEQ ID NO: 670700 - DNA, 19 bp, Mus musculus
  siRNA target sequence for Ube4a (NM_145400.2,2938-2956).
gtccaatgaaacaattggt

SEQ ID NO: 670701 - DNA, 19 bp, Mus musculus
  siRNA target sequence for Ube4a (NM_145400.2,2949-2967).
caattggtaccctttcctt

SEQ ID NO: 670702 - DNA, 19 bp, Mus musculus
  siRNA target sequence for Ube4a (NM_145400.2,3089-3107).
gacttcagcgaatttgact

SEQ ID NO: 670703 - DNA, 19 bp, Mus musculus
  siRNA target sequence for Ube4a (NM_145400.2,3114-3132).
ctcagcagctcgtatcaga

SEQ ID NO: 670704 - DNA, 19 bp, Mus musculus
  siRNA target sequence for Ube4a (NM_145400.2,3131-3149).
gacatctgcactatctact

SEQ ID NO: 670705 - DNA, 19 bp, Mus musculus
  siRNA target sequence for Ube4a (NM_145400.2,3136-3154).
ctgcactatctacttaaat

SEQ ID NO: 670706 - DNA, 19 bp, Mus musculus
  siRNA target sequence for Ube4a (NM_145400.2,3138-3156).
gcactatctacttaaatct

SEQ ID NO: 670707 - DNA, 19 bp, Mus musculus
  siRNA target sequence for Ube4a (NM_145400.2,3139-3157).
cactatctacttaaatctt

SEQ ID NO: 670708 - DNA, 19 bp, Mus musculus
  siRNA target sequence for Dad1 (NM_010015.1,245-263).
gcctgagaatacagatcaa

SEQ ID NO: 670709 - DNA, 19 bp, Mus musculus
  siRNA target sequence for Fkrp (NM_173430.1,171-189).
cctcctagtcttcttctat

SEQ ID NO: 670710 - DNA, 19 bp, Mus musculus
  siRNA target sequence for Fkrp (NM_173430.1,175-193).
ctagtcttcttctatgtgt

SEQ ID NO: 670711 - DNA, 19 bp, Mus musculus
  siRNA target sequence for Fkrp (NM_173430.1,687-705).
ccgctgcgacgctttggat

SEQ ID NO: 670712 - DNA, 19 bp, Mus musculus
  siRNA target sequence for Fkrp (NM_173430.1,1031-1049).
cacccgcctacctgtatga

SEQ ID NO: 670713 - DNA, 19 bp, Mus musculus
  siRNA target sequence for Fkrp (NM_173430.1,1172-1190).
ctcgccacggcgacatcat

SEQ ID NO: 670714 - DNA, 19 bp, Mus musculus
  siRNA target sequence for Fkrp (NM_173430.1,1196-1214).
gggactacgacgtagatct

SEQ ID NO: 670715 - DNA, 19 bp, Mus musculus
  siRNA target sequence for Fkrp (NM_173430.1,1282-1300).
gatgaacgcggctttgtgt

SEQ ID NO: 670716 - DNA, 19 bp, Mus musculus
  siRNA target sequence for Fkrp (NM_173430.1,1310-1328).
cggtggagggcgacttctt

SEQ ID NO: 670717 - DNA, 19 bp, Mus musculus
  siRNA target sequence for Fkrp (NM_173430.1,1495-1513).
gcacaggcccctaacaact

SEQ ID NO: 670718 - DNA, 19 bp, Mus musculus
  siRNA target sequence for B930030J24 (NM_177572.3,353-371).
ctgtccagtcggatagtga

SEQ ID NO: 670719 - DNA, 19 bp, Mus musculus
  siRNA target sequence for B930030J24 (NM_177572.3,421-439).
cgtcctcaaagcatcttaa

SEQ ID NO: 670720 - DNA, 19 bp, Mus musculus
  siRNA target sequence for B930030J24 (NM_177572.3,422-440).
gtcctcaaagcatcttaaa

SEQ ID NO: 670721 - DNA, 19 bp, Mus musculus
  siRNA target sequence for B930030J24 (NM_177572.3,424-442).
cctcaaagcatcttaaact

SEQ ID NO: 670722 - DNA, 19 bp, Mus musculus
  siRNA target sequence for B930030J24 (NM_177572.3,450-468).
caagttttggacattccaa

SEQ ID NO: 670723 - DNA, 19 bp, Mus musculus
  siRNA target sequence for B930030J24 (NM_177572.3,520-538).
cacgaagacttctctaaaa

SEQ ID NO: 670724 - DNA, 19 bp, Mus musculus
  siRNA target sequence for B930030J24 (NM_177572.3,786-804).
gcaaagcaactgctttcta

SEQ ID NO: 670725 - DNA, 19 bp, Mus musculus
  siRNA target sequence for B930030J24 (NM_177572.3,890-908).
gtggcatcgaccttcttat

SEQ ID NO: 670726 - DNA, 19 bp, Mus musculus
  siRNA target sequence for B930030J24 (NM_177572.3,892-910).
ggcatcgaccttcttatca

SEQ ID NO: 670727 - DNA, 19 bp, Mus musculus
  siRNA target sequence for B930030J24 (NM_177572.3,893-911).
gcatcgaccttcttatcat

SEQ ID NO: 670728 - DNA, 19 bp, Mus musculus
  siRNA target sequence for B930030J24 (NM_177572.3,969-987).
cgaccaggcatgcaactta

SEQ ID NO: 670729 - DNA, 19 bp, Mus musculus
  siRNA target sequence for B930030J24 (NM_177572.3,972-990).
ccaggcatgcaacttagat

SEQ ID NO: 670730 - DNA, 19 bp, Mus musculus
  siRNA target sequence for B930030J24 (NM_177572.3,1195-1213).
cgggattcctcagtaaaaa

SEQ ID NO: 670731 - DNA, 19 bp, Mus musculus
  siRNA target sequence for B930030J24 (NM_177572.3,1197-1215).
ggattcctcagtaaaaaca

SEQ ID NO: 670732 - DNA, 19 bp, Mus musculus
  siRNA target sequence for Arih1 (NM_019927.1,314-332).
cagaatccagcaactatca

SEQ ID NO: 670733 - DNA, 19 bp, Mus musculus
  siRNA target sequence for Arih1 (NM_019927.1,324-342).
caactatcacgagaatact

SEQ ID NO: 670734 - DNA, 19 bp, Mus musculus
  siRNA target sequence for Arih1 (NM_019927.1,341-359).
ctccttagccacttcaatt

SEQ ID NO: 670735 - DNA, 19 bp, Mus musculus
  siRNA target sequence for Arih1 (NM_019927.1,349-367).
ccacttcaattgggataaa

SEQ ID NO: 670736 - DNA, 19 bp, Mus musculus
  siRNA target sequence for Arih1 (NM_019927.1,412-430).
ctttgctgagtgtcatgta

SEQ ID NO: 670737 - DNA, 19 bp, Mus musculus
  siRNA target sequence for Arih1 (NM_019927.1,421-439).
gtgtcatgtaattaatcca

SEQ ID NO: 670738 - DNA, 19 bp, Mus musculus
  siRNA target sequence for Arih1 (NM_019927.1,450-468).
ctcgaactcgccagatgaa

SEQ ID NO: 670739 - DNA, 19 bp, Mus musculus
  siRNA target sequence for Arih1 (NM_019927.1,452-470).
cgaactcgccagatgaata

SEQ ID NO: 670740 - DNA, 19 bp, Mus musculus
  siRNA target sequence for Arih1 (NM_019927.1,474-492).
ggtcatcggcacaggatat

SEQ ID NO: 670741 - DNA, 19 bp, Mus musculus
  siRNA target sequence for Arih1 (NM_019927.1,517-535).
ctaccctaactcgtatttt

SEQ ID NO: 670742 - DNA, 19 bp, Mus musculus
  siRNA target sequence for Arih1 (NM_019927.1,568-586).
gcagtgctggagtgaatat

SEQ ID NO: 670743 - DNA, 19 bp, Mus musculus
  siRNA target sequence for Arih1 (NM_019927.1,571-589).
gtgctggagtgaatattta

SEQ ID NO: 670744 - DNA, 19 bp, Mus musculus
  siRNA target sequence for Arih1 (NM_019927.1,579-597).
gtgaatatttaactacaaa

SEQ ID NO: 670745 - DNA, 19 bp, Mus musculus
  siRNA target sequence for Arih1 (NM_019927.1,611-629).
ggcatggggcagactattt

SEQ ID NO: 670746 - DNA, 19 bp, Mus musculus
  siRNA target sequence for Arih1 (NM_019927.1,638-656).
gcgcatggttgtgatatct

SEQ ID NO: 670747 - DNA, 19 bp, Mus musculus
  siRNA target sequence for Arih1 (NM_019927.1,639-657).
cgcatggttgtgatatctt

SEQ ID NO: 670748 - DNA, 19 bp, Mus musculus
  siRNA target sequence for Arih1 (NM_019927.1,640-658).
gcatggttgtgatatctta

SEQ ID NO: 670749 - DNA, 19 bp, Mus musculus
  siRNA target sequence for Arih1 (NM_019927.1,659-677).
gtggatgacaacacagtta

SEQ ID NO: 670750 - DNA, 19 bp, Mus musculus
  siRNA target sequence for Arih1 (NM_019927.1,690-708).
cagattccaaagttaagtt

SEQ ID NO: 670751 - DNA, 19 bp, Mus musculus
  siRNA target sequence for Arih1 (NM_019927.1,696-714).
ccaaagttaagttaaaata

SEQ ID NO: 670752 - DNA, 19 bp, Mus musculus
  siRNA target sequence for Arih1 (NM_019927.1,743-761).
gagtgcaaccgactgttaa

SEQ ID NO: 670753 - DNA, 19 bp, Mus musculus
  siRNA target sequence for Arih1 (NM_019927.1,842-860).
cgccagttttgctttaact

SEQ ID NO: 670754 - DNA, 19 bp, Mus musculus
  siRNA target sequence for Arih1 (NM_019927.1,874-892).
gcatgatccagttaaatgt

SEQ ID NO: 670755 - DNA, 19 bp, Mus musculus
  siRNA target sequence for Arih1 (NM_019927.1,904-922).
gaagtggattaaaaagtgt

SEQ ID NO: 670756 - DNA, 19 bp, Mus musculus
  siRNA target sequence for Arih1 (NM_019927.1,948-966).
ggattgcagctaacacaaa

SEQ ID NO: 670757 - DNA, 19 bp, Mus musculus
  siRNA target sequence for Arih1 (NM_019927.1,981-999).
gccatgtcacaattgagaa

SEQ ID NO: 670758 - DNA, 19 bp, Mus musculus
  siRNA target sequence for Arih1 (NM_019927.1,997-1015).
gaaggatggcggttgtaat

SEQ ID NO: 670759 - DNA, 19 bp, Mus musculus
  siRNA target sequence for Arih1 (NM_019927.1,1001-1019).
gatggcggttgtaatcaca

SEQ ID NO: 670760 - DNA, 19 bp, Mus musculus
  siRNA target sequence for Arih1 (NM_019927.1,1026-1044).
gtcgtaaccagaactgtaa

SEQ ID NO: 670761 - DNA, 19 bp, Mus musculus
  siRNA target sequence for Arih1 (NM_019927.1,1088-1106).
ggatctgcctggtacaact

SEQ ID NO: 670762 - DNA, 19 bp, Mus musculus
  siRNA target sequence for Arih1 (NM_019927.1,1092-1110).
ctgcctggtacaactgtaa

SEQ ID NO: 670763 - DNA, 19 bp, Mus musculus
  siRNA target sequence for Arih1 (NM_019927.1,1102-1120).
caactgtaaccgctataat

SEQ ID NO: 670764 - DNA, 19 bp, Mus musculus
  siRNA target sequence for Arih1 (NM_019927.1,1221-1239).
gtctacgcttcgagcataa

SEQ ID NO: 670765 - DNA, 19 bp, Mus musculus
  siRNA target sequence for Arih1 (NM_019927.1,1346-1364).
cgtgccacactcatgtaca

SEQ ID NO: 670766 - DNA, 19 bp, Mus musculus
  siRNA target sequence for Arih1 (NM_019927.1,1365-1383).
cttatgtcttcgctttcta

SEQ ID NO: 670767 - DNA, 19 bp, Mus musculus
  siRNA target sequence for Arih1 (NM_019927.1,1461-1479).
gctaccttgaacgagatat

SEQ ID NO: 670768 - DNA, 19 bp, Mus musculus
  siRNA target sequence for Arih1 (NM_019927.1,1462-1480).
ctaccttgaacgagatatt

SEQ ID NO: 670769 - DNA, 19 bp, Mus musculus
  siRNA target sequence for Arih1 (NM_019927.1,1472-1490).
cgagatatttcccaagatt

SEQ ID NO: 670770 - DNA, 19 bp, Mus musculus
  siRNA target sequence for Arih1 (NM_019927.1,1487-1505).
gattctctgcaagatataa

SEQ ID NO: 670771 - DNA, 19 bp, Mus musculus
  siRNA target sequence for Arih1 (NM_019927.1,1491-1509).
ctctgcaagatataaagca

SEQ ID NO: 670772 - DNA, 19 bp, Mus musculus
  siRNA target sequence for Arih1 (NM_019927.1,1517-1535).
caagataagtacagatact

SEQ ID NO: 670773 - DNA, 19 bp, Mus musculus
  siRNA target sequence for Arih1 (NM_019927.1,1542-1560).
gtcgacgaagggttttgtt

SEQ ID NO: 670774 - DNA, 19 bp, Mus musculus
  siRNA target sequence for Arih1 (NM_019927.1,1545-1563).
gacgaagggttttgttaca

SEQ ID NO: 670775 - DNA, 19 bp, Mus musculus
  siRNA target sequence for Fbxl12 (NM_013911.1,1203-1221).
gcccacacccactcagatt

SEQ ID NO: 670776 - DNA, 19 bp, Mus musculus
  siRNA target sequence for Fbxo8 (NM_015791.2,353-371).
cttcaagcaacatttctca

SEQ ID NO: 670777 - DNA, 19 bp, Mus musculus
  siRNA target sequence for Fbxo8 (NM_015791.2,392-410).
cccaaggaggcattgatat

SEQ ID NO: 670778 - DNA, 19 bp, Mus musculus
  siRNA target sequence for Fbxo8 (NM_015791.2,394-412).
caaggaggcattgatatct

SEQ ID NO: 670779 - DNA, 19 bp, Mus musculus
  siRNA target sequence for Fbxo8 (NM_015791.2,398-416).
gaggcattgatatctatca

SEQ ID NO: 670780 - DNA, 19 bp, Mus musculus
  siRNA target sequence for Fbxo8 (NM_015791.2,402-420).
cattgatatctatcatctt

SEQ ID NO: 670781 - DNA, 19 bp, Mus musculus
  siRNA target sequence for Fbxo8 (NM_015791.2,442-460).
gaacaggaggggttcataa

SEQ ID NO: 670782 - DNA, 19 bp, Mus musculus
  siRNA target sequence for Fbxo8 (NM_015791.2,483-501).
gctgagcttcaccatctta

SEQ ID NO: 670783 - DNA, 19 bp, Mus musculus
  siRNA target sequence for Fbxo8 (NM_015791.2,546-564).
gcaagacctcgctaatgat

SEQ ID NO: 670784 - DNA, 19 bp, Mus musculus
  siRNA target sequence for Fbxo8 (NM_015791.2,573-591).
ctggcaagggttgtgtaaa

SEQ ID NO: 670785 - DNA, 19 bp, Mus musculus
  siRNA target sequence for Fbxo8 (NM_015791.2,576-594).
gcaagggttgtgtaaatct

SEQ ID NO: 670786 - DNA, 19 bp, Mus musculus
  siRNA target sequence for Fbxo8 (NM_015791.2,577-595).
caagggttgtgtaaatcta

SEQ ID NO: 670787 - DNA, 19 bp, Mus musculus
  siRNA target sequence for Fbxo8 (NM_015791.2,599-617).
ggggtcactgctctatata

SEQ ID NO: 670788 - DNA, 19 bp, Mus musculus
  siRNA target sequence for Fbxo8 (NM_015791.2,618-636).
caataagaacccaccttta

SEQ ID NO: 670789 - DNA, 19 bp, Mus musculus
  siRNA target sequence for Fbxo8 (NM_015791.2,624-642).
gaacccacctttaggattt

SEQ ID NO: 670790 - DNA, 19 bp, Mus musculus
  siRNA target sequence for Fbxo8 (NM_015791.2,673-691).
gagggaagcctcaccttta

SEQ ID NO: 670791 - DNA, 19 bp, Mus musculus
  siRNA target sequence for Fbxo8 (NM_015791.2,705-723).
ggagggagtgagctacttt

SEQ ID NO: 670792 - DNA, 19 bp, Mus musculus
  siRNA target sequence for Fbxo8 (NM_015791.2,728-746).
ccaagggtatcctagatga

SEQ ID NO: 670793 - DNA, 19 bp, Mus musculus
  siRNA target sequence for Fbxo8 (NM_015791.2,729-747).
caagggtatcctagatgat

SEQ ID NO: 670794 - DNA, 19 bp, Mus musculus
  siRNA target sequence for Fbxo8 (NM_015791.2,742-760).
gatgattcgccaaaggaaa

SEQ ID NO: 670795 - DNA, 19 bp, Mus musculus
  siRNA target sequence for Fbxo8 (NM_015791.2,774-792).
cttctgtaccagaacacta

SEQ ID NO: 670796 - DNA, 19 bp, Mus musculus
  siRNA target sequence for Fbxo8 (NM_015791.2,777-795).
ctgtaccagaacactaaat

SEQ ID NO: 670797 - DNA, 19 bp, Mus musculus
  siRNA target sequence for Fbxo8 (NM_015791.2,846-864).
ccttgtaaccttgcataat

SEQ ID NO: 670798 - DNA, 19 bp, Mus musculus
  siRNA target sequence for Fbxo8 (NM_015791.2,883-901).
ccgaatgcactgagagaat

SEQ ID NO: 670799 - DNA, 19 bp, Mus musculus
  siRNA target sequence for Fbxo8 (NM_015791.2,896-914).
gagaattttttcgtcatat

SEQ ID NO: 670800 - DNA, 19 bp, Mus musculus
  siRNA target sequence for Fbxo8 (NM_015791.2,931-949).
cgtggggagtaccttgaaa

SEQ ID NO: 670801 - DNA, 19 bp, Mus musculus
  siRNA target sequence for Fbxo8 (NM_015791.2,935-953).
gggagtaccttgaaactct

SEQ ID NO: 670802 - DNA, 19 bp, Mus musculus
  siRNA target sequence for Fbxo8 (NM_015791.2,936-954).
ggagtaccttgaaactctt

SEQ ID NO: 670803 - DNA, 19 bp, Mus musculus
  siRNA target sequence for Fbxo8 (NM_015791.2,937-955).
gagtaccttgaaactctta

SEQ ID NO: 670804 - DNA, 19 bp, Mus musculus
  siRNA target sequence for Fbxo8 (NM_015791.2,939-957).
gtaccttgaaactcttata

SEQ ID NO: 670805 - DNA, 19 bp, Mus musculus
  siRNA target sequence for Fbxo8 (NM_015791.2,959-977).
ccaagttctcacataggtt

SEQ ID NO: 670806 - DNA, 19 bp, Mus musculus
  siRNA target sequence for Fbxo8 (NM_015791.2,1036-1054).
gtactgtgctactctttga

SEQ ID NO: 670807 - DNA, 19 bp, Mus musculus
  siRNA target sequence for Fbxo8 (NM_015791.2,1041-1059).
gtgctactctttgattcta

SEQ ID NO: 670808 - DNA, 19 bp, Mus musculus
  siRNA target sequence for Fbxo8 (NM_015791.2,1076-1094).
ctagtcctcatgtgaagaa

SEQ ID NO: 670809 - DNA, 19 bp, Mus musculus
  siRNA target sequence for Fbxo8 (NM_015791.2,1079-1097).
gtcctcatgtgaagaataa

SEQ ID NO: 670810 - DNA, 19 bp, Mus musculus
  siRNA target sequence for Fbxo8 (NM_015791.2,1082-1100).
ctcatgtgaagaataaaat

SEQ ID NO: 670811 - DNA, 19 bp, Mus musculus
  siRNA target sequence for Fbxo8 (NM_015791.2,1101-1119).
gtcaaaaagagagtttatt

SEQ ID NO: 670812 - DNA, 19 bp, Mus musculus
  siRNA target sequence for Fbxo8 (NM_015791.2,1136-1154).
ctgctcagaacattagtga

SEQ ID NO: 670813 - DNA, 19 bp, Mus musculus
  siRNA target sequence for Fbxo8 (NM_015791.2,1162-1180).
gtaggacacctttatgaca

SEQ ID NO: 670814 - DNA, 19 bp, Mus musculus
  siRNA target sequence for Siah2 (NM_009174.2,867-885).
gcacctggtgtgtaaccaa

SEQ ID NO: 670815 - DNA, 19 bp, Mus musculus
  siRNA target sequence for Siah2 (NM_009174.2,868-886).
cacctggtgtgtaaccaat

SEQ ID NO: 670816 - DNA, 19 bp, Mus musculus
  siRNA target sequence for Siah2 (NM_009174.2,882-900).
ccaatgccgccagaagtta

SEQ ID NO: 670817 - DNA, 19 bp, Mus musculus
  siRNA target sequence for Siah2 (NM_009174.2,883-901).
caatgccgccagaagttaa

SEQ ID NO: 670818 - DNA, 19 bp, Mus musculus
  siRNA target sequence for Siah2 (NM_009174.2,966-984).
cgcctcggcagttctgttt

SEQ ID NO: 670819 - DNA, 19 bp, Mus musculus
  siRNA target sequence for Siah2 (NM_009174.2,1144-1162).
catgcccacaagagtatca

SEQ ID NO: 670820 - DNA, 19 bp, Mus musculus
  siRNA target sequence for Siah2 (NM_009174.2,1247-1265).
gttttggccaccacttcat

SEQ ID NO: 670821 - DNA, 19 bp, Mus musculus
  siRNA target sequence for Siah2 (NM_009174.2,1266-1284).
gctggtacttgaaaagcaa

SEQ ID NO: 670822 - DNA, 19 bp, Mus musculus
  siRNA target sequence for Siah2 (NM_009174.2,1410-1428).
cacacctcggtccattcat

SEQ ID NO: 670823 - DNA, 19 bp, Mus musculus
  siRNA target sequence for Siah2 (NM_009174.2,1508-1526).
ggaaccttggaatcaatgt

SEQ ID NO: 670824 - DNA, 19 bp, Mus musculus
  siRNA target sequence for Siah2 (NM_009174.2,1521-1539).
caatgtcacgatatctaca

SEQ ID NO: 670825 - DNA, 19 bp, Mus musculus
  siRNA target sequence for Ufd1l (NM_011672.2,181-199).
ctagcagggcctaatgaca

SEQ ID NO: 670826 - DNA, 19 bp, Mus musculus
  siRNA target sequence for Ufd1l (NM_011672.2,239-257).
cctcagccctcgatcaact

SEQ ID NO: 670827 - DNA, 19 bp, Mus musculus
  siRNA target sequence for Ufd1l (NM_011672.2,256-274).
ctcagccggctcaacatta

SEQ ID NO: 670828 - DNA, 19 bp, Mus musculus
  siRNA target sequence for Ufd1l (NM_011672.2,260-278).
gccggctcaacattaccta

SEQ ID NO: 670829 - DNA, 19 bp, Mus musculus
  siRNA target sequence for Ufd1l (NM_011672.2,261-279).
ccggctcaacattacctat

SEQ ID NO: 670830 - DNA, 19 bp, Mus musculus
  siRNA target sequence for Ufd1l (NM_011672.2,280-298).
cctatgctgtttaaattga

SEQ ID NO: 670831 - DNA, 19 bp, Mus musculus
  siRNA target sequence for Ufd1l (NM_011672.2,286-304).
ctgtttaaattgaccaata

SEQ ID NO: 670832 - DNA, 19 bp, Mus musculus
  siRNA target sequence for Ufd1l (NM_011672.2,297-315).
gaccaataagaattcagat

SEQ ID NO: 670833 - DNA, 19 bp, Mus musculus
  siRNA target sequence for Ufd1l (NM_011672.2,442-460).
caagtggcgacctactcta

SEQ ID NO: 670834 - DNA, 19 bp, Mus musculus
  siRNA target sequence for Ufd1l (NM_011672.2,445-463).
gtggcgacctactctaagt

SEQ ID NO: 670835 - DNA, 19 bp, Mus musculus
  siRNA target sequence for Ufd1l (NM_011672.2,478-496).
ccagacttcctggatatta

SEQ ID NO: 670836 - DNA, 19 bp, Mus musculus
  siRNA target sequence for Ufd1l (NM_011672.2,481-499).
gacttcctggatattacca

SEQ ID NO: 670837 - DNA, 19 bp, Mus musculus
  siRNA target sequence for Ufd1l (NM_011672.2,498-516).
caaccctaaagcggtatta

SEQ ID NO: 670838 - DNA, 19 bp, Mus musculus
  siRNA target sequence for Ufd1l (NM_011672.2,501-519).
ccctaaagcggtattagaa

SEQ ID NO: 670839 - DNA, 19 bp, Mus musculus
  siRNA target sequence for Ufd1l (NM_011672.2,546-564).
gacgactggagatgtgatt

SEQ ID NO: 670840 - DNA, 19 bp, Mus musculus
  siRNA target sequence for Ufd1l (NM_011672.2,556-574).
gatgtgattgctatcaact

SEQ ID NO: 670841 - DNA, 19 bp, Mus musculus
  siRNA target sequence for Ufd1l (NM_011672.2,559-577).
gtgattgctatcaactaca

SEQ ID NO: 670842 - DNA, 19 bp, Mus musculus
  siRNA target sequence for Ufd1l (NM_011672.2,624-642).
ggctgtatccattattgaa

SEQ ID NO: 670843 - DNA, 19 bp, Mus musculus
  siRNA target sequence for Ufd1l (NM_011672.2,625-643).
gctgtatccattattgaat

SEQ ID NO: 670844 - DNA, 19 bp, Mus musculus
  siRNA target sequence for Ufd1l (NM_011672.2,668-686).
ctcccttgggatacaaaga

SEQ ID NO: 670845 - DNA, 19 bp, Mus musculus
  siRNA target sequence for Ufd1l (NM_011672.2,837-855).
caagcctggagacatcaaa

SEQ ID NO: 670846 - DNA, 19 bp, Mus musculus
  siRNA target sequence for Ufd1l (NM_011672.2,857-875).
gaggaattcctaattacga

SEQ ID NO: 670847 - DNA, 19 bp, Mus musculus
  siRNA target sequence for Ufd1l (NM_011672.2,859-877).
ggaattcctaattacgaat

SEQ ID NO: 670848 - DNA, 19 bp, Mus musculus
  siRNA target sequence for Ufd1l (NM_011672.2,860-878).
gaattcctaattacgaatt

SEQ ID NO: 670849 - DNA, 19 bp, Mus musculus
  siRNA target sequence for Ufd1l (NM_011672.2,866-884).
ctaattacgaatttaagct

SEQ ID NO: 670850 - DNA, 19 bp, Mus musculus
  siRNA target sequence for Ufd1l (NM_011672.2,911-929).
cacgtccattggtcaaaaa

SEQ ID NO: 670851 - DNA, 19 bp, Mus musculus
  siRNA target sequence for Ufd1l (NM_011672.2,914-932).
gtccattggtcaaaaaggt

SEQ ID NO: 670852 - DNA, 19 bp, Mus musculus
  siRNA target sequence for Ufd1l (NM_011672.2,949-967).
ggaggcagattcattgctt

SEQ ID NO: 670853 - DNA, 19 bp, Mus musculus
  siRNA target sequence for Ufd1l (NM_011672.2,980-998).
gacagtcactgcgtaagaa

SEQ ID NO: 670854 - DNA, 19 bp, Mus musculus
  siRNA target sequence for Pcolce (NM_008788.1,67-85).
ctttctggggccattcctt

SEQ ID NO: 670855 - DNA, 19 bp, Mus musculus
  siRNA target sequence for Pcolce (NM_008788.1,273-291).
ccttccgagtcttcgatat

SEQ ID NO: 670856 - DNA, 19 bp, Mus musculus
  siRNA target sequence for Pcolce (NM_008788.1,410-428).
ggcaaccaagtgactttaa

SEQ ID NO: 670857 - DNA, 19 bp, Mus musculus
  siRNA target sequence for Pcolce (NM_008788.1,618-636).
cctcaaaccaggtgatcat

SEQ ID NO: 670858 - DNA, 19 bp, Mus musculus
  siRNA target sequence for Pcolce (NM_008788.1,628-646).
ggtgatcatgctaaccttt

SEQ ID NO: 670859 - DNA, 19 bp, Mus musculus
  siRNA target sequence for Pcolce (NM_008788.1,791-809).
ctcctggtccagtttgtat

SEQ ID NO: 670860 - DNA, 19 bp, Mus musculus
  siRNA target sequence for Pcolce (NM_008788.1,793-811).
cctggtccagtttgtatca

SEQ ID NO: 670861 - DNA, 19 bp, Mus musculus
  siRNA target sequence for Pcolce (NM_008788.1,796-814).
ggtccagtttgtatcagat

SEQ ID NO: 670862 - DNA, 19 bp, Mus musculus
  siRNA target sequence for Pcolce (NM_008788.1,861-879).
cacgggatgccgtagagaa

SEQ ID NO: 670863 - DNA, 19 bp, Mus musculus
  siRNA target sequence for Pcolce (NM_008788.1,968-986).
ccacccactaaacctaaat

SEQ ID NO: 670864 - DNA, 19 bp, Mus musculus
  siRNA target sequence for Pcolce (NM_008788.1,1062-1080).
cctgcccaaagcagtacaa

SEQ ID NO: 670865 - DNA, 19 bp, Mus musculus
  siRNA target sequence for Pcolce (NM_008788.1,1188-1206).
gtctccttggtgtctacaa

SEQ ID NO: 670866 - DNA, 19 bp, Mus musculus
  siRNA target sequence for Psmd8 (NM_026545.1,174-192).
gcatgtacgagcaactcaa

SEQ ID NO: 670867 - DNA, 19 bp, Mus musculus
  siRNA target sequence for Psmd8 (NM_026545.1,206-224).
cggaagaacccgaacctta

SEQ ID NO: 670868 - DNA, 19 bp, Mus musculus
  siRNA target sequence for Psmd8 (NM_026545.1,211-229).
gaacccgaaccttagtaaa

SEQ ID NO: 670869 - DNA, 19 bp, Mus musculus
  siRNA target sequence for Psmd8 (NM_026545.1,214-232).
cccgaaccttagtaaatgt

SEQ ID NO: 670870 - DNA, 19 bp, Mus musculus
  siRNA target sequence for Psmd8 (NM_026545.1,292-310).
ggggaccaaactgactaaa

SEQ ID NO: 670871 - DNA, 19 bp, Mus musculus
  siRNA target sequence for Psmd8 (NM_026545.1,319-337).
cattctggcccgtgacatt

SEQ ID NO: 670872 - DNA, 19 bp, Mus musculus
  siRNA target sequence for Psmd8 (NM_026545.1,404-422).
caactcaaatgctactact

SEQ ID NO: 670873 - DNA, 19 bp, Mus musculus
  siRNA target sequence for Psmd8 (NM_026545.1,409-427).
caaatgctactactttgat

SEQ ID NO: 670874 - DNA, 19 bp, Mus musculus
  siRNA target sequence for Psmd8 (NM_026545.1,414-432).
gctactactttgattacaa

SEQ ID NO: 670875 - DNA, 19 bp, Mus musculus
  siRNA target sequence for Psmd8 (NM_026545.1,444-462).
ctgagtcagcctatatgca

SEQ ID NO: 670876 - DNA, 19 bp, Mus musculus
  siRNA target sequence for Psmd8 (NM_026545.1,551-569).
gacatccagaccaatgtct

SEQ ID NO: 670877 - DNA, 19 bp, Mus musculus
  siRNA target sequence for Psmd8 (NM_026545.1,581-599).
cctgtttccctcgaacaat

SEQ ID NO: 670878 - DNA, 19 bp, Mus musculus
  siRNA target sequence for Psmd8 (NM_026545.1,582-600).
ctgtttccctcgaacaata

SEQ ID NO: 670879 - DNA, 19 bp, Mus musculus
  siRNA target sequence for Psmd8 (NM_026545.1,607-625).
ggagggtagctacaacaaa

SEQ ID NO: 670880 - DNA, 19 bp, Mus musculus
  siRNA target sequence for Psmd8 (NM_026545.1,656-674).
gaaagttacaccttcttca

SEQ ID NO: 670881 - DNA, 19 bp, Mus musculus
  siRNA target sequence for Psmd8 (NM_026545.1,660-678).
gttacaccttcttcattga

SEQ ID NO: 670882 - DNA, 19 bp, Mus musculus
  siRNA target sequence for Psmd8 (NM_026545.1,819-837).
gggtgctgggccctaacaa

SEQ ID NO: 670883 - DNA, 19 bp, Mus musculus
  siRNA target sequence for Psmd8 (NM_026545.1,821-839).
gtgctgggccctaacaact

SEQ ID NO: 670884 - DNA, 19 bp, Mus musculus
  siRNA target sequence for Psmd8 (NM_026545.1,824-842).
ctgggccctaacaactact

SEQ ID NO: 670885 - DNA, 19 bp, Mus musculus
  siRNA target sequence for Psmd8 (NM_026545.1,827-845).
ggccctaacaactactaca

SEQ ID NO: 670886 - DNA, 19 bp, Mus musculus
  siRNA target sequence for Psmd8 (NM_026545.1,879-897).
gcaccatcccctttactga

SEQ ID NO: 670887 - DNA, 19 bp, Mus musculus
  siRNA target sequence for Psmd8 (NM_026545.1,880-898).
caccatcccctttactgaa

SEQ ID NO: 670888 - DNA, 19 bp, Mus musculus
  siRNA target sequence for Phlda1 (NM_009344.1,676-694).
cgcccaagcagctacaaca

SEQ ID NO: 670889 - DNA, 19 bp, Mus musculus
  siRNA target sequence for Phlda1 (NM_009344.1,777-795).
ccagtcaagctgaaggaat

SEQ ID NO: 670890 - DNA, 19 bp, Mus musculus
  siRNA target sequence for Phlda1 (NM_009344.1,938-956).
gatggtgcagtacaaaaat

SEQ ID NO: 670891 - DNA, 19 bp, Mus musculus
  siRNA target sequence for 2400002D02Rik (NM_026422.1,127-145).
gaccagacctgtttcagaa

SEQ ID NO: 670892 - DNA, 19 bp, Mus musculus
  siRNA target sequence for 2400002D02Rik (NM_026422.1,130-148).
cagacctgtttcagaagtt

SEQ ID NO: 670893 - DNA, 19 bp, Mus musculus
  siRNA target sequence for 2400002D02Rik (NM_026422.1,212-230).
ccagttcgccattttgcaa

SEQ ID NO: 670894 - DNA, 19 bp, Mus musculus
  siRNA target sequence for 2400002D02Rik (NM_026422.1,268-286).
ggccagggtgaccgttaat

SEQ ID NO: 670895 - DNA, 19 bp, Mus musculus
  siRNA target sequence for 2400002D02Rik (NM_026422.1,269-287).
gccagggtgaccgttaata

SEQ ID NO: 670896 - DNA, 19 bp, Mus musculus
  siRNA target sequence for 2400002D02Rik (NM_026422.1,271-289).
cagggtgaccgttaataga

SEQ ID NO: 670897 - DNA, 19 bp, Mus musculus
  siRNA target sequence for 2400002D02Rik (NM_026422.1,346-364).
ggtggaagcacttaaggat

SEQ ID NO: 670898 - DNA, 19 bp, Mus musculus
  siRNA target sequence for 2400002D02Rik (NM_026422.1,349-367).
ggaagcacttaaggataat

SEQ ID NO: 670899 - DNA, 19 bp, Mus musculus
  siRNA target sequence for 2400002D02Rik (NM_026422.1,350-368).
gaagcacttaaggataatt

SEQ ID NO: 670900 - DNA, 19 bp, Mus musculus
  siRNA target sequence for 2400002D02Rik (NM_026422.1,353-371).
gcacttaaggataatttca

SEQ ID NO: 670901 - DNA, 19 bp, Mus musculus
  siRNA target sequence for 2400002D02Rik (NM_026422.1,354-372).
cacttaaggataatttcaa

SEQ ID NO: 670902 - DNA, 19 bp, Mus musculus
  siRNA target sequence for 2400002D02Rik (NM_026422.1,356-374).
cttaaggataatttcaata

SEQ ID NO: 670903 - DNA, 19 bp, Mus musculus
  siRNA target sequence for 2400002D02Rik (NM_026422.1,370-388).
caataagactctcaacata

SEQ ID NO: 670904 - DNA, 19 bp, Mus musculus
  siRNA target sequence for 2400002D02Rik (NM_026422.1,396-414).
caccaggatcccttgatca

SEQ ID NO: 670905 - DNA, 19 bp, Mus musculus
  siRNA target sequence for 2400002D02Rik (NM_026422.1,461-479).
ggccagatctccatgaagt

SEQ ID NO: 670906 - DNA, 19 bp, Mus musculus
  siRNA target sequence for 2400002D02Rik (NM_026422.1,530-548).
gcagctatcaaggctataa

SEQ ID NO: 670907 - DNA, 19 bp, Mus musculus
  siRNA target sequence for 2400002D02Rik (NM_026422.1,597-615).
gggtacccattcctaaagt

SEQ ID NO: 670908 - DNA, 19 bp, Mus musculus
  siRNA target sequence for 2400002D02Rik (NM_026422.1,599-617).
gtacccattcctaaagtaa

SEQ ID NO: 670909 - DNA, 19 bp, Mus musculus
  siRNA target sequence for 2400002D02Rik (NM_026422.1,628-646).
cagagaaatgctggtaaaa

SEQ ID NO: 670910 - DNA, 19 bp, Mus musculus
  siRNA target sequence for 2400002D02Rik (NM_026422.1,641-659).
gtaaaattggccaaacaga

SEQ ID NO: 670911 - DNA, 19 bp, Mus musculus
  siRNA target sequence for 2400002D02Rik (NM_026422.1,695-713).
cgcactaatgcaatgaata

SEQ ID NO: 670912 - DNA, 19 bp, Mus musculus
  siRNA target sequence for 2400002D02Rik (NM_026422.1,699-717).
ctaatgcaatgaataaact

SEQ ID NO: 670913 - DNA, 19 bp, Mus musculus
  siRNA target sequence for 2400002D02Rik (NM_026422.1,739-757).
ctcggaggacaccattaga

SEQ ID NO: 670914 - DNA, 19 bp, Mus musculus
  siRNA target sequence for 2400002D02Rik (NM_026422.1,741-759).
cggaggacaccattagact

SEQ ID NO: 670915 - DNA, 19 bp, Mus musculus
  siRNA target sequence for Eif2s1 (NM_026114.1,203-221).
ggtgaatgtaagatccatt

SEQ ID NO: 670916 - DNA, 19 bp, Mus musculus
  siRNA target sequence for Eif2s1 (NM_026114.1,242-260).
cagcttgttggaatataat

SEQ ID NO: 670917 - DNA, 19 bp, Mus musculus
  siRNA target sequence for Eif2s1 (NM_026114.1,244-262).
gcttgttggaatataataa

SEQ ID NO: 670918 - DNA, 19 bp, Mus musculus
  siRNA target sequence for Eif2s1 (NM_026114.1,263-281).
cattgaaggcatgattctt

SEQ ID NO: 670919 - DNA, 19 bp, Mus musculus
  siRNA target sequence for Eif2s1 (NM_026114.1,267-285).
gaaggcatgattcttctta

SEQ ID NO: 670920 - DNA, 19 bp, Mus musculus
  siRNA target sequence for Eif2s1 (NM_026114.1,275-293).
gattcttcttagtgaatta

SEQ ID NO: 670921 - DNA, 19 bp, Mus musculus
  siRNA target sequence for Eif2s1 (NM_026114.1,298-316).
gacgacgtatccgttctat

SEQ ID NO: 670922 - DNA, 19 bp, Mus musculus
  siRNA target sequence for Eif2s1 (NM_026114.1,300-318).
cgacgtatccgttctataa

SEQ ID NO: 670923 - DNA, 19 bp, Mus musculus
  siRNA target sequence for Eif2s1 (NM_026114.1,301-319).
gacgtatccgttctataaa

SEQ ID NO: 670924 - DNA, 19 bp, Mus musculus
  siRNA target sequence for Eif2s1 (NM_026114.1,303-321).
cgtatccgttctataaaca

SEQ ID NO: 670925 - DNA, 19 bp, Mus musculus
  siRNA target sequence for Eif2s1 (NM_026114.1,310-328).
gttctataaacaaactgat

SEQ ID NO: 670926 - DNA, 19 bp, Mus musculus
  siRNA target sequence for Eif2s1 (NM_026114.1,326-344).
gatccgaattggcagaaat

SEQ ID NO: 670927 - DNA, 19 bp, Mus musculus
  siRNA target sequence for Eif2s1 (NM_026114.1,382-400).
gatatatagatttgtcaaa

SEQ ID NO: 670928 - DNA, 19 bp, Mus musculus
  siRNA target sequence for Eif2s1 (NM_026114.1,414-432).
ccagaggaagcaatcaaat

SEQ ID NO: 670929 - DNA, 19 bp, Mus musculus
  siRNA target sequence for Eif2s1 (NM_026114.1,454-472).
ccaaaactgtttatagcat

SEQ ID NO: 670930 - DNA, 19 bp, Mus musculus
  siRNA target sequence for Eif2s1 (NM_026114.1,455-473).
caaaactgtttatagcatt

SEQ ID NO: 670931 - DNA, 19 bp, Mus musculus
  siRNA target sequence for Eif2s1 (NM_026114.1,486-504).
gctgaggtattagaatata

SEQ ID NO: 670932 - DNA, 19 bp, Mus musculus
  siRNA target sequence for Pelo (NM_134058.1,842-860).
ccctggagcggttctatga

SEQ ID NO: 670933 - DNA, 19 bp, Mus musculus
  siRNA target sequence for Pelo (NM_134058.1,946-964).
cagttctgcgattacatgt

SEQ ID NO: 670934 - DNA, 19 bp, Mus musculus
  siRNA target sequence for Pelo (NM_134058.1,948-966).
gttctgcgattacatgttt

SEQ ID NO: 670935 - DNA, 19 bp, Mus musculus
  siRNA target sequence for Pelo (NM_134058.1,1068-1086).
cctctgcgaccctactgta

SEQ ID NO: 670936 - DNA, 19 bp, Mus musculus
  siRNA target sequence for Pelo (NM_134058.1,1129-1147).
gccttggatgacttctaca

SEQ ID NO: 670937 - DNA, 19 bp, Mus musculus
  siRNA target sequence for Pelo (NM_134058.1,1164-1182).
gcccgaccgagcgttctat

SEQ ID NO: 670938 - DNA, 19 bp, Mus musculus
  siRNA target sequence for Pelo (NM_134058.1,1318-1336).
gcgggcaccgtaaggatat

SEQ ID NO: 670939 - DNA, 19 bp, Mus musculus
  siRNA target sequence for Pelo (NM_134058.1,1319-1337).
cgggcaccgtaaggatatt

SEQ ID NO: 670940 - DNA, 19 bp, Mus musculus
  siRNA target sequence for Pelo (NM_134058.1,1323-1341).
caccgtaaggatattctct

SEQ ID NO: 670941 - DNA, 19 bp, Mus musculus
  siRNA target sequence for Pelo (NM_134058.1,1406-1424).
cagtgccagaactttctga

SEQ ID NO: 670942 - DNA, 19 bp, Mus musculus
  siRNA target sequence for 2300004C15Rik (NM_027086.1,133-151).
gacagaactgggagaatat

SEQ ID NO: 670943 - DNA, 19 bp, Mus musculus
  siRNA target sequence for 2300004C15Rik (NM_027086.1,158-176).
gggggctatagcatttcat

SEQ ID NO: 670944 - DNA, 19 bp, Mus musculus
  siRNA target sequence for 2300004C15Rik (NM_027086.1,224-242).
ccggagctgatcgatttga

SEQ ID NO: 670945 - DNA, 19 bp, Mus musculus
  siRNA target sequence for 2300004C15Rik (NM_027086.1,230-248).
ctgatcgatttgatctact

SEQ ID NO: 670946 - DNA, 19 bp, Mus musculus
  siRNA target sequence for 2300004C15Rik (NM_027086.1,271-289).
ccagacccttgacttctat

SEQ ID NO: 670947 - DNA, 19 bp, Mus musculus
  siRNA target sequence for 2300004C15Rik (NM_027086.1,276-294).
cccttgacttctatggtat

SEQ ID NO: 670948 - DNA, 19 bp, Mus musculus
  siRNA target sequence for 2300004C15Rik (NM_027086.1,277-295).
ccttgacttctatggtatt

SEQ ID NO: 670949 - DNA, 19 bp, Mus musculus
  siRNA target sequence for 2300004C15Rik (NM_027086.1,303-321).
gatccacagtccatgttct

SEQ ID NO: 670950 - DNA, 19 bp, Mus musculus
  siRNA target sequence for 2300004C15Rik (NM_027086.1,311-329).
gtccatgttctccgaaaat

SEQ ID NO: 670951 - DNA, 19 bp, Mus musculus
  siRNA target sequence for 2300004C15Rik (NM_027086.1,334-352).
gcctgagcctgatcagaaa

SEQ ID NO: 670952 - DNA, 19 bp, Mus musculus
  siRNA target sequence for 2300004C15Rik (NM_027086.1,432-450).
gagaggcggtctttaagat

SEQ ID NO: 670953 - DNA, 19 bp, Mus musculus
  siRNA target sequence for 2300004C15Rik (NM_027086.1,525-543).
gggttctccaggataagga

SEQ ID NO: 670954 - DNA, 19 bp, Mus musculus
  siRNA target sequence for 2300004C15Rik (NM_027086.1,563-581).
gatcccaacatgctagata

SEQ ID NO: 670955 - DNA, 19 bp, Mus musculus
  siRNA target sequence for 2300004C15Rik (NM_027086.1,567-585).
ccaacatgctagatacatt

SEQ ID NO: 670956 - DNA, 19 bp, Mus musculus
  siRNA target sequence for 2300004C15Rik (NM_027086.1,926-944).
ggcacccagggccattctt

SEQ ID NO: 670957 - DNA, 19 bp, Mus musculus
  siRNA target sequence for BC003281 (NM_030253.1,160-178).
cgaaagaccagccaacaat

SEQ ID NO: 670958 - DNA, 19 bp, Mus musculus
  siRNA target sequence for BC003281 (NM_030253.1,161-179).
gaaagaccagccaacaatt

SEQ ID NO: 670959 - DNA, 19 bp, Mus musculus
  siRNA target sequence for BC003281 (NM_030253.1,201-219).
ggcaaattcccattaaaca

SEQ ID NO: 670960 - DNA, 19 bp, Mus musculus
  siRNA target sequence for BC003281 (NM_030253.1,209-227).
cccattaaacacaatgtct

SEQ ID NO: 670961 - DNA, 19 bp, Mus musculus
  siRNA target sequence for BC003281 (NM_030253.1,210-228).
ccattaaacacaatgtctt

SEQ ID NO: 670962 - DNA, 19 bp, Mus musculus
  siRNA target sequence for BC003281 (NM_030253.1,218-236).
cacaatgtcttcgaaattt

SEQ ID NO: 670963 - DNA, 19 bp, Mus musculus
  siRNA target sequence for BC003281 (NM_030253.1,359-377).
ctgatccctgggatagagt

SEQ ID NO: 670964 - DNA, 19 bp, Mus musculus
  siRNA target sequence for BC003281 (NM_030253.1,364-382).
ccctgggatagagttatct

SEQ ID NO: 670965 - DNA, 19 bp, Mus musculus
  siRNA target sequence for BC003281 (NM_030253.1,366-384).
ctgggatagagttatctgt

SEQ ID NO: 670966 - DNA, 19 bp, Mus musculus
  siRNA target sequence for BC003281 (NM_030253.1,424-442).
ggtgaacgcagccaatgaa

SEQ ID NO: 670967 - DNA, 19 bp, Mus musculus
  siRNA target sequence for BC003281 (NM_030253.1,425-443).
gtgaacgcagccaatgaaa

SEQ ID NO: 670968 - DNA, 19 bp, Mus musculus
  siRNA target sequence for BC003281 (NM_030253.1,467-485).
gccggaagcttggtgaaaa

SEQ ID NO: 670969 - DNA, 19 bp, Mus musculus
  siRNA target sequence for BC003281 (NM_030253.1,469-487).
cggaagcttggtgaaaact

SEQ ID NO: 670970 - DNA, 19 bp, Mus musculus
  siRNA target sequence for BC003281 (NM_030253.1,527-545).
gccaacgttggtaaaatct

SEQ ID NO: 670971 - DNA, 19 bp, Mus musculus
  siRNA target sequence for BC003281 (NM_030253.1,529-547).
caacgttggtaaaatctca

SEQ ID NO: 670972 - DNA, 19 bp, Mus musculus
  siRNA target sequence for BC003281 (NM_030253.1,615-633).
ctcggtggacagttacgaa

SEQ ID NO: 670973 - DNA, 19 bp, Mus musculus
  siRNA target sequence for BC003281 (NM_030253.1,634-652).
cagccagacagctatcgaa

SEQ ID NO: 670974 - DNA, 19 bp, Mus musculus
  siRNA target sequence for BC003281 (NM_030253.1,636-654).
gccagacagctatcgaatt

SEQ ID NO: 670975 - DNA, 19 bp, Mus musculus
  siRNA target sequence for BC003281 (NM_030253.1,637-655).
ccagacagctatcgaatta

SEQ ID NO: 670976 - DNA, 19 bp, Mus musculus
  siRNA target sequence for BC003281 (NM_030253.1,644-662).
gctatcgaattactgaaat

SEQ ID NO: 670977 - DNA, 19 bp, Mus musculus
  siRNA target sequence for BC003281 (NM_030253.1,656-674).
ctgaaatttgccattagga

SEQ ID NO: 670978 - DNA, 19 bp, Mus musculus
  siRNA target sequence for BC003281 (NM_030253.1,666-684).
ccattaggaacattctaga

SEQ ID NO: 670979 - DNA, 19 bp, Mus musculus
  siRNA target sequence for BC003281 (NM_030253.1,708-726).
gcattaagacagtagcaat

SEQ ID NO: 670980 - DNA, 19 bp, Mus musculus
  siRNA target sequence for BC003281 (NM_030253.1,709-727).
cattaagacagtagcaatt

SEQ ID NO: 670981 - DNA, 19 bp, Mus musculus
  siRNA target sequence for BC003281 (NM_030253.1,758-776).
cctctggatttgtgtacaa

SEQ ID NO: 670982 - DNA, 19 bp, Mus musculus
  siRNA target sequence for BC003281 (NM_030253.1,771-789).
gtacaagcataattttaga

SEQ ID NO: 670983 - DNA, 19 bp, Mus musculus
  siRNA target sequence for BC003281 (NM_030253.1,788-806).
gaaactatccggctttatt

SEQ ID NO: 670984 - DNA, 19 bp, Mus musculus
  siRNA target sequence for BC003281 (NM_030253.1,818-836).
caaatgttcggtaatttga

SEQ ID NO: 670985 - DNA, 19 bp, Mus musculus
  siRNA target sequence for BC003281 (NM_030253.1,828-846).
gtaatttgagagagattca

SEQ ID NO: 670986 - DNA, 19 bp, Mus musculus
  siRNA target sequence for BC003281 (NM_030253.1,1004-1022).
ggctgtattgaaatgcaaa

SEQ ID NO: 670987 - DNA, 19 bp, Mus musculus
  siRNA target sequence for BC003281 (NM_030253.1,1023-1041).
caacagatgtaattgttaa

SEQ ID NO: 670988 - DNA, 19 bp, Mus musculus
  siRNA target sequence for BC003281 (NM_030253.1,1046-1064).
ggatacatgcaggatttta

SEQ ID NO: 670989 - DNA, 19 bp, Mus musculus
  siRNA target sequence for BC003281 (NM_030253.1,1047-1065).
gatacatgcaggattttaa

SEQ ID NO: 670990 - DNA, 19 bp, Mus musculus
  siRNA target sequence for BC003281 (NM_030253.1,1076-1094).
gtggcacagtcgattctta

SEQ ID NO: 670991 - DNA, 19 bp, Mus musculus
  siRNA target sequence for BC003281 (NM_030253.1,1078-1096).
ggcacagtcgattcttaga

SEQ ID NO: 670992 - DNA, 19 bp, Mus musculus
  siRNA target sequence for BC003281 (NM_030253.1,1095-1113).
gacaagcaggggttgaaat

SEQ ID NO: 670993 - DNA, 19 bp, Mus musculus
  siRNA target sequence for BC003281 (NM_030253.1,1133-1151).
gttaacctgtccacagatt

SEQ ID NO: 670994 - DNA, 19 bp, Mus musculus
  siRNA target sequence for BC003281 (NM_030253.1,1160-1178).
gtgtgggtcacaaaaggat

SEQ ID NO: 670995 - DNA, 19 bp, Mus musculus
  siRNA target sequence for BC003281 (NM_030253.1,1164-1182).
gggtcacaaaaggatttaa

SEQ ID NO: 670996 - DNA, 19 bp, Mus musculus
  siRNA target sequence for BC003281 (NM_030253.1,1211-1229).
gcatggcattcccaaatca

SEQ ID NO: 670997 - DNA, 19 bp, Mus musculus
  siRNA target sequence for BC003281 (NM_030253.1,1212-1230).
catggcattcccaaatcaa

SEQ ID NO: 670998 - DNA, 19 bp, Mus musculus
  siRNA target sequence for BC003281 (NM_030253.1,1215-1233).
ggcattcccaaatcaacaa

SEQ ID NO: 670999 - DNA, 19 bp, Mus musculus
  siRNA target sequence for BC003281 (NM_030253.1,1216-1234).
gcattcccaaatcaacaaa

SEQ ID NO: 671000 - DNA, 19 bp, Mus musculus
  siRNA target sequence for BC003281 (NM_030253.1,1231-1249).
caaataccagatattgaaa

SEQ ID NO: 671001 - DNA, 19 bp, Mus musculus
  siRNA target sequence for BC003281 (NM_030253.1,1286-1304).
ccagatataaattccattt

SEQ ID NO: 671002 - DNA, 19 bp, Mus musculus
  siRNA target sequence for BC003281 (NM_030253.1,1314-1332).
ctctcgggacaggattgat

SEQ ID NO: 671003 - DNA, 19 bp, Mus musculus
  siRNA target sequence for BC003281 (NM_030253.1,1372-1390).
ggaagtttttgcatttgct

SEQ ID NO: 671004 - DNA, 19 bp, Mus musculus
  siRNA target sequence for BC003281 (NM_030253.1,1388-1406).
gctaaagagcacaaggaaa

SEQ ID NO: 671005 - DNA, 19 bp, Mus musculus
  siRNA target sequence for BC003281 (NM_030253.1,1410-1428).
cgctaactgtaaagattgt

SEQ ID NO: 671006 - DNA, 19 bp, Mus musculus
  siRNA target sequence for BC003281 (NM_030253.1,1485-1503).
ggtccaacgagctgaatct

SEQ ID NO: 671007 - DNA, 19 bp, Mus musculus
  siRNA target sequence for BC003281 (NM_030253.1,1496-1514).
ctgaatctcagcggtaata

SEQ ID NO: 671008 - DNA, 19 bp, Mus musculus
  siRNA target sequence for BC003281 (NM_030253.1,1498-1516).
gaatctcagcggtaatagt

SEQ ID NO: 671009 - DNA, 19 bp, Mus musculus
  siRNA target sequence for BC003281 (NM_030253.1,1507-1525).
cggtaatagtggtgcttta

SEQ ID NO: 671010 - DNA, 19 bp, Mus musculus
  siRNA target sequence for BC003281 (NM_030253.1,1588-1606).
caatctcatgggtgtaaaa

SEQ ID NO: 671011 - DNA, 19 bp, Mus musculus
  siRNA target sequence for BC003281 (NM_030253.1,1624-1642).
ggcccaggaatggattgaa

SEQ ID NO: 671012 - DNA, 19 bp, Mus musculus
  siRNA target sequence for BC003281 (NM_030253.1,1666-1684).
ccacatcattgagaataat

SEQ ID NO: 671013 - DNA, 19 bp, Mus musculus
  siRNA target sequence for BC003281 (NM_030253.1,1779-1797).
cggccactttggagattaa

SEQ ID NO: 671014 - DNA, 19 bp, Mus musculus
  siRNA target sequence for BC003281 (NM_030253.1,1783-1801).
cactttggagattaaaggt

SEQ ID NO: 671015 - DNA, 19 bp, Mus musculus
  siRNA target sequence for BC003281 (NM_030253.1,1814-1832).
ctcattgacgcagttatga

SEQ ID NO: 671016 - DNA, 19 bp, Mus musculus
  siRNA target sequence for BC003281 (NM_030253.1,1822-1840).
cgcagttatgaggattgaa

SEQ ID NO: 671017 - DNA, 19 bp, Mus musculus
  siRNA target sequence for BC003281 (NM_030253.1,1823-1841).
gcagttatgaggattgaat

SEQ ID NO: 671018 - DNA, 19 bp, Mus musculus
  siRNA target sequence for BC003281 (NM_030253.1,1945-1963).
ggaagaatcgtacacattt

SEQ ID NO: 671019 - DNA, 19 bp, Mus musculus
  siRNA target sequence for BC003281 (NM_030253.1,1953-1971).
cgtacacatttcaacgata

SEQ ID NO: 671020 - DNA, 19 bp, Mus musculus
  siRNA target sequence for BC003281 (NM_030253.1,1967-1985).
cgatacccagcatcattaa

SEQ ID NO: 671021 - DNA, 19 bp, Mus musculus
  siRNA target sequence for BC003281 (NM_030253.1,2124-2142).
gatctgggagccaaaggtt

SEQ ID NO: 671022 - DNA, 19 bp, Mus musculus
  siRNA target sequence for BC003281 (NM_030253.1,2186-2204).
gtcggcttccacagaatgt

SEQ ID NO: 671023 - DNA, 19 bp, Mus musculus
  siRNA target sequence for BC003281 (NM_030253.1,2188-2206).
cggcttccacagaatgtat

SEQ ID NO: 671024 - DNA, 19 bp, Mus musculus
  siRNA target sequence for BC003281 (NM_030253.1,2189-2207).
ggcttccacagaatgtatt

SEQ ID NO: 671025 - DNA, 19 bp, Mus musculus
  siRNA target sequence for BC003281 (NM_030253.1,2211-2229).
catcctataacccagttta

SEQ ID NO: 671026 - DNA, 19 bp, Mus musculus
  siRNA target sequence for BC003281 (NM_030253.1,2248-2266).
caccaagagcctcaaaaat

SEQ ID NO: 671027 - DNA, 19 bp, Mus musculus
  siRNA target sequence for BC003281 (NM_030253.1,2300-2318).
gacaagctaatctatgtgt

SEQ ID NO: 671028 - DNA, 19 bp, Mus musculus
  siRNA target sequence for BC003281 (NM_030253.1,2351-2369).
cagggtaattcctcaaata

SEQ ID NO: 671029 - DNA, 19 bp, Mus musculus
  siRNA target sequence for BC003281 (NM_030253.1,2391-2409).
ctggggccttagatgtcaa

SEQ ID NO: 671030 - DNA, 19 bp, Mus musculus
  siRNA target sequence for BC003281 (NM_030253.1,2413-2431).
cagcgtagttgacaatgtt

SEQ ID NO: 671031 - DNA, 19 bp, Mus musculus
  siRNA target sequence for BC003281 (NM_030253.1,2471-2489).
gccatgcccctgtacttgt

SEQ ID NO: 671032 - DNA, 19 bp, Mus musculus
  siRNA target sequence for Zdhhc3 (NM_026917.4,236-254).
gcgggagccatgtggttta

SEQ ID NO: 671033 - DNA, 19 bp, Mus musculus
  siRNA target sequence for Zdhhc3 (NM_026917.4,366-384).
gcatcatcaacggaattgt

SEQ ID NO: 671034 - DNA, 19 bp, Mus musculus
  siRNA target sequence for Zdhhc3 (NM_026917.4,462-480).
gaaatgccactaaagagtt

SEQ ID NO: 671035 - DNA, 19 bp, Mus musculus
  siRNA target sequence for Zdhhc3 (NM_026917.4,504-522).
ctgggcaggtggtgtacaa

SEQ ID NO: 671036 - DNA, 19 bp, Mus musculus
  siRNA target sequence for Zdhhc3 (NM_026917.4,633-651).
gcgagaacaaccagaagta

SEQ ID NO: 671037 - DNA, 19 bp, Mus musculus
  siRNA target sequence for Zdhhc3 (NM_026917.4,637-655).
gaacaaccagaagtacttt

SEQ ID NO: 671038 - DNA, 19 bp, Mus musculus
  siRNA target sequence for Zdhhc3 (NM_026917.4,649-667).
gtactttgtcctattcaca

SEQ ID NO: 671039 - DNA, 19 bp, Mus musculus
  siRNA target sequence for Zdhhc3 (NM_026917.4,656-674).
gtcctattcacaatgtaca

SEQ ID NO: 671040 - DNA, 19 bp, Mus musculus
  siRNA target sequence for Zdhhc3 (NM_026917.4,658-676).
cctattcacaatgtacata

SEQ ID NO: 671041 - DNA, 19 bp, Mus musculus
  siRNA target sequence for Zdhhc3 (NM_026917.4,715-733).
ccacttcctgcattgcttt

SEQ ID NO: 671042 - DNA, 19 bp, Mus musculus
  siRNA target sequence for Zdhhc3 (NM_026917.4,875-893).
gagacgggcatagaacaat

SEQ ID NO: 671043 - DNA, 19 bp, Mus musculus
  siRNA target sequence for Zdhhc3 (NM_026917.4,879-897).
cgggcatagaacaattgaa

SEQ ID NO: 671044 - DNA, 19 bp, Mus musculus
  siRNA target sequence for Zdhhc3 (NM_026917.4,1014-1032).
cagacccgtaccagtatgt

SEQ ID NO: 671045 - DNA, 19 bp, Mus musculus
  siRNA target sequence for 4632422M10Rik (NM_172807.1,195-213).
gcaacccttgccaagaaga

SEQ ID NO: 671046 - DNA, 19 bp, Mus musculus
  siRNA target sequence for 4632422M10Rik (NM_172807.1,231-249).
gaaagagtctaccttgata

SEQ ID NO: 671047 - DNA, 19 bp, Mus musculus
  siRNA target sequence for 4632422M10Rik (NM_172807.1,306-324).
catgtggtatgtaccaaaa

SEQ ID NO: 671048 - DNA, 19 bp, Mus musculus
  siRNA target sequence for 4632422M10Rik (NM_172807.1,311-329).
ggtatgtaccaaaacagat

SEQ ID NO: 671049 - DNA, 19 bp, Mus musculus
  siRNA target sequence for 4632422M10Rik (NM_172807.1,415-433).
gtcaccttggagttattga

SEQ ID NO: 671050 - DNA, 19 bp, Mus musculus
  siRNA target sequence for 4632422M10Rik (NM_172807.1,470-488).
ctctgtcggtgatgataaa

SEQ ID NO: 671051 - DNA, 19 bp, Mus musculus
  siRNA target sequence for 4632422M10Rik (NM_172807.1,578-596).
cccaggagatgccatatct

SEQ ID NO: 671052 - DNA, 19 bp, Mus musculus
  siRNA target sequence for 4632422M10Rik (NM_172807.1,690-708).
gtatcccctcttactcaaa

SEQ ID NO: 671053 - DNA, 19 bp, Mus musculus
  siRNA target sequence for 4632422M10Rik (NM_172807.1,695-713).
ccctcttactcaaataaga

SEQ ID NO: 671054 - DNA, 19 bp, Mus musculus
  siRNA target sequence for 4632422M10Rik (NM_172807.1,697-715).
ctcttactcaaataagact

SEQ ID NO: 671055 - DNA, 19 bp, Mus musculus
  siRNA target sequence for 4632422M10Rik (NM_172807.1,699-717).
cttactcaaataagactaa

SEQ ID NO: 671056 - DNA, 19 bp, Mus musculus
  siRNA target sequence for 4632422M10Rik (NM_172807.1,789-807).
gaatataagttccctaaaa

SEQ ID NO: 671057 - DNA, 19 bp, Mus musculus
  siRNA target sequence for 4632422M10Rik (NM_172807.1,854-872).
caagtgtaaggcatatcca

SEQ ID NO: 671058 - DNA, 19 bp, Mus musculus
  siRNA target sequence for 4632422M10Rik (NM_172807.1,864-882).
gcatatccaaccagcatat

SEQ ID NO: 671059 - DNA, 19 bp, Mus musculus
  siRNA target sequence for 4632422M10Rik (NM_172807.1,965-983).
catgagggtctttgatgaa

SEQ ID NO: 671060 - DNA, 19 bp, Mus musculus
  siRNA target sequence for 4632422M10Rik (NM_172807.1,968-986).
gagggtctttgatgaatca

SEQ ID NO: 671061 - DNA, 19 bp, Mus musculus
  siRNA target sequence for 4632422M10Rik (NM_172807.1,972-990).
gtctttgatgaatcattaa

SEQ ID NO: 671062 - DNA, 19 bp, Mus musculus
  siRNA target sequence for 4632422M10Rik (NM_172807.1,978-996).
gatgaatcattaagtatgt

SEQ ID NO: 671063 - DNA, 19 bp, Mus musculus
  siRNA target sequence for 4632422M10Rik (NM_172807.1,985-1003).
cattaagtatgtttactga

SEQ ID NO: 671064 - DNA, 19 bp, Mus musculus
  siRNA target sequence for 4632422M10Rik (NM_172807.1,1023-1041).
caactaccagacatggaat

SEQ ID NO: 671065 - DNA, 19 bp, Mus musculus
  siRNA target sequence for 4632422M10Rik (NM_172807.1,1046-1064).
ccgacgaatggctgtagaa

SEQ ID NO: 671066 - DNA, 19 bp, Mus musculus
  siRNA target sequence for 4632422M10Rik (NM_172807.1,1087-1105).
ctgtaagattagttaacat

SEQ ID NO: 671067 - DNA, 19 bp, Mus musculus
  siRNA target sequence for 4632422M10Rik (NM_172807.1,1093-1111).
gattagttaacatcgtttt

SEQ ID NO: 671068 - DNA, 19 bp, Mus musculus
  siRNA target sequence for 4632422M10Rik (NM_172807.1,1141-1159).
gaacgatgctgggcattaa

SEQ ID NO: 671069 - DNA, 19 bp, Mus musculus
  siRNA target sequence for 4632422M10Rik (NM_172807.1,1144-1162).
cgatgctgggcattaaagt

SEQ ID NO: 671070 - DNA, 19 bp, Mus musculus
  siRNA target sequence for 4632422M10Rik (NM_172807.1,1145-1163).
gatgctgggcattaaagta

SEQ ID NO: 671071 - DNA, 19 bp, Mus musculus
  siRNA target sequence for 4632422M10Rik (NM_172807.1,1219-1237).
gagtgatgcagctagcttt

SEQ ID NO: 671072 - DNA, 19 bp, Mus musculus
  siRNA target sequence for 4632422M10Rik (NM_172807.1,1244-1262).
gggaatagccaaaaagcat

SEQ ID NO: 671073 - DNA, 19 bp, Mus musculus
  siRNA target sequence for 4632422M10Rik (NM_172807.1,1323-1341).
gctgacccaacaatagtct

SEQ ID NO: 671074 - DNA, 19 bp, Mus musculus
  siRNA target sequence for 4632422M10Rik (NM_172807.1,1362-1380).
cgcttttatatgtttacca

SEQ ID NO: 671075 - DNA, 19 bp, Mus musculus
  siRNA target sequence for 4632422M10Rik (NM_172807.1,1410-1428).
gattctgacagagatgttt

SEQ ID NO: 671076 - DNA, 19 bp, Mus musculus
  siRNA target sequence for 4632422M10Rik (NM_172807.1,1480-1498).
ggccgaagcgagtttcaga

SEQ ID NO: 671077 - DNA, 19 bp, Mus musculus
  siRNA target sequence for 4632422M10Rik (NM_172807.1,1481-1499).
gccgaagcgagtttcagat

SEQ ID NO: 671078 - DNA, 19 bp, Mus musculus
  siRNA target sequence for 4632422M10Rik (NM_172807.1,1482-1500).
ccgaagcgagtttcagata

SEQ ID NO: 671079 - DNA, 19 bp, Mus musculus
  siRNA target sequence for 4632422M10Rik (NM_172807.1,1572-1590).
gaaaacttctgtgttcata

SEQ ID NO: 671080 - DNA, 19 bp, Mus musculus
  siRNA target sequence for 4632422M10Rik (NM_172807.1,1587-1605).
catagcagaaatggttatt

SEQ ID NO: 671081 - DNA, 19 bp, Mus musculus
  siRNA target sequence for 4632422M10Rik (NM_172807.1,1614-1632).
catacattccaccgtataa

SEQ ID NO: 671082 - DNA, 19 bp, Mus musculus
  siRNA target sequence for 4632422M10Rik (NM_172807.1,1618-1636).
cattccaccgtataattaa

SEQ ID NO: 671083 - DNA, 19 bp, Mus musculus
  siRNA target sequence for 4632422M10Rik (NM_172807.1,1713-1731).
gacgaattccactcaacat

SEQ ID NO: 671084 - DNA, 19 bp, Mus musculus
  siRNA target sequence for 4632422M10Rik (NM_172807.1,1815-1833).
ccaacgccttggcttgata

SEQ ID NO: 671085 - DNA, 19 bp, Mus musculus
  siRNA target sequence for 4632422M10Rik (NM_172807.1,1816-1834).
caacgccttggcttgataa

SEQ ID NO: 671086 - DNA, 19 bp, Mus musculus
  siRNA target sequence for 4632422M10Rik (NM_172807.1,1819-1837).
cgccttggcttgataataa

SEQ ID NO: 671087 - DNA, 19 bp, Mus musculus
  siRNA target sequence for 4632422M10Rik (NM_172807.1,1932-1950).
gacgtcagcatcataaata

SEQ ID NO: 671088 - DNA, 19 bp, Mus musculus
  siRNA target sequence for 4632422M10Rik (NM_172807.1,1935-1953).
gtcagcatcataaatatca

SEQ ID NO: 671089 - DNA, 19 bp, Mus musculus
  siRNA target sequence for 4632422M10Rik (NM_172807.1,1937-1955).
cagcatcataaatatcact

SEQ ID NO: 671090 - DNA, 19 bp, Mus musculus
  siRNA target sequence for 4933402K05Rik (NM_134152.1,282-300).
gtgcagctcgtgtatgcaa

SEQ ID NO: 671091 - DNA, 19 bp, Mus musculus
  siRNA target sequence for 4933402K05Rik (NM_134152.1,287-305).
gctcgtgtatgcaaccaat

SEQ ID NO: 671092 - DNA, 19 bp, Mus musculus
  siRNA target sequence for 4933402K05Rik (NM_134152.1,288-306).
ctcgtgtatgcaaccaata

SEQ ID NO: 671093 - DNA, 19 bp, Mus musculus
  siRNA target sequence for 4933402K05Rik (NM_134152.1,403-421).
cccacctgagtgaaatgca

SEQ ID NO: 671094 - DNA, 19 bp, Mus musculus
  siRNA target sequence for 4933402K05Rik (NM_134152.1,665-683).
cggctccagtcccttcttt

SEQ ID NO: 671095 - DNA, 19 bp, Mus musculus
  siRNA target sequence for 4933402K05Rik (NM_134152.1,667-685).
gctccagtcccttctttga

SEQ ID NO: 671096 - DNA, 19 bp, Mus musculus
  siRNA target sequence for 4933402K05Rik (NM_134152.1,700-718).
cctactgctcaaaagacta

SEQ ID NO: 671097 - DNA, 19 bp, Mus musculus
  siRNA target sequence for 4933402K05Rik (NM_134152.1,754-772).
ctgctcccatcacagataa

SEQ ID NO: 671098 - DNA, 19 bp, Mus musculus
  siRNA target sequence for 4933402K05Rik (NM_134152.1,757-775).
ctcccatcacagataaagt

SEQ ID NO: 671099 - DNA, 19 bp, Mus musculus
  siRNA target sequence for 4933402K05Rik (NM_134152.1,875-893).
gccatactgccgaaaggat

SEQ ID NO: 671100 - DNA, 19 bp, Mus musculus
  siRNA target sequence for 4933402K05Rik (NM_134152.1,876-894).
ccatactgccgaaaggatt

SEQ ID NO: 671101 - DNA, 19 bp, Mus musculus
  siRNA target sequence for 4933402K05Rik (NM_134152.1,881-899).
ctgccgaaaggatttctta

SEQ ID NO: 671102 - DNA, 19 bp, Mus musculus
  siRNA target sequence for 4933402K05Rik (NM_134152.1,891-909).
gatttcttagccatgttct

SEQ ID NO: 671103 - DNA, 19 bp, Mus musculus
  siRNA target sequence for 4933402K05Rik (NM_134152.1,1001-1019).
ggactgcttcagtagtttt

SEQ ID NO: 671104 - DNA, 19 bp, Mus musculus
  siRNA target sequence for 4933402K05Rik (NM_134152.1,1002-1020).
gactgcttcagtagttttt

SEQ ID NO: 671105 - DNA, 19 bp, Mus musculus
  siRNA target sequence for 4933402K05Rik (NM_134152.1,1139-1157).
catgggacataaatttcat

SEQ ID NO: 671106 - DNA, 19 bp, Mus musculus
  siRNA target sequence for 4933402K05Rik (NM_134152.1,1194-1212).
ctgccgaaaggcatcttca

SEQ ID NO: 671107 - DNA, 19 bp, Mus musculus
  siRNA target sequence for Aipl1 (NM_053245.1,281-299).
caggggtctaccctatgtt

SEQ ID NO: 671108 - DNA, 19 bp, Mus musculus
  siRNA target sequence for Aipl1 (NM_053245.1,283-301).
ggggtctaccctatgttgt

SEQ ID NO: 671109 - DNA, 19 bp, Mus musculus
  siRNA target sequence for Aipl1 (NM_053245.1,362-380).
gcgggttggccaacatgtt

SEQ ID NO: 671110 - DNA, 19 bp, Mus musculus
  siRNA target sequence for Aipl1 (NM_053245.1,363-381).
cgggttggccaacatgttt

SEQ ID NO: 671111 - DNA, 19 bp, Mus musculus
  siRNA target sequence for Aipl1 (NM_053245.1,466-484).
gtggaggccccaaatgagt

SEQ ID NO: 671112 - DNA, 19 bp, Mus musculus
  siRNA target sequence for Aipl1 (NM_053245.1,753-771).
gcacaccagcgacattcta

SEQ ID NO: 671113 - DNA, 19 bp, Mus musculus
  siRNA target sequence for Aipl1 (NM_053245.1,786-804).
gatcgtgaaggcctactat

SEQ ID NO: 671114 - DNA, 19 bp, Mus musculus
  siRNA target sequence for Fkbp8 (NM_010223.1,805-823).
ggctcagcaaggtgaatat

SEQ ID NO: 671115 - DNA, 19 bp, Mus musculus
  siRNA target sequence for Fkbp8 (NM_010223.1,939-957).
ccgccctgtaccgaaagat

SEQ ID NO: 671116 - DNA, 19 bp, Mus musculus
  siRNA target sequence for Pxn (NM_011223.1,206-224).
caactggaaaccacacata

SEQ ID NO: 671117 - DNA, 19 bp, Mus musculus
  siRNA target sequence for Pxn (NM_011223.1,916-934).
gcgtcactgtcagatttca

SEQ ID NO: 671118 - DNA, 19 bp, Mus musculus
  siRNA target sequence for Pxn (NM_011223.1,917-935).
cgtcactgtcagatttcaa

SEQ ID NO: 671119 - DNA, 19 bp, Mus musculus
  siRNA target sequence for Pxn (NM_011223.1,1178-1196).
gatcccgaaacttttttga

SEQ ID NO: 671120 - DNA, 19 bp, Mus musculus
  siRNA target sequence for Pxn (NM_011223.1,1266-1284).
cggacccatcctggataaa

SEQ ID NO: 671121 - DNA, 19 bp, Mus musculus
  siRNA target sequence for Pxn (NM_011223.1,1268-1286).
gacccatcctggataaagt

SEQ ID NO: 671122 - DNA, 19 bp, Mus musculus
  siRNA target sequence for Pxn (NM_011223.1,1388-1406).
cgtactgtcgtaaagatta

SEQ ID NO: 671123 - DNA, 19 bp, Mus musculus
  siRNA target sequence for Pxn (NM_011223.1,1452-1470).
cctggagaactacatttca

SEQ ID NO: 671124 - DNA, 19 bp, Mus musculus
  siRNA target sequence for 2900026G05Rik (NM_144874.2,362-380).
gtctggcctctcaatggta

SEQ ID NO: 671125 - DNA, 19 bp, Mus musculus
  siRNA target sequence for 2900026G05Rik (NM_144874.2,443-461).
ccaaaagtaccagcaattt

SEQ ID NO: 671126 - DNA, 19 bp, Mus musculus
  siRNA target sequence for 2900026G05Rik (NM_144874.2,493-511).
cgctggcggaattcaagtt

SEQ ID NO: 671127 - DNA, 19 bp, Mus musculus
  siRNA target sequence for 2900026G05Rik (NM_144874.2,495-513).
ctggcggaattcaagttta

SEQ ID NO: 671128 - DNA, 19 bp, Mus musculus
  siRNA target sequence for 2900026G05Rik (NM_144874.2,498-516).
gcggaattcaagtttatct

SEQ ID NO: 671129 - DNA, 19 bp, Mus musculus
  siRNA target sequence for 2900026G05Rik (NM_144874.2,550-568).
gagctgtaggccttgcata

SEQ ID NO: 671130 - DNA, 19 bp, Mus musculus
  siRNA target sequence for 2900026G05Rik (NM_144874.2,636-654).
gccctctgtggcttagtct

SEQ ID NO: 671131 - DNA, 19 bp, Mus musculus
  siRNA target sequence for 2900026G05Rik (NM_144874.2,662-680).
gggtctgttgggttggtat

SEQ ID NO: 671132 - DNA, 19 bp, Mus musculus
  siRNA target sequence for 2900026G05Rik (NM_144874.2,663-681).
ggtctgttgggttggtata

SEQ ID NO: 671133 - DNA, 19 bp, Mus musculus
  siRNA target sequence for 2900026G05Rik (NM_144874.2,672-690).
ggttggtatatggtgaaaa

SEQ ID NO: 671134 - DNA, 19 bp, Mus musculus
  siRNA target sequence for 2900026G05Rik (NM_144874.2,904-922).
ctctctcaggggcttttgt

SEQ ID NO: 671135 - DNA, 19 bp, Mus musculus
  siRNA target sequence for 2900026G05Rik (NM_144874.2,1036-1054).
ctaccatggttcagtttga

SEQ ID NO: 671136 - DNA, 19 bp, Mus musculus
  siRNA target sequence for 2900026G05Rik (NM_144874.2,1086-1104).
gccattacagtgctctatt

SEQ ID NO: 671137 - DNA, 19 bp, Mus musculus
  siRNA target sequence for 2900026G05Rik (NM_144874.2,1087-1105).
ccattacagtgctctattt

SEQ ID NO: 671138 - DNA, 19 bp, Mus musculus
  siRNA target sequence for 2900026G05Rik (NM_144874.2,1160-1178).
gctagctttggcatatgca

SEQ ID NO: 671139 - DNA, 19 bp, Mus musculus
  siRNA target sequence for 2900026G05Rik (NM_144874.2,1192-1210).
gcattagcactctgcttat

SEQ ID NO: 671140 - DNA, 19 bp, Mus musculus
  siRNA target sequence for 2900026G05Rik (NM_144874.2,1273-1291).
ccctttggctcatgaatga

SEQ ID NO: 671141 - DNA, 19 bp, Mus musculus
  siRNA target sequence for 2900026G05Rik (NM_144874.2,1293-1311).
ctccgaagagtccctaaat

SEQ ID NO: 671142 - DNA, 19 bp, Mus musculus
  siRNA target sequence for Plin (NM_175640.1,376-394).
ctgaagggcaccatctcta

SEQ ID NO: 671143 - DNA, 19 bp, Mus musculus
  siRNA target sequence for Plin (NM_175640.1,658-676).
gctcccaaggccaaaccaa

SEQ ID NO: 671144 - DNA, 19 bp, Mus musculus
  siRNA target sequence for Plin (NM_175640.1,1149-1167).
ggctgtctcctctaccaaa

SEQ ID NO: 671145 - DNA, 19 bp, Mus musculus
  siRNA target sequence for Plin (NM_175640.1,1279-1297).
gaattccgagacatcgata

SEQ ID NO: 671146 - DNA, 19 bp, Mus musculus
  siRNA target sequence for 2210402C18Rik (NM_027309.1,295-313).
cacgatggaacagatcaaa

SEQ ID NO: 671147 - DNA, 19 bp, Mus musculus
  siRNA target sequence for 2210402C18Rik (NM_027309.1,307-325).
gatcaaaagggccaacaaa

SEQ ID NO: 671148 - DNA, 19 bp, Mus musculus
  siRNA target sequence for 2210402C18Rik (NM_027309.1,404-422).
ggacttaactccattgatt

SEQ ID NO: 671149 - DNA, 19 bp, Mus musculus
  siRNA target sequence for 2210402C18Rik (NM_027309.1,423-441).
ctccggaaagtgaaactgt

SEQ ID NO: 671150 - DNA, 19 bp, Mus musculus
  siRNA target sequence for 2210402C18Rik (NM_027309.1,542-560).
gaagtgtctgccagagatt

SEQ ID NO: 671151 - DNA, 19 bp, Mus musculus
  siRNA target sequence for 2210402C18Rik (NM_027309.1,650-668).
gctgcctctctttatcata

SEQ ID NO: 671152 - DNA, 19 bp, Mus musculus
  siRNA target sequence for 2210402C18Rik (NM_027309.1,653-671).
gcctctctttatcatagtt

SEQ ID NO: 671153 - DNA, 19 bp, Mus musculus
  siRNA target sequence for 2610022K04Rik (NM_028134.1,696-714).
gagccgtgctcgttcttat

SEQ ID NO: 671154 - DNA, 19 bp, Mus musculus
  siRNA target sequence for 2610022K04Rik (NM_028134.1,699-717).
ccgtgctcgttcttatgga

SEQ ID NO: 671155 - DNA, 19 bp, Mus musculus
  siRNA target sequence for 2610022K04Rik (NM_028134.1,786-804).
caccctggctggattagca

SEQ ID NO: 671156 - DNA, 19 bp, Mus musculus
  siRNA target sequence for 2610022K04Rik (NM_028134.1,792-810).
ggctggattagcactcaaa

SEQ ID NO: 671157 - DNA, 19 bp, Mus musculus
  siRNA target sequence for 2610022K04Rik (NM_028134.1,793-811).
gctggattagcactcaaat

SEQ ID NO: 671158 - DNA, 19 bp, Mus musculus
  siRNA target sequence for 2610022K04Rik (NM_028134.1,794-812).
ctggattagcactcaaata

SEQ ID NO: 671159 - DNA, 19 bp, Mus musculus
  siRNA target sequence for 2610022K04Rik (NM_028134.1,816-834).
ggtaacgatggaacagatt

SEQ ID NO: 671160 - DNA, 19 bp, Mus musculus
  siRNA target sequence for 2610022K04Rik (NM_028134.1,837-855).
gcgtacaaaccgcctttat

SEQ ID NO: 671161 - DNA, 19 bp, Mus musculus
  siRNA target sequence for 2610022K04Rik (NM_028134.1,838-856).
cgtacaaaccgcctttata

SEQ ID NO: 671162 - DNA, 19 bp, Mus musculus
  siRNA target sequence for 2610022K04Rik (NM_028134.1,842-860).
caaaccgcctttatactaa

SEQ ID NO: 671163 - DNA, 19 bp, Mus musculus
  siRNA target sequence for 2610022K04Rik (NM_028134.1,886-904).
ctctacatccccatcctat

SEQ ID NO: 671164 - DNA, 19 bp, Mus musculus
  siRNA target sequence for 2610022K04Rik (NM_028134.1,912-930).
cagagacttgtttaatggt

SEQ ID NO: 671165 - DNA, 19 bp, Mus musculus
  siRNA target sequence for 2610022K04Rik (NM_028134.1,981-999).
ggatgagatcggatcatct

SEQ ID NO: 671166 - DNA, 19 bp, Mus musculus
  siRNA target sequence for 2610022K04Rik (NM_028134.1,982-1000).
gatgagatcggatcatctt

SEQ ID NO: 671167 - DNA, 19 bp, Mus musculus
  siRNA target sequence for 2610022K04Rik (NM_028134.1,1099-1117).
gcctctgatttccttaaga

SEQ ID NO: 671168 - DNA, 19 bp, Mus musculus
  siRNA target sequence for 4930506D23Rik (NM_175215.2,94-112).
ccaaacagccacgtttaca

SEQ ID NO: 671169 - DNA, 19 bp, Mus musculus
  siRNA target sequence for 4930506D23Rik (NM_175215.2,95-113).
caaacagccacgtttacat

SEQ ID NO: 671170 - DNA, 19 bp, Mus musculus
  siRNA target sequence for 4930506D23Rik (NM_175215.2,101-119).
gccacgtttacatgttcaa

SEQ ID NO: 671171 - DNA, 19 bp, Mus musculus
  siRNA target sequence for 4930506D23Rik (NM_175215.2,103-121).
cacgtttacatgttcaaca

SEQ ID NO: 671172 - DNA, 19 bp, Mus musculus
  siRNA target sequence for 4930506D23Rik (NM_175215.2,105-123).
cgtttacatgttcaacaat

SEQ ID NO: 671173 - DNA, 19 bp, Mus musculus
  siRNA target sequence for 4930506D23Rik (NM_175215.2,343-361).
gagcaagacctgtatgctt

SEQ ID NO: 671174 - DNA, 19 bp, Mus musculus
  siRNA target sequence for 4930506D23Rik (NM_175215.2,372-390).
caagattccagtgagaaat

SEQ ID NO: 671175 - DNA, 19 bp, Mus musculus
  siRNA target sequence for 4930506D23Rik (NM_175215.2,404-422).
cggagacccaccaagaact

SEQ ID NO: 671176 - DNA, 19 bp, Mus musculus
  siRNA target sequence for 4930506D23Rik (NM_175215.2,680-698).
ggaatgccgtcttccttat

SEQ ID NO: 671177 - DNA, 19 bp, Mus musculus
  siRNA target sequence for 4930506D23Rik (NM_175215.2,690-708).
cttccttatgcttctcatt

SEQ ID NO: 671178 - DNA, 19 bp, Mus musculus
  siRNA target sequence for 4930506D23Rik (NM_175215.2,756-774).
caccggggagccctcaaat

SEQ ID NO: 671179 - DNA, 19 bp, Mus musculus
  siRNA target sequence for BC003322 (NM_030257.1,189-207).
ggccagtggccatgtactt

SEQ ID NO: 671180 - DNA, 19 bp, Mus musculus
  siRNA target sequence for BC003322 (NM_030257.1,299-317).
gcgcatcgagagatagact

SEQ ID NO: 671181 - DNA, 19 bp, Mus musculus
  siRNA target sequence for BC003322 (NM_030257.1,300-318).
cgcatcgagagatagactt

SEQ ID NO: 671182 - DNA, 19 bp, Mus musculus
  siRNA target sequence for BC003322 (NM_030257.1,305-323).
cgagagatagacttgatga

SEQ ID NO: 671183 - DNA, 19 bp, Mus musculus
  siRNA target sequence for BC003322 (NM_030257.1,316-334).
cttgatgacattgttatat

SEQ ID NO: 671184 - DNA, 19 bp, Mus musculus
  siRNA target sequence for BC003322 (NM_030257.1,322-340).
gacattgttatattaacca

SEQ ID NO: 671185 - DNA, 19 bp, Mus musculus
  siRNA target sequence for BC003322 (NM_030257.1,389-407).
gctgtacggtagcagatat

SEQ ID NO: 671186 - DNA, 19 bp, Mus musculus
  siRNA target sequence for BC003322 (NM_030257.1,392-410).
gtacggtagcagatatcaa

SEQ ID NO: 671187 - DNA, 19 bp, Mus musculus
  siRNA target sequence for BC003322 (NM_030257.1,400-418).
gcagatatcaaaagagtta

SEQ ID NO: 671188 - DNA, 19 bp, Mus musculus
  siRNA target sequence for BC003322 (NM_030257.1,401-419).
cagatatcaaaagagttaa

SEQ ID NO: 671189 - DNA, 19 bp, Mus musculus
  siRNA target sequence for BC003322 (NM_030257.1,403-421).
gatatcaaaagagttaaca

SEQ ID NO: 671190 - DNA, 19 bp, Mus musculus
  siRNA target sequence for BC003322 (NM_030257.1,472-490).
gttaaaaggtttagttctt

SEQ ID NO: 671191 - DNA, 19 bp, Mus musculus
  siRNA target sequence for BC003322 (NM_030257.1,536-554).
ctccacctgttccgtattt

SEQ ID NO: 671192 - DNA, 19 bp, Mus musculus
  siRNA target sequence for BC003322 (NM_030257.1,539-557).
cacctgttccgtattttca

SEQ ID NO: 671193 - DNA, 19 bp, Mus musculus
  siRNA target sequence for BC003322 (NM_030257.1,603-621).
gtcagccggcagtttccta

SEQ ID NO: 671194 - DNA, 19 bp, Mus musculus
  siRNA target sequence for BC003322 (NM_030257.1,605-623).
cagccggcagtttcctaaa

SEQ ID NO: 671195 - DNA, 19 bp, Mus musculus
  siRNA target sequence for BC003322 (NM_030257.1,608-626).
ccggcagtttcctaaaaga

SEQ ID NO: 671196 - DNA, 19 bp, Mus musculus
  siRNA target sequence for BC003322 (NM_030257.1,609-627).
cggcagtttcctaaaagaa

SEQ ID NO: 671197 - DNA, 19 bp, Mus musculus
  siRNA target sequence for BC003322 (NM_030257.1,630-648).
ggaccgagacatagaacaa

SEQ ID NO: 671198 - DNA, 19 bp, Mus musculus
  siRNA target sequence for BC003322 (NM_030257.1,633-651).
ccgagacatagaacaaata

SEQ ID NO: 671199 - DNA, 19 bp, Mus musculus
  siRNA target sequence for BC003322 (NM_030257.1,643-661).
gaacaaatagtcaagtgta

SEQ ID NO: 671200 - DNA, 19 bp, Mus musculus
  siRNA target sequence for BC003322 (NM_030257.1,710-728).
cacaacaggtccgatttga

SEQ ID NO: 671201 - DNA, 19 bp, Mus musculus
  siRNA target sequence for BC003322 (NM_030257.1,721-739).
cgatttgaacctgataaca

SEQ ID NO: 671202 - DNA, 19 bp, Mus musculus
  siRNA target sequence for BC003322 (NM_030257.1,772-790).
gcagactgggggattggtt

SEQ ID NO: 671203 - DNA, 19 bp, Mus musculus
  siRNA target sequence for BC003322 (NM_030257.1,794-812).
ggacagctgtagtgataat

SEQ ID NO: 671204 - DNA, 19 bp, Mus musculus
  siRNA target sequence for BC003322 (NM_030257.1,797-815).
cagctgtagtgataatgtt

SEQ ID NO: 671205 - DNA, 19 bp, Mus musculus
  siRNA target sequence for BC003322 (NM_030257.1,816-834).
gatagtgggtataataaca

SEQ ID NO: 671206 - DNA, 19 bp, Mus musculus
  siRNA target sequence for BC003322 (NM_030257.1,852-870).
gtattatgaaattttagct

SEQ ID NO: 671207 - DNA, 19 bp, Mus musculus
  siRNA target sequence for BC003322 (NM_030257.1,869-887).
ctaaagtggatgttagtca

SEQ ID NO: 671208 - DNA, 19 bp, Mus musculus
  siRNA target sequence for BC003322 (NM_030257.1,877-895).
gatgttagtcaccattcaa

SEQ ID NO: 671209 - DNA, 19 bp, Mus musculus
  siRNA target sequence for Oxr1 (NM_130885.1,236-254).
cacccaatgaacttgttca

SEQ ID NO: 671210 - DNA, 19 bp, Mus musculus
  siRNA target sequence for Oxr1 (NM_130885.1,244-262).
gaacttgttcagttaaata

SEQ ID NO: 671211 - DNA, 19 bp, Mus musculus
  siRNA target sequence for Oxr1 (NM_130885.1,250-268).
gttcagttaaataagttat

SEQ ID NO: 671212 - DNA, 19 bp, Mus musculus
  siRNA target sequence for Oxr1 (NM_130885.1,282-300).
cgtgactggacaggtttta

SEQ ID NO: 671213 - DNA, 19 bp, Mus musculus
  siRNA target sequence for Oxr1 (NM_130885.1,287-305).
ctggacaggttttatacgt

SEQ ID NO: 671214 - DNA, 19 bp, Mus musculus
  siRNA target sequence for Oxr1 (NM_130885.1,303-321).
cgttcctgatcctgaatat

SEQ ID NO: 671215 - DNA, 19 bp, Mus musculus
  siRNA target sequence for Oxr1 (NM_130885.1,377-395).
cgtcatccgaggctgaatt

SEQ ID NO: 671216 - DNA, 19 bp, Mus musculus
  siRNA target sequence for Oxr1 (NM_130885.1,383-401).
ccgaggctgaatttgataa

SEQ ID NO: 671217 - DNA, 19 bp, Mus musculus
  siRNA target sequence for Oxr1 (NM_130885.1,413-431).
cagatgtagcccatccaaa

SEQ ID NO: 671218 - DNA, 19 bp, Mus musculus
  siRNA target sequence for Oxr1 (NM_130885.1,472-490).
gcgagagttgtgtcttcaa

SEQ ID NO: 671219 - DNA, 19 bp, Mus musculus
  siRNA target sequence for Oxr1 (NM_130885.1,474-492).
gagagttgtgtcttcaact

SEQ ID NO: 671220 - DNA, 19 bp, Mus musculus
  siRNA target sequence for Oxr1 (NM_130885.1,579-597).
cctgctagtcacaccaaat

SEQ ID NO: 671221 - DNA, 19 bp, Mus musculus
  siRNA target sequence for Oxr1 (NM_130885.1,586-604).
gtcacaccaaataacataa

SEQ ID NO: 671222 - DNA, 19 bp, Mus musculus
  siRNA target sequence for Oxr1 (NM_130885.1,737-755).
cactgcccatagaactaga

SEQ ID NO: 671223 - DNA, 19 bp, Mus musculus
  siRNA target sequence for Oxr1 (NM_130885.1,770-788).
gggggtcctgccattcaaa

SEQ ID NO: 671224 - DNA, 19 bp, Mus musculus
  siRNA target sequence for Oxr1 (NM_130885.1,772-790).
gggtcctgccattcaaaga

SEQ ID NO: 671225 - DNA, 19 bp, Mus musculus
  siRNA target sequence for Oxr1 (NM_130885.1,888-906).
ctcggaagacgctttcaca

SEQ ID NO: 671226 - DNA, 19 bp, Mus musculus
  siRNA target sequence for Oxr1 (NM_130885.1,952-970).
ccgagacaggagaagtcat

SEQ ID NO: 671227 - DNA, 19 bp, Mus musculus
  siRNA target sequence for Oxr1 (NM_130885.1,1035-1053).
gtcagaggctgctaacgtt

SEQ ID NO: 671228 - DNA, 19 bp, Mus musculus
  siRNA target sequence for Oxr1 (NM_130885.1,1249-1267).
gcaggtgaagacagtgtat

SEQ ID NO: 671229 - DNA, 19 bp, Mus musculus
  siRNA target sequence for Oxr1 (NM_130885.1,1252-1270).
ggtgaagacagtgtatctt

SEQ ID NO: 671230 - DNA, 19 bp, Mus musculus
  siRNA target sequence for Oxr1 (NM_130885.1,1366-1384).
ctgcgcaaactctggaaaa

SEQ ID NO: 671231 - DNA, 19 bp, Mus musculus
  siRNA target sequence for Oxr1 (NM_130885.1,1483-1501).
gagggctcctcgctgttaa

SEQ ID NO: 671232 - DNA, 19 bp, Mus musculus
  siRNA target sequence for Oxr1 (NM_130885.1,1487-1505).
gctcctcgctgttaaagga

SEQ ID NO: 671233 - DNA, 19 bp, Mus musculus
  siRNA target sequence for Oxr1 (NM_130885.1,1509-1527).
gcgaaggcatcgattacat

SEQ ID NO: 671234 - DNA, 19 bp, Mus musculus
  siRNA target sequence for Oxr1 (NM_130885.1,1510-1528).
cgaaggcatcgattacata

SEQ ID NO: 671235 - DNA, 19 bp, Mus musculus
  siRNA target sequence for Oxr1 (NM_130885.1,1511-1529).
gaaggcatcgattacataa

SEQ ID NO: 671236 - DNA, 19 bp, Mus musculus
  siRNA target sequence for Oxr1 (NM_130885.1,1514-1532).
ggcatcgattacataagtt

SEQ ID NO: 671237 - DNA, 19 bp, Mus musculus
  siRNA target sequence for Oxr1 (NM_130885.1,1519-1537).
cgattacataagttcctat

SEQ ID NO: 671238 - DNA, 19 bp, Mus musculus
  siRNA target sequence for Oxr1 (NM_130885.1,1586-1604).
gtgctacgatgcaacagta

SEQ ID NO: 671239 - DNA, 19 bp, Mus musculus
  siRNA target sequence for Oxr1 (NM_130885.1,1615-1633).
gataaaaaacacgaatatt

SEQ ID NO: 671240 - DNA, 19 bp, Mus musculus
  siRNA target sequence for Oxr1 (NM_130885.1,1686-1704).
gtggagtccagaaatctat

SEQ ID NO: 671241 - DNA, 19 bp, Mus musculus
  siRNA target sequence for Oxr1 (NM_130885.1,1764-1782).
cgagtctgaagcgaatgaa

SEQ ID NO: 671242 - DNA, 19 bp, Mus musculus
  siRNA target sequence for Oxr1 (NM_130885.1,1848-1866).
gatcgatgctctaaatact

SEQ ID NO: 671243 - DNA, 19 bp, Mus musculus
  siRNA target sequence for Oxr1 (NM_130885.1,1887-1905).
cagacggctccagattact

SEQ ID NO: 671244 - DNA, 19 bp, Mus musculus
  siRNA target sequence for Oxr1 (NM_130885.1,1891-1909).
cggctccagattactacaa

SEQ ID NO: 671245 - DNA, 19 bp, Mus musculus
  siRNA target sequence for Oxr1 (NM_130885.1,1986-2004).
cgaccccagtgaactctta

SEQ ID NO: 671246 - DNA, 19 bp, Mus musculus
  siRNA target sequence for Oxr1 (NM_130885.1,2001-2019).
cttactgcctgatcagatt

SEQ ID NO: 671247 - DNA, 19 bp, Mus musculus
  siRNA target sequence for Oxr1 (NM_130885.1,2014-2032).
cagattgaaaagcttacta

SEQ ID NO: 671248 - DNA, 19 bp, Mus musculus
  siRNA target sequence for Oxr1 (NM_130885.1,2087-2105).
ggaagcatggtacaagttt

SEQ ID NO: 671249 - DNA, 19 bp, Mus musculus
  siRNA target sequence for Oxr1 (NM_130885.1,2092-2110).
catggtacaagtttgaaga

SEQ ID NO: 671250 - DNA, 19 bp, Mus musculus
  siRNA target sequence for Oxr1 (NM_130885.1,2195-2213).
catcagagccatttaaagt

SEQ ID NO: 671251 - DNA, 19 bp, Mus musculus
  siRNA target sequence for Oxr1 (NM_130885.1,2202-2220).
gccatttaaagtaagtgat

SEQ ID NO: 671252 - DNA, 19 bp, Mus musculus
  siRNA target sequence for Oxr1 (NM_130885.1,2293-2311).
gataatatgttttttatca

SEQ ID NO: 671253 - DNA, 19 bp, Mus musculus
  siRNA target sequence for Oxr1 (NM_130885.1,2322-2340).
ggattcattagcatttggt

SEQ ID NO: 671254 - DNA, 19 bp, Mus musculus
  siRNA target sequence for Oxr1 (NM_130885.1,2366-2384).
ggcttgatggagatctcta

SEQ ID NO: 671255 - DNA, 19 bp, Mus musculus
  siRNA target sequence for Oxr1 (NM_130885.1,2411-2429).
cgtttgggaatcatacact

SEQ ID NO: 671256 - DNA, 19 bp, Mus musculus
  siRNA target sequence for Oxr1 (NM_130885.1,2412-2430).
gtttgggaatcatacactt

SEQ ID NO: 671257 - DNA, 19 bp, Mus musculus
  siRNA target sequence for Oxr1 (NM_130885.1,2416-2434).
gggaatcatacactttcta

SEQ ID NO: 671258 - DNA, 19 bp, Mus musculus
  siRNA target sequence for Oxr1 (NM_130885.1,2428-2446).
ctttctaagaaggaagatt

SEQ ID NO: 671259 - DNA, 19 bp, Mus musculus
  siRNA target sequence for Oxr1 (NM_130885.1,2448-2466).
ctttatccaagacattgaa

SEQ ID NO: 671260 - DNA, 19 bp, Mus musculus
  siRNA target sequence for Elovl1 (NM_019422.1,173-191).
gcggatccccggatccaaa

SEQ ID NO: 671261 - DNA, 19 bp, Mus musculus
  siRNA target sequence for Elovl1 (NM_019422.1,205-223).
ggggtcccccttgctaata

SEQ ID NO: 671262 - DNA, 19 bp, Mus musculus
  siRNA target sequence for Elovl1 (NM_019422.1,208-226).
gtcccccttgctaataaca

SEQ ID NO: 671263 - DNA, 19 bp, Mus musculus
  siRNA target sequence for Elovl1 (NM_019422.1,306-324).
gaggcttcatgattgtcta

SEQ ID NO: 671264 - DNA, 19 bp, Mus musculus
  siRNA target sequence for Elovl1 (NM_019422.1,340-358).
gatactctccctctacatt

SEQ ID NO: 671265 - DNA, 19 bp, Mus musculus
  siRNA target sequence for Elovl1 (NM_019422.1,352-370).
ctacattgtctatgagttt

SEQ ID NO: 671266 - DNA, 19 bp, Mus musculus
  siRNA target sequence for Elovl1 (NM_019422.1,404-422).
cgctgtgaccccatagact

SEQ ID NO: 671267 - DNA, 19 bp, Mus musculus
  siRNA target sequence for Elovl1 (NM_019422.1,405-423).
gctgtgaccccatagactt

SEQ ID NO: 671268 - DNA, 19 bp, Mus musculus
  siRNA target sequence for Elovl1 (NM_019422.1,406-424).
ctgtgaccccatagacttt

SEQ ID NO: 671269 - DNA, 19 bp, Mus musculus
  siRNA target sequence for Elovl1 (NM_019422.1,410-428).
gaccccatagacttttcca

SEQ ID NO: 671270 - DNA, 19 bp, Mus musculus
  siRNA target sequence for Elovl1 (NM_019422.1,412-430).
ccccatagacttttccaat

SEQ ID NO: 671271 - DNA, 19 bp, Mus musculus
  siRNA target sequence for Elovl1 (NM_019422.1,413-431).
cccatagacttttccaata

SEQ ID NO: 671272 - DNA, 19 bp, Mus musculus
  siRNA target sequence for Elovl1 (NM_019422.1,494-512).
ctgatggacacagtgatat

SEQ ID NO: 671273 - DNA, 19 bp, Mus musculus
  siRNA target sequence for Elovl1 (NM_019422.1,589-607).
gtgggggataaaaattgct

SEQ ID NO: 671274 - DNA, 19 bp, Mus musculus
  siRNA target sequence for Elovl1 (NM_019422.1,667-685).
cctctactatggattgtct

SEQ ID NO: 671275 - DNA, 19 bp, Mus musculus
  siRNA target sequence for Elovl1 (NM_019422.1,829-847).
ccacctcatctggatgtat

SEQ ID NO: 671276 - DNA, 19 bp, Mus musculus
  siRNA target sequence for Elovl1 (NM_019422.1,915-933).
cccgtgcagttcagcaaaa

SEQ ID NO: 671277 - DNA, 19 bp, Mus musculus
  siRNA target sequence for Elovl1 (NM_019422.1,916-934).
ccgtgcagttcagcaaaat

SEQ ID NO: 671278 - DNA, 19 bp, Mus musculus
  siRNA target sequence for Elovl3 (NM_007703.1,175-193).
gacacatccatgaatttct

SEQ ID NO: 671279 - DNA, 19 bp, Mus musculus
  siRNA target sequence for Elovl3 (NM_007703.1,194-212).
cacgcgggttaaaaatgga

SEQ ID NO: 671280 - DNA, 19 bp, Mus musculus
  siRNA target sequence for Elovl3 (NM_007703.1,214-232).
ctgatgcaaccctatgact

SEQ ID NO: 671281 - DNA, 19 bp, Mus musculus
  siRNA target sequence for Elovl3 (NM_007703.1,235-253).
gagacgtttcaggacttaa

SEQ ID NO: 671282 - DNA, 19 bp, Mus musculus
  siRNA target sequence for Elovl3 (NM_007703.1,270-288).
gtactgggtaagctcattt

SEQ ID NO: 671283 - DNA, 19 bp, Mus musculus
  siRNA target sequence for Elovl3 (NM_007703.1,276-294).
ggtaagctcatttctcata

SEQ ID NO: 671284 - DNA, 19 bp, Mus musculus
  siRNA target sequence for Elovl3 (NM_007703.1,502-520).
gacgccgtagtcagattct

SEQ ID NO: 671285 - DNA, 19 bp, Mus musculus
  siRNA target sequence for Elovl3 (NM_007703.1,584-602).
gtaagcgtccactcatctt

SEQ ID NO: 671286 - DNA, 19 bp, Mus musculus
  siRNA target sequence for Elovl3 (NM_007703.1,634-652).
ctgttcacaagctttggat

SEQ ID NO: 671287 - DNA, 19 bp, Mus musculus
  siRNA target sequence for Elovl3 (NM_007703.1,645-663).
ctttggatacaagaacaaa

SEQ ID NO: 671288 - DNA, 19 bp, Mus musculus
  siRNA target sequence for Elovl3 (NM_007703.1,701-719).
gcgtccattctgtcatgta

SEQ ID NO: 671289 - DNA, 19 bp, Mus musculus
  siRNA target sequence for Elovl3 (NM_007703.1,743-761).
ccaaactgaagcatcctaa

SEQ ID NO: 671290 - DNA, 19 bp, Mus musculus
  siRNA target sequence for Elovl3 (NM_007703.1,744-762).
caaactgaagcatcctaat

SEQ ID NO: 671291 - DNA, 19 bp, Mus musculus
  siRNA target sequence for Elovl3 (NM_007703.1,804-822).
ggttctgggcaccatcttt

SEQ ID NO: 671292 - DNA, 19 bp, Mus musculus
  siRNA target sequence for Elovl3 (NM_007703.1,815-833).
ccatctttggcatactgaa

SEQ ID NO: 671293 - DNA, 19 bp, Mus musculus
  siRNA target sequence for Elovl3 (NM_007703.1,866-884).
caacaacggaacacttctt

SEQ ID NO: 671294 - DNA, 19 bp, Mus musculus
  siRNA target sequence for Elovl3 (NM_007703.1,882-900).
cttctggtcttttatgcta

SEQ ID NO: 671295 - DNA, 19 bp, Mus musculus
  siRNA target sequence for Elovl3 (NM_007703.1,898-916).
ctatatgggacctatttca

SEQ ID NO: 671296 - DNA, 19 bp, Mus musculus
  siRNA target sequence for Elovl3 (NM_007703.1,904-922).
gggacctatttcatcctat

SEQ ID NO: 671297 - DNA, 19 bp, Mus musculus
  siRNA target sequence for Elovl4 (NM_148941.1,104-122).
cgatgtccacggcattcaa

SEQ ID NO: 671298 - DNA, 19 bp, Mus musculus
  siRNA target sequence for Elovl4 (NM_148941.1,153-171).
gaccattgcagataaacgt

SEQ ID NO: 671299 - DNA, 19 bp, Mus musculus
  siRNA target sequence for Elovl4 (NM_148941.1,200-218).
catggccaacgataagcat

SEQ ID NO: 671300 - DNA, 19 bp, Mus musculus
  siRNA target sequence for Elovl4 (NM_148941.1,205-223).
ccaacgataagcataagca

SEQ ID NO: 671301 - DNA, 19 bp, Mus musculus
  siRNA target sequence for Elovl4 (NM_148941.1,215-233).
gcataagcacgctctatct

SEQ ID NO: 671302 - DNA, 19 bp, Mus musculus
  siRNA target sequence for Elovl4 (NM_148941.1,268-286).
gaccgcgagccgttccaaa

SEQ ID NO: 671303 - DNA, 19 bp, Mus musculus
  siRNA target sequence for Elovl4 (NM_148941.1,279-297).
gttccaaatgcgcttagta

SEQ ID NO: 671304 - DNA, 19 bp, Mus musculus
  siRNA target sequence for Elovl4 (NM_148941.1,291-309).
cttagtactcataatctat

SEQ ID NO: 671305 - DNA, 19 bp, Mus musculus
  siRNA target sequence for Elovl4 (NM_148941.1,295-313).
gtactcataatctataatt

SEQ ID NO: 671306 - DNA, 19 bp, Mus musculus
  siRNA target sequence for Elovl4 (NM_148941.1,352-370).
ctattcatgggatcataca

SEQ ID NO: 671307 - DNA, 19 bp, Mus musculus
  siRNA target sequence for Elovl4 (NM_148941.1,394-412).
cagtcagtggattattcta

SEQ ID NO: 671308 - DNA, 19 bp, Mus musculus
  siRNA target sequence for Elovl4 (NM_148941.1,396-414).
gtcagtggattattctaat

SEQ ID NO: 671309 - DNA, 19 bp, Mus musculus
  siRNA target sequence for Elovl4 (NM_148941.1,410-428).
ctaatgatgttaatgaagt

SEQ ID NO: 671310 - DNA, 19 bp, Mus musculus
  siRNA target sequence for Elovl4 (NM_148941.1,449-467).
ggtggtattttgtatcgaa

SEQ ID NO: 671311 - DNA, 19 bp, Mus musculus
  siRNA target sequence for Elovl4 (NM_148941.1,450-468).
gtggtattttgtatcgaaa

SEQ ID NO: 671312 - DNA, 19 bp, Mus musculus
  siRNA target sequence for Elovl4 (NM_148941.1,563-581).
ctctgtggtggattggaat

SEQ ID NO: 671313 - DNA, 19 bp, Mus musculus
  siRNA target sequence for Elovl4 (NM_148941.1,593-611).
ctggaggccaagcgttttt

SEQ ID NO: 671314 - DNA, 19 bp, Mus musculus
  siRNA target sequence for Elovl4 (NM_148941.1,678-696).
cccctggatccagaaatat

SEQ ID NO: 671315 - DNA, 19 bp, Mus musculus
  siRNA target sequence for Elovl4 (NM_148941.1,858-876).
ctacactcggacatacaat

SEQ ID NO: 671316 - DNA, 19 bp, Mus musculus
  siRNA target sequence for Elovl4 (NM_148941.1,906-924).
ggccacgaatggtatctca

SEQ ID NO: 671317 - DNA, 19 bp, Mus musculus
  siRNA target sequence for Elovl4 (NM_148941.1,907-925).
gccacgaatggtatctcat

SEQ ID NO: 671318 - DNA, 19 bp, Mus musculus
  siRNA target sequence for Elovl4 (NM_148941.1,923-941).
catcgaacggcgtgaataa

SEQ ID NO: 671319 - DNA, 19 bp, Mus musculus
  siRNA target sequence for Prkab1 (NM_031869.1,374-392).
cgacctggaagcgaatgat

SEQ ID NO: 671320 - DNA, 19 bp, Mus musculus
  siRNA target sequence for Prkab1 (NM_031869.1,375-393).
gacctggaagcgaatgata

SEQ ID NO: 671321 - DNA, 19 bp, Mus musculus
  siRNA target sequence for Prkab1 (NM_031869.1,377-395).
cctggaagcgaatgataaa

SEQ ID NO: 671322 - DNA, 19 bp, Mus musculus
  siRNA target sequence for Prkab1 (NM_031869.1,439-457).
gtggaaaggaagtctactt

SEQ ID NO: 671323 - DNA, 19 bp, Mus musculus
  siRNA target sequence for Prkab1 (NM_031869.1,441-459).
ggaaaggaagtctacttgt

SEQ ID NO: 671324 - DNA, 19 bp, Mus musculus
  siRNA target sequence for Prkab1 (NM_031869.1,492-510).
ctcacgagaagccagaata

SEQ ID NO: 671325 - DNA, 19 bp, Mus musculus
  siRNA target sequence for Prkab1 (NM_031869.1,499-517).
gaagccagaataactttgt

SEQ ID NO: 671326 - DNA, 19 bp, Mus musculus
  siRNA target sequence for Prkab1 (NM_031869.1,535-553).
ctgaaggagagcatcagta

SEQ ID NO: 671327 - DNA, 19 bp, Mus musculus
  siRNA target sequence for Prkab1 (NM_031869.1,588-606).
ccttctgagccaatagtaa

SEQ ID NO: 671328 - DNA, 19 bp, Mus musculus
  siRNA target sequence for Prkab1 (NM_031869.1,618-636).
ggcacagttaacaacatca

SEQ ID NO: 671329 - DNA, 19 bp, Mus musculus
  siRNA target sequence for Prkab1 (NM_031869.1,741-759).
caccaggagccttacatgt

SEQ ID NO: 671330 - DNA, 19 bp, Mus musculus
  siRNA target sequence for Prkab1 (NM_031869.1,749-767).
gccttacatgtctaaacca

SEQ ID NO: 671331 - DNA, 19 bp, Mus musculus
  siRNA target sequence for Prkab1 (NM_031869.1,936-954).
gcaacacaccggtacaaga

SEQ ID NO: 671332 - DNA, 19 bp, Mus musculus
  siRNA target sequence for Prkab1 (NM_031869.1,937-955).
caacacaccggtacaagaa

SEQ ID NO: 671333 - DNA, 19 bp, Mus musculus
  siRNA target sequence for Prkab1 (NM_031869.1,940-958).
cacaccggtacaagaaaaa

SEQ ID NO: 671334 - DNA, 19 bp, Mus musculus
  siRNA target sequence for Prkab1 (NM_031869.1,942-960).
caccggtacaagaaaaagt

SEQ ID NO: 671335 - DNA, 19 bp, Mus musculus
  siRNA target sequence for Prkag1 (NM_016781.1,65-83).
gctcgccagctctagagaa

SEQ ID NO: 671336 - DNA, 19 bp, Mus musculus
  siRNA target sequence for Prkag1 (NM_016781.1,74-92).
ctctagagaatgaacactt

SEQ ID NO: 671337 - DNA, 19 bp, Mus musculus
  siRNA target sequence for Prkag1 (NM_016781.1,97-115).
gagaccccggaatcaaaca

SEQ ID NO: 671338 - DNA, 19 bp, Mus musculus
  siRNA target sequence for Prkag1 (NM_016781.1,102-120).
cccggaatcaaacaatagt

SEQ ID NO: 671339 - DNA, 19 bp, Mus musculus
  siRNA target sequence for Prkag1 (NM_016781.1,104-122).
cggaatcaaacaatagtgt

SEQ ID NO: 671340 - DNA, 19 bp, Mus musculus
  siRNA target sequence for Prkag1 (NM_016781.1,173-191).
gttccaagttggtggtatt

SEQ ID NO: 671341 - DNA, 19 bp, Mus musculus
  siRNA target sequence for Prkag1 (NM_016781.1,176-194).
ccaagttggtggtatttga

SEQ ID NO: 671342 - DNA, 19 bp, Mus musculus
  siRNA target sequence for Prkag1 (NM_016781.1,197-215).
cttcgctacaggtaaagaa

SEQ ID NO: 671343 - DNA, 19 bp, Mus musculus
  siRNA target sequence for Prkag1 (NM_016781.1,305-323).
ccgacttcatcaacatttt

SEQ ID NO: 671344 - DNA, 19 bp, Mus musculus
  siRNA target sequence for Prkag1 (NM_016781.1,318-336).
cattttgcaccgatactat

SEQ ID NO: 671345 - DNA, 19 bp, Mus musculus
  siRNA target sequence for Prkag1 (NM_016781.1,344-362).
ccctggtgcagatttacga

SEQ ID NO: 671346 - DNA, 19 bp, Mus musculus
  siRNA target sequence for Prkag1 (NM_016781.1,345-363).
cctggtgcagatttacgaa

SEQ ID NO: 671347 - DNA, 19 bp, Mus musculus
  siRNA target sequence for Prkag1 (NM_016781.1,467-485).
cttcattaattcgaaataa

SEQ ID NO: 671348 - DNA, 19 bp, Mus musculus
  siRNA target sequence for Prkag1 (NM_016781.1,470-488).
cattaattcgaaataagat

SEQ ID NO: 671349 - DNA, 19 bp, Mus musculus
  siRNA target sequence for Prkag1 (NM_016781.1,518-536).
caggcaacaccttgtacat

SEQ ID NO: 671350 - DNA, 19 bp, Mus musculus
  siRNA target sequence for Prkag1 (NM_016781.1,527-545).
ccttgtacatccttactca

SEQ ID NO: 671351 - DNA, 19 bp, Mus musculus
  siRNA target sequence for Prkag1 (NM_016781.1,595-613).
ccggaattcatgtctaagt

SEQ ID NO: 671352 - DNA, 19 bp, Mus musculus
  siRNA target sequence for Prkag1 (NM_016781.1,743-761).
ggcgtgtggtggacatcta

SEQ ID NO: 671353 - DNA, 19 bp, Mus musculus
  siRNA target sequence for Prkag1 (NM_016781.1,756-774).
catctactccaagtttgat

SEQ ID NO: 671354 - DNA, 19 bp, Mus musculus
  siRNA target sequence for Prkag1 (NM_016781.1,855-873).
ctttgagggtgttctcaaa

SEQ ID NO: 671355 - DNA, 19 bp, Mus musculus
  siRNA target sequence for Prkag1 (NM_016781.1,859-877).
gagggtgttctcaaatgct

SEQ ID NO: 671356 - DNA, 19 bp, Mus musculus
  siRNA target sequence for Prkag1 (NM_016781.1,980-998).
cgctgtctgacatcttaca

SEQ ID NO: 671357 - DNA, 19 bp, Mus musculus
  siRNA target sequence for Ptdss1 (NM_008959.2,722-740).
gtgaactacaggatgcatt

SEQ ID NO: 671358 - DNA, 19 bp, Mus musculus
  siRNA target sequence for Ptdss1 (NM_008959.2,893-911).
ggcatcctgtctgttatct

SEQ ID NO: 671359 - DNA, 19 bp, Mus musculus
  siRNA target sequence for Ptdss1 (NM_008959.2,894-912).
gcatcctgtctgttatctt

SEQ ID NO: 671360 - DNA, 19 bp, Mus musculus
  siRNA target sequence for Ptdss1 (NM_008959.2,905-923).
gttatcttcttctttctca

SEQ ID NO: 671361 - DNA, 19 bp, Mus musculus
  siRNA target sequence for Ptdss1 (NM_008959.2,943-961).
ccccaatggtccatttact

SEQ ID NO: 671362 - DNA, 19 bp, Mus musculus
  siRNA target sequence for Ptdss1 (NM_008959.2,974-992).
gccttatggcgaatggttt

SEQ ID NO: 671363 - DNA, 19 bp, Mus musculus
  siRNA target sequence for Ptdss1 (NM_008959.2,1054-1072).
ggttaaatccctgatgtat

SEQ ID NO: 671364 - DNA, 19 bp, Mus musculus
  siRNA target sequence for Ptdss1 (NM_008959.2,1078-1096).
ggatcccaatcttcgatat

SEQ ID NO: 671365 - DNA, 19 bp, Mus musculus
  siRNA target sequence for Ptdss1 (NM_008959.2,1082-1100).
cccaatcttcgatatgcta

SEQ ID NO: 671366 - DNA, 19 bp, Mus musculus
  siRNA target sequence for Ptdss1 (NM_008959.2,1130-1148).
gtgaactgtcatgtgataa

SEQ ID NO: 671367 - DNA, 19 bp, Mus musculus
  siRNA target sequence for Ptdss1 (NM_008959.2,1162-1180).
cgttagtcactttgatata

SEQ ID NO: 671368 - DNA, 19 bp, Mus musculus
  siRNA target sequence for Ptdss1 (NM_008959.2,1218-1236).
ccttgttgatccgtagtta

SEQ ID NO: 671369 - DNA, 19 bp, Mus musculus
  siRNA target sequence for Ptdss1 (NM_008959.2,1219-1237).
cttgttgatccgtagttat

SEQ ID NO: 671370 - DNA, 19 bp, Mus musculus
  siRNA target sequence for Ptdss1 (NM_008959.2,1241-1259).
ctttgctggacaatcagta

SEQ ID NO: 671371 - DNA, 19 bp, Mus musculus
  siRNA target sequence for Ptdss1 (NM_008959.2,1291-1309).
gcatctcctgcccaatttt

SEQ ID NO: 671372 - DNA, 19 bp, Mus musculus
  siRNA target sequence for Ptdss1 (NM_008959.2,1317-1335).
gctggtgggaccaagtcat

SEQ ID NO: 671373 - DNA, 19 bp, Mus musculus
  siRNA target sequence for Ptdss1 (NM_008959.2,1532-1550).
cagagagtggctggtatat

SEQ ID NO: 671374 - DNA, 19 bp, Mus musculus
  siRNA target sequence for Ptdss1 (NM_008959.2,1544-1562).
ggtatatacctcttcatga

SEQ ID NO: 671375 - DNA, 19 bp, Mus musculus
  siRNA target sequence for Ptdss1 (NM_008959.2,1632-1650).
ccttaagctggggtagaat

SEQ ID NO: 671376 - DNA, 19 bp, Mus musculus
  siRNA target sequence for Ptdss1 (NM_008959.2,1652-1670).
ctcttcatcggctgcatta

SEQ ID NO: 671377 - DNA, 19 bp, Mus musculus
  siRNA target sequence for Ptdss1 (NM_008959.2,1677-1695).
ccacagtgagacagtacta

SEQ ID NO: 671378 - DNA, 19 bp, Mus musculus
  siRNA target sequence for Ptdss1 (NM_008959.2,1768-1786).
ggaagctattgtttgcata

SEQ ID NO: 671379 - DNA, 19 bp, Mus musculus
  siRNA target sequence for Ptdss1 (NM_008959.2,1769-1787).
gaagctattgtttgcataa

SEQ ID NO: 671380 - DNA, 19 bp, Mus musculus
  siRNA target sequence for Ptdss1 (NM_008959.2,1772-1790).
gctattgtttgcataaaat

SEQ ID NO: 671381 - DNA, 19 bp, Mus musculus
  siRNA target sequence for Ptdss1 (NM_008959.2,1796-1814).
caagatctcttttctaaga

SEQ ID NO: 671382 - DNA, 19 bp, Mus musculus
  siRNA target sequence for Ptdss1 (NM_008959.2,1809-1827).
ctaagacccagatactcta

SEQ ID NO: 671383 - DNA, 19 bp, Mus musculus
  siRNA target sequence for Ptdss1 (NM_008959.2,2000-2018).
gacagcccaccgaagcatt

SEQ ID NO: 671384 - DNA, 19 bp, Mus musculus
  siRNA target sequence for Ptdss1 (NM_008959.2,2049-2067).
gaaggaaccggcattctaa

SEQ ID NO: 671385 - DNA, 19 bp, Mus musculus
  siRNA target sequence for Ptdss1 (NM_008959.2,2060-2078).
cattctaagtccaaagtca

SEQ ID NO: 671386 - DNA, 19 bp, Mus musculus
  siRNA target sequence for Ptdss1 (NM_008959.2,2068-2086).
gtccaaagtcactaatgga

SEQ ID NO: 671387 - DNA, 19 bp, Mus musculus
  siRNA target sequence for 0610009I22Rik (NM_025646.2,279-297).
cggatttgttggatggatt

SEQ ID NO: 671388 - DNA, 19 bp, Mus musculus
  siRNA target sequence for 0610009I22Rik (NM_025646.2,286-304).
gttggatggatttattgct

SEQ ID NO: 671389 - DNA, 19 bp, Mus musculus
  siRNA target sequence for 0610009I22Rik (NM_025646.2,368-386).
cttatcagcatcttatata

SEQ ID NO: 671390 - DNA, 19 bp, Mus musculus
  siRNA target sequence for 0610009I22Rik (NM_025646.2,375-393).
gcatcttatatattagctt

SEQ ID NO: 671391 - DNA, 19 bp, Mus musculus
  siRNA target sequence for 0610009I22Rik (NM_025646.2,414-432).
cagtcccactcacttacat

SEQ ID NO: 671392 - DNA, 19 bp, Mus musculus
  siRNA target sequence for 0610009I22Rik (NM_025646.2,416-434).
gtcccactcacttacatga

SEQ ID NO: 671393 - DNA, 19 bp, Mus musculus
  siRNA target sequence for 0610009I22Rik (NM_025646.2,418-436).
cccactcacttacatgata

SEQ ID NO: 671394 - DNA, 19 bp, Mus musculus
  siRNA target sequence for 0610009I22Rik (NM_025646.2,419-437).
ccactcacttacatgataa

SEQ ID NO: 671395 - DNA, 19 bp, Mus musculus
  siRNA target sequence for 0610009I22Rik (NM_025646.2,420-438).
cactcacttacatgataat

SEQ ID NO: 671396 - DNA, 19 bp, Mus musculus
  siRNA target sequence for 0610009I22Rik (NM_025646.2,422-440).
ctcacttacatgataattt

SEQ ID NO: 671397 - DNA, 19 bp, Mus musculus
  siRNA target sequence for 0610009I22Rik (NM_025646.2,465-483).
ctgtgttttatgtcagata

SEQ ID NO: 671398 - DNA, 19 bp, Mus musculus
  siRNA target sequence for 0610009I22Rik (NM_025646.2,493-511).
gccaacaccgcgaacacta

SEQ ID NO: 671399 - DNA, 19 bp, Mus musculus
  siRNA target sequence for 0610009I22Rik (NM_025646.2,498-516).
caccgcgaacactagctaa

SEQ ID NO: 671400 - DNA, 19 bp, Mus musculus
  siRNA target sequence for 0610009I22Rik (NM_025646.2,501-519).
cgcgaacactagctaagta

SEQ ID NO: 671401 - DNA, 19 bp, Mus musculus
  siRNA target sequence for 0610009I22Rik (NM_025646.2,503-521).
cgaacactagctaagtact

SEQ ID NO: 671402 - DNA, 19 bp, Mus musculus
  siRNA target sequence for 0610009I22Rik (NM_025646.2,507-525).
cactagctaagtacttcaa

SEQ ID NO: 671403 - DNA, 19 bp, Mus musculus
  siRNA target sequence for 0610009I22Rik (NM_025646.2,512-530).
gctaagtacttcaatcctt

SEQ ID NO: 671404 - DNA, 19 bp, Mus musculus
  siRNA target sequence for 0610009I22Rik (NM_025646.2,517-535).
gtacttcaatccttgctat

SEQ ID NO: 671405 - DNA, 19 bp, Mus musculus
  siRNA target sequence for 0610009I22Rik (NM_025646.2,532-550).
ctatgccacggctaggtta

SEQ ID NO: 671406 - DNA, 19 bp, Mus musculus
  siRNA target sequence for 0610009I22Rik (NM_025646.2,538-556).
cacggctaggttaaaacca

SEQ ID NO: 671407 - DNA, 19 bp, Mus musculus
  siRNA target sequence for 0610009I22Rik (NM_025646.2,543-561).
ctaggttaaaaccaacatt

SEQ ID NO: 671408 - DNA, 19 bp, Mus musculus
  siRNA target sequence for 0610009I22Rik (NM_025646.2,546-564).
ggttaaaaccaacattcat

SEQ ID NO: 671409 - DNA, 19 bp, Mus musculus
  siRNA target sequence for 0610009I22Rik (NM_025646.2,558-576).
cattcatcagcaaggtaaa

SEQ ID NO: 671410 - DNA, 19 bp, Mus musculus
  siRNA target sequence for 0610009I22Rik (NM_025646.2,609-627).
ctttggcagctccagtttt

SEQ ID NO: 671411 - DNA, 19 bp, Mus musculus
  siRNA target sequence for 0610009I22Rik (NM_025646.2,613-631).
ggcagctccagttttcaat

SEQ ID NO: 671412 - DNA, 19 bp, Mus musculus
  siRNA target sequence for 0610009I22Rik (NM_025646.2,640-658).
cagcatttatcttcagata

SEQ ID NO: 671413 - DNA, 19 bp, Mus musculus
  siRNA target sequence for 0610009I22Rik (NM_025646.2,642-660).
gcatttatcttcagatact

SEQ ID NO: 671414 - DNA, 19 bp, Mus musculus
  siRNA target sequence for 0610009I22Rik (NM_025646.2,686-704).
gctgcatcagcatacagtt

SEQ ID NO: 671415 - DNA, 19 bp, Mus musculus
  siRNA target sequence for 0610009I22Rik (NM_025646.2,689-707).
gcatcagcatacagttatt

SEQ ID NO: 671416 - DNA, 19 bp, Mus musculus
  siRNA target sequence for 0610009I22Rik (NM_025646.2,690-708).
catcagcatacagttatta

SEQ ID NO: 671417 - DNA, 19 bp, Mus musculus
  siRNA target sequence for 0610009I22Rik (NM_025646.2,695-713).
gcatacagttattatcact

SEQ ID NO: 671418 - DNA, 19 bp, Mus musculus
  siRNA target sequence for 0610009I22Rik (NM_025646.2,712-730).
ctatggtcggaaaactgtt

SEQ ID NO: 671419 - DNA, 19 bp, Mus musculus
  siRNA target sequence for Chpt1 (NM_144807.2,160-178).
cctggctgctccaatggat

SEQ ID NO: 671420 - DNA, 19 bp, Mus musculus
  siRNA target sequence for Chpt1 (NM_144807.2,238-256).
ccacactagtgctcatctt

SEQ ID NO: 671421 - DNA, 19 bp, Mus musculus
  siRNA target sequence for Chpt1 (NM_144807.2,241-259).
cactagtgctcatcttcta

SEQ ID NO: 671422 - DNA, 19 bp, Mus musculus
  siRNA target sequence for Chpt1 (NM_144807.2,285-303).
ccatactggacataccttt

SEQ ID NO: 671423 - DNA, 19 bp, Mus musculus
  siRNA target sequence for Chpt1 (NM_144807.2,286-304).
catactggacatacctttt

SEQ ID NO: 671424 - DNA, 19 bp, Mus musculus
  siRNA target sequence for Chpt1 (NM_144807.2,290-308).
ctggacataccttttatgt

SEQ ID NO: 671425 - DNA, 19 bp, Mus musculus
  siRNA target sequence for Chpt1 (NM_144807.2,382-400).
ctcccttaggggaactatt

SEQ ID NO: 671426 - DNA, 19 bp, Mus musculus
  siRNA target sequence for Chpt1 (NM_144807.2,386-404).
cttaggggaactatttgat

SEQ ID NO: 671427 - DNA, 19 bp, Mus musculus
  siRNA target sequence for Chpt1 (NM_144807.2,503-521).
cgttgggatgttcatgttt

SEQ ID NO: 671428 - DNA, 19 bp, Mus musculus
  siRNA target sequence for Chpt1 (NM_144807.2,526-544).
gtgctcattggcagactta

SEQ ID NO: 671429 - DNA, 19 bp, Mus musculus
  siRNA target sequence for Chpt1 (NM_144807.2,545-563).
cgtctcaggagtgttaaga

SEQ ID NO: 671430 - DNA, 19 bp, Mus musculus
  siRNA target sequence for Chpt1 (NM_144807.2,546-564).
gtctcaggagtgttaagat

SEQ ID NO: 671431 - DNA, 19 bp, Mus musculus
  siRNA target sequence for Chpt1 (NM_144807.2,548-566).
ctcaggagtgttaagattt

SEQ ID NO: 671432 - DNA, 19 bp, Mus musculus
  siRNA target sequence for Chpt1 (NM_144807.2,603-621).
gtgatcgtcttcatgttgt

SEQ ID NO: 671433 - DNA, 19 bp, Mus musculus
  siRNA target sequence for Chpt1 (NM_144807.2,636-654).
gcaacaatgtgggactata

SEQ ID NO: 671434 - DNA, 19 bp, Mus musculus
  siRNA target sequence for Chpt1 (NM_144807.2,640-658).
caatgtgggactatacgat

SEQ ID NO: 671435 - DNA, 19 bp, Mus musculus
  siRNA target sequence for Chpt1 (NM_144807.2,646-664).
gggactatacgatacctat

SEQ ID NO: 671436 - DNA, 19 bp, Mus musculus
  siRNA target sequence for Chpt1 (NM_144807.2,647-665).
ggactatacgatacctatt

SEQ ID NO: 671437 - DNA, 19 bp, Mus musculus
  siRNA target sequence for Chpt1 (NM_144807.2,650-668).
ctatacgatacctattcta

SEQ ID NO: 671438 - DNA, 19 bp, Mus musculus
  siRNA target sequence for Chpt1 (NM_144807.2,699-717).
ggagttgtaggtggattaa

SEQ ID NO: 671439 - DNA, 19 bp, Mus musculus
  siRNA target sequence for Chpt1 (NM_144807.2,700-718).
gagttgtaggtggattaat

SEQ ID NO: 671440 - DNA, 19 bp, Mus musculus
  siRNA target sequence for Chpt1 (NM_144807.2,702-720).
gttgtaggtggattaatat

SEQ ID NO: 671441 - DNA, 19 bp, Mus musculus
  siRNA target sequence for Chpt1 (NM_144807.2,765-783).
ggcaagaatgggtctacta

SEQ ID NO: 671442 - DNA, 19 bp, Mus musculus
  siRNA target sequence for Chpt1 (NM_144807.2,766-784).
gcaagaatgggtctactat

SEQ ID NO: 671443 - DNA, 19 bp, Mus musculus
  siRNA target sequence for Chpt1 (NM_144807.2,767-785).
caagaatgggtctactatt

SEQ ID NO: 671444 - DNA, 19 bp, Mus musculus
  siRNA target sequence for Chpt1 (NM_144807.2,807-825).
cctggactccacataggat

SEQ ID NO: 671445 - DNA, 19 bp, Mus musculus
  siRNA target sequence for Chpt1 (NM_144807.2,808-826).
ctggactccacataggatt

SEQ ID NO: 671446 - DNA, 19 bp, Mus musculus
  siRNA target sequence for Chpt1 (NM_144807.2,811-829).
gactccacataggattaat

SEQ ID NO: 671447 - DNA, 19 bp, Mus musculus
  siRNA target sequence for Chpt1 (NM_144807.2,813-831).
ctccacataggattaatta

SEQ ID NO: 671448 - DNA, 19 bp, Mus musculus
  siRNA target sequence for Chpt1 (NM_144807.2,815-833).
ccacataggattaattatt

SEQ ID NO: 671449 - DNA, 19 bp, Mus musculus
  siRNA target sequence for Chpt1 (NM_144807.2,816-834).
cacataggattaattatta

SEQ ID NO: 671450 - DNA, 19 bp, Mus musculus
  siRNA target sequence for Chpt1 (NM_144807.2,840-858).
gcaataatgatctataaga

SEQ ID NO: 671451 - DNA, 19 bp, Mus musculus
  siRNA target sequence for Chpt1 (NM_144807.2,913-931).
gatgtgtctttgctaaagt

SEQ ID NO: 671452 - DNA, 19 bp, Mus musculus
  siRNA target sequence for Chpt1 (NM_144807.2,959-977).
gacgaaaagtgaactatat

SEQ ID NO: 671453 - DNA, 19 bp, Mus musculus
  siRNA target sequence for Chpt1 (NM_144807.2,961-979).
cgaaaagtgaactatatct

SEQ ID NO: 671454 - DNA, 19 bp, Mus musculus
  siRNA target sequence for Chpt1 (NM_144807.2,978-996).
cttcaagacactgtcttta

SEQ ID NO: 671455 - DNA, 19 bp, Mus musculus
  siRNA target sequence for Chpt1 (NM_144807.2,1053-1071).
gttgttctgtggatagcaa

SEQ ID NO: 671456 - DNA, 19 bp, Mus musculus
  siRNA target sequence for Chpt1 (NM_144807.2,1094-1112).
gatgatatactttacttct

SEQ ID NO: 671457 - DNA, 19 bp, Mus musculus
  siRNA target sequence for Chpt1 (NM_144807.2,1129-1147).
caagacaccttcatctaaa

SEQ ID NO: 671458 - DNA, 19 bp, Mus musculus
  siRNA target sequence for Chpt1 (NM_144807.2,1137-1155).
cttcatctaaacatcttca

SEQ ID NO: 671459 - DNA, 19 bp, Mus musculus
  siRNA target sequence for Chpt1 (NM_144807.2,1143-1161).
ctaaacatcttcaagactt

SEQ ID NO: 671460 - DNA, 19 bp, Mus musculus
  siRNA target sequence for Chpt1 (NM_144807.2,1154-1172).
caagacttcatgtcaacaa

SEQ ID NO: 671461 - DNA, 19 bp, Mus musculus
  siRNA target sequence for Chpt1 (NM_144807.2,1173-1191).
gcaccggaacaggtttaca

SEQ ID NO: 671462 - DNA, 19 bp, Mus musculus
  siRNA target sequence for Chpt1 (NM_144807.2,1174-1192).
caccggaacaggtttacaa

SEQ ID NO: 671463 - DNA, 19 bp, Mus musculus
  siRNA target sequence for Sycp3 (NM_011517.1,127-145).
gccgctgagcaaacatcta

SEQ ID NO: 671464 - DNA, 19 bp, Mus musculus
  siRNA target sequence for Sycp3 (NM_011517.1,128-146).
ccgctgagcaaacatctaa

SEQ ID NO: 671465 - DNA, 19 bp, Mus musculus
  siRNA target sequence for Sycp3 (NM_011517.1,129-147).
cgctgagcaaacatctaaa

SEQ ID NO: 671466 - DNA, 19 bp, Mus musculus
  siRNA target sequence for Sycp3 (NM_011517.1,199-217).
ggttgatcagcctaaaaaa

SEQ ID NO: 671467 - DNA, 19 bp, Mus musculus
  siRNA target sequence for Sycp3 (NM_011517.1,315-333).
gatctgctgggataattga

SEQ ID NO: 671468 - DNA, 19 bp, Mus musculus
  siRNA target sequence for Sycp3 (NM_011517.1,341-359).
ggaggtgaagtacagaata

SEQ ID NO: 671469 - DNA, 19 bp, Mus musculus
  siRNA target sequence for Sycp3 (NM_011517.1,342-360).
gaggtgaagtacagaatat

SEQ ID NO: 671470 - DNA, 19 bp, Mus musculus
  siRNA target sequence for Sycp3 (NM_011517.1,345-363).
gtgaagtacagaatatgct

SEQ ID NO: 671471 - DNA, 19 bp, Mus musculus
  siRNA target sequence for Sycp3 (NM_011517.1,414-432).
gaatagaaatgtataccaa

SEQ ID NO: 671472 - DNA, 19 bp, Mus musculus
  siRNA target sequence for Sycp3 (NM_011517.1,447-465).
ccagtaaccagaaaattga

SEQ ID NO: 671473 - DNA, 19 bp, Mus musculus
  siRNA target sequence for Sycp3 (NM_011517.1,499-517).
gaagcttaacaatgaatat

SEQ ID NO: 671474 - DNA, 19 bp, Mus musculus
  siRNA target sequence for Sycp3 (NM_011517.1,512-530).
gaatattctcagcaattta

SEQ ID NO: 671475 - DNA, 19 bp, Mus musculus
  siRNA target sequence for Sycp3 (NM_011517.1,519-537).
ctcagcaatttatgaatgt

SEQ ID NO: 671476 - DNA, 19 bp, Mus musculus
  siRNA target sequence for Sycp3 (NM_011517.1,578-596).
caaggagaaaaactatcta

SEQ ID NO: 671477 - DNA, 19 bp, Mus musculus
  siRNA target sequence for Sycp3 (NM_011517.1,673-691).
gatacacgagcagttcata

SEQ ID NO: 671478 - DNA, 19 bp, Mus musculus
  siRNA target sequence for Sycp3 (NM_011517.1,677-695).
cacgagcagttcataaaga

SEQ ID NO: 671479 - DNA, 19 bp, Mus musculus
  siRNA target sequence for Sycp3 (NM_011517.1,679-697).
cgagcagttcataaagagt

SEQ ID NO: 671480 - DNA, 19 bp, Mus musculus
  siRNA target sequence for Sycp3 (NM_011517.1,728-746).
ctatttactggcacacaaa

SEQ ID NO: 671481 - DNA, 19 bp, Mus musculus
  siRNA target sequence for Sycp3 (NM_011517.1,737-755).
ggcacacaaagtgaactta

SEQ ID NO: 671482 - DNA, 19 bp, Mus musculus
  siRNA target sequence for Sycp3 (NM_011517.1,761-779).
gaaatggctatgttgcaaa

SEQ ID NO: 671483 - DNA, 19 bp, Mus musculus
  siRNA target sequence for Sycp3 (NM_011517.1,805-823).
gcaagagatggcaaatgtt

SEQ ID NO: 671484 - DNA, 19 bp, Mus musculus
  siRNA target sequence for Sycp3 (NM_011517.1,814-832).
ggcaaatgttcgaaagtct

SEQ ID NO: 671485 - DNA, 19 bp, Mus musculus
  siRNA target sequence for Sycp3 (NM_011517.1,825-843).
gaaagtctcttcaatccat

SEQ ID NO: 671486 - DNA, 19 bp, Mus musculus
  siRNA target sequence for 2810024B22Rik (NM_146211.1,606-624).
cccgctacgagcatgtcat

SEQ ID NO: 671487 - DNA, 19 bp, Mus musculus
  siRNA target sequence for 2810024B22Rik (NM_146211.1,609-627).
gctacgagcatgtcatgaa

SEQ ID NO: 671488 - DNA, 19 bp, Mus musculus
  siRNA target sequence for 2810024B22Rik (NM_146211.1,610-628).
ctacgagcatgtcatgaaa

SEQ ID NO: 671489 - DNA, 19 bp, Mus musculus
  siRNA target sequence for 2810024B22Rik (NM_146211.1,632-650).
cgccaagcagccttgaagt

SEQ ID NO: 671490 - DNA, 19 bp, Mus musculus
  siRNA target sequence for 2810024B22Rik (NM_146211.1,669-687).
ctgactacattctgttcat

SEQ ID NO: 671491 - DNA, 19 bp, Mus musculus
  siRNA target sequence for 2810024B22Rik (NM_146211.1,689-707).
gacatcgacaacttgatca

SEQ ID NO: 671492 - DNA, 19 bp, Mus musculus
  siRNA target sequence for 2810024B22Rik (NM_146211.1,731-749).
ctcatcgctgagaacaaga

SEQ ID NO: 671493 - DNA, 19 bp, Mus musculus
  siRNA target sequence for 2810024B22Rik (NM_146211.1,779-797).
gcggcatactccaacttct

SEQ ID NO: 671494 - DNA, 19 bp, Mus musculus
  siRNA target sequence for 2810024B22Rik (NM_146211.1,810-828).
cttcgcagggctactacaa

SEQ ID NO: 671495 - DNA, 19 bp, Mus musculus
  siRNA target sequence for 2810024B22Rik (NM_146211.1,1028-1046).
caaatgtacgtgtgcaata

SEQ ID NO: 671496 - DNA, 19 bp, Mus musculus
  siRNA target sequence for 2810024B22Rik (NM_146211.1,1264-1282).
catgctgcgggcactacat

SEQ ID NO: 671497 - DNA, 19 bp, Mus musculus
  siRNA target sequence for 2810024B22Rik (NM_146211.1,1466-1484).
gaccggggactacagaaat

SEQ ID NO: 671498 - DNA, 19 bp, Mus musculus
  siRNA target sequence for 2810024B22Rik (NM_146211.1,1468-1486).
ccggggactacagaaatca

SEQ ID NO: 671499 - DNA, 19 bp, Mus musculus
  siRNA target sequence for 2810024B22Rik (NM_146211.1,1505-1523).
ctgcgttttgagatcttct

SEQ ID NO: 671500 - DNA, 19 bp, Mus musculus
  siRNA target sequence for 2810024B22Rik (NM_146211.1,1675-1693).
ctggacgctagcctatgta

SEQ ID NO: 671501 - DNA, 19 bp, Mus musculus
  siRNA target sequence for 2810024B22Rik (NM_146211.1,1747-1765).
gctacctgttgatgagttt

SEQ ID NO: 671502 - DNA, 19 bp, Mus musculus
  siRNA target sequence for 2810024B22Rik (NM_146211.1,1842-1860).
ctgtggagcccctccttat

SEQ ID NO: 671503 - DNA, 19 bp, Mus musculus
  siRNA target sequence for 2810024B22Rik (NM_146211.1,1880-1898).
ggggatgatggctatgtga

SEQ ID NO: 671504 - DNA, 19 bp, Mus musculus
  siRNA target sequence for 2810024B22Rik (NM_146211.1,1923-1941).
ggaataatgagcaggttaa

SEQ ID NO: 671505 - DNA, 19 bp, Mus musculus
  siRNA target sequence for AI427652 (NM_177756.2,463-481).
cgcatacgctgccttactt

SEQ ID NO: 671506 - DNA, 19 bp, Mus musculus
  siRNA target sequence for AI427652 (NM_177756.2,543-561).
gatcacaatgtggacaata

SEQ ID NO: 671507 - DNA, 19 bp, Mus musculus
  siRNA target sequence for AI427652 (NM_177756.2,554-572).
ggacaatacaacggaaata

SEQ ID NO: 671508 - DNA, 19 bp, Mus musculus
  siRNA target sequence for AI427652 (NM_177756.2,592-610).
gtgtgcagcgtttgtatca

SEQ ID NO: 671509 - DNA, 19 bp, Mus musculus
  siRNA target sequence for AI427652 (NM_177756.2,594-612).
gtgcagcgtttgtatcact

SEQ ID NO: 671510 - DNA, 19 bp, Mus musculus
  siRNA target sequence for AI427652 (NM_177756.2,596-614).
gcagcgtttgtatcactat

SEQ ID NO: 671511 - DNA, 19 bp, Mus musculus
  siRNA target sequence for AI427652 (NM_177756.2,677-695).
gccaaactcccggttttct

SEQ ID NO: 671512 - DNA, 19 bp, Mus musculus
  siRNA target sequence for AI427652 (NM_177756.2,688-706).
ggttttctcacgtcatgaa

SEQ ID NO: 671513 - DNA, 19 bp, Mus musculus
  siRNA target sequence for AI427652 (NM_177756.2,689-707).
gttttctcacgtcatgaaa

SEQ ID NO: 671514 - DNA, 19 bp, Mus musculus
  siRNA target sequence for AI427652 (NM_177756.2,726-744).
cgaactgcgagggaaaaat

SEQ ID NO: 671515 - DNA, 19 bp, Mus musculus
  siRNA target sequence for AI427652 (NM_177756.2,773-791).
cgacaacttcctgactaat

SEQ ID NO: 671516 - DNA, 19 bp, Mus musculus
  siRNA target sequence for AI427652 (NM_177756.2,799-817).
ccctgaacctaatgattgt

SEQ ID NO: 671517 - DNA, 19 bp, Mus musculus
  siRNA target sequence for AI427652 (NM_177756.2,800-818).
cctgaacctaatgattgta

SEQ ID NO: 671518 - DNA, 19 bp, Mus musculus
  siRNA target sequence for AI427652 (NM_177756.2,803-821).
gaacctaatgattgtagaa

SEQ ID NO: 671519 - DNA, 19 bp, Mus musculus
  siRNA target sequence for AI427652 (NM_177756.2,858-876).
ggtctatactctaacttct

SEQ ID NO: 671520 - DNA, 19 bp, Mus musculus
  siRNA target sequence for AI427652 (NM_177756.2,915-933).
ccagactaccttcagatta

SEQ ID NO: 671521 - DNA, 19 bp, Mus musculus
  siRNA target sequence for AI427652 (NM_177756.2,1193-1211).
cctcatccatgtacagata

SEQ ID NO: 671522 - DNA, 19 bp, Mus musculus
  siRNA target sequence for AI427652 (NM_177756.2,1196-1214).
catccatgtacagatagaa

SEQ ID NO: 671523 - DNA, 19 bp, Mus musculus
  siRNA target sequence for AI427652 (NM_177756.2,1256-1274).
gtcagttgtccctaagtat

SEQ ID NO: 671524 - DNA, 19 bp, Mus musculus
  siRNA target sequence for AI427652 (NM_177756.2,1267-1285).
ctaagtatccagacaagat

SEQ ID NO: 671525 - DNA, 19 bp, Mus musculus
  siRNA target sequence for AI427652 (NM_177756.2,1401-1419).
gggaaggcactcaacacaa

SEQ ID NO: 671526 - DNA, 19 bp, Mus musculus
  siRNA target sequence for AI427652 (NM_177756.2,1483-1501).
ctttaaccaggggtgaaat

SEQ ID NO: 671527 - DNA, 19 bp, Mus musculus
  siRNA target sequence for AI427652 (NM_177756.2,1497-1515).
gaaattggttgcttcctta

SEQ ID NO: 671528 - DNA, 19 bp, Mus musculus
  siRNA target sequence for AI427652 (NM_177756.2,1586-1604).
gcgctttgagcatcagttt

SEQ ID NO: 671529 - DNA, 19 bp, Mus musculus
  siRNA target sequence for AI427652 (NM_177756.2,1587-1605).
cgctttgagcatcagttta

SEQ ID NO: 671530 - DNA, 19 bp, Mus musculus
  siRNA target sequence for AI427652 (NM_177756.2,1673-1691).
cggtcgaaaaagaatgcaa

SEQ ID NO: 671531 - DNA, 19 bp, Mus musculus
  siRNA target sequence for AI427652 (NM_177756.2,1731-1749).
ctcgtcgaagctgattatt

SEQ ID NO: 671532 - DNA, 19 bp, Mus musculus
  siRNA target sequence for AI427652 (NM_177756.2,1734-1752).
gtcgaagctgattattcct

SEQ ID NO: 671533 - DNA, 19 bp, Mus musculus
  siRNA target sequence for AI427652 (NM_177756.2,1809-1827).
gatccctttgggaagatgt

SEQ ID NO: 671534 - DNA, 19 bp, Mus musculus
  siRNA target sequence for AI427652 (NM_177756.2,1924-1942).
cagagcctctgctcatcta

SEQ ID NO: 671535 - DNA, 19 bp, Mus musculus
  siRNA target sequence for AI427652 (NM_177756.2,1993-2011).
caaccatctgggacaatga

SEQ ID NO: 671536 - DNA, 19 bp, Mus musculus
  siRNA target sequence for AI427652 (NM_177756.2,2073-2091).
cgcagcaccgccaagaaca

SEQ ID NO: 671537 - DNA, 19 bp, Mus musculus
  siRNA target sequence for Ppp1r3c (NM_016854.1,118-136).
gatccacgtcctttgacaa

SEQ ID NO: 671538 - DNA, 19 bp, Mus musculus
  siRNA target sequence for Ppp1r3c (NM_016854.1,168-186).
gatttgcttggctcattca

SEQ ID NO: 671539 - DNA, 19 bp, Mus musculus
  siRNA target sequence for Ppp1r3c (NM_016854.1,207-225).
gggtccttacaatggtttt

SEQ ID NO: 671540 - DNA, 19 bp, Mus musculus
  siRNA target sequence for Ppp1r3c (NM_016854.1,229-247).
cgaagaaattttgtgaata

SEQ ID NO: 671541 - DNA, 19 bp, Mus musculus
  siRNA target sequence for Ppp1r3c (NM_016854.1,413-431).
cgtgggacctgcagtttga

SEQ ID NO: 671542 - DNA, 19 bp, Mus musculus
  siRNA target sequence for Ppp1r3c (NM_016854.1,416-434).
gggacctgcagtttgatct

SEQ ID NO: 671543 - DNA, 19 bp, Mus musculus
  siRNA target sequence for Ppp1r3c (NM_016854.1,433-451).
ctcttggaccttaacgata

SEQ ID NO: 671544 - DNA, 19 bp, Mus musculus
  siRNA target sequence for Ppp1r3c (NM_016854.1,469-487).
cttcacgaggagaaaaatt

SEQ ID NO: 671545 - DNA, 19 bp, Mus musculus
  siRNA target sequence for Ppp1r3c (NM_016854.1,474-492).
cgaggagaaaaatttggtt

SEQ ID NO: 671546 - DNA, 19 bp, Mus musculus
  siRNA target sequence for Ppp1r3c (NM_016854.1,507-525).
gccctcaaccgactactta

SEQ ID NO: 671547 - DNA, 19 bp, Mus musculus
  siRNA target sequence for Ppp1r3c (NM_016854.1,508-526).
ccctcaaccgactacttaa

SEQ ID NO: 671548 - DNA, 19 bp, Mus musculus
  siRNA target sequence for Ppp1r3c (NM_016854.1,510-528).
ctcaaccgactacttaagt

SEQ ID NO: 671549 - DNA, 19 bp, Mus musculus
  siRNA target sequence for Ppp1r3c (NM_016854.1,512-530).
caaccgactacttaagttt

SEQ ID NO: 671550 - DNA, 19 bp, Mus musculus
  siRNA target sequence for Ppp1r3c (NM_016854.1,533-551).
gggaccgctttcagaagaa

SEQ ID NO: 671551 - DNA, 19 bp, Mus musculus
  siRNA target sequence for Ppp1r3c (NM_016854.1,535-553).
gaccgctttcagaagaact

SEQ ID NO: 671552 - DNA, 19 bp, Mus musculus
  siRNA target sequence for Ppp1r3c (NM_016854.1,682-700).
gtggactgtgtctacatga

SEQ ID NO: 671553 - DNA, 19 bp, Mus musculus
  siRNA target sequence for Ppp1r3c (NM_016854.1,747-765).
cgacttgccccgtgtcatt

SEQ ID NO: 671554 - DNA, 19 bp, Mus musculus
  siRNA target sequence for Ppp1r3c (NM_016854.1,828-846).
caacaatgagggtcagaat

SEQ ID NO: 671555 - DNA, 19 bp, Mus musculus
  siRNA target sequence for Ppp1r3c (NM_016854.1,929-947).
cccctaagactgagataga

SEQ ID NO: 671556 - DNA, 19 bp, Mus musculus
  siRNA target sequence for Gphn (NM_172952.1,100-118).
gtcctcacagtgagtgata

SEQ ID NO: 671557 - DNA, 19 bp, Mus musculus
  siRNA target sequence for Gphn (NM_172952.1,144-162).
ccgcagtgggataaatcta

SEQ ID NO: 671558 - DNA, 19 bp, Mus musculus
  siRNA target sequence for Gphn (NM_172952.1,145-163).
cgcagtgggataaatctaa

SEQ ID NO: 671559 - DNA, 19 bp, Mus musculus
  siRNA target sequence for Gphn (NM_172952.1,146-164).
gcagtgggataaatctaaa

SEQ ID NO: 671560 - DNA, 19 bp, Mus musculus
  siRNA target sequence for Gphn (NM_172952.1,147-165).
cagtgggataaatctaaaa

SEQ ID NO: 671561 - DNA, 19 bp, Mus musculus
  siRNA target sequence for Gphn (NM_172952.1,149-167).
gtgggataaatctaaaaga

SEQ ID NO: 671562 - DNA, 19 bp, Mus musculus
  siRNA target sequence for Gphn (NM_172952.1,200-218).
ctatatcggcatacaagat

SEQ ID NO: 671563 - DNA, 19 bp, Mus musculus
  siRNA target sequence for Gphn (NM_172952.1,213-231).
caagatagtaccagatgaa

SEQ ID NO: 671564 - DNA, 19 bp, Mus musculus
  siRNA target sequence for Gphn (NM_172952.1,330-348).
cactccagaggccacaaaa

SEQ ID NO: 671565 - DNA, 19 bp, Mus musculus
  siRNA target sequence for Gphn (NM_172952.1,478-496).
cctggtagcaagaaaggat

SEQ ID NO: 671566 - DNA, 19 bp, Mus musculus
  siRNA target sequence for Gphn (NM_172952.1,533-551).
ctcatgccattgacctttt

SEQ ID NO: 671567 - DNA, 19 bp, Mus musculus
  siRNA target sequence for Gphn (NM_172952.1,638-656).
caactagcccacataaaca

SEQ ID NO: 671568 - DNA, 19 bp, Mus musculus
  siRNA target sequence for Gphn (NM_172952.1,708-726).
cagtggtgtagcttcaaca

SEQ ID NO: 671569 - DNA, 19 bp, Mus musculus
  siRNA target sequence for Gphn (NM_172952.1,718-736).
gcttcaacagaagatagtt

SEQ ID NO: 671570 - DNA, 19 bp, Mus musculus
  siRNA target sequence for Gphn (NM_172952.1,858-876).
ccgtgctcaggctacatct

SEQ ID NO: 671571 - DNA, 19 bp, Mus musculus
  siRNA target sequence for Gphn (NM_172952.1,879-897).
cctctctacagcttcttgt

SEQ ID NO: 671572 - DNA, 19 bp, Mus musculus
  siRNA target sequence for Gphn (NM_172952.1,893-911).
cttgtccaacaccaaaaca

SEQ ID NO: 671573 - DNA, 19 bp, Mus musculus
  siRNA target sequence for Gphn (NM_172952.1,973-991).
cttccgtcgtgctcatcta

SEQ ID NO: 671574 - DNA, 19 bp, Mus musculus
  siRNA target sequence for Gphn (NM_172952.1,983-1001).
gctcatctacctatagtgt

SEQ ID NO: 671575 - DNA, 19 bp, Mus musculus
  siRNA target sequence for Gphn (NM_172952.1,984-1002).
ctcatctacctatagtgta

SEQ ID NO: 671576 - DNA, 19 bp, Mus musculus
  siRNA target sequence for Gphn (NM_172952.1,1052-1070).
gtcacagtgctgtagatat

SEQ ID NO: 671577 - DNA, 19 bp, Mus musculus
  siRNA target sequence for Gphn (NM_172952.1,1071-1089).
caccaaggtggctagaaga

SEQ ID NO: 671578 - DNA, 19 bp, Mus musculus
  siRNA target sequence for Gphn (NM_172952.1,1156-1174).
ccggtgcttggtacagaaa

SEQ ID NO: 671579 - DNA, 19 bp, Mus musculus
  siRNA target sequence for Gphn (NM_172952.1,1157-1175).
cggtgcttggtacagaaat

SEQ ID NO: 671580 - DNA, 19 bp, Mus musculus
  siRNA target sequence for Gphn (NM_172952.1,1159-1177).
gtgcttggtacagaaatca

SEQ ID NO: 671581 - DNA, 19 bp, Mus musculus
  siRNA target sequence for Gphn (NM_172952.1,1165-1183).
ggtacagaaatcatcaatt

SEQ ID NO: 671582 - DNA, 19 bp, Mus musculus
  siRNA target sequence for Gphn (NM_172952.1,1202-1220).
gagtccttgctcaagatgt

SEQ ID NO: 671583 - DNA, 19 bp, Mus musculus
  siRNA target sequence for Gphn (NM_172952.1,1210-1228).
gctcaagatgtatatgcaa

SEQ ID NO: 671584 - DNA, 19 bp, Mus musculus
  siRNA target sequence for Gphn (NM_172952.1,1211-1229).
ctcaagatgtatatgcaaa

SEQ ID NO: 671585 - DNA, 19 bp, Mus musculus
  siRNA target sequence for Gphn (NM_172952.1,1216-1234).
gatgtatatgcaaaagaca

SEQ ID NO: 671586 - DNA, 19 bp, Mus musculus
  siRNA target sequence for Gphn (NM_172952.1,1243-1261).
ccattccctgcatcagtaa

SEQ ID NO: 671587 - DNA, 19 bp, Mus musculus
  siRNA target sequence for Gphn (NM_172952.1,1292-1310).
gtccaggggatcgtttcat

SEQ ID NO: 671588 - DNA, 19 bp, Mus musculus
  siRNA target sequence for Gphn (NM_172952.1,1294-1312).
ccaggggatcgtttcatca

SEQ ID NO: 671589 - DNA, 19 bp, Mus musculus
  siRNA target sequence for Gphn (NM_172952.1,1295-1313).
caggggatcgtttcatcat

SEQ ID NO: 671590 - DNA, 19 bp, Mus musculus
  siRNA target sequence for Gphn (NM_172952.1,1336-1354).
cagccaactcagacagtaa

SEQ ID NO: 671591 - DNA, 19 bp, Mus musculus
  siRNA target sequence for Gphn (NM_172952.1,1363-1381).
caagtgatgcgggttacaa

SEQ ID NO: 671592 - DNA, 19 bp, Mus musculus
  siRNA target sequence for Gphn (NM_172952.1,1495-1513).
gctcggccaggccaagata

SEQ ID NO: 671593 - DNA, 19 bp, Mus musculus
  siRNA target sequence for Gphn (NM_172952.1,1517-1535).
gacccatcggccatgacat

SEQ ID NO: 671594 - DNA, 19 bp, Mus musculus
  siRNA target sequence for Gphn (NM_172952.1,1519-1537).
cccatcggccatgacatta

SEQ ID NO: 671595 - DNA, 19 bp, Mus musculus
  siRNA target sequence for Gphn (NM_172952.1,1524-1542).
cggccatgacattaagaga

SEQ ID NO: 671596 - DNA, 19 bp, Mus musculus
  siRNA target sequence for Gphn (NM_172952.1,1639-1657).
ccagtggttgccgttatgt

SEQ ID NO: 671597 - DNA, 19 bp, Mus musculus
  siRNA target sequence for Gphn (NM_172952.1,1665-1683).
gaatgagctgctaaatcct

SEQ ID NO: 671598 - DNA, 19 bp, Mus musculus
  siRNA target sequence for Gphn (NM_172952.1,1713-1731).
ggacagcaatcgatcaaca

SEQ ID NO: 671599 - DNA, 19 bp, Mus musculus
  siRNA target sequence for Gphn (NM_172952.1,1716-1734).
cagcaatcgatcaacactt

SEQ ID NO: 671600 - DNA, 19 bp, Mus musculus
  siRNA target sequence for Gphn (NM_172952.1,1719-1737).
caatcgatcaacacttcta

SEQ ID NO: 671601 - DNA, 19 bp, Mus musculus
  siRNA target sequence for Gphn (NM_172952.1,1727-1745).
caacacttctagcaacaat

SEQ ID NO: 671602 - DNA, 19 bp, Mus musculus
  siRNA target sequence for Gphn (NM_172952.1,1730-1748).
cacttctagcaacaattca

SEQ ID NO: 671603 - DNA, 19 bp, Mus musculus
  siRNA target sequence for Gphn (NM_172952.1,1753-1771).
catggttacccaacaatca

SEQ ID NO: 671604 - DNA, 19 bp, Mus musculus
  siRNA target sequence for Gphn (NM_172952.1,1766-1784).
caatcaacctgggaattgt

SEQ ID NO: 671605 - DNA, 19 bp, Mus musculus
  siRNA target sequence for Gphn (NM_172952.1,1873-1891).
ggggaaaaggactatctca

SEQ ID NO: 671606 - DNA, 19 bp, Mus musculus
  siRNA target sequence for Gphn (NM_172952.1,1874-1892).
gggaaaaggactatctcaa

SEQ ID NO: 671607 - DNA, 19 bp, Mus musculus
  siRNA target sequence for Gphn (NM_172952.1,1952-1970).
caggcttgccaacaacatt

SEQ ID NO: 671608 - DNA, 19 bp, Mus musculus
  siRNA target sequence for Gphn (NM_172952.1,1980-1998).
ggatattgatggtgtaaga

SEQ ID NO: 671609 - DNA, 19 bp, Mus musculus
  siRNA target sequence for Gphn (NM_172952.1,2043-2061).
cacctgcaacctctttgtt

SEQ ID NO: 671610 - DNA, 19 bp, Mus musculus
  siRNA target sequence for Gphn (NM_172952.1,2046-2064).
ctgcaacctctttgttgta

SEQ ID NO: 671611 - DNA, 19 bp, Mus musculus
  siRNA target sequence for Gphn (NM_172952.1,2075-2093).
gaaagatgcagggtatctt

SEQ ID NO: 671612 - DNA, 19 bp, Mus musculus
  siRNA target sequence for Gphn (NM_172952.1,2098-2116).
cctcggccaaccatcatca

SEQ ID NO: 671613 - DNA, 19 bp, Mus musculus
  siRNA target sequence for Gphn (NM_172952.1,2099-2117).
ctcggccaaccatcatcaa

SEQ ID NO: 671614 - DNA, 19 bp, Mus musculus
  siRNA target sequence for Gphn (NM_172952.1,2121-2139).
caggttatcgtgtgatgta

SEQ ID NO: 671615 - DNA, 19 bp, Mus musculus
  siRNA target sequence for Gphn (NM_172952.1,2208-2226).
ggcccagagtacaggtaat

SEQ ID NO: 671616 - DNA, 19 bp, Mus musculus
  siRNA target sequence for Gphn (NM_172952.1,2253-2271).
gcgcagtgccaatggatta

SEQ ID NO: 671617 - DNA, 19 bp, Mus musculus
  siRNA target sequence for Gphn (NM_172952.1,2254-2272).
cgcagtgccaatggattat

SEQ ID NO: 671618 - DNA, 19 bp, Mus musculus
  siRNA target sequence for Gphn (NM_172952.1,2255-2273).
gcagtgccaatggattatt

SEQ ID NO: 671619 - DNA, 19 bp, Mus musculus
  siRNA target sequence for Gphn (NM_172952.1,2298-2316).
gtacgtggaacttcacaaa

SEQ ID NO: 671620 - DNA, 19 bp, Mus musculus
  siRNA target sequence for Mocs1 (NM_020042.1,184-202).
ccagctcgttggagcaatt

SEQ ID NO: 671621 - DNA, 19 bp, Mus musculus
  siRNA target sequence for Mocs1 (NM_020042.1,185-203).
cagctcgttggagcaattt

SEQ ID NO: 671622 - DNA, 19 bp, Mus musculus
  siRNA target sequence for Mocs1 (NM_020042.1,187-205).
gctcgttggagcaatttct

SEQ ID NO: 671623 - DNA, 19 bp, Mus musculus
  siRNA target sequence for Mocs1 (NM_020042.1,437-455).
cctcaaatcagctaactca

SEQ ID NO: 671624 - DNA, 19 bp, Mus musculus
  siRNA target sequence for Mocs1 (NM_020042.1,694-712).
gtacacctggagttagaca

SEQ ID NO: 671625 - DNA, 19 bp, Mus musculus
  siRNA target sequence for Mocs1 (NM_020042.1,716-734).
cacgccacgctgtgttgat

SEQ ID NO: 671626 - DNA, 19 bp, Mus musculus
  siRNA target sequence for Mocs2 (NM_013826.1,260-278).
catcatcccgccaatcagt

SEQ ID NO: 671627 - DNA, 19 bp, Mus musculus
  siRNA target sequence for Mocs2 (NM_013826.1,270-288).
ccaatcagtggaggataat

SEQ ID NO: 671628 - DNA, 19 bp, Mus musculus
  siRNA target sequence for Mocs2 (NM_013826.1,334-352).
cctaaagacataatacagt

SEQ ID NO: 671629 - DNA, 19 bp, Mus musculus
  siRNA target sequence for Mocs2 (NM_013826.1,335-353).
ctaaagacataatacagtt

SEQ ID NO: 671630 - DNA, 19 bp, Mus musculus
  siRNA target sequence for Mocs2 (NM_013826.1,430-448).
gtagggactacaagaaata

SEQ ID NO: 671631 - DNA, 19 bp, Mus musculus
  siRNA target sequence for Mocs2 (NM_013826.1,433-451).
gggactacaagaaataact

SEQ ID NO: 671632 - DNA, 19 bp, Mus musculus
  siRNA target sequence for Mocs2 (NM_013826.1,468-486).
cattagcttagaatatgaa

SEQ ID NO: 671633 - DNA, 19 bp, Mus musculus
  siRNA target sequence for Mocs2 (NM_013826.1,497-515).
cgatggcagaaaatgaaat

SEQ ID NO: 671634 - DNA, 19 bp, Mus musculus
  siRNA target sequence for Mocs2 (NM_013826.1,518-536).
gaaaaatttgtaatgacat

SEQ ID NO: 671635 - DNA, 19 bp, Mus musculus
  siRNA target sequence for Mocs2 (NM_013826.1,557-575).
gacacatagcagtattcca

SEQ ID NO: 671636 - DNA, 19 bp, Mus musculus
  siRNA target sequence for Mocs2 (NM_013826.1,573-591).
ccatcggcttggtttggtt

SEQ ID NO: 671637 - DNA, 19 bp, Mus musculus
  siRNA target sequence for Mocs2 (NM_013826.1,657-675).
cgtgagctacgccattgat

SEQ ID NO: 671638 - DNA, 19 bp, Mus musculus
  siRNA target sequence for Mocs2 (NM_013826.1,658-676).
gtgagctacgccattgatt

SEQ ID NO: 671639 - DNA, 19 bp, Mus musculus
  siRNA target sequence for Mocs2 (NM_013826.1,660-678).
gagctacgccattgattct

SEQ ID NO: 671640 - DNA, 19 bp, Mus musculus
  siRNA target sequence for Mocs2 (NM_013826.1,662-680).
gctacgccattgattcttt

SEQ ID NO: 671641 - DNA, 19 bp, Mus musculus
  siRNA target sequence for Mocs2 (NM_013826.1,687-705).
caaggtgcccatatggaaa

SEQ ID NO: 671642 - DNA, 19 bp, Mus musculus
  siRNA target sequence for Coq7 (NM_009940.1,177-195).
ggggatgaccttagacaat

SEQ ID NO: 671643 - DNA, 19 bp, Mus musculus
  siRNA target sequence for Coq7 (NM_009940.1,178-196).
gggatgaccttagacaata

SEQ ID NO: 671644 - DNA, 19 bp, Mus musculus
  siRNA target sequence for Coq7 (NM_009940.1,203-221).
gggcagccgtggatcgaat

SEQ ID NO: 671645 - DNA, 19 bp, Mus musculus
  siRNA target sequence for Coq7 (NM_009940.1,204-222).
ggcagccgtggatcgaata

SEQ ID NO: 671646 - DNA, 19 bp, Mus musculus
  siRNA target sequence for Coq7 (NM_009940.1,231-249).
ggatcacgctggtgaatat

SEQ ID NO: 671647 - DNA, 19 bp, Mus musculus
  siRNA target sequence for Coq7 (NM_009940.1,297-315).
cagtgttggccctgtcatt

SEQ ID NO: 671648 - DNA, 19 bp, Mus musculus
  siRNA target sequence for Coq7 (NM_009940.1,299-317).
gtgttggccctgtcattca

SEQ ID NO: 671649 - DNA, 19 bp, Mus musculus
  siRNA target sequence for Coq7 (NM_009940.1,382-400).
gtccgacctacggttttga

SEQ ID NO: 671650 - DNA, 19 bp, Mus musculus
  siRNA target sequence for Coq7 (NM_009940.1,476-494).
gcaccgtggcggtagaaga

SEQ ID NO: 671651 - DNA, 19 bp, Mus musculus
  siRNA target sequence for Coq7 (NM_009940.1,493-511).
gagtctatcgctaatcact

SEQ ID NO: 671652 - DNA, 19 bp, Mus musculus
  siRNA target sequence for Coq7 (NM_009940.1,497-515).
ctatcgctaatcactacaa

SEQ ID NO: 671653 - DNA, 19 bp, Mus musculus
  siRNA target sequence for Coq7 (NM_009940.1,590-608).
gcgatgaggagcttgaaca

SEQ ID NO: 671654 - DNA, 19 bp, Mus musculus
  siRNA target sequence for Coq7 (NM_009940.1,646-664).
cccgcgtatgccttgttga

SEQ ID NO: 671655 - DNA, 19 bp, Mus musculus
  siRNA target sequence for Coq7 (NM_009940.1,647-665).
ccgcgtatgccttgttgaa

SEQ ID NO: 671656 - DNA, 19 bp, Mus musculus
  siRNA target sequence for Coq7 (NM_009940.1,649-667).
gcgtatgccttgttgaaga

SEQ ID NO: 671657 - DNA, 19 bp, Mus musculus
  siRNA target sequence for Coq7 (NM_009940.1,655-673).
gccttgttgaagaggatta

SEQ ID NO: 671658 - DNA, 19 bp, Mus musculus
  siRNA target sequence for Matp (NM_053077.2,117-135).
cgactgacacccataccta

SEQ ID NO: 671659 - DNA, 19 bp, Mus musculus
  siRNA target sequence for Matp (NM_053077.2,118-136).
gactgacacccatacctat

SEQ ID NO: 671660 - DNA, 19 bp, Mus musculus
  siRNA target sequence for Matp (NM_053077.2,122-140).
gacacccatacctatcaat

SEQ ID NO: 671661 - DNA, 19 bp, Mus musculus
  siRNA target sequence for Matp (NM_053077.2,126-144).
cccatacctatcaatcctt

SEQ ID NO: 671662 - DNA, 19 bp, Mus musculus
  siRNA target sequence for Matp (NM_053077.2,127-145).
ccatacctatcaatcctta

SEQ ID NO: 671663 - DNA, 19 bp, Mus musculus
  siRNA target sequence for Matp (NM_053077.2,170-188).
gtggagcaacccaagagat

SEQ ID NO: 671664 - DNA, 19 bp, Mus musculus
  siRNA target sequence for Matp (NM_053077.2,208-226).
gcacagcatggccatgttt

SEQ ID NO: 671665 - DNA, 19 bp, Mus musculus
  siRNA target sequence for Matp (NM_053077.2,220-238).
catgtttggccgagagttt

SEQ ID NO: 671666 - DNA, 19 bp, Mus musculus
  siRNA target sequence for Matp (NM_053077.2,248-266).
gtggaggcagcttatgtga

SEQ ID NO: 671667 - DNA, 19 bp, Mus musculus
  siRNA target sequence for Matp (NM_053077.2,396-414).
gtcgccggagaccatacat

SEQ ID NO: 671668 - DNA, 19 bp, Mus musculus
  siRNA target sequence for Matp (NM_053077.2,472-490).
ggtcgtatcagctttggtt

SEQ ID NO: 671669 - DNA, 19 bp, Mus musculus
  siRNA target sequence for Matp (NM_053077.2,539-557).
ggtgtggttctcttcgatt

SEQ ID NO: 671670 - DNA, 19 bp, Mus musculus
  siRNA target sequence for Matp (NM_053077.2,540-558).
gtgtggttctcttcgattt

SEQ ID NO: 671671 - DNA, 19 bp, Mus musculus
  siRNA target sequence for Matp (NM_053077.2,542-560).
gtggttctcttcgattttt

SEQ ID NO: 671672 - DNA, 19 bp, Mus musculus
  siRNA target sequence for Matp (NM_053077.2,544-562).
ggttctcttcgatttttct

SEQ ID NO: 671673 - DNA, 19 bp, Mus musculus
  siRNA target sequence for Matp (NM_053077.2,581-599).
cccatcaaagcctacttat

SEQ ID NO: 671674 - DNA, 19 bp, Mus musculus
  siRNA target sequence for Matp (NM_053077.2,582-600).
ccatcaaagcctacttatt

SEQ ID NO: 671675 - DNA, 19 bp, Mus musculus
  siRNA target sequence for Matp (NM_053077.2,583-601).
catcaaagcctacttattt

SEQ ID NO: 671676 - DNA, 19 bp, Mus musculus
  siRNA target sequence for Matp (NM_053077.2,892-910).
gcatgaatacggttctatt

SEQ ID NO: 671677 - DNA, 19 bp, Mus musculus
  siRNA target sequence for Matp (NM_053077.2,896-914).
gaatacggttctattgaga

SEQ ID NO: 671678 - DNA, 19 bp, Mus musculus
  siRNA target sequence for Matp (NM_053077.2,1011-1029).
cactccttcgggcattagt

SEQ ID NO: 671679 - DNA, 19 bp, Mus musculus
  siRNA target sequence for Matp (NM_053077.2,1013-1031).
ctccttcgggcattagtaa

SEQ ID NO: 671680 - DNA, 19 bp, Mus musculus
  siRNA target sequence for Matp (NM_053077.2,1016-1034).
cttcgggcattagtaaaca

SEQ ID NO: 671681 - DNA, 19 bp, Mus musculus
  siRNA target sequence for Matp (NM_053077.2,1061-1079).
gtcagccacctgattggat

SEQ ID NO: 671682 - DNA, 19 bp, Mus musculus
  siRNA target sequence for Matp (NM_053077.2,1080-1098).
ggactgccttcctgtcaaa

SEQ ID NO: 671683 - DNA, 19 bp, Mus musculus
  siRNA target sequence for Matp (NM_053077.2,1123-1141).
gggacagattgtataccat

SEQ ID NO: 671684 - DNA, 19 bp, Mus musculus
  siRNA target sequence for Matp (NM_053077.2,1167-1185).
ccacggagtttctcatcta

SEQ ID NO: 671685 - DNA, 19 bp, Mus musculus
  siRNA target sequence for Matp (NM_053077.2,1168-1186).
cacggagtttctcatctat

SEQ ID NO: 671686 - DNA, 19 bp, Mus musculus
  siRNA target sequence for Matp (NM_053077.2,1170-1188).
cggagtttctcatctatga

SEQ ID NO: 671687 - DNA, 19 bp, Mus musculus
  siRNA target sequence for Matp (NM_053077.2,1219-1237).
gtgcatcaactctgtgttt

SEQ ID NO: 671688 - DNA, 19 bp, Mus musculus
  siRNA target sequence for Matp (NM_053077.2,1251-1269).
catactttcagaaagctat

SEQ ID NO: 671689 - DNA, 19 bp, Mus musculus
  siRNA target sequence for Matp (NM_053077.2,1270-1288).
ggtctcctacattggatta

SEQ ID NO: 671690 - DNA, 19 bp, Mus musculus
  siRNA target sequence for Matp (NM_053077.2,1271-1289).
gtctcctacattggattaa

SEQ ID NO: 671691 - DNA, 19 bp, Mus musculus
  siRNA target sequence for Matp (NM_053077.2,1283-1301).
ggattaaaaggcctttatt

SEQ ID NO: 671692 - DNA, 19 bp, Mus musculus
  siRNA target sequence for Matp (NM_053077.2,1344-1362).
gactctttccaaatgtgta

SEQ ID NO: 671693 - DNA, 19 bp, Mus musculus
  siRNA target sequence for Matp (NM_053077.2,1380-1398).
gttctatgtttggtgtaat

SEQ ID NO: 671694 - DNA, 19 bp, Mus musculus
  siRNA target sequence for Matp (NM_053077.2,1661-1679).
gtggcgctcttcgtaagat

SEQ ID NO: 671695 - DNA, 19 bp, Mus musculus
  siRNA target sequence for Matp (NM_053077.2,1663-1681).
ggcgctcttcgtaagatat

SEQ ID NO: 671696 - DNA, 19 bp, Mus musculus
  siRNA target sequence for Matp (NM_053077.2,1665-1683).
cgctcttcgtaagatatgt

SEQ ID NO: 671697 - DNA, 19 bp, Mus musculus
  siRNA target sequence for Matp (NM_053077.2,1666-1684).
gctcttcgtaagatatgta

SEQ ID NO: 671698 - DNA, 19 bp, Mus musculus
  siRNA target sequence for Si (NM_021882.2,127-145).
gtgtcccaagacaacttgt

SEQ ID NO: 671699 - DNA, 19 bp, Mus musculus
  siRNA target sequence for Si (NM_021882.2,131-149).
cccaagacaacttgtaact

SEQ ID NO: 671700 - DNA, 19 bp, Mus musculus
  siRNA target sequence for Si (NM_021882.2,186-204).
gaggtgcaggggtctaact

SEQ ID NO: 671701 - DNA, 19 bp, Mus musculus
  siRNA target sequence for Si (NM_021882.2,226-244).
ctctgagggtcattaatga

SEQ ID NO: 671702 - DNA, 19 bp, Mus musculus
  siRNA target sequence for Si (NM_021882.2,330-348).
gttatctgggccaacaaca

SEQ ID NO: 671703 - DNA, 19 bp, Mus musculus
  siRNA target sequence for Si (NM_021882.2,437-455).
ctgcccatctggtcctaaa

SEQ ID NO: 671704 - DNA, 19 bp, Mus musculus
  siRNA target sequence for Si (NM_021882.2,450-468).
cctaaacctccgaagagaa

SEQ ID NO: 671705 - DNA, 19 bp, Mus musculus
  siRNA target sequence for Si (NM_021882.2,624-642).
cttgctcacgccagttcaa

SEQ ID NO: 671706 - DNA, 19 bp, Mus musculus
  siRNA target sequence for Si (NM_021882.2,716-734).
gcacttcctgagaaatcat

SEQ ID NO: 671707 - DNA, 19 bp, Mus musculus
  siRNA target sequence for Si (NM_021882.2,758-776).
ccacgaccccagtggttat

SEQ ID NO: 671708 - DNA, 19 bp, Mus musculus
  siRNA target sequence for Si (NM_021882.2,759-777).
cacgaccccagtggttatt

SEQ ID NO: 671709 - DNA, 19 bp, Mus musculus
  siRNA target sequence for Si (NM_021882.2,786-804).
gccgacctctcctacacat

SEQ ID NO: 671710 - DNA, 19 bp, Mus musculus
  siRNA target sequence for Si (NM_021882.2,833-851).
gatctctcgggcacttgat

SEQ ID NO: 671711 - DNA, 19 bp, Mus musculus
  siRNA target sequence for Si (NM_021882.2,981-999).
gcacctggaaccacatcta

SEQ ID NO: 671712 - DNA, 19 bp, Mus musculus
  siRNA target sequence for Si (NM_021882.2,1000-1018).
ggcaaggaaccactacaaa

SEQ ID NO: 671713 - DNA, 19 bp, Mus musculus
  siRNA target sequence for Si (NM_021882.2,1001-1019).
gcaaggaaccactacaaaa

SEQ ID NO: 671714 - DNA, 19 bp, Mus musculus
  siRNA target sequence for Si (NM_021882.2,1006-1024).
gaaccactacaaaagttgt

SEQ ID NO: 671715 - DNA, 19 bp, Mus musculus
  siRNA target sequence for Si (NM_021882.2,1065-1083).
ggaaccacagttgtacaaa

SEQ ID NO: 671716 - DNA, 19 bp, Mus musculus
  siRNA target sequence for Si (NM_021882.2,1066-1084).
gaaccacagttgtacaaat

SEQ ID NO: 671717 - DNA, 19 bp, Mus musculus
  siRNA target sequence for Si (NM_021882.2,1097-1115).
ggtcacagctactacatct

SEQ ID NO: 671718 - DNA, 19 bp, Mus musculus
  siRNA target sequence for Si (NM_021882.2,1127-1145).
gacctcagcggtcatagat

SEQ ID NO: 671719 - DNA, 19 bp, Mus musculus
  siRNA target sequence for Si (NM_021882.2,1152-1170).
ctggcagaggtgtcaacta

SEQ ID NO: 671720 - DNA, 19 bp, Mus musculus
  siRNA target sequence for Si (NM_021882.2,1259-1277).
gctgcccacacaaagttct

SEQ ID NO: 671721 - DNA, 19 bp, Mus musculus
  siRNA target sequence for Si (NM_021882.2,1262-1280).
gcccacacaaagttctaca

SEQ ID NO: 671722 - DNA, 19 bp, Mus musculus
  siRNA target sequence for Si (NM_021882.2,1302-1320).
gatgacaccgacaccataa

SEQ ID NO: 671723 - DNA, 19 bp, Mus musculus
  siRNA target sequence for Si (NM_021882.2,1307-1325).
caccgacaccataatgctt

SEQ ID NO: 671724 - DNA, 19 bp, Mus musculus
  siRNA target sequence for Si (NM_021882.2,1341-1359).
cccctggactgtgttctat

SEQ ID NO: 671725 - DNA, 19 bp, Mus musculus
  siRNA target sequence for Si (NM_021882.2,1342-1360).
ccctggactgtgttctata

SEQ ID NO: 671726 - DNA, 19 bp, Mus musculus
  siRNA target sequence for Si (NM_021882.2,1343-1361).
cctggactgtgttctatat

SEQ ID NO: 671727 - DNA, 19 bp, Mus musculus
  siRNA target sequence for Si (NM_021882.2,1346-1364).
ggactgtgttctatatcga

SEQ ID NO: 671728 - DNA, 19 bp, Mus musculus
  siRNA target sequence for Si (NM_021882.2,1347-1365).
gactgtgttctatatcgat

SEQ ID NO: 671729 - DNA, 19 bp, Mus musculus
  siRNA target sequence for Si (NM_021882.2,1353-1371).
gttctatatcgatatggtt

SEQ ID NO: 671730 - DNA, 19 bp, Mus musculus
  siRNA target sequence for Si (NM_021882.2,1391-1409).
cattgtccagggtattgaa

SEQ ID NO: 671731 - DNA, 19 bp, Mus musculus
  siRNA target sequence for Si (NM_021882.2,1494-1512).
gaagcctgtatggacattt

SEQ ID NO: 671732 - DNA, 19 bp, Mus musculus
  siRNA target sequence for Si (NM_021882.2,1615-1633).
ggacatattgcctcaatgt

SEQ ID NO: 671733 - DNA, 19 bp, Mus musculus
  siRNA target sequence for Si (NM_021882.2,1773-1791).
cataggcatagacttaaga

SEQ ID NO: 671734 - DNA, 19 bp, Mus musculus
  siRNA target sequence for Alg2 (NM_019998.2,61-79).
gcccgttcccgggtttaca

SEQ ID NO: 671735 - DNA, 19 bp, Mus musculus
  siRNA target sequence for Alg2 (NM_019998.2,168-186).
cggctgtgatgtgaagata

SEQ ID NO: 671736 - DNA, 19 bp, Mus musculus
  siRNA target sequence for Alg2 (NM_019998.2,332-350).
cgctctacgtgctgtttct

SEQ ID NO: 671737 - DNA, 19 bp, Mus musculus
  siRNA target sequence for Alg2 (NM_019998.2,334-352).
ctctacgtgctgtttctct

SEQ ID NO: 671738 - DNA, 19 bp, Mus musculus
  siRNA target sequence for Alg2 (NM_019998.2,395-413).
cctgtatcccggtgttcaa

SEQ ID NO: 671739 - DNA, 19 bp, Mus musculus
  siRNA target sequence for Alg2 (NM_019998.2,398-416).
gtatcccggtgttcaaact

SEQ ID NO: 671740 - DNA, 19 bp, Mus musculus
  siRNA target sequence for Alg2 (NM_019998.2,427-445).
cgtaagagggtcctatttt

SEQ ID NO: 671741 - DNA, 19 bp, Mus musculus
  siRNA target sequence for Alg2 (NM_019998.2,428-446).
gtaagagggtcctatttta

SEQ ID NO: 671742 - DNA, 19 bp, Mus musculus
  siRNA target sequence for Alg2 (NM_019998.2,432-450).
gagggtcctattttactgt

SEQ ID NO: 671743 - DNA, 19 bp, Mus musculus
  siRNA target sequence for Alg2 (NM_019998.2,466-484).
ctgcttactcagagaaatt

SEQ ID NO: 671744 - DNA, 19 bp, Mus musculus
  siRNA target sequence for Alg2 (NM_019998.2,468-486).
gcttactcagagaaattca

SEQ ID NO: 671745 - DNA, 19 bp, Mus musculus
  siRNA target sequence for Alg2 (NM_019998.2,485-503).
cagctctgaagaagttcta

SEQ ID NO: 671746 - DNA, 19 bp, Mus musculus
  siRNA target sequence for Alg2 (NM_019998.2,487-505).
gctctgaagaagttctaca

SEQ ID NO: 671747 - DNA, 19 bp, Mus musculus
  siRNA target sequence for Alg2 (NM_019998.2,517-535).
gactggatcgaggaataca

SEQ ID NO: 671748 - DNA, 19 bp, Mus musculus
  siRNA target sequence for Alg2 (NM_019998.2,578-596).
ctgcttccgtctttaaaga

SEQ ID NO: 671749 - DNA, 19 bp, Mus musculus
  siRNA target sequence for Alg2 (NM_019998.2,580-598).
gcttccgtctttaaagaaa

SEQ ID NO: 671750 - DNA, 19 bp, Mus musculus
  siRNA target sequence for Alg2 (NM_019998.2,584-602).
ccgtctttaaagaaacctt

SEQ ID NO: 671751 - DNA, 19 bp, Mus musculus
  siRNA target sequence for Alg2 (NM_019998.2,609-627).
cctgtctcacagaaatcct

SEQ ID NO: 671752 - DNA, 19 bp, Mus musculus
  siRNA target sequence for Alg2 (NM_019998.2,634-652).
ctctacccatctctgaata

SEQ ID NO: 671753 - DNA, 19 bp, Mus musculus
  siRNA target sequence for Alg2 (NM_019998.2,669-687).
ggctattcctgaaaagata

SEQ ID NO: 671754 - DNA, 19 bp, Mus musculus
  siRNA target sequence for Alg2 (NM_019998.2,726-744).
ctctatcaaccgatacgaa

SEQ ID NO: 671755 - DNA, 19 bp, Mus musculus
  siRNA target sequence for Alg2 (NM_019998.2,787-805).
cttcggaatcggttaccat

SEQ ID NO: 671756 - DNA, 19 bp, Mus musculus
  siRNA target sequence for Alg2 (NM_019998.2,792-810).
gaatcggttaccatctcaa

SEQ ID NO: 671757 - DNA, 19 bp, Mus musculus
  siRNA target sequence for Alg2 (NM_019998.2,806-824).
ctcaagagtgggataaggt

SEQ ID NO: 671758 - DNA, 19 bp, Mus musculus
  siRNA target sequence for Alg2 (NM_019998.2,815-833).
gggataaggttcatctctt

SEQ ID NO: 671759 - DNA, 19 bp, Mus musculus
  siRNA target sequence for Alg2 (NM_019998.2,831-849).
cttcatggccggtggttat

SEQ ID NO: 671760 - DNA, 19 bp, Mus musculus
  siRNA target sequence for Alg2 (NM_019998.2,842-860).
gtggttatgacgataggat

SEQ ID NO: 671761 - DNA, 19 bp, Mus musculus
  siRNA target sequence for Alg2 (NM_019998.2,865-883).
gagaacgtggagcactata

SEQ ID NO: 671762 - DNA, 19 bp, Mus musculus
  siRNA target sequence for Alg2 (NM_019998.2,1031-1049).
ctctggaggccatgtacat

SEQ ID NO: 671763 - DNA, 19 bp, Mus musculus
  siRNA target sequence for Alg2 (NM_019998.2,1214-1232).
ccagggtggcggagaagtt

SEQ ID NO: 671764 - DNA, 19 bp, Mus musculus
  siRNA target sequence for AW492253 (NM_183142.1,42-60).
gccgtgctgcggtttttct

SEQ ID NO: 671765 - DNA, 19 bp, Mus musculus
  siRNA target sequence for AW492253 (NM_183142.1,43-61).
ccgtgctgcggtttttcta

SEQ ID NO: 671766 - DNA, 19 bp, Mus musculus
  siRNA target sequence for AW492253 (NM_183142.1,44-62).
cgtgctgcggtttttctat

SEQ ID NO: 671767 - DNA, 19 bp, Mus musculus
  siRNA target sequence for AW492253 (NM_183142.1,47-65).
gctgcggtttttctattca

SEQ ID NO: 671768 - DNA, 19 bp, Mus musculus
  siRNA target sequence for AW492253 (NM_183142.1,86-104).
gatatgcggagttttgtgt

SEQ ID NO: 671769 - DNA, 19 bp, Mus musculus
  siRNA target sequence for AW492253 (NM_183142.1,91-109).
gcggagttttgtgtgtata

SEQ ID NO: 671770 - DNA, 19 bp, Mus musculus
  siRNA target sequence for AW492253 (NM_183142.1,167-185).
gtcgaccagcaaaaatgga

SEQ ID NO: 671771 - DNA, 19 bp, Mus musculus
  siRNA target sequence for AW492253 (NM_183142.1,169-187).
cgaccagcaaaaatggaaa

SEQ ID NO: 671772 - DNA, 19 bp, Mus musculus
  siRNA target sequence for AW492253 (NM_183142.1,192-210).
caaacggtggttgcatttt

SEQ ID NO: 671773 - DNA, 19 bp, Mus musculus
  siRNA target sequence for AW492253 (NM_183142.1,212-230).
ccatccatactgtaatgca

SEQ ID NO: 671774 - DNA, 19 bp, Mus musculus
  siRNA target sequence for AW492253 (NM_183142.1,309-327).
cggtatcctcacttcacat

SEQ ID NO: 671775 - DNA, 19 bp, Mus musculus
  siRNA target sequence for AW492253 (NM_183142.1,310-328).
ggtatcctcacttcacatt

SEQ ID NO: 671776 - DNA, 19 bp, Mus musculus
  siRNA target sequence for AW492253 (NM_183142.1,325-343).
cattgctaggccaaagtct

SEQ ID NO: 671777 - DNA, 19 bp, Mus musculus
  siRNA target sequence for AW492253 (NM_183142.1,335-353).
ccaaagtcttggatccatt

SEQ ID NO: 671778 - DNA, 19 bp, Mus musculus
  siRNA target sequence for AW492253 (NM_183142.1,340-358).
gtcttggatccattcttct

SEQ ID NO: 671779 - DNA, 19 bp, Mus musculus
  siRNA target sequence for AW492253 (NM_183142.1,377-395).
gcagcgcgttcctgatgtt

SEQ ID NO: 671780 - DNA, 19 bp, Mus musculus
  siRNA target sequence for AW492253 (NM_183142.1,378-396).
cagcgcgttcctgatgttt

SEQ ID NO: 671781 - DNA, 19 bp, Mus musculus
  siRNA target sequence for AW492253 (NM_183142.1,381-399).
cgcgttcctgatgtttaca

SEQ ID NO: 671782 - DNA, 19 bp, Mus musculus
  siRNA target sequence for AW492253 (NM_183142.1,382-400).
gcgttcctgatgtttacat

SEQ ID NO: 671783 - DNA, 19 bp, Mus musculus
  siRNA target sequence for AW492253 (NM_183142.1,424-442).
cactccctctctttaagta

SEQ ID NO: 671784 - DNA, 19 bp, Mus musculus
  siRNA target sequence for AW492253 (NM_183142.1,455-473).
ccgagtcggaagctatgtt

SEQ ID NO: 671785 - DNA, 19 bp, Mus musculus
  siRNA target sequence for AW492253 (NM_183142.1,515-533).
gaatcagaatcctggattt

SEQ ID NO: 671786 - DNA, 19 bp, Mus musculus
  siRNA target sequence for AW492253 (NM_183142.1,571-589).
gcaaagcaaagctcatcta

SEQ ID NO: 671787 - DNA, 19 bp, Mus musculus
  siRNA target sequence for AW492253 (NM_183142.1,576-594).
gcaaagctcatctattact

SEQ ID NO: 671788 - DNA, 19 bp, Mus musculus
  siRNA target sequence for AW492253 (NM_183142.1,581-599).
gctcatctattactattta

SEQ ID NO: 671789 - DNA, 19 bp, Mus musculus
  siRNA target sequence for AW492253 (NM_183142.1,582-600).
ctcatctattactatttat

SEQ ID NO: 671790 - DNA, 19 bp, Mus musculus
  siRNA target sequence for AW492253 (NM_183142.1,625-643).
gatcttgcagtgacatagt

SEQ ID NO: 671791 - DNA, 19 bp, Mus musculus
  siRNA target sequence for AW492253 (NM_183142.1,628-646).
cttgcagtgacatagtcat

SEQ ID NO: 671792 - DNA, 19 bp, Mus musculus
  siRNA target sequence for AW492253 (NM_183142.1,693-711).
gttgggcattgcactaaca

SEQ ID NO: 671793 - DNA, 19 bp, Mus musculus
  siRNA target sequence for AW492253 (NM_183142.1,836-854).
gatcaaagcctttgctaaa

SEQ ID NO: 671794 - DNA, 19 bp, Mus musculus
  siRNA target sequence for AW492253 (NM_183142.1,843-861).
gcctttgctaaattgttaa

SEQ ID NO: 671795 - DNA, 19 bp, Mus musculus
  siRNA target sequence for AW492253 (NM_183142.1,844-862).
cctttgctaaattgttaaa

SEQ ID NO: 671796 - DNA, 19 bp, Mus musculus
  siRNA target sequence for AW492253 (NM_183142.1,876-894).
gagttaggccattctctta

SEQ ID NO: 671797 - DNA, 19 bp, Mus musculus
  siRNA target sequence for AW492253 (NM_183142.1,883-901).
gccattctcttaaacttgt

SEQ ID NO: 671798 - DNA, 19 bp, Mus musculus
  siRNA target sequence for AW492253 (NM_183142.1,889-907).
ctcttaaacttgtccttat

SEQ ID NO: 671799 - DNA, 19 bp, Mus musculus
  siRNA target sequence for AW492253 (NM_183142.1,910-928).
gagggtgtcgcaacaaaga

SEQ ID NO: 671800 - DNA, 19 bp, Mus musculus
  siRNA target sequence for AW492253 (NM_183142.1,913-931).
ggtgtcgcaacaaagatga

SEQ ID NO: 671801 - DNA, 19 bp, Mus musculus
  siRNA target sequence for AW492253 (NM_183142.1,919-937).
gcaacaaagatgatgagtt

SEQ ID NO: 671802 - DNA, 19 bp, Mus musculus
  siRNA target sequence for AW492253 (NM_183142.1,923-941).
caaagatgatgagtttaga

SEQ ID NO: 671803 - DNA, 19 bp, Mus musculus
  siRNA target sequence for AW492253 (NM_183142.1,953-971).
gagaagtctatctgagaat

SEQ ID NO: 671804 - DNA, 19 bp, Mus musculus
  siRNA target sequence for AW492253 (NM_183142.1,1012-1030).
cattcgatgaattgaagaa

SEQ ID NO: 671805 - DNA, 19 bp, Mus musculus
  siRNA target sequence for AW492253 (NM_183142.1,1020-1038).
gaattgaagaattacttgt

SEQ ID NO: 671806 - DNA, 19 bp, Mus musculus
  siRNA target sequence for AW492253 (NM_183142.1,1048-1066).
ccatcggtctgcatactat

SEQ ID NO: 671807 - DNA, 19 bp, Mus musculus
  siRNA target sequence for AW492253 (NM_183142.1,1144-1162).
gcccgaagctggacattgt

SEQ ID NO: 671808 - DNA, 19 bp, Mus musculus
  siRNA target sequence for AW492253 (NM_183142.1,1157-1175).
cattgtcattcctcatgaa

SEQ ID NO: 671809 - DNA, 19 bp, Mus musculus
  siRNA target sequence for AW492253 (NM_183142.1,1277-1295).
gaatgctagagcgtctata

SEQ ID NO: 671810 - DNA, 19 bp, Mus musculus
  siRNA target sequence for AW492253 (NM_183142.1,1287-1305).
gcgtctataagcagattct

SEQ ID NO: 671811 - DNA, 19 bp, Mus musculus
  siRNA target sequence for AW492253 (NM_183142.1,1306-1324).
ccgaccaggagtttgaagt

SEQ ID NO: 671812 - DNA, 19 bp, Mus musculus
  siRNA target sequence for AW492253 (NM_183142.1,1336-1354).
gttccatggagaagttact

SEQ ID NO: 671813 - DNA, 19 bp, Mus musculus
  siRNA target sequence for AW492253 (NM_183142.1,1340-1358).
catggagaagttacttact

SEQ ID NO: 671814 - DNA, 19 bp, Mus musculus
  siRNA target sequence for 1010001D01Rik (NM_133186.1,290-308).
gctctccagaggtcatctt

SEQ ID NO: 671815 - DNA, 19 bp, Mus musculus
  siRNA target sequence for 1010001D01Rik (NM_133186.1,398-416).
cggagaaggagcatcttca

SEQ ID NO: 671816 - DNA, 19 bp, Mus musculus
  siRNA target sequence for 1010001D01Rik (NM_133186.1,438-456).
gtacctggcctcactcttt

SEQ ID NO: 671817 - DNA, 19 bp, Mus musculus
  siRNA target sequence for 1010001D01Rik (NM_133186.1,719-737).
gcttctacacctacaactt

SEQ ID NO: 671818 - DNA, 19 bp, Mus musculus
  siRNA target sequence for 1010001D01Rik (NM_133186.1,756-774).
gccatacattcggaaagat

SEQ ID NO: 671819 - DNA, 19 bp, Mus musculus
  siRNA target sequence for 1010001D01Rik (NM_133186.1,758-776).
catacattcggaaagatga

SEQ ID NO: 671820 - DNA, 19 bp, Mus musculus
  siRNA target sequence for 1010001D01Rik (NM_133186.1,1034-1052).
gctacgacctggtcaatct

SEQ ID NO: 671821 - DNA, 19 bp, Mus musculus
  siRNA target sequence for 1010001D01Rik (NM_133186.1,1178-1196).
cgctcccgtccattgctaa

SEQ ID NO: 671822 - DNA, 19 bp, Mus musculus
  siRNA target sequence for 1010001D01Rik (NM_133186.1,1180-1198).
ctcccgtccattgctaatt

SEQ ID NO: 671823 - DNA, 19 bp, Mus musculus
  siRNA target sequence for 1010001D01Rik (NM_133186.1,1306-1324).
gaaaaccactacaagttct

SEQ ID NO: 671824 - DNA, 19 bp, Mus musculus
  siRNA target sequence for 1010001D01Rik (NM_133186.1,1548-1566).
gctgggttcgggtctcttt

SEQ ID NO: 671825 - DNA, 19 bp, Mus musculus
  siRNA target sequence for 1010001D01Rik (NM_133186.1,1551-1569).
gggttcgggtctcttttct

SEQ ID NO: 671826 - DNA, 19 bp, Mus musculus
  siRNA target sequence for 1110039C07Rik (NM_026838.1,346-364).
cgcaggctcaggttactct

SEQ ID NO: 671827 - DNA, 19 bp, Mus musculus
  siRNA target sequence for 1110039C07Rik (NM_026838.1,376-394).
ctacaatgaagtatatgca

SEQ ID NO: 671828 - DNA, 19 bp, Mus musculus
  siRNA target sequence for 1110039C07Rik (NM_026838.1,437-455).
gtcccccgatggtgttaca

SEQ ID NO: 671829 - DNA, 19 bp, Mus musculus
  siRNA target sequence for 1110039C07Rik (NM_026838.1,439-457).
cccccgatggtgttacaca

SEQ ID NO: 671830 - DNA, 19 bp, Mus musculus
  siRNA target sequence for 1110039C07Rik (NM_026838.1,443-461).
cgatggtgttacacattga

SEQ ID NO: 671831 - DNA, 19 bp, Mus musculus
  siRNA target sequence for 1110039C07Rik (NM_026838.1,450-468).
gttacacattgaatatcca

SEQ ID NO: 671832 - DNA, 19 bp, Mus musculus
  siRNA target sequence for 1110039C07Rik (NM_026838.1,492-510).
caccaaggggaggaaatta

SEQ ID NO: 671833 - DNA, 19 bp, Mus musculus
  siRNA target sequence for 1110039C07Rik (NM_026838.1,572-590).
cggaagtcagtgcaatgtt

SEQ ID NO: 671834 - DNA, 19 bp, Mus musculus
  siRNA target sequence for 1110039C07Rik (NM_026838.1,698-716).
gactcccgttgtgactata

SEQ ID NO: 671835 - DNA, 19 bp, Mus musculus
  siRNA target sequence for 1110039C07Rik (NM_026838.1,786-804).
gaggcgagcctgtatgtgt

SEQ ID NO: 671836 - DNA, 19 bp, Mus musculus
  siRNA target sequence for 1110039C07Rik (NM_026838.1,869-887).
ctaactgctcgagtatact

SEQ ID NO: 671837 - DNA, 19 bp, Mus musculus
  siRNA target sequence for 1110039C07Rik (NM_026838.1,978-996).
gagaacatgtgattcgtta

SEQ ID NO: 671838 - DNA, 19 bp, Mus musculus
  siRNA target sequence for 1110039C07Rik (NM_026838.1,980-998).
gaacatgtgattcgttata

SEQ ID NO: 671839 - DNA, 19 bp, Mus musculus
  siRNA target sequence for 1110039C07Rik (NM_026838.1,1029-1047).
gctgcaaattcattgtaaa

SEQ ID NO: 671840 - DNA, 19 bp, Mus musculus
  siRNA target sequence for 1110039C07Rik (NM_026838.1,1030-1048).
ctgcaaattcattgtaaaa

SEQ ID NO: 671841 - DNA, 19 bp, Mus musculus
  siRNA target sequence for 1110039C07Rik (NM_026838.1,1059-1077).
gacgctgtcccattctgaa

SEQ ID NO: 671842 - DNA, 19 bp, Mus musculus
  siRNA target sequence for 1110039C07Rik (NM_026838.1,1128-1146).
gtgccatctgtgaatacca

SEQ ID NO: 671843 - DNA, 19 bp, Mus musculus
  siRNA target sequence for 1110039C07Rik (NM_026838.1,1144-1162).
ccactgtgatggtggttat

SEQ ID NO: 671844 - DNA, 19 bp, Mus musculus
  siRNA target sequence for 1110039C07Rik (NM_026838.1,1233-1251).
ctcctatgaagattaatgt

SEQ ID NO: 671845 - DNA, 19 bp, Mus musculus
  siRNA target sequence for 1110039C07Rik (NM_026838.1,1235-1253).
cctatgaagattaatgtca

SEQ ID NO: 671846 - DNA, 19 bp, Mus musculus
  siRNA target sequence for 1110039C07Rik (NM_026838.1,1269-1287).
ctggcctcctggatcagtt

SEQ ID NO: 671847 - DNA, 19 bp, Mus musculus
  siRNA target sequence for 1110039C07Rik (NM_026838.1,1272-1290).
gcctcctggatcagttcta

SEQ ID NO: 671848 - DNA, 19 bp, Mus musculus
  siRNA target sequence for 1110039C07Rik (NM_026838.1,1273-1291).
cctcctggatcagttctat

SEQ ID NO: 671849 - DNA, 19 bp, Mus musculus
  siRNA target sequence for 1110039C07Rik (NM_026838.1,1298-1316).
cagcgactcctcatagtct

SEQ ID NO: 671850 - DNA, 19 bp, Mus musculus
  siRNA target sequence for 1110039C07Rik (NM_026838.1,1328-1346).
ccctccaatcggtactaca

SEQ ID NO: 671851 - DNA, 19 bp, Mus musculus
  siRNA target sequence for 1110039C07Rik (NM_026838.1,1329-1347).
cctccaatcggtactacaa

SEQ ID NO: 671852 - DNA, 19 bp, Mus musculus
  siRNA target sequence for 1110039C07Rik (NM_026838.1,1330-1348).
ctccaatcggtactacaaa

SEQ ID NO: 671853 - DNA, 19 bp, Mus musculus
  siRNA target sequence for 1110039C07Rik (NM_026838.1,1332-1350).
ccaatcggtactacaaaat

SEQ ID NO: 671854 - DNA, 19 bp, Mus musculus
  siRNA target sequence for 1110039C07Rik (NM_026838.1,1446-1464).
gcatccgggagcaacaact

SEQ ID NO: 671855 - DNA, 19 bp, Mus musculus
  siRNA target sequence for 1110039C07Rik (NM_026838.1,1447-1465).
catccgggagcaacaacta

SEQ ID NO: 671856 - DNA, 19 bp, Mus musculus
  siRNA target sequence for 1110039C07Rik (NM_026838.1,1450-1468).
ccgggagcaacaactatca

SEQ ID NO: 671857 - DNA, 19 bp, Mus musculus
  siRNA target sequence for 1110039C07Rik (NM_026838.1,1505-1523).
ctcactcgttcctacttca

SEQ ID NO: 671858 - DNA, 19 bp, Mus musculus
  siRNA target sequence for 1110039C07Rik (NM_026838.1,1509-1527).
ctcgttcctacttcaacat

SEQ ID NO: 671859 - DNA, 19 bp, Mus musculus
  siRNA target sequence for 1110039C07Rik (NM_026838.1,1555-1573).
ccgggaacgctatatggaa

SEQ ID NO: 671860 - DNA, 19 bp, Mus musculus
  siRNA target sequence for 1110039C07Rik (NM_026838.1,1584-1602).
ctgaggaaatcttcacatt

SEQ ID NO: 671861 - DNA, 19 bp, Mus musculus
  siRNA target sequence for 1810043O07Rik (NM_133872.1,850-868).
cttacaacagcgatactgt

SEQ ID NO: 671862 - DNA, 19 bp, Mus musculus
  siRNA target sequence for 1810043O07Rik (NM_133872.1,876-894).
caccgagttcacagttact

SEQ ID NO: 671863 - DNA, 19 bp, Mus musculus
  siRNA target sequence for 1810043O07Rik (NM_133872.1,878-896).
ccgagttcacagttactta

SEQ ID NO: 671864 - DNA, 19 bp, Mus musculus
  siRNA target sequence for 1810043O07Rik (NM_133872.1,897-915).
gagcgccatggtcttatca

SEQ ID NO: 671865 - DNA, 19 bp, Mus musculus
  siRNA target sequence for 1810043O07Rik (NM_133872.1,900-918).
cgccatggtcttatcaact

SEQ ID NO: 671866 - DNA, 19 bp, Mus musculus
  siRNA target sequence for 1810043O07Rik (NM_133872.1,901-919).
gccatggtcttatcaactt

SEQ ID NO: 671867 - DNA, 19 bp, Mus musculus
  siRNA target sequence for 1810043O07Rik (NM_133872.1,961-979).
caggaaaggtgattattat

SEQ ID NO: 671868 - DNA, 19 bp, Mus musculus
  siRNA target sequence for 1810043O07Rik (NM_133872.1,1009-1027).
ctcgacagctacagagttt

SEQ ID NO: 671869 - DNA, 19 bp, Mus musculus
  siRNA target sequence for 1810043O07Rik (NM_133872.1,1069-1087).
gtggacgagttgctacatt

SEQ ID NO: 671870 - DNA, 19 bp, Mus musculus
  siRNA target sequence for 1810043O07Rik (NM_133872.1,1074-1092).
cgagttgctacatttcgaa

SEQ ID NO: 671871 - DNA, 19 bp, Mus musculus
  siRNA target sequence for 1810043O07Rik (NM_133872.1,1075-1093).
gagttgctacatttcgaaa

SEQ ID NO: 671872 - DNA, 19 bp, Mus musculus
  siRNA target sequence for 1810043O07Rik (NM_133872.1,1113-1131).
cttggcgccatggttgtaa

SEQ ID NO: 671873 - DNA, 19 bp, Mus musculus
  siRNA target sequence for 1810043O07Rik (NM_133872.1,1158-1176).
gtcgtcagcaaacaagtaa

SEQ ID NO: 671874 - DNA, 19 bp, Mus musculus
  siRNA target sequence for 1810043O07Rik (NM_133872.1,1160-1178).
cgtcagcaaacaagtaaat

SEQ ID NO: 671875 - DNA, 19 bp, Mus musculus
  siRNA target sequence for 1810043O07Rik (NM_133872.1,1291-1309).
ccacttcttaccttagtca

SEQ ID NO: 671876 - DNA, 19 bp, Mus musculus
  siRNA target sequence for 1810043O07Rik (NM_133872.1,1302-1320).
cttagtcaccagttagact

SEQ ID NO: 671877 - DNA, 19 bp, Mus musculus
  siRNA target sequence for 1810043O07Rik (NM_133872.1,1306-1324).
gtcaccagttagacttcaa

SEQ ID NO: 671878 - DNA, 19 bp, Mus musculus
  siRNA target sequence for 1810043O07Rik (NM_133872.1,1322-1340).
caacgtcctcaataataaa

SEQ ID NO: 671879 - DNA, 19 bp, Mus musculus
  siRNA target sequence for 1810043O07Rik (NM_133872.1,1325-1343).
cgtcctcaataataaacct

SEQ ID NO: 671880 - DNA, 19 bp, Mus musculus
  siRNA target sequence for 1810043O07Rik (NM_133872.1,1358-1376).
ggcattggaggttgtcatt

SEQ ID NO: 671881 - DNA, 19 bp, Mus musculus
  siRNA target sequence for 1810043O07Rik (NM_133872.1,1448-1466).
gttgaaagagcttcttaat

SEQ ID NO: 671882 - DNA, 19 bp, Mus musculus
  siRNA target sequence for 1810043O07Rik (NM_133872.1,1497-1515).
gagctccatcagcaataca

SEQ ID NO: 671883 - DNA, 19 bp, Mus musculus
  siRNA target sequence for 1810043O07Rik (NM_133872.1,1499-1517).
gctccatcagcaatacaaa

SEQ ID NO: 671884 - DNA, 19 bp, Mus musculus
  siRNA target sequence for 1810043O07Rik (NM_133872.1,1594-1612).
ccctctgcaaggaatatga

SEQ ID NO: 671885 - DNA, 19 bp, Mus musculus
  siRNA target sequence for 1810043O07Rik (NM_133872.1,1598-1616).
ctgcaaggaatatgatgaa

SEQ ID NO: 671886 - DNA, 19 bp, Mus musculus
  siRNA target sequence for 1810043O07Rik (NM_133872.1,1672-1690).
ccccaagtgatgtatacct

SEQ ID NO: 671887 - DNA, 19 bp, Mus musculus
  siRNA target sequence for 1810043O07Rik (NM_133872.1,1680-1698).
gatgtatacctctcatcaa

SEQ ID NO: 671888 - DNA, 19 bp, Mus musculus
  siRNA target sequence for 1810043O07Rik (NM_133872.1,1864-1882).
ctgaaggcttggacattaa

SEQ ID NO: 671889 - DNA, 19 bp, Mus musculus
  siRNA target sequence for 1810043O07Rik (NM_133872.1,1869-1887).
ggcttggacattaaactga

SEQ ID NO: 671890 - DNA, 19 bp, Mus musculus
  siRNA target sequence for 1810043O07Rik (NM_133872.1,1870-1888).
gcttggacattaaactgaa

SEQ ID NO: 671891 - DNA, 19 bp, Mus musculus
  siRNA target sequence for 1810043O07Rik (NM_133872.1,1918-1936).
cctcaggatgtgaagtgat

SEQ ID NO: 671892 - DNA, 19 bp, Mus musculus
  siRNA target sequence for 1810043O07Rik (NM_133872.1,1919-1937).
ctcaggatgtgaagtgatt

SEQ ID NO: 671893 - DNA, 19 bp, Mus musculus
  siRNA target sequence for 1810043O07Rik (NM_133872.1,1946-1964).
cacacgttccacaagtcaa

SEQ ID NO: 671894 - DNA, 19 bp, Mus musculus
  siRNA target sequence for 1810043O07Rik (NM_133872.1,1951-1969).
gttccacaagtcaaacctt

SEQ ID NO: 671895 - DNA, 19 bp, Mus musculus
  siRNA target sequence for 1810043O07Rik (NM_133872.1,1954-1972).
ccacaagtcaaacctttat

SEQ ID NO: 671896 - DNA, 19 bp, Mus musculus
  siRNA target sequence for 1810043O07Rik (NM_133872.1,2091-2109).
ggatttggcaaccttaaca

SEQ ID NO: 671897 - DNA, 19 bp, Mus musculus
  siRNA target sequence for 1810043O07Rik (NM_133872.1,2092-2110).
gatttggcaaccttaacaa

SEQ ID NO: 671898 - DNA, 19 bp, Mus musculus
  siRNA target sequence for 1810043O07Rik (NM_133872.1,2108-2126).
caaggtggtgttatgcttt

SEQ ID NO: 671899 - DNA, 19 bp, Mus musculus
  siRNA target sequence for 1810043O07Rik (NM_133872.1,2138-2156).
ctgggacccaagtgtcaat

SEQ ID NO: 671900 - DNA, 19 bp, Mus musculus
  siRNA target sequence for 1810043O07Rik (NM_133872.1,2140-2158).
gggacccaagtgtcaattt

SEQ ID NO: 671901 - DNA, 19 bp, Mus musculus
  siRNA target sequence for 1810043O07Rik (NM_133872.1,2163-2181).
gggcacgttggcagtacaa

SEQ ID NO: 671902 - DNA, 19 bp, Mus musculus
  siRNA target sequence for 1810043O07Rik (NM_133872.1,2165-2183).
gcacgttggcagtacaact

SEQ ID NO: 671903 - DNA, 19 bp, Mus musculus
  siRNA target sequence for 1810043O07Rik (NM_133872.1,2205-2223).
ctcttctggaacctatata

SEQ ID NO: 671904 - DNA, 19 bp, Mus musculus
  siRNA target sequence for 1810043O07Rik (NM_133872.1,2427-2445).
ggatcctctggaaatgact

SEQ ID NO: 671905 - DNA, 19 bp, Mus musculus
  siRNA target sequence for 1810043O07Rik (NM_133872.1,2437-2455).
gaaatgactatgatttaat

SEQ ID NO: 671906 - DNA, 19 bp, Mus musculus
  siRNA target sequence for 1810043O07Rik (NM_133872.1,2468-2486).
cactcctggcccctcaatt

SEQ ID NO: 671907 - DNA, 19 bp, Mus musculus
  siRNA target sequence for 1810043O07Rik (NM_133872.1,2599-2617).
ggattgccgaccagttttt

SEQ ID NO: 671908 - DNA, 19 bp, Mus musculus
  siRNA target sequence for 1810043O07Rik (NM_133872.1,2665-2683).
cacagcagtccccaagtat

SEQ ID NO: 671909 - DNA, 19 bp, Mus musculus
  siRNA target sequence for 1810043O07Rik (NM_133872.1,2667-2685).
cagcagtccccaagtatgt

SEQ ID NO: 671910 - DNA, 19 bp, Mus musculus
  siRNA target sequence for 4732474A20Rik (NM_177307.2,229-247).
cagcctttcgagtgtatgt

SEQ ID NO: 671911 - DNA, 19 bp, Mus musculus
  siRNA target sequence for 4732474A20Rik (NM_177307.2,232-250).
cctttcgagtgtatgttgt

SEQ ID NO: 671912 - DNA, 19 bp, Mus musculus
  siRNA target sequence for 4732474A20Rik (NM_177307.2,293-311).
gctggtgcgggcattcaaa

SEQ ID NO: 671913 - DNA, 19 bp, Mus musculus
  siRNA target sequence for 4732474A20Rik (NM_177307.2,294-312).
ctggtgcgggcattcaaat

SEQ ID NO: 671914 - DNA, 19 bp, Mus musculus
  siRNA target sequence for 4732474A20Rik (NM_177307.2,300-318).
cgggcattcaaattattta

SEQ ID NO: 671915 - DNA, 19 bp, Mus musculus
  siRNA target sequence for 4732474A20Rik (NM_177307.2,304-322).
cattcaaattatttagtga

SEQ ID NO: 671916 - DNA, 19 bp, Mus musculus
  siRNA target sequence for 4732474A20Rik (NM_177307.2,386-404).
gggtcacatgagcatgtat

SEQ ID NO: 671917 - DNA, 19 bp, Mus musculus
  siRNA target sequence for 4732474A20Rik (NM_177307.2,841-859).
gtgactgccaggagagaat

SEQ ID NO: 671918 - DNA, 19 bp, Mus musculus
  siRNA target sequence for 4732474A20Rik (NM_177307.2,843-861).
gactgccaggagagaatga

SEQ ID NO: 671919 - DNA, 19 bp, Mus musculus
  siRNA target sequence for 4732474A20Rik (NM_177307.2,927-945).
cactacctggatttcatgt

SEQ ID NO: 671920 - DNA, 19 bp, Mus musculus
  siRNA target sequence for 4732474A20Rik (NM_177307.2,1162-1180).
ccgaggcagatactttcat

SEQ ID NO: 671921 - DNA, 19 bp, Mus musculus
  siRNA target sequence for 4732474A20Rik (NM_177307.2,1188-1206).
ggtcatgacacaacatcta

SEQ ID NO: 671922 - DNA, 19 bp, Mus musculus
  siRNA target sequence for 4732474A20Rik (NM_177307.2,1226-1244).
gttcaacctggcaaagtat

SEQ ID NO: 671923 - DNA, 19 bp, Mus musculus
  siRNA target sequence for 4732474A20Rik (NM_177307.2,1504-1522).
ggcctgactctaaggtata

SEQ ID NO: 671924 - DNA, 19 bp, Mus musculus
  siRNA target sequence for 4732474A20Rik (NM_177307.2,1507-1525).
ctgactctaaggtatacaa

SEQ ID NO: 671925 - DNA, 19 bp, Mus musculus
  siRNA target sequence for 4732474A20Rik (NM_177307.2,1706-1724).
gaagccggagcttattcta

SEQ ID NO: 671926 - DNA, 19 bp, Mus musculus
  siRNA target sequence for 4732474A20Rik (NM_177307.2,1736-1754).
cggcctttggctcaatgta

SEQ ID NO: 671927 - DNA, 19 bp, Mus musculus
  siRNA target sequence for 9030625M01Rik (NM_025778.1,254-272).
gcagcaccagtgtgtatga

SEQ ID NO: 671928 - DNA, 19 bp, Mus musculus
  siRNA target sequence for 9030625M01Rik (NM_025778.1,301-319).
gatccaaacagcatagagt

SEQ ID NO: 671929 - DNA, 19 bp, Mus musculus
  siRNA target sequence for 9030625M01Rik (NM_025778.1,341-359).
ccagacaccatgtcttcaa

SEQ ID NO: 671930 - DNA, 19 bp, Mus musculus
  siRNA target sequence for 9030625M01Rik (NM_025778.1,443-461).
cctggacacaggtatcatt

SEQ ID NO: 671931 - DNA, 19 bp, Mus musculus
  siRNA target sequence for 9030625M01Rik (NM_025778.1,678-696).
gcgcctggagagtgaagtt

SEQ ID NO: 671932 - DNA, 19 bp, Mus musculus
  siRNA target sequence for 9030625M01Rik (NM_025778.1,752-770).
ggccaccaccagatgtcat

SEQ ID NO: 671933 - DNA, 19 bp, Mus musculus
  siRNA target sequence for 9030625M01Rik (NM_025778.1,803-821).
gggtctcggagattctgta

SEQ ID NO: 671934 - DNA, 19 bp, Mus musculus
  siRNA target sequence for 9030625M01Rik (NM_025778.1,835-853).
ggaccttgtgactctaaga

SEQ ID NO: 671935 - DNA, 19 bp, Mus musculus
  siRNA target sequence for 9030625M01Rik (NM_025778.1,836-854).
gaccttgtgactctaagaa

SEQ ID NO: 671936 - DNA, 19 bp, Mus musculus
  siRNA target sequence for 9030625M01Rik (NM_025778.1,870-888).
ccaaataataagcaagatt

SEQ ID NO: 671937 - DNA, 19 bp, Mus musculus
  siRNA target sequence for 9030625M01Rik (NM_025778.1,967-985).
gacgggctgtcctactcaa

SEQ ID NO: 671938 - DNA, 19 bp, Mus musculus
  siRNA target sequence for 9030625M01Rik (NM_025778.1,1023-1041).
ggacaccagaggagaatca

SEQ ID NO: 671939 - DNA, 19 bp, Mus musculus
  siRNA target sequence for 9030625M01Rik (NM_025778.1,1107-1125).
cgacaaccacccaatgaat

SEQ ID NO: 671940 - DNA, 19 bp, Mus musculus
  siRNA target sequence for 9030625M01Rik (NM_025778.1,1108-1126).
gacaaccacccaatgaata

SEQ ID NO: 671941 - DNA, 19 bp, Mus musculus
  siRNA target sequence for 9030625M01Rik (NM_025778.1,1110-1128).
caaccacccaatgaataga

SEQ ID NO: 671942 - DNA, 19 bp, Mus musculus
  siRNA target sequence for 9030625M01Rik (NM_025778.1,1190-1208).
gcggatgggaaaaaatact

SEQ ID NO: 671943 - DNA, 19 bp, Mus musculus
  siRNA target sequence for 9030625M01Rik (NM_025778.1,1191-1209).
cggatgggaaaaaatactt

SEQ ID NO: 671944 - DNA, 19 bp, Mus musculus
  siRNA target sequence for 9030625M01Rik (NM_025778.1,1211-1229).
ggatctcacatgaagaagt

SEQ ID NO: 671945 - DNA, 19 bp, Mus musculus
  siRNA target sequence for Agps (NM_172666.2,210-228).
ggaggctccgagtaccaat

SEQ ID NO: 671946 - DNA, 19 bp, Mus musculus
  siRNA target sequence for Agps (NM_172666.2,214-232).
gctccgagtaccaatgagt

SEQ ID NO: 671947 - DNA, 19 bp, Mus musculus
  siRNA target sequence for Agps (NM_172666.2,312-330).
caagaagcggcaagaagtt

SEQ ID NO: 671948 - DNA, 19 bp, Mus musculus
  siRNA target sequence for Agps (NM_172666.2,318-336).
gcggcaagaagttatgaaa

SEQ ID NO: 671949 - DNA, 19 bp, Mus musculus
  siRNA target sequence for Agps (NM_172666.2,343-361).
ggatggggctacaatgatt

SEQ ID NO: 671950 - DNA, 19 bp, Mus musculus
  siRNA target sequence for Agps (NM_172666.2,358-376).
gattccaagttcttattga

SEQ ID NO: 671951 - DNA, 19 bp, Mus musculus
  siRNA target sequence for Agps (NM_172666.2,362-380).
ccaagttcttattgaataa

SEQ ID NO: 671952 - DNA, 19 bp, Mus musculus
  siRNA target sequence for Agps (NM_172666.2,470-488).
gagtaagtctggagcataa

SEQ ID NO: 671953 - DNA, 19 bp, Mus musculus
  siRNA target sequence for Agps (NM_172666.2,518-536).
gtgaagcacctccttctat

SEQ ID NO: 671954 - DNA, 19 bp, Mus musculus
  siRNA target sequence for Agps (NM_172666.2,524-542).
cacctccttctattgtgaa

SEQ ID NO: 671955 - DNA, 19 bp, Mus musculus
  siRNA target sequence for Agps (NM_172666.2,527-545).
ctccttctattgtgaatga

SEQ ID NO: 671956 - DNA, 19 bp, Mus musculus
  siRNA target sequence for Agps (NM_172666.2,629-647).
gtcttcacgagatattttt

SEQ ID NO: 671957 - DNA, 19 bp, Mus musculus
  siRNA target sequence for Agps (NM_172666.2,669-687).
gcggattcctgatatagtt

SEQ ID NO: 671958 - DNA, 19 bp, Mus musculus
  siRNA target sequence for Agps (NM_172666.2,693-711).
gccaacatgtcatgatgat

SEQ ID NO: 671959 - DNA, 19 bp, Mus musculus
  siRNA target sequence for Agps (NM_172666.2,698-716).
catgtcatgatgatgtagt

SEQ ID NO: 671960 - DNA, 19 bp, Mus musculus
  siRNA target sequence for Agps (NM_172666.2,701-719).
gtcatgatgatgtagttaa

SEQ ID NO: 671961 - DNA, 19 bp, Mus musculus
  siRNA target sequence for Agps (NM_172666.2,726-744).
gaatctagcttgcaaatat

SEQ ID NO: 671962 - DNA, 19 bp, Mus musculus
  siRNA target sequence for Agps (NM_172666.2,747-765).
cctttgtatcataccaatt

SEQ ID NO: 671963 - DNA, 19 bp, Mus musculus
  siRNA target sequence for Agps (NM_172666.2,811-829).
gagacaagaacaataattt

SEQ ID NO: 671964 - DNA, 19 bp, Mus musculus
  siRNA target sequence for Agps (NM_172666.2,830-848).
ctttggacacttcacaaat

SEQ ID NO: 671965 - DNA, 19 bp, Mus musculus
  siRNA target sequence for Agps (NM_172666.2,844-862).
caaatgaaccggattctct

SEQ ID NO: 671966 - DNA, 19 bp, Mus musculus
  siRNA target sequence for Agps (NM_172666.2,891-909).
cgtagaggctgggataaca

SEQ ID NO: 671967 - DNA, 19 bp, Mus musculus
  siRNA target sequence for Agps (NM_172666.2,902-920).
ggataacaggacaagattt

SEQ ID NO: 671968 - DNA, 19 bp, Mus musculus
  siRNA target sequence for Agps (NM_172666.2,988-1006).
gtgggaggatggatatcta

SEQ ID NO: 671969 - DNA, 19 bp, Mus musculus
  siRNA target sequence for Agps (NM_172666.2,990-1008).
gggaggatggatatctact

SEQ ID NO: 671970 - DNA, 19 bp, Mus musculus
  siRNA target sequence for Agps (NM_172666.2,1009-1027).
cgagcgtcaggcatgaaga

SEQ ID NO: 671971 - DNA, 19 bp, Mus musculus
  siRNA target sequence for Agps (NM_172666.2,1010-1028).
gagcgtcaggcatgaagaa

SEQ ID NO: 671972 - DNA, 19 bp, Mus musculus
  siRNA target sequence for Agps (NM_172666.2,1013-1031).
cgtcaggcatgaagaaaaa

SEQ ID NO: 671973 - DNA, 19 bp, Mus musculus
  siRNA target sequence for Agps (NM_172666.2,1019-1037).
gcatgaagaaaaatatcta

SEQ ID NO: 671974 - DNA, 19 bp, Mus musculus
  siRNA target sequence for Agps (NM_172666.2,1020-1038).
catgaagaaaaatatctat

SEQ ID NO: 671975 - DNA, 19 bp, Mus musculus
  siRNA target sequence for Agps (NM_172666.2,1048-1066).
gaggacctggtggttcata

SEQ ID NO: 671976 - DNA, 19 bp, Mus musculus
  siRNA target sequence for Agps (NM_172666.2,1053-1071).
cctggtggttcatatgaaa

SEQ ID NO: 671977 - DNA, 19 bp, Mus musculus
  siRNA target sequence for Agps (NM_172666.2,1079-1097).
cacctagaggtgtaataga

SEQ ID NO: 671978 - DNA, 19 bp, Mus musculus
  siRNA target sequence for Agps (NM_172666.2,1081-1099).
cctagaggtgtaatagaga

SEQ ID NO: 671979 - DNA, 19 bp, Mus musculus
  siRNA target sequence for Agps (NM_172666.2,1082-1100).
ctagaggtgtaatagagaa

SEQ ID NO: 671980 - DNA, 19 bp, Mus musculus
  siRNA target sequence for Agps (NM_172666.2,1107-1125).
ccaaggacctcgtatgtca

SEQ ID NO: 671981 - DNA, 19 bp, Mus musculus
  siRNA target sequence for Agps (NM_172666.2,1108-1126).
caaggacctcgtatgtcaa

SEQ ID NO: 671982 - DNA, 19 bp, Mus musculus
  siRNA target sequence for Agps (NM_172666.2,1130-1148).
gccctgatatccatcactt

SEQ ID NO: 671983 - DNA, 19 bp, Mus musculus
  siRNA target sequence for Agps (NM_172666.2,1135-1153).
gatatccatcacttcatta

SEQ ID NO: 671984 - DNA, 19 bp, Mus musculus
  siRNA target sequence for Agps (NM_172666.2,1165-1183).
ggaactcttggtgtaataa

SEQ ID NO: 671985 - DNA, 19 bp, Mus musculus
  siRNA target sequence for Agps (NM_172666.2,1235-1253).
cggtggctttccctaactt

SEQ ID NO: 671986 - DNA, 19 bp, Mus musculus
  siRNA target sequence for Agps (NM_172666.2,1236-1254).
ggtggctttccctaacttt

SEQ ID NO: 671987 - DNA, 19 bp, Mus musculus
  siRNA target sequence for Agps (NM_172666.2,1258-1276).
caaggtgtagcctgtttaa

SEQ ID NO: 671988 - DNA, 19 bp, Mus musculus
  siRNA target sequence for Agps (NM_172666.2,1264-1282).
gtagcctgtttaagagaaa

SEQ ID NO: 671989 - DNA, 19 bp, Mus musculus
  siRNA target sequence for Agps (NM_172666.2,1341-1359).
gtttggtcatgctcttaaa

SEQ ID NO: 671990 - DNA, 19 bp, Mus musculus
  siRNA target sequence for Agps (NM_172666.2,1451-1469).
gtgtagccacattactgtt

SEQ ID NO: 671991 - DNA, 19 bp, Mus musculus
  siRNA target sequence for Agps (NM_172666.2,1488-1506).
ggttcttcagcacgaaaaa

SEQ ID NO: 671992 - DNA, 19 bp, Mus musculus
  siRNA target sequence for Agps (NM_172666.2,1497-1515).
gcacgaaaaacaagtgtat

SEQ ID NO: 671993 - DNA, 19 bp, Mus musculus
  siRNA target sequence for Agps (NM_172666.2,1512-1530).
gtatgacatcgcagcaaaa

SEQ ID NO: 671994 - DNA, 19 bp, Mus musculus
  siRNA target sequence for Agps (NM_172666.2,1518-1536).
catcgcagcaaaatttggt

SEQ ID NO: 671995 - DNA, 19 bp, Mus musculus
  siRNA target sequence for Agps (NM_172666.2,1562-1580).
gtcagaggggttatttgct

SEQ ID NO: 671996 - DNA, 19 bp, Mus musculus
  siRNA target sequence for Agps (NM_172666.2,1569-1587).
gggttatttgctgacttat

SEQ ID NO: 671997 - DNA, 19 bp, Mus musculus
  siRNA target sequence for Agps (NM_172666.2,1581-1599).
gacttatgtcattgcatat

SEQ ID NO: 671998 - DNA, 19 bp, Mus musculus
  siRNA target sequence for Agps (NM_172666.2,1603-1621).
cgtgatttgggtttggaat

SEQ ID NO: 671999 - DNA, 19 bp, Mus musculus
  siRNA target sequence for Agps (NM_172666.2,1604-1622).
gtgatttgggtttggaata

SEQ ID NO: 672000 - DNA, 19 bp, Mus musculus
  siRNA target sequence for Agps (NM_172666.2,1611-1629).
gggtttggaatactatgta

SEQ ID NO: 672001 - DNA, 19 bp, Mus musculus
  siRNA target sequence for Agps (NM_172666.2,1617-1635).
ggaatactatgtaatagga

SEQ ID NO: 672002 - DNA, 19 bp, Mus musculus
  siRNA target sequence for Agps (NM_172666.2,1623-1641).
ctatgtaataggagaatct

SEQ ID NO: 672003 - DNA, 19 bp, Mus musculus
  siRNA target sequence for Agps (NM_172666.2,1658-1676).
cttgggacagggttataga

SEQ ID NO: 672004 - DNA, 19 bp, Mus musculus
  siRNA target sequence for Agps (NM_172666.2,1661-1679).
gggacagggttatagatct

SEQ ID NO: 672005 - DNA, 19 bp, Mus musculus
  siRNA target sequence for Agps (NM_172666.2,1732-1750).
cagttcgcacctctttcta

SEQ ID NO: 672006 - DNA, 19 bp, Mus musculus
  siRNA target sequence for Agps (NM_172666.2,1754-1772).
gcagggtgacacagactta

SEQ ID NO: 672007 - DNA, 19 bp, Mus musculus
  siRNA target sequence for Agps (NM_172666.2,1757-1775).
gggtgacacagacttatga

SEQ ID NO: 672008 - DNA, 19 bp, Mus musculus
  siRNA target sequence for Agps (NM_172666.2,1758-1776).
ggtgacacagacttatgat

SEQ ID NO: 672009 - DNA, 19 bp, Mus musculus
  siRNA target sequence for Agps (NM_172666.2,1777-1795).
gcaggtgcatgtatctact

SEQ ID NO: 672010 - DNA, 19 bp, Mus musculus
  siRNA target sequence for Agps (NM_172666.2,1832-1850).
cactgaccgtgtttgaaca

SEQ ID NO: 672011 - DNA, 19 bp, Mus musculus
  siRNA target sequence for Agps (NM_172666.2,1912-1930).
ggagtgggcaagatacgaa

SEQ ID NO: 672012 - DNA, 19 bp, Mus musculus
  siRNA target sequence for Agps (NM_172666.2,1913-1931).
gagtgggcaagatacgaaa

SEQ ID NO: 672013 - DNA, 19 bp, Mus musculus
  siRNA target sequence for AI325464 (NM_178882.2,437-455).
cttaggcactgctataaga

SEQ ID NO: 672014 - DNA, 19 bp, Mus musculus
  siRNA target sequence for AI325464 (NM_178882.2,504-522).
gcagtgttcctgtctttga

SEQ ID NO: 672015 - DNA, 19 bp, Mus musculus
  siRNA target sequence for AI325464 (NM_178882.2,559-577).
catcagctttcatgatgta

SEQ ID NO: 672016 - DNA, 19 bp, Mus musculus
  siRNA target sequence for AI325464 (NM_178882.2,694-712).
gggaaatgtggcaacaaat

SEQ ID NO: 672017 - DNA, 19 bp, Mus musculus
  siRNA target sequence for AI325464 (NM_178882.2,721-739).
cctgcgattcctgagatat

SEQ ID NO: 672018 - DNA, 19 bp, Mus musculus
  siRNA target sequence for AI325464 (NM_178882.2,913-931).
caggcctaaggctgtgaat

SEQ ID NO: 672019 - DNA, 19 bp, Mus musculus
  siRNA target sequence for AI325464 (NM_178882.2,1022-1040).
gagttcatggatactgaat

SEQ ID NO: 672020 - DNA, 19 bp, Mus musculus
  siRNA target sequence for AI325464 (NM_178882.2,1286-1304).
gtgttcaagtatgacttat

SEQ ID NO: 672021 - DNA, 19 bp, Mus musculus
  siRNA target sequence for AI325464 (NM_178882.2,1288-1306).
gttcaagtatgacttatct

SEQ ID NO: 672022 - DNA, 19 bp, Mus musculus
  siRNA target sequence for AI325464 (NM_178882.2,1372-1390).
gcacgtggtgggatatgga

SEQ ID NO: 672023 - DNA, 19 bp, Mus musculus
  siRNA target sequence for AW049681 (NM_019720.2,259-277).
gagacggagtcgcatatct

SEQ ID NO: 672024 - DNA, 19 bp, Mus musculus
  siRNA target sequence for AW049681 (NM_019720.2,319-337).
gtggcgttaggctttacca

SEQ ID NO: 672025 - DNA, 19 bp, Mus musculus
  siRNA target sequence for AW049681 (NM_019720.2,324-342).
gttaggctttaccatcttt

SEQ ID NO: 672026 - DNA, 19 bp, Mus musculus
  siRNA target sequence for AW049681 (NM_019720.2,384-402).
gcaccccgttcttatgtct

SEQ ID NO: 672027 - DNA, 19 bp, Mus musculus
  siRNA target sequence for AW049681 (NM_019720.2,427-445).
gaggcactcctgatgttct

SEQ ID NO: 672028 - DNA, 19 bp, Mus musculus
  siRNA target sequence for AW049681 (NM_019720.2,840-858).
catcctcaccagtttggta

SEQ ID NO: 672029 - DNA, 19 bp, Mus musculus
  siRNA target sequence for AW049681 (NM_019720.2,848-866).
ccagtttggtaatcatgaa

SEQ ID NO: 672030 - DNA, 19 bp, Mus musculus
  siRNA target sequence for Cyb5 (NM_025797.1,168-186).
gtacgatctgaccaagttt

SEQ ID NO: 672031 - DNA, 19 bp, Mus musculus
  siRNA target sequence for Cyb5 (NM_025797.1,235-253).
ggtgatgctaccgagaatt

SEQ ID NO: 672032 - DNA, 19 bp, Mus musculus
  siRNA target sequence for Cyb5 (NM_025797.1,236-254).
gtgatgctaccgagaattt

SEQ ID NO: 672033 - DNA, 19 bp, Mus musculus
  siRNA target sequence for Cyb5 (NM_025797.1,284-302).
gagaactgtccaaaacata

SEQ ID NO: 672034 - DNA, 19 bp, Mus musculus
  siRNA target sequence for Cyb5 (NM_025797.1,344-362).
ccaagccttcggatactct

SEQ ID NO: 672035 - DNA, 19 bp, Mus musculus
  siRNA target sequence for Cyb5 (NM_025797.1,345-363).
caagccttcggatactctt

SEQ ID NO: 672036 - DNA, 19 bp, Mus musculus
  siRNA target sequence for Cyb5 (NM_025797.1,349-367).
ccttcggatactcttatca

SEQ ID NO: 672037 - DNA, 19 bp, Mus musculus
  siRNA target sequence for Cyb5 (NM_025797.1,366-384).
cactactgtggagtctaat

SEQ ID NO: 672038 - DNA, 19 bp, Mus musculus
  siRNA target sequence for Cyb5 (NM_025797.1,451-469).
ctctacatggcagaagatt

SEQ ID NO: 672039 - DNA, 19 bp, Mus musculus
  siRNA target sequence for Cyb561 (NM_007805.2,80-98).
ctgcactgccgtactatgt

SEQ ID NO: 672040 - DNA, 19 bp, Mus musculus
  siRNA target sequence for Cyb561 (NM_007805.2,259-277).
gtgtaccgtgtcttcagaa

SEQ ID NO: 672041 - DNA, 19 bp, Mus musculus
  siRNA target sequence for Cyb561 (NM_007805.2,319-337).
cacgtcttcgccttcatca

SEQ ID NO: 672042 - DNA, 19 bp, Mus musculus
  siRNA target sequence for Cyb561 (NM_007805.2,416-434).
ggtgtgggatcttagtctt

SEQ ID NO: 672043 - DNA, 19 bp, Mus musculus
  siRNA target sequence for Cyb561 (NM_007805.2,517-535).
cgccctcagcacattttct

SEQ ID NO: 672044 - DNA, 19 bp, Mus musculus
  siRNA target sequence for Cyb561 (NM_007805.2,518-536).
gccctcagcacattttctt

SEQ ID NO: 672045 - DNA, 19 bp, Mus musculus
  siRNA target sequence for Cyb561 (NM_007805.2,615-633).
caagtacagcacgtttgaa

SEQ ID NO: 672046 - DNA, 19 bp, Mus musculus
  siRNA target sequence for Cyb561 (NM_007805.2,663-681).
cttgctgctggtctgtttt

SEQ ID NO: 672047 - DNA, 19 bp, Mus musculus
  siRNA target sequence for Cyp26b1 (NM_175475.2,527-545).
gagaagtatggcaacgttt

SEQ ID NO: 672048 - DNA, 19 bp, Mus musculus
  siRNA target sequence for Cyp26b1 (NM_175475.2,541-559).
cgttttcaagacacactta

SEQ ID NO: 672049 - DNA, 19 bp, Mus musculus
  siRNA target sequence for Cyp26b1 (NM_175475.2,784-802).
ggtgatccaggatacactt

SEQ ID NO: 672050 - DNA, 19 bp, Mus musculus
  siRNA target sequence for Cyp26b1 (NM_175475.2,820-838).
gcctgaggccatcaatgta

SEQ ID NO: 672051 - DNA, 19 bp, Mus musculus
  siRNA target sequence for Cyp26b1 (NM_175475.2,821-839).
cctgaggccatcaatgtat

SEQ ID NO: 672052 - DNA, 19 bp, Mus musculus
  siRNA target sequence for Cyp26b1 (NM_175475.2,822-840).
ctgaggccatcaatgtata

SEQ ID NO: 672053 - DNA, 19 bp, Mus musculus
  siRNA target sequence for Cyp26b1 (NM_175475.2,1459-1477).
gggctggagtgtcatgtat

SEQ ID NO: 672054 - DNA, 19 bp, Mus musculus
  siRNA target sequence for Cyp26b1 (NM_175475.2,1554-1572).
cacgcagtgaggataagga

SEQ ID NO: 672055 - DNA, 19 bp, Mus musculus
  siRNA target sequence for Cyp26b1 (NM_175475.2,1748-1766).
ggcctcagtgtcaagttct

SEQ ID NO: 672056 - DNA, 19 bp, Mus musculus
  siRNA target sequence for Cyp26b1 (NM_175475.2,1777-1795).
ctccaaccagaatgagatt

SEQ ID NO: 672057 - DNA, 19 bp, Mus musculus
  siRNA target sequence for Cyp7a1 (NM_007824.2,96-114).
ggtagtgagctgttgcata

SEQ ID NO: 672058 - DNA, 19 bp, Mus musculus
  siRNA target sequence for Cyp7a1 (NM_007824.2,97-115).
gtagtgagctgttgcatat

SEQ ID NO: 672059 - DNA, 19 bp, Mus musculus
  siRNA target sequence for Cyp7a1 (NM_007824.2,102-120).
gagctgttgcatatggttt

SEQ ID NO: 672060 - DNA, 19 bp, Mus musculus
  siRNA target sequence for Cyp7a1 (NM_007824.2,163-181).
gacaacgggttgattccat

SEQ ID NO: 672061 - DNA, 19 bp, Mus musculus
  siRNA target sequence for Cyp7a1 (NM_007824.2,204-222).
cggatccaatcctcttgaa

SEQ ID NO: 672062 - DNA, 19 bp, Mus musculus
  siRNA target sequence for Cyp7a1 (NM_007824.2,205-223).
ggatccaatcctcttgaat

SEQ ID NO: 672063 - DNA, 19 bp, Mus musculus
  siRNA target sequence for Cyp7a1 (NM_007824.2,206-224).
gatccaatcctcttgaatt

SEQ ID NO: 672064 - DNA, 19 bp, Mus musculus
  siRNA target sequence for Cyp7a1 (NM_007824.2,266-284).
gcaaactgatggggaaata

SEQ ID NO: 672065 - DNA, 19 bp, Mus musculus
  siRNA target sequence for Cyp7a1 (NM_007824.2,278-296).
ggaaatatgtccacttcat

SEQ ID NO: 672066 - DNA, 19 bp, Mus musculus
  siRNA target sequence for Cyp7a1 (NM_007824.2,286-304).
gtccacttcatcacaaact

SEQ ID NO: 672067 - DNA, 19 bp, Mus musculus
  siRNA target sequence for Cyp7a1 (NM_007824.2,305-323).
ccctgtcataccacaaagt

SEQ ID NO: 672068 - DNA, 19 bp, Mus musculus
  siRNA target sequence for Cyp7a1 (NM_007824.2,307-325).
ctgtcataccacaaagtct

SEQ ID NO: 672069 - DNA, 19 bp, Mus musculus
  siRNA target sequence for Cyp7a1 (NM_007824.2,331-349).
cacggaaaatattttgact

SEQ ID NO: 672070 - DNA, 19 bp, Mus musculus
  siRNA target sequence for Cyp7a1 (NM_007824.2,351-369).
gaaaaaatttcattacact

SEQ ID NO: 672071 - DNA, 19 bp, Mus musculus
  siRNA target sequence for Cyp7a1 (NM_007824.2,403-421).
gacccaagtgatggaaata

SEQ ID NO: 672072 - DNA, 19 bp, Mus musculus
  siRNA target sequence for Cyp7a1 (NM_007824.2,416-434).
gaaataccacggaaaacat

SEQ ID NO: 672073 - DNA, 19 bp, Mus musculus
  siRNA target sequence for Cyp7a1 (NM_007824.2,558-576).
ggtcacggaagggatgtat

SEQ ID NO: 672074 - DNA, 19 bp, Mus musculus
  siRNA target sequence for Cyp7a1 (NM_007824.2,582-600).
ctgctaccgagtgatgttt

SEQ ID NO: 672075 - DNA, 19 bp, Mus musculus
  siRNA target sequence for Cyp7a1 (NM_007824.2,584-602).
gctaccgagtgatgtttga

SEQ ID NO: 672076 - DNA, 19 bp, Mus musculus
  siRNA target sequence for Cyp7a1 (NM_007824.2,585-603).
ctaccgagtgatgtttgaa

SEQ ID NO: 672077 - DNA, 19 bp, Mus musculus
  siRNA target sequence for Cyp7a1 (NM_007824.2,617-635).
cgctgtttggcaaagatat

SEQ ID NO: 672078 - DNA, 19 bp, Mus musculus
  siRNA target sequence for Cyp7a1 (NM_007824.2,618-636).
gctgtttggcaaagatatt

SEQ ID NO: 672079 - DNA, 19 bp, Mus musculus
  siRNA target sequence for Cyp7a1 (NM_007824.2,646-664).
gactcacaaagagcattta

SEQ ID NO: 672080 - DNA, 19 bp, Mus musculus
  siRNA target sequence for Cyp7a1 (NM_007824.2,648-666).
ctcacaaagagcatttatt

SEQ ID NO: 672081 - DNA, 19 bp, Mus musculus
  siRNA target sequence for Cyp7a1 (NM_007824.2,650-668).
cacaaagagcatttattca

SEQ ID NO: 672082 - DNA, 19 bp, Mus musculus
  siRNA target sequence for Cyp7a1 (NM_007824.2,725-743).
gcgtccctattcacttgtt

SEQ ID NO: 672083 - DNA, 19 bp, Mus musculus
  siRNA target sequence for Cyp7a1 (NM_007824.2,727-745).
gtccctattcacttgttca

SEQ ID NO: 672084 - DNA, 19 bp, Mus musculus
  siRNA target sequence for Cyp7a1 (NM_007824.2,730-748).
cctattcacttgttcaaga

SEQ ID NO: 672085 - DNA, 19 bp, Mus musculus
  siRNA target sequence for Cyp7a1 (NM_007824.2,828-846).
gatccgtctacgcatgttt

SEQ ID NO: 672086 - DNA, 19 bp, Mus musculus
  siRNA target sequence for Cyp7a1 (NM_007824.2,832-850).
cgtctacgcatgtttctca

SEQ ID NO: 672087 - DNA, 19 bp, Mus musculus
  siRNA target sequence for Cyp7a1 (NM_007824.2,833-851).
gtctacgcatgtttctcaa

SEQ ID NO: 672088 - DNA, 19 bp, Mus musculus
  siRNA target sequence for Cyp7a1 (NM_007824.2,838-856).
cgcatgtttctcaacgata

SEQ ID NO: 672089 - DNA, 19 bp, Mus musculus
  siRNA target sequence for Cyp7a1 (NM_007824.2,1055-1073).
ccatttacttggatcaaga

SEQ ID NO: 672090 - DNA, 19 bp, Mus musculus
  siRNA target sequence for Cyp7a1 (NM_007824.2,1083-1101).
caacctgccagtactagat

SEQ ID NO: 672091 - DNA, 19 bp, Mus musculus
  siRNA target sequence for Cyp7a1 (NM_007824.2,1189-1207).
ggttcctataacattcgaa

SEQ ID NO: 672092 - DNA, 19 bp, Mus musculus
  siRNA target sequence for Cyp7a1 (NM_007824.2,1194-1212).
ctataacattcgaaaagat

SEQ ID NO: 672093 - DNA, 19 bp, Mus musculus
  siRNA target sequence for Cyp7a1 (NM_007824.2,1222-1240).
gctctttacccacagttaa

SEQ ID NO: 672094 - DNA, 19 bp, Mus musculus
  siRNA target sequence for Cyp7a1 (NM_007824.2,1243-1261).
cacttggatcctgaaatct

SEQ ID NO: 672095 - DNA, 19 bp, Mus musculus
  siRNA target sequence for Cyp7a1 (NM_007824.2,1260-1278).
ctacccagaccctttgact

SEQ ID NO: 672096 - DNA, 19 bp, Mus musculus
  siRNA target sequence for Cyp7a1 (NM_007824.2,1264-1282).
ccagaccctttgactttta

SEQ ID NO: 672097 - DNA, 19 bp, Mus musculus
  siRNA target sequence for Cyp7a1 (NM_007824.2,1265-1283).
cagaccctttgacttttaa

SEQ ID NO: 672098 - DNA, 19 bp, Mus musculus
  siRNA target sequence for Cyp7a1 (NM_007824.2,1372-1390).
ggatcaggagctacaatat

SEQ ID NO: 672099 - DNA, 19 bp, Mus musculus
  siRNA target sequence for Cyp7a1 (NM_007824.2,1411-1429).
gtccaagaaatcaagcaat

SEQ ID NO: 672100 - DNA, 19 bp, Mus musculus
  siRNA target sequence for Cyp7a1 (NM_007824.2,1440-1458).
gatgctgtcttactttgaa

SEQ ID NO: 672101 - DNA, 19 bp, Mus musculus
  siRNA target sequence for Cyp7a1 (NM_007824.2,1482-1500).
caagtgtccccctctagat

SEQ ID NO: 672102 - DNA, 19 bp, Mus musculus
  siRNA target sequence for Cyp7a1 (NM_007824.2,1527-1545).
gccaccactaaatgatatt

SEQ ID NO: 672103 - DNA, 19 bp, Mus musculus
  siRNA target sequence for Cyp7a1 (NM_007824.2,1529-1547).
caccactaaatgatattga

SEQ ID NO: 672104 - DNA, 19 bp, Mus musculus
  siRNA target sequence for Cyp7a1 (NM_007824.2,1531-1549).
ccactaaatgatattgagt

SEQ ID NO: 672105 - DNA, 19 bp, Mus musculus
  siRNA target sequence for Cyp7a1 (NM_007824.2,1534-1552).
ctaaatgatattgagttta

SEQ ID NO: 672106 - DNA, 19 bp, Mus musculus
  siRNA target sequence for D8Bwg1320e (NM_027570.3,111-129).
ggctctgaaggcagttgta

SEQ ID NO: 672107 - DNA, 19 bp, Mus musculus
  siRNA target sequence for D8Bwg1320e (NM_027570.3,168-186).
gcaacacgggcatgatgaa

SEQ ID NO: 672108 - DNA, 19 bp, Mus musculus
  siRNA target sequence for D8Bwg1320e (NM_027570.3,169-187).
caacacgggcatgatgaat

SEQ ID NO: 672109 - DNA, 19 bp, Mus musculus
  siRNA target sequence for D8Bwg1320e (NM_027570.3,257-275).
caagcctgtgctacaatca

SEQ ID NO: 672110 - DNA, 19 bp, Mus musculus
  siRNA target sequence for D8Bwg1320e (NM_027570.3,375-393).
gatcacggagctgaataca

SEQ ID NO: 672111 - DNA, 19 bp, Mus musculus
  siRNA target sequence for D8Bwg1320e (NM_027570.3,426-444).
cacccgtaaagctctcaat

SEQ ID NO: 672112 - DNA, 19 bp, Mus musculus
  siRNA target sequence for D8Bwg1320e (NM_027570.3,563-581).
gggacaacgtgattaacct

SEQ ID NO: 672113 - DNA, 19 bp, Mus musculus
  siRNA target sequence for D8Bwg1320e (NM_027570.3,649-667).
gcagctggctacaatctca

SEQ ID NO: 672114 - DNA, 19 bp, Mus musculus
  siRNA target sequence for D8Bwg1320e (NM_027570.3,826-844).
cccgtggctcgcattgagt

SEQ ID NO: 672115 - DNA, 19 bp, Mus musculus
  siRNA target sequence for D8Bwg1320e (NM_027570.3,827-845).
ccgtggctcgcattgagtt

SEQ ID NO: 672116 - DNA, 19 bp, Mus musculus
  siRNA target sequence for D8Bwg1320e (NM_027570.3,836-854).
gcattgagttcctagatga

SEQ ID NO: 672117 - DNA, 19 bp, Mus musculus
  siRNA target sequence for D8Bwg1320e (NM_027570.3,963-981).
gcgcacagaggcaatcact

SEQ ID NO: 672118 - DNA, 19 bp, Mus musculus
  siRNA target sequence for D8Bwg1320e (NM_027570.3,972-990).
ggcaatcactcaggataat

SEQ ID NO: 672119 - DNA, 19 bp, Mus musculus
  siRNA target sequence for D8Bwg1320e (NM_027570.3,1020-1038).
ggccgaaaagcgcaatgaa

SEQ ID NO: 672120 - DNA, 19 bp, Mus musculus
  siRNA target sequence for D8Bwg1320e (NM_027570.3,1022-1040).
ccgaaaagcgcaatgaact

SEQ ID NO: 672121 - DNA, 19 bp, Mus musculus
  siRNA target sequence for D8Bwg1320e (NM_027570.3,1023-1041).
cgaaaagcgcaatgaactt

SEQ ID NO: 672122 - DNA, 19 bp, Mus musculus
  siRNA target sequence for D8Bwg1320e (NM_027570.3,1024-1042).
gaaaagcgcaatgaacttt

SEQ ID NO: 672123 - DNA, 19 bp, Mus musculus
  siRNA target sequence for D8Bwg1320e (NM_027570.3,1079-1097).
ccctgagtccaggaagtaa

SEQ ID NO: 672124 - DNA, 19 bp, Mus musculus
  siRNA target sequence for D8Bwg1320e (NM_027570.3,1090-1108).
ggaagtaaggcctattcca

SEQ ID NO: 672125 - DNA, 19 bp, Mus musculus
  siRNA target sequence for D8Bwg1320e (NM_027570.3,1158-1176).
caaggaggagattaaagct

SEQ ID NO: 672126 - DNA, 19 bp, Mus musculus
  siRNA target sequence for D8Bwg1320e (NM_027570.3,1236-1254).
cctggtcgacccagatgat

SEQ ID NO: 672127 - DNA, 19 bp, Mus musculus
  siRNA target sequence for D8Bwg1320e (NM_027570.3,1407-1425).
gcggcagctcaaaaacaca

SEQ ID NO: 672128 - DNA, 19 bp, Mus musculus
  siRNA target sequence for Dhcr24 (NM_053272.1,82-100).
ggttggagttcgttctcat

SEQ ID NO: 672129 - DNA, 19 bp, Mus musculus
  siRNA target sequence for Dhcr24 (NM_053272.1,141-159).
ctctcgctcatcttcgata

SEQ ID NO: 672130 - DNA, 19 bp, Mus musculus
  siRNA target sequence for Dhcr24 (NM_053272.1,145-163).
cgctcatcttcgatatcta

SEQ ID NO: 672131 - DNA, 19 bp, Mus musculus
  siRNA target sequence for Dhcr24 (NM_053272.1,147-165).
ctcatcttcgatatctact

SEQ ID NO: 672132 - DNA, 19 bp, Mus musculus
  siRNA target sequence for Dhcr24 (NM_053272.1,270-288).
ggcagtaagaccttcatgt

SEQ ID NO: 672133 - DNA, 19 bp, Mus musculus
  siRNA target sequence for Dhcr24 (NM_053272.1,319-337).
cgctgcgagtcggaaagta

SEQ ID NO: 672134 - DNA, 19 bp, Mus musculus
  siRNA target sequence for Dhcr24 (NM_053272.1,321-339).
ctgcgagtcggaaagtaca

SEQ ID NO: 672135 - DNA, 19 bp, Mus musculus
  siRNA target sequence for Dhcr24 (NM_053272.1,324-342).
cgagtcggaaagtacaaga

SEQ ID NO: 672136 - DNA, 19 bp, Mus musculus
  siRNA target sequence for Dhcr24 (NM_053272.1,325-343).
gagtcggaaagtacaagaa

SEQ ID NO: 672137 - DNA, 19 bp, Mus musculus
  siRNA target sequence for Dhcr24 (NM_053272.1,327-345).
gtcggaaagtacaagaaga

SEQ ID NO: 672138 - DNA, 19 bp, Mus musculus
  siRNA target sequence for Dhcr24 (NM_053272.1,539-557).
gtcatcgtcccacaagtat

SEQ ID NO: 672139 - DNA, 19 bp, Mus musculus
  siRNA target sequence for Dhcr24 (NM_053272.1,618-636).
cgctgcacaccgtctgaaa

SEQ ID NO: 672140 - DNA, 19 bp, Mus musculus
  siRNA target sequence for Dhcr24 (NM_053272.1,619-637).
gctgcacaccgtctgaaaa

SEQ ID NO: 672141 - DNA, 19 bp, Mus musculus
  siRNA target sequence for Dhcr24 (NM_053272.1,892-910).
ccagcaagctgaatagcat

SEQ ID NO: 672142 - DNA, 19 bp, Mus musculus
  siRNA target sequence for Dhcr24 (NM_053272.1,907-925).
gcattggcagttactacaa

SEQ ID NO: 672143 - DNA, 19 bp, Mus musculus
  siRNA target sequence for Dhcr24 (NM_053272.1,969-987).
cgggagggcctcgaataca

SEQ ID NO: 672144 - DNA, 19 bp, Mus musculus
  siRNA target sequence for Dhcr24 (NM_053272.1,970-988).
gggagggcctcgaatacat

SEQ ID NO: 672145 - DNA, 19 bp, Mus musculus
  siRNA target sequence for Dhcr24 (NM_053272.1,971-989).
ggagggcctcgaatacatt

SEQ ID NO: 672146 - DNA, 19 bp, Mus musculus
  siRNA target sequence for Dhcr24 (NM_053272.1,1213-1231).
ccctgcataccttccaaaa

SEQ ID NO: 672147 - DNA, 19 bp, Mus musculus
  siRNA target sequence for Dhcr24 (NM_053272.1,1411-1429).
gtgtgcacgggttccaaat

SEQ ID NO: 672148 - DNA, 19 bp, Mus musculus
  siRNA target sequence for Dhcr24 (NM_053272.1,1413-1431).
gtgcacgggttccaaatgt

SEQ ID NO: 672149 - DNA, 19 bp, Mus musculus
  siRNA target sequence for Dhcr24 (NM_053272.1,1415-1433).
gcacgggttccaaatgtta

SEQ ID NO: 672150 - DNA, 19 bp, Mus musculus
  siRNA target sequence for Dhcr24 (NM_053272.1,1430-1448).
gttatacgccgattgctat

SEQ ID NO: 672151 - DNA, 19 bp, Mus musculus
  siRNA target sequence for Dhcr24 (NM_053272.1,1536-1554).
gaggtgtacgacaagatct

SEQ ID NO: 672152 - DNA, 19 bp, Mus musculus
  siRNA target sequence for F730023N20 (NM_183158.1,974-992).
ctggatgcatggttattat

SEQ ID NO: 672153 - DNA, 19 bp, Mus musculus
  siRNA target sequence for F730023N20 (NM_183158.1,976-994).
ggatgcatggttattatgt

SEQ ID NO: 672154 - DNA, 19 bp, Mus musculus
  siRNA target sequence for F730023N20 (NM_183158.1,1052-1070).
ctgggagagccctcatcaa

SEQ ID NO: 672155 - DNA, 19 bp, Mus musculus
  siRNA target sequence for F730023N20 (NM_183158.1,1211-1229).
caggacctttcagtttcaa

SEQ ID NO: 672156 - DNA, 19 bp, Mus musculus
  siRNA target sequence for F730023N20 (NM_183158.1,1247-1265).
ggacctcgggctggaatat

SEQ ID NO: 672157 - DNA, 19 bp, Mus musculus
  siRNA target sequence for F730023N20 (NM_183158.1,1251-1269).
ctcgggctggaatatgtct

SEQ ID NO: 672158 - DNA, 19 bp, Mus musculus
  siRNA target sequence for F730023N20 (NM_183158.1,1253-1271).
cgggctggaatatgtcttt

SEQ ID NO: 672159 - DNA, 19 bp, Mus musculus
  siRNA target sequence for Ncf4 (NM_008677.1,346-364).
gtcatcgaggtcaaaacaa

SEQ ID NO: 672160 - DNA, 19 bp, Mus musculus
  siRNA target sequence for Ncf4 (NM_008677.1,348-366).
catcgaggtcaaaacaaaa

SEQ ID NO: 672161 - DNA, 19 bp, Mus musculus
  siRNA target sequence for Ncf4 (NM_008677.1,351-369).
cgaggtcaaaacaaaagga

SEQ ID NO: 672162 - DNA, 19 bp, Mus musculus
  siRNA target sequence for Ncf4 (NM_008677.1,367-385).
ggagggtccaagtatctca

SEQ ID NO: 672163 - DNA, 19 bp, Mus musculus
  siRNA target sequence for Ncf4 (NM_008677.1,368-386).
gagggtccaagtatctcat

SEQ ID NO: 672164 - DNA, 19 bp, Mus musculus
  siRNA target sequence for Ncf4 (NM_008677.1,371-389).
ggtccaagtatctcatcta

SEQ ID NO: 672165 - DNA, 19 bp, Mus musculus
  siRNA target sequence for Ncf4 (NM_008677.1,485-503).
cattgccagccaaagtcta

SEQ ID NO: 672166 - DNA, 19 bp, Mus musculus
  siRNA target sequence for Ncf4 (NM_008677.1,544-562).
gccctcaatgcctacatga

SEQ ID NO: 672167 - DNA, 19 bp, Mus musculus
  siRNA target sequence for Ncf4 (NM_008677.1,604-622).
gacgtcaggatcttcttct

SEQ ID NO: 672168 - DNA, 19 bp, Mus musculus
  siRNA target sequence for Ncf4 (NM_008677.1,606-624).
cgtcaggatcttcttctat

SEQ ID NO: 672169 - DNA, 19 bp, Mus musculus
  siRNA target sequence for Ncf4 (NM_008677.1,621-639).
ctatcagtctgcatacgat

SEQ ID NO: 672170 - DNA, 19 bp, Mus musculus
  siRNA target sequence for Ncf4 (NM_008677.1,674-692).
gaccgcgcacgcgcaaaat

SEQ ID NO: 672171 - DNA, 19 bp, Mus musculus
  siRNA target sequence for Ncf4 (NM_008677.1,676-694).
ccgcgcacgcgcaaaatca

SEQ ID NO: 672172 - DNA, 19 bp, Mus musculus
  siRNA target sequence for Ncf4 (NM_008677.1,677-695).
cgcgcacgcgcaaaatcaa

SEQ ID NO: 672173 - DNA, 19 bp, Mus musculus
  siRNA target sequence for Ncf4 (NM_008677.1,767-785).
ctgggaacagcaaattgga

SEQ ID NO: 672174 - DNA, 19 bp, Mus musculus
  siRNA target sequence for Ncf4 (NM_008677.1,887-905).
ccttcgtgaagatccttaa

SEQ ID NO: 672175 - DNA, 19 bp, Mus musculus
  siRNA target sequence for Ncf4 (NM_008677.1,938-956).
ggctacgatgctacttcta

SEQ ID NO: 672176 - DNA, 19 bp, Mus musculus
  siRNA target sequence for Ncf4 (NM_008677.1,944-962).
gatgctacttctatgaaga

SEQ ID NO: 672177 - DNA, 19 bp, Mus musculus
  siRNA target sequence for Ncf4 (NM_008677.1,1008-1026).
cagcacgcccctgttcaaa

SEQ ID NO: 672178 - DNA, 19 bp, Mus musculus
  siRNA target sequence for Ncf4 (NM_008677.1,1010-1028).
gcacgcccctgttcaaaga

SEQ ID NO: 672179 - DNA, 19 bp, Mus musculus
  siRNA target sequence for Ncf4 (NM_008677.1,1090-1108).
gctgagggggacttggtta

SEQ ID NO: 672180 - DNA, 19 bp, Mus musculus
  siRNA target sequence for Ptges (NM_022415.1,269-287).
cgacatggagacaatctat

SEQ ID NO: 672181 - DNA, 19 bp, Mus musculus
  siRNA target sequence for Ptges (NM_022415.1,300-318).
ctcggcttcgtgtactcat

SEQ ID NO: 672182 - DNA, 19 bp, Mus musculus
  siRNA target sequence for Osbp2 (NM_152818.1,365-383).
gactctacatctttcatca

SEQ ID NO: 672183 - DNA, 19 bp, Mus musculus
  siRNA target sequence for Osbp2 (NM_152818.1,451-469).
gacctcagcagataatgta

SEQ ID NO: 672184 - DNA, 19 bp, Mus musculus
  siRNA target sequence for Osbp2 (NM_152818.1,456-474).
cagcagataatgtattaga

SEQ ID NO: 672185 - DNA, 19 bp, Mus musculus
  siRNA target sequence for Osbp2 (NM_152818.1,481-499).
ctcattcatgcccaagaat

SEQ ID NO: 672186 - DNA, 19 bp, Mus musculus
  siRNA target sequence for Osbp2 (NM_152818.1,530-548).
cctgacaaacccaactata

SEQ ID NO: 672187 - DNA, 19 bp, Mus musculus
  siRNA target sequence for Osbp2 (NM_152818.1,540-558).
ccaactatagccttaacct

SEQ ID NO: 672188 - DNA, 19 bp, Mus musculus
  siRNA target sequence for Osbp2 (NM_152818.1,605-623).
cccatgccggtgaacttca

SEQ ID NO: 672189 - DNA, 19 bp, Mus musculus
  siRNA target sequence for Osbp2 (NM_152818.1,606-624).
ccatgccggtgaacttcaa

SEQ ID NO: 672190 - DNA, 19 bp, Mus musculus
  siRNA target sequence for Osbp2 (NM_152818.1,607-625).
catgccggtgaacttcaat

SEQ ID NO: 672191 - DNA, 19 bp, Mus musculus
  siRNA target sequence for Osbp2 (NM_152818.1,885-903).
cccaccacgtgttctctaa

SEQ ID NO: 672192 - DNA, 19 bp, Mus musculus
  siRNA target sequence for Osbp2 (NM_152818.1,954-972).
ggaaatacatctctatcat

SEQ ID NO: 672193 - DNA, 19 bp, Mus musculus
  siRNA target sequence for Osbp2 (NM_152818.1,980-998).
ggtgccatccacctagaat

SEQ ID NO: 672194 - DNA, 19 bp, Mus musculus
  siRNA target sequence for Osbp2 (NM_152818.1,981-999).
gtgccatccacctagaatt

SEQ ID NO: 672195 - DNA, 19 bp, Mus musculus
  siRNA target sequence for Osbp2 (NM_152818.1,1001-1019).
caggccagtggcaatcact

SEQ ID NO: 672196 - DNA, 19 bp, Mus musculus
  siRNA target sequence for Osbp2 (NM_152818.1,1038-1056).
cctccaccgtgcacaacat

SEQ ID NO: 672197 - DNA, 19 bp, Mus musculus
  siRNA target sequence for Osbp2 (NM_152818.1,1244-1262).
gaccagatggaatgttcta

SEQ ID NO: 672198 - DNA, 19 bp, Mus musculus
  siRNA target sequence for Osbpl11 (NM_176840.2,766-784).
gccggcatcggtgatgaaa

SEQ ID NO: 672199 - DNA, 19 bp, Mus musculus
  siRNA target sequence for Osbpl11 (NM_176840.2,768-786).
cggcatcggtgatgaaagt

SEQ ID NO: 672200 - DNA, 19 bp, Mus musculus
  siRNA target sequence for Osbpl11 (NM_176840.2,770-788).
gcatcggtgatgaaagtct

SEQ ID NO: 672201 - DNA, 19 bp, Mus musculus
  siRNA target sequence for Osbpl11 (NM_176840.2,824-842).
gcagtgaccccgaacaaga

SEQ ID NO: 672202 - DNA, 19 bp, Mus musculus
  siRNA target sequence for Osbpl11 (NM_176840.2,945-963).
gtgttaatggctatttaat

SEQ ID NO: 672203 - DNA, 19 bp, Mus musculus
  siRNA target sequence for Osbpl11 (NM_176840.2,947-965).
gttaatggctatttaatga

SEQ ID NO: 672204 - DNA, 19 bp, Mus musculus
  siRNA target sequence for Osbpl11 (NM_176840.2,1023-1041).
ctgggctgttggagtactt

SEQ ID NO: 672205 - DNA, 19 bp, Mus musculus
  siRNA target sequence for Osbpl11 (NM_176840.2,1028-1046).
ctgttggagtactttgtaa

SEQ ID NO: 672206 - DNA, 19 bp, Mus musculus
  siRNA target sequence for Osbpl11 (NM_176840.2,1030-1048).
gttggagtactttgtaaat

SEQ ID NO: 672207 - DNA, 19 bp, Mus musculus
  siRNA target sequence for Osbpl11 (NM_176840.2,1149-1167).
ccagcggggagcagtataa

SEQ ID NO: 672208 - DNA, 19 bp, Mus musculus
  siRNA target sequence for Osbpl11 (NM_176840.2,1150-1168).
cagcggggagcagtataaa

SEQ ID NO: 672209 - DNA, 19 bp, Mus musculus
  siRNA target sequence for Osbpl11 (NM_176840.2,1204-1222).
ggtgagcagacttcagata

SEQ ID NO: 672210 - DNA, 19 bp, Mus musculus
  siRNA target sequence for Osbpl11 (NM_176840.2,1205-1223).
gtgagcagacttcagatat

SEQ ID NO: 672211 - DNA, 19 bp, Mus musculus
  siRNA target sequence for Osbpl11 (NM_176840.2,1210-1228).
cagacttcagatatgtaca

SEQ ID NO: 672212 - DNA, 19 bp, Mus musculus
  siRNA target sequence for Osbpl11 (NM_176840.2,1231-1249).
gcaccacacggaagctatt

SEQ ID NO: 672213 - DNA, 19 bp, Mus musculus
  siRNA target sequence for Osbpl11 (NM_176840.2,1239-1257).
cggaagctattggaaagaa

SEQ ID NO: 672214 - DNA, 19 bp, Mus musculus
  siRNA target sequence for Osbpl11 (NM_176840.2,1240-1258).
ggaagctattggaaagaat

SEQ ID NO: 672215 - DNA, 19 bp, Mus musculus
  siRNA target sequence for Osbpl11 (NM_176840.2,1241-1259).
gaagctattggaaagaata

SEQ ID NO: 672216 - DNA, 19 bp, Mus musculus
  siRNA target sequence for Osbpl11 (NM_176840.2,1289-1307).
ctggcatctagtggtaatt

SEQ ID NO: 672217 - DNA, 19 bp, Mus musculus
  siRNA target sequence for Osbpl11 (NM_176840.2,1291-1309).
ggcatctagtggtaattct

SEQ ID NO: 672218 - DNA, 19 bp, Mus musculus
  siRNA target sequence for Osbpl11 (NM_176840.2,1452-1470).
gacaacaacgagacctaat

SEQ ID NO: 672219 - DNA, 19 bp, Mus musculus
  siRNA target sequence for Osbpl11 (NM_176840.2,1454-1472).
caacaacgagacctaatta

SEQ ID NO: 672220 - DNA, 19 bp, Mus musculus
  siRNA target sequence for Osbpl11 (NM_176840.2,1466-1484).
ctaattagacggatcgaat

SEQ ID NO: 672221 - DNA, 19 bp, Mus musculus
  siRNA target sequence for Osbpl11 (NM_176840.2,1520-1538).
caggacctcttgatgctta

SEQ ID NO: 672222 - DNA, 19 bp, Mus musculus
  siRNA target sequence for Osbpl11 (NM_176840.2,1522-1540).
ggacctcttgatgcttaaa

SEQ ID NO: 672223 - DNA, 19 bp, Mus musculus
  siRNA target sequence for Osbpl11 (NM_176840.2,1542-1560).
ctacttccatggcaactat

SEQ ID NO: 672224 - DNA, 19 bp, Mus musculus
  siRNA target sequence for Osbpl11 (NM_176840.2,1553-1571).
gcaactatgaactgcttaa

SEQ ID NO: 672225 - DNA, 19 bp, Mus musculus
  siRNA target sequence for Osbpl11 (NM_176840.2,1554-1572).
caactatgaactgcttaaa

SEQ ID NO: 672226 - DNA, 19 bp, Mus musculus
  siRNA target sequence for Osbpl11 (NM_176840.2,1630-1648).
ctcagggacaacaattgaa

SEQ ID NO: 672227 - DNA, 19 bp, Mus musculus
  siRNA target sequence for Osbpl11 (NM_176840.2,1655-1673).
gaaccaaagattcctttat

SEQ ID NO: 672228 - DNA, 19 bp, Mus musculus
  siRNA target sequence for Osbpl11 (NM_176840.2,1658-1676).
ccaaagattcctttatcaa

SEQ ID NO: 672229 - DNA, 19 bp, Mus musculus
  siRNA target sequence for Osbpl11 (NM_176840.2,1667-1685).
cctttatcaaaccactata

SEQ ID NO: 672230 - DNA, 19 bp, Mus musculus
  siRNA target sequence for Osbpl11 (NM_176840.2,1987-2005).
gcatccagacctgttcata

SEQ ID NO: 672231 - DNA, 19 bp, Mus musculus
  siRNA target sequence for Osbpl11 (NM_176840.2,2025-2043).
cgccagaggaccgaatgat

SEQ ID NO: 672232 - DNA, 19 bp, Mus musculus
  siRNA target sequence for Osbpl11 (NM_176840.2,2026-2044).
gccagaggaccgaatgatt

SEQ ID NO: 672233 - DNA, 19 bp, Mus musculus
  siRNA target sequence for Osbpl11 (NM_176840.2,2030-2048).
gaggaccgaatgattcgat

SEQ ID NO: 672234 - DNA, 19 bp, Mus musculus
  siRNA target sequence for Osbpl11 (NM_176840.2,2032-2050).
ggaccgaatgattcgattt

SEQ ID NO: 672235 - DNA, 19 bp, Mus musculus
  siRNA target sequence for Osbpl11 (NM_176840.2,2035-2053).
ccgaatgattcgatttgtt

SEQ ID NO: 672236 - DNA, 19 bp, Mus musculus
  siRNA target sequence for Osbpl11 (NM_176840.2,2056-2074).
gtactaccttacctcattt

SEQ ID NO: 672237 - DNA, 19 bp, Mus musculus
  siRNA target sequence for Osbpl11 (NM_176840.2,2107-2125).
gccgtacaaccctatcatt

SEQ ID NO: 672238 - DNA, 19 bp, Mus musculus
  siRNA target sequence for Osbpl11 (NM_176840.2,2117-2135).
cctatcattggagaaactt

SEQ ID NO: 672239 - DNA, 19 bp, Mus musculus
  siRNA target sequence for Osbpl11 (NM_176840.2,2263-2281).
ctacactgtcagattcgtt

SEQ ID NO: 672240 - DNA, 19 bp, Mus musculus
  siRNA target sequence for Osbpl11 (NM_176840.2,2336-2354).
gaaaggaagatgtgtgtaa

SEQ ID NO: 672241 - DNA, 19 bp, Mus musculus
  siRNA target sequence for Osbpl11 (NM_176840.2,2380-2398).
gttcttgggcatgtcaata

SEQ ID NO: 672242 - DNA, 19 bp, Mus musculus
  siRNA target sequence for Osbpl11 (NM_176840.2,2441-2459).
cacggagaggagtacacat

SEQ ID NO: 672243 - DNA, 19 bp, Mus musculus
  siRNA target sequence for Osbpl11 (NM_176840.2,2496-2514).
ctgtcccgtgggtagaact

SEQ ID NO: 672244 - DNA, 19 bp, Mus musculus
  siRNA target sequence for Osbpl11 (NM_176840.2,2558-2576).
gccagcatcacctttcata

SEQ ID NO: 672245 - DNA, 19 bp, Mus musculus
  siRNA target sequence for Osbpl11 (NM_176840.2,2560-2578).
cagcatcacctttcatact

SEQ ID NO: 672246 - DNA, 19 bp, Mus musculus
  siRNA target sequence for Osbpl11 (NM_176840.2,2562-2580).
gcatcacctttcatactaa

SEQ ID NO: 672247 - DNA, 19 bp, Mus musculus
  siRNA target sequence for Osbpl11 (NM_176840.2,2618-2636).
gaagtgaaatacaacctta

SEQ ID NO: 672248 - DNA, 19 bp, Mus musculus
  siRNA target sequence for Osbpl11 (NM_176840.2,2698-2716).
caacggagagaccaagttt

SEQ ID NO: 672249 - DNA, 19 bp, Mus musculus
  siRNA target sequence for Osbpl11 (NM_176840.2,2787-2805).
ccaggcgattatggaaaaa

SEQ ID NO: 672250 - DNA, 19 bp, Mus musculus
  siRNA target sequence for Osbpl11 (NM_176840.2,2788-2806).
caggcgattatggaaaaat

SEQ ID NO: 672251 - DNA, 19 bp, Mus musculus
  siRNA target sequence for Osbpl11 (NM_176840.2,2790-2808).
ggcgattatggaaaaatgt

SEQ ID NO: 672252 - DNA, 19 bp, Mus musculus
  siRNA target sequence for Osbpl11 (NM_176840.2,2791-2809).
gcgattatggaaaaatgta

SEQ ID NO: 672253 - DNA, 19 bp, Mus musculus
  siRNA target sequence for Osbpl11 (NM_176840.2,2823-2841).
gggaatctgaaattgacaa

SEQ ID NO: 672254 - DNA, 19 bp, Mus musculus
  siRNA target sequence for Osbpl11 (NM_176840.2,2843-2861).
gccacagagcacaaacgtt

SEQ ID NO: 672255 - DNA, 19 bp, Mus musculus
  siRNA target sequence for Osbpl11 (NM_176840.2,2888-2906).
gaaaggctgcggactgaaa

SEQ ID NO: 672256 - DNA, 19 bp, Mus musculus
  siRNA target sequence for Osbpl11 (NM_176840.2,2913-2931).
caccctggaaaaccaaata

SEQ ID NO: 672257 - DNA, 19 bp, Mus musculus
  siRNA target sequence for Osbpl11 (NM_176840.2,2946-2964).
gagatggctgggtgtatca

SEQ ID NO: 672258 - DNA, 19 bp, Mus musculus
  siRNA target sequence for Osbpl1a (NM_020573.1,899-917).
cacaatgccagtgatattt

SEQ ID NO: 672259 - DNA, 19 bp, Mus musculus
  siRNA target sequence for Osbpl1a (NM_020573.1,936-954).
ctgcagcggctaactgaat

SEQ ID NO: 672260 - DNA, 19 bp, Mus musculus
  siRNA target sequence for Osbpl1a (NM_020573.1,939-957).
cagcggctaactgaataca

SEQ ID NO: 672261 - DNA, 19 bp, Mus musculus
  siRNA target sequence for Osbpl1a (NM_020573.1,978-996).
cacaaagccagttcacttt

SEQ ID NO: 672262 - DNA, 19 bp, Mus musculus
  siRNA target sequence for Osbpl1a (NM_020573.1,988-1006).
gttcactttctgatcttgt

SEQ ID NO: 672263 - DNA, 19 bp, Mus musculus
  siRNA target sequence for Osbpl1a (NM_020573.1,1094-1112).
gggagagacttatgaatta

SEQ ID NO: 672264 - DNA, 19 bp, Mus musculus
  siRNA target sequence for Osbpl1a (NM_020573.1,1157-1175).
ccatcatcccccaatcagt

SEQ ID NO: 672265 - DNA, 19 bp, Mus musculus
  siRNA target sequence for Osbpl1a (NM_020573.1,1166-1184).
cccaatcagtgcattccat

SEQ ID NO: 672266 - DNA, 19 bp, Mus musculus
  siRNA target sequence for Osbpl1a (NM_020573.1,1186-1204).
cagaagggctcaacaatga

SEQ ID NO: 672267 - DNA, 19 bp, Mus musculus
  siRNA target sequence for Osbpl1a (NM_020573.1,1188-1206).
gaagggctcaacaatgact

SEQ ID NO: 672268 - DNA, 19 bp, Mus musculus
  siRNA target sequence for Osbpl1a (NM_020573.1,1330-1348).
ccacctgttgtgtgcataa

SEQ ID NO: 672269 - DNA, 19 bp, Mus musculus
  siRNA target sequence for Osbpl1a (NM_020573.1,1333-1351).
cctgttgtgtgcataacat

SEQ ID NO: 672270 - DNA, 19 bp, Mus musculus
  siRNA target sequence for Osbpl1a (NM_020573.1,1336-1354).
gttgtgtgcataacatcat

SEQ ID NO: 672271 - DNA, 19 bp, Mus musculus
  siRNA target sequence for Osbpl1a (NM_020573.1,1383-1401).
ggcaacgtggaaatcataa

SEQ ID NO: 672272 - DNA, 19 bp, Mus musculus
  siRNA target sequence for Osbpl1a (NM_020573.1,1384-1402).
gcaacgtggaaatcataaa

SEQ ID NO: 672273 - DNA, 19 bp, Mus musculus
  siRNA target sequence for Osbpl1a (NM_020573.1,1457-1475).
caaggaattacacaaagtt

SEQ ID NO: 672274 - DNA, 19 bp, Mus musculus
  siRNA target sequence for Osbpl1a (NM_020573.1,1476-1494).
gaaggctacatacaagata

SEQ ID NO: 672275 - DNA, 19 bp, Mus musculus
  siRNA target sequence for Osbpl1a (NM_020573.1,1572-1590).
gcttacaaaaaaaatgata

SEQ ID NO: 672276 - DNA, 19 bp, Mus musculus
  siRNA target sequence for Osbpl1a (NM_020573.1,1669-1687).
ccgagagcgtattcattat

SEQ ID NO: 672277 - DNA, 19 bp, Mus musculus
  siRNA target sequence for Osbpl1a (NM_020573.1,1853-1871).
gaacggagagatagatcta

SEQ ID NO: 672278 - DNA, 19 bp, Mus musculus
  siRNA target sequence for Osbpl1a (NM_020573.1,1862-1880).
gatagatctagctagtgaa

SEQ ID NO: 672279 - DNA, 19 bp, Mus musculus
  siRNA target sequence for Osbpl1a (NM_020573.1,1989-2007).
ggagcacaggactggattt

SEQ ID NO: 672280 - DNA, 19 bp, Mus musculus
  siRNA target sequence for Osbpl1a (NM_020573.1,2017-2035).
gctactgggacagaaacta

SEQ ID NO: 672281 - DNA, 19 bp, Mus musculus
  siRNA target sequence for Osbpl1a (NM_020573.1,2025-2043).
gacagaaactacttcaatt

SEQ ID NO: 672282 - DNA, 19 bp, Mus musculus
  siRNA target sequence for Osbpl2 (NM_144500.1,214-232).
cggggaggaagaattcttt

SEQ ID NO: 672283 - DNA, 19 bp, Mus musculus
  siRNA target sequence for Osbpl2 (NM_144500.1,236-254).
gccgttacaggctttgatt

SEQ ID NO: 672284 - DNA, 19 bp, Mus musculus
  siRNA target sequence for Osbpl2 (NM_144500.1,238-256).
cgttacaggctttgattct

SEQ ID NO: 672285 - DNA, 19 bp, Mus musculus
  siRNA target sequence for Osbpl2 (NM_144500.1,316-334).
ggataccagcaaaagtact

SEQ ID NO: 672286 - DNA, 19 bp, Mus musculus
  siRNA target sequence for Osbpl2 (NM_144500.1,317-335).
gataccagcaaaagtacta

SEQ ID NO: 672287 - DNA, 19 bp, Mus musculus
  siRNA target sequence for Osbpl2 (NM_144500.1,330-348).
gtactaggagtgggaaaaa

SEQ ID NO: 672288 - DNA, 19 bp, Mus musculus
  siRNA target sequence for Osbpl2 (NM_144500.1,436-454).
gtggagtatcctgaagaaa

SEQ ID NO: 672289 - DNA, 19 bp, Mus musculus
  siRNA target sequence for Osbpl2 (NM_144500.1,680-698).
gagacatatgagttgatca

SEQ ID NO: 672290 - DNA, 19 bp, Mus musculus
  siRNA target sequence for Osbpl2 (NM_144500.1,691-709).
gttgatcagggaagactta

SEQ ID NO: 672291 - DNA, 19 bp, Mus musculus
  siRNA target sequence for Osbpl2 (NM_144500.1,704-722).
gacttagggttcagattta

SEQ ID NO: 672292 - DNA, 19 bp, Mus musculus
  siRNA target sequence for Osbpl2 (NM_144500.1,711-729).
ggttcagatttatatctga

SEQ ID NO: 672293 - DNA, 19 bp, Mus musculus
  siRNA target sequence for Osbpl2 (NM_144500.1,746-764).
cctcctattagcgcatttt

SEQ ID NO: 672294 - DNA, 19 bp, Mus musculus
  siRNA target sequence for Osbpl2 (NM_144500.1,747-765).
ctcctattagcgcatttta

SEQ ID NO: 672295 - DNA, 19 bp, Mus musculus
  siRNA target sequence for Osbpl2 (NM_144500.1,749-767).
cctattagcgcattttatt

SEQ ID NO: 672296 - DNA, 19 bp, Mus musculus
  siRNA target sequence for Osbpl2 (NM_144500.1,871-889).
ggagctgctcaaacataat

SEQ ID NO: 672297 - DNA, 19 bp, Mus musculus
  siRNA target sequence for Osbpl2 (NM_144500.1,937-955).
ccttgggcagctatggata

SEQ ID NO: 672298 - DNA, 19 bp, Mus musculus
  siRNA target sequence for Osbpl2 (NM_144500.1,996-1014).
gagataagtgtatacttca

SEQ ID NO: 672299 - DNA, 19 bp, Mus musculus
  siRNA target sequence for Osbpl2 (NM_144500.1,1018-1036).
caagccttgtggattgttt

SEQ ID NO: 672300 - DNA, 19 bp, Mus musculus
  siRNA target sequence for Osbpl2 (NM_144500.1,1051-1069).
cagagtagaagggtacatt

SEQ ID NO: 672301 - DNA, 19 bp, Mus musculus
  siRNA target sequence for Osbpl2 (NM_144500.1,1120-1138).
gtgcttgtggggaatagat

SEQ ID NO: 672302 - DNA, 19 bp, Mus musculus
  siRNA target sequence for Osbpl2 (NM_144500.1,1142-1160).
gcttcatacgagtccttta

SEQ ID NO: 672303 - DNA, 19 bp, Mus musculus
  siRNA target sequence for Osbpl2 (NM_144500.1,1143-1161).
cttcatacgagtcctttaa

SEQ ID NO: 672304 - DNA, 19 bp, Mus musculus
  siRNA target sequence for Osbpl2 (NM_144500.1,1146-1164).
catacgagtcctttaagaa

SEQ ID NO: 672305 - DNA, 19 bp, Mus musculus
  siRNA target sequence for Osbpl2 (NM_144500.1,1426-1444).
ccgcctccgtcctgacata

SEQ ID NO: 672306 - DNA, 19 bp, Mus musculus
  siRNA target sequence for Osbpl2 (NM_144500.1,1563-1581).
ggttctctccaggcaataa

SEQ ID NO: 672307 - DNA, 19 bp, Mus musculus
  siRNA target sequence for Osbpl3 (NM_027881.1,343-361).
gccagtgcagaaaggattt

SEQ ID NO: 672308 - DNA, 19 bp, Mus musculus
  siRNA target sequence for Osbpl3 (NM_027881.1,514-532).
gaagaagtcgtctaagtgt

SEQ ID NO: 672309 - DNA, 19 bp, Mus musculus
  siRNA target sequence for Osbpl3 (NM_027881.1,624-642).
gaatgtaccggcagaatga

SEQ ID NO: 672310 - DNA, 19 bp, Mus musculus
  siRNA target sequence for Osbpl3 (NM_027881.1,637-655).
gaatgagatcgccatgttt

SEQ ID NO: 672311 - DNA, 19 bp, Mus musculus
  siRNA target sequence for Osbpl3 (NM_027881.1,659-677).
cgggatgtcaatcactttt

SEQ ID NO: 672312 - DNA, 19 bp, Mus musculus
  siRNA target sequence for Osbpl3 (NM_027881.1,660-678).
gggatgtcaatcacttttt

SEQ ID NO: 672313 - DNA, 19 bp, Mus musculus
  siRNA target sequence for Osbpl3 (NM_027881.1,683-701).
gggtcctctgtcacagatt

SEQ ID NO: 672314 - DNA, 19 bp, Mus musculus
  siRNA target sequence for Osbpl3 (NM_027881.1,685-703).
gtcctctgtcacagattct

SEQ ID NO: 672315 - DNA, 19 bp, Mus musculus
  siRNA target sequence for Osbpl3 (NM_027881.1,710-728).
ggagtgttcgagtcagttt

SEQ ID NO: 672316 - DNA, 19 bp, Mus musculus
  siRNA target sequence for Osbpl3 (NM_027881.1,736-754).
gaagcgtagcagtctatca

SEQ ID NO: 672317 - DNA, 19 bp, Mus musculus
  siRNA target sequence for Osbpl3 (NM_027881.1,770-788).
ccacccggaagcaatttgt

SEQ ID NO: 672318 - DNA, 19 bp, Mus musculus
  siRNA target sequence for Osbpl3 (NM_027881.1,775-793).
cggaagcaatttgtcattt

SEQ ID NO: 672319 - DNA, 19 bp, Mus musculus
  siRNA target sequence for Osbpl3 (NM_027881.1,804-822).
gcgacactcgagttccttt

SEQ ID NO: 672320 - DNA, 19 bp, Mus musculus
  siRNA target sequence for Osbpl3 (NM_027881.1,881-899).
gcctacctgctggaaatga

SEQ ID NO: 672321 - DNA, 19 bp, Mus musculus
  siRNA target sequence for Osbpl3 (NM_027881.1,1107-1125).
gccatgtcgcccacaaagt

SEQ ID NO: 672322 - DNA, 19 bp, Mus musculus
  siRNA target sequence for Osbpl3 (NM_027881.1,1108-1126).
ccatgtcgcccacaaagtt

SEQ ID NO: 672323 - DNA, 19 bp, Mus musculus
  siRNA target sequence for Osbpl3 (NM_027881.1,1109-1127).
catgtcgcccacaaagttt

SEQ ID NO: 672324 - DNA, 19 bp, Mus musculus
  siRNA target sequence for Osbpl3 (NM_027881.1,1112-1130).
gtcgcccacaaagtttact

SEQ ID NO: 672325 - DNA, 19 bp, Mus musculus
  siRNA target sequence for Osbpl3 (NM_027881.1,1134-1152).
ctttaaggtcggctttcaa

SEQ ID NO: 672326 - DNA, 19 bp, Mus musculus
  siRNA target sequence for Osbpl3 (NM_027881.1,1140-1158).
ggtcggctttcaatagcat

SEQ ID NO: 672327 - DNA, 19 bp, Mus musculus
  siRNA target sequence for Osbpl3 (NM_027881.1,1141-1159).
gtcggctttcaatagcata

SEQ ID NO: 672328 - DNA, 19 bp, Mus musculus
  siRNA target sequence for Osbpl3 (NM_027881.1,1251-1269).
catccgccctagcacaaaa

SEQ ID NO: 672329 - DNA, 19 bp, Mus musculus
  siRNA target sequence for Osbpl3 (NM_027881.1,1255-1273).
cgccctagcacaaaacaca

SEQ ID NO: 672330 - DNA, 19 bp, Mus musculus
  siRNA target sequence for Osbpl3 (NM_027881.1,1296-1314).
gaatccatgcggaatctct

SEQ ID NO: 672331 - DNA, 19 bp, Mus musculus
  siRNA target sequence for Osbpl3 (NM_027881.1,1535-1553).
gataatctgtccttagaca

SEQ ID NO: 672332 - DNA, 19 bp, Mus musculus
  siRNA target sequence for Osbpl3 (NM_027881.1,1546-1564).
cttagacaacctcagtaat

SEQ ID NO: 672333 - DNA, 19 bp, Mus musculus
  siRNA target sequence for Osbpl3 (NM_027881.1,1550-1568).
gacaacctcagtaatgatt

SEQ ID NO: 672334 - DNA, 19 bp, Mus musculus
  siRNA target sequence for Osbpl3 (NM_027881.1,1552-1570).
caacctcagtaatgattta

SEQ ID NO: 672335 - DNA, 19 bp, Mus musculus
  siRNA target sequence for Osbpl3 (NM_027881.1,1556-1574).
ctcagtaatgatttagaca

SEQ ID NO: 672336 - DNA, 19 bp, Mus musculus
  siRNA target sequence for Osbpl3 (NM_027881.1,1686-1704).
gcatcctgcgcaacaacat

SEQ ID NO: 672337 - DNA, 19 bp, Mus musculus
  siRNA target sequence for Osbpl3 (NM_027881.1,1861-1879).
cgccatctccgcatatgca

SEQ ID NO: 672338 - DNA, 19 bp, Mus musculus
  siRNA target sequence for Osbpl3 (NM_027881.1,1862-1880).
gccatctccgcatatgcat

SEQ ID NO: 672339 - DNA, 19 bp, Mus musculus
  siRNA target sequence for Osbpl3 (NM_027881.1,1917-1935).
cggtccttggagaaacgta

SEQ ID NO: 672340 - DNA, 19 bp, Mus musculus
  siRNA target sequence for Osbpl3 (NM_027881.1,2014-2032).
cgctgagtccggaaacttt

SEQ ID NO: 672341 - DNA, 19 bp, Mus musculus
  siRNA target sequence for Osbpl3 (NM_027881.1,2016-2034).
ctgagtccggaaactttgt

SEQ ID NO: 672342 - DNA, 19 bp, Mus musculus
  siRNA target sequence for Osbpl3 (NM_027881.1,2121-2139).
ctgcttttggagatcactt

SEQ ID NO: 672343 - DNA, 19 bp, Mus musculus
  siRNA target sequence for Osbpl3 (NM_027881.1,2160-2178).
cctgcatccacaacatctt

SEQ ID NO: 672344 - DNA, 19 bp, Mus musculus
  siRNA target sequence for Osbpl3 (NM_027881.1,2197-2215).
cgagcactatggcgaaatt

SEQ ID NO: 672345 - DNA, 19 bp, Mus musculus
  siRNA target sequence for Osbpl3 (NM_027881.1,2201-2219).
cactatggcgaaattgaca

SEQ ID NO: 672346 - DNA, 19 bp, Mus musculus
  siRNA target sequence for Osbpl3 (NM_027881.1,2207-2225).
ggcgaaattgacatcaaga

SEQ ID NO: 672347 - DNA, 19 bp, Mus musculus
  siRNA target sequence for Osbpl3 (NM_027881.1,2208-2226).
gcgaaattgacatcaagaa

SEQ ID NO: 672348 - DNA, 19 bp, Mus musculus
  siRNA target sequence for Osbpl3 (NM_027881.1,2456-2474).
cagtttgcactagagttaa

SEQ ID NO: 672349 - DNA, 19 bp, Mus musculus
  siRNA target sequence for Osbpl3 (NM_027881.1,2487-2505).
ctttgtcaaggtctttatt

SEQ ID NO: 672350 - DNA, 19 bp, Mus musculus
  siRNA target sequence for Osbpl3 (NM_027881.1,2512-2530).
caccgacactcggtttaga

SEQ ID NO: 672351 - DNA, 19 bp, Mus musculus
  siRNA target sequence for Osbpl3 (NM_027881.1,2522-2540).
cggtttagaccagatcaaa

SEQ ID NO: 672352 - DNA, 19 bp, Mus musculus
  siRNA target sequence for Osbpl3 (NM_027881.1,2677-2695).
cgatgcttgggtaagcaat

SEQ ID NO: 672353 - DNA, 19 bp, Mus musculus
  siRNA target sequence for Osbpl3 (NM_027881.1,2741-2759).
gaccatcccgtcttatggt

SEQ ID NO: 672354 - DNA, 19 bp, Mus musculus
  siRNA target sequence for Osbpl6 (NM_145525.1,383-401).
gcacaactgggcagagtaa

SEQ ID NO: 672355 - DNA, 19 bp, Mus musculus
  siRNA target sequence for Osbpl6 (NM_145525.1,384-402).
cacaactgggcagagtaaa

SEQ ID NO: 672356 - DNA, 19 bp, Mus musculus
  siRNA target sequence for Osbpl6 (NM_145525.1,556-574).
gctaactgtgtagatattt

SEQ ID NO: 672357 - DNA, 19 bp, Mus musculus
  siRNA target sequence for Osbpl6 (NM_145525.1,761-779).
gttccacggattataccaa

SEQ ID NO: 672358 - DNA, 19 bp, Mus musculus
  siRNA target sequence for Osbpl6 (NM_145525.1,777-795).
caagctacaagaagaattt

SEQ ID NO: 672359 - DNA, 19 bp, Mus musculus
  siRNA target sequence for Osbpl6 (NM_145525.1,836-854).
catttaacagcatagctat

SEQ ID NO: 672360 - DNA, 19 bp, Mus musculus
  siRNA target sequence for Osbpl6 (NM_145525.1,973-991).
cggagtcggctgaacagaa

SEQ ID NO: 672361 - DNA, 19 bp, Mus musculus
  siRNA target sequence for Osbpl6 (NM_145525.1,974-992).
ggagtcggctgaacagaat

SEQ ID NO: 672362 - DNA, 19 bp, Mus musculus
  siRNA target sequence for Osbpl6 (NM_145525.1,975-993).
gagtcggctgaacagaata

SEQ ID NO: 672363 - DNA, 19 bp, Mus musculus
  siRNA target sequence for Osbpl6 (NM_145525.1,977-995).
gtcggctgaacagaataca

SEQ ID NO: 672364 - DNA, 19 bp, Mus musculus
  siRNA target sequence for Osbpl6 (NM_145525.1,979-997).
cggctgaacagaatacact

SEQ ID NO: 672365 - DNA, 19 bp, Mus musculus
  siRNA target sequence for Osbpl6 (NM_145525.1,994-1012).
cactcagagtctaccattt

SEQ ID NO: 672366 - DNA, 19 bp, Mus musculus
  siRNA target sequence for Osbpl6 (NM_145525.1,996-1014).
ctcagagtctaccatttgt

SEQ ID NO: 672367 - DNA, 19 bp, Mus musculus
  siRNA target sequence for Osbpl6 (NM_145525.1,1015-1033).
gatcacgttgtcagtgtaa

SEQ ID NO: 672368 - DNA, 19 bp, Mus musculus
  siRNA target sequence for Osbpl6 (NM_145525.1,1018-1036).
cacgttgtcagtgtaaata

SEQ ID NO: 672369 - DNA, 19 bp, Mus musculus
  siRNA target sequence for Osbpl6 (NM_145525.1,1020-1038).
cgttgtcagtgtaaatatt

SEQ ID NO: 672370 - DNA, 19 bp, Mus musculus
  siRNA target sequence for Osbpl6 (NM_145525.1,1114-1132).
cgcctctccatgtcagaat

SEQ ID NO: 672371 - DNA, 19 bp, Mus musculus
  siRNA target sequence for Osbpl6 (NM_145525.1,1127-1145).
cagaatccgtgtcagaatt

SEQ ID NO: 672372 - DNA, 19 bp, Mus musculus
  siRNA target sequence for Osbpl6 (NM_145525.1,1129-1147).
gaatccgtgtcagaattct

SEQ ID NO: 672373 - DNA, 19 bp, Mus musculus
  siRNA target sequence for Osbpl6 (NM_145525.1,1221-1239).
cgacgtgagtgacaacata

SEQ ID NO: 672374 - DNA, 19 bp, Mus musculus
  siRNA target sequence for Osbpl6 (NM_145525.1,1253-1271).
ccagtgtcgccgacaacat

SEQ ID NO: 672375 - DNA, 19 bp, Mus musculus
  siRNA target sequence for Osbpl6 (NM_145525.1,1254-1272).
cagtgtcgccgacaacatt

SEQ ID NO: 672376 - DNA, 19 bp, Mus musculus
  siRNA target sequence for Osbpl6 (NM_145525.1,1350-1368).
cccggacaccagtaacatt

SEQ ID NO: 672377 - DNA, 19 bp, Mus musculus
  siRNA target sequence for Osbpl6 (NM_145525.1,1351-1369).
ccggacaccagtaacatta

SEQ ID NO: 672378 - DNA, 19 bp, Mus musculus
  siRNA target sequence for Osbpl6 (NM_145525.1,1621-1639).
gagacctatgaatgcataa

SEQ ID NO: 672379 - DNA, 19 bp, Mus musculus
  siRNA target sequence for Osbpl6 (NM_145525.1,1623-1641).
gacctatgaatgcataaga

SEQ ID NO: 672380 - DNA, 19 bp, Mus musculus
  siRNA target sequence for Osbpl6 (NM_145525.1,1625-1643).
cctatgaatgcataagaga

SEQ ID NO: 672381 - DNA, 19 bp, Mus musculus
  siRNA target sequence for Osbpl6 (NM_145525.1,1705-1723).
cactgtgaatccaagaatt

SEQ ID NO: 672382 - DNA, 19 bp, Mus musculus
  siRNA target sequence for Osbpl6 (NM_145525.1,1709-1727).
gtgaatccaagaattttgt

SEQ ID NO: 672383 - DNA, 19 bp, Mus musculus
  siRNA target sequence for Osbpl6 (NM_145525.1,1800-1818).
gaacgtcacgcttccaaaa

SEQ ID NO: 672384 - DNA, 19 bp, Mus musculus
  siRNA target sequence for Osbpl6 (NM_145525.1,1803-1821).
cgtcacgcttccaaaatat

SEQ ID NO: 672385 - DNA, 19 bp, Mus musculus
  siRNA target sequence for Osbpl6 (NM_145525.1,1825-1843).
gattactatgtgtggaata

SEQ ID NO: 672386 - DNA, 19 bp, Mus musculus
  siRNA target sequence for Osbpl6 (NM_145525.1,1850-1868).
ccacgtgcatacacaatat

SEQ ID NO: 672387 - DNA, 19 bp, Mus musculus
  siRNA target sequence for Osbpl6 (NM_145525.1,1900-1918).
ggtgaagtgacccttagaa

SEQ ID NO: 672388 - DNA, 19 bp, Mus musculus
  siRNA target sequence for Osbpl6 (NM_145525.1,1901-1919).
gtgaagtgacccttagaaa

SEQ ID NO: 672389 - DNA, 19 bp, Mus musculus
  siRNA target sequence for Osbpl6 (NM_145525.1,1906-1924).
gtgacccttagaaatacca

SEQ ID NO: 672390 - DNA, 19 bp, Mus musculus
  siRNA target sequence for Osbpl6 (NM_145525.1,1908-1926).
gacccttagaaataccaaa

SEQ ID NO: 672391 - DNA, 19 bp, Mus musculus
  siRNA target sequence for Osbpl6 (NM_145525.1,1912-1930).
cttagaaataccaaaagca

SEQ ID NO: 672392 - DNA, 19 bp, Mus musculus
  siRNA target sequence for Osbpl6 (NM_145525.1,1952-1970).
cgtttgtcaaggtgaatta

SEQ ID NO: 672393 - DNA, 19 bp, Mus musculus
  siRNA target sequence for Osbpl6 (NM_145525.1,1973-1991).
ggaactccaacgtgaatga

SEQ ID NO: 672394 - DNA, 19 bp, Mus musculus
  siRNA target sequence for Osbpl6 (NM_145525.1,1974-1992).
gaactccaacgtgaatgaa

SEQ ID NO: 672395 - DNA, 19 bp, Mus musculus
  siRNA target sequence for Osbpl6 (NM_145525.1,2111-2129).
ctctgccaaccaactatga

SEQ ID NO: 672396 - DNA, 19 bp, Mus musculus
  siRNA target sequence for Osbpl6 (NM_145525.1,2120-2138).
ccaactatgagctctacta

SEQ ID NO: 672397 - DNA, 19 bp, Mus musculus
  siRNA target sequence for Osbpl6 (NM_145525.1,2136-2154).
ctatggctttacaagattt

SEQ ID NO: 672398 - DNA, 19 bp, Mus musculus
  siRNA target sequence for Osbpl6 (NM_145525.1,2214-2232).
ccgattccggccagatcaa

SEQ ID NO: 672399 - DNA, 19 bp, Mus musculus
  siRNA target sequence for Osbpl6 (NM_145525.1,2215-2233).
cgattccggccagatcaaa

SEQ ID NO: 672400 - DNA, 19 bp, Mus musculus
  siRNA target sequence for Osbpl6 (NM_145525.1,2221-2239).
cggccagatcaaaggtttt

SEQ ID NO: 672401 - DNA, 19 bp, Mus musculus
  siRNA target sequence for Osbpl6 (NM_145525.1,2222-2240).
ggccagatcaaaggttttt

SEQ ID NO: 672402 - DNA, 19 bp, Mus musculus
  siRNA target sequence for Osbpl6 (NM_145525.1,2262-2280).
cgcagccgcagagaaacaa

SEQ ID NO: 672403 - DNA, 19 bp, Mus musculus
  siRNA target sequence for Osbpl6 (NM_145525.1,2267-2285).
ccgcagagaaacaaagagt

SEQ ID NO: 672404 - DNA, 19 bp, Mus musculus
  siRNA target sequence for Osbpl6 (NM_145525.1,2268-2286).
cgcagagaaacaaagagtt

SEQ ID NO: 672405 - DNA, 19 bp, Mus musculus
  siRNA target sequence for Osbpl6 (NM_145525.1,2311-2329).
cgctacatggaggaaaaca

SEQ ID NO: 672406 - DNA, 19 bp, Mus musculus
  siRNA target sequence for Osbpl6 (NM_145525.1,2328-2346).
caaccttgaacatatacca

SEQ ID NO: 672407 - DNA, 19 bp, Mus musculus
  siRNA target sequence for Osbpl6 (NM_145525.1,2386-2404).
ctgtggttagaccaaagat

SEQ ID NO: 672408 - DNA, 19 bp, Mus musculus
  siRNA target sequence for Osbpl9 (NM_133885.1,491-509).
cagtcccagagttctctta

SEQ ID NO: 672409 - DNA, 19 bp, Mus musculus
  siRNA target sequence for Osbpl9 (NM_133885.1,493-511).
gtcccagagttctcttact

SEQ ID NO: 672410 - DNA, 19 bp, Mus musculus
  siRNA target sequence for Osbpl9 (NM_133885.1,516-534).
cagtgaagatgagttctat

SEQ ID NO: 672411 - DNA, 19 bp, Mus musculus
  siRNA target sequence for Osbpl9 (NM_133885.1,563-581).
cgtccccaaagcgcttaat

SEQ ID NO: 672412 - DNA, 19 bp, Mus musculus
  siRNA target sequence for Osbpl9 (NM_133885.1,564-582).
gtccccaaagcgcttaata

SEQ ID NO: 672413 - DNA, 19 bp, Mus musculus
  siRNA target sequence for Osbpl9 (NM_133885.1,567-585).
cccaaagcgcttaatagat

SEQ ID NO: 672414 - DNA, 19 bp, Mus musculus
  siRNA target sequence for Osbpl9 (NM_133885.1,568-586).
ccaaagcgcttaatagatt

SEQ ID NO: 672415 - DNA, 19 bp, Mus musculus
  siRNA target sequence for Osbpl9 (NM_133885.1,573-591).
gcgcttaatagattcttct

SEQ ID NO: 672416 - DNA, 19 bp, Mus musculus
  siRNA target sequence for Osbpl9 (NM_133885.1,617-635).
gcagctccggaaatagctt

SEQ ID NO: 672417 - DNA, 19 bp, Mus musculus
  siRNA target sequence for Osbpl9 (NM_133885.1,620-638).
gctccggaaatagcttaaa

SEQ ID NO: 672418 - DNA, 19 bp, Mus musculus
  siRNA target sequence for Osbpl9 (NM_133885.1,621-639).
ctccggaaatagcttaaaa

SEQ ID NO: 672419 - DNA, 19 bp, Mus musculus
  siRNA target sequence for Osbpl9 (NM_133885.1,684-702).
cacaagcgatgctgatctt

SEQ ID NO: 672420 - DNA, 19 bp, Mus musculus
  siRNA target sequence for Osbpl9 (NM_133885.1,689-707).
gcgatgctgatctttttga

SEQ ID NO: 672421 - DNA, 19 bp, Mus musculus
  siRNA target sequence for Osbpl9 (NM_133885.1,754-772).
gagcacaagagcgttatca

SEQ ID NO: 672422 - DNA, 19 bp, Mus musculus
  siRNA target sequence for Osbpl9 (NM_133885.1,766-784).
gttatcatgcacctcttat

SEQ ID NO: 672423 - DNA, 19 bp, Mus musculus
  siRNA target sequence for Osbpl9 (NM_133885.1,771-789).
catgcacctcttatcacaa

SEQ ID NO: 672424 - DNA, 19 bp, Mus musculus
  siRNA target sequence for Osbpl9 (NM_133885.1,801-819).
gatggacctcacaaaggta

SEQ ID NO: 672425 - DNA, 19 bp, Mus musculus
  siRNA target sequence for Osbpl9 (NM_133885.1,807-825).
cctcacaaaggtagttctt

SEQ ID NO: 672426 - DNA, 19 bp, Mus musculus
  siRNA target sequence for Osbpl9 (NM_133885.1,816-834).
ggtagttcttccaacgttt

SEQ ID NO: 672427 - DNA, 19 bp, Mus musculus
  siRNA target sequence for Osbpl9 (NM_133885.1,817-835).
gtagttcttccaacgttta

SEQ ID NO: 672428 - DNA, 19 bp, Mus musculus
  siRNA target sequence for Osbpl9 (NM_133885.1,840-858).
cgagagaagatctctgtta

SEQ ID NO: 672429 - DNA, 19 bp, Mus musculus
  siRNA target sequence for Osbpl9 (NM_133885.1,845-863).
gaagatctctgttagaaat

SEQ ID NO: 672430 - DNA, 19 bp, Mus musculus
  siRNA target sequence for Osbpl9 (NM_133885.1,889-907).
gacctgttcgtgagcatta

SEQ ID NO: 672431 - DNA, 19 bp, Mus musculus
  siRNA target sequence for Osbpl9 (NM_133885.1,891-909).
cctgttcgtgagcattagt

SEQ ID NO: 672432 - DNA, 19 bp, Mus musculus
  siRNA target sequence for Osbpl9 (NM_133885.1,894-912).
gttcgtgagcattagtgat

SEQ ID NO: 672433 - DNA, 19 bp, Mus musculus
  siRNA target sequence for Osbpl9 (NM_133885.1,932-950).
gaatggttcaggttgtgaa

SEQ ID NO: 672434 - DNA, 19 bp, Mus musculus
  siRNA target sequence for Osbpl9 (NM_133885.1,937-955).
gttcaggttgtgaaatggt

SEQ ID NO: 672435 - DNA, 19 bp, Mus musculus
  siRNA target sequence for Osbpl9 (NM_133885.1,1041-1059).
ctggacgttgccgaatgat

SEQ ID NO: 672436 - DNA, 19 bp, Mus musculus
  siRNA target sequence for Osbpl9 (NM_133885.1,1044-1062).
gacgttgccgaatgatact

SEQ ID NO: 672437 - DNA, 19 bp, Mus musculus
  siRNA target sequence for Osbpl9 (NM_133885.1,1046-1064).
cgttgccgaatgatactga

SEQ ID NO: 672438 - DNA, 19 bp, Mus musculus
  siRNA target sequence for Osbpl9 (NM_133885.1,1047-1065).
gttgccgaatgatactgaa

SEQ ID NO: 672439 - DNA, 19 bp, Mus musculus
  siRNA target sequence for Osbpl9 (NM_133885.1,1052-1070).
cgaatgatactgaagagaa

SEQ ID NO: 672440 - DNA, 19 bp, Mus musculus
  siRNA target sequence for Osbpl9 (NM_133885.1,1071-1089).
cgcagagctcgtttcagaa

SEQ ID NO: 672441 - DNA, 19 bp, Mus musculus
  siRNA target sequence for Osbpl9 (NM_133885.1,1105-1123).
gtttctaagaacagtgtaa

SEQ ID NO: 672442 - DNA, 19 bp, Mus musculus
  siRNA target sequence for Osbpl9 (NM_133885.1,1109-1127).
ctaagaacagtgtaacatt

SEQ ID NO: 672443 - DNA, 19 bp, Mus musculus
  siRNA target sequence for Osbpl9 (NM_133885.1,1146-1164).
ccaccatccgcccatttca

SEQ ID NO: 672444 - DNA, 19 bp, Mus musculus
  siRNA target sequence for Osbpl9 (NM_133885.1,1155-1173).
gcccatttcagccttttat

SEQ ID NO: 672445 - DNA, 19 bp, Mus musculus
  siRNA target sequence for Osbpl9 (NM_133885.1,1198-1216).
caattcaatgctcatatct

SEQ ID NO: 672446 - DNA, 19 bp, Mus musculus
  siRNA target sequence for Osbpl9 (NM_133885.1,1217-1235).
ggactaaatcaaaattcct

SEQ ID NO: 672447 - DNA, 19 bp, Mus musculus
  siRNA target sequence for Osbpl9 (NM_133885.1,1218-1236).
gactaaatcaaaattcctt

SEQ ID NO: 672448 - DNA, 19 bp, Mus musculus
  siRNA target sequence for Osbpl9 (NM_133885.1,1366-1384).
ggaggagaatgcaatatca

SEQ ID NO: 672449 - DNA, 19 bp, Mus musculus
  siRNA target sequence for Osbpl9 (NM_133885.1,1369-1387).
ggagaatgcaatatcaact

SEQ ID NO: 672450 - DNA, 19 bp, Mus musculus
  siRNA target sequence for Osbpl9 (NM_133885.1,1422-1440).
ccacactaagcctttctat

SEQ ID NO: 672451 - DNA, 19 bp, Mus musculus
  siRNA target sequence for Osbpl9 (NM_133885.1,1457-1475).
gaattactgcagagatttt

SEQ ID NO: 672452 - DNA, 19 bp, Mus musculus
  siRNA target sequence for Osbpl9 (NM_133885.1,1480-1498).
ccgaatgacaagaaatcct

SEQ ID NO: 672453 - DNA, 19 bp, Mus musculus
  siRNA target sequence for Osbpl9 (NM_133885.1,1481-1499).
cgaatgacaagaaatcctt

SEQ ID NO: 672454 - DNA, 19 bp, Mus musculus
  siRNA target sequence for Osbpl9 (NM_133885.1,1516-1534).
gaatggaatggtatcatgt

SEQ ID NO: 672455 - DNA, 19 bp, Mus musculus
  siRNA target sequence for Osbpl9 (NM_133885.1,1525-1543).
ggtatcatgtatgcaaaat

SEQ ID NO: 672456 - DNA, 19 bp, Mus musculus
  siRNA target sequence for Osbpl9 (NM_133885.1,1545-1563).
cgcaacaggggaaaacact

SEQ ID NO: 672457 - DNA, 19 bp, Mus musculus
  siRNA target sequence for Osbpl9 (NM_133885.1,1577-1595).
ccaagaaattgcctataat

SEQ ID NO: 672458 - DNA, 19 bp, Mus musculus
  siRNA target sequence for Osbpl9 (NM_133885.1,1710-1728).
gcacagacttgaagaaaga

SEQ ID NO: 672459 - DNA, 19 bp, Mus musculus
  siRNA target sequence for Osbpl9 (NM_133885.1,1772-1790).
gggagacgaggctctttca

SEQ ID NO: 672460 - DNA, 19 bp, Mus musculus
  siRNA target sequence for Osbpl9 (NM_133885.1,1799-1817).
gcgaatgctgggtttacga

SEQ ID NO: 672461 - DNA, 19 bp, Mus musculus
  siRNA target sequence for Osbpl9 (NM_133885.1,1800-1818).
cgaatgctgggtttacgat

SEQ ID NO: 672462 - DNA, 19 bp, Mus musculus
  siRNA target sequence for Osbpl9 (NM_133885.1,1837-1855).
cttggtgctgtgaagcatt

SEQ ID NO: 672463 - DNA, 19 bp, Mus musculus
  siRNA target sequence for Osbpl9 (NM_173350.1,268-286).
gcagcacgcagatggaatt

SEQ ID NO: 672464 - DNA, 19 bp, Mus musculus
  siRNA target sequence for Osbpl9 (NM_173350.1,271-289).
gcacgcagatggaattata

SEQ ID NO: 672465 - DNA, 19 bp, Mus musculus
  siRNA target sequence for Osbpl9 (NM_173350.1,272-290).
cacgcagatggaattataa

SEQ ID NO: 672466 - DNA, 19 bp, Mus musculus
  siRNA target sequence for Osbpl9 (NM_173350.1,274-292).
cgcagatggaattataagt

SEQ ID NO: 672467 - DNA, 19 bp, Mus musculus
  siRNA target sequence for Osbpl9 (NM_173350.1,275-293).
gcagatggaattataagta

SEQ ID NO: 672468 - DNA, 19 bp, Mus musculus
  siRNA target sequence for Osbpl9 (NM_173350.1,282-300).
gaattataagtactattaa

SEQ ID NO: 672469 - DNA, 19 bp, Mus musculus
  siRNA target sequence for 2310020A21Rik (NM_175249.2,23-41).
ctgtgcgctctgattctct

SEQ ID NO: 672470 - DNA, 19 bp, Mus musculus
  siRNA target sequence for 2310020A21Rik (NM_175249.2,263-281).
gctacagagtcggatattt

SEQ ID NO: 672471 - DNA, 19 bp, Mus musculus
  siRNA target sequence for 2310020A21Rik (NM_175249.2,269-287).
gagtcggatattttgacat

SEQ ID NO: 672472 - DNA, 19 bp, Mus musculus
  siRNA target sequence for 2310020A21Rik (NM_175249.2,275-293).
gatattttgacatcagtaa

SEQ ID NO: 672473 - DNA, 19 bp, Mus musculus
  siRNA target sequence for 2310020A21Rik (NM_175249.2,434-452).
ctctgtgaaccattacaga

SEQ ID NO: 672474 - DNA, 19 bp, Mus musculus
  siRNA target sequence for 2310020A21Rik (NM_175249.2,613-631).
ggatgctctagagtctaat

SEQ ID NO: 672475 - DNA, 19 bp, Mus musculus
  siRNA target sequence for 2310020A21Rik (NM_175249.2,614-632).
gatgctctagagtctaatt

SEQ ID NO: 672476 - DNA, 19 bp, Mus musculus
  siRNA target sequence for 2310020A21Rik (NM_175249.2,647-665).
gtaactgtccagaatcagt

SEQ ID NO: 672477 - DNA, 19 bp, Mus musculus
  siRNA target sequence for 2310020A21Rik (NM_175249.2,690-708).
ctgccctctgcgagaacta

SEQ ID NO: 672478 - DNA, 19 bp, Mus musculus
  siRNA target sequence for 2310020A21Rik (NM_175249.2,693-711).
ccctctgcgagaactacat

SEQ ID NO: 672479 - DNA, 19 bp, Mus musculus
  siRNA target sequence for 2310020A21Rik (NM_175249.2,903-921).
gcgacgtgtgcttgaactt

SEQ ID NO: 672480 - DNA, 19 bp, Mus musculus
  siRNA target sequence for 2310020A21Rik (NM_175249.2,1047-1065).
cctacagccctgaattggt

SEQ ID NO: 672481 - DNA, 19 bp, Mus musculus
  siRNA target sequence for Gm2a (NM_010299.2,146-164).
cttctcctgggataactgt

SEQ ID NO: 672482 - DNA, 19 bp, Mus musculus
  siRNA target sequence for Gm2a (NM_010299.2,152-170).
ctgggataactgtgatgaa

SEQ ID NO: 672483 - DNA, 19 bp, Mus musculus
  siRNA target sequence for Gm2a (NM_010299.2,177-195).
gaccctgcagtgatcaaaa

SEQ ID NO: 672484 - DNA, 19 bp, Mus musculus
  siRNA target sequence for Gm2a (NM_010299.2,361-379).
gctgtagctacgagaacat

SEQ ID NO: 672485 - DNA, 19 bp, Mus musculus
  siRNA target sequence for Gm2a (NM_010299.2,382-400).
gtgacctgatagacgaata

SEQ ID NO: 672486 - DNA, 19 bp, Mus musculus
  siRNA target sequence for Gm2a (NM_010299.2,386-404).
cctgatagacgaatacatt

SEQ ID NO: 672487 - DNA, 19 bp, Mus musculus
  siRNA target sequence for Gm2a (NM_010299.2,552-570).
cgcatccagagtatcttga

SEQ ID NO: 672488 - DNA, 19 bp, Mus musculus
  siRNA target sequence for Gm2a (NM_010299.2,585-603).
cgcctgggctgcatcaaga

SEQ ID NO: 672489 - DNA, 19 bp, Mus musculus
  siRNA target sequence for Gm2a (NM_010299.2,587-605).
cctgggctgcatcaagatt

SEQ ID NO: 672490 - DNA, 19 bp, Mus musculus
  siRNA target sequence for Psap (NM_011179.2,60-78).
gtccaagacccgaagacat

SEQ ID NO: 672491 - DNA, 19 bp, Mus musculus
  siRNA target sequence for Psap (NM_011179.2,351-369).
gtcatcctggacatgatta

SEQ ID NO: 672492 - DNA, 19 bp, Mus musculus
  siRNA target sequence for Psap (NM_011179.2,501-519).
gtggttgcccccttcatgt

SEQ ID NO: 672493 - DNA, 19 bp, Mus musculus
  siRNA target sequence for Psap (NM_011179.2,559-577).
gcagccagccccaacctaa

SEQ ID NO: 672494 - DNA, 19 bp, Mus musculus
  siRNA target sequence for Psap (NM_011179.2,705-723).
ccaggcgtgtctgacatat

SEQ ID NO: 672495 - DNA, 19 bp, Mus musculus
  siRNA target sequence for Psap (NM_011179.2,709-727).
gcgtgtctgacatatgcaa

SEQ ID NO: 672496 - DNA, 19 bp, Mus musculus
  siRNA target sequence for Psap (NM_011179.2,861-879).
cctgccaccgagaccatta

SEQ ID NO: 672497 - DNA, 19 bp, Mus musculus
  siRNA target sequence for Psap (NM_011179.2,862-880).
ctgccaccgagaccattaa

SEQ ID NO: 672498 - DNA, 19 bp, Mus musculus
  siRNA target sequence for Psap (NM_011179.2,864-882).
gccaccgagaccattaaga

SEQ ID NO: 672499 - DNA, 19 bp, Mus musculus
  siRNA target sequence for Psap (NM_011179.2,865-883).
ccaccgagaccattaagaa

SEQ ID NO: 672500 - DNA, 19 bp, Mus musculus
  siRNA target sequence for Psap (NM_011179.2,930-948).
gtccaggcccacaatgtga

SEQ ID NO: 672501 - DNA, 19 bp, Mus musculus
  siRNA target sequence for Psap (NM_011179.2,932-950).
ccaggcccacaatgtgatt

SEQ ID NO: 672502 - DNA, 19 bp, Mus musculus
  siRNA target sequence for Psap (NM_011179.2,936-954).
gcccacaatgtgattttat

SEQ ID NO: 672503 - DNA, 19 bp, Mus musculus
  siRNA target sequence for Psap (NM_011179.2,962-980).
ctgtcagtttgtgatgaat

SEQ ID NO: 672504 - DNA, 19 bp, Mus musculus
  siRNA target sequence for Psap (NM_011179.2,1012-1030).
ctgaggagctcctagttaa

SEQ ID NO: 672505 - DNA, 19 bp, Mus musculus
  siRNA target sequence for Psap (NM_011179.2,1473-1491).
gagtatgagcccttgctat

SEQ ID NO: 672506 - DNA, 19 bp, Mus musculus
  siRNA target sequence for Psap (NM_011179.2,1603-1621).
gctactggtgtcagaacat

SEQ ID NO: 672507 - DNA, 19 bp, Mus musculus
  siRNA target sequence for Sftpb (NM_147779.1,561-579).
gtccacctcctcacaaaga

SEQ ID NO: 672508 - DNA, 19 bp, Mus musculus
  siRNA target sequence for Sftpb (NM_147779.1,670-688).
gtcgccaagtgcttgatgt

SEQ ID NO: 672509 - DNA, 19 bp, Mus musculus
  siRNA target sequence for Sftpb (NM_147779.1,689-707).
ctacctgcccctggttatt

SEQ ID NO: 672510 - DNA, 19 bp, Mus musculus
  siRNA target sequence for Sftpb (NM_147779.1,697-715).
ccctggttattgactactt

SEQ ID NO: 672511 - DNA, 19 bp, Mus musculus
  siRNA target sequence for Sftpb (NM_147779.1,776-794).
ggctaagccagaacagaat

SEQ ID NO: 672512 - DNA, 19 bp, Mus musculus
  siRNA target sequence for C330018K18Rik (NM_177352.2,176-194).
cgcgcagaaggtagaaaat

SEQ ID NO: 672513 - DNA, 19 bp, Mus musculus
  siRNA target sequence for C330018K18Rik (NM_177352.2,208-226).
ctggctgggttgaaatcga

SEQ ID NO: 672514 - DNA, 19 bp, Mus musculus
  siRNA target sequence for C330018K18Rik (NM_177352.2,246-264).
cagtttgttgccgtaataa

SEQ ID NO: 672515 - DNA, 19 bp, Mus musculus
  siRNA target sequence for C330018K18Rik (NM_177352.2,280-298).
ctgcaggggtgcagatgaa

SEQ ID NO: 672516 - DNA, 19 bp, Mus musculus
  siRNA target sequence for C330018K18Rik (NM_177352.2,283-301).
caggggtgcagatgaatca

SEQ ID NO: 672517 - DNA, 19 bp, Mus musculus
  siRNA target sequence for C330018K18Rik (NM_177352.2,285-303).
ggggtgcagatgaatcaaa

SEQ ID NO: 672518 - DNA, 19 bp, Mus musculus
  siRNA target sequence for C330018K18Rik (NM_177352.2,286-304).
gggtgcagatgaatcaaat

SEQ ID NO: 672519 - DNA, 19 bp, Mus musculus
  siRNA target sequence for C330018K18Rik (NM_177352.2,287-305).
ggtgcagatgaatcaaatt

SEQ ID NO: 672520 - DNA, 19 bp, Mus musculus
  siRNA target sequence for C330018K18Rik (NM_177352.2,306-324).
gtcggtcttggcatatcaa

SEQ ID NO: 672521 - DNA, 19 bp, Mus musculus
  siRNA target sequence for C330018K18Rik (NM_177352.2,329-347).
gagagccactttcattaca

SEQ ID NO: 672522 - DNA, 19 bp, Mus musculus
  siRNA target sequence for C330018K18Rik (NM_177352.2,361-379).
caggccatcattttcacaa

SEQ ID NO: 672523 - DNA, 19 bp, Mus musculus
  siRNA target sequence for C330018K18Rik (NM_177352.2,398-416).
cctaagggcagctgaactt

SEQ ID NO: 672524 - DNA, 19 bp, Mus musculus
  siRNA target sequence for C330018K18Rik (NM_177352.2,405-423).
gcagctgaacttgtaaagt

SEQ ID NO: 672525 - DNA, 19 bp, Mus musculus
  siRNA target sequence for C330018K18Rik (NM_177352.2,436-454).
ctctcataatgaagctatt

SEQ ID NO: 672526 - DNA, 19 bp, Mus musculus
  siRNA target sequence for C330018K18Rik (NM_177352.2,471-489).
gtccttcatttcttcagta

SEQ ID NO: 672527 - DNA, 19 bp, Mus musculus
  siRNA target sequence for C330018K18Rik (NM_177352.2,477-495).
catttcttcagtagaagta

SEQ ID NO: 672528 - DNA, 19 bp, Mus musculus
  siRNA target sequence for C330018K18Rik (NM_177352.2,487-505).
gtagaagtaaagtaatgct

SEQ ID NO: 672529 - DNA, 19 bp, Mus musculus
  siRNA target sequence for C330018K18Rik (NM_177352.2,508-526).
cggtcagccgcttcaattt

SEQ ID NO: 672530 - DNA, 19 bp, Mus musculus
  siRNA target sequence for C330018K18Rik (NM_177352.2,510-528).
gtcagccgcttcaatttca

SEQ ID NO: 672531 - DNA, 19 bp, Mus musculus
  siRNA target sequence for C330018K18Rik (NM_177352.2,533-551).
ccagcatgccaccttaaga

SEQ ID NO: 672532 - DNA, 19 bp, Mus musculus
  siRNA target sequence for C330018K18Rik (NM_177352.2,556-574).
cctggattttacaaaacct

SEQ ID NO: 672533 - DNA, 19 bp, Mus musculus
  siRNA target sequence for C330018K18Rik (NM_177352.2,557-575).
ctggattttacaaaaccta

SEQ ID NO: 672534 - DNA, 19 bp, Mus musculus
  siRNA target sequence for C330018K18Rik (NM_177352.2,665-683).
ctacgccacggattattca

SEQ ID NO: 672535 - DNA, 19 bp, Mus musculus
  siRNA target sequence for C330018K18Rik (NM_177352.2,691-709).
gcaccactggattttttga

SEQ ID NO: 672536 - DNA, 19 bp, Mus musculus
  siRNA target sequence for C330018K18Rik (NM_177352.2,692-710).
caccactggattttttgat

SEQ ID NO: 672537 - DNA, 19 bp, Mus musculus
  siRNA target sequence for C330018K18Rik (NM_177352.2,723-741).
cgctggagcaggctcataa

SEQ ID NO: 672538 - DNA, 19 bp, Mus musculus
  siRNA target sequence for C330018K18Rik (NM_177352.2,771-789).
ctgcctcctgtgaaggata

SEQ ID NO: 672539 - DNA, 19 bp, Mus musculus
  siRNA target sequence for C330018K18Rik (NM_177352.2,805-823).
gatcagtggatgagaagat

SEQ ID NO: 672540 - DNA, 19 bp, Mus musculus
  siRNA target sequence for C330018K18Rik (NM_177352.2,830-848).
cgtgcctataccagttgtt

SEQ ID NO: 672541 - DNA, 19 bp, Mus musculus
  siRNA target sequence for C330018K18Rik (NM_177352.2,863-881).
ccagcagtcggccatgttt

SEQ ID NO: 672542 - DNA, 19 bp, Mus musculus
  siRNA target sequence for C330018K18Rik (NM_177352.2,904-922).
gagatgtgaagctaaccat

SEQ ID NO: 672543 - DNA, 19 bp, Mus musculus
  siRNA target sequence for C330018K18Rik (NM_177352.2,928-946).
ctggaacatttttggatat

SEQ ID NO: 672544 - DNA, 19 bp, Mus musculus
  siRNA target sequence for C330018K18Rik (NM_177352.2,979-997).
gaggcttttatccactaat

SEQ ID NO: 672545 - DNA, 19 bp, Mus musculus
  siRNA target sequence for C330018K18Rik (NM_177352.2,1004-1022).
gaagattgggcaagaactt

SEQ ID NO: 672546 - DNA, 19 bp, Mus musculus
  siRNA target sequence for C330018K18Rik (NM_177352.2,1007-1025).
gattgggcaagaacttgta

SEQ ID NO: 672547 - DNA, 19 bp, Mus musculus
  siRNA target sequence for C330018K18Rik (NM_177352.2,1070-1088).
gtgggctcaaaaattagat

SEQ ID NO: 672548 - DNA, 19 bp, Mus musculus
  siRNA target sequence for C330018K18Rik (NM_177352.2,1122-1140).
gccctgagcctggaagatt

SEQ ID NO: 672549 - DNA, 19 bp, Mus musculus
  siRNA target sequence for C330018K18Rik (NM_177352.2,1137-1155).
gattctgaaggggtttact

SEQ ID NO: 672550 - DNA, 19 bp, Mus musculus
  siRNA target sequence for C330018K18Rik (NM_177352.2,1154-1172).
ctttgttccgtcgtttagt

SEQ ID NO: 672551 - DNA, 19 bp, Mus musculus
  siRNA target sequence for C330018K18Rik (NM_177352.2,1162-1180).
cgtcgtttagtggattaca

SEQ ID NO: 672552 - DNA, 19 bp, Mus musculus
  siRNA target sequence for C330018K18Rik (NM_177352.2,1173-1191).
ggattacaggctccattaa

SEQ ID NO: 672553 - DNA, 19 bp, Mus musculus
  siRNA target sequence for C330018K18Rik (NM_177352.2,1174-1192).
gattacaggctccattaaa

SEQ ID NO: 672554 - DNA, 19 bp, Mus musculus
  siRNA target sequence for C330018K18Rik (NM_177352.2,1232-1250).
ctccactaataaataccat

SEQ ID NO: 672555 - DNA, 19 bp, Mus musculus
  siRNA target sequence for C330018K18Rik (NM_177352.2,1258-1276).
gagcaatattggagtcaat

SEQ ID NO: 672556 - DNA, 19 bp, Mus musculus
  siRNA target sequence for C330018K18Rik (NM_177352.2,1279-1297).
ctttcaggaacaaacagtt

SEQ ID NO: 672557 - DNA, 19 bp, Mus musculus
  siRNA target sequence for C330018K18Rik (NM_177352.2,1348-1366).
cagatggaggcgtgtgtaa

SEQ ID NO: 672558 - DNA, 19 bp, Mus musculus
  siRNA target sequence for C330018K18Rik (NM_177352.2,1350-1368).
gatggaggcgtgtgtaaca

SEQ ID NO: 672559 - DNA, 19 bp, Mus musculus
  siRNA target sequence for C330018K18Rik (NM_177352.2,1518-1536).
caaagcgagatggttttca

SEQ ID NO: 672560 - DNA, 19 bp, Mus musculus
  siRNA target sequence for C330018K18Rik (NM_177352.2,1554-1572).
caggaatacgaggcatttt

SEQ ID NO: 672561 - DNA, 19 bp, Mus musculus
  siRNA target sequence for Tgn (NM_009375.1,13-31).
gtcttgtgggtctctactt

SEQ ID NO: 672562 - DNA, 19 bp, Mus musculus
  siRNA target sequence for Tgn (NM_009375.1,49-67).
ctggtagcagccaacatct

SEQ ID NO: 672563 - DNA, 19 bp, Mus musculus
  siRNA target sequence for Tgn (NM_009375.1,51-69).
ggtagcagccaacatcttt

SEQ ID NO: 672564 - DNA, 19 bp, Mus musculus
  siRNA target sequence for Tgn (NM_009375.1,261-279).
ggggaggccaacaatttgt

SEQ ID NO: 672565 - DNA, 19 bp, Mus musculus
  siRNA target sequence for Tgn (NM_009375.1,363-381).
ccaggattcagggaactat

SEQ ID NO: 672566 - DNA, 19 bp, Mus musculus
  siRNA target sequence for Tgn (NM_009375.1,577-595).
gtccagtgcaagtttgtca

SEQ ID NO: 672567 - DNA, 19 bp, Mus musculus
  siRNA target sequence for Tgn (NM_009375.1,599-617).
ccacagacatgatgatttt

SEQ ID NO: 672568 - DNA, 19 bp, Mus musculus
  siRNA target sequence for Tgn (NM_009375.1,691-709).
gaagtgtctgggtactgtt

SEQ ID NO: 672569 - DNA, 19 bp, Mus musculus
  siRNA target sequence for Tgn (NM_009375.1,746-764).
caggactggaattgttact

SEQ ID NO: 672570 - DNA, 19 bp, Mus musculus
  siRNA target sequence for Tgn (NM_009375.1,805-823).
gcctcgaccttcactcaaa

SEQ ID NO: 672571 - DNA, 19 bp, Mus musculus
  siRNA target sequence for Tgn (NM_009375.1,824-842).
gcaccatgtaccggatatt

SEQ ID NO: 672572 - DNA, 19 bp, Mus musculus
  siRNA target sequence for Tgn (NM_009375.1,827-845).
ccatgtaccggatattgca

SEQ ID NO: 672573 - DNA, 19 bp, Mus musculus
  siRNA target sequence for Tgn (NM_009375.1,856-874).
ctggccatccaattagtca

SEQ ID NO: 672574 - DNA, 19 bp, Mus musculus
  siRNA target sequence for Tgn (NM_009375.1,894-912).
ccccactaagtgtgaagta

SEQ ID NO: 672575 - DNA, 19 bp, Mus musculus
  siRNA target sequence for Tgn (NM_009375.1,896-914).
ccactaagtgtgaagtaga

SEQ ID NO: 672576 - DNA, 19 bp, Mus musculus
  siRNA target sequence for Tgn (NM_009375.1,897-915).
cactaagtgtgaagtagaa

SEQ ID NO: 672577 - DNA, 19 bp, Mus musculus
  siRNA target sequence for Tgn (NM_009375.1,929-947).
ccagatttggtcattctta

SEQ ID NO: 672578 - DNA, 19 bp, Mus musculus
  siRNA target sequence for Tgn (NM_009375.1,1087-1105).
cagtcatgtgccttggaaa

SEQ ID NO: 672579 - DNA, 19 bp, Mus musculus
  siRNA target sequence for Tgn (NM_009375.1,1114-1132).
gccttgtctaggttctact

SEQ ID NO: 672580 - DNA, 19 bp, Mus musculus
  siRNA target sequence for Tgn (NM_009375.1,1115-1133).
ccttgtctaggttctactt

SEQ ID NO: 672581 - DNA, 19 bp, Mus musculus
  siRNA target sequence for Tgn (NM_009375.1,1156-1174).
ccgcaggaccttttgtctt

SEQ ID NO: 672582 - DNA, 19 bp, Mus musculus
  siRNA target sequence for Tgn (NM_009375.1,1220-1238).
cctgcccacccagaatcaa

SEQ ID NO: 672583 - DNA, 19 bp, Mus musculus
  siRNA target sequence for Tgn (NM_009375.1,1433-1451).
cgaatgctgcccagtttaa

SEQ ID NO: 672584 - DNA, 19 bp, Mus musculus
  siRNA target sequence for Tgn (NM_009375.1,1516-1534).
ctcccaggcttcctgaata

SEQ ID NO: 672585 - DNA, 19 bp, Mus musculus
  siRNA target sequence for Tgn (NM_009375.1,1518-1536).
cccaggcttcctgaataga

SEQ ID NO: 672586 - DNA, 19 bp, Mus musculus
  siRNA target sequence for Tgn (NM_009375.1,1520-1538).
caggcttcctgaatagaga

SEQ ID NO: 672587 - DNA, 19 bp, Mus musculus
  siRNA target sequence for Tgn (NM_009375.1,1547-1565).
ctactcttgccaaactact

SEQ ID NO: 672588 - DNA, 19 bp, Mus musculus
  siRNA target sequence for Tgn (NM_009375.1,1613-1631).
ctgagaagacagttgctat

SEQ ID NO: 672589 - DNA, 19 bp, Mus musculus
  siRNA target sequence for Tgn (NM_009375.1,1649-1667).
gtaactttggcttcaaagt

SEQ ID NO: 672590 - DNA, 19 bp, Mus musculus
  siRNA target sequence for Tgn (NM_009375.1,1753-1771).
gtttctgtgccggaagata

SEQ ID NO: 672591 - DNA, 19 bp, Mus musculus
  siRNA target sequence for Tgn (NM_009375.1,1765-1783).
gaagatatagcgagagatt

SEQ ID NO: 672592 - DNA, 19 bp, Mus musculus
  siRNA target sequence for Tgn (NM_009375.1,1778-1796).
gagatttaggagatgtgat

SEQ ID NO: 672593 - DNA, 19 bp, Mus musculus
  siRNA target sequence for Tgn (NM_009375.1,1787-1805).
gagatgtgatggaaatggt

SEQ ID NO: 672594 - DNA, 19 bp, Mus musculus
  siRNA target sequence for Tgn (NM_009375.1,1811-1829).
gtgctcaagcctgtaaaca

SEQ ID NO: 672595 - DNA, 19 bp, Mus musculus
  siRNA target sequence for Tgn (NM_009375.1,1871-1889).
gaagctatgaggatataca

SEQ ID NO: 672596 - DNA, 19 bp, Mus musculus
  siRNA target sequence for Tgn (NM_009375.1,1903-1921).
gaatgctggtgtgtagatt

SEQ ID NO: 672597 - DNA, 19 bp, Mus musculus
  siRNA target sequence for Tgn (NM_009375.1,1922-1940).
cccgaggcaaagaacttga

SEQ ID NO: 672598 - DNA, 19 bp, Mus musculus
  siRNA target sequence for Tgn (NM_009375.1,1976-1994).
ccaccaagtgtgaaaagca

SEQ ID NO: 672599 - DNA, 19 bp, Mus musculus
  siRNA target sequence for Tgn (NM_009375.1,2060-2078).
gtactagagagggatattt

SEQ ID NO: 672600 - DNA, 19 bp, Mus musculus
  siRNA target sequence for Tgn (NM_009375.1,2063-2081).
ctagagagggatattttct

SEQ ID NO: 672601 - DNA, 19 bp, Mus musculus
  siRNA target sequence for Tgn (NM_009375.1,2089-2107).
cagtgcttcaactcagaat

SEQ ID NO: 672602 - DNA, 19 bp, Mus musculus
  siRNA target sequence for Tgn (NM_009375.1,2093-2111).
gcttcaactcagaatgtta

SEQ ID NO: 672603 - DNA, 19 bp, Mus musculus
  siRNA target sequence for Tgn (NM_009375.1,2180-2198).
ccagtgtctgccaattaca

SEQ ID NO: 672604 - DNA, 19 bp, Mus musculus
  siRNA target sequence for Tgn (NM_009375.1,2190-2208).
ccaattacaggctgaacaa

SEQ ID NO: 672605 - DNA, 19 bp, Mus musculus
  siRNA target sequence for Tgn (NM_009375.1,2396-2414).
ccccagccgcactgctaat

SEQ ID NO: 672606 - DNA, 19 bp, Mus musculus
  siRNA target sequence for Tgn (NM_009375.1,2399-2417).
cagccgcactgctaatgaa

SEQ ID NO: 672607 - DNA, 19 bp, Mus musculus
  siRNA target sequence for Tgn (NM_009375.1,2401-2419).
gccgcactgctaatgaaga

SEQ ID NO: 672608 - DNA, 19 bp, Mus musculus
  siRNA target sequence for Tgn (NM_009375.1,2434-2452).
gaagtagcttccagaaact

SEQ ID NO: 672609 - DNA, 19 bp, Mus musculus
  siRNA target sequence for Tgn (NM_009375.1,2482-2500).
gctggccagcaaagaatct

SEQ ID NO: 672610 - DNA, 19 bp, Mus musculus
  siRNA target sequence for Tgn (NM_009375.1,2517-2535).
gtacccatctcttcaagat

SEQ ID NO: 672611 - DNA, 19 bp, Mus musculus
  siRNA target sequence for Tgn (NM_009375.1,2590-2608).
ctggatccgtacatctttt

SEQ ID NO: 672612 - DNA, 19 bp, Mus musculus
  siRNA target sequence for Tgn (NM_009375.1,2647-2665).
ccctactcagactttaaca

SEQ ID NO: 672613 - DNA, 19 bp, Mus musculus
  siRNA target sequence for Tgn (NM_009375.1,2648-2666).
cctactcagactttaacat

SEQ ID NO: 672614 - DNA, 19 bp, Mus musculus
  siRNA target sequence for Tgn (NM_009375.1,2791-2809).
cttcgtgtcctgaaattta

SEQ ID NO: 672615 - DNA, 19 bp, Mus musculus
  siRNA target sequence for Tgn (NM_009375.1,2794-2812).
cgtgtcctgaaatttatta

SEQ ID NO: 672616 - DNA, 19 bp, Mus musculus
  siRNA target sequence for Tgn (NM_009375.1,2830-2848).
gtctcagcctccaatgctt

SEQ ID NO: 672617 - DNA, 19 bp, Mus musculus
  siRNA target sequence for Tgn (NM_009375.1,3081-3099).
ctacatgccacaatgcaat

SEQ ID NO: 672618 - DNA, 19 bp, Mus musculus
  siRNA target sequence for Tgn (NM_009375.1,3087-3105).
gccacaatgcaatatgatt

SEQ ID NO: 672619 - DNA, 19 bp, Mus musculus
  siRNA target sequence for Tgn (NM_009375.1,3759-3777).
cctccggagtgcgttttca

SEQ ID NO: 672620 - DNA, 19 bp, Mus musculus
  siRNA target sequence for Tgn (NM_009375.1,4040-4058).
gtgacaactcctcaataca

SEQ ID NO: 672621 - DNA, 19 bp, Mus musculus
  siRNA target sequence for Tgn (NM_009375.1,4071-4089).
gactgcagagcgtttagga

SEQ ID NO: 672622 - DNA, 19 bp, Mus musculus
  siRNA target sequence for Tgn (NM_009375.1,4076-4094).
cagagcgtttaggagtaaa

SEQ ID NO: 672623 - DNA, 19 bp, Mus musculus
  siRNA target sequence for Tgn (NM_009375.1,4190-4208).
ggcgctttgcagatctgat

SEQ ID NO: 672624 - DNA, 19 bp, Mus musculus
  siRNA target sequence for Tgn (NM_009375.1,4255-4273).
gcggacaccaccttgtatt

SEQ ID NO: 672625 - DNA, 19 bp, Mus musculus
  siRNA target sequence for Tgn (NM_009375.1,4256-4274).
cggacaccaccttgtattt

SEQ ID NO: 672626 - DNA, 19 bp, Mus musculus
  siRNA target sequence for Tgn (NM_009375.1,4717-4735).
gctccagaatcgaaggtta

SEQ ID NO: 672627 - DNA, 19 bp, Mus musculus
  siRNA target sequence for Tgn (NM_009375.1,4718-4736).
ctccagaatcgaaggttat

SEQ ID NO: 672628 - DNA, 19 bp, Mus musculus
  siRNA target sequence for Tgn (NM_009375.1,4720-4738).
ccagaatcgaaggttatct

SEQ ID NO: 672629 - DNA, 19 bp, Mus musculus
  siRNA target sequence for Tgn (NM_009375.1,4721-4739).
cagaatcgaaggttatctt

SEQ ID NO: 672630 - DNA, 19 bp, Mus musculus
  siRNA target sequence for Tgn (NM_009375.1,4731-4749).
ggttatctttgatgctaat

SEQ ID NO: 672631 - DNA, 19 bp, Mus musculus
  siRNA target sequence for Tgn (NM_009375.1,4732-4750).
gttatctttgatgctaatt

SEQ ID NO: 672632 - DNA, 19 bp, Mus musculus
  siRNA target sequence for Tgn (NM_009375.1,4811-4829).
cagattgtgcaaatgatga

SEQ ID NO: 672633 - DNA, 19 bp, Mus musculus
  siRNA target sequence for Tgn (NM_009375.1,4919-4937).
cttctgaccaggaacaaga

SEQ ID NO: 672634 - DNA, 19 bp, Mus musculus
  siRNA target sequence for Tgn (NM_009375.1,4982-5000).
gccaggtgaaagtgagaaa

SEQ ID NO: 672635 - DNA, 19 bp, Mus musculus
  siRNA target sequence for Tgn (NM_009375.1,4986-5004).
ggtgaaagtgagaaatagt

SEQ ID NO: 672636 - DNA, 19 bp, Mus musculus
  siRNA target sequence for Tgn (NM_009375.1,5073-5091).
cgaaccaacgggttttcaa

SEQ ID NO: 672637 - DNA, 19 bp, Mus musculus
  siRNA target sequence for Tgn (NM_009375.1,5074-5092).
gaaccaacgggttttcaaa

SEQ ID NO: 672638 - DNA, 19 bp, Mus musculus
  siRNA target sequence for Tgn (NM_009375.1,5131-5149).
gcctcaggagccaatctga

SEQ ID NO: 672639 - DNA, 19 bp, Mus musculus
  siRNA target sequence for Tgn (NM_009375.1,5137-5155).
ggagccaatctgacagata

SEQ ID NO: 672640 - DNA, 19 bp, Mus musculus
  siRNA target sequence for Tgn (NM_009375.1,5172-5190).
gcttgcctgtgacaatgat

SEQ ID NO: 672641 - DNA, 19 bp, Mus musculus
  siRNA target sequence for Tgn (NM_009375.1,5173-5191).
cttgcctgtgacaatgatt

SEQ ID NO: 672642 - DNA, 19 bp, Mus musculus
  siRNA target sequence for Tgn (NM_009375.1,5195-5213).
gctgtgatggcttcatcat

SEQ ID NO: 672643 - DNA, 19 bp, Mus musculus
  siRNA target sequence for Tgn (NM_009375.1,5208-5226).
catcatcacacaggttaaa

SEQ ID NO: 672644 - DNA, 19 bp, Mus musculus
  siRNA target sequence for Tgn (NM_009375.1,5327-5345).
gtgctggggtgacatatga

SEQ ID NO: 672645 - DNA, 19 bp, Mus musculus
  siRNA target sequence for Tgn (NM_009375.1,5451-5469).
ctacctctggaaagattct

SEQ ID NO: 672646 - DNA, 19 bp, Mus musculus
  siRNA target sequence for Tgn (NM_009375.1,5681-5699).
gtgcccaggagcccatttt

SEQ ID NO: 672647 - DNA, 19 bp, Mus musculus
  siRNA target sequence for Tgn (NM_009375.1,5704-5722).
caacttgcagacataacaa

SEQ ID NO: 672648 - DNA, 19 bp, Mus musculus
  siRNA target sequence for Tgn (NM_009375.1,5707-5725).
cttgcagacataacaaaaa

SEQ ID NO: 672649 - DNA, 19 bp, Mus musculus
  siRNA target sequence for Tgn (NM_009375.1,5715-5733).
cataacaaaaagttcatct

SEQ ID NO: 672650 - DNA, 19 bp, Mus musculus
  siRNA target sequence for Tgn (NM_009375.1,5776-5794).
gacaatgtcatggaatcta

SEQ ID NO: 672651 - DNA, 19 bp, Mus musculus
  siRNA target sequence for Tgn (NM_009375.1,5788-5806).
gaatctaatgccaagaact

SEQ ID NO: 672652 - DNA, 19 bp, Mus musculus
  siRNA target sequence for Tgn (NM_009375.1,5838-5856).
cctcttccggaggaaagtt

SEQ ID NO: 672653 - DNA, 19 bp, Mus musculus
  siRNA target sequence for Tgn (NM_009375.1,6072-6090).
gaacagcatggggattcaa

SEQ ID NO: 672654 - DNA, 19 bp, Mus musculus
  siRNA target sequence for Tgn (NM_009375.1,6075-6093).
cagcatggggattcaaaca

SEQ ID NO: 672655 - DNA, 19 bp, Mus musculus
  siRNA target sequence for Tgn (NM_009375.1,6081-6099).
ggggattcaaacatgcaat

SEQ ID NO: 672656 - DNA, 19 bp, Mus musculus
  siRNA target sequence for Tgn (NM_009375.1,6113-6131).
caacctggcgcattttgga

SEQ ID NO: 672657 - DNA, 19 bp, Mus musculus
  siRNA target sequence for Tgn (NM_009375.1,6288-6306).
gtcttcagtgattgtagat

SEQ ID NO: 672658 - DNA, 19 bp, Mus musculus
  siRNA target sequence for Tgn (NM_009375.1,6308-6326).
catccatcaagcactttga

SEQ ID NO: 672659 - DNA, 19 bp, Mus musculus
  siRNA target sequence for Tgn (NM_009375.1,6596-6614).
ctgtacgcattgattcctt

SEQ ID NO: 672660 - DNA, 19 bp, Mus musculus
  siRNA target sequence for Tgn (NM_009375.1,6629-6647).
gtgggtcccaggtcatcaa

SEQ ID NO: 672661 - DNA, 19 bp, Mus musculus
  siRNA target sequence for Tgn (NM_009375.1,6681-6699).
ccttggagttccatatgct

SEQ ID NO: 672662 - DNA, 19 bp, Mus musculus
  siRNA target sequence for Tgn (NM_009375.1,6730-6748).
gcaccagaggtcttgaatt

SEQ ID NO: 672663 - DNA, 19 bp, Mus musculus
  siRNA target sequence for Tgn (NM_009375.1,6839-6857).
gcttatatcccaatgtgtt

SEQ ID NO: 672664 - DNA, 19 bp, Mus musculus
  siRNA target sequence for Tgn (NM_009375.1,6965-6983).
ctgcagttggcaacttcat

SEQ ID NO: 672665 - DNA, 19 bp, Mus musculus
  siRNA target sequence for Tgn (NM_009375.1,6985-7003).
gtagtcactgctaactaca

SEQ ID NO: 672666 - DNA, 19 bp, Mus musculus
  siRNA target sequence for Tgn (NM_009375.1,7206-7224).
gctccagctcttcaagaaa

SEQ ID NO: 672667 - DNA, 19 bp, Mus musculus
  siRNA target sequence for Tgn (NM_009375.1,7315-7333).
gttggatgccctaacttca

SEQ ID NO: 672668 - DNA, 19 bp, Mus musculus
  siRNA target sequence for Tgn (NM_009375.1,7452-7470).
ccagtacctccgtgaactt

SEQ ID NO: 672669 - DNA, 19 bp, Mus musculus
  siRNA target sequence for Tgn (NM_009375.1,7471-7489).
ccatccagacggttgaaga

SEQ ID NO: 672670 - DNA, 19 bp, Mus musculus
  siRNA target sequence for Tgn (NM_009375.1,7588-7606).
ggccgaaccaacagcaaaa

SEQ ID NO: 672671 - DNA, 19 bp, Mus musculus
  siRNA target sequence for Tgn (NM_009375.1,7672-7690).
gctgctgtatggtattact

SEQ ID NO: 672672 - DNA, 19 bp, Mus musculus
  siRNA target sequence for Tgn (NM_009375.1,7744-7762).
gccacccgggactacttta

SEQ ID NO: 672673 - DNA, 19 bp, Mus musculus
  siRNA target sequence for Tgn (NM_009375.1,7805-7823).
gaacccgtggaaatgtctt

SEQ ID NO: 672674 - DNA, 19 bp, Mus musculus
  siRNA target sequence for Tgn (NM_009375.1,7811-7829).
gtggaaatgtcttcatgta

SEQ ID NO: 672675 - DNA, 19 bp, Mus musculus
  siRNA target sequence for Tgn (NM_009375.1,7869-7887).
gctggcagatgttcaatat

SEQ ID NO: 672676 - DNA, 19 bp, Mus musculus
  siRNA target sequence for Tgn (NM_009375.1,7914-7932).
ctaccagggccagttttca

SEQ ID NO: 672677 - DNA, 19 bp, Mus musculus
  siRNA target sequence for Tgn (NM_009375.1,7980-7998).
cttcatcagatcaggaaat

SEQ ID NO: 672678 - DNA, 19 bp, Mus musculus
  siRNA target sequence for Tgn (NM_009375.1,7983-8001).
catcagatcaggaaatcct

SEQ ID NO: 672679 - DNA, 19 bp, Mus musculus
  siRNA target sequence for Tgn (NM_009375.1,7988-8006).
gatcaggaaatcctaacta

SEQ ID NO: 672680 - DNA, 19 bp, Mus musculus
  siRNA target sequence for BC002118 (NM_030264.1,69-87).
ccggccatgcgcatcaaaa

SEQ ID NO: 672681 - DNA, 19 bp, Mus musculus
  siRNA target sequence for BC002118 (NM_030264.1,70-88).
cggccatgcgcatcaaaat

SEQ ID NO: 672682 - DNA, 19 bp, Mus musculus
  siRNA target sequence for BC002118 (NM_030264.1,73-91).
ccatgcgcatcaaaatcga

SEQ ID NO: 672683 - DNA, 19 bp, Mus musculus
  siRNA target sequence for BC002118 (NM_030264.1,152-170).
cttcatcaactaattcttt

SEQ ID NO: 672684 - DNA, 19 bp, Mus musculus
  siRNA target sequence for BC002118 (NM_030264.1,212-230).
cttcccctgcctatcttaa

SEQ ID NO: 672685 - DNA, 19 bp, Mus musculus
  siRNA target sequence for BC002118 (NM_030264.1,324-342).
cggccgatgggcaatgcta

SEQ ID NO: 672686 - DNA, 19 bp, Mus musculus
  siRNA target sequence for BC002118 (NM_030264.1,377-395).
cacagatcggaatcatcaa

SEQ ID NO: 672687 - DNA, 19 bp, Mus musculus
  siRNA target sequence for BC002118 (NM_030264.1,393-411).
caacgttccgaaatggtat

SEQ ID NO: 672688 - DNA, 19 bp, Mus musculus
  siRNA target sequence for BC002118 (NM_030264.1,396-414).
cgttccgaaatggtatgat

SEQ ID NO: 672689 - DNA, 19 bp, Mus musculus
  siRNA target sequence for BC002118 (NM_030264.1,427-445).
gagtactttgcctcatcat

SEQ ID NO: 672690 - DNA, 19 bp, Mus musculus
  siRNA target sequence for BC002118 (NM_030264.1,438-456).
ctcatcatcgaccttgttt

SEQ ID NO: 672691 - DNA, 19 bp, Mus musculus
  siRNA target sequence for BC002118 (NM_030264.1,446-464).
cgaccttgtttgtgattga

SEQ ID NO: 672692 - DNA, 19 bp, Mus musculus
  siRNA target sequence for BC002118 (NM_030264.1,478-496).
cactatgtggagataagga

SEQ ID NO: 672693 - DNA, 19 bp, Mus musculus
  siRNA target sequence for BC002118 (NM_030264.1,537-555).
ccctatcttcaagcaatat

SEQ ID NO: 672694 - DNA, 19 bp, Mus musculus
  siRNA target sequence for BC002118 (NM_030264.1,538-556).
cctatcttcaagcaatata

SEQ ID NO: 672695 - DNA, 19 bp, Mus musculus
  siRNA target sequence for BC002118 (NM_030264.1,557-575).
gcttgcctcctaatgaagt

SEQ ID NO: 672696 - DNA, 19 bp, Mus musculus
  siRNA target sequence for BC002118 (NM_030264.1,563-581).
ctcctaatgaagttggtta

SEQ ID NO: 672697 - DNA, 19 bp, Mus musculus
  siRNA target sequence for BC002118 (NM_030264.1,711-729).
ggggccttttgataacctt

SEQ ID NO: 672698 - DNA, 19 bp, Mus musculus
  siRNA target sequence for BC002118 (NM_030264.1,752-770).
ggcacaacaccattattca

SEQ ID NO: 672699 - DNA, 19 bp, Mus musculus
  siRNA target sequence for BC002118 (NM_030264.1,754-772).
cacaacaccattattcaga

SEQ ID NO: 672700 - DNA, 19 bp, Mus musculus
  siRNA target sequence for 9230106L14Rik (NM_138685.1,241-259).
catggctcgacctgaaata

SEQ ID NO: 672701 - DNA, 19 bp, Mus musculus
  siRNA target sequence for 9230106L14Rik (NM_138685.1,246-264).
ctcgacctgaaataaagaa

SEQ ID NO: 672702 - DNA, 19 bp, Mus musculus
  siRNA target sequence for 9230106L14Rik (NM_138685.1,313-331).
ctgcccctttgtccttata

SEQ ID NO: 672703 - DNA, 19 bp, Mus musculus
  siRNA target sequence for 9230106L14Rik (NM_138685.1,316-334).
cccctttgtccttatacct

SEQ ID NO: 672704 - DNA, 19 bp, Mus musculus
  siRNA target sequence for 9230106L14Rik (NM_138685.1,323-341).
gtccttatacctaaatgca

SEQ ID NO: 672705 - DNA, 19 bp, Mus musculus
  siRNA target sequence for 9230106L14Rik (NM_138685.1,333-351).
ctaaatgcaggcgtgataa

SEQ ID NO: 672706 - DNA, 19 bp, Mus musculus
  siRNA target sequence for Camp (NM_009921.1,48-66).
gctgtggcggtcactatca

SEQ ID NO: 672707 - DNA, 19 bp, Mus musculus
  siRNA target sequence for Camp (NM_009921.1,207-225).
ggacgaggatccagatact

SEQ ID NO: 672708 - DNA, 19 bp, Mus musculus
  siRNA target sequence for Camp (NM_009921.1,314-332).
gggtggtgaagcagtgtat

SEQ ID NO: 672709 - DNA, 19 bp, Mus musculus
  siRNA target sequence for Camp (NM_009921.1,397-415).
cagccctttcggttcaaga

SEQ ID NO: 672710 - DNA, 19 bp, Mus musculus
  siRNA target sequence for Camp (NM_009921.1,399-417).
gccctttcggttcaagaaa

SEQ ID NO: 672711 - DNA, 19 bp, Mus musculus
  siRNA target sequence for Camp (NM_009921.1,400-418).
ccctttcggttcaagaaaa

SEQ ID NO: 672712 - DNA, 19 bp, Mus musculus
  siRNA target sequence for Camp (NM_009921.1,401-419).
cctttcggttcaagaaaat

SEQ ID NO: 672713 - DNA, 19 bp, Mus musculus
  siRNA target sequence for Camp (NM_009921.1,402-420).
ctttcggttcaagaaaatt

SEQ ID NO: 672714 - DNA, 19 bp, Mus musculus
  siRNA target sequence for Defb1 (NM_007843.2,72-90).
ctcctggtgatgatatgtt

SEQ ID NO: 672715 - DNA, 19 bp, Mus musculus
  siRNA target sequence for Defb1 (NM_007843.2,191-209).
ctccagctgcccatctaat

SEQ ID NO: 672716 - DNA, 19 bp, Mus musculus
  siRNA target sequence for Defb1 (NM_007843.2,196-214).
gctgcccatctaataccaa

SEQ ID NO: 672717 - DNA, 19 bp, Mus musculus
  siRNA target sequence for Defb1 (NM_007843.2,197-215).
ctgcccatctaataccaaa

SEQ ID NO: 672718 - DNA, 19 bp, Mus musculus
  siRNA target sequence for Defb1 (NM_007843.2,202-220).
catctaataccaaactaca

SEQ ID NO: 672719 - DNA, 19 bp, Mus musculus
  siRNA target sequence for Defb1 (NM_007843.2,223-241).
gaacctgtaaaccagataa

SEQ ID NO: 672720 - DNA, 19 bp, Mus musculus
  siRNA target sequence for Defb1 (NM_007843.2,234-252).
ccagataagcccaactgtt

SEQ ID NO: 672721 - DNA, 19 bp, Mus musculus
  siRNA target sequence for Defb1 (NM_007843.2,237-255).
gataagcccaactgttgta

SEQ ID NO: 672722 - DNA, 19 bp, Mus musculus
  siRNA target sequence for Defb2 (NM_010030.1,94-112).
gctgttggaagtttaaaaa

SEQ ID NO: 672723 - DNA, 19 bp, Mus musculus
  siRNA target sequence for Defb2 (NM_010030.1,119-137).
gatacgaagcagaacttga

SEQ ID NO: 672724 - DNA, 19 bp, Mus musculus
  siRNA target sequence for Defb2 (NM_010030.1,226-244).
ccctgttgcaagtacatga

SEQ ID NO: 672725 - DNA, 19 bp, Mus musculus
  siRNA target sequence for Defb2 (NM_010030.1,227-245).
cctgttgcaagtacatgaa

SEQ ID NO: 672726 - DNA, 19 bp, Mus musculus
  siRNA target sequence for Defb3 (NM_013756.1,158-176).
gcagttgtggagttccttt

SEQ ID NO: 672727 - DNA, 19 bp, Mus musculus
  siRNA target sequence for Defb3 (NM_013756.1,166-184).
ggagttcctttcctcaaat

SEQ ID NO: 672728 - DNA, 19 bp, Mus musculus
  siRNA target sequence for Defb4 (NM_019728.2,83-101).
gcagcctttacccaaatta

SEQ ID NO: 672729 - DNA, 19 bp, Mus musculus
  siRNA target sequence for Defb4 (NM_019728.2,86-104).
gcctttacccaaattatca

SEQ ID NO: 672730 - DNA, 19 bp, Mus musculus
  siRNA target sequence for Defb4 (NM_019728.2,87-105).
cctttacccaaattatcaa

SEQ ID NO: 672731 - DNA, 19 bp, Mus musculus
  siRNA target sequence for Defb4 (NM_019728.2,95-113).
caaattatcaacaatccaa

SEQ ID NO: 672732 - DNA, 19 bp, Mus musculus
  siRNA target sequence for Defb4 (NM_019728.2,151-169).
gtgccctaccgcttttcga

SEQ ID NO: 672733 - DNA, 19 bp, Mus musculus
  siRNA target sequence for Leap2 (NM_153069.1,80-98).
ctgctgggtcaggtcaata

SEQ ID NO: 672734 - DNA, 19 bp, Mus musculus
  siRNA target sequence for Leap2 (NM_153069.1,82-100).
gctgggtcaggtcaatagt

SEQ ID NO: 672735 - DNA, 19 bp, Mus musculus
  siRNA target sequence for Leap2 (NM_153069.1,195-213).
gggatgactctgagtgtat

SEQ ID NO: 672736 - DNA, 19 bp, Mus musculus
  siRNA target sequence for Leap2 (NM_153069.1,200-218).
gactctgagtgtatcacaa

SEQ ID NO: 672737 - DNA, 19 bp, Mus musculus
  siRNA target sequence for Swam2 (NM_138684.2,63-81).
cctcatgacgctccttatt

SEQ ID NO: 672738 - DNA, 19 bp, Mus musculus
  siRNA target sequence for Swam2 (NM_138684.2,64-82).
ctcatgacgctccttattt

SEQ ID NO: 672739 - DNA, 19 bp, Mus musculus
  siRNA target sequence for Swam2 (NM_138684.2,152-170).
gctgcatcaggcaagatga

SEQ ID NO: 672740 - DNA, 19 bp, Mus musculus
  siRNA target sequence for Swam2 (NM_138684.2,153-171).
ctgcatcaggcaagatgat

SEQ ID NO: 672741 - DNA, 19 bp, Mus musculus
  siRNA target sequence for Swam2 (NM_138684.2,222-240).
ctggcaatgtggcttcaaa

SEQ ID NO: 672742 - DNA, 19 bp, Mus musculus
  siRNA target sequence for Swam2 (NM_138684.2,242-260).
gcgtgctgccggtgaaaga

SEQ ID NO: 672743 - DNA, 19 bp, Mus musculus
  siRNA target sequence for Drpla (NM_007881.2,424-442).
gcgcccaaaaagaccaaaa

SEQ ID NO: 672744 - DNA, 19 bp, Mus musculus
  siRNA target sequence for Drpla (NM_007881.2,519-537).
cagcagcgaccctagagat

SEQ ID NO: 672745 - DNA, 19 bp, Mus musculus
  siRNA target sequence for Drpla (NM_007881.2,521-539).
gcagcgaccctagagatat

SEQ ID NO: 672746 - DNA, 19 bp, Mus musculus
  siRNA target sequence for Drpla (NM_007881.2,522-540).
cagcgaccctagagatata

SEQ ID NO: 672747 - DNA, 19 bp, Mus musculus
  siRNA target sequence for Drpla (NM_007881.2,524-542).
gcgaccctagagatataga

SEQ ID NO: 672748 - DNA, 19 bp, Mus musculus
  siRNA target sequence for Drpla (NM_007881.2,583-601).
ggcagcgtggaaaatgact

SEQ ID NO: 672749 - DNA, 19 bp, Mus musculus
  siRNA target sequence for Drpla (NM_007881.2,735-753).
gccgcctactggatatcat

SEQ ID NO: 672750 - DNA, 19 bp, Mus musculus
  siRNA target sequence for Drpla (NM_007881.2,841-859).
gctagtggaggtgttttat

SEQ ID NO: 672751 - DNA, 19 bp, Mus musculus
  siRNA target sequence for Drpla (NM_007881.2,942-960).
cactaccccaattccaata

SEQ ID NO: 672752 - DNA, 19 bp, Mus musculus
  siRNA target sequence for Drpla (NM_007881.2,948-966).
cccaattccaatatcaagt

SEQ ID NO: 672753 - DNA, 19 bp, Mus musculus
  siRNA target sequence for Drpla (NM_007881.2,949-967).
ccaattccaatatcaagtt

SEQ ID NO: 672754 - DNA, 19 bp, Mus musculus
  siRNA target sequence for Drpla (NM_007881.2,1278-1296).
gcctccaatgcgatatcca

SEQ ID NO: 672755 - DNA, 19 bp, Mus musculus
  siRNA target sequence for Drpla (NM_007881.2,1279-1297).
cctccaatgcgatatccat

SEQ ID NO: 672756 - DNA, 19 bp, Mus musculus
  siRNA target sequence for Drpla (NM_007881.2,1280-1298).
ctccaatgcgatatccata

SEQ ID NO: 672757 - DNA, 19 bp, Mus musculus
  siRNA target sequence for Drpla (NM_007881.2,1282-1300).
ccaatgcgatatccatatt

SEQ ID NO: 672758 - DNA, 19 bp, Mus musculus
  siRNA target sequence for Drpla (NM_007881.2,1318-1336).
gccgcagcctcttctagtt

SEQ ID NO: 672759 - DNA, 19 bp, Mus musculus
  siRNA target sequence for Drpla (NM_007881.2,1402-1420).
cccccaccaactagtatgt

SEQ ID NO: 672760 - DNA, 19 bp, Mus musculus
  siRNA target sequence for Drpla (NM_007881.2,1415-1433).
gtatgtctgtctctaatca

SEQ ID NO: 672761 - DNA, 19 bp, Mus musculus
  siRNA target sequence for Drpla (NM_007881.2,1555-1573).
cctactgggggtcaatcta

SEQ ID NO: 672762 - DNA, 19 bp, Mus musculus
  siRNA target sequence for Drpla (NM_007881.2,1702-1720).
catgcacacccttacaaca

SEQ ID NO: 672763 - DNA, 19 bp, Mus musculus
  siRNA target sequence for Drpla (NM_007881.2,1783-1801).
catggccaggtgtcctata

SEQ ID NO: 672764 - DNA, 19 bp, Mus musculus
  siRNA target sequence for Drpla (NM_007881.2,1788-1806).
ccaggtgtcctataaccaa

SEQ ID NO: 672765 - DNA, 19 bp, Mus musculus
  siRNA target sequence for Drpla (NM_007881.2,1819-1837).
ggtcccccagtttcttctt

SEQ ID NO: 672766 - DNA, 19 bp, Mus musculus
  siRNA target sequence for Drpla (NM_007881.2,1861-1879).
caagcctcctattcatgtt

SEQ ID NO: 672767 - DNA, 19 bp, Mus musculus
  siRNA target sequence for Drpla (NM_007881.2,2288-2306).
ccgccacgcagatcaaaca

SEQ ID NO: 672768 - DNA, 19 bp, Mus musculus
  siRNA target sequence for Drpla (NM_007881.2,3071-3089).
cacctggcctgcatccttt

SEQ ID NO: 672769 - DNA, 19 bp, Mus musculus
  siRNA target sequence for Drpla (NM_007881.2,3345-3363).
ctcggtgcaccctctcatt

SEQ ID NO: 672770 - DNA, 19 bp, Mus musculus
  siRNA target sequence for Drpla (NM_007881.2,3447-3465).
gcacgagaacgaagttctt

SEQ ID NO: 672771 - DNA, 19 bp, Mus musculus
  siRNA target sequence for AF397014 (NM_138654.2,168-186).
cctttgccacgatgaattt

SEQ ID NO: 672772 - DNA, 19 bp, Mus musculus
  siRNA target sequence for AF397014 (NM_138654.2,169-187).
ctttgccacgatgaattta

SEQ ID NO: 672773 - DNA, 19 bp, Mus musculus
  siRNA target sequence for AF397014 (NM_138654.2,198-216).
gagcagaagttataaaagt

SEQ ID NO: 672774 - DNA, 19 bp, Mus musculus
  siRNA target sequence for AF397014 (NM_138654.2,249-267).
cttggggacctccttttgt

SEQ ID NO: 672775 - DNA, 19 bp, Mus musculus
  siRNA target sequence for AF397014 (NM_138654.2,290-308).
cttagtgttaatcgaaata

SEQ ID NO: 672776 - DNA, 19 bp, Mus musculus
  siRNA target sequence for AF397014 (NM_138654.2,417-435).
ctgagatgggcctaggata

SEQ ID NO: 672777 - DNA, 19 bp, Mus musculus
  siRNA target sequence for AF397014 (NM_138654.2,424-442).
gggcctaggatatgaagat

SEQ ID NO: 672778 - DNA, 19 bp, Mus musculus
  siRNA target sequence for AF397014 (NM_138654.2,425-443).
ggcctaggatatgaagata

SEQ ID NO: 672779 - DNA, 19 bp, Mus musculus
  siRNA target sequence for AF397014 (NM_138654.2,426-444).
gcctaggatatgaagatat

SEQ ID NO: 672780 - DNA, 19 bp, Mus musculus
  siRNA target sequence for AF397014 (NM_138654.2,516-534).
gagcaggttatgatgctat

SEQ ID NO: 672781 - DNA, 19 bp, Mus musculus
  siRNA target sequence for AF397014 (NM_138654.2,521-539).
ggttatgatgctattgctt

SEQ ID NO: 672782 - DNA, 19 bp, Mus musculus
  siRNA target sequence for AF397014 (NM_138654.2,540-558).
ctgctatgtctggtctaat

SEQ ID NO: 672783 - DNA, 19 bp, Mus musculus
  siRNA target sequence for AF397014 (NM_138654.2,543-561).
ctatgtctggtctaatgca

SEQ ID NO: 672784 - DNA, 19 bp, Mus musculus
  siRNA target sequence for AF397014 (NM_138654.2,616-634).
cctcgccactggtcttttt

SEQ ID NO: 672785 - DNA, 19 bp, Mus musculus
  siRNA target sequence for AF397014 (NM_138654.2,656-674).
ggcctcctacaacgttata

SEQ ID NO: 672786 - DNA, 19 bp, Mus musculus
  siRNA target sequence for AF397014 (NM_138654.2,658-676).
cctcctacaacgttataga

SEQ ID NO: 672787 - DNA, 19 bp, Mus musculus
  siRNA target sequence for AF397014 (NM_138654.2,714-732).
catcacaggtggcatgttt

SEQ ID NO: 672788 - DNA, 19 bp, Mus musculus
  siRNA target sequence for AF397014 (NM_138654.2,733-751).
gacccaagtagctgctaat

SEQ ID NO: 672789 - DNA, 19 bp, Mus musculus
  siRNA target sequence for AF397014 (NM_138654.2,736-754).
ccaagtagctgctaattat

SEQ ID NO: 672790 - DNA, 19 bp, Mus musculus
  siRNA target sequence for AF397014 (NM_138654.2,789-807).
cagctcatggcagtattgt

SEQ ID NO: 672791 - DNA, 19 bp, Mus musculus
  siRNA target sequence for AF397014 (NM_138654.2,875-893).
gctgtggtatgcaagatct

SEQ ID NO: 672792 - DNA, 19 bp, Mus musculus
  siRNA target sequence for AF397014 (NM_138654.2,876-894).
ctgtggtatgcaagatctt

SEQ ID NO: 672793 - DNA, 19 bp, Mus musculus
  siRNA target sequence for AF397014 (NM_138654.2,878-896).
gtggtatgcaagatcttga

SEQ ID NO: 672794 - DNA, 19 bp, Mus musculus
  siRNA target sequence for AF397014 (NM_138654.2,937-955).
ccatcttcgggtacagaat

SEQ ID NO: 672795 - DNA, 19 bp, Mus musculus
  siRNA target sequence for AF397014 (NM_138654.2,938-956).
catcttcgggtacagaata

SEQ ID NO: 672796 - DNA, 19 bp, Mus musculus
  siRNA target sequence for AF397014 (NM_138654.2,941-959).
cttcgggtacagaatagaa

SEQ ID NO: 672797 - DNA, 19 bp, Mus musculus
  siRNA target sequence for AF397014 (NM_138654.2,962-980).
gagcttgtgaaaatccttt

SEQ ID NO: 672798 - DNA, 19 bp, Mus musculus
  siRNA target sequence for AF397014 (NM_138654.2,1009-1027).
caagtggctttgtctcttt

SEQ ID NO: 672799 - DNA, 19 bp, Mus musculus
  siRNA target sequence for AF397014 (NM_138654.2,1080-1098).
cagaagcccaggtattgca

SEQ ID NO: 672800 - DNA, 19 bp, Mus musculus
  siRNA target sequence for AF397014 (NM_138654.2,1105-1123).
ccttgttatggagatgaat

SEQ ID NO: 672801 - DNA, 19 bp, Mus musculus
  siRNA target sequence for AF397014 (NM_138654.2,1127-1145).
ccaactgtggggaagattt

SEQ ID NO: 672802 - DNA, 19 bp, Mus musculus
  siRNA target sequence for AF397014 (NM_138654.2,1154-1172).
ggtccagctgtgagataca

SEQ ID NO: 672803 - DNA, 19 bp, Mus musculus
  siRNA target sequence for 4930511J11Rik (NM_029070.1,571-589).
ccgacttctggtacatcat

SEQ ID NO: 672804 - DNA, 19 bp, Mus musculus
  siRNA target sequence for 4930511J11Rik (NM_029070.1,712-730).
cctgcacgccgttgatgaa

SEQ ID NO: 672805 - DNA, 19 bp, Mus musculus
  siRNA target sequence for 4930511J11Rik (NM_029070.1,733-751).
ctttctggcaggagaatgt

SEQ ID NO: 672806 - DNA, 19 bp, Mus musculus
  siRNA target sequence for 4930511J11Rik (NM_029070.1,792-810).
gggacattcgtgatcttat

SEQ ID NO: 672807 - DNA, 19 bp, Mus musculus
  siRNA target sequence for 4930511J11Rik (NM_029070.1,793-811).
ggacattcgtgatcttatt

SEQ ID NO: 672808 - DNA, 19 bp, Mus musculus
  siRNA target sequence for 4930511J11Rik (NM_029070.1,1047-1065).
ctggccctcggctggatta

SEQ ID NO: 672809 - DNA, 19 bp, Mus musculus
  siRNA target sequence for 4930511J11Rik (NM_029070.1,1051-1069).
ccctcggctggattagctt

SEQ ID NO: 672810 - DNA, 19 bp, Mus musculus
  siRNA target sequence for 4930511J11Rik (NM_029070.1,1055-1073).
cggctggattagctttgta

SEQ ID NO: 672811 - DNA, 19 bp, Mus musculus
  siRNA target sequence for 4930511J11Rik (NM_029070.1,1056-1074).
ggctggattagctttgtat

SEQ ID NO: 672812 - DNA, 19 bp, Mus musculus
  siRNA target sequence for 4933417N20Rik (NM_175443.2,206-224).
ctggaagcccgaacaagtt

SEQ ID NO: 672813 - DNA, 19 bp, Mus musculus
  siRNA target sequence for 4933417N20Rik (NM_175443.2,247-265).
gcatcaccaacaagctatt

SEQ ID NO: 672814 - DNA, 19 bp, Mus musculus
  siRNA target sequence for 4933417N20Rik (NM_175443.2,402-420).
ctctactgtacctttcaga

SEQ ID NO: 672815 - DNA, 19 bp, Mus musculus
  siRNA target sequence for 4933417N20Rik (NM_175443.2,424-442).
ggctgtgctacgagtatgt

SEQ ID NO: 672816 - DNA, 19 bp, Mus musculus
  siRNA target sequence for 4933417N20Rik (NM_175443.2,493-511).
ggttgatcgccttagaaat

SEQ ID NO: 672817 - DNA, 19 bp, Mus musculus
  siRNA target sequence for 4933417N20Rik (NM_175443.2,503-521).
cttagaaatggctaagatt

SEQ ID NO: 672818 - DNA, 19 bp, Mus musculus
  siRNA target sequence for 4933417N20Rik (NM_175443.2,507-525).
gaaatggctaagattcaca

SEQ ID NO: 672819 - DNA, 19 bp, Mus musculus
  siRNA target sequence for 4933417N20Rik (NM_175443.2,555-573).
cccacgctctggcataaga

SEQ ID NO: 672820 - DNA, 19 bp, Mus musculus
  siRNA target sequence for 4933417N20Rik (NM_175443.2,678-696).
cacctgtcccagttggatt

SEQ ID NO: 672821 - DNA, 19 bp, Mus musculus
  siRNA target sequence for Atp6v0d2 (NM_175406.1,80-98).
ctgcagagctgtacttcaa

SEQ ID NO: 672822 - DNA, 19 bp, Mus musculus
  siRNA target sequence for Atp6v0d2 (NM_175406.1,123-141).
cctggttcgaggatgcaaa

SEQ ID NO: 672823 - DNA, 19 bp, Mus musculus
  siRNA target sequence for Atp6v0d2 (NM_175406.1,155-173).
ctcagcaggactatgtcaa

SEQ ID NO: 672824 - DNA, 19 bp, Mus musculus
  siRNA target sequence for Atp6v0d2 (NM_175406.1,237-255).
cttcctggctaatgaaaca

SEQ ID NO: 672825 - DNA, 19 bp, Mus musculus
  siRNA target sequence for Atp6v0d2 (NM_175406.1,243-261).
ggctaatgaaacaaatcct

SEQ ID NO: 672826 - DNA, 19 bp, Mus musculus
  siRNA target sequence for Atp6v0d2 (NM_175406.1,260-278).
ctctcactgtttccaaaat

SEQ ID NO: 672827 - DNA, 19 bp, Mus musculus
  siRNA target sequence for Atp6v0d2 (NM_175406.1,303-321).
ctgcagagagtttgactat

SEQ ID NO: 672828 - DNA, 19 bp, Mus musculus
  siRNA target sequence for Atp6v0d2 (NM_175406.1,316-334).
gactatttccggaatcatt

SEQ ID NO: 672829 - DNA, 19 bp, Mus musculus
  siRNA target sequence for Atp6v0d2 (NM_175406.1,369-387).
gacatgcagctatatgata

SEQ ID NO: 672830 - DNA, 19 bp, Mus musculus
  siRNA target sequence for Atp6v0d2 (NM_175406.1,371-389).
catgcagctatatgataga

SEQ ID NO: 672831 - DNA, 19 bp, Mus musculus
  siRNA target sequence for Atp6v0d2 (NM_175406.1,459-477).
cccactgggccgtttcaca

SEQ ID NO: 672832 - DNA, 19 bp, Mus musculus
  siRNA target sequence for Atp6v0d2 (NM_175406.1,506-524).
ccccctcagatctcttcaa

SEQ ID NO: 672833 - DNA, 19 bp, Mus musculus
  siRNA target sequence for Atp6v0d2 (NM_175406.1,525-543).
ggctgtgctggttgaaaca

SEQ ID NO: 672834 - DNA, 19 bp, Mus musculus
  siRNA target sequence for Atp6v0d2 (NM_175406.1,542-560).
caccattagctccattctt

SEQ ID NO: 672835 - DNA, 19 bp, Mus musculus
  siRNA target sequence for Atp6v0d2 (NM_175406.1,545-563).
cattagctccattctttca

SEQ ID NO: 672836 - DNA, 19 bp, Mus musculus
  siRNA target sequence for Atp6v0d2 (NM_175406.1,632-650).
cttaccttgaggcattcta

SEQ ID NO: 672837 - DNA, 19 bp, Mus musculus
  siRNA target sequence for Atp6v0d2 (NM_175406.1,640-658).
gaggcattctacaaattct

SEQ ID NO: 672838 - DNA, 19 bp, Mus musculus
  siRNA target sequence for Atp6v0d2 (NM_175406.1,676-694).
gtcacagcagacgttatgt

SEQ ID NO: 672839 - DNA, 19 bp, Mus musculus
  siRNA target sequence for Atp6v0d2 (NM_175406.1,678-696).
cacagcagacgttatgtgt

SEQ ID NO: 672840 - DNA, 19 bp, Mus musculus
  siRNA target sequence for Atp6v0d2 (NM_175406.1,687-705).
cgttatgtgtcccattctt

SEQ ID NO: 672841 - DNA, 19 bp, Mus musculus
  siRNA target sequence for Atp6v0d2 (NM_175406.1,715-733).
gccgacagacgcgctttaa

SEQ ID NO: 672842 - DNA, 19 bp, Mus musculus
  siRNA target sequence for Atp6v0d2 (NM_175406.1,864-882).
gagagtggcagataattat

SEQ ID NO: 672843 - DNA, 19 bp, Mus musculus
  siRNA target sequence for Atp6v0d2 (NM_175406.1,937-955).
gaagacgttttctatgaga

SEQ ID NO: 672844 - DNA, 19 bp, Mus musculus
  siRNA target sequence for Atp6v0d2 (NM_175406.1,1076-1094).
cacagaggcatcgaactaa

SEQ ID NO: 672845 - DNA, 19 bp, Mus musculus
  siRNA target sequence for Atp6v0d2 (NM_175406.1,1078-1096).
cagaggcatcgaactaaaa

SEQ ID NO: 672846 - DNA, 19 bp, Mus musculus
  siRNA target sequence for Atp6v0d2 (NM_175406.1,1082-1100).
ggcatcgaactaaaatcaa

SEQ ID NO: 672847 - DNA, 19 bp, Mus musculus
  siRNA target sequence for Atp6v0d2 (NM_175406.1,1084-1102).
catcgaactaaaatcaaca

SEQ ID NO: 672848 - DNA, 19 bp, Mus musculus
  siRNA target sequence for Atp6v0d2 (NM_175406.1,1101-1119).
cagctacattccaatttta

SEQ ID NO: 672849 - DNA, 19 bp, Mus musculus
  siRNA target sequence for Tcirg1 (NM_016921.2,1387-1405).
gcacggactgctcatgttt

SEQ ID NO: 672850 - DNA, 19 bp, Mus musculus
  siRNA target sequence for Tcirg1 (NM_016921.2,1531-1549).
cactggcttcatctacaat

SEQ ID NO: 672851 - DNA, 19 bp, Mus musculus
  siRNA target sequence for Tcirg1 (NM_016921.2,1535-1553).
ggcttcatctacaatgagt

SEQ ID NO: 672852 - DNA, 19 bp, Mus musculus
  siRNA target sequence for Tcirg1 (NM_016921.2,1560-1578).
gccgagccaccactatttt

SEQ ID NO: 672853 - DNA, 19 bp, Mus musculus
  siRNA target sequence for Tcirg1 (NM_016921.2,1973-1991).
cccagtatcctcattcact

SEQ ID NO: 672854 - DNA, 19 bp, Mus musculus
  siRNA target sequence for Tcirg1 (NM_016921.2,1974-1992).
ccagtatcctcattcactt

SEQ ID NO: 672855 - DNA, 19 bp, Mus musculus
  siRNA target sequence for Tcirg1 (NM_016921.2,2138-2156).
caccgccacagaagaaaca

SEQ ID NO: 672856 - DNA, 19 bp, Mus musculus
  siRNA target sequence for Tcirg1 (NM_016921.2,2140-2158).
ccgccacagaagaaacact

SEQ ID NO: 672857 - DNA, 19 bp, Mus musculus
  siRNA target sequence for Tcirg1 (NM_016921.2,2596-2614).
ccagaacaagttctattca

SEQ ID NO: 672858 - DNA, 19 bp, Mus musculus
  siRNA target sequence for Clns1a (NM_023671.1,52-70).
gcaatgagcttcctcaaaa

SEQ ID NO: 672859 - DNA, 19 bp, Mus musculus
  siRNA target sequence for A930031E15Rik (NM_146255.1,377-395).
ctctcaccacaggagatta

SEQ ID NO: 672860 - DNA, 19 bp, Mus musculus
  siRNA target sequence for A930031E15Rik (NM_146255.1,379-397).
ctcaccacaggagattagt

SEQ ID NO: 672861 - DNA, 19 bp, Mus musculus
  siRNA target sequence for A930031E15Rik (NM_146255.1,381-399).
caccacaggagattagtta

SEQ ID NO: 672862 - DNA, 19 bp, Mus musculus
  siRNA target sequence for A930031E15Rik (NM_146255.1,674-692).
gatcttgtccggaacatgt

SEQ ID NO: 672863 - DNA, 19 bp, Mus musculus
  siRNA target sequence for A930031E15Rik (NM_146255.1,735-753).
ccaagaccaccccagttat

SEQ ID NO: 672864 - DNA, 19 bp, Mus musculus
  siRNA target sequence for A930031E15Rik (NM_146255.1,825-843).
gctcacgtgtgcagaactt

SEQ ID NO: 672865 - DNA, 19 bp, Mus musculus
  siRNA target sequence for A930031E15Rik (NM_146255.1,866-884).
cctgagattgtctacaagt

SEQ ID NO: 672866 - DNA, 19 bp, Mus musculus
  siRNA target sequence for A930031E15Rik (NM_146255.1,936-954).
cagccacgatgggtatcat

SEQ ID NO: 672867 - DNA, 19 bp, Mus musculus
  siRNA target sequence for A930031E15Rik (NM_146255.1,1073-1091).
ctgatcgctggcaagatct

SEQ ID NO: 672868 - DNA, 19 bp, Mus musculus
  siRNA target sequence for A930031E15Rik (NM_146255.1,1438-1456).
caactatgagctagacttt

SEQ ID NO: 672869 - DNA, 19 bp, Mus musculus
  siRNA target sequence for A930031E15Rik (NM_146255.1,1563-1581).
gactgccgaccgatgacat

SEQ ID NO: 672870 - DNA, 19 bp, Mus musculus
  siRNA target sequence for A930031E15Rik (NM_146255.1,1616-1634).
cgcttccgaaccatgatta

SEQ ID NO: 672871 - DNA, 19 bp, Mus musculus
  siRNA target sequence for A930031E15Rik (NM_146255.1,1617-1635).
gcttccgaaccatgattaa

SEQ ID NO: 672872 - DNA, 19 bp, Mus musculus
  siRNA target sequence for A930031E15Rik (NM_146255.1,1618-1636).
cttccgaaccatgattaat

SEQ ID NO: 672873 - DNA, 19 bp, Mus musculus
  siRNA target sequence for A930031E15Rik (NM_146255.1,1673-1691).
cacatctgccggaaggatt

SEQ ID NO: 672874 - DNA, 19 bp, Mus musculus
  siRNA target sequence for A930031E15Rik (NM_146255.1,1675-1693).
catctgccggaaggatttt

SEQ ID NO: 672875 - DNA, 19 bp, Mus musculus
  siRNA target sequence for A930031E15Rik (NM_146255.1,1678-1696).
ctgccggaaggattttgct

SEQ ID NO: 672876 - DNA, 19 bp, Mus musculus
  siRNA target sequence for A930031E15Rik (NM_146255.1,1884-1902).
gcctagaccactgtactat

SEQ ID NO: 672877 - DNA, 19 bp, Mus musculus
  siRNA target sequence for A930031E15Rik (NM_146255.1,1885-1903).
cctagaccactgtactatt

SEQ ID NO: 672878 - DNA, 19 bp, Mus musculus
  siRNA target sequence for 1810012I05Rik (NM_178027.3,472-490).
ggaaatcttgctgaatgat

SEQ ID NO: 672879 - DNA, 19 bp, Mus musculus
  siRNA target sequence for 1810012I05Rik (NM_178027.3,579-597).
ggaaagtgagcctatcact

SEQ ID NO: 672880 - DNA, 19 bp, Mus musculus
  siRNA target sequence for 1810012I05Rik (NM_178027.3,651-669).
ggcagatcgaactctacta

SEQ ID NO: 672881 - DNA, 19 bp, Mus musculus
  siRNA target sequence for 1810012I05Rik (NM_178027.3,652-670).
gcagatcgaactctactat

SEQ ID NO: 672882 - DNA, 19 bp, Mus musculus
  siRNA target sequence for 1810012I05Rik (NM_178027.3,675-693).
gtgggaaccaccatgagtt

SEQ ID NO: 672883 - DNA, 19 bp, Mus musculus
  siRNA target sequence for 1810012I05Rik (NM_178027.3,741-759).
cgcaggccttcgactttga

SEQ ID NO: 672884 - DNA, 19 bp, Mus musculus
  siRNA target sequence for 1810012I05Rik (NM_178027.3,743-761).
caggccttcgactttgagt

SEQ ID NO: 672885 - DNA, 19 bp, Mus musculus
  siRNA target sequence for 1810012I05Rik (NM_178027.3,808-826).
gaagctccgctatttcctt

SEQ ID NO: 672886 - DNA, 19 bp, Mus musculus
  siRNA target sequence for 1810012I05Rik (NM_178027.3,943-961).
ggattgcctgcacattgaa

SEQ ID NO: 672887 - DNA, 19 bp, Mus musculus
  siRNA target sequence for 1810012I05Rik (NM_178027.3,944-962).
gattgcctgcacattgaat

SEQ ID NO: 672888 - DNA, 19 bp, Mus musculus
  siRNA target sequence for 1810012I05Rik (NM_178027.3,959-977).
gaatttgagtacaacaaat

SEQ ID NO: 672889 - DNA, 19 bp, Mus musculus
  siRNA target sequence for 1810012I05Rik (NM_178027.3,978-996).
ccaaataccacttgaaaga

SEQ ID NO: 672890 - DNA, 19 bp, Mus musculus
  siRNA target sequence for 1810012I05Rik (NM_178027.3,998-1016).
gtcattgtagggaagatat

SEQ ID NO: 672891 - DNA, 19 bp, Mus musculus
  siRNA target sequence for 1810012I05Rik (NM_178027.3,1051-1069).
ggagatagacatcatcaaa

SEQ ID NO: 672892 - DNA, 19 bp, Mus musculus
  siRNA target sequence for 1810012I05Rik (NM_178027.3,1102-1120).
ccacgagaacgacacaata

SEQ ID NO: 672893 - DNA, 19 bp, Mus musculus
  siRNA target sequence for 1810012I05Rik (NM_178027.3,1111-1129).
cgacacaatagcgaagtat

SEQ ID NO: 672894 - DNA, 19 bp, Mus musculus
  siRNA target sequence for 1810012I05Rik (NM_178027.3,1116-1134).
caatagcgaagtatgagat

SEQ ID NO: 672895 - DNA, 19 bp, Mus musculus
  siRNA target sequence for 1810012I05Rik (NM_178027.3,1205-1223).
cccaccatgcgtgacataa

SEQ ID NO: 672896 - DNA, 19 bp, Mus musculus
  siRNA target sequence for 1810012I05Rik (NM_178027.3,1207-1225).
caccatgcgtgacataaat

SEQ ID NO: 672897 - DNA, 19 bp, Mus musculus
  siRNA target sequence for 1810012I05Rik (NM_178027.3,1209-1227).
ccatgcgtgacataaataa

SEQ ID NO: 672898 - DNA, 19 bp, Mus musculus
  siRNA target sequence for 1810012I05Rik (NM_178027.3,1274-1292).
gaggaacggcgctacttca

SEQ ID NO: 672899 - DNA, 19 bp, Mus musculus
  siRNA target sequence for 4933401N24Rik (NM_175367.2,501-519).
cgaccttggaccatgtcat

SEQ ID NO: 672900 - DNA, 19 bp, Mus musculus
  siRNA target sequence for 4933401N24Rik (NM_175367.2,799-817).
ctgggtccagtttgaagat

SEQ ID NO: 672901 - DNA, 19 bp, Mus musculus
  siRNA target sequence for 4933401N24Rik (NM_175367.2,801-819).
gggtccagtttgaagatga

SEQ ID NO: 672902 - DNA, 19 bp, Mus musculus
  siRNA target sequence for 4933401N24Rik (NM_175367.2,854-872).
gaaacagccctcacattga

SEQ ID NO: 672903 - DNA, 19 bp, Mus musculus
  siRNA target sequence for 4933401N24Rik (NM_175367.2,1177-1195).
ccccagctgggtcactttt

SEQ ID NO: 672904 - DNA, 19 bp, Mus musculus
  siRNA target sequence for 4933401N24Rik (NM_175367.2,1185-1203).
gggtcacttttgaagacaa

SEQ ID NO: 672905 - DNA, 19 bp, Mus musculus
  siRNA target sequence for 4933401N24Rik (NM_175367.2,1227-1245).
cagtcccctctccaaagaa

SEQ ID NO: 672906 - DNA, 19 bp, Mus musculus
  siRNA target sequence for 4933401N24Rik (NM_175367.2,1275-1293).
ccccagatgtacctttcaa

SEQ ID NO: 672907 - DNA, 19 bp, Mus musculus
  siRNA target sequence for 4933401N24Rik (NM_175367.2,1277-1295).
ccagatgtacctttcaact

SEQ ID NO: 672908 - DNA, 19 bp, Mus musculus
  siRNA target sequence for 4933401N24Rik (NM_175367.2,1280-1298).
gatgtacctttcaactcaa

SEQ ID NO: 672909 - DNA, 19 bp, Mus musculus
  siRNA target sequence for 4933401N24Rik (NM_175367.2,1327-1345).
gagcacactgatgaactta

SEQ ID NO: 672910 - DNA, 19 bp, Mus musculus
  siRNA target sequence for 4933401N24Rik (NM_175367.2,1336-1354).
gatgaacttacccaaagtt

SEQ ID NO: 672911 - DNA, 19 bp, Mus musculus
  siRNA target sequence for 4933401N24Rik (NM_175367.2,1383-1401).
ggccaccttctgtaatcga

SEQ ID NO: 672912 - DNA, 19 bp, Mus musculus
  siRNA target sequence for 4933401N24Rik (NM_175367.2,1474-1492).
cccgttcagtgctttcttt

SEQ ID NO: 672913 - DNA, 19 bp, Mus musculus
  siRNA target sequence for 4933401N24Rik (NM_175367.2,1502-1520).
gaaaggcgctcccaaaaca

SEQ ID NO: 672914 - DNA, 19 bp, Mus musculus
  siRNA target sequence for 4933401N24Rik (NM_175367.2,1539-1557).
ccggcaaaagccaaagaga

SEQ ID NO: 672915 - DNA, 19 bp, Mus musculus
  siRNA target sequence for 4933401N24Rik (NM_175367.2,1540-1558).
cggcaaaagccaaagagat

SEQ ID NO: 672916 - DNA, 19 bp, Mus musculus
  siRNA target sequence for 4933401N24Rik (NM_175367.2,1619-1637).
caccccgacgccatcgaaa

SEQ ID NO: 672917 - DNA, 19 bp, Mus musculus
  siRNA target sequence for 4933401N24Rik (NM_175367.2,1623-1641).
ccgacgccatcgaaaagct

SEQ ID NO: 672918 - DNA, 19 bp, Mus musculus
  siRNA target sequence for 4933401N24Rik (NM_175367.2,1639-1657).
gctcaagcaactccaaatt

SEQ ID NO: 672919 - DNA, 19 bp, Mus musculus
  siRNA target sequence for 4933401N24Rik (NM_175367.2,1704-1722).
ccacggcctcggttgaact

SEQ ID NO: 672920 - DNA, 19 bp, Mus musculus
  siRNA target sequence for 4933401N24Rik (NM_175367.2,1761-1779).
gggacgggtggccaatgat

SEQ ID NO: 672921 - DNA, 19 bp, Mus musculus
  siRNA target sequence for 4933401N24Rik (NM_175367.2,1783-1801).
gcgaatccccgagaagaaa

SEQ ID NO: 672922 - DNA, 19 bp, Mus musculus
  siRNA target sequence for 4933401N24Rik (NM_175367.2,1784-1802).
cgaatccccgagaagaaaa

SEQ ID NO: 672923 - DNA, 19 bp, Mus musculus
  siRNA target sequence for 4933401N24Rik (NM_175367.2,1785-1803).
gaatccccgagaagaaaaa

SEQ ID NO: 672924 - DNA, 19 bp, Mus musculus
  siRNA target sequence for 4933401N24Rik (NM_175367.2,1818-1836).
ggcactggggaccaatcta

SEQ ID NO: 672925 - DNA, 19 bp, Mus musculus
  siRNA target sequence for 4933401N24Rik (NM_175367.2,1827-1845).
gaccaatctacatcaaact

SEQ ID NO: 672926 - DNA, 19 bp, Mus musculus
  siRNA target sequence for 4933401N24Rik (NM_175367.2,1829-1847).
ccaatctacatcaaactga

SEQ ID NO: 672927 - DNA, 19 bp, Mus musculus
  siRNA target sequence for 4933401N24Rik (NM_175367.2,1856-1874).
ggttacctgcagctgtatt

SEQ ID NO: 672928 - DNA, 19 bp, Mus musculus
  siRNA target sequence for 4933401N24Rik (NM_175367.2,1986-2004).
ggatagaccgggtcactta

SEQ ID NO: 672929 - DNA, 19 bp, Mus musculus
  siRNA target sequence for 4933401N24Rik (NM_175367.2,2053-2071).
ggaacgggaacaggtaatt

SEQ ID NO: 672930 - DNA, 19 bp, Mus musculus
  siRNA target sequence for 4933401N24Rik (NM_175367.2,2054-2072).
gaacgggaacaggtaatta

SEQ ID NO: 672931 - DNA, 19 bp, Mus musculus
  siRNA target sequence for 4933401N24Rik (NM_175367.2,2058-2076).
gggaacaggtaattaaact

SEQ ID NO: 672932 - DNA, 19 bp, Mus musculus
  siRNA target sequence for 4933401N24Rik (NM_175367.2,2128-2146).
ccgtctcatggatttacca

SEQ ID NO: 672933 - DNA, 19 bp, Mus musculus
  siRNA target sequence for 4933401N24Rik (NM_175367.2,2322-2340).
gcttgggcctcaatgacat

SEQ ID NO: 672934 - DNA, 19 bp, Mus musculus
  siRNA target sequence for 4933401N24Rik (NM_175367.2,2347-2365).
caaagggaacgaaatcgtt

SEQ ID NO: 672935 - DNA, 19 bp, Mus musculus
  siRNA target sequence for 4933401N24Rik (NM_175367.2,2438-2456).
gtggacgaggacgtgttta

SEQ ID NO: 672936 - DNA, 19 bp, Mus musculus
  siRNA target sequence for 4933401N24Rik (NM_175367.2,2441-2459).
gacgaggacgtgtttaaca

SEQ ID NO: 672937 - DNA, 19 bp, Mus musculus
  siRNA target sequence for 4933401N24Rik (NM_175367.2,2443-2461).
cgaggacgtgtttaacagt

SEQ ID NO: 672938 - DNA, 19 bp, Mus musculus
  siRNA target sequence for 4933401N24Rik (NM_175367.2,2444-2462).
gaggacgtgtttaacagtt

SEQ ID NO: 672939 - DNA, 19 bp, Mus musculus
  siRNA target sequence for 4933401N24Rik (NM_175367.2,2463-2481).
cccgggttattctgttcaa

SEQ ID NO: 672940 - DNA, 19 bp, Mus musculus
  siRNA target sequence for 4933401N24Rik (NM_175367.2,2512-2530).
gaggtttaggaccgtattt

SEQ ID NO: 672941 - DNA, 19 bp, Mus musculus
  siRNA target sequence for 4933401N24Rik (NM_175367.2,2559-2577).
ggaccgcagcgagcattaa

SEQ ID NO: 672942 - DNA, 19 bp, Mus musculus
  siRNA target sequence for 4933401N24Rik (NM_175367.2,2658-2676).
cctgtgagaacgtaatggt

SEQ ID NO: 672943 - DNA, 19 bp, Mus musculus
  siRNA target sequence for 4933401N24Rik (NM_175367.2,2801-2819).
gagcccgtcatgagagtaa

SEQ ID NO: 672944 - DNA, 19 bp, Mus musculus
  siRNA target sequence for 4933401N24Rik (NM_175367.2,2803-2821).
gcccgtcatgagagtaact

SEQ ID NO: 672945 - DNA, 19 bp, Mus musculus
  siRNA target sequence for 4933401N24Rik (NM_175367.2,2805-2823).
ccgtcatgagagtaactct

SEQ ID NO: 672946 - DNA, 19 bp, Mus musculus
  siRNA target sequence for 4933401N24Rik (NM_175367.2,2846-2864).
gccttcaactccattgtgt

SEQ ID NO: 672947 - DNA, 19 bp, Mus musculus
  siRNA target sequence for 4933401N24Rik (NM_175367.2,2856-2874).
ccattgtgtggaggataaa

SEQ ID NO: 672948 - DNA, 19 bp, Mus musculus
  siRNA target sequence for 4933401N24Rik (NM_175367.2,2903-2921).
ggccacccacactgtttct

SEQ ID NO: 672949 - DNA, 19 bp, Mus musculus
  siRNA target sequence for 4933401N24Rik (NM_175367.2,2964-2982).
gatttgccaactatgtaaa

SEQ ID NO: 672950 - DNA, 19 bp, Mus musculus
  siRNA target sequence for 4933401N24Rik (NM_175367.2,3059-3077).
gtcaggaagtgggtcaatt

SEQ ID NO: 672951 - DNA, 19 bp, Mus musculus
  siRNA target sequence for 4933401N24Rik (NM_175367.2,3061-3079).
caggaagtgggtcaattat

SEQ ID NO: 672952 - DNA, 19 bp, Mus musculus
  siRNA target sequence for 4933401N24Rik (NM_175367.2,3091-3109).
cagctacaaggtggaaatt

SEQ ID NO: 672953 - DNA, 19 bp, Mus musculus
  siRNA target sequence for Ap3m2 (NM_029505.1,203-221).
gccgctctgtgtgtgatta

SEQ ID NO: 672954 - DNA, 19 bp, Mus musculus
  siRNA target sequence for Ap3m2 (NM_029505.1,304-322).
gtttaccggcacaagatct

SEQ ID NO: 672955 - DNA, 19 bp, Mus musculus
  siRNA target sequence for Ap3m2 (NM_029505.1,311-329).
ggcacaagatcttctttgt

SEQ ID NO: 672956 - DNA, 19 bp, Mus musculus
  siRNA target sequence for Ap3m2 (NM_029505.1,349-367).
gtcccgcctctgtttgtca

SEQ ID NO: 672957 - DNA, 19 bp, Mus musculus
  siRNA target sequence for Ap3m2 (NM_029505.1,353-371).
cgcctctgtttgtcattga

SEQ ID NO: 672958 - DNA, 19 bp, Mus musculus
  siRNA target sequence for Ap3m2 (NM_029505.1,419-437).
gttccgagccagtgatcaa

SEQ ID NO: 672959 - DNA, 19 bp, Mus musculus
  siRNA target sequence for Ap3m2 (NM_029505.1,422-440).
ccgagccagtgatcaaaga

SEQ ID NO: 672960 - DNA, 19 bp, Mus musculus
  siRNA target sequence for Ap3m2 (NM_029505.1,426-444).
gccagtgatcaaagacaat

SEQ ID NO: 672961 - DNA, 19 bp, Mus musculus
  siRNA target sequence for Ap3m2 (NM_029505.1,509-527).
caaacatcctcaaagaact

SEQ ID NO: 672962 - DNA, 19 bp, Mus musculus
  siRNA target sequence for Ap3m2 (NM_029505.1,513-531).
catcctcaaagaactgata

SEQ ID NO: 672963 - DNA, 19 bp, Mus musculus
  siRNA target sequence for Ap3m2 (NM_029505.1,631-649).
cgacggacaggggtgaaat

SEQ ID NO: 672964 - DNA, 19 bp, Mus musculus
  siRNA target sequence for Ap3m2 (NM_029505.1,632-650).
gacggacaggggtgaaata

SEQ ID NO: 672965 - DNA, 19 bp, Mus musculus
  siRNA target sequence for Ap3m2 (NM_029505.1,634-652).
cggacaggggtgaaatata

SEQ ID NO: 672966 - DNA, 19 bp, Mus musculus
  siRNA target sequence for Ap3m2 (NM_029505.1,653-671).
ccaacaacgaggcctattt

SEQ ID NO: 672967 - DNA, 19 bp, Mus musculus
  siRNA target sequence for Ap3m2 (NM_029505.1,936-954).
cgttgccattccagtctat

SEQ ID NO: 672968 - DNA, 19 bp, Mus musculus
  siRNA target sequence for Ap3m2 (NM_029505.1,941-959).
ccattccagtctatgtcaa

SEQ ID NO: 672969 - DNA, 19 bp, Mus musculus
  siRNA target sequence for Ap3m2 (NM_029505.1,1040-1058).
ccatagagggtgtgattgt

SEQ ID NO: 672970 - DNA, 19 bp, Mus musculus
  siRNA target sequence for Ap3m2 (NM_029505.1,1072-1090).
cccaaaggagtcctgaata

SEQ ID NO: 672971 - DNA, 19 bp, Mus musculus
  siRNA target sequence for Ap3m2 (NM_029505.1,1073-1091).
ccaaaggagtcctgaatat

SEQ ID NO: 672972 - DNA, 19 bp, Mus musculus
  siRNA target sequence for Ap3m2 (NM_029505.1,1121-1139).
cgtttgaccccgtgacaaa

SEQ ID NO: 672973 - DNA, 19 bp, Mus musculus
  siRNA target sequence for Ap3m2 (NM_029505.1,1209-1227).
ccaggtcggagcttctaaa

SEQ ID NO: 672974 - DNA, 19 bp, Mus musculus
  siRNA target sequence for Ap3m2 (NM_029505.1,1231-1249).
gatgagaaccctacgatta

SEQ ID NO: 672975 - DNA, 19 bp, Mus musculus
  siRNA target sequence for Ap3m2 (NM_029505.1,1277-1295).
ccatttctggactcaaagt

SEQ ID NO: 672976 - DNA, 19 bp, Mus musculus
  siRNA target sequence for Ap4m1 (NM_021392.2,209-227).
ggatccgctcatctataaa

SEQ ID NO: 672977 - DNA, 19 bp, Mus musculus
  siRNA target sequence for Ap4m1 (NM_021392.2,214-232).
cgctcatctataaagactt

SEQ ID NO: 672978 - DNA, 19 bp, Mus musculus
  siRNA target sequence for Ap4m1 (NM_021392.2,301-319).
gcgagtccccggttgtcat

SEQ ID NO: 672979 - DNA, 19 bp, Mus musculus
  siRNA target sequence for Ap4m1 (NM_021392.2,305-323).
gtccccggttgtcatgtat

SEQ ID NO: 672980 - DNA, 19 bp, Mus musculus
  siRNA target sequence for Ap4m1 (NM_021392.2,307-325).
ccccggttgtcatgtatca

SEQ ID NO: 672981 - DNA, 19 bp, Mus musculus
  siRNA target sequence for Ap4m1 (NM_021392.2,324-342).
cacggtgatcgtcatttta

SEQ ID NO: 672982 - DNA, 19 bp, Mus musculus
  siRNA target sequence for Ap4m1 (NM_021392.2,326-344).
cggtgatcgtcattttatt

SEQ ID NO: 672983 - DNA, 19 bp, Mus musculus
  siRNA target sequence for Ap4m1 (NM_021392.2,330-348).
gatcgtcattttattcaca

SEQ ID NO: 672984 - DNA, 19 bp, Mus musculus
  siRNA target sequence for Ap4m1 (NM_021392.2,371-389).
ggtggccacaaccttagaa

SEQ ID NO: 672985 - DNA, 19 bp, Mus musculus
  siRNA target sequence for Ap4m1 (NM_021392.2,376-394).
ccacaaccttagaaaacgt

SEQ ID NO: 672986 - DNA, 19 bp, Mus musculus
  siRNA target sequence for Ap4m1 (NM_021392.2,449-467).
ctactgtggctcactcaat

SEQ ID NO: 672987 - DNA, 19 bp, Mus musculus
  siRNA target sequence for Ap4m1 (NM_021392.2,544-562).
ctacatccacagaaatgct

SEQ ID NO: 672988 - DNA, 19 bp, Mus musculus
  siRNA target sequence for Ap4m1 (NM_021392.2,555-573).
gaaatgctgaggaacttca

SEQ ID NO: 672989 - DNA, 19 bp, Mus musculus
  siRNA target sequence for Ap4m1 (NM_021392.2,561-579).
ctgaggaacttcatccaaa

SEQ ID NO: 672990 - DNA, 19 bp, Mus musculus
  siRNA target sequence for Ap4m1 (NM_021392.2,725-743).
gaatgaggtgtttttggat

SEQ ID NO: 672991 - DNA, 19 bp, Mus musculus
  siRNA target sequence for Ap4m1 (NM_021392.2,752-770).
gagactgtctgtactgatt

SEQ ID NO: 672992 - DNA, 19 bp, Mus musculus
  siRNA target sequence for Ap4m1 (NM_021392.2,760-778).
ctgtactgattgcatctaa

SEQ ID NO: 672993 - DNA, 19 bp, Mus musculus
  siRNA target sequence for Ap4m1 (NM_021392.2,775-793).
ctaatggctcgttgttgaa

SEQ ID NO: 672994 - DNA, 19 bp, Mus musculus
  siRNA target sequence for Ap4m1 (NM_021392.2,797-815).
ggacgtccaaggagagata

SEQ ID NO: 672995 - DNA, 19 bp, Mus musculus
  siRNA target sequence for Ap4m1 (NM_021392.2,839-857).
cggttctgagatatgcatt

SEQ ID NO: 672996 - DNA, 19 bp, Mus musculus
  siRNA target sequence for Ap4m1 (NM_021392.2,854-872).
cattggcttgacagaagaa

SEQ ID NO: 672997 - DNA, 19 bp, Mus musculus
  siRNA target sequence for Ap4m1 (NM_021392.2,887-905).
gtcagaactgagaggttat

SEQ ID NO: 672998 - DNA, 19 bp, Mus musculus
  siRNA target sequence for Ap4m1 (NM_021392.2,908-926).
gccagggattcgagttgat

SEQ ID NO: 672999 - DNA, 19 bp, Mus musculus
  siRNA target sequence for Ap4m1 (NM_021392.2,910-928).
cagggattcgagttgatga

SEQ ID NO: 673000 - DNA, 19 bp, Mus musculus
  siRNA target sequence for Ap4m1 (NM_021392.2,919-937).
gagttgatgaggtgtcatt

SEQ ID NO: 673001 - DNA, 19 bp, Mus musculus
  siRNA target sequence for Ap4m1 (NM_021392.2,927-945).
gaggtgtcattccatagtt

SEQ ID NO: 673002 - DNA, 19 bp, Mus musculus
  siRNA target sequence for Ap4m1 (NM_021392.2,929-947).
ggtgtcattccatagttct

SEQ ID NO: 673003 - DNA, 19 bp, Mus musculus
  siRNA target sequence for Ap4m1 (NM_021392.2,943-961).
gttctgtcaatctagatga

SEQ ID NO: 673004 - DNA, 19 bp, Mus musculus
  siRNA target sequence for Ap4m1 (NM_021392.2,1148-1166).
ccaagctctcaacattcat

SEQ ID NO: 673005 - DNA, 19 bp, Mus musculus
  siRNA target sequence for Ap4m1 (NM_021392.2,1411-1429).
ccggtctccaggttcgatt

SEQ ID NO: 673006 - DNA, 19 bp, Mus musculus
  siRNA target sequence for Ap4m1 (NM_021392.2,1494-1512).
cacagcaacgcctacgtaa

SEQ ID NO: 673007 - DNA, 19 bp, Mus musculus
  siRNA target sequence for Ap4m1 (NM_021392.2,1496-1514).
cagcaacgcctacgtaatt

SEQ ID NO: 673008 - DNA, 19 bp, Mus musculus
  siRNA target sequence for Ap4s1 (NM_021710.1,386-404).
cagacccgactgtctaagt

SEQ ID NO: 673009 - DNA, 19 bp, Mus musculus
  siRNA target sequence for Ap4s1 (NM_021710.1,390-408).
cccgactgtctaagtacta

SEQ ID NO: 673010 - DNA, 19 bp, Mus musculus
  siRNA target sequence for Ap4s1 (NM_021710.1,409-427).
cgagcatgtggacattaat

SEQ ID NO: 673011 - DNA, 19 bp, Mus musculus
  siRNA target sequence for Ap4s1 (NM_021710.1,410-428).
gagcatgtggacattaata

SEQ ID NO: 673012 - DNA, 19 bp, Mus musculus
  siRNA target sequence for Ap4s1 (NM_021710.1,520-538).
gatctaccggcaatatgca

SEQ ID NO: 673013 - DNA, 19 bp, Mus musculus
  siRNA target sequence for Ap4s1 (NM_021710.1,551-569).
gtggttggagttaatgaca

SEQ ID NO: 673014 - DNA, 19 bp, Mus musculus
  siRNA target sequence for Ap4s1 (NM_021710.1,578-596).
gagatggctatctatgaat

SEQ ID NO: 673015 - DNA, 19 bp, Mus musculus
  siRNA target sequence for Ap4s1 (NM_021710.1,671-689).
gataaagttcacatcattt

SEQ ID NO: 673016 - DNA, 19 bp, Mus musculus
  siRNA target sequence for Ap4s1 (NM_021710.1,691-709).
ggatgagatggtgttaaat

SEQ ID NO: 673017 - DNA, 19 bp, Mus musculus
  siRNA target sequence for Ap4s1 (NM_021710.1,726-744).
ctaacagagccagaattct

SEQ ID NO: 673018 - DNA, 19 bp, Mus musculus
  siRNA target sequence for Arcn1 (NM_145985.2,1073-1091).
gccggattcgtcttcatgt

SEQ ID NO: 673019 - DNA, 19 bp, Mus musculus
  siRNA target sequence for Arcn1 (NM_145985.2,1074-1092).
ccggattcgtcttcatgta

SEQ ID NO: 673020 - DNA, 19 bp, Mus musculus
  siRNA target sequence for Arcn1 (NM_145985.2,1127-1145).
cgcatccaaatgtggataa

SEQ ID NO: 673021 - DNA, 19 bp, Mus musculus
  siRNA target sequence for Arcn1 (NM_145985.2,1140-1158).
ggataaaaaactttttact

SEQ ID NO: 673022 - DNA, 19 bp, Mus musculus
  siRNA target sequence for Arcn1 (NM_145985.2,1432-1450).
catgacagtcggagaaata

SEQ ID NO: 673023 - DNA, 19 bp, Mus musculus
  siRNA target sequence for Arcn1 (NM_145985.2,1435-1453).
gacagtcggagaaatacgt

SEQ ID NO: 673024 - DNA, 19 bp, Mus musculus
  siRNA target sequence for Arcn1 (NM_145985.2,1471-1489).
gtgattgatgccaaaaata

SEQ ID NO: 673025 - DNA, 19 bp, Mus musculus
  siRNA target sequence for Arcn1 (NM_145985.2,1650-1668).
cttagtggacaaatacgaa

SEQ ID NO: 673026 - DNA, 19 bp, Mus musculus
  siRNA target sequence for Dscr3 (NM_007834.1,82-100).
gagcgaataaagtgtatca

SEQ ID NO: 673027 - DNA, 19 bp, Mus musculus
  siRNA target sequence for Dscr3 (NM_007834.1,156-174).
caccagggagtctctttga

SEQ ID NO: 673028 - DNA, 19 bp, Mus musculus
  siRNA target sequence for Dscr3 (NM_007834.1,158-176).
ccagggagtctctttgaca

SEQ ID NO: 673029 - DNA, 19 bp, Mus musculus
  siRNA target sequence for Dscr3 (NM_007834.1,175-193).
caatggaagggactgtaaa

SEQ ID NO: 673030 - DNA, 19 bp, Mus musculus
  siRNA target sequence for Dscr3 (NM_007834.1,197-215).
ccagctcagtgccaaaagt

SEQ ID NO: 673031 - DNA, 19 bp, Mus musculus
  siRNA target sequence for Dscr3 (NM_007834.1,220-238).
gtgtgttcgaagcctttta

SEQ ID NO: 673032 - DNA, 19 bp, Mus musculus
  siRNA target sequence for Dscr3 (NM_007834.1,222-240).
gtgttcgaagccttttaca

SEQ ID NO: 673033 - DNA, 19 bp, Mus musculus
  siRNA target sequence for Dscr3 (NM_007834.1,246-264).
gtgaagccgatccagatta

SEQ ID NO: 673034 - DNA, 19 bp, Mus musculus
  siRNA target sequence for Dscr3 (NM_007834.1,252-270).
ccgatccagattatcaaca

SEQ ID NO: 673035 - DNA, 19 bp, Mus musculus
  siRNA target sequence for Dscr3 (NM_007834.1,352-370).
gcagcaaggtcctgtatga

SEQ ID NO: 673036 - DNA, 19 bp, Mus musculus
  siRNA target sequence for Dscr3 (NM_007834.1,373-391).
cttaccacggcgtgtttgt

SEQ ID NO: 673037 - DNA, 19 bp, Mus musculus
  siRNA target sequence for Dscr3 (NM_007834.1,380-398).
cggcgtgtttgtcaacatt

SEQ ID NO: 673038 - DNA, 19 bp, Mus musculus
  siRNA target sequence for Dscr3 (NM_007834.1,382-400).
gcgtgtttgtcaacattca

SEQ ID NO: 673039 - DNA, 19 bp, Mus musculus
  siRNA target sequence for Dscr3 (NM_007834.1,483-501).
cctcagaaggggaagttga

SEQ ID NO: 673040 - DNA, 19 bp, Mus musculus
  siRNA target sequence for Dscr3 (NM_007834.1,502-520).
ccccaagtcctgttgactt

SEQ ID NO: 673041 - DNA, 19 bp, Mus musculus
  siRNA target sequence for Dscr3 (NM_007834.1,523-541).
cgatcactccggaaacctt

SEQ ID NO: 673042 - DNA, 19 bp, Mus musculus
  siRNA target sequence for Dscr3 (NM_007834.1,551-569).
caaagagagagcttcactt

SEQ ID NO: 673043 - DNA, 19 bp, Mus musculus
  siRNA target sequence for Dscr3 (NM_007834.1,739-757).
cagagattcagaatattca

SEQ ID NO: 673044 - DNA, 19 bp, Mus musculus
  siRNA target sequence for Dscr3 (NM_007834.1,761-779).
cgctgatggggacatttgt

SEQ ID NO: 673045 - DNA, 19 bp, Mus musculus
  siRNA target sequence for Stam (NM_011484.2,208-226).
ccttcgaccaggatgttga

SEQ ID NO: 673046 - DNA, 19 bp, Mus musculus
  siRNA target sequence for Stam (NM_011484.2,231-249).
gcaactagtgagttgaata

SEQ ID NO: 673047 - DNA, 19 bp, Mus musculus
  siRNA target sequence for Stam (NM_011484.2,262-280).
ggggcctcatcttggatat

SEQ ID NO: 673048 - DNA, 19 bp, Mus musculus
  siRNA target sequence for Stam (NM_011484.2,269-287).
catcttggatatttgtgat

SEQ ID NO: 673049 - DNA, 19 bp, Mus musculus
  siRNA target sequence for Stam (NM_011484.2,301-319).
ctcgcacaggacctaaaga

SEQ ID NO: 673050 - DNA, 19 bp, Mus musculus
  siRNA target sequence for Stam (NM_011484.2,340-358).
gaagagtgaaccataaaga

SEQ ID NO: 673051 - DNA, 19 bp, Mus musculus
  siRNA target sequence for Stam (NM_011484.2,359-377).
cccccatgttgctatgcaa

SEQ ID NO: 673052 - DNA, 19 bp, Mus musculus
  siRNA target sequence for Stam (NM_011484.2,370-388).
ctatgcaagccttaactct

SEQ ID NO: 673053 - DNA, 19 bp, Mus musculus
  siRNA target sequence for Stam (NM_011484.2,390-408).
ctgggagcatgtgtatcaa

SEQ ID NO: 673054 - DNA, 19 bp, Mus musculus
  siRNA target sequence for Stam (NM_011484.2,393-411).
ggagcatgtgtatcaaact

SEQ ID NO: 673055 - DNA, 19 bp, Mus musculus
  siRNA target sequence for Stam (NM_011484.2,562-580).
gtctgatatcggcaatgat

SEQ ID NO: 673056 - DNA, 19 bp, Mus musculus
  siRNA target sequence for Stam (NM_011484.2,564-582).
ctgatatcggcaatgatca

SEQ ID NO: 673057 - DNA, 19 bp, Mus musculus
  siRNA target sequence for Stam (NM_011484.2,682-700).
ctgtggctaccaaaaagga

SEQ ID NO: 673058 - DNA, 19 bp, Mus musculus
  siRNA target sequence for Stam (NM_011484.2,705-723).
gaagatttagccaaagcta

SEQ ID NO: 673059 - DNA, 19 bp, Mus musculus
  siRNA target sequence for Stam (NM_011484.2,860-878).
ggataatgagcttaccttt

SEQ ID NO: 673060 - DNA, 19 bp, Mus musculus
  siRNA target sequence for Stam (NM_011484.2,861-879).
gataatgagcttaccttta

SEQ ID NO: 673061 - DNA, 19 bp, Mus musculus
  siRNA target sequence for Stam (NM_011484.2,1022-1040).
gaagacggtacagttcaat

SEQ ID NO: 673062 - DNA, 19 bp, Mus musculus
  siRNA target sequence for Stam (NM_011484.2,1025-1043).
gacggtacagttcaatgat

SEQ ID NO: 673063 - DNA, 19 bp, Mus musculus
  siRNA target sequence for Stam (NM_011484.2,1027-1045).
cggtacagttcaatgatga

SEQ ID NO: 673064 - DNA, 19 bp, Mus musculus
  siRNA target sequence for Stam (NM_011484.2,1121-1139).
gatgttgcaaagtacagat

SEQ ID NO: 673065 - DNA, 19 bp, Mus musculus
  siRNA target sequence for Stam (NM_011484.2,1202-1220).
gggacctctcattgatgaa

SEQ ID NO: 673066 - DNA, 19 bp, Mus musculus
  siRNA target sequence for Stam (NM_011484.2,1203-1221).
ggacctctcattgatgaaa

SEQ ID NO: 673067 - DNA, 19 bp, Mus musculus
  siRNA target sequence for Stam (NM_011484.2,1204-1222).
gacctctcattgatgaaaa

SEQ ID NO: 673068 - DNA, 19 bp, Mus musculus
  siRNA target sequence for Stam (NM_011484.2,1280-1298).
ggaagctctctcactgtat

SEQ ID NO: 673069 - DNA, 19 bp, Mus musculus
  siRNA target sequence for Stam (NM_011484.2,1281-1299).
gaagctctctcactgtata

SEQ ID NO: 673070 - DNA, 19 bp, Mus musculus
  siRNA target sequence for Stam (NM_011484.2,1284-1302).
gctctctcactgtatacga

SEQ ID NO: 673071 - DNA, 19 bp, Mus musculus
  siRNA target sequence for Stam (NM_011484.2,1285-1303).
ctctctcactgtatacgaa

SEQ ID NO: 673072 - DNA, 19 bp, Mus musculus
  siRNA target sequence for Stam (NM_011484.2,1289-1307).
ctcactgtatacgaagtta

SEQ ID NO: 673073 - DNA, 19 bp, Mus musculus
  siRNA target sequence for Stam (NM_011484.2,1293-1311).
ctgtatacgaagttaatga

SEQ ID NO: 673074 - DNA, 19 bp, Mus musculus
  siRNA target sequence for Stam (NM_011484.2,1295-1313).
gtatacgaagttaatgaat

SEQ ID NO: 673075 - DNA, 19 bp, Mus musculus
  siRNA target sequence for Stam (NM_011484.2,1317-1335).
gacccaatgtactctatgt

SEQ ID NO: 673076 - DNA, 19 bp, Mus musculus
  siRNA target sequence for Stam (NM_011484.2,1319-1337).
cccaatgtactctatgtat

SEQ ID NO: 673077 - DNA, 19 bp, Mus musculus
  siRNA target sequence for Stam (NM_011484.2,1325-1343).
gtactctatgtatgcaaaa

SEQ ID NO: 673078 - DNA, 19 bp, Mus musculus
  siRNA target sequence for Stam (NM_011484.2,1328-1346).
ctctatgtatgcaaaatta

SEQ ID NO: 673079 - DNA, 19 bp, Mus musculus
  siRNA target sequence for Stam (NM_011484.2,1330-1348).
ctatgtatgcaaaattaca

SEQ ID NO: 673080 - DNA, 19 bp, Mus musculus
  siRNA target sequence for Stam (NM_011484.2,1482-1500).
gagcagctgtcttctatca

SEQ ID NO: 673081 - DNA, 19 bp, Mus musculus
  siRNA target sequence for Stam (NM_011484.2,1557-1575).
gcttcttacccgaatgcaa

SEQ ID NO: 673082 - DNA, 19 bp, Mus musculus
  siRNA target sequence for Stam (NM_011484.2,1558-1576).
cttcttacccgaatgcaat

SEQ ID NO: 673083 - DNA, 19 bp, Mus musculus
  siRNA target sequence for Stam (NM_011484.2,1566-1584).
ccgaatgcaatggttagtt

SEQ ID NO: 673084 - DNA, 19 bp, Mus musculus
  siRNA target sequence for Stam (NM_011484.2,1585-1603).
ctgttcaaggaaattcgta

SEQ ID NO: 673085 - DNA, 19 bp, Mus musculus
  siRNA target sequence for Stam (NM_011484.2,1730-1748).
ggtgccaaactatacttta

SEQ ID NO: 673086 - DNA, 19 bp, Mus musculus
  siRNA target sequence for Stam (NM_011484.2,1731-1749).
gtgccaaactatactttaa

SEQ ID NO: 673087 - DNA, 19 bp, Mus musculus
  siRNA target sequence for Stam (NM_011484.2,1734-1752).
ccaaactatactttaacat

SEQ ID NO: 673088 - DNA, 19 bp, Mus musculus
  siRNA target sequence for Stam (NM_011484.2,1792-1810).
ctcagccacagcaagcata

SEQ ID NO: 673089 - DNA, 19 bp, Mus musculus
  siRNA target sequence for Stam (NM_011484.2,1794-1812).
cagccacagcaagcatatt

SEQ ID NO: 673090 - DNA, 19 bp, Mus musculus
  siRNA target sequence for Stam (NM_011484.2,1798-1816).
cacagcaagcatattctca

SEQ ID NO: 673091 - DNA, 19 bp, Mus musculus
  siRNA target sequence for Stam2 (NM_019667.2,1413-1431).
ccaacccttcttacatgaa

SEQ ID NO: 673092 - DNA, 19 bp, Mus musculus
  siRNA target sequence for Tcte3 (NM_011560.1,205-223).
gttcgagaaggagtcatat

SEQ ID NO: 673093 - DNA, 19 bp, Mus musculus
  siRNA target sequence for Tcte3 (NM_011560.1,321-339).
gtgccctggcaaaattaaa

SEQ ID NO: 673094 - DNA, 19 bp, Mus musculus
  siRNA target sequence for Tcte3 (NM_011560.1,426-444).
gtcttaaagatgtcaaata

SEQ ID NO: 673095 - DNA, 19 bp, Mus musculus
  siRNA target sequence for Tcte3 (NM_011560.1,449-467).
gacaaagcccctcatttgt

SEQ ID NO: 673096 - DNA, 19 bp, Mus musculus
  siRNA target sequence for Tcte3 (NM_011560.1,458-476).
cctcatttgtcacttgaat

SEQ ID NO: 673097 - DNA, 19 bp, Mus musculus
  siRNA target sequence for Tcte3 (NM_011560.1,497-515).
gcagtcaaagaatttgcat

SEQ ID NO: 673098 - DNA, 19 bp, Mus musculus
  siRNA target sequence for Tcte3 (NM_011560.1,512-530).
gcataccatcgttataaat

SEQ ID NO: 673099 - DNA, 19 bp, Mus musculus
  siRNA target sequence for Tcte3 (NM_011560.1,517-535).
ccatcgttataaattcatt

SEQ ID NO: 673100 - DNA, 19 bp, Mus musculus
  siRNA target sequence for Tcte3 (NM_011560.1,518-536).
catcgttataaattcatta

SEQ ID NO: 673101 - DNA, 19 bp, Mus musculus
  siRNA target sequence for Tcte3 (NM_011560.1,664-682).
ggtgtttgctctctattgt

SEQ ID NO: 673102 - DNA, 19 bp, Mus musculus
  siRNA target sequence for Elmo1 (NM_080288.1,46-64).
ctggcgcctaccctaaact

SEQ ID NO: 673103 - DNA, 19 bp, Mus musculus
  siRNA target sequence for Elmo1 (NM_080288.1,48-66).
ggcgcctaccctaaactca

SEQ ID NO: 673104 - DNA, 19 bp, Mus musculus
  siRNA target sequence for Elmo1 (NM_080288.1,49-67).
gcgcctaccctaaactcat

SEQ ID NO: 673105 - DNA, 19 bp, Mus musculus
  siRNA target sequence for Elmo1 (NM_080288.1,58-76).
ctaaactcatggagattga

SEQ ID NO: 673106 - DNA, 19 bp, Mus musculus
  siRNA target sequence for Elmo1 (NM_080288.1,127-145).
ctcttgccaaccatgaata

SEQ ID NO: 673107 - DNA, 19 bp, Mus musculus
  siRNA target sequence for Elmo1 (NM_080288.1,134-152).
caaccatgaatattttgca

SEQ ID NO: 673108 - DNA, 19 bp, Mus musculus
  siRNA target sequence for Elmo1 (NM_080288.1,153-171).
ctgcagcacgctgatagtt

SEQ ID NO: 673109 - DNA, 19 bp, Mus musculus
  siRNA target sequence for Elmo1 (NM_080288.1,155-173).
gcagcacgctgatagttca

SEQ ID NO: 673110 - DNA, 19 bp, Mus musculus
  siRNA target sequence for Elmo1 (NM_080288.1,156-174).
cagcacgctgatagttcaa

SEQ ID NO: 673111 - DNA, 19 bp, Mus musculus
  siRNA target sequence for Elmo1 (NM_080288.1,159-177).
cacgctgatagttcaaact

SEQ ID NO: 673112 - DNA, 19 bp, Mus musculus
  siRNA target sequence for Elmo1 (NM_080288.1,162-180).
gctgatagttcaaacttct

SEQ ID NO: 673113 - DNA, 19 bp, Mus musculus
  siRNA target sequence for Elmo1 (NM_080288.1,165-183).
gatagttcaaacttctaca

SEQ ID NO: 673114 - DNA, 19 bp, Mus musculus
  siRNA target sequence for Elmo1 (NM_080288.1,260-278).
gcagctccatgaacgaata

SEQ ID NO: 673115 - DNA, 19 bp, Mus musculus
  siRNA target sequence for Elmo1 (NM_080288.1,264-282).
ctccatgaacgaatacagt

SEQ ID NO: 673116 - DNA, 19 bp, Mus musculus
  siRNA target sequence for Elmo1 (NM_080288.1,270-288).
gaacgaatacagtcatcaa

SEQ ID NO: 673117 - DNA, 19 bp, Mus musculus
  siRNA target sequence for Elmo1 (NM_080288.1,273-291).
cgaatacagtcatcaagta

SEQ ID NO: 673118 - DNA, 19 bp, Mus musculus
  siRNA target sequence for Elmo1 (NM_080288.1,412-430).
ctgaacgataccagaagtt

SEQ ID NO: 673119 - DNA, 19 bp, Mus musculus
  siRNA target sequence for Elmo1 (NM_080288.1,422-440).
ccagaagttgcagaagatt

SEQ ID NO: 673120 - DNA, 19 bp, Mus musculus
  siRNA target sequence for Elmo1 (NM_080288.1,423-441).
cagaagttgcagaagatta

SEQ ID NO: 673121 - DNA, 19 bp, Mus musculus
  siRNA target sequence for Elmo1 (NM_080288.1,500-518).
ggaccacggcattgtatca

SEQ ID NO: 673122 - DNA, 19 bp, Mus musculus
  siRNA target sequence for Elmo1 (NM_080288.1,501-519).
gaccacggcattgtatcat

SEQ ID NO: 673123 - DNA, 19 bp, Mus musculus
  siRNA target sequence for Elmo1 (NM_080288.1,534-552).
gtggccttcattaagaaga

SEQ ID NO: 673124 - DNA, 19 bp, Mus musculus
  siRNA target sequence for Elmo1 (NM_080288.1,536-554).
ggccttcattaagaagata

SEQ ID NO: 673125 - DNA, 19 bp, Mus musculus
  siRNA target sequence for Elmo1 (NM_080288.1,555-573).
gccagctttgtgaacaagt

SEQ ID NO: 673126 - DNA, 19 bp, Mus musculus
  siRNA target sequence for Elmo1 (NM_080288.1,637-655).
gtcatgacctctaccaaaa

SEQ ID NO: 673127 - DNA, 19 bp, Mus musculus
  siRNA target sequence for Elmo1 (NM_080288.1,724-742).
cttacaccattgctgtaat

SEQ ID NO: 673128 - DNA, 19 bp, Mus musculus
  siRNA target sequence for Elmo1 (NM_080288.1,736-754).
ctgtaatcaacgcactttt

SEQ ID NO: 673129 - DNA, 19 bp, Mus musculus
  siRNA target sequence for Elmo1 (NM_080288.1,809-827).
gcagctgcgctacatcatt

SEQ ID NO: 673130 - DNA, 19 bp, Mus musculus
  siRNA target sequence for Elmo1 (NM_080288.1,812-830).
gctgcgctacatcatttta

SEQ ID NO: 673131 - DNA, 19 bp, Mus musculus
  siRNA target sequence for Elmo1 (NM_080288.1,813-831).
ctgcgctacatcattttaa

SEQ ID NO: 673132 - DNA, 19 bp, Mus musculus
  siRNA target sequence for Elmo1 (NM_080288.1,815-833).
gcgctacatcattttaaca

SEQ ID NO: 673133 - DNA, 19 bp, Mus musculus
  siRNA target sequence for Elmo1 (NM_080288.1,817-835).
gctacatcattttaacaca

SEQ ID NO: 673134 - DNA, 19 bp, Mus musculus
  siRNA target sequence for Elmo1 (NM_080288.1,869-887).
gatggcacaccagttatat

SEQ ID NO: 673135 - DNA, 19 bp, Mus musculus
  siRNA target sequence for Elmo1 (NM_080288.1,874-892).
cacaccagttatatgttct

SEQ ID NO: 673136 - DNA, 19 bp, Mus musculus
  siRNA target sequence for Elmo1 (NM_080288.1,891-909).
ctccaagtgctgaccttta

SEQ ID NO: 673137 - DNA, 19 bp, Mus musculus
  siRNA target sequence for Elmo1 (NM_080288.1,918-936).
gaagacaggatgatgacta

SEQ ID NO: 673138 - DNA, 19 bp, Mus musculus
  siRNA target sequence for Elmo1 (NM_080288.1,965-983).
ggacatcatatttgaactt

SEQ ID NO: 673139 - DNA, 19 bp, Mus musculus
  siRNA target sequence for Elmo1 (NM_080288.1,1002-1020).
gcagagtcagaacctaata

SEQ ID NO: 673140 - DNA, 19 bp, Mus musculus
  siRNA target sequence for Elmo1 (NM_080288.1,1052-1070).
catgtacactcgggattat

SEQ ID NO: 673141 - DNA, 19 bp, Mus musculus
  siRNA target sequence for Elmo1 (NM_080288.1,1055-1073).
gtacactcgggattataaa

SEQ ID NO: 673142 - DNA, 19 bp, Mus musculus
  siRNA target sequence for Elmo1 (NM_080288.1,1060-1078).
ctcgggattataaaaaact

SEQ ID NO: 673143 - DNA, 19 bp, Mus musculus
  siRNA target sequence for Elmo1 (NM_080288.1,1320-1338).
gactttcacccgatgttct

SEQ ID NO: 673144 - DNA, 19 bp, Mus musculus
  siRNA target sequence for Elmo1 (NM_080288.1,1362-1380).
gaattcttctgcatttgca

SEQ ID NO: 673145 - DNA, 19 bp, Mus musculus
  siRNA target sequence for Elmo1 (NM_080288.1,1379-1397).
cattcaactcctgaacaaa

SEQ ID NO: 673146 - DNA, 19 bp, Mus musculus
  siRNA target sequence for Elmo1 (NM_080288.1,1414-1432).
gggcaacatctgaagactt

SEQ ID NO: 673147 - DNA, 19 bp, Mus musculus
  siRNA target sequence for Elmo1 (NM_080288.1,1464-1482).
gttatgagagcgcttacaa

SEQ ID NO: 673148 - DNA, 19 bp, Mus musculus
  siRNA target sequence for Elmo1 (NM_080288.1,1589-1607).
gtctcgcccgattttggaa

SEQ ID NO: 673149 - DNA, 19 bp, Mus musculus
  siRNA target sequence for Elmo1 (NM_080288.1,1593-1611).
cgcccgattttggaactaa

SEQ ID NO: 673150 - DNA, 19 bp, Mus musculus
  siRNA target sequence for Elmo1 (NM_080288.1,1594-1612).
gcccgattttggaactaaa

SEQ ID NO: 673151 - DNA, 19 bp, Mus musculus
  siRNA target sequence for Elmo1 (NM_080288.1,1597-1615).
cgattttggaactaaagga

SEQ ID NO: 673152 - DNA, 19 bp, Mus musculus
  siRNA target sequence for Elmo1 (NM_080288.1,1619-1637).
gatccagccagaaatctta

SEQ ID NO: 673153 - DNA, 19 bp, Mus musculus
  siRNA target sequence for Elmo1 (NM_080288.1,1629-1647).
gaaatcttagagctgatta

SEQ ID NO: 673154 - DNA, 19 bp, Mus musculus
  siRNA target sequence for Elmo1 (NM_080288.1,1671-1689).
gtggaagggacctgcttta

SEQ ID NO: 673155 - DNA, 19 bp, Mus musculus
  siRNA target sequence for Elmo1 (NM_080288.1,1702-1720).
ctcgccggagacaagacaa

SEQ ID NO: 673156 - DNA, 19 bp, Mus musculus
  siRNA target sequence for Elmo1 (NM_080288.1,1705-1723).
gccggagacaagacaagtt

SEQ ID NO: 673157 - DNA, 19 bp, Mus musculus
  siRNA target sequence for Elmo1 (NM_080288.1,1707-1725).
cggagacaagacaagtttt

SEQ ID NO: 673158 - DNA, 19 bp, Mus musculus
  siRNA target sequence for Elmo1 (NM_080288.1,1732-1750).
gtcggctttcaccaaatca

SEQ ID NO: 673159 - DNA, 19 bp, Mus musculus
  siRNA target sequence for Elmo1 (NM_080288.1,1734-1752).
cggctttcaccaaatcaca

SEQ ID NO: 673160 - DNA, 19 bp, Mus musculus
  siRNA target sequence for Elmo1 (NM_080288.1,1735-1753).
ggctttcaccaaatcacaa

SEQ ID NO: 673161 - DNA, 19 bp, Mus musculus
  siRNA target sequence for Elmo1 (NM_080288.1,1744-1762).
caaatcacaaggtcttaca

SEQ ID NO: 673162 - DNA, 19 bp, Mus musculus
  siRNA target sequence for Elmo1 (NM_080288.1,1806-1824).
gattccctgcaggacaaat

SEQ ID NO: 673163 - DNA, 19 bp, Mus musculus
  siRNA target sequence for Elmo1 (NM_080288.1,1858-1876).
gaaaggactgccctcatat

SEQ ID NO: 673164 - DNA, 19 bp, Mus musculus
  siRNA target sequence for Elmo1 (NM_080288.1,1931-1949).
catcttatacgactcaaat

SEQ ID NO: 673165 - DNA, 19 bp, Mus musculus
  siRNA target sequence for Elmo1 (NM_080288.1,1945-1963).
caaattgccaactgaactt

SEQ ID NO: 673166 - DNA, 19 bp, Mus musculus
  siRNA target sequence for Elmo1 (NM_080288.1,1969-1987).
ctcctgataagcatgagta

SEQ ID NO: 673167 - DNA, 19 bp, Mus musculus
  siRNA target sequence for Elmo1 (NM_080288.1,2148-2166).
gaacctagcaactatgact

SEQ ID NO: 673168 - DNA, 19 bp, Mus musculus
  siRNA target sequence for Elmo3 (NM_172760.1,529-547).
ctaagcaccatcattgaaa

SEQ ID NO: 673169 - DNA, 19 bp, Mus musculus
  siRNA target sequence for Elmo3 (NM_172760.1,653-671).
ggaaggtgatatcttatgt

SEQ ID NO: 673170 - DNA, 19 bp, Mus musculus
  siRNA target sequence for Elmo3 (NM_172760.1,796-814).
gtgcacctgcaagtaatga

SEQ ID NO: 673171 - DNA, 19 bp, Mus musculus
  siRNA target sequence for Elmo3 (NM_172760.1,874-892).
cccactgaacgcaaggaaa

SEQ ID NO: 673172 - DNA, 19 bp, Mus musculus
  siRNA target sequence for Elmo3 (NM_172760.1,875-893).
ccactgaacgcaaggaaat

SEQ ID NO: 673173 - DNA, 19 bp, Mus musculus
  siRNA target sequence for Elmo3 (NM_172760.1,1032-1050).
gatgcggacaccacttgat

SEQ ID NO: 673174 - DNA, 19 bp, Mus musculus
  siRNA target sequence for Elmo3 (NM_172760.1,1167-1185).
ccgagagttccgcaagtta

SEQ ID NO: 673175 - DNA, 19 bp, Mus musculus
  siRNA target sequence for Elmo3 (NM_172760.1,1177-1195).
cgcaagttaggcttctcta

SEQ ID NO: 673176 - DNA, 19 bp, Mus musculus
  siRNA target sequence for Elmo3 (NM_172760.1,1249-1267).
gacaatatgctctacttct

SEQ ID NO: 673177 - DNA, 19 bp, Mus musculus
  siRNA target sequence for Elmo3 (NM_172760.1,1285-1303).
gcatacagtcggtttgtgt

SEQ ID NO: 673178 - DNA, 19 bp, Mus musculus
  siRNA target sequence for Elmo3 (NM_172760.1,1286-1304).
catacagtcggtttgtgtt

SEQ ID NO: 673179 - DNA, 19 bp, Mus musculus
  siRNA target sequence for Elmo3 (NM_172760.1,1423-1441).
gacttctcgcccatgttct

SEQ ID NO: 673180 - DNA, 19 bp, Mus musculus
  siRNA target sequence for Elmo3 (NM_172760.1,1520-1538).
caacacaggaagattttga

SEQ ID NO: 673181 - DNA, 19 bp, Mus musculus
  siRNA target sequence for Elmo3 (NM_172760.1,1608-1626).
ctttcgaaccaaagtgaat

SEQ ID NO: 673182 - DNA, 19 bp, Mus musculus
  siRNA target sequence for Elmo3 (NM_172760.1,1686-1704).
cacgctggcccctcctata

SEQ ID NO: 673183 - DNA, 19 bp, Mus musculus
  siRNA target sequence for Elmo3 (NM_172760.1,1694-1712).
cccctcctatactggaatt

SEQ ID NO: 673184 - DNA, 19 bp, Mus musculus
  siRNA target sequence for Elmo3 (NM_172760.1,1816-1834).
caggacaagctatggtttt

SEQ ID NO: 673185 - DNA, 19 bp, Mus musculus
  siRNA target sequence for Elmo3 (NM_172760.1,2254-2272).
ccaccccctaccaacttta

SEQ ID NO: 673186 - DNA, 19 bp, Mus musculus
  siRNA target sequence for Elmo3 (NM_172760.1,2255-2273).
caccccctaccaactttaa

SEQ ID NO: 673187 - DNA, 19 bp, Mus musculus
  siRNA target sequence for Unc13a (NM_021468.1,338-356).
cagggttcaccagataaat

SEQ ID NO: 673188 - DNA, 19 bp, Mus musculus
  siRNA target sequence for Unc13a (NM_021468.1,347-365).
ccagataaatttaacacat

SEQ ID NO: 673189 - DNA, 19 bp, Mus musculus
  siRNA target sequence for Unc13a (NM_021468.1,490-508).
gtggaacaagggactgata

SEQ ID NO: 673190 - DNA, 19 bp, Mus musculus
  siRNA target sequence for Unc13a (NM_021468.1,501-519).
gactgatatgggacacaat

SEQ ID NO: 673191 - DNA, 19 bp, Mus musculus
  siRNA target sequence for Unc13a (NM_021468.1,593-611).
ctggaggcagagacgttaa

SEQ ID NO: 673192 - DNA, 19 bp, Mus musculus
  siRNA target sequence for Unc13a (NM_021468.1,596-614).
gaggcagagacgttaatga

SEQ ID NO: 673193 - DNA, 19 bp, Mus musculus
  siRNA target sequence for Unc13a (NM_021468.1,606-624).
cgttaatgaaagatgatga

SEQ ID NO: 673194 - DNA, 19 bp, Mus musculus
  siRNA target sequence for Unc13a (NM_021468.1,623-641).
gagatctgtggaactaaaa

SEQ ID NO: 673195 - DNA, 19 bp, Mus musculus
  siRNA target sequence for Unc13a (NM_021468.1,625-643).
gatctgtggaactaaaaat

SEQ ID NO: 673196 - DNA, 19 bp, Mus musculus
  siRNA target sequence for Unc13a (NM_021468.1,645-663).
caactcctcataaaatctt

SEQ ID NO: 673197 - DNA, 19 bp, Mus musculus
  siRNA target sequence for Unc13a (NM_021468.1,653-671).
cataaaatcttgcttgata

SEQ ID NO: 673198 - DNA, 19 bp, Mus musculus
  siRNA target sequence for Unc13a (NM_021468.1,661-679).
cttgcttgatacaagattt

SEQ ID NO: 673199 - DNA, 19 bp, Mus musculus
  siRNA target sequence for Unc13a (NM_021468.1,675-693).
gatttgagctgccttttga

SEQ ID NO: 673200 - DNA, 19 bp, Mus musculus
  siRNA target sequence for Unc13a (NM_021468.1,704-722).
gaggaagccagatattgga

SEQ ID NO: 673201 - DNA, 19 bp, Mus musculus
  siRNA target sequence for Unc13a (NM_021468.1,714-732).
gatattggacctacaaatt

SEQ ID NO: 673202 - DNA, 19 bp, Mus musculus
  siRNA target sequence for Unc13a (NM_021468.1,723-741).
cctacaaattggagcaaat

SEQ ID NO: 673203 - DNA, 19 bp, Mus musculus
  siRNA target sequence for Unc13a (NM_021468.1,826-844).
ctttgaagaccctgatagt

SEQ ID NO: 673204 - DNA, 19 bp, Mus musculus
  siRNA target sequence for Unc13a (NM_021468.1,919-937).
ccagcccaacgcttctgta

SEQ ID NO: 673205 - DNA, 19 bp, Mus musculus
  siRNA target sequence for Unc13a (NM_021468.1,964-982).
gccacagcagctctttctt

SEQ ID NO: 673206 - DNA, 19 bp, Mus musculus
  siRNA target sequence for Unc13a (NM_021468.1,1019-1037).
cagagttacgaccttgatt

SEQ ID NO: 673207 - DNA, 19 bp, Mus musculus
  siRNA target sequence for Unc13a (NM_021468.1,1021-1039).
gagttacgaccttgattat

SEQ ID NO: 673208 - DNA, 19 bp, Mus musculus
  siRNA target sequence for Unc13a (NM_021468.1,1078-1096).
gtatggctcctcctgtaat

SEQ ID NO: 673209 - DNA, 19 bp, Mus musculus
  siRNA target sequence for Unc13a (NM_021468.1,1122-1140).
gtgagctggaccagtatca

SEQ ID NO: 673210 - DNA, 19 bp, Mus musculus
  siRNA target sequence for Unc13a (NM_021468.1,1163-1181).
gagagggactccattcatt

SEQ ID NO: 673211 - DNA, 19 bp, Mus musculus
  siRNA target sequence for Unc13a (NM_021468.1,1425-1443).
ggttccgagcggttaccaa

SEQ ID NO: 673212 - DNA, 19 bp, Mus musculus
  siRNA target sequence for Unc13a (NM_021468.1,1664-1682).
ctgaaatctcatgtgtata

SEQ ID NO: 673213 - DNA, 19 bp, Mus musculus
  siRNA target sequence for Unc13a (NM_021468.1,1719-1737).
gtaccacgccccacaactt

SEQ ID NO: 673214 - DNA, 19 bp, Mus musculus
  siRNA target sequence for Unc13a (NM_021468.1,1755-1773).
ctacacctacctattgcta

SEQ ID NO: 673215 - DNA, 19 bp, Mus musculus
  siRNA target sequence for Unc13a (NM_021468.1,1833-1851).
gagtcaagtgccatgagaa

SEQ ID NO: 673216 - DNA, 19 bp, Mus musculus
  siRNA target sequence for Unc13a (NM_021468.1,1921-1939).
ggaccgaactcagaacatt

SEQ ID NO: 673217 - DNA, 19 bp, Mus musculus
  siRNA target sequence for Unc13a (NM_021468.1,1922-1940).
gaccgaactcagaacatta

SEQ ID NO: 673218 - DNA, 19 bp, Mus musculus
  siRNA target sequence for Unc13a (NM_021468.1,1966-1984).
gatccgagaacggaataaa

SEQ ID NO: 673219 - DNA, 19 bp, Mus musculus
  siRNA target sequence for Unc13a (NM_021468.1,1969-1987).
ccgagaacggaataaacca

SEQ ID NO: 673220 - DNA, 19 bp, Mus musculus
  siRNA target sequence for Unc13a (NM_021468.1,1978-1996).
gaataaaccagagatcttt

SEQ ID NO: 673221 - DNA, 19 bp, Mus musculus
  siRNA target sequence for Unc13a (NM_021468.1,2129-2147).
ggcctacaagccaaagaca

SEQ ID NO: 673222 - DNA, 19 bp, Mus musculus
  siRNA target sequence for Unc13a (NM_021468.1,2200-2218).
gcgcaccaagaccattttt

SEQ ID NO: 673223 - DNA, 19 bp, Mus musculus
  siRNA target sequence for Unc13a (NM_021468.1,2266-2284).
caactcttctgatcgaatt

SEQ ID NO: 673224 - DNA, 19 bp, Mus musculus
  siRNA target sequence for Unc13a (NM_021468.1,2271-2289).
cttctgatcgaattaaggt

SEQ ID NO: 673225 - DNA, 19 bp, Mus musculus
  siRNA target sequence for Unc13a (NM_021468.1,2368-2386).
ccaaactatcattgaagtt

SEQ ID NO: 673226 - DNA, 19 bp, Mus musculus
  siRNA target sequence for Unc13a (NM_021468.1,2456-2474).
ggggctatccgacttcaaa

SEQ ID NO: 673227 - DNA, 19 bp, Mus musculus
  siRNA target sequence for Unc13a (NM_021468.1,2457-2475).
gggctatccgacttcaaat

SEQ ID NO: 673228 - DNA, 19 bp, Mus musculus
  siRNA target sequence for Unc13a (NM_021468.1,2515-2533).
ccatgtacaatatacatgt

SEQ ID NO: 673229 - DNA, 19 bp, Mus musculus
  siRNA target sequence for Unc13a (NM_021468.1,2679-2697).
gcatcgagtccatttatca

SEQ ID NO: 673230 - DNA, 19 bp, Mus musculus
  siRNA target sequence for Unc13a (NM_021468.1,2776-2794).
caacatcaatgcctattat

SEQ ID NO: 673231 - DNA, 19 bp, Mus musculus
  siRNA target sequence for Unc13a (NM_021468.1,2912-2930).
ctctctacatacaggaata

SEQ ID NO: 673232 - DNA, 19 bp, Mus musculus
  siRNA target sequence for Unc13a (NM_021468.1,2951-2969).
gagcggcttcaggatttaa

SEQ ID NO: 673233 - DNA, 19 bp, Mus musculus
  siRNA target sequence for Unc13a (NM_021468.1,3010-3028).
gatgaaggtgcaagaactt

SEQ ID NO: 673234 - DNA, 19 bp, Mus musculus
  siRNA target sequence for Unc13a (NM_021468.1,3045-3063).
ccagccaggtggtaaagga

SEQ ID NO: 673235 - DNA, 19 bp, Mus musculus
  siRNA target sequence for Unc13a (NM_021468.1,3055-3073).
ggtaaaggactgtgtgaaa

SEQ ID NO: 673236 - DNA, 19 bp, Mus musculus
  siRNA target sequence for Unc13a (NM_021468.1,3074-3092).
gcctgcttgaactctacat

SEQ ID NO: 673237 - DNA, 19 bp, Mus musculus
  siRNA target sequence for Unc13a (NM_021468.1,3177-3195).
gcattcggaacttggattt

SEQ ID NO: 673238 - DNA, 19 bp, Mus musculus
  siRNA target sequence for Unc13a (NM_021468.1,3191-3209).
gatttctggcccaaactta

SEQ ID NO: 673239 - DNA, 19 bp, Mus musculus
  siRNA target sequence for Unc13a (NM_021468.1,3202-3220).
caaacttatcacactcatt

SEQ ID NO: 673240 - DNA, 19 bp, Mus musculus
  siRNA target sequence for Unc13a (NM_021468.1,3206-3224).
cttatcacactcattgttt

SEQ ID NO: 673241 - DNA, 19 bp, Mus musculus
  siRNA target sequence for Unc13a (NM_021468.1,3280-3298).
ggagttgaacgtaggaaaa

SEQ ID NO: 673242 - DNA, 19 bp, Mus musculus
  siRNA target sequence for Unc13a (NM_021468.1,3378-3396).
gtaagagtgctgactacat

SEQ ID NO: 673243 - DNA, 19 bp, Mus musculus
  siRNA target sequence for Unc13a (NM_021468.1,3418-3436).
gtggctccacaatgaatat

SEQ ID NO: 673244 - DNA, 19 bp, Mus musculus
  siRNA target sequence for Unc13a (NM_021468.1,3420-3438).
ggctccacaatgaatatgt

SEQ ID NO: 673245 - DNA, 19 bp, Mus musculus
  siRNA target sequence for Unc13a (NM_021468.1,3599-3617).
gagcatgccttgttttcct

SEQ ID NO: 673246 - DNA, 19 bp, Mus musculus
  siRNA target sequence for Unc13a (NM_021468.1,3698-3716).
cttgcccactacatgagaa

SEQ ID NO: 673247 - DNA, 19 bp, Mus musculus
  siRNA target sequence for Unc13a (NM_021468.1,3748-3766).
gcagtatgcagacatctta

SEQ ID NO: 673248 - DNA, 19 bp, Mus musculus
  siRNA target sequence for Unc13a (NM_021468.1,3976-3994).
ccaggtgcggattgatgaa

SEQ ID NO: 673249 - DNA, 19 bp, Mus musculus
  siRNA target sequence for Unc13a (NM_021468.1,3977-3995).
caggtgcggattgatgaat

SEQ ID NO: 673250 - DNA, 19 bp, Mus musculus
  siRNA target sequence for Unc13a (NM_021468.1,3979-3997).
ggtgcggattgatgaatgt

SEQ ID NO: 673251 - DNA, 19 bp, Mus musculus
  siRNA target sequence for Unc13a (NM_021468.1,3982-4000).
gcggattgatgaatgtgtt

SEQ ID NO: 673252 - DNA, 19 bp, Mus musculus
  siRNA target sequence for Unc13a (NM_021468.1,4204-4222).
caccatggagcgggttatt

SEQ ID NO: 673253 - DNA, 19 bp, Mus musculus
  siRNA target sequence for Unc13a (NM_021468.1,4248-4266).
cgggcacccagctgatctt

SEQ ID NO: 673254 - DNA, 19 bp, Mus musculus
  siRNA target sequence for Unc13a (NM_021468.1,4495-4513).
cactctcatcaagacattt

SEQ ID NO: 673255 - DNA, 19 bp, Mus musculus
  siRNA target sequence for Unc13a (NM_021468.1,4497-4515).
ctctcatcaagacatttgt

SEQ ID NO: 673256 - DNA, 19 bp, Mus musculus
  siRNA target sequence for Unc13a (NM_021468.1,4554-4572).
ccgtgggagaagtctctat

SEQ ID NO: 673257 - DNA, 19 bp, Mus musculus
  siRNA target sequence for Unc13a (NM_021468.1,4555-4573).
cgtgggagaagtctctatt

SEQ ID NO: 673258 - DNA, 19 bp, Mus musculus
  siRNA target sequence for Unc13a (NM_021468.1,4569-4587).
ctattcaggtggacttatt

SEQ ID NO: 673259 - DNA, 19 bp, Mus musculus
  siRNA target sequence for Unc13a (NM_021468.1,4808-4826).
ggtccagaggcctatgaat

SEQ ID NO: 673260 - DNA, 19 bp, Mus musculus
  siRNA target sequence for Unc13a (NM_021468.1,4812-4830).
cagaggcctatgaattgca

SEQ ID NO: 673261 - DNA, 19 bp, Mus musculus
  siRNA target sequence for Unc13a (NM_021468.1,4945-4963).
ccggaagatccatatggat

SEQ ID NO: 673262 - DNA, 19 bp, Mus musculus
  siRNA target sequence for Unc13a (NM_021468.1,5024-5042).
gagttcgtgaagctcaaat

SEQ ID NO: 673263 - DNA, 19 bp, Mus musculus
  siRNA target sequence for Bin1 (NM_009668.1,449-467).
cctatctggcttctgttaa

SEQ ID NO: 673264 - DNA, 19 bp, Mus musculus
  siRNA target sequence for Bin1 (NM_009668.1,643-661).
cagttccctgatatcaagt

SEQ ID NO: 673265 - DNA, 19 bp, Mus musculus
  siRNA target sequence for Bin1 (NM_009668.1,803-821).
ggtgccaaggcaaactaca

SEQ ID NO: 673266 - DNA, 19 bp, Mus musculus
  siRNA target sequence for Bin1 (NM_009668.1,826-844).
catcttgtagctcaaacta

SEQ ID NO: 673267 - DNA, 19 bp, Mus musculus
  siRNA target sequence for Bin1 (NM_009668.1,842-860).
ctaacctgctccgaaatca

SEQ ID NO: 673268 - DNA, 19 bp, Mus musculus
  siRNA target sequence for Bin1 (NM_009668.1,941-959).
ggaacagccgtgtaggttt

SEQ ID NO: 673269 - DNA, 19 bp, Mus musculus
  siRNA target sequence for Bin1 (NM_009668.1,945-963).
cagccgtgtaggtttctat

SEQ ID NO: 673270 - DNA, 19 bp, Mus musculus
  siRNA target sequence for Bin1 (NM_009668.1,947-965).
gccgtgtaggtttctatgt

SEQ ID NO: 673271 - DNA, 19 bp, Mus musculus
  siRNA target sequence for Bin1 (NM_009668.1,949-967).
cgtgtaggtttctatgtca

SEQ ID NO: 673272 - DNA, 19 bp, Mus musculus
  siRNA target sequence for Bin1 (NM_009668.1,991-1009).
ctggaggaaaacttccata

SEQ ID NO: 673273 - DNA, 19 bp, Mus musculus
  siRNA target sequence for Bin1 (NM_009668.1,993-1011).
ggaggaaaacttccataaa

SEQ ID NO: 673274 - DNA, 19 bp, Mus musculus
  siRNA target sequence for Bin1 (NM_009668.1,997-1015).
gaaaacttccataaagaga

SEQ ID NO: 673275 - DNA, 19 bp, Mus musculus
  siRNA target sequence for Bin1 (NM_009668.1,1478-1496).
caccctctggtcagtcaat

SEQ ID NO: 673276 - DNA, 19 bp, Mus musculus
  siRNA target sequence for Bin1 (NM_009668.1,1810-1828).
caagcccagcatgattaca

SEQ ID NO: 673277 - DNA, 19 bp, Mus musculus
  siRNA target sequence for Bin1 (NM_009668.1,1978-1996).
ggcgtcttcccggagaatt

SEQ ID NO: 673278 - DNA, 19 bp, Mus musculus
  siRNA target sequence for Bin1 (NM_009668.1,1979-1997).
gcgtcttcccggagaattt

SEQ ID NO: 673279 - DNA, 19 bp, Mus musculus
  siRNA target sequence for Bin1 (NM_009668.1,1980-1998).
cgtcttcccggagaatttt

SEQ ID NO: 673280 - DNA, 19 bp, Mus musculus
  siRNA target sequence for Bin1 (NM_009668.1,1981-1999).
gtcttcccggagaatttta

SEQ ID NO: 673281 - DNA, 19 bp, Mus musculus
  siRNA target sequence for Bin1 (NM_009668.1,1983-2001).
cttcccggagaattttaca

SEQ ID NO: 673282 - DNA, 19 bp, Mus musculus
  siRNA target sequence for Bin3 (NM_021328.2,49-67).
gctggattccatttaagat

SEQ ID NO: 673283 - DNA, 19 bp, Mus musculus
  siRNA target sequence for Bin3 (NM_021328.2,102-120).
gtggagagagactttgaaa

SEQ ID NO: 673284 - DNA, 19 bp, Mus musculus
  siRNA target sequence for Bin3 (NM_021328.2,143-161).
gctggaagagcaaactaaa

SEQ ID NO: 673285 - DNA, 19 bp, Mus musculus
  siRNA target sequence for Bin3 (NM_021328.2,606-624).
ggcagccgacttgactatt

SEQ ID NO: 673286 - DNA, 19 bp, Mus musculus
  siRNA target sequence for Bin3 (NM_021328.2,607-625).
gcagccgacttgactattt

SEQ ID NO: 673287 - DNA, 19 bp, Mus musculus
  siRNA target sequence for Bin3 (NM_021328.2,610-628).
gccgacttgactatttcca

SEQ ID NO: 673288 - DNA, 19 bp, Mus musculus
  siRNA target sequence for Cplx2 (NM_009946.1,435-453).
ggacacagtgctcaaatat

SEQ ID NO: 673289 - DNA, 19 bp, Mus musculus
  siRNA target sequence for 0610012C01Rik (NM_026680.1,168-186).
cgtgctcttggcttttgga

SEQ ID NO: 673290 - DNA, 19 bp, Mus musculus
  siRNA target sequence for 0610012C01Rik (NM_026680.1,222-240).
cggcctgaggagaacgttt

SEQ ID NO: 673291 - DNA, 19 bp, Mus musculus
  siRNA target sequence for 0610012C01Rik (NM_026680.1,397-415).
ctgggcagtgcgtttaaca

SEQ ID NO: 673292 - DNA, 19 bp, Mus musculus
  siRNA target sequence for 2310061A22Rik (NM_025872.2,135-153).
ctcacggatacgcagaaaa

SEQ ID NO: 673293 - DNA, 19 bp, Mus musculus
  siRNA target sequence for 2310061A22Rik (NM_025872.2,257-275).
cggcttggcttttgtaatt

SEQ ID NO: 673294 - DNA, 19 bp, Mus musculus
  siRNA target sequence for 2310061A22Rik (NM_025872.2,260-278).
cttggcttttgtaattggt

SEQ ID NO: 673295 - DNA, 19 bp, Mus musculus
  siRNA target sequence for 2310061A22Rik (NM_025872.2,279-297).
ctcgagagaacgttcagat

SEQ ID NO: 673296 - DNA, 19 bp, Mus musculus
  siRNA target sequence for 2310061A22Rik (NM_025872.2,286-304).
gaacgttcagattcttctt

SEQ ID NO: 673297 - DNA, 19 bp, Mus musculus
  siRNA target sequence for 2310061A22Rik (NM_025872.2,381-399).
ggcatgatcttcgaaattt

SEQ ID NO: 673298 - DNA, 19 bp, Mus musculus
  siRNA target sequence for 2310061A22Rik (NM_025872.2,382-400).
gcatgatcttcgaaattta

SEQ ID NO: 673299 - DNA, 19 bp, Mus musculus
  siRNA target sequence for 2310061A22Rik (NM_025872.2,383-401).
catgatcttcgaaatttat

SEQ ID NO: 673300 - DNA, 19 bp, Mus musculus
  siRNA target sequence for 2310061A22Rik (NM_025872.2,386-404).
gatcttcgaaatttatgga

SEQ ID NO: 673301 - DNA, 19 bp, Mus musculus
  siRNA target sequence for 2310061A22Rik (NM_025872.2,437-455).
ggtcgttggctttatcaga

SEQ ID NO: 673302 - DNA, 19 bp, Mus musculus
  siRNA target sequence for 2310061A22Rik (NM_025872.2,438-456).
gtcgttggctttatcagaa

SEQ ID NO: 673303 - DNA, 19 bp, Mus musculus
  siRNA target sequence for 2310061A22Rik (NM_025872.2,470-488).
cggatccctcctaaatcta

SEQ ID NO: 673304 - DNA, 19 bp, Mus musculus
  siRNA target sequence for 2310061A22Rik (NM_025872.2,486-504).
ctacctggaatcagatcat

SEQ ID NO: 673305 - DNA, 19 bp, Mus musculus
  siRNA target sequence for 2310061A22Rik (NM_025872.2,499-517).
gatcattcgtagacaaagt

SEQ ID NO: 673306 - DNA, 19 bp, Mus musculus
  siRNA target sequence for Sec22l1 (NM_011342.2,205-223).
gaccttcaacagtatcaga

SEQ ID NO: 673307 - DNA, 19 bp, Mus musculus
  siRNA target sequence for Sec22l1 (NM_011342.2,224-242).
gtcaggctaagcaactctt

SEQ ID NO: 673308 - DNA, 19 bp, Mus musculus
  siRNA target sequence for Sec22l1 (NM_011342.2,229-247).
gctaagcaactctttcgaa

SEQ ID NO: 673309 - DNA, 19 bp, Mus musculus
  siRNA target sequence for Sec22l1 (NM_011342.2,230-248).
ctaagcaactctttcgaaa

SEQ ID NO: 673310 - DNA, 19 bp, Mus musculus
  siRNA target sequence for Sec22l1 (NM_011342.2,235-253).
caactctttcgaaagttga

SEQ ID NO: 673311 - DNA, 19 bp, Mus musculus
  siRNA target sequence for Sec22l1 (NM_011342.2,293-311).
ccatgacttttcactacat

SEQ ID NO: 673312 - DNA, 19 bp, Mus musculus
  siRNA target sequence for Sec22l1 (NM_011342.2,322-340).
ggggtgtgttacttggttt

SEQ ID NO: 673313 - DNA, 19 bp, Mus musculus
  siRNA target sequence for Sec22l1 (NM_011342.2,436-454).
gtgtctaggccctattcct

SEQ ID NO: 673314 - DNA, 19 bp, Mus musculus
  siRNA target sequence for Sec22l1 (NM_011342.2,486-504).
caagaaactctacattgat

SEQ ID NO: 673315 - DNA, 19 bp, Mus musculus
  siRNA target sequence for Sec22l1 (NM_011342.2,506-524).
gccgtgctcggagaaatct

SEQ ID NO: 673316 - DNA, 19 bp, Mus musculus
  siRNA target sequence for Sec22l1 (NM_011342.2,507-525).
ccgtgctcggagaaatcta

SEQ ID NO: 673317 - DNA, 19 bp, Mus musculus
  siRNA target sequence for Sec22l1 (NM_011342.2,526-544).
ggctccattaacactgaat

SEQ ID NO: 673318 - DNA, 19 bp, Mus musculus
  siRNA target sequence for Sec22l1 (NM_011342.2,527-545).
gctccattaacactgaatt

SEQ ID NO: 673319 - DNA, 19 bp, Mus musculus
  siRNA target sequence for Sec22l1 (NM_011342.2,530-548).
ccattaacactgaattgca

SEQ ID NO: 673320 - DNA, 19 bp, Mus musculus
  siRNA target sequence for Sec22l1 (NM_011342.2,564-582).
catggtggccaatattgaa

SEQ ID NO: 673321 - DNA, 19 bp, Mus musculus
  siRNA target sequence for Sec22l1 (NM_011342.2,567-585).
ggtggccaatattgaagaa

SEQ ID NO: 673322 - DNA, 19 bp, Mus musculus
  siRNA target sequence for Sec22l1 (NM_011342.2,604-622).
gcactctcagcattggatt

SEQ ID NO: 673323 - DNA, 19 bp, Mus musculus
  siRNA target sequence for Sec22l1 (NM_011342.2,618-636).
ggattcaaaggctaacaat

SEQ ID NO: 673324 - DNA, 19 bp, Mus musculus
  siRNA target sequence for Sec22l1 (NM_011342.2,619-637).
gattcaaaggctaacaatt

SEQ ID NO: 673325 - DNA, 19 bp, Mus musculus
  siRNA target sequence for Sec22l1 (NM_011342.2,641-659).
ccagtctatctaagaaata

SEQ ID NO: 673326 - DNA, 19 bp, Mus musculus
  siRNA target sequence for Sec22l1 (NM_011342.2,742-760).
gtgtatgtgcggttttggt

SEQ ID NO: 673327 - DNA, 19 bp, Mus musculus
  siRNA target sequence for Apoc4 (NM_007385.2,341-359).
gagaccacctcctaaacaa

SEQ ID NO: 673328 - DNA, 19 bp, Mus musculus
  siRNA target sequence for Edn1 (NM_010104.2,748-766).
gtcagtgcgctcaccaaaa

SEQ ID NO: 673329 - DNA, 19 bp, Mus musculus
  siRNA target sequence for Edn1 (NM_010104.2,804-822).
gaactcagggcccaaagta

SEQ ID NO: 673330 - DNA, 19 bp, Mus musculus
  siRNA target sequence for Edn1 (NM_010104.2,828-846).
cagaaaagcttaaaagact

SEQ ID NO: 673331 - DNA, 19 bp, Mus musculus
  siRNA target sequence for Edn1 (NM_010104.2,947-965).
catcaaggcatcttttcgt

SEQ ID NO: 673332 - DNA, 19 bp, Mus musculus
  siRNA target sequence for Cplx1 (NM_007756.2,309-327).
gggtataagagacaagtat

SEQ ID NO: 673333 - DNA, 19 bp, Mus musculus
  siRNA target sequence for Slc18a3 (NM_021712.1,114-132).
cgtgtgcgttgcactgtta

SEQ ID NO: 673334 - DNA, 19 bp, Mus musculus
  siRNA target sequence for Slc18a3 (NM_021712.1,163-181).
cccattgttcccgactata

SEQ ID NO: 673335 - DNA, 19 bp, Mus musculus
  siRNA target sequence for Slc18a3 (NM_021712.1,164-182).
ccattgttcccgactatat

SEQ ID NO: 673336 - DNA, 19 bp, Mus musculus
  siRNA target sequence for Slc18a3 (NM_021712.1,337-355).
cctcgctaccccacagaaa

SEQ ID NO: 673337 - DNA, 19 bp, Mus musculus
  siRNA target sequence for Slc18a3 (NM_021712.1,341-359).
gctaccccacagaaagtga

SEQ ID NO: 673338 - DNA, 19 bp, Mus musculus
  siRNA target sequence for Slc18a3 (NM_021712.1,366-384).
gaagataggcgtgctattt

SEQ ID NO: 673339 - DNA, 19 bp, Mus musculus
  siRNA target sequence for Slc18a3 (NM_021712.1,453-471).
cgacgtgccgctgcttatt

SEQ ID NO: 673340 - DNA, 19 bp, Mus musculus
  siRNA target sequence for Slc18a3 (NM_021712.1,489-507).
cgcctccacagtcatgttt

SEQ ID NO: 673341 - DNA, 19 bp, Mus musculus
  siRNA target sequence for Slc18a3 (NM_021712.1,537-555).
cgctgcgcgcagtctacaa

SEQ ID NO: 673342 - DNA, 19 bp, Mus musculus
  siRNA target sequence for Slc18a3 (NM_021712.1,593-611).
ccatgatcgccgacaagta

SEQ ID NO: 673343 - DNA, 19 bp, Mus musculus
  siRNA target sequence for Slc18a3 (NM_021712.1,646-664).
gtggcgctagccttcatca

SEQ ID NO: 673344 - DNA, 19 bp, Mus musculus
  siRNA target sequence for Slc18a3 (NM_021712.1,720-738).
caagcgtgtaccctttcta

SEQ ID NO: 673345 - DNA, 19 bp, Mus musculus
  siRNA target sequence for Slc18a3 (NM_021712.1,864-882).
cccttacatcgctgttgta

SEQ ID NO: 673346 - DNA, 19 bp, Mus musculus
  siRNA target sequence for Slc18a3 (NM_021712.1,883-901).
gccggagcgctcacaactt

SEQ ID NO: 673347 - DNA, 19 bp, Mus musculus
  siRNA target sequence for Slc18a3 (NM_021712.1,885-903).
cggagcgctcacaacttgt

SEQ ID NO: 673348 - DNA, 19 bp, Mus musculus
  siRNA target sequence for Slc18a3 (NM_021712.1,886-904).
ggagcgctcacaacttgta

SEQ ID NO: 673349 - DNA, 19 bp, Mus musculus
  siRNA target sequence for Slc18a3 (NM_021712.1,887-905).
gagcgctcacaacttgtaa

SEQ ID NO: 673350 - DNA, 19 bp, Mus musculus
  siRNA target sequence for Slc18a3 (NM_021712.1,889-907).
gcgctcacaacttgtaaca

SEQ ID NO: 673351 - DNA, 19 bp, Mus musculus
  siRNA target sequence for Slc18a3 (NM_021712.1,891-909).
gctcacaacttgtaacatt

SEQ ID NO: 673352 - DNA, 19 bp, Mus musculus
  siRNA target sequence for Slc18a3 (NM_021712.1,1015-1033).
gtgttaggcgtctatctca

SEQ ID NO: 673353 - DNA, 19 bp, Mus musculus
  siRNA target sequence for Slc18a3 (NM_021712.1,1233-1251).
gcgccacgtatcagtctat

SEQ ID NO: 673354 - DNA, 19 bp, Mus musculus
  siRNA target sequence for Slc18a3 (NM_021712.1,1559-1577).
gtgaggacgactacaacta

SEQ ID NO: 673355 - DNA, 19 bp, Mus musculus
  siRNA target sequence for Slc18a3 (NM_021712.1,1561-1579).
gaggacgactacaactact

SEQ ID NO: 673356 - DNA, 19 bp, Mus musculus
  siRNA target sequence for A230090E05 (NM_175000.1,401-419).
cttcagcggcgaaaaagat

SEQ ID NO: 673357 - DNA, 19 bp, Mus musculus
  siRNA target sequence for BC033609 (NM_145959.1,53-71).
cgggtacaaggtgattatt

SEQ ID NO: 673358 - DNA, 19 bp, Mus musculus
  siRNA target sequence for BC033609 (NM_145959.1,54-72).
gggtacaaggtgattattt

SEQ ID NO: 673359 - DNA, 19 bp, Mus musculus
  siRNA target sequence for BC033609 (NM_145959.1,74-92).
gaaaccctactctataaga

SEQ ID NO: 673360 - DNA, 19 bp, Mus musculus
  siRNA target sequence for BC033609 (NM_145959.1,102-120).
ctatagatgaacacactaa

SEQ ID NO: 673361 - DNA, 19 bp, Mus musculus
  siRNA target sequence for BC033609 (NM_145959.1,154-172).
cttatcgctggtgaagaat

SEQ ID NO: 673362 - DNA, 19 bp, Mus musculus
  siRNA target sequence for BC033609 (NM_145959.1,211-229).
gaagggacaagtgataaat

SEQ ID NO: 673363 - DNA, 19 bp, Mus musculus
  siRNA target sequence for BC033609 (NM_145959.1,263-281).
ccatctgtgaatagactaa

SEQ ID NO: 673364 - DNA, 19 bp, Mus musculus
  siRNA target sequence for BC033609 (NM_145959.1,276-294).
gactaaagagcacattaga

SEQ ID NO: 673365 - DNA, 19 bp, Mus musculus
  siRNA target sequence for BC033609 (NM_145959.1,285-303).
gcacattagacccacaaaa

SEQ ID NO: 673366 - DNA, 19 bp, Mus musculus
  siRNA target sequence for BC033609 (NM_145959.1,299-317).
caaaagatgctcttatcgt

SEQ ID NO: 673367 - DNA, 19 bp, Mus musculus
  siRNA target sequence for BC033609 (NM_145959.1,439-457).
gtacacaaagcgaattgca

SEQ ID NO: 673368 - DNA, 19 bp, Mus musculus
  siRNA target sequence for BC033609 (NM_145959.1,471-489).
ccactctgactgcattctt

SEQ ID NO: 673369 - DNA, 19 bp, Mus musculus
  siRNA target sequence for BC033609 (NM_145959.1,502-520).
cctttcaccgaacttgaaa

SEQ ID NO: 673370 - DNA, 19 bp, Mus musculus
  siRNA target sequence for BC033609 (NM_145959.1,523-541).
ccacgcagtcaccatgttt

SEQ ID NO: 673371 - DNA, 19 bp, Mus musculus
  siRNA target sequence for BC033609 (NM_145959.1,526-544).
cgcagtcaccatgtttgaa

SEQ ID NO: 673372 - DNA, 19 bp, Mus musculus
  siRNA target sequence for BC033609 (NM_145959.1,618-636).
gagaagcacagagatactt

SEQ ID NO: 673373 - DNA, 19 bp, Mus musculus
  siRNA target sequence for BC033609 (NM_145959.1,634-652).
ctttgaccacgcacttact

SEQ ID NO: 673374 - DNA, 19 bp, Mus musculus
  siRNA target sequence for BC033609 (NM_145959.1,668-686).
ctcttcctgcgtcataata

SEQ ID NO: 673375 - DNA, 19 bp, Mus musculus
  siRNA target sequence for BC033609 (NM_145959.1,673-691).
cctgcgtcataataaggat

SEQ ID NO: 673376 - DNA, 19 bp, Mus musculus
  siRNA target sequence for BC033609 (NM_145959.1,756-774).
gcgaaagccttcttggttt

SEQ ID NO: 673377 - DNA, 19 bp, Mus musculus
  siRNA target sequence for BC033609 (NM_145959.1,797-815).
gttctaaacaaaaactaca

SEQ ID NO: 673378 - DNA, 19 bp, Mus musculus
  siRNA target sequence for BC033609 (NM_145959.1,828-846).
ccatggcgcctcttaccaa

SEQ ID NO: 673379 - DNA, 19 bp, Mus musculus
  siRNA target sequence for BC033609 (NM_145959.1,829-847).
catggcgcctcttaccaat

SEQ ID NO: 673380 - DNA, 19 bp, Mus musculus
  siRNA target sequence for BC033609 (NM_145959.1,833-851).
gcgcctcttaccaatgaga

SEQ ID NO: 673381 - DNA, 19 bp, Mus musculus
  siRNA target sequence for BC033609 (NM_145959.1,867-885).
gctgcaccccgcagcatat

SEQ ID NO: 673382 - DNA, 19 bp, Mus musculus
  siRNA target sequence for BC033609 (NM_145959.1,914-932).
gtctggtttaaattgtata

SEQ ID NO: 673383 - DNA, 19 bp, Mus musculus
  siRNA target sequence for BC033609 (NM_145959.1,973-991).
gtccaaaggtacaagactt

SEQ ID NO: 673384 - DNA, 19 bp, Mus musculus
  siRNA target sequence for BC033609 (NM_145959.1,992-1010).
cggaaactgccagatatat

SEQ ID NO: 673385 - DNA, 19 bp, Mus musculus
  siRNA target sequence for BC033609 (NM_145959.1,1015-1033).
gggttatgatcggttactt

SEQ ID NO: 673386 - DNA, 19 bp, Mus musculus
  siRNA target sequence for BC033609 (NM_145959.1,1016-1034).
ggttatgatcggttactta

SEQ ID NO: 673387 - DNA, 19 bp, Mus musculus
  siRNA target sequence for BC033609 (NM_145959.1,1017-1035).
gttatgatcggttacttat

SEQ ID NO: 673388 - DNA, 19 bp, Mus musculus
  siRNA target sequence for BC033609 (NM_145959.1,1022-1040).
gatcggttacttataacct

SEQ ID NO: 673389 - DNA, 19 bp, Mus musculus
  siRNA target sequence for BC033609 (NM_145959.1,1059-1077).
gggtcgttcctgcttcaaa

SEQ ID NO: 673390 - DNA, 19 bp, Mus musculus
  siRNA target sequence for BC033609 (NM_145959.1,1086-1104).
cgatgctgaatgatgcttt

SEQ ID NO: 673391 - DNA, 19 bp, Mus musculus
  siRNA target sequence for BC033609 (NM_145959.1,1286-1304).
gtcaccatgttgaatgctt

SEQ ID NO: 673392 - DNA, 19 bp, Mus musculus
  siRNA target sequence for BC033609 (NM_145959.1,1390-1408).
gagcacagagtcgtttgaa

SEQ ID NO: 673393 - DNA, 19 bp, Mus musculus
  siRNA target sequence for BC033609 (NM_145959.1,1392-1410).
gcacagagtcgtttgaaat

SEQ ID NO: 673394 - DNA, 19 bp, Mus musculus
  siRNA target sequence for BC033609 (NM_145959.1,1438-1456).
ggcgacaaaaccaaactct

SEQ ID NO: 673395 - DNA, 19 bp, Mus musculus
  siRNA target sequence for BC033609 (NM_145959.1,1522-1540).
cgaattaaaccggaaagtt

SEQ ID NO: 673396 - DNA, 19 bp, Mus musculus
  siRNA target sequence for BC033609 (NM_145959.1,1523-1541).
gaattaaaccggaaagttt

SEQ ID NO: 673397 - DNA, 19 bp, Mus musculus
  siRNA target sequence for BC033609 (NM_145959.1,1531-1549).
ccggaaagtttgtcagaaa

SEQ ID NO: 673398 - DNA, 19 bp, Mus musculus
  siRNA target sequence for BC033609 (NM_145959.1,1534-1552).
gaaagtttgtcagaaaata

SEQ ID NO: 673399 - DNA, 19 bp, Mus musculus
  siRNA target sequence for BC033609 (NM_145959.1,1579-1597).
gagccttcaaagtctctta

SEQ ID NO: 673400 - DNA, 19 bp, Mus musculus
  siRNA target sequence for BC033609 (NM_145959.1,1592-1610).
ctcttacattccagtagaa

SEQ ID NO: 673401 - DNA, 19 bp, Mus musculus
  siRNA target sequence for BC033609 (NM_145959.1,1594-1612).
cttacattccagtagaaaa

SEQ ID NO: 673402 - DNA, 19 bp, Mus musculus
  siRNA target sequence for BC033609 (NM_145959.1,1618-1636).
cctgcaagtccttaacttt

SEQ ID NO: 673403 - DNA, 19 bp, Mus musculus
  siRNA target sequence for BC033609 (NM_145959.1,1621-1639).
gcaagtccttaactttgtt

SEQ ID NO: 673404 - DNA, 19 bp, Mus musculus
  siRNA target sequence for BC033609 (NM_145959.1,1625-1643).
gtccttaactttgttcatt

SEQ ID NO: 673405 - DNA, 19 bp, Mus musculus
  siRNA target sequence for BC033609 (NM_145959.1,1736-1754).
ccacttccggccaaaaact

SEQ ID NO: 673406 - DNA, 19 bp, Mus musculus
  siRNA target sequence for BC033609 (NM_145959.1,1737-1755).
cacttccggccaaaaactt

SEQ ID NO: 673407 - DNA, 19 bp, Mus musculus
  siRNA target sequence for BC033609 (NM_145959.1,1739-1757).
cttccggccaaaaacttaa

SEQ ID NO: 673408 - DNA, 19 bp, Mus musculus
  siRNA target sequence for BC033609 (NM_145959.1,1742-1760).
ccggccaaaaacttaatgt

SEQ ID NO: 673409 - DNA, 19 bp, Mus musculus
  siRNA target sequence for BC033609 (NM_145959.1,1743-1761).
cggccaaaaacttaatgtt

SEQ ID NO: 673410 - DNA, 19 bp, Mus musculus
  siRNA target sequence for BC033609 (NM_145959.1,1744-1762).
ggccaaaaacttaatgttt

SEQ ID NO: 673411 - DNA, 19 bp, Mus musculus
  siRNA target sequence for BC033609 (NM_145959.1,1745-1763).
gccaaaaacttaatgttta

SEQ ID NO: 673412 - DNA, 19 bp, Mus musculus
  siRNA target sequence for 1110020B03Rik (NM_145823.1,936-954).
ctgagaagcgagtgtatct

SEQ ID NO: 673413 - DNA, 19 bp, Mus musculus
  siRNA target sequence for 1110020B03Rik (NM_145823.1,981-999).
gagctgttgttcccaaaat

SEQ ID NO: 673414 - DNA, 19 bp, Mus musculus
  siRNA target sequence for 1110020B03Rik (NM_145823.1,1011-1029).
ccgagaaggcgtggaatta

SEQ ID NO: 673415 - DNA, 19 bp, Mus musculus
  siRNA target sequence for 1110020B03Rik (NM_145823.1,1012-1030).
cgagaaggcgtggaattat

SEQ ID NO: 673416 - DNA, 19 bp, Mus musculus
  siRNA target sequence for 1110020B03Rik (NM_145823.1,1013-1031).
gagaaggcgtggaattatt

SEQ ID NO: 673417 - DNA, 19 bp, Mus musculus
  siRNA target sequence for 1110020B03Rik (NM_145823.1,1059-1077).
gttccttcctgccgaaatt

SEQ ID NO: 673418 - DNA, 19 bp, Mus musculus
  siRNA target sequence for 1110020B03Rik (NM_145823.1,1087-1105).
catagaaaccaagtatgaa

SEQ ID NO: 673419 - DNA, 19 bp, Mus musculus
  siRNA target sequence for 1110020B03Rik (NM_145823.1,1115-1133).
ggaagcaacgatagtattt

SEQ ID NO: 673420 - DNA, 19 bp, Mus musculus
  siRNA target sequence for 1110020B03Rik (NM_145823.1,1119-1137).
gcaacgatagtatttttga

SEQ ID NO: 673421 - DNA, 19 bp, Mus musculus
  siRNA target sequence for 1110020B03Rik (NM_145823.1,1177-1195).
cgatatcgcctgtgatgaa

SEQ ID NO: 673422 - DNA, 19 bp, Mus musculus
  siRNA target sequence for 1110020B03Rik (NM_145823.1,1183-1201).
cgcctgtgatgaaattcca

SEQ ID NO: 673423 - DNA, 19 bp, Mus musculus
  siRNA target sequence for 1110020B03Rik (NM_145823.1,1200-1218).
cagaacgctactacaaaga

SEQ ID NO: 673424 - DNA, 19 bp, Mus musculus
  siRNA target sequence for 1110020B03Rik (NM_145823.1,1226-1244).
gatcctaaacacttcaagt

SEQ ID NO: 673425 - DNA, 19 bp, Mus musculus
  siRNA target sequence for 1110020B03Rik (NM_145823.1,1258-1276).
ccgagggcagctaagagaa

SEQ ID NO: 673426 - DNA, 19 bp, Mus musculus
  siRNA target sequence for 1110020B03Rik (NM_145823.1,1354-1372).
gacccgagtggaacaattt

SEQ ID NO: 673427 - DNA, 19 bp, Mus musculus
  siRNA target sequence for 1110020B03Rik (NM_145823.1,1356-1374).
cccgagtggaacaatttgt

SEQ ID NO: 673428 - DNA, 19 bp, Mus musculus
  siRNA target sequence for 1110020B03Rik (NM_145823.1,1430-1448).
gttgatgagtggtacgata

SEQ ID NO: 673429 - DNA, 19 bp, Mus musculus
  siRNA target sequence for 1110020B03Rik (NM_145823.1,1433-1451).
gatgagtggtacgatatga

SEQ ID NO: 673430 - DNA, 19 bp, Mus musculus
  siRNA target sequence for 1110020B03Rik (NM_145823.1,1436-1454).
gagtggtacgatatgacaa

SEQ ID NO: 673431 - DNA, 19 bp, Mus musculus
  siRNA target sequence for 1110020B03Rik (NM_145823.1,1441-1459).
gtacgatatgacaatggat

SEQ ID NO: 673432 - DNA, 19 bp, Mus musculus
  siRNA target sequence for 1110020B03Rik (NM_145823.1,1466-1484).
cgggaatacgagaaaaaca

SEQ ID NO: 673433 - DNA, 19 bp, Mus musculus
  siRNA target sequence for 1110020B03Rik (NM_145823.1,1467-1485).
gggaatacgagaaaaacat

SEQ ID NO: 673434 - DNA, 19 bp, Mus musculus
  siRNA target sequence for 1110020B03Rik (NM_145823.1,1550-1568).
catgcacagaccagtacat

SEQ ID NO: 673435 - DNA, 19 bp, Mus musculus
  siRNA target sequence for Ctns (NM_031251.2,128-146).
gaggaattggctgcttatt

SEQ ID NO: 673436 - DNA, 19 bp, Mus musculus
  siRNA target sequence for Ctns (NM_031251.2,159-177).
ctcttgatgttcatagaga

SEQ ID NO: 673437 - DNA, 19 bp, Mus musculus
  siRNA target sequence for Ctns (NM_031251.2,164-182).
gatgttcatagagaagtat

SEQ ID NO: 673438 - DNA, 19 bp, Mus musculus
  siRNA target sequence for Ctns (NM_031251.2,212-230).
caccgtgaagctggaaaat

SEQ ID NO: 673439 - DNA, 19 bp, Mus musculus
  siRNA target sequence for Ctns (NM_031251.2,256-274).
cccttgggcatccactaaa

SEQ ID NO: 673440 - DNA, 19 bp, Mus musculus
  siRNA target sequence for Ctns (NM_031251.2,261-279).
gggcatccactaaattcga

SEQ ID NO: 673441 - DNA, 19 bp, Mus musculus
  siRNA target sequence for Ctns (NM_031251.2,300-318).
gtcacgtttcgctcaaaaa

SEQ ID NO: 673442 - DNA, 19 bp, Mus musculus
  siRNA target sequence for Ctns (NM_031251.2,302-320).
cacgtttcgctcaaaaaat

SEQ ID NO: 673443 - DNA, 19 bp, Mus musculus
  siRNA target sequence for Ctns (NM_031251.2,304-322).
cgtttcgctcaaaaaatct

SEQ ID NO: 673444 - DNA, 19 bp, Mus musculus
  siRNA target sequence for Ctns (NM_031251.2,311-329).
ctcaaaaaatctgactatt

SEQ ID NO: 673445 - DNA, 19 bp, Mus musculus
  siRNA target sequence for Ctns (NM_031251.2,313-331).
caaaaaatctgactattgt

SEQ ID NO: 673446 - DNA, 19 bp, Mus musculus
  siRNA target sequence for Ctns (NM_031251.2,356-374).
gcctcgcggagagaaaaat

SEQ ID NO: 673447 - DNA, 19 bp, Mus musculus
  siRNA target sequence for Ctns (NM_031251.2,482-500).
cagaatcgttagcatcata

SEQ ID NO: 673448 - DNA, 19 bp, Mus musculus
  siRNA target sequence for Ctns (NM_031251.2,507-525).
gtgattggctggatctact

SEQ ID NO: 673449 - DNA, 19 bp, Mus musculus
  siRNA target sequence for Ctns (NM_031251.2,531-549).
gcgtggtctgtctcctttt

SEQ ID NO: 673450 - DNA, 19 bp, Mus musculus
  siRNA target sequence for Ctns (NM_031251.2,532-550).
cgtggtctgtctcctttta

SEQ ID NO: 673451 - DNA, 19 bp, Mus musculus
  siRNA target sequence for Ctns (NM_031251.2,572-590).
gagacggaaaagtgtcatt

SEQ ID NO: 673452 - DNA, 19 bp, Mus musculus
  siRNA target sequence for Ctns (NM_031251.2,716-734).
gaaccccgtcgacagtaat

SEQ ID NO: 673453 - DNA, 19 bp, Mus musculus
  siRNA target sequence for Ctns (NM_031251.2,719-737).
ccccgtcgacagtaatgat

SEQ ID NO: 673454 - DNA, 19 bp, Mus musculus
  siRNA target sequence for Ctns (NM_031251.2,763-781).
ccctcaccctgattgtcat

SEQ ID NO: 673455 - DNA, 19 bp, Mus musculus
  siRNA target sequence for Ctns (NM_031251.2,975-993).
gcctatatgaacttctact

SEQ ID NO: 673456 - DNA, 19 bp, Mus musculus
  siRNA target sequence for Ctns (NM_031251.2,976-994).
cctatatgaacttctacta

SEQ ID NO: 673457 - DNA, 19 bp, Mus musculus
  siRNA target sequence for Ctns (NM_031251.2,1021-1039).
gcggtgtgctcctcgattt

SEQ ID NO: 673458 - DNA, 19 bp, Mus musculus
  siRNA target sequence for Ctns (NM_031251.2,1022-1040).
cggtgtgctcctcgatttt

SEQ ID NO: 673459 - DNA, 19 bp, Mus musculus
  siRNA target sequence for Ctns (NM_031251.2,1023-1041).
ggtgtgctcctcgatttta

SEQ ID NO: 673460 - DNA, 19 bp, Mus musculus
  siRNA target sequence for Ctns (NM_031251.2,1070-1088).
gttcctccagtcttacaat

SEQ ID NO: 673461 - DNA, 19 bp, Mus musculus
  siRNA target sequence for Ctns (NM_031251.2,1092-1110).
gaccaatggacattgatct

SEQ ID NO: 673462 - DNA, 19 bp, Mus musculus
  siRNA target sequence for Ctns (NM_031251.2,1179-1197).
cacttctacttgtacagaa

SEQ ID NO: 673463 - DNA, 19 bp, Mus musculus
  siRNA target sequence for Ctns (NM_031251.2,1204-1222).
cagggtacgaccagttgaa

SEQ ID NO: 673464 - DNA, 19 bp, Mus musculus
  siRNA target sequence for Ctns (NM_031251.2,1206-1224).
gggtacgaccagttgaatt

SEQ ID NO: 673465 - DNA, 19 bp, Mus musculus
  siRNA target sequence for Hpxn (NM_017371.1,15-33).
gacagcagtggcgctaaat

SEQ ID NO: 673466 - DNA, 19 bp, Mus musculus
  siRNA target sequence for Hpxn (NM_017371.1,17-35).
cagcagtggcgctaaatat

SEQ ID NO: 673467 - DNA, 19 bp, Mus musculus
  siRNA target sequence for Hpxn (NM_017371.1,20-38).
cagtggcgctaaatatcct

SEQ ID NO: 673468 - DNA, 19 bp, Mus musculus
  siRNA target sequence for Hpxn (NM_017371.1,98-116).
ggagagttgccgaagttga

SEQ ID NO: 673469 - DNA, 19 bp, Mus musculus
  siRNA target sequence for Hpxn (NM_017371.1,101-119).
gagttgccgaagttgaaaa

SEQ ID NO: 673470 - DNA, 19 bp, Mus musculus
  siRNA target sequence for Hpxn (NM_017371.1,126-144).
caagccagattcagatgta

SEQ ID NO: 673471 - DNA, 19 bp, Mus musculus
  siRNA target sequence for Hpxn (NM_017371.1,145-163).
cccgaacactgcttggata

SEQ ID NO: 673472 - DNA, 19 bp, Mus musculus
  siRNA target sequence for Hpxn (NM_017371.1,179-197).
ctgcgaccatggatcacaa

SEQ ID NO: 673473 - DNA, 19 bp, Mus musculus
  siRNA target sequence for Hpxn (NM_017371.1,201-219).
gaccatgctgttctttaaa

SEQ ID NO: 673474 - DNA, 19 bp, Mus musculus
  siRNA target sequence for Hpxn (NM_017371.1,245-263).
cagggacccgggagttgat

SEQ ID NO: 673475 - DNA, 19 bp, Mus musculus
  siRNA target sequence for Hpxn (NM_017371.1,247-265).
gggacccgggagttgatct

SEQ ID NO: 673476 - DNA, 19 bp, Mus musculus
  siRNA target sequence for Hpxn (NM_017371.1,353-371).
gggtgtaccctcctgaaaa

SEQ ID NO: 673477 - DNA, 19 bp, Mus musculus
  siRNA target sequence for Hpxn (NM_017371.1,389-407).
caaagttgttccaagaaga

SEQ ID NO: 673478 - DNA, 19 bp, Mus musculus
  siRNA target sequence for Hpxn (NM_017371.1,521-539).
ccacaagaacccaaaagga

SEQ ID NO: 673479 - DNA, 19 bp, Mus musculus
  siRNA target sequence for Hpxn (NM_017371.1,673-691).
gcccgtgactacttcgtat

SEQ ID NO: 673480 - DNA, 19 bp, Mus musculus
  siRNA target sequence for Hpxn (NM_017371.1,727-745).
ggaactgctcatggaaata

SEQ ID NO: 673481 - DNA, 19 bp, Mus musculus
  siRNA target sequence for Hpxn (NM_017371.1,909-927).
gggtccttcaacagtagat

SEQ ID NO: 673482 - DNA, 19 bp, Mus musculus
  siRNA target sequence for Hpxn (NM_017371.1,931-949).
gccttttcctgggatgata

SEQ ID NO: 673483 - DNA, 19 bp, Mus musculus
  siRNA target sequence for Hpxn (NM_017371.1,933-951).
cttttcctgggatgataaa

SEQ ID NO: 673484 - DNA, 19 bp, Mus musculus
  siRNA target sequence for Hpxn (NM_017371.1,992-1010).
caaagggaggcaataacct

SEQ ID NO: 673485 - DNA, 19 bp, Mus musculus
  siRNA target sequence for Hpxn (NM_017371.1,997-1015).
ggaggcaataacctagtaa

SEQ ID NO: 673486 - DNA, 19 bp, Mus musculus
  siRNA target sequence for Hpxn (NM_017371.1,1008-1026).
cctagtaagtggttatcca

SEQ ID NO: 673487 - DNA, 19 bp, Mus musculus
  siRNA target sequence for Hpxn (NM_017371.1,1009-1027).
ctagtaagtggttatccaa

SEQ ID NO: 673488 - DNA, 19 bp, Mus musculus
  siRNA target sequence for Hpxn (NM_017371.1,1103-1121).
gttcttccaggctctatgt

SEQ ID NO: 673489 - DNA, 19 bp, Mus musculus
  siRNA target sequence for Hpxn (NM_017371.1,1190-1208).
cctggccccatgagaaagt

SEQ ID NO: 673490 - DNA, 19 bp, Mus musculus
  siRNA target sequence for Hpxn (NM_017371.1,1193-1211).
ggccccatgagaaagttga

SEQ ID NO: 673491 - DNA, 19 bp, Mus musculus
  siRNA target sequence for Hpxn (NM_017371.1,1194-1212).
gccccatgagaaagttgat

SEQ ID NO: 673492 - DNA, 19 bp, Mus musculus
  siRNA target sequence for Hpxn (NM_017371.1,1265-1283).
gttccagcttgtactttat

SEQ ID NO: 673493 - DNA, 19 bp, Mus musculus
  siRNA target sequence for Hpxn (NM_017371.1,1285-1303).
catgggcccaatttgtact

SEQ ID NO: 673494 - DNA, 19 bp, Mus musculus
  siRNA target sequence for Hpxn (NM_017371.1,1291-1309).
cccaatttgtactgctata

SEQ ID NO: 673495 - DNA, 19 bp, Mus musculus
  siRNA target sequence for Hpxn (NM_017371.1,1299-1317).
gtactgctatagcagtata

SEQ ID NO: 673496 - DNA, 19 bp, Mus musculus
  siRNA target sequence for Hpxn (NM_017371.1,1304-1322).
gctatagcagtatagacaa

SEQ ID NO: 673497 - DNA, 19 bp, Mus musculus
  siRNA target sequence for Hpxn (NM_017371.1,1310-1328).
gcagtatagacaaactgaa

SEQ ID NO: 673498 - DNA, 19 bp, Mus musculus
  siRNA target sequence for Hpxn (NM_017371.1,1311-1329).
cagtatagacaaactgaat

SEQ ID NO: 673499 - DNA, 19 bp, Mus musculus
  siRNA target sequence for Laptm4a (NM_008640.1,911-929).
ccatgccagctgtcaacat

SEQ ID NO: 673500 - DNA, 19 bp, Mus musculus
  siRNA target sequence for Laptm4a (NM_008640.1,920-938).
ctgtcaacattcagtatga

SEQ ID NO: 673501 - DNA, 19 bp, Mus musculus
  siRNA target sequence for Laptm4a (NM_008640.1,931-949).
cagtatgaagtcattggta

SEQ ID NO: 673502 - DNA, 19 bp, Mus musculus
  siRNA target sequence for Laptm4a (NM_008640.1,933-951).
gtatgaagtcattggtaat

SEQ ID NO: 673503 - DNA, 19 bp, Mus musculus
  siRNA target sequence for Laptm4a (NM_008640.1,942-960).
cattggtaattactattca

SEQ ID NO: 673504 - DNA, 19 bp, Mus musculus
  siRNA target sequence for Laptm4a (NM_008640.1,976-994).
gataatgcctgcgttcttt

SEQ ID NO: 673505 - DNA, 19 bp, Mus musculus
  siRNA target sequence for Laptm4a (NM_008640.1,998-1016).
ccgtctctgttcttatgtt

SEQ ID NO: 673506 - DNA, 19 bp, Mus musculus
  siRNA target sequence for Laptm4a (NM_008640.1,1080-1098).
cttctgctaccgactcttt

SEQ ID NO: 673507 - DNA, 19 bp, Mus musculus
  siRNA target sequence for Laptm4a (NM_008640.1,1085-1103).
gctaccgactctttgactt

SEQ ID NO: 673508 - DNA, 19 bp, Mus musculus
  siRNA target sequence for Laptm4a (NM_008640.1,1176-1194).
gcctgatttcccatacaaa

SEQ ID NO: 673509 - DNA, 19 bp, Mus musculus
  siRNA target sequence for Laptm4a (NM_008640.1,1272-1290).
ggcttacctaatcaattgt

SEQ ID NO: 673510 - DNA, 19 bp, Mus musculus
  siRNA target sequence for Laptm4a (NM_008640.1,1274-1292).
cttacctaatcaattgtgt

SEQ ID NO: 673511 - DNA, 19 bp, Mus musculus
  siRNA target sequence for Laptm4a (NM_008640.1,1295-1313).
ggaactgctacaaatacat

SEQ ID NO: 673512 - DNA, 19 bp, Mus musculus
  siRNA target sequence for Laptm4a (NM_008640.1,1344-1362).
gtaccctgcctttgaaaca

SEQ ID NO: 673513 - DNA, 19 bp, Mus musculus
  siRNA target sequence for Nup62 (NM_053074.1,256-274).
ccggcaccggagggtttaa

SEQ ID NO: 673514 - DNA, 19 bp, Mus musculus
  siRNA target sequence for Nup62 (NM_053074.1,257-275).
cggcaccggagggtttaat

SEQ ID NO: 673515 - DNA, 19 bp, Mus musculus
  siRNA target sequence for Nup62 (NM_053074.1,258-276).
ggcaccggagggtttaatt

SEQ ID NO: 673516 - DNA, 19 bp, Mus musculus
  siRNA target sequence for Nup62 (NM_053074.1,600-618).
ggctccactgggttctcat

SEQ ID NO: 673517 - DNA, 19 bp, Mus musculus
  siRNA target sequence for Nup62 (NM_053074.1,601-619).
gctccactgggttctcatt

SEQ ID NO: 673518 - DNA, 19 bp, Mus musculus
  siRNA target sequence for Nup62 (NM_053074.1,725-743).
cactctggtgactactaca

SEQ ID NO: 673519 - DNA, 19 bp, Mus musculus
  siRNA target sequence for Tmem9 (NM_025439.2,146-164).
gaagatatccggtgcaaat

SEQ ID NO: 673520 - DNA, 19 bp, Mus musculus
  siRNA target sequence for Tmem9 (NM_025439.2,149-167).
gatatccggtgcaaatgca

SEQ ID NO: 673521 - DNA, 19 bp, Mus musculus
  siRNA target sequence for Tmem9 (NM_025439.2,171-189).
gtccgccttacagaaacat

SEQ ID NO: 673522 - DNA, 19 bp, Mus musculus
  siRNA target sequence for Tmem9 (NM_025439.2,173-191).
ccgccttacagaaacatca

SEQ ID NO: 673523 - DNA, 19 bp, Mus musculus
  siRNA target sequence for Tmem9 (NM_025439.2,330-348).
caaccatcaaggtcattat

SEQ ID NO: 673524 - DNA, 19 bp, Mus musculus
  siRNA target sequence for Tmem9 (NM_025439.2,333-351).
ccatcaaggtcattattgt

SEQ ID NO: 673525 - DNA, 19 bp, Mus musculus
  siRNA target sequence for Trappc3 (NM_013718.2,113-131).
ggcacggagagcaagaaaa

SEQ ID NO: 673526 - DNA, 19 bp, Mus musculus
  siRNA target sequence for Trappc3 (NM_013718.2,455-473).
cactcggccctcatttact

SEQ ID NO: 673527 - DNA, 19 bp, Mus musculus
  siRNA target sequence for Trappc3 (NM_013718.2,560-578).
ggagatggcgtgacagaaa

SEQ ID NO: 673528 - DNA, 19 bp, Mus musculus
  siRNA target sequence for Trappc3 (NM_013718.2,561-579).
gagatggcgtgacagaaat

SEQ ID NO: 673529 - DNA, 19 bp, Mus musculus
  siRNA target sequence for Mad2l1 (NM_019499.2,101-119).
gtgggagcgcagaaatcgt

SEQ ID NO: 673530 - DNA, 19 bp, Mus musculus
  siRNA target sequence for Mad2l1 (NM_019499.2,117-135).
cgtggccgagtttttctca

SEQ ID NO: 673531 - DNA, 19 bp, Mus musculus
  siRNA target sequence for Mad2l1 (NM_019499.2,118-136).
gtggccgagtttttctcat

SEQ ID NO: 673532 - DNA, 19 bp, Mus musculus
  siRNA target sequence for Mad2l1 (NM_019499.2,120-138).
ggccgagtttttctcattt

SEQ ID NO: 673533 - DNA, 19 bp, Mus musculus
  siRNA target sequence for Mad2l1 (NM_019499.2,175-193).
ccgtcggaaacctttacta

SEQ ID NO: 673534 - DNA, 19 bp, Mus musculus
  siRNA target sequence for Mad2l1 (NM_019499.2,177-195).
gtcggaaacctttactaga

SEQ ID NO: 673535 - DNA, 19 bp, Mus musculus
  siRNA target sequence for Mad2l1 (NM_019499.2,208-226).
ggactcaccttgcttacaa

SEQ ID NO: 673536 - DNA, 19 bp, Mus musculus
  siRNA target sequence for Mad2l1 (NM_019499.2,211-229).
ctcaccttgcttacaacta

SEQ ID NO: 673537 - DNA, 19 bp, Mus musculus
  siRNA target sequence for Mad2l1 (NM_019499.2,232-250).
gaccccgagctcataaagt

SEQ ID NO: 673538 - DNA, 19 bp, Mus musculus
  siRNA target sequence for Mad2l1 (NM_019499.2,234-252).
ccccgagctcataaagtat

SEQ ID NO: 673539 - DNA, 19 bp, Mus musculus
  siRNA target sequence for Mad2l1 (NM_019499.2,236-254).
ccgagctcataaagtatct

SEQ ID NO: 673540 - DNA, 19 bp, Mus musculus
  siRNA target sequence for Mad2l1 (NM_019499.2,240-258).
gctcataaagtatctcaat

SEQ ID NO: 673541 - DNA, 19 bp, Mus musculus
  siRNA target sequence for Mad2l1 (NM_019499.2,265-283).
gtggaacagctaaaagagt

SEQ ID NO: 673542 - DNA, 19 bp, Mus musculus
  siRNA target sequence for Mad2l1 (NM_019499.2,312-330).
ggtggtggtcatctcaaat

SEQ ID NO: 673543 - DNA, 19 bp, Mus musculus
  siRNA target sequence for Mad2l1 (NM_019499.2,313-331).
gtggtggtcatctcaaata

SEQ ID NO: 673544 - DNA, 19 bp, Mus musculus
  siRNA target sequence for Mad2l1 (NM_019499.2,319-337).
gtcatctcaaatattgaaa

SEQ ID NO: 673545 - DNA, 19 bp, Mus musculus
  siRNA target sequence for Mad2l1 (NM_019499.2,352-370).
gaaagatggcagtttgata

SEQ ID NO: 673546 - DNA, 19 bp, Mus musculus
  siRNA target sequence for Mad2l1 (NM_019499.2,396-414).
ggaaggtgttcgtagagaa

SEQ ID NO: 673547 - DNA, 19 bp, Mus musculus
  siRNA target sequence for Mad2l1 (NM_019499.2,397-415).
gaaggtgttcgtagagaaa

SEQ ID NO: 673548 - DNA, 19 bp, Mus musculus
  siRNA target sequence for Mad2l1 (NM_019499.2,400-418).
ggtgttcgtagagaaaagt

SEQ ID NO: 673549 - DNA, 19 bp, Mus musculus
  siRNA target sequence for Mad2l1 (NM_019499.2,439-457).
gaaattcgctcagtgatta

SEQ ID NO: 673550 - DNA, 19 bp, Mus musculus
  siRNA target sequence for Mad2l1 (NM_019499.2,467-485).
cagctactgtgacatttct

SEQ ID NO: 673551 - DNA, 19 bp, Mus musculus
  siRNA target sequence for Mad2l1 (NM_019499.2,565-583).
gaatcgggaccgcaattta

SEQ ID NO: 673552 - DNA, 19 bp, Mus musculus
  siRNA target sequence for Mad2l1 (NM_019499.2,572-590).
gaccgcaatttattaccaa

SEQ ID NO: 673553 - DNA, 19 bp, Mus musculus
  siRNA target sequence for Mad2l1 (NM_019499.2,574-592).
ccgcaatttattaccaatt

SEQ ID NO: 673554 - DNA, 19 bp, Mus musculus
  siRNA target sequence for Mad2l1 (NM_019499.2,601-619).
gtccgtctacgctcattta

SEQ ID NO: 673555 - DNA, 19 bp, Mus musculus
  siRNA target sequence for Mad2l1 (NM_019499.2,620-638).
caaccacaatccataaagt

SEQ ID NO: 673556 - DNA, 19 bp, Mus musculus
  siRNA target sequence for Mad2l1 (NM_019499.2,624-642).
cacaatccataaagtgaat

SEQ ID NO: 673557 - DNA, 19 bp, Mus musculus
  siRNA target sequence for Mad2l1 (NM_019499.2,654-672).
ctacaaaacccctgtcaat

SEQ ID NO: 673558 - DNA, 19 bp, Mus musculus
  siRNA target sequence for Pes1 (NM_022889.2,1217-1235).
catcattggcaggtactat

SEQ ID NO: 673559 - DNA, 19 bp, Mus musculus
  siRNA target sequence for Pes1 (NM_022889.2,1220-1238).
cattggcaggtactatgta

SEQ ID NO: 673560 - DNA, 19 bp, Mus musculus
  siRNA target sequence for Pes1 (NM_022889.2,1242-1260).
ccccagtgggtctttgact

SEQ ID NO: 673561 - DNA, 19 bp, Mus musculus
  siRNA target sequence for Ccna1 (NM_007628.1,163-181).
ggtcctgatgcttgtcaaa

SEQ ID NO: 673562 - DNA, 19 bp, Mus musculus
  siRNA target sequence for Ccna1 (NM_007628.1,164-182).
gtcctgatgcttgtcaaat

SEQ ID NO: 673563 - DNA, 19 bp, Mus musculus
  siRNA target sequence for Ccna1 (NM_007628.1,229-247).
ctaggggtgttgactgaaa

SEQ ID NO: 673564 - DNA, 19 bp, Mus musculus
  siRNA target sequence for Ccna1 (NM_007628.1,347-365).
ctgaccatggggtcaatga

SEQ ID NO: 673565 - DNA, 19 bp, Mus musculus
  siRNA target sequence for Ccna1 (NM_007628.1,376-394).
cgtgggtttgatatctata

SEQ ID NO: 673566 - DNA, 19 bp, Mus musculus
  siRNA target sequence for Ccna1 (NM_007628.1,380-398).
ggtttgatatctatatgga

SEQ ID NO: 673567 - DNA, 19 bp, Mus musculus
  siRNA target sequence for Ccna1 (NM_007628.1,432-450).
ggggaaagagggcatcata

SEQ ID NO: 673568 - DNA, 19 bp, Mus musculus
  siRNA target sequence for Ccna1 (NM_007628.1,568-586).
gaagcaacggattttggtt

SEQ ID NO: 673569 - DNA, 19 bp, Mus musculus
  siRNA target sequence for Ccna1 (NM_007628.1,584-602).
gttcagatgtgattaacgt

SEQ ID NO: 673570 - DNA, 19 bp, Mus musculus
  siRNA target sequence for Ccna1 (NM_007628.1,659-677).
gacccaaggctcactacat

SEQ ID NO: 673571 - DNA, 19 bp, Mus musculus
  siRNA target sequence for Ccna1 (NM_007628.1,1065-1083).
gaatttggccaagtatgtt

SEQ ID NO: 673572 - DNA, 19 bp, Mus musculus
  siRNA target sequence for Ccna1 (NM_007628.1,1157-1175).
gcctggcaaactatattgt

SEQ ID NO: 673573 - DNA, 19 bp, Mus musculus
  siRNA target sequence for Ccna1 (NM_007628.1,1159-1177).
ctggcaaactatattgtga

SEQ ID NO: 673574 - DNA, 19 bp, Mus musculus
  siRNA target sequence for Ccna1 (NM_007628.1,1214-1232).
cgggctattcattaaatga

SEQ ID NO: 673575 - DNA, 19 bp, Mus musculus
  siRNA target sequence for Ccna1 (NM_007628.1,1216-1234).
ggctattcattaaatgaga

SEQ ID NO: 673576 - DNA, 19 bp, Mus musculus
  siRNA target sequence for Ccna1 (NM_007628.1,1245-1263).
cctgagtgagctgcataaa

SEQ ID NO: 673577 - DNA, 19 bp, Mus musculus
  siRNA target sequence for Ccna1 (NM_007628.1,1298-1316).
caatcagggagaagtacaa

SEQ ID NO: 673578 - DNA, 19 bp, Mus musculus
  siRNA target sequence for Ccna2 (NM_009828.1,312-330).
gacgggttgctcctcttaa

SEQ ID NO: 673579 - DNA, 19 bp, Mus musculus
  siRNA target sequence for Ccna2 (NM_009828.1,324-342).
ctcttaaggaccttcctat

SEQ ID NO: 673580 - DNA, 19 bp, Mus musculus
  siRNA target sequence for Ccna2 (NM_009828.1,326-344).
cttaaggaccttcctataa

SEQ ID NO: 673581 - DNA, 19 bp, Mus musculus
  siRNA target sequence for Ccna2 (NM_009828.1,331-349).
ggaccttcctataaacgat

SEQ ID NO: 673582 - DNA, 19 bp, Mus musculus
  siRNA target sequence for Ccna2 (NM_009828.1,372-390).
catggaaagcagtcagtaa

SEQ ID NO: 673583 - DNA, 19 bp, Mus musculus
  siRNA target sequence for Ccna2 (NM_009828.1,522-540).
cactgacacctcttgacta

SEQ ID NO: 673584 - DNA, 19 bp, Mus musculus
  siRNA target sequence for Ccna2 (NM_009828.1,528-546).
cacctcttgactatccaat

SEQ ID NO: 673585 - DNA, 19 bp, Mus musculus
  siRNA target sequence for Ccna2 (NM_009828.1,599-617).
gacaagccagtgaacgtta

SEQ ID NO: 673586 - DNA, 19 bp, Mus musculus
  siRNA target sequence for Ccna2 (NM_009828.1,601-619).
caagccagtgaacgttaat

SEQ ID NO: 673587 - DNA, 19 bp, Mus musculus
  siRNA target sequence for Ccna2 (NM_009828.1,604-622).
gccagtgaacgttaatgaa

SEQ ID NO: 673588 - DNA, 19 bp, Mus musculus
  siRNA target sequence for Ccna2 (NM_009828.1,627-645).
ctgactatcaagaagacat

SEQ ID NO: 673589 - DNA, 19 bp, Mus musculus
  siRNA target sequence for Ccna2 (NM_009828.1,641-659).
gacattcacacgtacctta

SEQ ID NO: 673590 - DNA, 19 bp, Mus musculus
  siRNA target sequence for Ccna2 (NM_009828.1,651-669).
cgtaccttagggaaatgga

SEQ ID NO: 673591 - DNA, 19 bp, Mus musculus
  siRNA target sequence for Ccna2 (NM_009828.1,668-686).
gaggttaaatgtaaaccta

SEQ ID NO: 673592 - DNA, 19 bp, Mus musculus
  siRNA target sequence for Ccna2 (NM_009828.1,670-688).
ggttaaatgtaaacctaaa

SEQ ID NO: 673593 - DNA, 19 bp, Mus musculus
  siRNA target sequence for Ccna2 (NM_009828.1,683-701).
cctaaagtgggttacatga

SEQ ID NO: 673594 - DNA, 19 bp, Mus musculus
  siRNA target sequence for Ccna2 (NM_009828.1,684-702).
ctaaagtgggttacatgaa

SEQ ID NO: 673595 - DNA, 19 bp, Mus musculus
  siRNA target sequence for Ccna2 (NM_009828.1,797-815).
catttggctgtgaactaca

SEQ ID NO: 673596 - DNA, 19 bp, Mus musculus
  siRNA target sequence for Ccna2 (NM_009828.1,806-824).
gtgaactacattgatagat

SEQ ID NO: 673597 - DNA, 19 bp, Mus musculus
  siRNA target sequence for Ccna2 (NM_009828.1,883-901).
gctgctagcttcgaagttt

SEQ ID NO: 673598 - DNA, 19 bp, Mus musculus
  siRNA target sequence for Ccna2 (NM_009828.1,886-904).
gctagcttcgaagtttgaa

SEQ ID NO: 673599 - DNA, 19 bp, Mus musculus
  siRNA target sequence for Ccna2 (NM_009828.1,890-908).
gcttcgaagtttgaagaaa

SEQ ID NO: 673600 - DNA, 19 bp, Mus musculus
  siRNA target sequence for Ccna2 (NM_009828.1,894-912).
cgaagtttgaagaaatata

SEQ ID NO: 673601 - DNA, 19 bp, Mus musculus
  siRNA target sequence for Ccna2 (NM_009828.1,923-941).
gtagcagagtttgtgtata

SEQ ID NO: 673602 - DNA, 19 bp, Mus musculus
  siRNA target sequence for Ccna2 (NM_009828.1,945-963).
cagacgatacctattccaa

SEQ ID NO: 673603 - DNA, 19 bp, Mus musculus
  siRNA target sequence for Ccna2 (NM_009828.1,1015-1033).
cttggctgcaccaacagta

SEQ ID NO: 673604 - DNA, 19 bp, Mus musculus
  siRNA target sequence for Ccna2 (NM_009828.1,1018-1036).
ggctgcaccaacagtaaat

SEQ ID NO: 673605 - DNA, 19 bp, Mus musculus
  siRNA target sequence for Ccna2 (NM_009828.1,1022-1040).
gcaccaacagtaaatcagt

SEQ ID NO: 673606 - DNA, 19 bp, Mus musculus
  siRNA target sequence for Ccna2 (NM_009828.1,1023-1041).
caccaacagtaaatcagtt

SEQ ID NO: 673607 - DNA, 19 bp, Mus musculus
  siRNA target sequence for Ccna2 (NM_009828.1,1078-1096).
ctgtaaggttgaaagctta

SEQ ID NO: 673608 - DNA, 19 bp, Mus musculus
  siRNA target sequence for Ccna2 (NM_009828.1,1110-1128).
gagaactgagtttgataga

SEQ ID NO: 673609 - DNA, 19 bp, Mus musculus
  siRNA target sequence for Ccna2 (NM_009828.1,1130-1148).
gctgacccgtaccttaagt

SEQ ID NO: 673610 - DNA, 19 bp, Mus musculus
  siRNA target sequence for Ccna2 (NM_009828.1,1131-1149).
ctgacccgtaccttaagta

SEQ ID NO: 673611 - DNA, 19 bp, Mus musculus
  siRNA target sequence for Ccna2 (NM_009828.1,1228-1246).
ggcacaacagactggatat

SEQ ID NO: 673612 - DNA, 19 bp, Mus musculus
  siRNA target sequence for Ccna2 (NM_009828.1,1229-1247).
gcacaacagactggatata

SEQ ID NO: 673613 - DNA, 19 bp, Mus musculus
  siRNA target sequence for Ccna2 (NM_009828.1,1255-1273).
gagtcttaagccttgtctt

SEQ ID NO: 673614 - DNA, 19 bp, Mus musculus
  siRNA target sequence for Ccna2 (NM_009828.1,1294-1312).
cctcaaagcgccacaacat

SEQ ID NO: 673615 - DNA, 19 bp, Mus musculus
  siRNA target sequence for Ccna2 (NM_009828.1,1336-1354).
gtacaagcattcaaaatat

SEQ ID NO: 673616 - DNA, 19 bp, Mus musculus
  siRNA target sequence for Ccna2 (NM_009828.1,1375-1393).
cccaccagagacactaagt

SEQ ID NO: 673617 - DNA, 19 bp, Mus musculus
  siRNA target sequence for Ccnb1 (NM_172301.2,308-326).
ctgttaaagccctaccaaa

SEQ ID NO: 673618 - DNA, 19 bp, Mus musculus
  siRNA target sequence for Ccnb1 (NM_172301.2,388-406).
cctgaacttgaacatgtta

SEQ ID NO: 673619 - DNA, 19 bp, Mus musculus
  siRNA target sequence for Ccnb1 (NM_172301.2,422-440).
ctcctgaacctattttggt

SEQ ID NO: 673620 - DNA, 19 bp, Mus musculus
  siRNA target sequence for Ccnb1 (NM_172301.2,427-445).
gaacctattttggttgata

SEQ ID NO: 673621 - DNA, 19 bp, Mus musculus
  siRNA target sequence for Ccnb1 (NM_172301.2,454-472).
ccaagcccgatggaaacat

SEQ ID NO: 673622 - DNA, 19 bp, Mus musculus
  siRNA target sequence for Ccnb1 (NM_172301.2,1124-1142).
gcttagcgctgaaaattct

SEQ ID NO: 673623 - DNA, 19 bp, Mus musculus
  siRNA target sequence for Ccnb1 (NM_172301.2,1125-1143).
cttagcgctgaaaattctt

SEQ ID NO: 673624 - DNA, 19 bp, Mus musculus
  siRNA target sequence for Ccnb1 (NM_172301.2,1292-1310).
catctaagcatgctaagat

SEQ ID NO: 673625 - DNA, 19 bp, Mus musculus
  siRNA target sequence for Ccnb1 (NM_172301.2,1326-1344).
gctgaactgtacactagtt

SEQ ID NO: 673626 - DNA, 19 bp, Mus musculus
  siRNA target sequence for Ccnb2 (NM_007630.1,121-139).
cgacggtgtccagtgattt

SEQ ID NO: 673627 - DNA, 19 bp, Mus musculus
  siRNA target sequence for Ccnb2 (NM_007630.1,197-215).
ggcagttttagaagaaatt

SEQ ID NO: 673628 - DNA, 19 bp, Mus musculus
  siRNA target sequence for Ccnb2 (NM_007630.1,286-304).
ccaccaaagtgacaaatgt

SEQ ID NO: 673629 - DNA, 19 bp, Mus musculus
  siRNA target sequence for Ccnb2 (NM_007630.1,527-545).
caggcagcttgaggtttta

SEQ ID NO: 673630 - DNA, 19 bp, Mus musculus
  siRNA target sequence for Ccnb2 (NM_007630.1,529-547).
ggcagcttgaggttttaca

SEQ ID NO: 673631 - DNA, 19 bp, Mus musculus
  siRNA target sequence for Ccnb2 (NM_007630.1,539-557).
ggttttacagtccattaat

SEQ ID NO: 673632 - DNA, 19 bp, Mus musculus
  siRNA target sequence for Ccnb2 (NM_007630.1,551-569).
cattaatccacacttctta

SEQ ID NO: 673633 - DNA, 19 bp, Mus musculus
  siRNA target sequence for Ccnb2 (NM_007630.1,651-669).
caggaaactctgtacatgt

SEQ ID NO: 673634 - DNA, 19 bp, Mus musculus
  siRNA target sequence for Ccnb2 (NM_007630.1,908-926).
cttaaggcgagcctcaaaa

SEQ ID NO: 673635 - DNA, 19 bp, Mus musculus
  siRNA target sequence for Ccnb2 (NM_007630.1,928-946).
ccggagaggtggatgttga

SEQ ID NO: 673636 - DNA, 19 bp, Mus musculus
  siRNA target sequence for Ccnb2 (NM_007630.1,982-1000).
cgctcgtcgactatgacat

SEQ ID NO: 673637 - DNA, 19 bp, Mus musculus
  siRNA target sequence for Ccnb2 (NM_007630.1,1059-1077).
ctgggccaaggaaaatgga

SEQ ID NO: 673638 - DNA, 19 bp, Mus musculus
  siRNA target sequence for Ccnb2 (NM_007630.1,1239-1257).
cctcagctgaactccaaaa

SEQ ID NO: 673639 - DNA, 19 bp, Mus musculus
  siRNA target sequence for Ccnb2 (NM_007630.1,1242-1260).
cagctgaactccaaaatca

SEQ ID NO: 673640 - DNA, 19 bp, Mus musculus
  siRNA target sequence for Ccnb2 (NM_007630.1,1247-1265).
gaactccaaaatcatcaaa

SEQ ID NO: 673641 - DNA, 19 bp, Mus musculus
  siRNA target sequence for Ccnf (NM_007634.2,79-97).
gtttctgttatcctactaa

SEQ ID NO: 673642 - DNA, 19 bp, Mus musculus
  siRNA target sequence for Ccnf (NM_007634.2,83-101).
ctgttatcctactaaacga

SEQ ID NO: 673643 - DNA, 19 bp, Mus musculus
  siRNA target sequence for Ccnf (NM_007634.2,90-108).
cctactaaacgaagaatca

SEQ ID NO: 673644 - DNA, 19 bp, Mus musculus
  siRNA target sequence for Ccnf (NM_007634.2,91-109).
ctactaaacgaagaatcaa

SEQ ID NO: 673645 - DNA, 19 bp, Mus musculus
  siRNA target sequence for Ccnf (NM_007634.2,319-337).
ctgctgaaaagggaaattt

SEQ ID NO: 673646 - DNA, 19 bp, Mus musculus
  siRNA target sequence for Ccnf (NM_007634.2,359-377).
gattgcctacctctacaat

SEQ ID NO: 673647 - DNA, 19 bp, Mus musculus
  siRNA target sequence for Ccnf (NM_007634.2,554-572).
ccgagcggagtgtcagtta

SEQ ID NO: 673648 - DNA, 19 bp, Mus musculus
  siRNA target sequence for Ccnf (NM_007634.2,556-574).
gagcggagtgtcagttaca

SEQ ID NO: 673649 - DNA, 19 bp, Mus musculus
  siRNA target sequence for Ccnf (NM_007634.2,558-576).
gcggagtgtcagttacaga

SEQ ID NO: 673650 - DNA, 19 bp, Mus musculus
  siRNA target sequence for Ccnf (NM_007634.2,604-622).
gcttgggaagggtgctaaa

SEQ ID NO: 673651 - DNA, 19 bp, Mus musculus
  siRNA target sequence for Ccnf (NM_007634.2,605-623).
cttgggaagggtgctaaat

SEQ ID NO: 673652 - DNA, 19 bp, Mus musculus
  siRNA target sequence for Ccnf (NM_007634.2,608-626).
gggaagggtgctaaatctt

SEQ ID NO: 673653 - DNA, 19 bp, Mus musculus
  siRNA target sequence for Ccnf (NM_007634.2,609-627).
ggaagggtgctaaatcttt

SEQ ID NO: 673654 - DNA, 19 bp, Mus musculus
  siRNA target sequence for Ccnf (NM_007634.2,610-628).
gaagggtgctaaatctttt

SEQ ID NO: 673655 - DNA, 19 bp, Mus musculus
  siRNA target sequence for Ccnf (NM_007634.2,613-631).
gggtgctaaatctttttga

SEQ ID NO: 673656 - DNA, 19 bp, Mus musculus
  siRNA target sequence for Ccnf (NM_007634.2,653-671).
ggcgcgtagccttttggaa

SEQ ID NO: 673657 - DNA, 19 bp, Mus musculus
  siRNA target sequence for Ccnf (NM_007634.2,679-697).
ctcgtcagggatgcttaat

SEQ ID NO: 673658 - DNA, 19 bp, Mus musculus
  siRNA target sequence for Ccnf (NM_007634.2,721-739).
gcgacagaaaggtggatat

SEQ ID NO: 673659 - DNA, 19 bp, Mus musculus
  siRNA target sequence for Ccnf (NM_007634.2,723-741).
gacagaaaggtggatatgt

SEQ ID NO: 673660 - DNA, 19 bp, Mus musculus
  siRNA target sequence for Ccnf (NM_007634.2,915-933).
gtcaacaagcagcagatat

SEQ ID NO: 673661 - DNA, 19 bp, Mus musculus
  siRNA target sequence for Ccnf (NM_007634.2,956-974).
cgacaccatgaggtacatt

SEQ ID NO: 673662 - DNA, 19 bp, Mus musculus
  siRNA target sequence for Ccnf (NM_007634.2,959-977).
caccatgaggtacattcta

SEQ ID NO: 673663 - DNA, 19 bp, Mus musculus
  siRNA target sequence for Ccnf (NM_007634.2,1072-1090).
ggctggtccccagatacaa

SEQ ID NO: 673664 - DNA, 19 bp, Mus musculus
  siRNA target sequence for Ccnf (NM_007634.2,1176-1194).
ctcacagacaacacgtata

SEQ ID NO: 673665 - DNA, 19 bp, Mus musculus
  siRNA target sequence for Ccnf (NM_007634.2,1213-1231).
gcgtgatgggggagatcat

SEQ ID NO: 673666 - DNA, 19 bp, Mus musculus
  siRNA target sequence for Ccnf (NM_007634.2,1214-1232).
cgtgatgggggagatcatt

SEQ ID NO: 673667 - DNA, 19 bp, Mus musculus
  siRNA target sequence for Ccnf (NM_007634.2,1260-1278).
cctaccgtggttgactata

SEQ ID NO: 673668 - DNA, 19 bp, Mus musculus
  siRNA target sequence for Ccnf (NM_007634.2,1503-1521).
gtcctgagccttcataaga

SEQ ID NO: 673669 - DNA, 19 bp, Mus musculus
  siRNA target sequence for Ccnf (NM_007634.2,1581-1599).
cagaggttcgaggataagt

SEQ ID NO: 673670 - DNA, 19 bp, Mus musculus
  siRNA target sequence for Ccnf (NM_007634.2,1639-1657).
ctgacttgtgcagtacaat

SEQ ID NO: 673671 - DNA, 19 bp, Mus musculus
  siRNA target sequence for Ccnf (NM_007634.2,1643-1661).
cttgtgcagtacaatagga

SEQ ID NO: 673672 - DNA, 19 bp, Mus musculus
  siRNA target sequence for Ccnf (NM_007634.2,1649-1667).
cagtacaataggagtaaaa

SEQ ID NO: 673673 - DNA, 19 bp, Mus musculus
  siRNA target sequence for Ccnf (NM_007634.2,1651-1669).
gtacaataggagtaaaaca

SEQ ID NO: 673674 - DNA, 19 bp, Mus musculus
  siRNA target sequence for Ccnf (NM_007634.2,1804-1822).
ccaccgcagagctatcgaa

SEQ ID NO: 673675 - DNA, 19 bp, Mus musculus
  siRNA target sequence for Ccnf (NM_007634.2,1805-1823).
caccgcagagctatcgaat

SEQ ID NO: 673676 - DNA, 19 bp, Mus musculus
  siRNA target sequence for Ccnf (NM_007634.2,2011-2029).
cctggccagaggacaagat

SEQ ID NO: 673677 - DNA, 19 bp, Mus musculus
  siRNA target sequence for Ccnf (NM_007634.2,2097-2115).
gatcgggccaaggacatta

SEQ ID NO: 673678 - DNA, 19 bp, Mus musculus
  siRNA target sequence for Ccnf (NM_007634.2,2241-2259).
caccatcaggccaagaagt

SEQ ID NO: 673679 - DNA, 19 bp, Mus musculus
  siRNA target sequence for Ccnf (NM_007634.2,2251-2269).
ccaagaagtcatgtttaca

SEQ ID NO: 673680 - DNA, 19 bp, Mus musculus
  siRNA target sequence for Ccng1 (NM_009831.1,246-264).
caactgactctcagaaact

SEQ ID NO: 673681 - DNA, 19 bp, Mus musculus
  siRNA target sequence for Ccng1 (NM_009831.1,316-334).
ggtctgcggcttgaaacta

SEQ ID NO: 673682 - DNA, 19 bp, Mus musculus
  siRNA target sequence for Ccng1 (NM_009831.1,317-335).
gtctgcggcttgaaactaa

SEQ ID NO: 673683 - DNA, 19 bp, Mus musculus
  siRNA target sequence for Ccng1 (NM_009831.1,319-337).
ctgcggcttgaaactaatt

SEQ ID NO: 673684 - DNA, 19 bp, Mus musculus
  siRNA target sequence for Ccng1 (NM_009831.1,321-339).
gcggcttgaaactaattga

SEQ ID NO: 673685 - DNA, 19 bp, Mus musculus
  siRNA target sequence for Ccng1 (NM_009831.1,350-368).
gataatggcctcagaatga

SEQ ID NO: 673686 - DNA, 19 bp, Mus musculus
  siRNA target sequence for Ccng1 (NM_009831.1,372-390).
caagattacgggactttga

SEQ ID NO: 673687 - DNA, 19 bp, Mus musculus
  siRNA target sequence for Ccng1 (NM_009831.1,385-403).
ctttgaagtaaaagatcta

SEQ ID NO: 673688 - DNA, 19 bp, Mus musculus
  siRNA target sequence for Ccng1 (NM_009831.1,389-407).
gaagtaaaagatctactta

SEQ ID NO: 673689 - DNA, 19 bp, Mus musculus
  siRNA target sequence for Ccng1 (NM_009831.1,447-465).
ccctagctgtgaatttact

SEQ ID NO: 673690 - DNA, 19 bp, Mus musculus
  siRNA target sequence for Ccng1 (NM_009831.1,466-484).
ggacagattcttgtctaaa

SEQ ID NO: 673691 - DNA, 19 bp, Mus musculus
  siRNA target sequence for Ccng1 (NM_009831.1,515-533).
gttggactgagctgctttt

SEQ ID NO: 673692 - DNA, 19 bp, Mus musculus
  siRNA target sequence for Ccng1 (NM_009831.1,569-587).
gtcccactggcgactgatt

SEQ ID NO: 673693 - DNA, 19 bp, Mus musculus
  siRNA target sequence for Ccng1 (NM_009831.1,572-590).
ccactggcgactgatttga

SEQ ID NO: 673694 - DNA, 19 bp, Mus musculus
  siRNA target sequence for Ccng1 (NM_009831.1,573-591).
cactggcgactgatttgat

SEQ ID NO: 673695 - DNA, 19 bp, Mus musculus
  siRNA target sequence for Ccng1 (NM_009831.1,589-607).
gatccgaataagtcagtat

SEQ ID NO: 673696 - DNA, 19 bp, Mus musculus
  siRNA target sequence for Ccng1 (NM_009831.1,593-611).
cgaataagtcagtataggt

SEQ ID NO: 673697 - DNA, 19 bp, Mus musculus
  siRNA target sequence for Ccng1 (NM_009831.1,594-612).
gaataagtcagtataggtt

SEQ ID NO: 673698 - DNA, 19 bp, Mus musculus
  siRNA target sequence for Ccng1 (NM_009831.1,667-685).
gaaagtcaaagctactact

SEQ ID NO: 673699 - DNA, 19 bp, Mus musculus
  siRNA target sequence for Ccng1 (NM_009831.1,677-695).
gctactactgcctttcaat

SEQ ID NO: 673700 - DNA, 19 bp, Mus musculus
  siRNA target sequence for Ccng1 (NM_009831.1,692-710).
caatttctgcagctctatt

SEQ ID NO: 673701 - DNA, 19 bp, Mus musculus
  siRNA target sequence for Ccng1 (NM_009831.1,745-763).
gagaaacgatctgaatttt

SEQ ID NO: 673702 - DNA, 19 bp, Mus musculus
  siRNA target sequence for Ccng1 (NM_009831.1,747-765).
gaaacgatctgaattttga

SEQ ID NO: 673703 - DNA, 19 bp, Mus musculus
  siRNA target sequence for Ccng1 (NM_009831.1,751-769).
cgatctgaattttgaaaga

SEQ ID NO: 673704 - DNA, 19 bp, Mus musculus
  siRNA target sequence for Ccng1 (NM_009831.1,768-786).
gactagaagcccaacttaa

SEQ ID NO: 673705 - DNA, 19 bp, Mus musculus
  siRNA target sequence for Ccng1 (NM_009831.1,792-810).
gccactgcaggatcatatt

SEQ ID NO: 673706 - DNA, 19 bp, Mus musculus
  siRNA target sequence for Ccng1 (NM_009831.1,793-811).
ccactgcaggatcatattt

SEQ ID NO: 673707 - DNA, 19 bp, Mus musculus
  siRNA target sequence for Ccng1 (NM_009831.1,794-812).
cactgcaggatcatatttt

SEQ ID NO: 673708 - DNA, 19 bp, Mus musculus
  siRNA target sequence for Ccng1 (NM_009831.1,832-850).
gctggcgctatctatcctt

SEQ ID NO: 673709 - DNA, 19 bp, Mus musculus
  siRNA target sequence for Ccng1 (NM_009831.1,862-880).
ccaagcactgaaatacgta

SEQ ID NO: 673710 - DNA, 19 bp, Mus musculus
  siRNA target sequence for Ccng1 (NM_009831.1,869-887).
ctgaaatacgtagagttaa

SEQ ID NO: 673711 - DNA, 19 bp, Mus musculus
  siRNA target sequence for Ccng1 (NM_009831.1,888-906).
cagaaggagtagaatgtat

SEQ ID NO: 673712 - DNA, 19 bp, Mus musculus
  siRNA target sequence for Ccng1 (NM_009831.1,955-973).
gcttgtttccaagtgttta

SEQ ID NO: 673713 - DNA, 19 bp, Mus musculus
  siRNA target sequence for Ccng1 (NM_009831.1,956-974).
cttgtttccaagtgtttaa

SEQ ID NO: 673714 - DNA, 19 bp, Mus musculus
  siRNA target sequence for Ccng1 (NM_009831.1,964-982).
caagtgtttaactgaatat

SEQ ID NO: 673715 - DNA, 19 bp, Mus musculus
  siRNA target sequence for Ccng1 (NM_009831.1,1005-1023).
ctaacggtcagaagttgaa

SEQ ID NO: 673716 - DNA, 19 bp, Mus musculus
  siRNA target sequence for Ccng1 (NM_009831.1,1041-1059).
gcactgcacggcaactgaa

SEQ ID NO: 673717 - DNA, 19 bp, Mus musculus
  siRNA target sequence for Ccng1 (NM_009831.1,1060-1078).
gcacagttattatagaata

SEQ ID NO: 673718 - DNA, 19 bp, Mus musculus
  siRNA target sequence for Ccng1 (NM_009831.1,1061-1079).
cacagttattatagaataa

SEQ ID NO: 673719 - DNA, 19 bp, Mus musculus
  siRNA target sequence for Ccng1 (NM_009831.1,1065-1083).
gttattatagaataactca

SEQ ID NO: 673720 - DNA, 19 bp, Mus musculus
  siRNA target sequence for Ccng2 (NM_007635.2,578-596).
gcgaaggggttcagctttt

SEQ ID NO: 673721 - DNA, 19 bp, Mus musculus
  siRNA target sequence for Ccng2 (NM_007635.2,589-607).
cagcttttcggattgttga

SEQ ID NO: 673722 - DNA, 19 bp, Mus musculus
  siRNA target sequence for Ccng2 (NM_007635.2,644-662).
gggaaaaagggctgatctt

SEQ ID NO: 673723 - DNA, 19 bp, Mus musculus
  siRNA target sequence for Ccng2 (NM_007635.2,646-664).
gaaaaagggctgatcttga

SEQ ID NO: 673724 - DNA, 19 bp, Mus musculus
  siRNA target sequence for Ccng2 (NM_007635.2,669-687).
ggctaccccggagaatgat

SEQ ID NO: 673725 - DNA, 19 bp, Mus musculus
  siRNA target sequence for Ccng2 (NM_007635.2,670-688).
gctaccccggagaatgata

SEQ ID NO: 673726 - DNA, 19 bp, Mus musculus
  siRNA target sequence for Ccng2 (NM_007635.2,671-689).
ctaccccggagaatgataa

SEQ ID NO: 673727 - DNA, 19 bp, Mus musculus
  siRNA target sequence for Ccng2 (NM_007635.2,675-693).
cccggagaatgataacact

SEQ ID NO: 673728 - DNA, 19 bp, Mus musculus
  siRNA target sequence for Ccng2 (NM_007635.2,676-694).
ccggagaatgataacactt

SEQ ID NO: 673729 - DNA, 19 bp, Mus musculus
  siRNA target sequence for Ccng2 (NM_007635.2,677-695).
cggagaatgataacacttt

SEQ ID NO: 673730 - DNA, 19 bp, Mus musculus
  siRNA target sequence for Ccng2 (NM_007635.2,685-703).
gataacactttgtgttcaa

SEQ ID NO: 673731 - DNA, 19 bp, Mus musculus
  siRNA target sequence for Ccng2 (NM_007635.2,775-793).
gttctggctgtcaatattt

SEQ ID NO: 673732 - DNA, 19 bp, Mus musculus
  siRNA target sequence for Ccng2 (NM_007635.2,780-798).
ggctgtcaatattttggat

SEQ ID NO: 673733 - DNA, 19 bp, Mus musculus
  siRNA target sequence for Ccng2 (NM_007635.2,781-799).
gctgtcaatattttggata

SEQ ID NO: 673734 - DNA, 19 bp, Mus musculus
  siRNA target sequence for Ccng2 (NM_007635.2,800-818).
gattcttggcccttatgaa

SEQ ID NO: 673735 - DNA, 19 bp, Mus musculus
  siRNA target sequence for Ccng2 (NM_007635.2,902-920).
cccccacgcacgatgtgat

SEQ ID NO: 673736 - DNA, 19 bp, Mus musculus
  siRNA target sequence for Ccng2 (NM_007635.2,921-939).
ccgcatcagtcagtgtaaa

SEQ ID NO: 673737 - DNA, 19 bp, Mus musculus
  siRNA target sequence for Ccng2 (NM_007635.2,922-940).
cgcatcagtcagtgtaaat

SEQ ID NO: 673738 - DNA, 19 bp, Mus musculus
  siRNA target sequence for Ccng2 (NM_007635.2,942-960).
cacagcgtctgacattaaa

SEQ ID NO: 673739 - DNA, 19 bp, Mus musculus
  siRNA target sequence for Ccng2 (NM_007635.2,961-979).
cgcatggagaaaatcatct

SEQ ID NO: 673740 - DNA, 19 bp, Mus musculus
  siRNA target sequence for Ccng2 (NM_007635.2,1006-1024).
gctaccactgccttaaact

SEQ ID NO: 673741 - DNA, 19 bp, Mus musculus
  siRNA target sequence for Ccng2 (NM_007635.2,1007-1025).
ctaccactgccttaaactt

SEQ ID NO: 673742 - DNA, 19 bp, Mus musculus
  siRNA target sequence for Ccng2 (NM_007635.2,1013-1031).
ctgccttaaactttttgca

SEQ ID NO: 673743 - DNA, 19 bp, Mus musculus
  siRNA target sequence for Ccng2 (NM_007635.2,1032-1050).
cttgtaccacgcgattgta

SEQ ID NO: 673744 - DNA, 19 bp, Mus musculus
  siRNA target sequence for Ccng2 (NM_007635.2,1035-1053).
gtaccacgcgattgtattt

SEQ ID NO: 673745 - DNA, 19 bp, Mus musculus
  siRNA target sequence for Ccng2 (NM_007635.2,1038-1056).
ccacgcgattgtattttgt

SEQ ID NO: 673746 - DNA, 19 bp, Mus musculus
  siRNA target sequence for Ccng2 (NM_007635.2,1140-1158).
caaagcaagaccatctgta

SEQ ID NO: 673747 - DNA, 19 bp, Mus musculus
  siRNA target sequence for Ccng2 (NM_007635.2,1322-1340).
gctgcaagcctgatctgaa

SEQ ID NO: 673748 - DNA, 19 bp, Mus musculus
  siRNA target sequence for Ccng2 (NM_007635.2,1338-1356).
gaagaagctggtatggatt

SEQ ID NO: 673749 - DNA, 19 bp, Mus musculus
  siRNA target sequence for Ccng2 (NM_007635.2,1341-1359).
gaagctggtatggattgtt

SEQ ID NO: 673750 - DNA, 19 bp, Mus musculus
  siRNA target sequence for Nedd9 (NM_017464.2,306-324).
gcaagggccttgtatgaca

SEQ ID NO: 673751 - DNA, 19 bp, Mus musculus
  siRNA target sequence for Nedd9 (NM_017464.2,307-325).
caagggccttgtatgacaa

SEQ ID NO: 673752 - DNA, 19 bp, Mus musculus
  siRNA target sequence for Nedd9 (NM_017464.2,357-375).
cgcaagggagacatcttaa

SEQ ID NO: 673753 - DNA, 19 bp, Mus musculus
  siRNA target sequence for Nedd9 (NM_017464.2,533-551).
gacctttggccaacagaaa

SEQ ID NO: 673754 - DNA, 19 bp, Mus musculus
  siRNA target sequence for Nedd9 (NM_017464.2,552-570).
ctctatcaagtgccaaatt

SEQ ID NO: 673755 - DNA, 19 bp, Mus musculus
  siRNA target sequence for Nedd9 (NM_017464.2,577-595).
cagcatctcgggataccat

SEQ ID NO: 673756 - DNA, 19 bp, Mus musculus
  siRNA target sequence for Nedd9 (NM_017464.2,655-673).
gcactccagaacaagatgt

SEQ ID NO: 673757 - DNA, 19 bp, Mus musculus
  siRNA target sequence for Nedd9 (NM_017464.2,701-719).
gaacattggcggcactaat

SEQ ID NO: 673758 - DNA, 19 bp, Mus musculus
  siRNA target sequence for Nedd9 (NM_017464.2,704-722).
cattggcggcactaatgga

SEQ ID NO: 673759 - DNA, 19 bp, Mus musculus
  siRNA target sequence for Nedd9 (NM_017464.2,720-738).
ggaccccttctaagcaaaa

SEQ ID NO: 673760 - DNA, 19 bp, Mus musculus
  siRNA target sequence for Nedd9 (NM_017464.2,721-739).
gaccccttctaagcaaaaa

SEQ ID NO: 673761 - DNA, 19 bp, Mus musculus
  siRNA target sequence for Nedd9 (NM_017464.2,782-800).
gtacccatccagataccaa

SEQ ID NO: 673762 - DNA, 19 bp, Mus musculus
  siRNA target sequence for Nedd9 (NM_017464.2,830-848).
cagcactcaaggggtatat

SEQ ID NO: 673763 - DNA, 19 bp, Mus musculus
  siRNA target sequence for Nedd9 (NM_017464.2,832-850).
gcactcaaggggtatatga

SEQ ID NO: 673764 - DNA, 19 bp, Mus musculus
  siRNA target sequence for Nedd9 (NM_017464.2,1048-1066).
gacctgagggggtttatga

SEQ ID NO: 673765 - DNA, 19 bp, Mus musculus
  siRNA target sequence for Nedd9 (NM_017464.2,1050-1068).
cctgagggggtttatgaca

SEQ ID NO: 673766 - DNA, 19 bp, Mus musculus
  siRNA target sequence for Nedd9 (NM_017464.2,1051-1069).
ctgagggggtttatgacat

SEQ ID NO: 673767 - DNA, 19 bp, Mus musculus
  siRNA target sequence for Nedd9 (NM_017464.2,1132-1150).
caggaggtgtcgaaccaat

SEQ ID NO: 673768 - DNA, 19 bp, Mus musculus
  siRNA target sequence for Nedd9 (NM_017464.2,1362-1380).
gtggtagatgggatcaaca

SEQ ID NO: 673769 - DNA, 19 bp, Mus musculus
  siRNA target sequence for Nedd9 (NM_017464.2,1372-1390).
ggatcaacagactgtcttt

SEQ ID NO: 673770 - DNA, 19 bp, Mus musculus
  siRNA target sequence for Nedd9 (NM_017464.2,1401-1419).
ggcagtaccaggagtaaca

SEQ ID NO: 673771 - DNA, 19 bp, Mus musculus
  siRNA target sequence for Nedd9 (NM_017464.2,1462-1480).
cctccccgtctcaagacaa

SEQ ID NO: 673772 - DNA, 19 bp, Mus musculus
  siRNA target sequence for Nedd9 (NM_017464.2,1585-1603).
ggaggtgctacggatacat

SEQ ID NO: 673773 - DNA, 19 bp, Mus musculus
  siRNA target sequence for Nedd9 (NM_017464.2,1627-1645).
gcaccgcggtggacaaagt

SEQ ID NO: 673774 - DNA, 19 bp, Mus musculus
  siRNA target sequence for Nedd9 (NM_017464.2,1628-1646).
caccgcggtggacaaagta

SEQ ID NO: 673775 - DNA, 19 bp, Mus musculus
  siRNA target sequence for Nedd9 (NM_017464.2,1739-1757).
gcgggaactccaaagagta

SEQ ID NO: 673776 - DNA, 19 bp, Mus musculus
  siRNA target sequence for Nedd9 (NM_017464.2,1761-1779).
gattcccaccagattctaa

SEQ ID NO: 673777 - DNA, 19 bp, Mus musculus
  siRNA target sequence for Nedd9 (NM_017464.2,1810-1828).
gctggtccctgaatatttt

SEQ ID NO: 673778 - DNA, 19 bp, Mus musculus
  siRNA target sequence for Nedd9 (NM_017464.2,1820-1838).
gaatattttagctatcaat

SEQ ID NO: 673779 - DNA, 19 bp, Mus musculus
  siRNA target sequence for Nedd9 (NM_017464.2,1860-1878).
gacctagaccggtttgtga

SEQ ID NO: 673780 - DNA, 19 bp, Mus musculus
  siRNA target sequence for Nedd9 (NM_017464.2,1895-1913).
gccagacgacgccaaacaa

SEQ ID NO: 673781 - DNA, 19 bp, Mus musculus
  siRNA target sequence for Nedd9 (NM_017464.2,1963-1981).
ctgccaattcccatctgaa

SEQ ID NO: 673782 - DNA, 19 bp, Mus musculus
  siRNA target sequence for Nedd9 (NM_017464.2,1967-1985).
caattcccatctgaagaat

SEQ ID NO: 673783 - DNA, 19 bp, Mus musculus
  siRNA target sequence for Nedd9 (NM_017464.2,2048-2066).
gcatcctggtgactacaaa

SEQ ID NO: 673784 - DNA, 19 bp, Mus musculus
  siRNA target sequence for Nedd9 (NM_017464.2,2084-2102).
gccgttgcctcctagtcta

SEQ ID NO: 673785 - DNA, 19 bp, Mus musculus
  siRNA target sequence for Nedd9 (NM_017464.2,2085-2103).
ccgttgcctcctagtctaa

SEQ ID NO: 673786 - DNA, 19 bp, Mus musculus
  siRNA target sequence for Nedd9 (NM_017464.2,2150-2168).
gagttggatggatgattat

SEQ ID NO: 673787 - DNA, 19 bp, Mus musculus
  siRNA target sequence for Nedd9 (NM_017464.2,2155-2173).
ggatggatgattatgatta

SEQ ID NO: 673788 - DNA, 19 bp, Mus musculus
  siRNA target sequence for Nedd9 (NM_017464.2,2321-2339).
ggagaatgacatctctaaa

SEQ ID NO: 673789 - DNA, 19 bp, Mus musculus
  siRNA target sequence for Nedd9 (NM_017464.2,2322-2340).
gagaatgacatctctaaat

SEQ ID NO: 673790 - DNA, 19 bp, Mus musculus
  siRNA target sequence for Nedd9 (NM_017464.2,2421-2439).
cagtgcgagacccatttca

SEQ ID NO: 673791 - DNA, 19 bp, Mus musculus
  siRNA target sequence for Nedd9 (NM_017464.2,2423-2441).
gtgcgagacccatttcatt

SEQ ID NO: 673792 - DNA, 19 bp, Mus musculus
  siRNA target sequence for Nedd9 (NM_017464.2,2539-2557).
cgcacaaactggtgttcat

SEQ ID NO: 673793 - DNA, 19 bp, Mus musculus
  siRNA target sequence for Nedd9 (NM_017464.2,2588-2606).
ccaggacattcgcaacaaa

SEQ ID NO: 673794 - DNA, 19 bp, Mus musculus
  siRNA target sequence for Nedd9 (NM_017464.2,2637-2655).
cagctcaagacgatagtga

SEQ ID NO: 673795 - DNA, 19 bp, Mus musculus
  siRNA target sequence for Nedd9 (NM_017464.2,2737-2755).
gaaatgctcagctgtttaa

SEQ ID NO: 673796 - DNA, 19 bp, Mus musculus
  siRNA target sequence for Stag1 (NM_009282.2,269-287).
gtgttacaggattcaacta

SEQ ID NO: 673797 - DNA, 19 bp, Mus musculus
  siRNA target sequence for Stag1 (NM_009282.2,277-295).
ggattcaactaatgaaact

SEQ ID NO: 673798 - DNA, 19 bp, Mus musculus
  siRNA target sequence for Stag1 (NM_009282.2,278-296).
gattcaactaatgaaacta

SEQ ID NO: 673799 - DNA, 19 bp, Mus musculus
  siRNA target sequence for Stag1 (NM_009282.2,372-390).
ggcctccatcaacaaataa

SEQ ID NO: 673800 - DNA, 19 bp, Mus musculus
  siRNA target sequence for Stag1 (NM_009282.2,375-393).
ctccatcaacaaataagaa

SEQ ID NO: 673801 - DNA, 19 bp, Mus musculus
  siRNA target sequence for Stag1 (NM_009282.2,421-439).
cagaattgaagctggaatt

SEQ ID NO: 673802 - DNA, 19 bp, Mus musculus
  siRNA target sequence for Stag1 (NM_009282.2,491-509).
ggggatcctgtcaccttat

SEQ ID NO: 673803 - DNA, 19 bp, Mus musculus
  siRNA target sequence for Stag1 (NM_009282.2,492-510).
gggatcctgtcaccttatt

SEQ ID NO: 673804 - DNA, 19 bp, Mus musculus
  siRNA target sequence for Stag1 (NM_009282.2,493-511).
ggatcctgtcaccttattt

SEQ ID NO: 673805 - DNA, 19 bp, Mus musculus
  siRNA target sequence for Stag1 (NM_009282.2,554-572).
gatgactggattgaattat

SEQ ID NO: 673806 - DNA, 19 bp, Mus musculus
  siRNA target sequence for Stag1 (NM_009282.2,559-577).
ctggattgaattatataaa

SEQ ID NO: 673807 - DNA, 19 bp, Mus musculus
  siRNA target sequence for Stag1 (NM_009282.2,561-579).
ggattgaattatataaaca

SEQ ID NO: 673808 - DNA, 19 bp, Mus musculus
  siRNA target sequence for Stag1 (NM_009282.2,589-607).
catcgcacttctggattta

SEQ ID NO: 673809 - DNA, 19 bp, Mus musculus
  siRNA target sequence for Stag1 (NM_009282.2,636-654).
gtcgaggtacggtcagaat

SEQ ID NO: 673810 - DNA, 19 bp, Mus musculus
  siRNA target sequence for Stag1 (NM_009282.2,639-657).
gaggtacggtcagaataga

SEQ ID NO: 673811 - DNA, 19 bp, Mus musculus
  siRNA target sequence for Stag1 (NM_009282.2,641-659).
ggtacggtcagaatagaga

SEQ ID NO: 673812 - DNA, 19 bp, Mus musculus
  siRNA target sequence for Stag1 (NM_009282.2,645-663).
cggtcagaatagagatgtt

SEQ ID NO: 673813 - DNA, 19 bp, Mus musculus
  siRNA target sequence for Stag1 (NM_009282.2,674-692).
cagaacgcagaaataatca

SEQ ID NO: 673814 - DNA, 19 bp, Mus musculus
  siRNA target sequence for Stag1 (NM_009282.2,676-694).
gaacgcagaaataatcaga

SEQ ID NO: 673815 - DNA, 19 bp, Mus musculus
  siRNA target sequence for Stag1 (NM_009282.2,679-697).
cgcagaaataatcagaaaa

SEQ ID NO: 673816 - DNA, 19 bp, Mus musculus
  siRNA target sequence for Stag1 (NM_009282.2,755-773).
cagtggaaaaaatttcgtt

SEQ ID NO: 673817 - DNA, 19 bp, Mus musculus
  siRNA target sequence for Stag1 (NM_009282.2,800-818).
ctgattcgacagtgtcaat

SEQ ID NO: 673818 - DNA, 19 bp, Mus musculus
  siRNA target sequence for Stag1 (NM_009282.2,802-820).
gattcgacagtgtcaatat

SEQ ID NO: 673819 - DNA, 19 bp, Mus musculus
  siRNA target sequence for Stag1 (NM_009282.2,806-824).
cgacagtgtcaatatagca

SEQ ID NO: 673820 - DNA, 19 bp, Mus musculus
  siRNA target sequence for Stag1 (NM_009282.2,807-825).
gacagtgtcaatatagcat

SEQ ID NO: 673821 - DNA, 19 bp, Mus musculus
  siRNA target sequence for Stag1 (NM_009282.2,809-827).
cagtgtcaatatagcataa

SEQ ID NO: 673822 - DNA, 19 bp, Mus musculus
  siRNA target sequence for Stag1 (NM_009282.2,811-829).
gtgtcaatatagcataatt

SEQ ID NO: 673823 - DNA, 19 bp, Mus musculus
  siRNA target sequence for Stag1 (NM_009282.2,853-871).
cgtaatttcccttttgact

SEQ ID NO: 673824 - DNA, 19 bp, Mus musculus
  siRNA target sequence for Stag1 (NM_009282.2,862-880).
ccttttgactggtttgtca

SEQ ID NO: 673825 - DNA, 19 bp, Mus musculus
  siRNA target sequence for Stag1 (NM_009282.2,896-914).
gcttttaggcatacaagta

SEQ ID NO: 673826 - DNA, 19 bp, Mus musculus
  siRNA target sequence for Stag1 (NM_009282.2,944-962).
ctggtgaatgttgctttaa

SEQ ID NO: 673827 - DNA, 19 bp, Mus musculus
  siRNA target sequence for Stag1 (NM_009282.2,965-983).
ctcagtattcatcaagata

SEQ ID NO: 673828 - DNA, 19 bp, Mus musculus
  siRNA target sequence for Stag1 (NM_009282.2,967-985).
cagtattcatcaagataat

SEQ ID NO: 673829 - DNA, 19 bp, Mus musculus
  siRNA target sequence for Stag1 (NM_009282.2,1120-1138).
ctttaagggtatatttgtt

SEQ ID NO: 673830 - DNA, 19 bp, Mus musculus
  siRNA target sequence for Stag1 (NM_009282.2,1128-1146).
gtatatttgttcatcgata

SEQ ID NO: 673831 - DNA, 19 bp, Mus musculus
  siRNA target sequence for Stag1 (NM_009282.2,1163-1181).
gaaattcgagccatctgta

SEQ ID NO: 673832 - DNA, 19 bp, Mus musculus
  siRNA target sequence for Stag1 (NM_009282.2,1172-1190).
gccatctgtattgaagaaa

SEQ ID NO: 673833 - DNA, 19 bp, Mus musculus
  siRNA target sequence for Stag1 (NM_009282.2,1174-1192).
catctgtattgaagaaatt

SEQ ID NO: 673834 - DNA, 19 bp, Mus musculus
  siRNA target sequence for Stag1 (NM_009282.2,1314-1332).
gcctgtataccaatagaga

SEQ ID NO: 673835 - DNA, 19 bp, Mus musculus
  siRNA target sequence for Stag1 (NM_009282.2,1339-1357).
ccccaaattggagctattt

SEQ ID NO: 673836 - DNA, 19 bp, Mus musculus
  siRNA target sequence for Stag1 (NM_009282.2,1369-1387).
caaggatcgcattgtatca

SEQ ID NO: 673837 - DNA, 19 bp, Mus musculus
  siRNA target sequence for Stag1 (NM_009282.2,1373-1391).
gatcgcattgtatcaatga

SEQ ID NO: 673838 - DNA, 19 bp, Mus musculus
  siRNA target sequence for Stag1 (NM_009282.2,1420-1438).
ggaagcaatccgattggtt

SEQ ID NO: 673839 - DNA, 19 bp, Mus musculus
  siRNA target sequence for Stag1 (NM_009282.2,1425-1443).
caatccgattggttactct

SEQ ID NO: 673840 - DNA, 19 bp, Mus musculus
  siRNA target sequence for Stag1 (NM_009282.2,1458-1476).
gtgaagaagctctttccaa

SEQ ID NO: 673841 - DNA, 19 bp, Mus musculus
  siRNA target sequence for Stag1 (NM_009282.2,1474-1492).
caacgaagactgtgaaaat

SEQ ID NO: 673842 - DNA, 19 bp, Mus musculus
  siRNA target sequence for Stag1 (NM_009282.2,1542-1560).
gagagttcctacacaaaaa

SEQ ID NO: 673843 - DNA, 19 bp, Mus musculus
  siRNA target sequence for Stag1 (NM_009282.2,1625-1643).
ccaaacgggaacctcatta

SEQ ID NO: 673844 - DNA, 19 bp, Mus musculus
  siRNA target sequence for Stag1 (NM_009282.2,1711-1729).
gtgggagagctctcaagaa

SEQ ID NO: 673845 - DNA, 19 bp, Mus musculus
  siRNA target sequence for Stag1 (NM_009282.2,1722-1740).
ctcaagaactgttgaaaga

SEQ ID NO: 673846 - DNA, 19 bp, Mus musculus
  siRNA target sequence for Stag1 (NM_009282.2,1749-1767).
gtatgacagagttactatt

SEQ ID NO: 673847 - DNA, 19 bp, Mus musculus
  siRNA target sequence for Stag1 (NM_009282.2,1753-1771).
gacagagttactattagaa

SEQ ID NO: 673848 - DNA, 19 bp, Mus musculus
  siRNA target sequence for Stag1 (NM_009282.2,1806-1824).
gtcaagagagtgctcttat

SEQ ID NO: 673849 - DNA, 19 bp, Mus musculus
  siRNA target sequence for Stag1 (NM_009282.2,1815-1833).
gtgctcttatagagctaat

SEQ ID NO: 673850 - DNA, 19 bp, Mus musculus
  siRNA target sequence for Stag1 (NM_009282.2,1923-1941).
ctcaaattgatgataggaa

SEQ ID NO: 673851 - DNA, 19 bp, Mus musculus
  siRNA target sequence for Stag1 (NM_009282.2,1939-1957).
gaacaaattaactgaacat

SEQ ID NO: 673852 - DNA, 19 bp, Mus musculus
  siRNA target sequence for Stag1 (NM_009282.2,1973-1991).
cctatgttactatcaaagt

SEQ ID NO: 673853 - DNA, 19 bp, Mus musculus
  siRNA target sequence for Stag1 (NM_009282.2,1974-1992).
ctatgttactatcaaagta

SEQ ID NO: 673854 - DNA, 19 bp, Mus musculus
  siRNA target sequence for Stag1 (NM_009282.2,2024-2042).
ctgcaaattccacagtatt

SEQ ID NO: 673855 - DNA, 19 bp, Mus musculus
  siRNA target sequence for Stag1 (NM_009282.2,2034-2052).
cacagtattttgatctaga

SEQ ID NO: 673856 - DNA, 19 bp, Mus musculus
  siRNA target sequence for Stag1 (NM_009282.2,2117-2135).
gtagagaaacatgtagaat

SEQ ID NO: 673857 - DNA, 19 bp, Mus musculus
  siRNA target sequence for Stag1 (NM_009282.2,2157-2175).
gtaaaacctacagcatttt

SEQ ID NO: 673858 - DNA, 19 bp, Mus musculus
  siRNA target sequence for Stag1 (NM_009282.2,2200-2218).
gaatcgagttgatattgct

SEQ ID NO: 673859 - DNA, 19 bp, Mus musculus
  siRNA target sequence for Stag1 (NM_009282.2,2217-2235).
ctcggagccaactgattga

SEQ ID NO: 673860 - DNA, 19 bp, Mus musculus
  siRNA target sequence for Stag1 (NM_009282.2,2221-2239).
gagccaactgattgatgaa

SEQ ID NO: 673861 - DNA, 19 bp, Mus musculus
  siRNA target sequence for Stag1 (NM_009282.2,2243-2261).
gtagatcgattcaatcatt

SEQ ID NO: 673862 - DNA, 19 bp, Mus musculus
  siRNA target sequence for Stag1 (NM_009282.2,2295-2313).
ctgacgatgatgatatcta

SEQ ID NO: 673863 - DNA, 19 bp, Mus musculus
  siRNA target sequence for Stag1 (NM_009282.2,2297-2315).
gacgatgatgatatctaca

SEQ ID NO: 673864 - DNA, 19 bp, Mus musculus
  siRNA target sequence for Stag1 (NM_009282.2,2336-2354).
cgtttaacttcttttcaca

SEQ ID NO: 673865 - DNA, 19 bp, Mus musculus
  siRNA target sequence for Stag1 (NM_009282.2,2366-2384).
ctcactaaatgggatctat

SEQ ID NO: 673866 - DNA, 19 bp, Mus musculus
  siRNA target sequence for Stag1 (NM_009282.2,2368-2386).
cactaaatgggatctattt

SEQ ID NO: 673867 - DNA, 19 bp, Mus musculus
  siRNA target sequence for Stag1 (NM_009282.2,2378-2396).
gatctatttggtaattgct

SEQ ID NO: 673868 - DNA, 19 bp, Mus musculus
  siRNA target sequence for Stag1 (NM_009282.2,2387-2405).
ggtaattgctacagactat

SEQ ID NO: 673869 - DNA, 19 bp, Mus musculus
  siRNA target sequence for Stag1 (NM_009282.2,2388-2406).
gtaattgctacagactatt

SEQ ID NO: 673870 - DNA, 19 bp, Mus musculus
  siRNA target sequence for Stag1 (NM_009282.2,2430-2448).
ctatgccagaacagatagt

SEQ ID NO: 673871 - DNA, 19 bp, Mus musculus
  siRNA target sequence for Stag1 (NM_009282.2,2461-2479).
gcagtgttcccattactca

SEQ ID NO: 673872 - DNA, 19 bp, Mus musculus
  siRNA target sequence for Stag1 (NM_009282.2,2464-2482).
gtgttcccattactcaatt

SEQ ID NO: 673873 - DNA, 19 bp, Mus musculus
  siRNA target sequence for Stag1 (NM_009282.2,2466-2484).
gttcccattactcaattct

SEQ ID NO: 673874 - DNA, 19 bp, Mus musculus
  siRNA target sequence for Stag1 (NM_009282.2,2483-2501).
ctgtggcagttggtgaaaa

SEQ ID NO: 673875 - DNA, 19 bp, Mus musculus
  siRNA target sequence for Stag1 (NM_009282.2,2517-2535).
cttccaaagaggatttgtt

SEQ ID NO: 673876 - DNA, 19 bp, Mus musculus
  siRNA target sequence for Stag1 (NM_009282.2,2525-2543).
gaggatttgttggtattga

SEQ ID NO: 673877 - DNA, 19 bp, Mus musculus
  siRNA target sequence for Stag1 (NM_009282.2,2574-2592).
gccaacagtgcctatctaa

SEQ ID NO: 673878 - DNA, 19 bp, Mus musculus
  siRNA target sequence for Stag1 (NM_009282.2,2579-2597).
cagtgcctatctaatgtta

SEQ ID NO: 673879 - DNA, 19 bp, Mus musculus
  siRNA target sequence for Stag1 (NM_009282.2,2581-2599).
gtgcctatctaatgttaat

SEQ ID NO: 673880 - DNA, 19 bp, Mus musculus
  siRNA target sequence for Stag1 (NM_009282.2,2584-2602).
cctatctaatgttaatact

SEQ ID NO: 673881 - DNA, 19 bp, Mus musculus
  siRNA target sequence for Stag1 (NM_009282.2,2647-2665).
gatttttagccaccaatta

SEQ ID NO: 673882 - DNA, 19 bp, Mus musculus
  siRNA target sequence for Stag1 (NM_009282.2,2687-2705).
cttcagcctttggtgttta

SEQ ID NO: 673883 - DNA, 19 bp, Mus musculus
  siRNA target sequence for Stag1 (NM_009282.2,2698-2716).
ggtgtttaatccagatact

SEQ ID NO: 673884 - DNA, 19 bp, Mus musculus
  siRNA target sequence for Stag1 (NM_009282.2,2729-2747).
gaactcctcagttttgtga

SEQ ID NO: 673885 - DNA, 19 bp, Mus musculus
  siRNA target sequence for Stag1 (NM_009282.2,2803-2821).
ggaagatgaagctaataaa

SEQ ID NO: 673886 - DNA, 19 bp, Mus musculus
  siRNA target sequence for Stag1 (NM_009282.2,2865-2883).
gcaaacttatcatttatga

SEQ ID NO: 673887 - DNA, 19 bp, Mus musculus
  siRNA target sequence for Stag1 (NM_009282.2,2866-2884).
caaacttatcatttatgat

SEQ ID NO: 673888 - DNA, 19 bp, Mus musculus
  siRNA target sequence for Stag1 (NM_009282.2,2921-2939).
cactacatgaagtattaca

SEQ ID NO: 673889 - DNA, 19 bp, Mus musculus
  siRNA target sequence for Stag1 (NM_009282.2,2977-2995).
gaccaggcagattgataaa

SEQ ID NO: 673890 - DNA, 19 bp, Mus musculus
  siRNA target sequence for Stag1 (NM_009282.2,3024-3042).
gtctgcaacagttgtttaa

SEQ ID NO: 673891 - DNA, 19 bp, Mus musculus
  siRNA target sequence for Stag1 (NM_009282.2,3091-3109).
cgtcagtgggattaaagaa

SEQ ID NO: 673892 - DNA, 19 bp, Mus musculus
  siRNA target sequence for Stag1 (NM_009282.2,3116-3134).
cgtcgttttgcccttacat

SEQ ID NO: 673893 - DNA, 19 bp, Mus musculus
  siRNA target sequence for Stag1 (NM_009282.2,3117-3135).
gtcgttttgcccttacatt

SEQ ID NO: 673894 - DNA, 19 bp, Mus musculus
  siRNA target sequence for Stag1 (NM_009282.2,3137-3155).
ggattggaccagatcaaga

SEQ ID NO: 673895 - DNA, 19 bp, Mus musculus
  siRNA target sequence for Stag1 (NM_009282.2,3179-3197).
cacaaggatggaatagagt

SEQ ID NO: 673896 - DNA, 19 bp, Mus musculus
  siRNA target sequence for Stag1 (NM_009282.2,3181-3199).
caaggatggaatagagttt

SEQ ID NO: 673897 - DNA, 19 bp, Mus musculus
  siRNA target sequence for Stag1 (NM_009282.2,3241-3259).
ccctaatctggcttttcta

SEQ ID NO: 673898 - DNA, 19 bp, Mus musculus
  siRNA target sequence for Stag1 (NM_009282.2,3243-3261).
ctaatctggcttttctaga

SEQ ID NO: 673899 - DNA, 19 bp, Mus musculus
  siRNA target sequence for Stag1 (NM_009282.2,3260-3278).
gaagtactaagtgaatttt

SEQ ID NO: 673900 - DNA, 19 bp, Mus musculus
  siRNA target sequence for Stag1 (NM_009282.2,3299-3317).
gacaagaaaactgttcatt

SEQ ID NO: 673901 - DNA, 19 bp, Mus musculus
  siRNA target sequence for Stag1 (NM_009282.2,3318-3336).
cgtatcttgaaaaattcct

SEQ ID NO: 673902 - DNA, 19 bp, Mus musculus
  siRNA target sequence for Stag1 (NM_009282.2,3374-3392).
cttccactcatctcgtata

SEQ ID NO: 673903 - DNA, 19 bp, Mus musculus
  siRNA target sequence for Stag1 (NM_009282.2,3377-3395).
ccactcatctcgtatagaa

SEQ ID NO: 673904 - DNA, 19 bp, Mus musculus
  siRNA target sequence for Stag1 (NM_009282.2,3378-3396).
cactcatctcgtatagaaa

SEQ ID NO: 673905 - DNA, 19 bp, Mus musculus
  siRNA target sequence for Stag1 (NM_009282.2,3382-3400).
catctcgtatagaaactca

SEQ ID NO: 673906 - DNA, 19 bp, Mus musculus
  siRNA target sequence for Stag1 (NM_009282.2,3385-3403).
ctcgtatagaaactcatta

SEQ ID NO: 673907 - DNA, 19 bp, Mus musculus
  siRNA target sequence for Stag1 (NM_009282.2,3443-3461).
ggaagtagcagcagtaaaa

SEQ ID NO: 673908 - DNA, 19 bp, Mus musculus
  siRNA target sequence for Stag1 (NM_009282.2,3549-3567).
ggactgacacgatgattca

SEQ ID NO: 673909 - DNA, 19 bp, Mus musculus
  siRNA target sequence for Stag1 (NM_009282.2,3600-3618).
cctccacggtacttagaga

SEQ ID NO: 673910 - DNA, 19 bp, Mus musculus
  siRNA target sequence for Stag1 (NM_009282.2,3601-3619).
ctccacggtacttagagaa

SEQ ID NO: 673911 - DNA, 19 bp, Mus musculus
  siRNA target sequence for Stag1 (NM_009282.2,3630-3648).
ccatgggagagcagattca

SEQ ID NO: 673912 - DNA, 19 bp, Mus musculus
  siRNA target sequence for Stag1 (NM_009282.2,3700-3718).
gatgcagatctcttggtta

SEQ ID NO: 673913 - DNA, 19 bp, Mus musculus
  siRNA target sequence for Stag1 (NM_009282.2,3715-3733).
gttaggccagccgaagtta

SEQ ID NO: 673914 - DNA, 19 bp, Mus musculus
  siRNA target sequence for Stag1 (NM_009282.2,3726-3744).
cgaagttagaagacttgaa

SEQ ID NO: 673915 - DNA, 19 bp, Mus musculus
  siRNA target sequence for Stag1 (NM_009282.2,3801-3819).
ccgttcggggtctaatgga

SEQ ID NO: 673916 - DNA, 19 bp, Mus musculus
  siRNA target sequence for Stag1 (NM_009282.2,3861-3879).
cacggagccagttagaaga

SEQ ID NO: 673917 - DNA, 19 bp, Mus musculus
  siRNA target sequence for Stag1 (NM_009282.2,3952-3970).
gctaaggccagacttcttt

SEQ ID NO: 673918 - DNA, 19 bp, Mus musculus
  siRNA target sequence for Stag1 (NM_009282.2,3975-3993).
ctgcagctatcatagaaga

SEQ ID NO: 673919 - DNA, 19 bp, Mus musculus
  siRNA target sequence for Stag1 (NM_009282.2,3980-3998).
gctatcatagaagatgatt

SEQ ID NO: 673920 - DNA, 19 bp, Mus musculus
  siRNA target sequence for Stag2 (NM_021465.1,318-336).
gatgttgttcgaagttgtt

SEQ ID NO: 673921 - DNA, 19 bp, Mus musculus
  siRNA target sequence for Stag2 (NM_021465.1,321-339).
gttgttcgaagttgttaaa

SEQ ID NO: 673922 - DNA, 19 bp, Mus musculus
  siRNA target sequence for Stag2 (NM_021465.1,401-419).
gggacatagcgcttcttga

SEQ ID NO: 673923 - DNA, 19 bp, Mus musculus
  siRNA target sequence for Stag2 (NM_021465.1,409-427).
gcgcttcttgaccttatca

SEQ ID NO: 673924 - DNA, 19 bp, Mus musculus
  siRNA target sequence for Stag2 (NM_021465.1,410-428).
cgcttcttgaccttatcaa

SEQ ID NO: 673925 - DNA, 19 bp, Mus musculus
  siRNA target sequence for Stag2 (NM_021465.1,411-429).
gcttcttgaccttatcaat

SEQ ID NO: 673926 - DNA, 19 bp, Mus musculus
  siRNA target sequence for Stag2 (NM_021465.1,412-430).
cttcttgaccttatcaatt

SEQ ID NO: 673927 - DNA, 19 bp, Mus musculus
  siRNA target sequence for Stag2 (NM_021465.1,492-510).
gaactctgagataattcga

SEQ ID NO: 673928 - DNA, 19 bp, Mus musculus
  siRNA target sequence for Stag2 (NM_021465.1,495-513).
ctctgagataattcgaaaa

SEQ ID NO: 673929 - DNA, 19 bp, Mus musculus
  siRNA target sequence for Stag2 (NM_021465.1,499-517).
gagataattcgaaaaatga

SEQ ID NO: 673930 - DNA, 19 bp, Mus musculus
  siRNA target sequence for Stag2 (NM_021465.1,501-519).
gataattcgaaaaatgaca

SEQ ID NO: 673931 - DNA, 19 bp, Mus musculus
  siRNA target sequence for Stag2 (NM_021465.1,619-637).
gtacggcagtgtcaataca

SEQ ID NO: 673932 - DNA, 19 bp, Mus musculus
  siRNA target sequence for Stag2 (NM_021465.1,622-640).
cggcagtgtcaatacagta

SEQ ID NO: 673933 - DNA, 19 bp, Mus musculus
  siRNA target sequence for Stag2 (NM_021465.1,623-641).
ggcagtgtcaatacagtat

SEQ ID NO: 673934 - DNA, 19 bp, Mus musculus
  siRNA target sequence for Stag2 (NM_021465.1,625-643).
cagtgtcaatacagtatca

SEQ ID NO: 673935 - DNA, 19 bp, Mus musculus
  siRNA target sequence for Stag2 (NM_021465.1,627-645).
gtgtcaatacagtatcata

SEQ ID NO: 673936 - DNA, 19 bp, Mus musculus
  siRNA target sequence for Stag2 (NM_021465.1,629-647).
gtcaatacagtatcatata

SEQ ID NO: 673937 - DNA, 19 bp, Mus musculus
  siRNA target sequence for Stag2 (NM_021465.1,728-746).
gcaccctggcagctatgaa

SEQ ID NO: 673938 - DNA, 19 bp, Mus musculus
  siRNA target sequence for Stag2 (NM_021465.1,762-780).
ggtaaatgtggcactaaat

SEQ ID NO: 673939 - DNA, 19 bp, Mus musculus
  siRNA target sequence for Stag2 (NM_021465.1,781-799).
cttagcattaatatggata

SEQ ID NO: 673940 - DNA, 19 bp, Mus musculus
  siRNA target sequence for Stag2 (NM_021465.1,820-838).
gcagaacggaataaaatga

SEQ ID NO: 673941 - DNA, 19 bp, Mus musculus
  siRNA target sequence for Stag2 (NM_021465.1,821-839).
cagaacggaataaaatgat

SEQ ID NO: 673942 - DNA, 19 bp, Mus musculus
  siRNA target sequence for Stag2 (NM_021465.1,826-844).
cggaataaaatgattggaa

SEQ ID NO: 673943 - DNA, 19 bp, Mus musculus
  siRNA target sequence for Stag2 (NM_021465.1,841-859).
ggaaaacgagctaacgaaa

SEQ ID NO: 673944 - DNA, 19 bp, Mus musculus
  siRNA target sequence for Stag2 (NM_021465.1,860-878).
ggctagaactcctgttaca

SEQ ID NO: 673945 - DNA, 19 bp, Mus musculus
  siRNA target sequence for Stag2 (NM_021465.1,861-879).
gctagaactcctgttacaa

SEQ ID NO: 673946 - DNA, 19 bp, Mus musculus
  siRNA target sequence for Stag2 (NM_021465.1,862-880).
ctagaactcctgttacaaa

SEQ ID NO: 673947 - DNA, 19 bp, Mus musculus
  siRNA target sequence for Stag2 (NM_021465.1,984-1002).
cagagctatatgcattgaa

SEQ ID NO: 673948 - DNA, 19 bp, Mus musculus
  siRNA target sequence for Stag2 (NM_021465.1,1041-1059).
ccttaatgacagctattta

SEQ ID NO: 673949 - DNA, 19 bp, Mus musculus
  siRNA target sequence for Stag2 (NM_021465.1,1069-1087).
ggttggactatgcatgata

SEQ ID NO: 673950 - DNA, 19 bp, Mus musculus
  siRNA target sequence for Stag2 (NM_021465.1,1070-1088).
gttggactatgcatgataa

SEQ ID NO: 673951 - DNA, 19 bp, Mus musculus
  siRNA target sequence for Stag2 (NM_021465.1,1126-1144).
caagggctttactataaca

SEQ ID NO: 673952 - DNA, 19 bp, Mus musculus
  siRNA target sequence for Stag2 (NM_021465.1,1130-1148).
ggctttactataacaaaga

SEQ ID NO: 673953 - DNA, 19 bp, Mus musculus
  siRNA target sequence for Stag2 (NM_021465.1,1178-1196).
gtcgattcaaggatagaat

SEQ ID NO: 673954 - DNA, 19 bp, Mus musculus
  siRNA target sequence for Stag2 (NM_021465.1,1200-1218).
gtctatgacccttgacaaa

SEQ ID NO: 673955 - DNA, 19 bp, Mus musculus
  siRNA target sequence for Stag2 (NM_021465.1,1228-1246).
gttgcagtacaagcaataa

SEQ ID NO: 673956 - DNA, 19 bp, Mus musculus
  siRNA target sequence for Stag2 (NM_021465.1,1232-1250).
cagtacaagcaataaagtt

SEQ ID NO: 673957 - DNA, 19 bp, Mus musculus
  siRNA target sequence for Stag2 (NM_021465.1,1269-1287).
gagtagtgaagaagttcta

SEQ ID NO: 673958 - DNA, 19 bp, Mus musculus
  siRNA target sequence for Stag2 (NM_021465.1,1311-1329).
ctatcatctggtttattca

SEQ ID NO: 673959 - DNA, 19 bp, Mus musculus
  siRNA target sequence for Stag2 (NM_021465.1,1444-1462).
gccaaccttgtgaagactt

SEQ ID NO: 673960 - DNA, 19 bp, Mus musculus
  siRNA target sequence for Stag2 (NM_021465.1,1494-1512).
cgagcatgcagcttacctt

SEQ ID NO: 673961 - DNA, 19 bp, Mus musculus
  siRNA target sequence for Stag2 (NM_021465.1,1624-1642).
gagagtgctttgattgaaa

SEQ ID NO: 673962 - DNA, 19 bp, Mus musculus
  siRNA target sequence for Stag2 (NM_021465.1,1639-1657).
gaaataatgctttgtacta

SEQ ID NO: 673963 - DNA, 19 bp, Mus musculus
  siRNA target sequence for Stag2 (NM_021465.1,1738-1756).
cagttggatgacagaacaa

SEQ ID NO: 673964 - DNA, 19 bp, Mus musculus
  siRNA target sequence for Stag2 (NM_021465.1,1740-1758).
gttggatgacagaacaaga

SEQ ID NO: 673965 - DNA, 19 bp, Mus musculus
  siRNA target sequence for Stag2 (NM_021465.1,1777-1795).
gtggcccttccgcagttat

SEQ ID NO: 673966 - DNA, 19 bp, Mus musculus
  siRNA target sequence for Stag2 (NM_021465.1,1779-1797).
ggcccttccgcagttatta

SEQ ID NO: 673967 - DNA, 19 bp, Mus musculus
  siRNA target sequence for Stag2 (NM_021465.1,1782-1800).
ccttccgcagttattagct

SEQ ID NO: 673968 - DNA, 19 bp, Mus musculus
  siRNA target sequence for Stag2 (NM_021465.1,1783-1801).
cttccgcagttattagcta

SEQ ID NO: 673969 - DNA, 19 bp, Mus musculus
  siRNA target sequence for Stag2 (NM_021465.1,1786-1804).
ccgcagttattagctaaat

SEQ ID NO: 673970 - DNA, 19 bp, Mus musculus
  siRNA target sequence for Stag2 (NM_021465.1,1787-1805).
cgcagttattagctaaata

SEQ ID NO: 673971 - DNA, 19 bp, Mus musculus
  siRNA target sequence for Stag2 (NM_021465.1,1791-1809).
gttattagctaaatactct

SEQ ID NO: 673972 - DNA, 19 bp, Mus musculus
  siRNA target sequence for Stag2 (NM_021465.1,1817-1835).
cagaaaaggtgaccaattt

SEQ ID NO: 673973 - DNA, 19 bp, Mus musculus
  siRNA target sequence for Stag2 (NM_021465.1,1819-1837).
gaaaaggtgaccaatttgt

SEQ ID NO: 673974 - DNA, 19 bp, Mus musculus
  siRNA target sequence for Stag2 (NM_021465.1,1842-1860).
gttacctcagtactttgat

SEQ ID NO: 673975 - DNA, 19 bp, Mus musculus
  siRNA target sequence for Stag2 (NM_021465.1,1874-1892).
ccactggacgattagaaaa

SEQ ID NO: 673976 - DNA, 19 bp, Mus musculus
  siRNA target sequence for Stag2 (NM_021465.1,1911-1929).
gcgccagatccgaaatatt

SEQ ID NO: 673977 - DNA, 19 bp, Mus musculus
  siRNA target sequence for Stag2 (NM_021465.1,1913-1931).
gccagatccgaaatattgt

SEQ ID NO: 673978 - DNA, 19 bp, Mus musculus
  siRNA target sequence for Stag2 (NM_021465.1,1914-1932).
ccagatccgaaatattgta

SEQ ID NO: 673979 - DNA, 19 bp, Mus musculus
  siRNA target sequence for Stag2 (NM_021465.1,1959-1977).
ggaagcatgttctaaaact

SEQ ID NO: 673980 - DNA, 19 bp, Mus musculus
  siRNA target sequence for Stag2 (NM_021465.1,1960-1978).
gaagcatgttctaaaactt

SEQ ID NO: 673981 - DNA, 19 bp, Mus musculus
  siRNA target sequence for Stag2 (NM_021465.1,1976-1994).
cttaccatgcattatgtaa

SEQ ID NO: 673982 - DNA, 19 bp, Mus musculus
  siRNA target sequence for Stag2 (NM_021465.1,1985-2003).
cattatgtaacgaagagtt

SEQ ID NO: 673983 - DNA, 19 bp, Mus musculus
  siRNA target sequence for Stag2 (NM_021465.1,2010-2028).
cttcaacagagtagatatt

SEQ ID NO: 673984 - DNA, 19 bp, Mus musculus
  siRNA target sequence for Stag2 (NM_021465.1,2030-2048).
caagaagtcagctgattga

SEQ ID NO: 673985 - DNA, 19 bp, Mus musculus
  siRNA target sequence for Stag2 (NM_021465.1,2119-2137).
gacgcatatcaggtattgt

SEQ ID NO: 673986 - DNA, 19 bp, Mus musculus
  siRNA target sequence for Stag2 (NM_021465.1,2150-2168).
ggatcactgcttttcataa

SEQ ID NO: 673987 - DNA, 19 bp, Mus musculus
  siRNA target sequence for Stag2 (NM_021465.1,2164-2182).
cataatgctcatgatcttt

SEQ ID NO: 673988 - DNA, 19 bp, Mus musculus
  siRNA target sequence for Stag2 (NM_021465.1,2170-2188).
gctcatgatctttcaaagt

SEQ ID NO: 673989 - DNA, 19 bp, Mus musculus
  siRNA target sequence for Stag2 (NM_021465.1,2189-2207).
gggatttgttcgcttgtaa

SEQ ID NO: 673990 - DNA, 19 bp, Mus musculus
  siRNA target sequence for Stag2 (NM_021465.1,2190-2208).
ggatttgttcgcttgtaat

SEQ ID NO: 673991 - DNA, 19 bp, Mus musculus
  siRNA target sequence for Stag2 (NM_021465.1,2191-2209).
gatttgttcgcttgtaatt

SEQ ID NO: 673992 - DNA, 19 bp, Mus musculus
  siRNA target sequence for Stag2 (NM_021465.1,2200-2218).
gcttgtaattacaaactct

SEQ ID NO: 673993 - DNA, 19 bp, Mus musculus
  siRNA target sequence for Stag2 (NM_021465.1,2201-2219).
cttgtaattacaaactctt

SEQ ID NO: 673994 - DNA, 19 bp, Mus musculus
  siRNA target sequence for Stag2 (NM_021465.1,2217-2235).
cttgaaaaccggaatcgaa

SEQ ID NO: 673995 - DNA, 19 bp, Mus musculus
  siRNA target sequence for Stag2 (NM_021465.1,2220-2238).
gaaaaccggaatcgaaaat

SEQ ID NO: 673996 - DNA, 19 bp, Mus musculus
  siRNA target sequence for Stag2 (NM_021465.1,2341-2359).
gacttactgcgcttaaaga

SEQ ID NO: 673997 - DNA, 19 bp, Mus musculus
  siRNA target sequence for Stag2 (NM_021465.1,2378-2396).
gccagatatgtcagcatta

SEQ ID NO: 673998 - DNA, 19 bp, Mus musculus
  siRNA target sequence for Stag2 (NM_021465.1,2397-2415).
cttgaccaacgtgaatact

SEQ ID NO: 673999 - DNA, 19 bp, Mus musculus
  siRNA target sequence for Stag2 (NM_021465.1,2400-2418).
gaccaacgtgaatactact

SEQ ID NO: 674000 - DNA, 19 bp, Mus musculus
  siRNA target sequence for Stag2 (NM_021465.1,2403-2421).
caacgtgaatactactgtt

SEQ ID NO: 674001 - DNA, 19 bp, Mus musculus
  siRNA target sequence for Stag2 (NM_021465.1,2406-2424).
cgtgaatactactgttaaa

SEQ ID NO: 674002 - DNA, 19 bp, Mus musculus
  siRNA target sequence for Stag2 (NM_021465.1,2428-2446).
caggccttcactattctgt

SEQ ID NO: 674003 - DNA, 19 bp, Mus musculus
  siRNA target sequence for Stag2 (NM_021465.1,2466-2484).
cagtcaccagattatgtct

SEQ ID NO: 674004 - DNA, 19 bp, Mus musculus
  siRNA target sequence for Stag2 (NM_021465.1,2483-2501).
ctggagggcgtgacatgtt

SEQ ID NO: 674005 - DNA, 19 bp, Mus musculus
  siRNA target sequence for Stag2 (NM_021465.1,2486-2504).
gagggcgtgacatgttaga

SEQ ID NO: 674006 - DNA, 19 bp, Mus musculus
  siRNA target sequence for Stag2 (NM_021465.1,2499-2517).
gttagagccattagtttat

SEQ ID NO: 674007 - DNA, 19 bp, Mus musculus
  siRNA target sequence for Stag2 (NM_021465.1,2512-2530).
gtttatactcctgattctt

SEQ ID NO: 674008 - DNA, 19 bp, Mus musculus
  siRNA target sequence for Stag2 (NM_021465.1,2552-2570).
gctttattttggatcatgt

SEQ ID NO: 674009 - DNA, 19 bp, Mus musculus
  siRNA target sequence for Stag2 (NM_021465.1,2581-2599).
caggatgatgatagtaata

SEQ ID NO: 674010 - DNA, 19 bp, Mus musculus
  siRNA target sequence for Stag2 (NM_021465.1,2672-2690).
cattttgtaagctaattgt

SEQ ID NO: 674011 - DNA, 19 bp, Mus musculus
  siRNA target sequence for Stag2 (NM_021465.1,2722-2740).
gatatcttcaagcagtata

SEQ ID NO: 674012 - DNA, 19 bp, Mus musculus
  siRNA target sequence for Stag2 (NM_021465.1,2736-2754).
gtatatgaagtattataat

SEQ ID NO: 674013 - DNA, 19 bp, Mus musculus
  siRNA target sequence for Stag2 (NM_021465.1,2887-2905).
gatagatcatcctcaacat

SEQ ID NO: 674014 - DNA, 19 bp, Mus musculus
  siRNA target sequence for Stag2 (NM_021465.1,2988-3006).
gctccacaaagatggtata

SEQ ID NO: 674015 - DNA, 19 bp, Mus musculus
  siRNA target sequence for Stag2 (NM_021465.1,2994-3012).
caaagatggtatagaattt

SEQ ID NO: 674016 - DNA, 19 bp, Mus musculus
  siRNA target sequence for Stag2 (NM_021465.1,2998-3016).
gatggtatagaatttgctt

SEQ ID NO: 674017 - DNA, 19 bp, Mus musculus
  siRNA target sequence for Stag2 (NM_021465.1,3039-3057).
ggagagccatccaccttta

SEQ ID NO: 674018 - DNA, 19 bp, Mus musculus
  siRNA target sequence for Stag2 (NM_021465.1,3044-3062).
gccatccacctttaaactt

SEQ ID NO: 674019 - DNA, 19 bp, Mus musculus
  siRNA target sequence for Stag2 (NM_021465.1,3064-3082).
gcatttcttgatattctca

SEQ ID NO: 674020 - DNA, 19 bp, Mus musculus
  siRNA target sequence for Stag2 (NM_021465.1,3070-3088).
cttgatattctcagtgaat

SEQ ID NO: 674021 - DNA, 19 bp, Mus musculus
  siRNA target sequence for Stag2 (NM_021465.1,3073-3091).
gatattctcagtgaatttt

SEQ ID NO: 674022 - DNA, 19 bp, Mus musculus
  siRNA target sequence for Stag2 (NM_021465.1,3100-3118).
ctgctccgacaggataaaa

SEQ ID NO: 674023 - DNA, 19 bp, Mus musculus
  siRNA target sequence for Stag2 (NM_021465.1,3102-3120).
gctccgacaggataaaaga

SEQ ID NO: 674024 - DNA, 19 bp, Mus musculus
  siRNA target sequence for Stag2 (NM_021465.1,3185-3203).
ggcttcctctgatgtctta

SEQ ID NO: 674025 - DNA, 19 bp, Mus musculus
  siRNA target sequence for Stag2 (NM_021465.1,3193-3211).
ctgatgtcttaccgaaatt

SEQ ID NO: 674026 - DNA, 19 bp, Mus musculus
  siRNA target sequence for Stag2 (NM_021465.1,3195-3213).
gatgtcttaccgaaattct

SEQ ID NO: 674027 - DNA, 19 bp, Mus musculus
  siRNA target sequence for Stag2 (NM_021465.1,3261-3279).
gagcagtcggggatcaact

SEQ ID NO: 674028 - DNA, 19 bp, Mus musculus
  siRNA target sequence for Stag2 (NM_021465.1,3264-3282).
cagtcggggatcaactgta

SEQ ID NO: 674029 - DNA, 19 bp, Mus musculus
  siRNA target sequence for Stag2 (NM_021465.1,3275-3293).
caactgtacggagtaaaaa

SEQ ID NO: 674030 - DNA, 19 bp, Mus musculus
  siRNA target sequence for Stag2 (NM_021465.1,3280-3298).
gtacggagtaaaaaatcaa

SEQ ID NO: 674031 - DNA, 19 bp, Mus musculus
  siRNA target sequence for Stag2 (NM_021465.1,3545-3563).
gtggtacaagcctaatgga

SEQ ID NO: 674032 - DNA, 19 bp, Mus musculus
  siRNA target sequence for Stag2 (NM_021465.1,3600-3618).
gtcctcagaaggaaggatt

SEQ ID NO: 674033 - DNA, 19 bp, Mus musculus
  siRNA target sequence for Stag2 (NM_021465.1,3631-3649).
gagggaatggactttgaca

SEQ ID NO: 674034 - DNA, 19 bp, Mus musculus
  siRNA target sequence for Stag2 (NM_021465.1,3666-3684).
gccaccatcaaagaataga

SEQ ID NO: 674035 - DNA, 19 bp, Mus musculus
  siRNA target sequence for Stag2 (NM_021465.1,3697-3715).
gaactgaagcccgatttct

SEQ ID NO: 674036 - DNA, 19 bp, Mus musculus
  siRNA target sequence for Stag2 (NM_021465.1,3724-3742).
gcttcaattatggatgaat

SEQ ID NO: 674037 - DNA, 19 bp, Mus musculus
  siRNA target sequence for Stag2 (NM_021465.1,3743-3761).
cagttcttggggtgtcaat

SEQ ID NO: 674038 - DNA, 19 bp, Mus musculus
  siRNA target sequence for Zw10 (NM_012039.1,147-165).
ggagatcaagggtgaagta

SEQ ID NO: 674039 - DNA, 19 bp, Mus musculus
  siRNA target sequence for Zw10 (NM_012039.1,157-175).
ggtgaagtatgcaatatga

SEQ ID NO: 674040 - DNA, 19 bp, Mus musculus
  siRNA target sequence for Zw10 (NM_012039.1,298-316).
cgggatcttcacatatcaa

SEQ ID NO: 674041 - DNA, 19 bp, Mus musculus
  siRNA target sequence for Zw10 (NM_012039.1,309-327).
catatcaactgttgagttt

SEQ ID NO: 674042 - DNA, 19 bp, Mus musculus
  siRNA target sequence for Zw10 (NM_012039.1,366-384).
cctaactctgctcaaacaa

SEQ ID NO: 674043 - DNA, 19 bp, Mus musculus
  siRNA target sequence for Zw10 (NM_012039.1,393-411).
gttttcctctgctattgaa

SEQ ID NO: 674044 - DNA, 19 bp, Mus musculus
  siRNA target sequence for Zw10 (NM_012039.1,398-416).
cctctgctattgaagagta

SEQ ID NO: 674045 - DNA, 19 bp, Mus musculus
  siRNA target sequence for Zw10 (NM_012039.1,473-491).
ctcaggagtgcttgaagtt

SEQ ID NO: 674046 - DNA, 19 bp, Mus musculus
  siRNA target sequence for Zw10 (NM_012039.1,475-493).
caggagtgcttgaagttat

SEQ ID NO: 674047 - DNA, 19 bp, Mus musculus
  siRNA target sequence for Zw10 (NM_012039.1,478-496).
gagtgcttgaagttattaa

SEQ ID NO: 674048 - DNA, 19 bp, Mus musculus
  siRNA target sequence for Zw10 (NM_012039.1,631-649).
gataccagcagcttagagt

SEQ ID NO: 674049 - DNA, 19 bp, Mus musculus
  siRNA target sequence for Zw10 (NM_012039.1,642-660).
cttagagtcttgtctacaa

SEQ ID NO: 674050 - DNA, 19 bp, Mus musculus
  siRNA target sequence for Zw10 (NM_012039.1,655-673).
ctacaaacagagcttcatt

SEQ ID NO: 674051 - DNA, 19 bp, Mus musculus
  siRNA target sequence for Zw10 (NM_012039.1,792-810).
gctgctgaagtatatcctt

SEQ ID NO: 674052 - DNA, 19 bp, Mus musculus
  siRNA target sequence for Zw10 (NM_012039.1,831-849).
gtcgctccatgctgtgatt

SEQ ID NO: 674053 - DNA, 19 bp, Mus musculus
  siRNA target sequence for Zw10 (NM_012039.1,833-851).
cgctccatgctgtgattga

SEQ ID NO: 674054 - DNA, 19 bp, Mus musculus
  siRNA target sequence for Zw10 (NM_012039.1,858-876).
gccaagttcagttagcatt

SEQ ID NO: 674055 - DNA, 19 bp, Mus musculus
  siRNA target sequence for Zw10 (NM_012039.1,916-934).
ccacccgaagcttttgcaa

SEQ ID NO: 674056 - DNA, 19 bp, Mus musculus
  siRNA target sequence for Zw10 (NM_012039.1,920-938).
ccgaagcttttgcaaagat

SEQ ID NO: 674057 - DNA, 19 bp, Mus musculus
  siRNA target sequence for Zw10 (NM_012039.1,991-1009).
gctgacctagaaattggaa

SEQ ID NO: 674058 - DNA, 19 bp, Mus musculus
  siRNA target sequence for Zw10 (NM_012039.1,1069-1087).
gagtgcctcatcagaaact

SEQ ID NO: 674059 - DNA, 19 bp, Mus musculus
  siRNA target sequence for Zw10 (NM_012039.1,1118-1136).
gcaagctccaggaatacga

SEQ ID NO: 674060 - DNA, 19 bp, Mus musculus
  siRNA target sequence for Zw10 (NM_012039.1,1205-1223).
ctactgacttgctgaaata

SEQ ID NO: 674061 - DNA, 19 bp, Mus musculus
  siRNA target sequence for Zw10 (NM_012039.1,1226-1244).
ctcgcaatatcaattctca

SEQ ID NO: 674062 - DNA, 19 bp, Mus musculus
  siRNA target sequence for Zw10 (NM_012039.1,1228-1246).
cgcaatatcaattctcatt

SEQ ID NO: 674063 - DNA, 19 bp, Mus musculus
  siRNA target sequence for Zw10 (NM_012039.1,1229-1247).
gcaatatcaattctcattt

SEQ ID NO: 674064 - DNA, 19 bp, Mus musculus
  siRNA target sequence for Zw10 (NM_012039.1,1276-1294).
gtggcggctagaaatctca

SEQ ID NO: 674065 - DNA, 19 bp, Mus musculus
  siRNA target sequence for Zw10 (NM_012039.1,1450-1468).
ctggaccctcagtcctttt

SEQ ID NO: 674066 - DNA, 19 bp, Mus musculus
  siRNA target sequence for Zw10 (NM_012039.1,1515-1533).
gctcgcttatcagacttta

SEQ ID NO: 674067 - DNA, 19 bp, Mus musculus
  siRNA target sequence for Zw10 (NM_012039.1,1518-1536).
cgcttatcagactttactt

SEQ ID NO: 674068 - DNA, 19 bp, Mus musculus
  siRNA target sequence for Zw10 (NM_012039.1,1534-1552).
cttgaggcaacaacaagta

SEQ ID NO: 674069 - DNA, 19 bp, Mus musculus
  siRNA target sequence for Zw10 (NM_012039.1,1674-1692).
ccacaacaactgcatgtat

SEQ ID NO: 674070 - DNA, 19 bp, Mus musculus
  siRNA target sequence for Zw10 (NM_012039.1,1675-1693).
cacaacaactgcatgtata

SEQ ID NO: 674071 - DNA, 19 bp, Mus musculus
  siRNA target sequence for Zw10 (NM_012039.1,1677-1695).
caacaactgcatgtatatt

SEQ ID NO: 674072 - DNA, 19 bp, Mus musculus
  siRNA target sequence for Zw10 (NM_012039.1,1714-1732).
ctcggtcatcagttcagat

SEQ ID NO: 674073 - DNA, 19 bp, Mus musculus
  siRNA target sequence for Zw10 (NM_012039.1,1766-1784).
ccacctttgtggatcttgt

SEQ ID NO: 674074 - DNA, 19 bp, Mus musculus
  siRNA target sequence for Zw10 (NM_012039.1,1801-1819).
cttgggacggagtgctttt

SEQ ID NO: 674075 - DNA, 19 bp, Mus musculus
  siRNA target sequence for Zw10 (NM_012039.1,1863-1881).
gtcaagtgctagaagcttt

SEQ ID NO: 674076 - DNA, 19 bp, Mus musculus
  siRNA target sequence for Zw10 (NM_012039.1,1893-1911).
cgacgaagagaattactct

SEQ ID NO: 674077 - DNA, 19 bp, Mus musculus
  siRNA target sequence for Zw10 (NM_012039.1,1978-1996).
gtcctgccagtgaacatat

SEQ ID NO: 674078 - DNA, 19 bp, Mus musculus
  siRNA target sequence for Zw10 (NM_012039.1,2027-2045).
cagcgattgctgagatgat

SEQ ID NO: 674079 - DNA, 19 bp, Mus musculus
  siRNA target sequence for Zw10 (NM_012039.1,2029-2047).
gcgattgctgagatgatga

SEQ ID NO: 674080 - DNA, 19 bp, Mus musculus
  siRNA target sequence for Zw10 (NM_012039.1,2067-2085).
ggacatctcgactgaagat

SEQ ID NO: 674081 - DNA, 19 bp, Mus musculus
  siRNA target sequence for Zw10 (NM_012039.1,2076-2094).
gactgaagatggtgataga

SEQ ID NO: 674082 - DNA, 19 bp, Mus musculus
  siRNA target sequence for Zw10 (NM_012039.1,2078-2096).
ctgaagatggtgatagatt

SEQ ID NO: 674083 - DNA, 19 bp, Mus musculus
  siRNA target sequence for Zw10 (NM_012039.1,2080-2098).
gaagatggtgatagattgt

SEQ ID NO: 674084 - DNA, 19 bp, Mus musculus
  siRNA target sequence for Zw10 (NM_012039.1,2097-2115).
gtattccctgtgcaaaaca

SEQ ID NO: 674085 - DNA, 19 bp, Mus musculus
  siRNA target sequence for Zw10 (NM_012039.1,2185-2203).
gaggttcccgtctatgtgt

SEQ ID NO: 674086 - DNA, 19 bp, Mus musculus
  siRNA target sequence for Zw10 (NM_012039.1,2191-2209).
cccgtctatgtgtccaaat

SEQ ID NO: 674087 - DNA, 19 bp, Mus musculus
  siRNA target sequence for Zw10 (NM_012039.1,2204-2222).
ccaaatggatgcctttcaa

SEQ ID NO: 674088 - DNA, 19 bp, Mus musculus
  siRNA target sequence for Zw10 (NM_012039.1,2216-2234).
ctttcaaagaactcatgat

SEQ ID NO: 674089 - DNA, 19 bp, Mus musculus
  siRNA target sequence for Zw10 (NM_012039.1,2242-2260).
caagctagcttgcaagaaa

SEQ ID NO: 674090 - DNA, 19 bp, Mus musculus
  siRNA target sequence for Zw10 (NM_012039.1,2307-2325).
cccttccagcgaagtcaaa

SEQ ID NO: 674091 - DNA, 19 bp, Mus musculus
  siRNA target sequence for Zw10 (NM_012039.1,2312-2330).
ccagcgaagtcaaagcttt

SEQ ID NO: 674092 - DNA, 19 bp, Mus musculus
  siRNA target sequence for Zw10 (NM_012039.1,2313-2331).
cagcgaagtcaaagcttta

SEQ ID NO: 674093 - DNA, 19 bp, Mus musculus
  siRNA target sequence for Zw10 (NM_012039.1,2315-2333).
gcgaagtcaaagctttaat

SEQ ID NO: 674094 - DNA, 19 bp, Mus musculus
  siRNA target sequence for Zw10 (NM_012039.1,2368-2386).
gctgcccttgctaagatta

SEQ ID NO: 674095 - DNA, 19 bp, Mus musculus
  siRNA target sequence for Zw10 (NM_012039.1,2369-2387).
ctgcccttgctaagattaa

SEQ ID NO: 674096 - DNA, 19 bp, Mus musculus
  siRNA target sequence for Zw10 (NM_012039.1,2371-2389).
gcccttgctaagattaaat

SEQ ID NO: 674097 - DNA, 19 bp, Mus musculus
  siRNA target sequence for Slfn1 (NM_011407.1,278-296).
gacccctgtgctgattcta

SEQ ID NO: 674098 - DNA, 19 bp, Mus musculus
  siRNA target sequence for Slfn1 (NM_011407.1,281-299).
ccctgtgctgattctaaat

SEQ ID NO: 674099 - DNA, 19 bp, Mus musculus
  siRNA target sequence for Slfn1 (NM_011407.1,332-350).
gaaaaccatggagaatcat

SEQ ID NO: 674100 - DNA, 19 bp, Mus musculus
  siRNA target sequence for Slfn1 (NM_011407.1,384-402).
gctctgtgtgctctgatta

SEQ ID NO: 674101 - DNA, 19 bp, Mus musculus
  siRNA target sequence for Slfn1 (NM_011407.1,387-405).
ctgtgtgctctgattaatt

SEQ ID NO: 674102 - DNA, 19 bp, Mus musculus
  siRNA target sequence for Slfn1 (NM_011407.1,455-473).
gtctaaacatggaatagga

SEQ ID NO: 674103 - DNA, 19 bp, Mus musculus
  siRNA target sequence for Slfn1 (NM_011407.1,508-526).
catctaggcccctagactt

SEQ ID NO: 674104 - DNA, 19 bp, Mus musculus
  siRNA target sequence for Slfn1 (NM_011407.1,515-533).
gcccctagactttaagcaa

SEQ ID NO: 674105 - DNA, 19 bp, Mus musculus
  siRNA target sequence for Slfn1 (NM_011407.1,516-534).
cccctagactttaagcaat

SEQ ID NO: 674106 - DNA, 19 bp, Mus musculus
  siRNA target sequence for Slfn1 (NM_011407.1,517-535).
ccctagactttaagcaata

SEQ ID NO: 674107 - DNA, 19 bp, Mus musculus
  siRNA target sequence for Slfn1 (NM_011407.1,518-536).
cctagactttaagcaatat

SEQ ID NO: 674108 - DNA, 19 bp, Mus musculus
  siRNA target sequence for Slfn1 (NM_011407.1,604-622).
ccattgcaaccaatttgta

SEQ ID NO: 674109 - DNA, 19 bp, Mus musculus
  siRNA target sequence for Slfn1 (NM_011407.1,634-652).
gggcatcatcagttgaaat

SEQ ID NO: 674110 - DNA, 19 bp, Mus musculus
  siRNA target sequence for Slfn1 (NM_011407.1,729-747).
gataggccaggcgatgata

SEQ ID NO: 674111 - DNA, 19 bp, Mus musculus
  siRNA target sequence for Slfn1 (NM_011407.1,875-893).
gttgctacaacgagttaaa

SEQ ID NO: 674112 - DNA, 19 bp, Mus musculus
  siRNA target sequence for Slfn1 (NM_011407.1,879-897).
ctacaacgagttaaagaga

SEQ ID NO: 674113 - DNA, 19 bp, Mus musculus
  siRNA target sequence for Slfn1 (NM_011407.1,933-951).
gacgggggatatttgttta

SEQ ID NO: 674114 - DNA, 19 bp, Mus musculus
  siRNA target sequence for Slfn1 (NM_011407.1,935-953).
cgggggatatttgtttatt

SEQ ID NO: 674115 - DNA, 19 bp, Mus musculus
  siRNA target sequence for Slfn1 (NM_011407.1,984-1002).
ggttttgaagcaaagaatt

SEQ ID NO: 674116 - DNA, 19 bp, Mus musculus
  siRNA target sequence for Slfn1 (NM_011407.1,1005-1023).
cagcctaagtgcttagaga

SEQ ID NO: 674117 - DNA, 19 bp, Mus musculus
  siRNA target sequence for Slfn1 (NM_011407.1,1015-1033).
gcttagagagtgaaataga

SEQ ID NO: 674118 - DNA, 19 bp, Mus musculus
  siRNA target sequence for Slfn1 (NM_011407.1,1123-1141).
ccggagttgtgtgtaaata

SEQ ID NO: 674119 - DNA, 19 bp, Mus musculus
  siRNA target sequence for Slfn1 (NM_011407.1,1124-1142).
cggagttgtgtgtaaatat

SEQ ID NO: 674120 - DNA, 19 bp, Mus musculus
  siRNA target sequence for Slfn1 (NM_011407.1,1126-1144).
gagttgtgtgtaaatatgt

SEQ ID NO: 674121 - DNA, 19 bp, Mus musculus
  siRNA target sequence for Slfn1 (NM_011407.1,1199-1217).
gtcctggcacatgaaagat

SEQ ID NO: 674122 - DNA, 19 bp, Mus musculus
  siRNA target sequence for Slfn1 (NM_011407.1,1221-1239).
ggtgttaaaaggtttacca

SEQ ID NO: 674123 - DNA, 19 bp, Mus musculus
  siRNA target sequence for Ris2 (NM_026014.3,52-70).
gtcgtgttaccgatttcta

SEQ ID NO: 674124 - DNA, 19 bp, Mus musculus
  siRNA target sequence for Ris2 (NM_026014.3,361-379).
cccccgtcaagcgaacaaa

SEQ ID NO: 674125 - DNA, 19 bp, Mus musculus
  siRNA target sequence for Ris2 (NM_026014.3,363-381).
cccgtcaagcgaacaaaga

SEQ ID NO: 674126 - DNA, 19 bp, Mus musculus
  siRNA target sequence for Ris2 (NM_026014.3,365-383).
cgtcaagcgaacaaagagt

SEQ ID NO: 674127 - DNA, 19 bp, Mus musculus
  siRNA target sequence for Ris2 (NM_026014.3,366-384).
gtcaagcgaacaaagagta

SEQ ID NO: 674128 - DNA, 19 bp, Mus musculus
  siRNA target sequence for Ris2 (NM_026014.3,371-389).
gcgaacaaagagtacaact

SEQ ID NO: 674129 - DNA, 19 bp, Mus musculus
  siRNA target sequence for Ris2 (NM_026014.3,376-394).
caaagagtacaactgttta

SEQ ID NO: 674130 - DNA, 19 bp, Mus musculus
  siRNA target sequence for Ris2 (NM_026014.3,499-517).
gagcccgagtccaagagaa

SEQ ID NO: 674131 - DNA, 19 bp, Mus musculus
  siRNA target sequence for Ris2 (NM_026014.3,630-648).
cttgtcctaccctacaagt

SEQ ID NO: 674132 - DNA, 19 bp, Mus musculus
  siRNA target sequence for Ris2 (NM_026014.3,781-799).
gcaatgtgggccagatcaa

SEQ ID NO: 674133 - DNA, 19 bp, Mus musculus
  siRNA target sequence for Ris2 (NM_026014.3,782-800).
caatgtgggccagatcaaa

SEQ ID NO: 674134 - DNA, 19 bp, Mus musculus
  siRNA target sequence for Ris2 (NM_026014.3,1173-1191).
cgtgcccggagcttgatga

SEQ ID NO: 674135 - DNA, 19 bp, Mus musculus
  siRNA target sequence for Ris2 (NM_026014.3,1452-1470).
cgcgtgctgcgcaatgtct

SEQ ID NO: 674136 - DNA, 19 bp, Mus musculus
  siRNA target sequence for Ris2 (NM_026014.3,1453-1471).
gcgtgctgcgcaatgtctt

SEQ ID NO: 674137 - DNA, 19 bp, Mus musculus
  siRNA target sequence for Ris2 (NM_026014.3,1483-1501).
ggaagccggcactcactat

SEQ ID NO: 674138 - DNA, 19 bp, Mus musculus
  siRNA target sequence for Ris2 (NM_026014.3,1618-1636).
gcatccgcacggataccta

SEQ ID NO: 674139 - DNA, 19 bp, Mus musculus
  siRNA target sequence for Bcl10 (NM_009740.1,105-123).
cacggaggaggatttgact

SEQ ID NO: 674140 - DNA, 19 bp, Mus musculus
  siRNA target sequence for Bcl10 (NM_009740.1,135-153).
ggacgctttagagaattta

SEQ ID NO: 674141 - DNA, 19 bp, Mus musculus
  siRNA target sequence for Bcl10 (NM_009740.1,196-214).
gatcatctacgtgcaaaaa

SEQ ID NO: 674142 - DNA, 19 bp, Mus musculus
  siRNA target sequence for Bcl10 (NM_009740.1,251-269).
gccgaacttcaagtagaaa

SEQ ID NO: 674143 - DNA, 19 bp, Mus musculus
  siRNA target sequence for Bcl10 (NM_009740.1,252-270).
ccgaacttcaagtagaaaa

SEQ ID NO: 674144 - DNA, 19 bp, Mus musculus
  siRNA target sequence for Bcl10 (NM_009740.1,272-290).
gggctgggaagttgttaga

SEQ ID NO: 674145 - DNA, 19 bp, Mus musculus
  siRNA target sequence for Bcl10 (NM_009740.1,274-292).
gctgggaagttgttagact

SEQ ID NO: 674146 - DNA, 19 bp, Mus musculus
  siRNA target sequence for Bcl10 (NM_009740.1,278-296).
ggaagttgttagactactt

SEQ ID NO: 674147 - DNA, 19 bp, Mus musculus
  siRNA target sequence for Bcl10 (NM_009740.1,380-398).
cggatgaggtgctaaagct

SEQ ID NO: 674148 - DNA, 19 bp, Mus musculus
  siRNA target sequence for Bcl10 (NM_009740.1,381-399).
ggatgaggtgctaaagctt

SEQ ID NO: 674149 - DNA, 19 bp, Mus musculus
  siRNA target sequence for Bcl10 (NM_009740.1,390-408).
gctaaagcttcggaatata

SEQ ID NO: 674150 - DNA, 19 bp, Mus musculus
  siRNA target sequence for Bcl10 (NM_009740.1,566-584).
cggctcccttcttctctat

SEQ ID NO: 674151 - DNA, 19 bp, Mus musculus
  siRNA target sequence for Bcl10 (NM_009740.1,616-634).
gttggcaggactgaaaaca

SEQ ID NO: 674152 - DNA, 19 bp, Mus musculus
  siRNA target sequence for Bcl10 (NM_009740.1,708-726).
ggaagaggggggaagttgt

SEQ ID NO: 674153 - DNA, 19 bp, Mus musculus
  siRNA target sequence for Bcl10 (NM_009740.1,717-735).
gggaagttgtggaaactca

SEQ ID NO: 674154 - DNA, 19 bp, Mus musculus
  siRNA target sequence for Brms1 (NM_134155.1,106-124).
gccttcaggcaaagaaaca

SEQ ID NO: 674155 - DNA, 19 bp, Mus musculus
  siRNA target sequence for Brms1 (NM_134155.1,195-213).
ggagtggcagccaaactga

SEQ ID NO: 674156 - DNA, 19 bp, Mus musculus
  siRNA target sequence for Brms1 (NM_134155.1,343-361).
cagccagctacgtttacga

SEQ ID NO: 674157 - DNA, 19 bp, Mus musculus
  siRNA target sequence for Brms1 (NM_134155.1,631-649).
gtggtgggacgacaaacta

SEQ ID NO: 674158 - DNA, 19 bp, Mus musculus
  siRNA target sequence for Brms1 (NM_134155.1,634-652).
gtgggacgacaaactacat

SEQ ID NO: 674159 - DNA, 19 bp, Mus musculus
  siRNA target sequence for Brms1 (NM_134155.1,715-733).
cgtttctggtccatacatt

SEQ ID NO: 674160 - DNA, 19 bp, Mus musculus
  siRNA target sequence for Brms1 (NM_134155.1,720-738).
ctggtccatacattgtgta

SEQ ID NO: 674161 - DNA, 19 bp, Mus musculus
  siRNA target sequence for Brms1 (NM_134155.1,723-741).
gtccatacattgtgtacat

SEQ ID NO: 674162 - DNA, 19 bp, Mus musculus
  siRNA target sequence for Cdkap1 (NM_013812.1,139-157).
ggcgacctcctcccaatat

SEQ ID NO: 674163 - DNA, 19 bp, Mus musculus
  siRNA target sequence for Cdkap1 (NM_013812.1,310-328).
cgccatggagaggctaaaa

SEQ ID NO: 674164 - DNA, 19 bp, Mus musculus
  siRNA target sequence for Cdkap1 (NM_013812.1,313-331).
catggagaggctaaaacga

SEQ ID NO: 674165 - DNA, 19 bp, Mus musculus
  siRNA target sequence for Cdkap1 (NM_013812.1,322-340).
gctaaaacgaggcatcatt

SEQ ID NO: 674166 - DNA, 19 bp, Mus musculus
  siRNA target sequence for Cdkn2b (NM_007670.2,271-289).
gcccaatccaggtcatgat

SEQ ID NO: 674167 - DNA, 19 bp, Mus musculus
  siRNA target sequence for Dcc (NM_007831.1,205-223).
ccaagctggcttttgtact

SEQ ID NO: 674168 - DNA, 19 bp, Mus musculus
  siRNA target sequence for Dcc (NM_007831.1,255-273).
caagtcacgggtttccaaa

SEQ ID NO: 674169 - DNA, 19 bp, Mus musculus
  siRNA target sequence for Dcc (NM_007831.1,258-276).
gtcacgggtttccaaatta

SEQ ID NO: 674170 - DNA, 19 bp, Mus musculus
  siRNA target sequence for Dcc (NM_007831.1,260-278).
cacgggtttccaaattaaa

SEQ ID NO: 674171 - DNA, 19 bp, Mus musculus
  siRNA target sequence for Dcc (NM_007831.1,2078-2096).
ctcaaggagtatcaaagta

SEQ ID NO: 674172 - DNA, 19 bp, Mus musculus
  siRNA target sequence for Dcc (NM_007831.1,2109-2127).
cctccatcgggaacacaaa

SEQ ID NO: 674173 - DNA, 19 bp, Mus musculus
  siRNA target sequence for Dcc (NM_007831.1,2116-2134).
cgggaacacaaaatggatt

SEQ ID NO: 674174 - DNA, 19 bp, Mus musculus
  siRNA target sequence for Dcc (NM_007831.1,2131-2149).
gatttattactggctataa

SEQ ID NO: 674175 - DNA, 19 bp, Mus musculus
  siRNA target sequence for Nbl1 (NM_008675.1,206-224).
ggctgtgaggccaagtcta

SEQ ID NO: 674176 - DNA, 19 bp, Mus musculus
  siRNA target sequence for Nbl1 (NM_008675.1,237-255).
cgtgcctaggacaatgctt

SEQ ID NO: 674177 - DNA, 19 bp, Mus musculus
  siRNA target sequence for Vhlh (NM_009507.2,442-460).
gtcgatggacagcctattt

SEQ ID NO: 674178 - DNA, 19 bp, Mus musculus
  siRNA target sequence for Vhlh (NM_009507.2,444-462).
cgatggacagcctattttt

SEQ ID NO: 674179 - DNA, 19 bp, Mus musculus
  siRNA target sequence for Vhlh (NM_009507.2,468-486).
catcacattgccagtgtat

SEQ ID NO: 674180 - DNA, 19 bp, Mus musculus
  siRNA target sequence for Vhlh (NM_009507.2,555-573).
catcgtcaggtcactctat

SEQ ID NO: 674181 - DNA, 19 bp, Mus musculus
  siRNA target sequence for 4930500E24Rik (NM_030228.1,135-153).
gccgattggctcaatgctt

SEQ ID NO: 674182 - DNA, 19 bp, Mus musculus
  siRNA target sequence for 4930500E24Rik (NM_030228.1,336-354).
gacaacgtggcctctttca

SEQ ID NO: 674183 - DNA, 19 bp, Mus musculus
  siRNA target sequence for 4930500E24Rik (NM_030228.1,637-655).
cgcccaatgaccttcgaaa

SEQ ID NO: 674184 - DNA, 19 bp, Mus musculus
  siRNA target sequence for 4930500E24Rik (NM_030228.1,641-659).
caatgaccttcgaaacctt

SEQ ID NO: 674185 - DNA, 19 bp, Mus musculus
  siRNA target sequence for 4930500E24Rik (NM_030228.1,702-720).
gaccagtttcccatgatca

SEQ ID NO: 674186 - DNA, 19 bp, Mus musculus
  siRNA target sequence for Eppk1 (NM_144848.2,1161-1179).
gtcgtagttgccaatggaa

SEQ ID NO: 674187 - DNA, 19 bp, Mus musculus
  siRNA target sequence for Eppk1 (NM_144848.2,1279-1297).
gtattgctggggtatatgt

SEQ ID NO: 674188 - DNA, 19 bp, Mus musculus
  siRNA target sequence for Eppk1 (NM_144848.2,1319-1337).
gagcatctatgctgctata

SEQ ID NO: 674189 - DNA, 19 bp, Mus musculus
  siRNA target sequence for Eppk1 (NM_144848.2,1361-1379).
gcttggactgactttgctt

SEQ ID NO: 674190 - DNA, 19 bp, Mus musculus
  siRNA target sequence for Eppk1 (NM_144848.2,1528-1546).
cctatgggggtgaaaagct

SEQ ID NO: 674191 - DNA, 19 bp, Mus musculus
  siRNA target sequence for Eppk1 (NM_144848.2,1833-1851).
cccctattgcccttaaaga

SEQ ID NO: 674192 - DNA, 19 bp, Mus musculus
  siRNA target sequence for Eppk1 (NM_144848.2,1896-1914).
ctggaggcgggagtactaa

SEQ ID NO: 674193 - DNA, 19 bp, Mus musculus
  siRNA target sequence for Eppk1 (NM_144848.2,1898-1916).
ggaggcgggagtactaaat

SEQ ID NO: 674194 - DNA, 19 bp, Mus musculus
  siRNA target sequence for Eppk1 (NM_144848.2,1901-1919).
ggcgggagtactaaatgaa

SEQ ID NO: 674195 - DNA, 19 bp, Mus musculus
  siRNA target sequence for Eppk1 (NM_144848.2,1906-1924).
gagtactaaatgaagagat

SEQ ID NO: 674196 - DNA, 19 bp, Mus musculus
  siRNA target sequence for Eppk1 (NM_144848.2,1978-1996).
ccgaggtgcgacgttatct

SEQ ID NO: 674197 - DNA, 19 bp, Mus musculus
  siRNA target sequence for Eppk1 (NM_144848.2,2040-2058).
ggtcacaagaagagctttt

SEQ ID NO: 674198 - DNA, 19 bp, Mus musculus
  siRNA target sequence for Eppk1 (NM_144848.2,2054-2072).
ctttttccaggctacagtt

SEQ ID NO: 674199 - DNA, 19 bp, Mus musculus
  siRNA target sequence for Eppk1 (NM_144848.2,2092-2110).
gtattgcactacaactctt

SEQ ID NO: 674200 - DNA, 19 bp, Mus musculus
  siRNA target sequence for Eppk1 (NM_144848.2,2195-2213).
ggttggcccagaacttcat

SEQ ID NO: 674201 - DNA, 19 bp, Mus musculus
  siRNA target sequence for Eppk1 (NM_144848.2,2237-2255).
ggcagtaactgggtattat

SEQ ID NO: 674202 - DNA, 19 bp, Mus musculus
  siRNA target sequence for Eppk1 (NM_144848.2,2239-2257).
cagtaactgggtattatga

SEQ ID NO: 674203 - DNA, 19 bp, Mus musculus
  siRNA target sequence for Eppk1 (NM_144848.2,2456-2474).
ggcaatgggcttttcagat

SEQ ID NO: 674204 - DNA, 19 bp, Mus musculus
  siRNA target sequence for Eppk1 (NM_144848.2,2486-2504).
cgatcgtcttggctatgaa

SEQ ID NO: 674205 - DNA, 19 bp, Mus musculus
  siRNA target sequence for Eppk1 (NM_144848.2,2566-2584).
gaatgtcccacgcaaatga

SEQ ID NO: 674206 - DNA, 19 bp, Mus musculus
  siRNA target sequence for Eppk1 (NM_144848.2,2591-2609).
gggacccacatttattgat

SEQ ID NO: 674207 - DNA, 19 bp, Mus musculus
  siRNA target sequence for Eppk1 (NM_144848.2,2685-2703).
ctctgggaactgctctttt

SEQ ID NO: 674208 - DNA, 19 bp, Mus musculus
  siRNA target sequence for Eppk1 (NM_144848.2,2706-2724).
gagtcagtgcccgttaaga

SEQ ID NO: 674209 - DNA, 19 bp, Mus musculus
  siRNA target sequence for Eppk1 (NM_144848.2,2870-2888).
gttgttgaaagctgagata

SEQ ID NO: 674210 - DNA, 19 bp, Mus musculus
  siRNA target sequence for Eppk1 (NM_144848.2,2975-2993).
gcagggcacaggcagtatt

SEQ ID NO: 674211 - DNA, 19 bp, Mus musculus
  siRNA target sequence for Eppk1 (NM_144848.2,3016-3034).
cccaggaacgactcagtat

SEQ ID NO: 674212 - DNA, 19 bp, Mus musculus
  siRNA target sequence for Eppk1 (NM_144848.2,3020-3038).
ggaacgactcagtatctat

SEQ ID NO: 674213 - DNA, 19 bp, Mus musculus
  siRNA target sequence for Eppk1 (NM_144848.2,3394-3412).
gtggctactttgatcagat

SEQ ID NO: 674214 - DNA, 19 bp, Mus musculus
  siRNA target sequence for Eppk1 (NM_144848.2,3606-3624).
ctactgctctccgtgaaat

SEQ ID NO: 674215 - DNA, 19 bp, Mus musculus
  siRNA target sequence for Eppk1 (NM_144848.2,3611-3629).
gctctccgtgaaatatgga

SEQ ID NO: 674216 - DNA, 19 bp, Mus musculus
  siRNA target sequence for Eppk1 (NM_144848.2,3654-3672).
gcgtgggagctggttaact

SEQ ID NO: 674217 - DNA, 19 bp, Mus musculus
  siRNA target sequence for Eppk1 (NM_144848.2,3656-3674).
gtgggagctggttaactct

SEQ ID NO: 674218 - DNA, 19 bp, Mus musculus
  siRNA target sequence for Eppk1 (NM_144848.2,3660-3678).
gagctggttaactctgaat

SEQ ID NO: 674219 - DNA, 19 bp, Mus musculus
  siRNA target sequence for Eppk1 (NM_144848.2,3662-3680).
gctggttaactctgaatat

SEQ ID NO: 674220 - DNA, 19 bp, Mus musculus
  siRNA target sequence for Eppk1 (NM_144848.2,3700-3718).
ggcagctcctgcaacgtta

SEQ ID NO: 674221 - DNA, 19 bp, Mus musculus
  siRNA target sequence for Eppk1 (NM_144848.2,3701-3719).
gcagctcctgcaacgttat

SEQ ID NO: 674222 - DNA, 19 bp, Mus musculus
  siRNA target sequence for Eppk1 (NM_144848.2,3905-3923).
ccttcaggtgggtgatgtt

SEQ ID NO: 674223 - DNA, 19 bp, Mus musculus
  siRNA target sequence for Eppk1 (NM_144848.2,3974-3992).
ctccaaccagcgaatcagt

SEQ ID NO: 674224 - DNA, 19 bp, Mus musculus
  siRNA target sequence for Eppk1 (NM_144848.2,4059-4077).
gcagccactggaactatca

SEQ ID NO: 674225 - DNA, 19 bp, Mus musculus
  siRNA target sequence for Eppk1 (NM_144848.2,4143-4161).
gaagtatatggcaagttga

SEQ ID NO: 674226 - DNA, 19 bp, Mus musculus
  siRNA target sequence for Eppk1 (NM_144848.2,4157-4175).
gttgaagcgagcagaacat

SEQ ID NO: 674227 - DNA, 19 bp, Mus musculus
  siRNA target sequence for Eppk1 (NM_144848.2,4636-4654).
gctacctcgaggatgtgaa

SEQ ID NO: 674228 - DNA, 19 bp, Mus musculus
  siRNA target sequence for Eppk1 (NM_144848.2,4778-4796).
gctacgagatgctggtatt

SEQ ID NO: 674229 - DNA, 19 bp, Mus musculus
  siRNA target sequence for Eppk1 (NM_144848.2,4779-4797).
ctacgagatgctggtatta

SEQ ID NO: 674230 - DNA, 19 bp, Mus musculus
  siRNA target sequence for Eppk1 (NM_144848.2,4782-4800).
cgagatgctggtattatca

SEQ ID NO: 674231 - DNA, 19 bp, Mus musculus
  siRNA target sequence for Eppk1 (NM_144848.2,5103-5121).
catctgaggcaggttgaaa

SEQ ID NO: 674232 - DNA, 19 bp, Mus musculus
  siRNA target sequence for Eppk1 (NM_144848.2,5191-5209).
ggcttgtaacccaaagtga

SEQ ID NO: 674233 - DNA, 19 bp, Mus musculus
  siRNA target sequence for Eppk1 (NM_144848.2,5338-5356).
ccgccactgggaaggaaaa

SEQ ID NO: 674234 - DNA, 19 bp, Mus musculus
  siRNA target sequence for Eppk1 (NM_144848.2,5346-5364).
gggaaggaaaacaaactct

SEQ ID NO: 674235 - DNA, 19 bp, Mus musculus
  siRNA target sequence for Eppk1 (NM_144848.2,5609-5627).
ggagctggtggcactttgt

SEQ ID NO: 674236 - DNA, 19 bp, Mus musculus
  siRNA target sequence for Eppk1 (NM_144848.2,5610-5628).
gagctggtggcactttgtt

SEQ ID NO: 674237 - DNA, 19 bp, Mus musculus
  siRNA target sequence for Eppk1 (NM_144848.2,5612-5630).
gctggtggcactttgttgt

SEQ ID NO: 674238 - DNA, 19 bp, Mus musculus
  siRNA target sequence for Eppk1 (NM_144848.2,5823-5841).
gaagtgacagagatggata

SEQ ID NO: 674239 - DNA, 19 bp, Mus musculus
  siRNA target sequence for Eppk1 (NM_144848.2,5873-5891).
cattgctggggtccttatt

SEQ ID NO: 674240 - DNA, 19 bp, Mus musculus
  siRNA target sequence for Eppk1 (NM_144848.2,5883-5901).
gtccttattcaggatacaa

SEQ ID NO: 674241 - DNA, 19 bp, Mus musculus
  siRNA target sequence for Eppk1 (NM_144848.2,5885-5903).
ccttattcaggatacaaaa

SEQ ID NO: 674242 - DNA, 19 bp, Mus musculus
  siRNA target sequence for Eppk1 (NM_144848.2,5926-5944).
ccttgagaaggcacattct

SEQ ID NO: 674243 - DNA, 19 bp, Mus musculus
  siRNA target sequence for Eppk1 (NM_144848.2,6071-6089).
ctacatgaagctgttatca

SEQ ID NO: 674244 - DNA, 19 bp, Mus musculus
  siRNA target sequence for Eppk1 (NM_144848.2,6098-6116).
ggctgtcaccggctataca

SEQ ID NO: 674245 - DNA, 19 bp, Mus musculus
  siRNA target sequence for Eppk1 (NM_144848.2,6100-6118).
ctgtcaccggctatacaga

SEQ ID NO: 674246 - DNA, 19 bp, Mus musculus
  siRNA target sequence for Eppk1 (NM_144848.2,6121-6139).
cttacacgggagaacagat

SEQ ID NO: 674247 - DNA, 19 bp, Mus musculus
  siRNA target sequence for Eppk1 (NM_144848.2,6405-6423).
cctgagactggcctgtata

SEQ ID NO: 674248 - DNA, 19 bp, Mus musculus
  siRNA target sequence for Eppk1 (NM_144848.2,6406-6424).
ctgagactggcctgtatat

SEQ ID NO: 674249 - DNA, 19 bp, Mus musculus
  siRNA target sequence for Eppk1 (NM_144848.2,6415-6433).
gcctgtatatgttggaaat

SEQ ID NO: 674250 - DNA, 19 bp, Mus musculus
  siRNA target sequence for Eppk1 (NM_144848.2,6416-6434).
cctgtatatgttggaaatt

SEQ ID NO: 674251 - DNA, 19 bp, Mus musculus
  siRNA target sequence for Eppk1 (NM_144848.2,6543-6561).
gtgtgggacctgttatctt

SEQ ID NO: 674252 - DNA, 19 bp, Mus musculus
  siRNA target sequence for Eppk1 (NM_144848.2,6653-6671).
ctcgaccgtggaagaaaca

SEQ ID NO: 674253 - DNA, 19 bp, Mus musculus
  siRNA target sequence for Eppk1 (NM_144848.2,6692-6710).
caaggtgccgggtatccat

SEQ ID NO: 674254 - DNA, 19 bp, Mus musculus
  siRNA target sequence for Eppk1 (NM_144848.2,6723-6741).
gctgcagaactgttcaact

SEQ ID NO: 674255 - DNA, 19 bp, Mus musculus
  siRNA target sequence for Eppk1 (NM_144848.2,6961-6979).
ctgccactgggtacctaat

SEQ ID NO: 674256 - DNA, 19 bp, Mus musculus
  siRNA target sequence for Eppk1 (NM_144848.2,7419-7437).
gacaaaaaggacatagaat

SEQ ID NO: 674257 - DNA, 19 bp, Mus musculus
  siRNA target sequence for Eppk1 (NM_144848.2,7427-7445).
ggacatagaatatgttgat

SEQ ID NO: 674258 - DNA, 19 bp, Mus musculus
  siRNA target sequence for Eppk1 (NM_144848.2,7440-7458).
gttgatgaggccaccaaaa

SEQ ID NO: 674259 - DNA, 19 bp, Mus musculus
  siRNA target sequence for Eppk1 (NM_144848.2,7565-7583).
gatggaactagttagacta

SEQ ID NO: 674260 - DNA, 19 bp, Mus musculus
  siRNA target sequence for Eppk1 (NM_144848.2,7569-7587).
gaactagttagactataca

SEQ ID NO: 674261 - DNA, 19 bp, Mus musculus
  siRNA target sequence for Eppk1 (NM_144848.2,7623-7641).
gagctcatcctacaaatga

SEQ ID NO: 674262 - DNA, 19 bp, Mus musculus
  siRNA target sequence for Eppk1 (NM_144848.2,7671-7689).
ctctggttccgaggattaa

SEQ ID NO: 674263 - DNA, 19 bp, Mus musculus
  siRNA target sequence for Eppk1 (NM_144848.2,7765-7783).
ggagaaccacagtagatca

SEQ ID NO: 674264 - DNA, 19 bp, Mus musculus
  siRNA target sequence for Eppk1 (NM_144848.2,7768-7786).
gaaccacagtagatcagat

SEQ ID NO: 674265 - DNA, 19 bp, Mus musculus
  siRNA target sequence for Eppk1 (NM_144848.2,7772-7790).
cacagtagatcagattgaa

SEQ ID NO: 674266 - DNA, 19 bp, Mus musculus
  siRNA target sequence for Eppk1 (NM_144848.2,20736-20754).
gaccctgagacgggattat

SEQ ID NO: 674267 - DNA, 19 bp, Mus musculus
  siRNA target sequence for Eppk1 (NM_144848.2,20739-20757).
cctgagacgggattattgt

SEQ ID NO: 674268 - DNA, 19 bp, Mus musculus
  siRNA target sequence for Eppk1 (NM_144848.2,20740-20758).
ctgagacgggattattgtt

SEQ ID NO: 674269 - DNA, 19 bp, Mus musculus
  siRNA target sequence for Gas2 (NM_008087.1,281-299).
gacctggcctgtctgatat

SEQ ID NO: 674270 - DNA, 19 bp, Mus musculus
  siRNA target sequence for Gas2 (NM_008087.1,329-347).
gacatgaagctaatttgct

SEQ ID NO: 674271 - DNA, 19 bp, Mus musculus
  siRNA target sequence for Gas2 (NM_008087.1,366-384).
ggccttgtggttaaccaat

SEQ ID NO: 674272 - DNA, 19 bp, Mus musculus
  siRNA target sequence for Gas2 (NM_008087.1,372-390).
gtggttaaccaatctatta

SEQ ID NO: 674273 - DNA, 19 bp, Mus musculus
  siRNA target sequence for Gas2 (NM_008087.1,461-479).
caactgtgcaggagaaatt

SEQ ID NO: 674274 - DNA, 19 bp, Mus musculus
  siRNA target sequence for Gas2 (NM_008087.1,464-482).
ctgtgcaggagaaattcaa

SEQ ID NO: 674275 - DNA, 19 bp, Mus musculus
  siRNA target sequence for Gas2 (NM_008087.1,515-533).
ccctaccactgaagaagat

SEQ ID NO: 674276 - DNA, 19 bp, Mus musculus
  siRNA target sequence for Gas2 (NM_008087.1,606-624).
ccgagatttgggagttgat

SEQ ID NO: 674277 - DNA, 19 bp, Mus musculus
  siRNA target sequence for Gas2 (NM_008087.1,650-668).
gcctggttctgcataagca

SEQ ID NO: 674278 - DNA, 19 bp, Mus musculus
  siRNA target sequence for Gas2 (NM_008087.1,729-747).
ggagcctcctggtctgata

SEQ ID NO: 674279 - DNA, 19 bp, Mus musculus
  siRNA target sequence for Gas2 (NM_008087.1,730-748).
gagcctcctggtctgataa

SEQ ID NO: 674280 - DNA, 19 bp, Mus musculus
  siRNA target sequence for Gas2 (NM_008087.1,831-849).
gaagagtactggaaactta

SEQ ID NO: 674281 - DNA, 19 bp, Mus musculus
  siRNA target sequence for Gas2 (NM_008087.1,850-868).
ctggatgatgcagtaaaaa

SEQ ID NO: 674282 - DNA, 19 bp, Mus musculus
  siRNA target sequence for Gas2 (NM_008087.1,852-870).
ggatgatgcagtaaaaaga

SEQ ID NO: 674283 - DNA, 19 bp, Mus musculus
  siRNA target sequence for Gas2 (NM_008087.1,1122-1140).
ggacatgaatcctgataat

SEQ ID NO: 674284 - DNA, 19 bp, Mus musculus
  siRNA target sequence for Gas2 (NM_008087.1,1123-1141).
gacatgaatcctgataatt

SEQ ID NO: 674285 - DNA, 19 bp, Mus musculus
  siRNA target sequence for Pmp22 (NM_008885.1,627-645).
cctcagtggtatcatctat

SEQ ID NO: 674286 - DNA, 19 bp, Mus musculus
  siRNA target sequence for Sesn2 (NM_144907.1,556-574).
ctacacccggactacctta

SEQ ID NO: 674287 - DNA, 19 bp, Mus musculus
  siRNA target sequence for Sesn2 (NM_144907.1,629-647).
gctcctggcgccactacat

SEQ ID NO: 674288 - DNA, 19 bp, Mus musculus
  siRNA target sequence for Sesn2 (NM_144907.1,630-648).
ctcctggcgccactacatt

SEQ ID NO: 674289 - DNA, 19 bp, Mus musculus
  siRNA target sequence for Sesn2 (NM_144907.1,780-798).
cagcgaggtcaacaagtta

SEQ ID NO: 674290 - DNA, 19 bp, Mus musculus
  siRNA target sequence for Sesn2 (NM_144907.1,782-800).
gcgaggtcaacaagttact

SEQ ID NO: 674291 - DNA, 19 bp, Mus musculus
  siRNA target sequence for Sesn2 (NM_144907.1,869-887).
ggtccctggccgaactcat

SEQ ID NO: 674292 - DNA, 19 bp, Mus musculus
  siRNA target sequence for Sesn2 (NM_144907.1,1196-1214).
ccccctcagcggatatcct

SEQ ID NO: 674293 - DNA, 19 bp, Mus musculus
  siRNA target sequence for Sesn2 (NM_144907.1,1251-1269).
ggaggaccccgcatttgga

SEQ ID NO: 674294 - DNA, 19 bp, Mus musculus
  siRNA target sequence for Sesn2 (NM_144907.1,1252-1270).
gaggaccccgcatttggat

SEQ ID NO: 674295 - DNA, 19 bp, Mus musculus
  siRNA target sequence for Sesn2 (NM_144907.1,1254-1272).
ggaccccgcatttggatat

SEQ ID NO: 674296 - DNA, 19 bp, Mus musculus
  siRNA target sequence for Sesn2 (NM_144907.1,1259-1277).
ccgcatttggatatgaaga

SEQ ID NO: 674297 - DNA, 19 bp, Mus musculus
  siRNA target sequence for Sesn2 (NM_144907.1,1262-1280).
catttggatatgaagactt

SEQ ID NO: 674298 - DNA, 19 bp, Mus musculus
  siRNA target sequence for Sesn2 (NM_144907.1,1310-1328).
ccttccgtgcccaggatta

SEQ ID NO: 674299 - DNA, 19 bp, Mus musculus
  siRNA target sequence for Sesn2 (NM_144907.1,1311-1329).
cttccgtgcccaggattat

SEQ ID NO: 674300 - DNA, 19 bp, Mus musculus
  siRNA target sequence for Sesn2 (NM_144907.1,1315-1333).
cgtgcccaggattatacct

SEQ ID NO: 674301 - DNA, 19 bp, Mus musculus
  siRNA target sequence for Sesn2 (NM_144907.1,1499-1517).
gcgtctttggcatcagata

SEQ ID NO: 674302 - DNA, 19 bp, Mus musculus
  siRNA target sequence for Sesn2 (NM_144907.1,1555-1573).
gaacggaacctcaaaatct

SEQ ID NO: 674303 - DNA, 19 bp, Mus musculus
  siRNA target sequence for Sesn3 (NM_030261.2,217-235).
gctgcggaaggacaaaaga

SEQ ID NO: 674304 - DNA, 19 bp, Mus musculus
  siRNA target sequence for Sesn3 (NM_030261.2,289-307).
ggaagttgtccaagcaaat

SEQ ID NO: 674305 - DNA, 19 bp, Mus musculus
  siRNA target sequence for Sesn3 (NM_030261.2,309-327).
cggcggatgaacgaacaaa

SEQ ID NO: 674306 - DNA, 19 bp, Mus musculus
  siRNA target sequence for Sesn3 (NM_030261.2,311-329).
gcggatgaacgaacaaact

SEQ ID NO: 674307 - DNA, 19 bp, Mus musculus
  siRNA target sequence for Sesn3 (NM_030261.2,312-330).
cggatgaacgaacaaactt

SEQ ID NO: 674308 - DNA, 19 bp, Mus musculus
  siRNA target sequence for Sesn3 (NM_030261.2,332-350).
cttgtggaagagtactcta

SEQ ID NO: 674309 - DNA, 19 bp, Mus musculus
  siRNA target sequence for Sesn3 (NM_030261.2,335-353).
gtggaagagtactctacat

SEQ ID NO: 674310 - DNA, 19 bp, Mus musculus
  siRNA target sequence for Sesn3 (NM_030261.2,463-481).
cccagacaggcactacatt

SEQ ID NO: 674311 - DNA, 19 bp, Mus musculus
  siRNA target sequence for Sesn3 (NM_030261.2,505-523).
ccagtgttcctacctaata

SEQ ID NO: 674312 - DNA, 19 bp, Mus musculus
  siRNA target sequence for Sesn3 (NM_030261.2,506-524).
cagtgttcctacctaataa

SEQ ID NO: 674313 - DNA, 19 bp, Mus musculus
  siRNA target sequence for Sesn3 (NM_030261.2,510-528).
gttcctacctaataaacat

SEQ ID NO: 674314 - DNA, 19 bp, Mus musculus
  siRNA target sequence for Sesn3 (NM_030261.2,571-589).
gctgaatggcttggaatat

SEQ ID NO: 674315 - DNA, 19 bp, Mus musculus
  siRNA target sequence for Sesn3 (NM_030261.2,751-769).
cgctttggccagctttgtt

SEQ ID NO: 674316 - DNA, 19 bp, Mus musculus
  siRNA target sequence for Sesn3 (NM_030261.2,752-770).
gctttggccagctttgttt

SEQ ID NO: 674317 - DNA, 19 bp, Mus musculus
  siRNA target sequence for Sesn3 (NM_030261.2,809-827).
gccaatgggttcagactaa

SEQ ID NO: 674318 - DNA, 19 bp, Mus musculus
  siRNA target sequence for Sesn3 (NM_030261.2,810-828).
ccaatgggttcagactaat

SEQ ID NO: 674319 - DNA, 19 bp, Mus musculus
  siRNA target sequence for Sesn3 (NM_030261.2,927-945).
gcgagctggaagccttaat

SEQ ID NO: 674320 - DNA, 19 bp, Mus musculus
  siRNA target sequence for Sesn3 (NM_030261.2,1048-1066).
ggtccctggagaaacttta

SEQ ID NO: 674321 - DNA, 19 bp, Mus musculus
  siRNA target sequence for Sesn3 (NM_030261.2,1071-1089).
cgtttcctcactcagattt

SEQ ID NO: 674322 - DNA, 19 bp, Mus musculus
  siRNA target sequence for Sesn3 (NM_030261.2,1072-1090).
gtttcctcactcagatttt

SEQ ID NO: 674323 - DNA, 19 bp, Mus musculus
  siRNA target sequence for Sesn3 (NM_030261.2,1113-1131).
ccgatgtctctcgatacat

SEQ ID NO: 674324 - DNA, 19 bp, Mus musculus
  siRNA target sequence for Sesn3 (NM_030261.2,1114-1132).
cgatgtctctcgatacatt

SEQ ID NO: 674325 - DNA, 19 bp, Mus musculus
  siRNA target sequence for Sesn3 (NM_030261.2,1144-1162).
ctttgggtacgaagacttt

SEQ ID NO: 674326 - DNA, 19 bp, Mus musculus
  siRNA target sequence for Sesn3 (NM_030261.2,1164-1182).
ccaggcgaggagaagaaca

SEQ ID NO: 674327 - DNA, 19 bp, Mus musculus
  siRNA target sequence for Sesn3 (NM_030261.2,1165-1183).
caggcgaggagaagaacat

SEQ ID NO: 674328 - DNA, 19 bp, Mus musculus
  siRNA target sequence for Sesn3 (NM_030261.2,1237-1255).
ggtgaacaggctttactct

SEQ ID NO: 674329 - DNA, 19 bp, Mus musculus
  siRNA target sequence for Sesn3 (NM_030261.2,1271-1289).
ctggatgagaagtttcgaa

SEQ ID NO: 674330 - DNA, 19 bp, Mus musculus
  siRNA target sequence for Sesn3 (NM_030261.2,1282-1300).
gtttcgaatggtctacaat

SEQ ID NO: 674331 - DNA, 19 bp, Mus musculus
  siRNA target sequence for Sesn3 (NM_030261.2,1286-1304).
cgaatggtctacaatctca

SEQ ID NO: 674332 - DNA, 19 bp, Mus musculus
  siRNA target sequence for Sesn3 (NM_030261.2,1349-1367).
ctgcgcagagctttgttta

SEQ ID NO: 674333 - DNA, 19 bp, Mus musculus
  siRNA target sequence for Sesn3 (NM_030261.2,1352-1370).
cgcagagctttgtttaact

SEQ ID NO: 674334 - DNA, 19 bp, Mus musculus
  siRNA target sequence for Sesn3 (NM_030261.2,1353-1371).
gcagagctttgtttaacta

SEQ ID NO: 674335 - DNA, 19 bp, Mus musculus
  siRNA target sequence for Sesn3 (NM_030261.2,1356-1374).
gagctttgtttaactatgt

SEQ ID NO: 674336 - DNA, 19 bp, Mus musculus
  siRNA target sequence for Sesn3 (NM_030261.2,1389-1407).
gaatcaggtatgatgacta

SEQ ID NO: 674337 - DNA, 19 bp, Mus musculus
  siRNA target sequence for Sesn3 (NM_030261.2,1395-1413).
ggtatgatgactatgacta

SEQ ID NO: 674338 - DNA, 19 bp, Mus musculus
  siRNA target sequence for Sesn3 (NM_030261.2,1416-1434).
gagaagttaaccagttact

SEQ ID NO: 674339 - DNA, 19 bp, Mus musculus
  siRNA target sequence for Sesn3 (NM_030261.2,1439-1457).
cggagcctgaaggtttaca

SEQ ID NO: 674340 - DNA, 19 bp, Mus musculus
  siRNA target sequence for Sesn3 (NM_030261.2,1440-1458).
ggagcctgaaggtttacat

SEQ ID NO: 674341 - DNA, 19 bp, Mus musculus
  siRNA target sequence for Sesn3 (NM_030261.2,1488-1506).
ccacgaagcgcatgtatga

SEQ ID NO: 674342 - DNA, 19 bp, Mus musculus
  siRNA target sequence for Sesn3 (NM_030261.2,1576-1594).
gcaggccgagctgctttat

SEQ ID NO: 674343 - DNA, 19 bp, Mus musculus
  siRNA target sequence for Sesn3 (NM_030261.2,1579-1597).
ggccgagctgctttatgct

SEQ ID NO: 674344 - DNA, 19 bp, Mus musculus
  siRNA target sequence for Ccnb3 (NM_183015.1,173-191).
gagaaggctcagtctaaca

SEQ ID NO: 674345 - DNA, 19 bp, Mus musculus
  siRNA target sequence for Ccnb3 (NM_183015.1,179-197).
gctcagtctaacaagatca

SEQ ID NO: 674346 - DNA, 19 bp, Mus musculus
  siRNA target sequence for Ccnb3 (NM_183015.1,215-233).
caatctgaaaagattggaa

SEQ ID NO: 674347 - DNA, 19 bp, Mus musculus
  siRNA target sequence for Ccnb3 (NM_183015.1,226-244).
gattggaaagagtaaccat

SEQ ID NO: 674348 - DNA, 19 bp, Mus musculus
  siRNA target sequence for Ccnb3 (NM_183015.1,267-285).
caactcaaggcgcagtaaa

SEQ ID NO: 674349 - DNA, 19 bp, Mus musculus
  siRNA target sequence for Ccnb3 (NM_183015.1,296-314).
gtgtttgaagatgtaacta

SEQ ID NO: 674350 - DNA, 19 bp, Mus musculus
  siRNA target sequence for Ccnb3 (NM_183015.1,327-345).
gtcaatgtgtccagtcaaa

SEQ ID NO: 674351 - DNA, 19 bp, Mus musculus
  siRNA target sequence for Ccnb3 (NM_183015.1,340-358).
gtcaaaggaagacaatata

SEQ ID NO: 674352 - DNA, 19 bp, Mus musculus
  siRNA target sequence for Ccnb3 (NM_183015.1,359-377).
gagcttaaaagccatgttt

SEQ ID NO: 674353 - DNA, 19 bp, Mus musculus
  siRNA target sequence for Ccnb3 (NM_183015.1,583-601).
ccttatgaggaagacatta

SEQ ID NO: 674354 - DNA, 19 bp, Mus musculus
  siRNA target sequence for Ccnb3 (NM_183015.1,686-704).
gatacagaactgatgactt

SEQ ID NO: 674355 - DNA, 19 bp, Mus musculus
  siRNA target sequence for Ccnb3 (NM_183015.1,788-806).
ctcacctcaagcccattat

SEQ ID NO: 674356 - DNA, 19 bp, Mus musculus
  siRNA target sequence for Ccnb3 (NM_183015.1,792-810).
cctcaagcccattatggtt

SEQ ID NO: 674357 - DNA, 19 bp, Mus musculus
  siRNA target sequence for Ccnb3 (NM_183015.1,807-825).
ggttaaagaataaacatgt

SEQ ID NO: 674358 - DNA, 19 bp, Mus musculus
  siRNA target sequence for Ccnb3 (NM_183015.1,851-869).
caggagaagagttcattca

SEQ ID NO: 674359 - DNA, 19 bp, Mus musculus
  siRNA target sequence for Ccnb3 (NM_183015.1,888-906).
caaatgtggtgactactaa

SEQ ID NO: 674360 - DNA, 19 bp, Mus musculus
  siRNA target sequence for Ccnb3 (NM_183015.1,950-968).
cctaccactgagatgaagt

SEQ ID NO: 674361 - DNA, 19 bp, Mus musculus
  siRNA target sequence for Ccnb3 (NM_183015.1,991-1009).
ggaagagaaatataatact

SEQ ID NO: 674362 - DNA, 19 bp, Mus musculus
  siRNA target sequence for Ccnb3 (NM_183015.1,1016-1034).
gatgcaagcatcttgaaga

SEQ ID NO: 674363 - DNA, 19 bp, Mus musculus
  siRNA target sequence for Ccnb3 (NM_183015.1,1033-1051).
gaagccacaggtgttacaa

SEQ ID NO: 674364 - DNA, 19 bp, Mus musculus
  siRNA target sequence for Ccnb3 (NM_183015.1,1040-1058).
caggtgttacaagagaata

SEQ ID NO: 674365 - DNA, 19 bp, Mus musculus
  siRNA target sequence for Ccnb3 (NM_183015.1,1105-1123).
gaaacatagtgccaatgaa

SEQ ID NO: 674366 - DNA, 19 bp, Mus musculus
  siRNA target sequence for Ccnb3 (NM_183015.1,1192-1210).
gaggccactaagagttcat

SEQ ID NO: 674367 - DNA, 19 bp, Mus musculus
  siRNA target sequence for Ccnb3 (NM_183015.1,1208-1226).
catccagtcacctatgaaa

SEQ ID NO: 674368 - DNA, 19 bp, Mus musculus
  siRNA target sequence for Ccnb3 (NM_183015.1,1229-1247).
gagccaatgtcctctaaga

SEQ ID NO: 674369 - DNA, 19 bp, Mus musculus
  siRNA target sequence for Ccnb3 (NM_183015.1,1232-1250).
ccaatgtcctctaagaagt

SEQ ID NO: 674370 - DNA, 19 bp, Mus musculus
  siRNA target sequence for Ccnb3 (NM_183015.1,1242-1260).
ctaagaagtcaactactaa

SEQ ID NO: 674371 - DNA, 19 bp, Mus musculus
  siRNA target sequence for Ccnb3 (NM_183015.1,1264-1282).
gaaagattcccatttccat

SEQ ID NO: 674372 - DNA, 19 bp, Mus musculus
  siRNA target sequence for Ccnb3 (NM_183015.1,1321-1339).
ggaggtgtccactgtgaaa

SEQ ID NO: 674373 - DNA, 19 bp, Mus musculus
  siRNA target sequence for Ccnb3 (NM_183015.1,1375-1393).
gaagatgttacattttcca

SEQ ID NO: 674374 - DNA, 19 bp, Mus musculus
  siRNA target sequence for Ccnb3 (NM_183015.1,1392-1410).
cagtagctacagttttgga

SEQ ID NO: 674375 - DNA, 19 bp, Mus musculus
  siRNA target sequence for Ccnb3 (NM_183015.1,1482-1500).
ctaaaagaagacgtttctt

SEQ ID NO: 674376 - DNA, 19 bp, Mus musculus
  siRNA target sequence for Ccnb3 (NM_183015.1,1488-1506).
gaagacgtttcttcagtaa

SEQ ID NO: 674377 - DNA, 19 bp, Mus musculus
  siRNA target sequence for Ccnb3 (NM_183015.1,1595-1613).
gcactgccaaagaagcata

SEQ ID NO: 674378 - DNA, 19 bp, Mus musculus
  siRNA target sequence for Ccnb3 (NM_183015.1,1622-1640).
ggggaattgtccaaacaga

SEQ ID NO: 674379 - DNA, 19 bp, Mus musculus
  siRNA target sequence for Ccnb3 (NM_183015.1,1649-1667).
catgtctcaccaaagcata

SEQ ID NO: 674380 - DNA, 19 bp, Mus musculus
  siRNA target sequence for Ccnb3 (NM_183015.1,1652-1670).
gtctcaccaaagcataaca

SEQ ID NO: 674381 - DNA, 19 bp, Mus musculus
  siRNA target sequence for Ccnb3 (NM_183015.1,1678-1696).
ggactcacagtgttggtta

SEQ ID NO: 674382 - DNA, 19 bp, Mus musculus
  siRNA target sequence for Ccnb3 (NM_183015.1,1681-1699).
ctcacagtgttggttagat

SEQ ID NO: 674383 - DNA, 19 bp, Mus musculus
  siRNA target sequence for Ccnb3 (NM_183015.1,1692-1710).
ggttagattcagcttttaa

SEQ ID NO: 674384 - DNA, 19 bp, Mus musculus
  siRNA target sequence for Ccnb3 (NM_183015.1,1740-1758).
ccacccatacgcctttaaa

SEQ ID NO: 674385 - DNA, 19 bp, Mus musculus
  siRNA target sequence for Ccnb3 (NM_183015.1,1743-1761).
cccatacgcctttaaagtt

SEQ ID NO: 674386 - DNA, 19 bp, Mus musculus
  siRNA target sequence for Ccnb3 (NM_183015.1,1749-1767).
cgcctttaaagttagagat

SEQ ID NO: 674387 - DNA, 19 bp, Mus musculus
  siRNA target sequence for Ccnb3 (NM_183015.1,1772-1790).
caggctattactaaagaga

SEQ ID NO: 674388 - DNA, 19 bp, Mus musculus
  siRNA target sequence for Ccnb3 (NM_183015.1,1789-1807).
gacagggttccatttgaga

SEQ ID NO: 674389 - DNA, 19 bp, Mus musculus
  siRNA target sequence for Ccnb3 (NM_183015.1,1865-1883).
ccatcctttagggaacaaa

SEQ ID NO: 674390 - DNA, 19 bp, Mus musculus
  siRNA target sequence for Ccnb3 (NM_183015.1,1875-1893).
gggaacaaaatacatcttt

SEQ ID NO: 674391 - DNA, 19 bp, Mus musculus
  siRNA target sequence for Ccnb3 (NM_183015.1,1876-1894).
ggaacaaaatacatcttta

SEQ ID NO: 674392 - DNA, 19 bp, Mus musculus
  siRNA target sequence for Ccnb3 (NM_183015.1,2035-2053).
gaatccattgccaccaaat

SEQ ID NO: 674393 - DNA, 19 bp, Mus musculus
  siRNA target sequence for Ccnb3 (NM_183015.1,2048-2066).
ccaaatgaaaattgcttaa

SEQ ID NO: 674394 - DNA, 19 bp, Mus musculus
  siRNA target sequence for Ccnb3 (NM_183015.1,2140-2158).
ggaatcggtggcttcaaat

SEQ ID NO: 674395 - DNA, 19 bp, Mus musculus
  siRNA target sequence for Ccnb3 (NM_183015.1,2145-2163).
cggtggcttcaaatgatga

SEQ ID NO: 674396 - DNA, 19 bp, Mus musculus
  siRNA target sequence for Ccnb3 (NM_183015.1,2173-2191).
cttctcgcaggacctattt

SEQ ID NO: 674397 - DNA, 19 bp, Mus musculus
  siRNA target sequence for Ccnb3 (NM_183015.1,2208-2226).
ctgatgaagatacattgaa

SEQ ID NO: 674398 - DNA, 19 bp, Mus musculus
  siRNA target sequence for Ccnb3 (NM_183015.1,2254-2272).
gcaggttgatagaaaaaat

SEQ ID NO: 674399 - DNA, 19 bp, Mus musculus
  siRNA target sequence for Ccnb3 (NM_183015.1,2273-2291).
gactcccacaaaaaaatgt

SEQ ID NO: 674400 - DNA, 19 bp, Mus musculus
  siRNA target sequence for Ccnb3 (NM_183015.1,2313-2331).
ccgaagaagagtccttttt

SEQ ID NO: 674401 - DNA, 19 bp, Mus musculus
  siRNA target sequence for Ccnb3 (NM_183015.1,2405-2423).
caggaattcctcttaataa

SEQ ID NO: 674402 - DNA, 19 bp, Mus musculus
  siRNA target sequence for Ccnb3 (NM_183015.1,2407-2425).
ggaattcctcttaataaaa

SEQ ID NO: 674403 - DNA, 19 bp, Mus musculus
  siRNA target sequence for Ccnb3 (NM_183015.1,2437-2455).
gaataccagtagtgatgtt

SEQ ID NO: 674404 - DNA, 19 bp, Mus musculus
  siRNA target sequence for Ccnb3 (NM_183015.1,2469-2487).
gtcatcagtcacctcatat

SEQ ID NO: 674405 - DNA, 19 bp, Mus musculus
  siRNA target sequence for Ccnb3 (NM_183015.1,2480-2498).
cctcatattcagaaccatt

SEQ ID NO: 674406 - DNA, 19 bp, Mus musculus
  siRNA target sequence for Ccnb3 (NM_183015.1,2639-2657).
gttgccctcatgaagatgt

SEQ ID NO: 674407 - DNA, 19 bp, Mus musculus
  siRNA target sequence for Ccnb3 (NM_183015.1,2664-2682).
cagaagatgagtctactaa

SEQ ID NO: 674408 - DNA, 19 bp, Mus musculus
  siRNA target sequence for Ccnb3 (NM_183015.1,2721-2739).
ctcatgctgagaaatcctt

SEQ ID NO: 674409 - DNA, 19 bp, Mus musculus
  siRNA target sequence for Ccnb3 (NM_183015.1,2831-2849).
ctgaaggagctacttgttt

SEQ ID NO: 674410 - DNA, 19 bp, Mus musculus
  siRNA target sequence for Ccnb3 (NM_183015.1,2833-2851).
gaaggagctacttgtttta

SEQ ID NO: 674411 - DNA, 19 bp, Mus musculus
  siRNA target sequence for Ccnb3 (NM_183015.1,2885-2903).
gcgtttcaggagaatccat

SEQ ID NO: 674412 - DNA, 19 bp, Mus musculus
  siRNA target sequence for Ccnb3 (NM_183015.1,2896-2914).
gaatccatctaataacgta

SEQ ID NO: 674413 - DNA, 19 bp, Mus musculus
  siRNA target sequence for Ccnb3 (NM_183015.1,2919-2937).
ctctcttgagggaagtatt

SEQ ID NO: 674414 - DNA, 19 bp, Mus musculus
  siRNA target sequence for Ccnb3 (NM_183015.1,2939-2957).
gcattggtggagaactcta

SEQ ID NO: 674415 - DNA, 19 bp, Mus musculus
  siRNA target sequence for Ccnb3 (NM_183015.1,2980-2998).
ggagaaacctagcactaaa

SEQ ID NO: 674416 - DNA, 19 bp, Mus musculus
  siRNA target sequence for Ccnb3 (NM_183015.1,3032-3050).
gaagagaattccagcaata

SEQ ID NO: 674417 - DNA, 19 bp, Mus musculus
  siRNA target sequence for Ccnb3 (NM_183015.1,3057-3075).
caaaccccatggactcttt

SEQ ID NO: 674418 - DNA, 19 bp, Mus musculus
  siRNA target sequence for Ccnb3 (NM_183015.1,3110-3128).
gaaatagccagaatggtat

SEQ ID NO: 674419 - DNA, 19 bp, Mus musculus
  siRNA target sequence for Ccnb3 (NM_183015.1,3118-3136).
cagaatggtattaactgat

SEQ ID NO: 674420 - DNA, 19 bp, Mus musculus
  siRNA target sequence for Ccnb3 (NM_183015.1,3157-3175).
cctgtatgagagagtatta

SEQ ID NO: 674421 - DNA, 19 bp, Mus musculus
  siRNA target sequence for Ccnb3 (NM_183015.1,3200-3218).
gcagaccagttgtccttta

SEQ ID NO: 674422 - DNA, 19 bp, Mus musculus
  siRNA target sequence for Ccnb3 (NM_183015.1,3260-3278).
gaggaatttttcaaatcat

SEQ ID NO: 674423 - DNA, 19 bp, Mus musculus
  siRNA target sequence for Ccnb3 (NM_183015.1,3313-3331).
gtccagcaatgcttttgaa

SEQ ID NO: 674424 - DNA, 19 bp, Mus musculus
  siRNA target sequence for Ccnb3 (NM_183015.1,3407-3425).
gtgtctagttccaaaagct

SEQ ID NO: 674425 - DNA, 19 bp, Mus musculus
  siRNA target sequence for Ccnb3 (NM_183015.1,3409-3427).
gtctagttccaaaagcttt

SEQ ID NO: 674426 - DNA, 19 bp, Mus musculus
  siRNA target sequence for Ccnb3 (NM_183015.1,3432-3450).
caactctgggtgcaaaaga

SEQ ID NO: 674427 - DNA, 19 bp, Mus musculus
  siRNA target sequence for Ccnb3 (NM_183015.1,3506-3524).
ggccaagatccattattga

SEQ ID NO: 674428 - DNA, 19 bp, Mus musculus
  siRNA target sequence for Ccnb3 (NM_183015.1,3507-3525).
gccaagatccattattgaa

SEQ ID NO: 674429 - DNA, 19 bp, Mus musculus
  siRNA target sequence for Ccnb3 (NM_183015.1,3512-3530).
gatccattattgaacacta

SEQ ID NO: 674430 - DNA, 19 bp, Mus musculus
  siRNA target sequence for Ccnb3 (NM_183015.1,3516-3534).
cattattgaacactatata

SEQ ID NO: 674431 - DNA, 19 bp, Mus musculus
  siRNA target sequence for Ccnb3 (NM_183015.1,3537-3555).
ccaaagacgtcttcaatta

SEQ ID NO: 674432 - DNA, 19 bp, Mus musculus
  siRNA target sequence for Ccnb3 (NM_183015.1,3542-3560).
gacgtcttcaattacttga

SEQ ID NO: 674433 - DNA, 19 bp, Mus musculus
  siRNA target sequence for Ccnb3 (NM_183015.1,3611-3629).
gaactcaccagtgatatga

SEQ ID NO: 674434 - DNA, 19 bp, Mus musculus
  siRNA target sequence for Ccnb3 (NM_183015.1,3655-3673).
ggagatacagggatccttt

SEQ ID NO: 674435 - DNA, 19 bp, Mus musculus
  siRNA target sequence for Ccnb3 (NM_183015.1,3764-3782).
cttggttccactacttaca

SEQ ID NO: 674436 - DNA, 19 bp, Mus musculus
  siRNA target sequence for Ccnb3 (NM_183015.1,3768-3786).
gttccactacttacatgat

SEQ ID NO: 674437 - DNA, 19 bp, Mus musculus
  siRNA target sequence for Ccnb3 (NM_183015.1,3832-3850).
cctgttcatttgtgaagat

SEQ ID NO: 674438 - DNA, 19 bp, Mus musculus
  siRNA target sequence for Ccnb3 (NM_183015.1,3833-3851).
ctgttcatttgtgaagata

SEQ ID NO: 674439 - DNA, 19 bp, Mus musculus
  siRNA target sequence for Ccnb3 (NM_183015.1,3857-3875).
gaaaagagtgatatggtat

SEQ ID NO: 674440 - DNA, 19 bp, Mus musculus
  siRNA target sequence for Ccnb3 (NM_183015.1,3968-3986).
gctagcatgaagacactaa

SEQ ID NO: 674441 - DNA, 19 bp, Mus musculus
  siRNA target sequence for Ccnb3 (NM_183015.1,4007-4025).
gagatgaccctgcaagaat

SEQ ID NO: 674442 - DNA, 19 bp, Mus musculus
  siRNA target sequence for Ccnb3 (NM_183015.1,4082-4100).
ctctatatgaggaatctca

SEQ ID NO: 674443 - DNA, 19 bp, Mus musculus
  siRNA target sequence for Ccnb3 (NM_183015.1,4093-4111).
gaatctcagcaattgtgtt

SEQ ID NO: 674444 - DNA, 19 bp, Mus musculus
  siRNA target sequence for Ccnb3 (NM_183015.1,4107-4125).
gtgttcctacactggaata

SEQ ID NO: 674445 - DNA, 19 bp, Mus musculus
  siRNA target sequence for Ccnb3 (NM_183015.1,4162-4180).
ggtcaggaagttaaaccat

SEQ ID NO: 674446 - DNA, 19 bp, Mus musculus
  siRNA target sequence for Ccnb3 (NM_183015.1,4163-4181).
gtcaggaagttaaaccatt

SEQ ID NO: 674447 - DNA, 19 bp, Mus musculus
  siRNA target sequence for Ccnb3 (NM_183015.1,4197-4215).
cccatagtatcctcaagaa

SEQ ID NO: 674448 - DNA, 19 bp, Mus musculus
  siRNA target sequence for Ccnb3 (NM_183015.1,4203-4221).
gtatcctcaagaatgtgtt

SEQ ID NO: 674449 - DNA, 19 bp, Mus musculus
  siRNA target sequence for Ccnb3 (NM_183015.1,4286-4304).
ctagagaatcttttgaatt

SEQ ID NO: 674450 - DNA, 19 bp, Mus musculus
  siRNA target sequence for Ccnd2 (NM_009829.2,363-381).
ctcccgcagtgttcctatt

SEQ ID NO: 674451 - DNA, 19 bp, Mus musculus
  siRNA target sequence for Ccnd2 (NM_009829.2,366-384).
ccgcagtgttcctatttca

SEQ ID NO: 674452 - DNA, 19 bp, Mus musculus
  siRNA target sequence for Ccnd2 (NM_009829.2,367-385).
cgcagtgttcctatttcaa

SEQ ID NO: 674453 - DNA, 19 bp, Mus musculus
  siRNA target sequence for Ccnd2 (NM_009829.2,369-387).
cagtgttcctatttcaagt

SEQ ID NO: 674454 - DNA, 19 bp, Mus musculus
  siRNA target sequence for Ccnd2 (NM_009829.2,814-832).
gcgctaccgacttcaagtt

SEQ ID NO: 674455 - DNA, 19 bp, Mus musculus
  siRNA target sequence for Ccnd2 (NM_009829.2,815-833).
cgctaccgacttcaagttt

SEQ ID NO: 674456 - DNA, 19 bp, Mus musculus
  siRNA target sequence for Ccnd2 (NM_009829.2,1099-1117).
cagacgtgcgggatgttga

SEQ ID NO: 674457 - DNA, 19 bp, Mus musculus
  siRNA target sequence for Ccne1 (NM_007633.1,207-225).
cagccctgggatgataatt

SEQ ID NO: 674458 - DNA, 19 bp, Mus musculus
  siRNA target sequence for Ccne1 (NM_007633.1,209-227).
gccctgggatgataattca

SEQ ID NO: 674459 - DNA, 19 bp, Mus musculus
  siRNA target sequence for Ccne1 (NM_007633.1,234-252).
gtggacccctgctctttca

SEQ ID NO: 674460 - DNA, 19 bp, Mus musculus
  siRNA target sequence for Ccne1 (NM_007633.1,341-359).
cccacttcccgtcttgaat

SEQ ID NO: 674461 - DNA, 19 bp, Mus musculus
  siRNA target sequence for Ccne1 (NM_007633.1,342-360).
ccacttcccgtcttgaatt

SEQ ID NO: 674462 - DNA, 19 bp, Mus musculus
  siRNA target sequence for Ccne1 (NM_007633.1,353-371).
cttgaattggggcaataga

SEQ ID NO: 674463 - DNA, 19 bp, Mus musculus
  siRNA target sequence for Ccne1 (NM_007633.1,491-509).
ggaggtgtgcgaagtctat

SEQ ID NO: 674464 - DNA, 19 bp, Mus musculus
  siRNA target sequence for Ccne1 (NM_007633.1,492-510).
gaggtgtgcgaagtctata

SEQ ID NO: 674465 - DNA, 19 bp, Mus musculus
  siRNA target sequence for Ccne1 (NM_007633.1,536-554).
ggcacaggacttctttgat

SEQ ID NO: 674466 - DNA, 19 bp, Mus musculus
  siRNA target sequence for Ccne1 (NM_007633.1,608-626).
gatttcagccttatttatt

SEQ ID NO: 674467 - DNA, 19 bp, Mus musculus
  siRNA target sequence for Ccne1 (NM_007633.1,659-677).
gttgcaccagtttgcttat

SEQ ID NO: 674468 - DNA, 19 bp, Mus musculus
  siRNA target sequence for Ccne1 (NM_007633.1,662-680).
gcaccagtttgcttatgtt

SEQ ID NO: 674469 - DNA, 19 bp, Mus musculus
  siRNA target sequence for Ccne1 (NM_007633.1,665-683).
ccagtttgcttatgttaca

SEQ ID NO: 674470 - DNA, 19 bp, Mus musculus
  siRNA target sequence for Ccne1 (NM_007633.1,694-712).
gctccggggatgaaattct

SEQ ID NO: 674471 - DNA, 19 bp, Mus musculus
  siRNA target sequence for Ccne1 (NM_007633.1,695-713).
ctccggggatgaaattctt

SEQ ID NO: 674472 - DNA, 19 bp, Mus musculus
  siRNA target sequence for Ccne1 (NM_007633.1,933-951).
gcttctgctttgtatcatt

SEQ ID NO: 674473 - DNA, 19 bp, Mus musculus
  siRNA target sequence for Ccne1 (NM_007633.1,990-1008).
cagtggtgcgacatagaga

SEQ ID NO: 674474 - DNA, 19 bp, Mus musculus
  siRNA target sequence for Ccne1 (NM_007633.1,1119-1137).
cacaccaacagcttggatt

SEQ ID NO: 674475 - DNA, 19 bp, Mus musculus
  siRNA target sequence for Ccne1 (NM_007633.1,1166-1184).
catattgtcagaacagaat

SEQ ID NO: 674476 - DNA, 19 bp, Mus musculus
  siRNA target sequence for Ccne1 (NM_007633.1,1172-1190).
gtcagaacagaataggatt

SEQ ID NO: 674477 - DNA, 19 bp, Mus musculus
  siRNA target sequence for Ccne1 (NM_007633.1,1440-1458).
gctaggtgttttaactata

SEQ ID NO: 674478 - DNA, 19 bp, Mus musculus
  siRNA target sequence for Ccnl2 (NM_018856.1,167-185).
gcaggagagtcgaagtcaa

SEQ ID NO: 674479 - DNA, 19 bp, Mus musculus
  siRNA target sequence for Ccnl2 (NM_018856.1,195-213).
cgtgagcagagctactcaa

SEQ ID NO: 674480 - DNA, 19 bp, Mus musculus
  siRNA target sequence for Ccnl2 (NM_018856.1,365-383).
gaggggctcccggaaatca

SEQ ID NO: 674481 - DNA, 19 bp, Mus musculus
  siRNA target sequence for Ccnl2 (NM_018856.1,459-477).
cgagagcggacggacaatt

SEQ ID NO: 674482 - DNA, 19 bp, Mus musculus
  siRNA target sequence for D430039C20Rik (NM_172839.1,320-338).
cctcaggcggtattttgct

SEQ ID NO: 674483 - DNA, 19 bp, Mus musculus
  siRNA target sequence for D430039C20Rik (NM_172839.1,476-494).
gcttctagcaagcaaattt

SEQ ID NO: 674484 - DNA, 19 bp, Mus musculus
  siRNA target sequence for D430039C20Rik (NM_172839.1,543-561).
ggctgtatgacgaacatga

SEQ ID NO: 674485 - DNA, 19 bp, Mus musculus
  siRNA target sequence for D430039C20Rik (NM_172839.1,544-562).
gctgtatgacgaacatgaa

SEQ ID NO: 674486 - DNA, 19 bp, Mus musculus
  siRNA target sequence for D430039C20Rik (NM_172839.1,649-667).
cccacttcattgagtacta

SEQ ID NO: 674487 - DNA, 19 bp, Mus musculus
  siRNA target sequence for D430039C20Rik (NM_172839.1,702-720).
gacggctggccgatggttt

SEQ ID NO: 674488 - DNA, 19 bp, Mus musculus
  siRNA target sequence for D430039C20Rik (NM_172839.1,717-735).
gtttgcttggagaagacta

SEQ ID NO: 674489 - DNA, 19 bp, Mus musculus
  siRNA target sequence for D430039C20Rik (NM_172839.1,721-739).
gcttggagaagactaaact

SEQ ID NO: 674490 - DNA, 19 bp, Mus musculus
  siRNA target sequence for D430039C20Rik (NM_172839.1,747-765).
gccaaatatgcagattact

SEQ ID NO: 674491 - DNA, 19 bp, Mus musculus
  siRNA target sequence for D430039C20Rik (NM_172839.1,748-766).
ccaaatatgcagattactt

SEQ ID NO: 674492 - DNA, 19 bp, Mus musculus
  siRNA target sequence for D430039C20Rik (NM_172839.1,838-856).
cttcttcgaggattatcct

SEQ ID NO: 674493 - DNA, 19 bp, Mus musculus
  siRNA target sequence for D430039C20Rik (NM_172839.1,901-919).
cctactcctgggacttctt

SEQ ID NO: 674494 - DNA, 19 bp, Mus musculus
  siRNA target sequence for D430039C20Rik (NM_172839.1,953-971).
cgataacgacgtgaaagaa

SEQ ID NO: 674495 - DNA, 19 bp, Mus musculus
  siRNA target sequence for D430039C20Rik (NM_172839.1,1235-1253).
gatgtccctggcaatacca

SEQ ID NO: 674496 - DNA, 19 bp, Mus musculus
  siRNA target sequence for D430039C20Rik (NM_172839.1,1244-1262).
ggcaataccagtagaagtt

SEQ ID NO: 674497 - DNA, 19 bp, Mus musculus
  siRNA target sequence for D430039C20Rik (NM_172839.1,1245-1263).
gcaataccagtagaagtta

SEQ ID NO: 674498 - DNA, 19 bp, Mus musculus
  siRNA target sequence for D430039C20Rik (NM_172839.1,1246-1264).
caataccagtagaagttaa

SEQ ID NO: 674499 - DNA, 19 bp, Mus musculus
  siRNA target sequence for D430039C20Rik (NM_172839.1,1291-1309).
ggagttaccagataaacga

SEQ ID NO: 674500 - DNA, 19 bp, Mus musculus
  siRNA target sequence for D430039C20Rik (NM_172839.1,1292-1310).
gagttaccagataaacgaa

SEQ ID NO: 674501 - DNA, 19 bp, Mus musculus
  siRNA target sequence for D430039C20Rik (NM_172839.1,1307-1325).
cgaacatttcccgtgtatt

SEQ ID NO: 674502 - DNA, 19 bp, Mus musculus
  siRNA target sequence for D430039C20Rik (NM_172839.1,1308-1326).
gaacatttcccgtgtatta

SEQ ID NO: 674503 - DNA, 19 bp, Mus musculus
  siRNA target sequence for Tacc3 (NM_011524.1,88-106).
gtctgcatgtcttaaatga

SEQ ID NO: 674504 - DNA, 19 bp, Mus musculus
  siRNA target sequence for Tacc3 (NM_011524.1,107-125).
cgaaaacgtgcccaatgaa

SEQ ID NO: 674505 - DNA, 19 bp, Mus musculus
  siRNA target sequence for Tacc3 (NM_011524.1,108-126).
gaaaacgtgcccaatgaaa

SEQ ID NO: 674506 - DNA, 19 bp, Mus musculus
  siRNA target sequence for Tacc3 (NM_011524.1,130-148).
gttcacagtgccgtgattt

SEQ ID NO: 674507 - DNA, 19 bp, Mus musculus
  siRNA target sequence for Tacc3 (NM_011524.1,139-157).
gccgtgatttccagttttt

SEQ ID NO: 674508 - DNA, 19 bp, Mus musculus
  siRNA target sequence for Tacc3 (NM_011524.1,227-245).
ccaggctaaggccacaaat

SEQ ID NO: 674509 - DNA, 19 bp, Mus musculus
  siRNA target sequence for Tacc3 (NM_011524.1,231-249).
gctaaggccacaaatgtga

SEQ ID NO: 674510 - DNA, 19 bp, Mus musculus
  siRNA target sequence for Tacc3 (NM_011524.1,278-296).
gacacacaggatcttaagt

SEQ ID NO: 674511 - DNA, 19 bp, Mus musculus
  siRNA target sequence for Tacc3 (NM_011524.1,286-304).
ggatcttaagtcctaacat

SEQ ID NO: 674512 - DNA, 19 bp, Mus musculus
  siRNA target sequence for Tacc3 (NM_011524.1,295-313).
gtcctaacatgaccaataa

SEQ ID NO: 674513 - DNA, 19 bp, Mus musculus
  siRNA target sequence for Tacc3 (NM_011524.1,314-332).
gcgtgaggctccttttgga

SEQ ID NO: 674514 - DNA, 19 bp, Mus musculus
  siRNA target sequence for Tacc3 (NM_011524.1,315-333).
cgtgaggctccttttggat

SEQ ID NO: 674515 - DNA, 19 bp, Mus musculus
  siRNA target sequence for Tacc3 (NM_011524.1,316-334).
gtgaggctccttttggatt

SEQ ID NO: 674516 - DNA, 19 bp, Mus musculus
  siRNA target sequence for Tacc3 (NM_011524.1,705-723).
gaacctgtcgtggatctaa

SEQ ID NO: 674517 - DNA, 19 bp, Mus musculus
  siRNA target sequence for Tacc3 (NM_011524.1,852-870).
cagtctttgtacgtgaaat

SEQ ID NO: 674518 - DNA, 19 bp, Mus musculus
  siRNA target sequence for Tacc3 (NM_011524.1,854-872).
gtctttgtacgtgaaattt

SEQ ID NO: 674519 - DNA, 19 bp, Mus musculus
  siRNA target sequence for Tacc3 (NM_011524.1,856-874).
ctttgtacgtgaaatttga

SEQ ID NO: 674520 - DNA, 19 bp, Mus musculus
  siRNA target sequence for Tacc3 (NM_011524.1,908-926).
gccggtggccccaataaca

SEQ ID NO: 674521 - DNA, 19 bp, Mus musculus
  siRNA target sequence for Tacc3 (NM_011524.1,910-928).
cggtggccccaataacaaa

SEQ ID NO: 674522 - DNA, 19 bp, Mus musculus
  siRNA target sequence for Tacc3 (NM_011524.1,914-932).
ggccccaataacaaatagt

SEQ ID NO: 674523 - DNA, 19 bp, Mus musculus
  siRNA target sequence for Tacc3 (NM_011524.1,973-991).
cagaagctgagcttgtcaa

SEQ ID NO: 674524 - DNA, 19 bp, Mus musculus
  siRNA target sequence for Tacc3 (NM_011524.1,1151-1169).
ggagctgaaaagcaagtat

SEQ ID NO: 674525 - DNA, 19 bp, Mus musculus
  siRNA target sequence for Tacc3 (NM_011524.1,1172-1190).
ggacctcaacacaaaatat

SEQ ID NO: 674526 - DNA, 19 bp, Mus musculus
  siRNA target sequence for Tacc3 (NM_011524.1,1173-1191).
gacctcaacacaaaatatt

SEQ ID NO: 674527 - DNA, 19 bp, Mus musculus
  siRNA target sequence for Tacc3 (NM_011524.1,1201-1219).
ggaagtccgttgatgagtt

SEQ ID NO: 674528 - DNA, 19 bp, Mus musculus
  siRNA target sequence for Tacc3 (NM_011524.1,1221-1239).
gagaagatcgcgtacaaat

SEQ ID NO: 674529 - DNA, 19 bp, Mus musculus
  siRNA target sequence for Tacc3 (NM_011524.1,1223-1241).
gaagatcgcgtacaaatca

SEQ ID NO: 674530 - DNA, 19 bp, Mus musculus
  siRNA target sequence for Tacc3 (NM_011524.1,1313-1331).
gagagaccaacttaatgca

SEQ ID NO: 674531 - DNA, 19 bp, Mus musculus
  siRNA target sequence for Tacc3 (NM_011524.1,1436-1454).
gtatgttggggaatgcata

SEQ ID NO: 674532 - DNA, 19 bp, Mus musculus
  siRNA target sequence for Tacc3 (NM_011524.1,1443-1461).
ggggaatgcatagtgaaaa

SEQ ID NO: 674533 - DNA, 19 bp, Mus musculus
  siRNA target sequence for Tacc3 (NM_011524.1,1444-1462).
gggaatgcatagtgaaaat

SEQ ID NO: 674534 - DNA, 19 bp, Mus musculus
  siRNA target sequence for Stag3 (NM_016964.1,278-296).
gggatagtccctcaactaa

SEQ ID NO: 674535 - DNA, 19 bp, Mus musculus
  siRNA target sequence for Stag3 (NM_016964.1,307-325).
gactttgaagacagcttaa

SEQ ID NO: 674536 - DNA, 19 bp, Mus musculus
  siRNA target sequence for Stag3 (NM_016964.1,320-338).
gcttaagacgaaatgtgaa

SEQ ID NO: 674537 - DNA, 19 bp, Mus musculus
  siRNA target sequence for Stag3 (NM_016964.1,393-411).
gaagcagtcccgaatagta

SEQ ID NO: 674538 - DNA, 19 bp, Mus musculus
  siRNA target sequence for Stag3 (NM_016964.1,396-414).
gcagtcccgaatagtatct

SEQ ID NO: 674539 - DNA, 19 bp, Mus musculus
  siRNA target sequence for Stag3 (NM_016964.1,397-415).
cagtcccgaatagtatcta

SEQ ID NO: 674540 - DNA, 19 bp, Mus musculus
  siRNA target sequence for Stag3 (NM_016964.1,399-417).
gtcccgaatagtatctagt

SEQ ID NO: 674541 - DNA, 19 bp, Mus musculus
  siRNA target sequence for Stag3 (NM_016964.1,437-455).
cagtgccatcaaccaatta

SEQ ID NO: 674542 - DNA, 19 bp, Mus musculus
  siRNA target sequence for Stag3 (NM_016964.1,441-459).
gccatcaaccaattacctt

SEQ ID NO: 674543 - DNA, 19 bp, Mus musculus
  siRNA target sequence for Stag3 (NM_016964.1,442-460).
ccatcaaccaattaccttt

SEQ ID NO: 674544 - DNA, 19 bp, Mus musculus
  siRNA target sequence for Stag3 (NM_016964.1,482-500).
gaagttgcatgcagtcttt

SEQ ID NO: 674545 - DNA, 19 bp, Mus musculus
  siRNA target sequence for Stag3 (NM_016964.1,508-526).
gagtggctagataactaca

SEQ ID NO: 674546 - DNA, 19 bp, Mus musculus
  siRNA target sequence for Stag3 (NM_016964.1,549-567).
cttggagctcattaatttt

SEQ ID NO: 674547 - DNA, 19 bp, Mus musculus
  siRNA target sequence for Stag3 (NM_016964.1,573-591).
ccgagcctgtggatgtaaa

SEQ ID NO: 674548 - DNA, 19 bp, Mus musculus
  siRNA target sequence for Stag3 (NM_016964.1,574-592).
cgagcctgtggatgtaaaa

SEQ ID NO: 674549 - DNA, 19 bp, Mus musculus
  siRNA target sequence for Stag3 (NM_016964.1,615-633).
caagacaatgtccaattca

SEQ ID NO: 674550 - DNA, 19 bp, Mus musculus
  siRNA target sequence for Stag3 (NM_016964.1,723-741).
gggaagcttctgtgagttt

SEQ ID NO: 674551 - DNA, 19 bp, Mus musculus
  siRNA target sequence for Stag3 (NM_016964.1,725-743).
gaagcttctgtgagtttgt

SEQ ID NO: 674552 - DNA, 19 bp, Mus musculus
  siRNA target sequence for Stag3 (NM_016964.1,768-786).
gtacagtctcctctatgat

SEQ ID NO: 674553 - DNA, 19 bp, Mus musculus
  siRNA target sequence for Stag3 (NM_016964.1,793-811).
cctatggatgaccttatct

SEQ ID NO: 674554 - DNA, 19 bp, Mus musculus
  siRNA target sequence for Stag3 (NM_016964.1,843-861).
ccgagcctttcgtcatact

SEQ ID NO: 674555 - DNA, 19 bp, Mus musculus
  siRNA target sequence for Stag3 (NM_016964.1,844-862).
cgagcctttcgtcatacta

SEQ ID NO: 674556 - DNA, 19 bp, Mus musculus
  siRNA target sequence for Stag3 (NM_016964.1,847-865).
gcctttcgtcatactagta

SEQ ID NO: 674557 - DNA, 19 bp, Mus musculus
  siRNA target sequence for Stag3 (NM_016964.1,933-951).
caacaatcaacgtcagtat

SEQ ID NO: 674558 - DNA, 19 bp, Mus musculus
  siRNA target sequence for Stag3 (NM_016964.1,1009-1027).
ctggagaaacgaaaagagt

SEQ ID NO: 674559 - DNA, 19 bp, Mus musculus
  siRNA target sequence for Stag3 (NM_016964.1,1135-1153).
gaggagattgggtattgga

SEQ ID NO: 674560 - DNA, 19 bp, Mus musculus
  siRNA target sequence for Stag3 (NM_016964.1,1145-1163).
ggtattggatgcaaagcta

SEQ ID NO: 674561 - DNA, 19 bp, Mus musculus
  siRNA target sequence for Stag3 (NM_016964.1,1204-1222).
ggctggaccctgcatgata

SEQ ID NO: 674562 - DNA, 19 bp, Mus musculus
  siRNA target sequence for Stag3 (NM_016964.1,1205-1223).
gctggaccctgcatgataa

SEQ ID NO: 674563 - DNA, 19 bp, Mus musculus
  siRNA target sequence for Stag3 (NM_016964.1,1296-1314).
gatggagctctttacaaat

SEQ ID NO: 674564 - DNA, 19 bp, Mus musculus
  siRNA target sequence for Stag3 (NM_016964.1,1347-1365).
ggacagagagtgtgaagta

SEQ ID NO: 674565 - DNA, 19 bp, Mus musculus
  siRNA target sequence for Stag3 (NM_016964.1,1380-1398).
cagattgctgacccttatt

SEQ ID NO: 674566 - DNA, 19 bp, Mus musculus
  siRNA target sequence for Stag3 (NM_016964.1,1492-1510).
ggggaatttgtgtattgga

SEQ ID NO: 674567 - DNA, 19 bp, Mus musculus
  siRNA target sequence for Stag3 (NM_016964.1,1493-1511).
gggaatttgtgtattggaa

SEQ ID NO: 674568 - DNA, 19 bp, Mus musculus
  siRNA target sequence for Stag3 (NM_016964.1,1597-1615).
cttttactggccttcttta

SEQ ID NO: 674569 - DNA, 19 bp, Mus musculus
  siRNA target sequence for Stag3 (NM_016964.1,1632-1650).
caaccatgctgcttactta

SEQ ID NO: 674570 - DNA, 19 bp, Mus musculus
  siRNA target sequence for Stag3 (NM_016964.1,1819-1837).
cgcatcactggaaagaaga

SEQ ID NO: 674571 - DNA, 19 bp, Mus musculus
  siRNA target sequence for Stag3 (NM_016964.1,1857-1875).
caagcttcaagcctatgat

SEQ ID NO: 674572 - DNA, 19 bp, Mus musculus
  siRNA target sequence for Stag3 (NM_016964.1,1864-1882).
caagcctatgataagatga

SEQ ID NO: 674573 - DNA, 19 bp, Mus musculus
  siRNA target sequence for Stag3 (NM_016964.1,1984-2002).
gacctcagcatatattgca

SEQ ID NO: 674574 - DNA, 19 bp, Mus musculus
  siRNA target sequence for Stag3 (NM_016964.1,2159-2177).
gaagccaattagtagattt

SEQ ID NO: 674575 - DNA, 19 bp, Mus musculus
  siRNA target sequence for Stag3 (NM_016964.1,2164-2182).
caattagtagattttctga

SEQ ID NO: 674576 - DNA, 19 bp, Mus musculus
  siRNA target sequence for Stag3 (NM_016964.1,2233-2251).
gatgaggatgaggtataca

SEQ ID NO: 674577 - DNA, 19 bp, Mus musculus
  siRNA target sequence for Stag3 (NM_016964.1,2368-2386).
gttcctcaccaggtgattt

SEQ ID NO: 674578 - DNA, 19 bp, Mus musculus
  siRNA target sequence for Stag3 (NM_016964.1,2399-2417).
ctctggtatatttttccat

SEQ ID NO: 674579 - DNA, 19 bp, Mus musculus
  siRNA target sequence for Stag3 (NM_016964.1,2544-2562).
ggagcaggcttttgtctta

SEQ ID NO: 674580 - DNA, 19 bp, Mus musculus
  siRNA target sequence for Stag3 (NM_016964.1,2548-2566).
caggcttttgtcttattaa

SEQ ID NO: 674581 - DNA, 19 bp, Mus musculus
  siRNA target sequence for Stag3 (NM_016964.1,2552-2570).
cttttgtcttattaagtga

SEQ ID NO: 674582 - DNA, 19 bp, Mus musculus
  siRNA target sequence for Stag3 (NM_016964.1,2583-2601).
cttcagccctcagatgatt

SEQ ID NO: 674583 - DNA, 19 bp, Mus musculus
  siRNA target sequence for Stag3 (NM_016964.1,2605-2623).
gggggacgggatttcctta

SEQ ID NO: 674584 - DNA, 19 bp, Mus musculus
  siRNA target sequence for Stag3 (NM_016964.1,2676-2694).
cctcatggaccatgtcttt

SEQ ID NO: 674585 - DNA, 19 bp, Mus musculus
  siRNA target sequence for Stag3 (NM_016964.1,2770-2788).
cgcctgcttgcaggatttt

SEQ ID NO: 674586 - DNA, 19 bp, Mus musculus
  siRNA target sequence for Stag3 (NM_016964.1,2824-2842).
gcagcctcagacgttttca

SEQ ID NO: 674587 - DNA, 19 bp, Mus musculus
  siRNA target sequence for Stag3 (NM_016964.1,2825-2843).
cagcctcagacgttttcaa

SEQ ID NO: 674588 - DNA, 19 bp, Mus musculus
  siRNA target sequence for Stag3 (NM_016964.1,2836-2854).
gttttcaaacactacaaca

SEQ ID NO: 674589 - DNA, 19 bp, Mus musculus
  siRNA target sequence for Stag3 (NM_016964.1,2897-2915).
ctcgagcaagacaaattga

SEQ ID NO: 674590 - DNA, 19 bp, Mus musculus
  siRNA target sequence for Stag3 (NM_016964.1,2899-2917).
cgagcaagacaaattgaca

SEQ ID NO: 674591 - DNA, 19 bp, Mus musculus
  siRNA target sequence for Stag3 (NM_016964.1,3007-3025).
ctgccagccttcattgaga

SEQ ID NO: 674592 - DNA, 19 bp, Mus musculus
  siRNA target sequence for Stag3 (NM_016964.1,3109-3127).
gaagggatcaagttctcat

SEQ ID NO: 674593 - DNA, 19 bp, Mus musculus
  siRNA target sequence for Stag3 (NM_016964.1,3112-3130).
gggatcaagttctcattgt

SEQ ID NO: 674594 - DNA, 19 bp, Mus musculus
  siRNA target sequence for Stag3 (NM_016964.1,3114-3132).
gatcaagttctcattgtct

SEQ ID NO: 674595 - DNA, 19 bp, Mus musculus
  siRNA target sequence for Stag3 (NM_016964.1,3222-3240).
ggacaagcggctactacta

SEQ ID NO: 674596 - DNA, 19 bp, Mus musculus
  siRNA target sequence for Stag3 (NM_016964.1,3223-3241).
gacaagcggctactactat

SEQ ID NO: 674597 - DNA, 19 bp, Mus musculus
  siRNA target sequence for Stag3 (NM_016964.1,3238-3256).
ctatcctacctggaaaagt

SEQ ID NO: 674598 - DNA, 19 bp, Mus musculus
  siRNA target sequence for Stag3 (NM_016964.1,3270-3288).
ctccaaggcacctaaccat

SEQ ID NO: 674599 - DNA, 19 bp, Mus musculus
  siRNA target sequence for Stag3 (NM_016964.1,3320-3338).
cccttcaccctctagagat

SEQ ID NO: 674600 - DNA, 19 bp, Mus musculus
  siRNA target sequence for Stag3 (NM_016964.1,3519-3537).
gggcaagaagcaaaaaggt

SEQ ID NO: 674601 - DNA, 19 bp, Mus musculus
  siRNA target sequence for Stag3 (NM_016964.1,3625-3643).
ccatgtttccagattcgat

SEQ ID NO: 674602 - DNA, 19 bp, Mus musculus
  siRNA target sequence for Stag3 (NM_016964.1,3680-3698).
cccgactcagccttatgga

SEQ ID NO: 674603 - DNA, 19 bp, Mus musculus
  siRNA target sequence for Stag3 (NM_016964.1,3681-3699).
ccgactcagccttatggaa

SEQ ID NO: 674604 - DNA, 19 bp, Mus musculus
  siRNA target sequence for Stag3 (NM_016964.1,3740-3758).
ggcaacgtggagacaagat

SEQ ID NO: 674605 - DNA, 19 bp, Mus musculus
  siRNA target sequence for Stag3 (NM_016964.1,3786-3804).
gcatgggttggacctatta

SEQ ID NO: 674606 - DNA, 19 bp, Mus musculus
  siRNA target sequence for Stag3 (NM_016964.1,3790-3808).
gggttggacctattagata

SEQ ID NO: 674607 - DNA, 19 bp, Mus musculus
  siRNA target sequence for Stag3 (NM_016964.1,3792-3810).
gttggacctattagataca

SEQ ID NO: 674608 - DNA, 19 bp, Mus musculus
  siRNA target sequence for Stag3 (NM_016964.1,3795-3813).
ggacctattagatacaaca

SEQ ID NO: 674609 - DNA, 19 bp, Mus musculus
  siRNA target sequence for 2310009E07Rik (NM_027115.1,541-559).
catccctccagctagacta

SEQ ID NO: 674610 - DNA, 19 bp, Mus musculus
  siRNA target sequence for 2310009E07Rik (NM_027115.1,653-671).
cccacaaggtcatatgttt

SEQ ID NO: 674611 - DNA, 19 bp, Mus musculus
  siRNA target sequence for 2310009E07Rik (NM_027115.1,655-673).
cacaaggtcatatgtttca

SEQ ID NO: 674612 - DNA, 19 bp, Mus musculus
  siRNA target sequence for 2310009E07Rik (NM_027115.1,660-678).
ggtcatatgtttcaacaaa

SEQ ID NO: 674613 - DNA, 19 bp, Mus musculus
  siRNA target sequence for 2310009E07Rik (NM_027115.1,661-679).
gtcatatgtttcaacaaat

SEQ ID NO: 674614 - DNA, 19 bp, Mus musculus
  siRNA target sequence for 2310009E07Rik (NM_027115.1,692-710).
gagctacctaggccaaata

SEQ ID NO: 674615 - DNA, 19 bp, Mus musculus
  siRNA target sequence for 2310009E07Rik (NM_027115.1,725-743).
ccagttggtcctttaggta

SEQ ID NO: 674616 - DNA, 19 bp, Mus musculus
  siRNA target sequence for 2310009E07Rik (NM_027115.1,784-802).
gggagggcagcatcctaat

SEQ ID NO: 674617 - DNA, 19 bp, Mus musculus
  siRNA target sequence for 2310009E07Rik (NM_027115.1,797-815).
cctaatgtgccatatctat

SEQ ID NO: 674618 - DNA, 19 bp, Mus musculus
  siRNA target sequence for 2310009E07Rik (NM_027115.1,902-920).
ccaccagcgcagtatccta

SEQ ID NO: 674619 - DNA, 19 bp, Mus musculus
  siRNA target sequence for 2310009E07Rik (NM_027115.1,952-970).
ccagccttccccgaataat

SEQ ID NO: 674620 - DNA, 19 bp, Mus musculus
  siRNA target sequence for 2310009E07Rik (NM_027115.1,955-973).
gccttccccgaataatcct

SEQ ID NO: 674621 - DNA, 19 bp, Mus musculus
  siRNA target sequence for 2310009E07Rik (NM_027115.1,956-974).
ccttccccgaataatcctt

SEQ ID NO: 674622 - DNA, 19 bp, Mus musculus
  siRNA target sequence for 2310009E07Rik (NM_027115.1,957-975).
cttccccgaataatcctta

SEQ ID NO: 674623 - DNA, 19 bp, Mus musculus
  siRNA target sequence for 2310009E07Rik (NM_027115.1,1197-1215).
ctcacaaagctgaaagctt

SEQ ID NO: 674624 - DNA, 19 bp, Mus musculus
  siRNA target sequence for Meig1 (NM_008579.4,295-313).
cttctgacgtgaaaccaaa

SEQ ID NO: 674625 - DNA, 19 bp, Mus musculus
  siRNA target sequence for Meig1 (NM_008579.4,300-318).
gacgtgaaaccaaaatcaa

SEQ ID NO: 674626 - DNA, 19 bp, Mus musculus
  siRNA target sequence for Meig1 (NM_008579.4,302-320).
cgtgaaaccaaaatcaata

SEQ ID NO: 674627 - DNA, 19 bp, Mus musculus
  siRNA target sequence for Meig1 (NM_008579.4,376-394).
caggatatcgggatgaaat

SEQ ID NO: 674628 - DNA, 19 bp, Mus musculus
  siRNA target sequence for Meig1 (NM_008579.4,384-402).
cgggatgaaattgaatata

SEQ ID NO: 674629 - DNA, 19 bp, Mus musculus
  siRNA target sequence for Meig1 (NM_008579.4,443-461).
gacagggtacgtgaagaaa

SEQ ID NO: 674630 - DNA, 19 bp, Mus musculus
  siRNA target sequence for Meig1 (NM_008579.4,448-466).
ggtacgtgaagaaacttca

SEQ ID NO: 674631 - DNA, 19 bp, Mus musculus
  siRNA target sequence for Meig1 (NM_008579.4,465-483).
cagcggagggacaatactt

SEQ ID NO: 674632 - DNA, 19 bp, Mus musculus
  siRNA target sequence for Meig1 (NM_008579.4,468-486).
cggagggacaatactttct

SEQ ID NO: 674633 - DNA, 19 bp, Mus musculus
  siRNA target sequence for Meig1 (NM_008579.4,525-543).
gtccacaaagtgaaggttt

SEQ ID NO: 674634 - DNA, 19 bp, Mus musculus
  siRNA target sequence for Tsga2 (NM_025290.2,217-235).
ccaacggggacacatatga

SEQ ID NO: 674635 - DNA, 19 bp, Mus musculus
  siRNA target sequence for Tsga2 (NM_025290.2,264-282).
ggccaggggacttacaaat

SEQ ID NO: 674636 - DNA, 19 bp, Mus musculus
  siRNA target sequence for Tsga2 (NM_025290.2,266-284).
ccaggggacttacaaattt

SEQ ID NO: 674637 - DNA, 19 bp, Mus musculus
  siRNA target sequence for Tsga2 (NM_025290.2,267-285).
caggggacttacaaattta

SEQ ID NO: 674638 - DNA, 19 bp, Mus musculus
  siRNA target sequence for Tsga2 (NM_025290.2,270-288).
gggacttacaaatttaaga

SEQ ID NO: 674639 - DNA, 19 bp, Mus musculus
  siRNA target sequence for Tsga2 (NM_025290.2,271-289).
ggacttacaaatttaagaa

SEQ ID NO: 674640 - DNA, 19 bp, Mus musculus
  siRNA target sequence for Tsga2 (NM_025290.2,272-290).
gacttacaaatttaagaat

SEQ ID NO: 674641 - DNA, 19 bp, Mus musculus
  siRNA target sequence for Tsga2 (NM_025290.2,296-314).
ccggtacaccggagactat

SEQ ID NO: 674642 - DNA, 19 bp, Mus musculus
  siRNA target sequence for Tsga2 (NM_025290.2,302-320).
caccggagactatgtcaaa

SEQ ID NO: 674643 - DNA, 19 bp, Mus musculus
  siRNA target sequence for Tsga2 (NM_025290.2,305-323).
cggagactatgtcaaaaat

SEQ ID NO: 674644 - DNA, 19 bp, Mus musculus
  siRNA target sequence for Tsga2 (NM_025290.2,335-353).
ccaaggcacctttatctat

SEQ ID NO: 674645 - DNA, 19 bp, Mus musculus
  siRNA target sequence for Tsga2 (NM_025290.2,402-420).
ggccaaggcgtgtactact

SEQ ID NO: 674646 - DNA, 19 bp, Mus musculus
  siRNA target sequence for Tsga2 (NM_025290.2,403-421).
gccaaggcgtgtactacta

SEQ ID NO: 674647 - DNA, 19 bp, Mus musculus
  siRNA target sequence for Tsga2 (NM_025290.2,404-422).
ccaaggcgtgtactactat

SEQ ID NO: 674648 - DNA, 19 bp, Mus musculus
  siRNA target sequence for Tsga2 (NM_025290.2,408-426).
ggcgtgtactactatgtca

SEQ ID NO: 674649 - DNA, 19 bp, Mus musculus
  siRNA target sequence for Tsga2 (NM_025290.2,409-427).
gcgtgtactactatgtcaa

SEQ ID NO: 674650 - DNA, 19 bp, Mus musculus
  siRNA target sequence for Tsga2 (NM_025290.2,442-460).
caggggagtggttcaatca

SEQ ID NO: 674651 - DNA, 19 bp, Mus musculus
  siRNA target sequence for Tsga2 (NM_025290.2,445-463).
gggagtggttcaatcatca

SEQ ID NO: 674652 - DNA, 19 bp, Mus musculus
  siRNA target sequence for Tsga2 (NM_025290.2,446-464).
ggagtggttcaatcatcaa

SEQ ID NO: 674653 - DNA, 19 bp, Mus musculus
  siRNA target sequence for Tsga2 (NM_025290.2,492-510).
gcagagaccggcagtaagt

SEQ ID NO: 674654 - DNA, 19 bp, Mus musculus
  siRNA target sequence for Tsga2 (NM_025290.2,604-622).
ctgtgggccctggaaagta

SEQ ID NO: 674655 - DNA, 19 bp, Mus musculus
  siRNA target sequence for Tsga2 (NM_025290.2,610-628).
gccctggaaagtacgtatt

SEQ ID NO: 674656 - DNA, 19 bp, Mus musculus
  siRNA target sequence for Tsga2 (NM_025290.2,611-629).
ccctggaaagtacgtattt

SEQ ID NO: 674657 - DNA, 19 bp, Mus musculus
  siRNA target sequence for Tsga2 (NM_025290.2,613-631).
ctggaaagtacgtatttga

SEQ ID NO: 674658 - DNA, 19 bp, Mus musculus
  siRNA target sequence for Tsga2 (NM_025290.2,615-633).
ggaaagtacgtatttgata

SEQ ID NO: 674659 - DNA, 19 bp, Mus musculus
  siRNA target sequence for Tsga2 (NM_025290.2,616-634).
gaaagtacgtatttgatat

SEQ ID NO: 674660 - DNA, 19 bp, Mus musculus
  siRNA target sequence for Tsga2 (NM_025290.2,620-638).
gtacgtatttgatattgga

SEQ ID NO: 674661 - DNA, 19 bp, Mus musculus
  siRNA target sequence for Tsga2 (NM_025290.2,640-658).
gcgaacagcacggtgaata

SEQ ID NO: 674662 - DNA, 19 bp, Mus musculus
  siRNA target sequence for Tsga2 (NM_025290.2,641-659).
cgaacagcacggtgaatat

SEQ ID NO: 674663 - DNA, 19 bp, Mus musculus
  siRNA target sequence for Tsga2 (NM_025290.2,654-672).
gaatatcgcctcacagata

SEQ ID NO: 674664 - DNA, 19 bp, Mus musculus
  siRNA target sequence for Tsga2 (NM_025290.2,696-714).
gaggaagagacattagtga

SEQ ID NO: 674665 - DNA, 19 bp, Mus musculus
  siRNA target sequence for Tsga2 (NM_025290.2,716-734).
catcgttccaaaatggaaa

SEQ ID NO: 674666 - DNA, 19 bp, Mus musculus
  siRNA target sequence for Tsga2 (NM_025290.2,815-833).
ggaaccgcagggacttact

SEQ ID NO: 674667 - DNA, 19 bp, Mus musculus
  siRNA target sequence for 1700051C09Rik (NM_026562.1,137-155).
ggtgaactgtagtgacttt

SEQ ID NO: 674668 - DNA, 19 bp, Mus musculus
  siRNA target sequence for 1700051C09Rik (NM_026562.1,172-190).
ccacagagactatcgaaaa

SEQ ID NO: 674669 - DNA, 19 bp, Mus musculus
  siRNA target sequence for 1700051C09Rik (NM_026562.1,268-286).
cccggatcgtggagtttgt

SEQ ID NO: 674670 - DNA, 19 bp, Mus musculus
  siRNA target sequence for 1700051C09Rik (NM_026562.1,269-287).
ccggatcgtggagtttgtt

SEQ ID NO: 674671 - DNA, 19 bp, Mus musculus
  siRNA target sequence for 1700051C09Rik (NM_026562.1,270-288).
cggatcgtggagtttgttt

SEQ ID NO: 674672 - DNA, 19 bp, Mus musculus
  siRNA target sequence for 1700051C09Rik (NM_026562.1,336-354).
gctgtagaaatcctagaaa

SEQ ID NO: 674673 - DNA, 19 bp, Mus musculus
  siRNA target sequence for 1700051C09Rik (NM_026562.1,433-451).
gctggagggctatgaaaga

SEQ ID NO: 674674 - DNA, 19 bp, Mus musculus
  siRNA target sequence for 1700051C09Rik (NM_026562.1,514-532).
ctttccactacaaaattgt

SEQ ID NO: 674675 - DNA, 19 bp, Mus musculus
  siRNA target sequence for 1700051C09Rik (NM_026562.1,524-542).
caaaattgtcagcaacatt

SEQ ID NO: 674676 - DNA, 19 bp, Mus musculus
  siRNA target sequence for 1700051C09Rik (NM_026562.1,599-617).
ggagtcagagctcgatatt

SEQ ID NO: 674677 - DNA, 19 bp, Mus musculus
  siRNA target sequence for 1700051C09Rik (NM_026562.1,600-618).
gagtcagagctcgatattt

SEQ ID NO: 674678 - DNA, 19 bp, Mus musculus
  siRNA target sequence for 1700051C09Rik (NM_026562.1,604-622).
cagagctcgatattttgaa

SEQ ID NO: 674679 - DNA, 19 bp, Mus musculus
  siRNA target sequence for 1700051C09Rik (NM_026562.1,606-624).
gagctcgatattttgaagt

SEQ ID NO: 674680 - DNA, 19 bp, Mus musculus
  siRNA target sequence for 1700051C09Rik (NM_026562.1,649-667).
ccactcctctggcatatgt

SEQ ID NO: 674681 - DNA, 19 bp, Mus musculus
  siRNA target sequence for 1700051C09Rik (NM_026562.1,707-725).
ggtccctgccacacaacta

SEQ ID NO: 674682 - DNA, 19 bp, Mus musculus
  siRNA target sequence for 1700051C09Rik (NM_026562.1,746-764).
cctcgacctggtctatctt

SEQ ID NO: 674683 - DNA, 19 bp, Mus musculus
  siRNA target sequence for 1700051C09Rik (NM_026562.1,788-806).
cctattgagagcttcaatt

SEQ ID NO: 674684 - DNA, 19 bp, Mus musculus
  siRNA target sequence for 1700051C09Rik (NM_026562.1,894-912).
gcgagtgccttcatccaaa

SEQ ID NO: 674685 - DNA, 19 bp, Mus musculus
  siRNA target sequence for 1700051C09Rik (NM_026562.1,895-913).
cgagtgccttcatccaaaa

SEQ ID NO: 674686 - DNA, 19 bp, Mus musculus
  siRNA target sequence for 1700051C09Rik (NM_026562.1,898-916).
gtgccttcatccaaaacca

SEQ ID NO: 674687 - DNA, 19 bp, Mus musculus
  siRNA target sequence for 1700051C09Rik (NM_026562.1,961-979).
gcattgcctcggaaagcat

SEQ ID NO: 674688 - DNA, 19 bp, Mus musculus
  siRNA target sequence for 1700051C09Rik (NM_026562.1,962-980).
cattgcctcggaaagcatt

SEQ ID NO: 674689 - DNA, 19 bp, Mus musculus
  siRNA target sequence for 1700051C09Rik (NM_026562.1,1086-1104).
gctgccgcttcctctaaca

SEQ ID NO: 674690 - DNA, 19 bp, Mus musculus
  siRNA target sequence for 5730405I09Rik (NM_026484.2,620-638).
gggaaaacatcgacgattt

SEQ ID NO: 674691 - DNA, 19 bp, Mus musculus
  siRNA target sequence for 5730405I09Rik (NM_026484.2,621-639).
ggaaaacatcgacgattta

SEQ ID NO: 674692 - DNA, 19 bp, Mus musculus
  siRNA target sequence for 5730405I09Rik (NM_026484.2,622-640).
gaaaacatcgacgatttaa

SEQ ID NO: 674693 - DNA, 19 bp, Mus musculus
  siRNA target sequence for 5730405I09Rik (NM_026484.2,631-649).
gacgatttaaacatggaat

SEQ ID NO: 674694 - DNA, 19 bp, Mus musculus
  siRNA target sequence for 5730405I09Rik (NM_026484.2,667-685).
cctcgggccagcacaatat

SEQ ID NO: 674695 - DNA, 19 bp, Mus musculus
  siRNA target sequence for 5730405I09Rik (NM_026484.2,668-686).
ctcgggccagcacaatatt

SEQ ID NO: 674696 - DNA, 19 bp, Mus musculus
  siRNA target sequence for 5730405I09Rik (NM_026484.2,721-739).
cgcaagagtctcttcatta

SEQ ID NO: 674697 - DNA, 19 bp, Mus musculus
  siRNA target sequence for 5730405I09Rik (NM_026484.2,726-744).
gagtctcttcattaaccat

SEQ ID NO: 674698 - DNA, 19 bp, Mus musculus
  siRNA target sequence for 5730405I09Rik (NM_026484.2,828-846).
caagtacaccatcaaatgt

SEQ ID NO: 674699 - DNA, 19 bp, Mus musculus
  siRNA target sequence for 5730405I09Rik (NM_026484.2,831-849).
gtacaccatcaaatgtgta

SEQ ID NO: 674700 - DNA, 19 bp, Mus musculus
  siRNA target sequence for 5730405I09Rik (NM_026484.2,845-863).
gtgtagctcttgcgatata

SEQ ID NO: 674701 - DNA, 19 bp, Mus musculus
  siRNA target sequence for 5730405I09Rik (NM_026484.2,851-869).
ctcttgcgatatattacca

SEQ ID NO: 674702 - DNA, 19 bp, Mus musculus
  siRNA target sequence for 5730405I09Rik (NM_026484.2,1082-1100).
catacgcagagattgatat

SEQ ID NO: 674703 - DNA, 19 bp, Mus musculus
  siRNA target sequence for 5730405I09Rik (NM_026484.2,1086-1104).
cgcagagattgatatctgt

SEQ ID NO: 674704 - DNA, 19 bp, Mus musculus
  siRNA target sequence for 5730405I09Rik (NM_026484.2,1110-1128).
caattggaagcgcattgtt

SEQ ID NO: 674705 - DNA, 19 bp, Mus musculus
  siRNA target sequence for 5730405I09Rik (NM_026484.2,1237-1255).
gagaggcagtttcttgaat

SEQ ID NO: 674706 - DNA, 19 bp, Mus musculus
  siRNA target sequence for 5730405I09Rik (NM_026484.2,1241-1259).
ggcagtttcttgaattgct

SEQ ID NO: 674707 - DNA, 19 bp, Mus musculus
  siRNA target sequence for 5730405I09Rik (NM_026484.2,1242-1260).
gcagtttcttgaattgcta

SEQ ID NO: 674708 - DNA, 19 bp, Mus musculus
  siRNA target sequence for 5730405I09Rik (NM_026484.2,1252-1270).
gaattgctacagtttaaca

SEQ ID NO: 674709 - DNA, 19 bp, Mus musculus
  siRNA target sequence for 5730405I09Rik (NM_026484.2,1286-1304).
gtgtgtatgccaagtatta

SEQ ID NO: 674710 - DNA, 19 bp, Mus musculus
  siRNA target sequence for 5730405I09Rik (NM_026484.2,1288-1306).
gtgtatgccaagtattatt

SEQ ID NO: 674711 - DNA, 19 bp, Mus musculus
  siRNA target sequence for 5730405I09Rik (NM_026484.2,1457-1475).
gtgctgacaacctgattct

SEQ ID NO: 674712 - DNA, 19 bp, Mus musculus
  siRNA target sequence for Ccni (NM_017367.2,599-617).
cattggattttcttcacat

SEQ ID NO: 674713 - DNA, 19 bp, Mus musculus
  siRNA target sequence for Ccni (NM_017367.2,813-831).
gcttcctcttacgattgaa

SEQ ID NO: 674714 - DNA, 19 bp, Mus musculus
  siRNA target sequence for Ccni (NM_017367.2,824-842).
cgattgaactgcttcagaa

SEQ ID NO: 674715 - DNA, 19 bp, Mus musculus
  siRNA target sequence for Ccni (NM_017367.2,878-896).
gggagctggtggcatatca

SEQ ID NO: 674716 - DNA, 19 bp, Mus musculus
  siRNA target sequence for Ccni (NM_017367.2,921-939).
gcctctaaattccgtttat

SEQ ID NO: 674717 - DNA, 19 bp, Mus musculus
  siRNA target sequence for Ccni (NM_017367.2,923-941).
ctctaaattccgtttatgt

SEQ ID NO: 674718 - DNA, 19 bp, Mus musculus
  siRNA target sequence for Ccni (NM_017367.2,925-943).
ctaaattccgtttatgtct

SEQ ID NO: 674719 - DNA, 19 bp, Mus musculus
  siRNA target sequence for Ccni (NM_017367.2,974-992).
gtgacaaaggagcattcaa

SEQ ID NO: 674720 - DNA, 19 bp, Mus musculus
  siRNA target sequence for Ccni (NM_017367.2,1165-1183).
gggatcaagcggctctata

SEQ ID NO: 674721 - DNA, 19 bp, Mus musculus
  siRNA target sequence for Ccni (NM_017367.2,1166-1184).
ggatcaagcggctctataa

SEQ ID NO: 674722 - DNA, 19 bp, Mus musculus
  siRNA target sequence for Ccni (NM_017367.2,1167-1185).
gatcaagcggctctataat

SEQ ID NO: 674723 - DNA, 19 bp, Mus musculus
  siRNA target sequence for Ccnl1 (NM_019937.1,396-414).
ctgttccatcggttcttct

SEQ ID NO: 674724 - DNA, 19 bp, Mus musculus
  siRNA target sequence for Ccnl1 (NM_019937.1,418-436).
ccaagtcgttcgtcaaaca

SEQ ID NO: 674725 - DNA, 19 bp, Mus musculus
  siRNA target sequence for Ccnl1 (NM_019937.1,424-442).
cgttcgtcaaacacagttt

SEQ ID NO: 674726 - DNA, 19 bp, Mus musculus
  siRNA target sequence for Ccnl1 (NM_019937.1,450-468).
gttgctatggcctgtatta

SEQ ID NO: 674727 - DNA, 19 bp, Mus musculus
  siRNA target sequence for Ccnl1 (NM_019937.1,502-520).
gaataagagatgtgattaa

SEQ ID NO: 674728 - DNA, 19 bp, Mus musculus
  siRNA target sequence for Ccnl1 (NM_019937.1,528-546).
caccacctccgccagttaa

SEQ ID NO: 674729 - DNA, 19 bp, Mus musculus
  siRNA target sequence for Ccnl1 (NM_019937.1,530-548).
ccacctccgccagttaaga

SEQ ID NO: 674730 - DNA, 19 bp, Mus musculus
  siRNA target sequence for Ccnl1 (NM_019937.1,536-554).
ccgccagttaagaggaaaa

SEQ ID NO: 674731 - DNA, 19 bp, Mus musculus
  siRNA target sequence for Ccnl1 (NM_019937.1,537-555).
cgccagttaagaggaaaaa

SEQ ID NO: 674732 - DNA, 19 bp, Mus musculus
  siRNA target sequence for Ccnl1 (NM_019937.1,565-583).
gccccctgatccttgatca

SEQ ID NO: 674733 - DNA, 19 bp, Mus musculus
  siRNA target sequence for Ccnl1 (NM_019937.1,576-594).
cttgatcagaactacatta

SEQ ID NO: 674734 - DNA, 19 bp, Mus musculus
  siRNA target sequence for Ccnl1 (NM_019937.1,598-616).
ccaaaaatcaagttatcaa

SEQ ID NO: 674735 - DNA, 19 bp, Mus musculus
  siRNA target sequence for Ccnl1 (NM_019937.1,646-664).
gattttgtgttcatgtcaa

SEQ ID NO: 674736 - DNA, 19 bp, Mus musculus
  siRNA target sequence for Ccnl1 (NM_019937.1,660-678).
gtcaagcatccccataaga

SEQ ID NO: 674737 - DNA, 19 bp, Mus musculus
  siRNA target sequence for Ccnl1 (NM_019937.1,665-683).
gcatccccataagatcatt

SEQ ID NO: 674738 - DNA, 19 bp, Mus musculus
  siRNA target sequence for Ccnl1 (NM_019937.1,672-690).
cataagatcattgtaatgt

SEQ ID NO: 674739 - DNA, 19 bp, Mus musculus
  siRNA target sequence for Ccnl1 (NM_019937.1,677-695).
gatcattgtaatgtattta

SEQ ID NO: 674740 - DNA, 19 bp, Mus musculus
  siRNA target sequence for Ccnl1 (NM_019937.1,799-817).
ctatagcatgtgcttgtat

SEQ ID NO: 674741 - DNA, 19 bp, Mus musculus
  siRNA target sequence for Ccnl1 (NM_019937.1,913-931).
gcatagagacgcttagact

SEQ ID NO: 674742 - DNA, 19 bp, Mus musculus
  siRNA target sequence for Ccnl1 (NM_019937.1,914-932).
catagagacgcttagactt

SEQ ID NO: 674743 - DNA, 19 bp, Mus musculus
  siRNA target sequence for Ccnl1 (NM_019937.1,918-936).
gagacgcttagactttata

SEQ ID NO: 674744 - DNA, 19 bp, Mus musculus
  siRNA target sequence for Ccnl1 (NM_019937.1,938-956).
caggaaaaagcctaactat

SEQ ID NO: 674745 - DNA, 19 bp, Mus musculus
  siRNA target sequence for Ccnl1 (NM_019937.1,995-1013).
cttacaggaagccaagtta

SEQ ID NO: 674746 - DNA, 19 bp, Mus musculus
  siRNA target sequence for Ccnl1 (NM_019937.1,1126-1144).
cagtctccattaatgtgaa

SEQ ID NO: 674747 - DNA, 19 bp, Mus musculus
  siRNA target sequence for Ccnl1 (NM_019937.1,1180-1198).
cgtcaaaaagcccttacaa

SEQ ID NO: 674748 - DNA, 19 bp, Mus musculus
  siRNA target sequence for Ccnl1 (NM_019937.1,1181-1199).
gtcaaaaagcccttacaat

SEQ ID NO: 674749 - DNA, 19 bp, Mus musculus
  siRNA target sequence for Ccnl1 (NM_019937.1,1190-1208).
cccttacaatggtgtaaga

SEQ ID NO: 674750 - DNA, 19 bp, Mus musculus
  siRNA target sequence for Ccnl1 (NM_019937.1,1232-1250).
cagcagaagtgctagtaga

SEQ ID NO: 674751 - DNA, 19 bp, Mus musculus
  siRNA target sequence for Ccnl1 (NM_019937.1,1288-1306).
gcccaagaagacattataa

SEQ ID NO: 674752 - DNA, 19 bp, Mus musculus
  siRNA target sequence for Ccnl1 (NM_019937.1,1315-1333).
gaagtcgatctggaacata

SEQ ID NO: 674753 - DNA, 19 bp, Mus musculus
  siRNA target sequence for Ccnl1 (NM_019937.1,1375-1393).
gccctcgaagacatcataa

SEQ ID NO: 674754 - DNA, 19 bp, Mus musculus
  siRNA target sequence for Ccnl1 (NM_019937.1,1447-1465).
caaatagacacggtcataa

SEQ ID NO: 674755 - DNA, 19 bp, Mus musculus
  siRNA target sequence for Ccnl1 (NM_019937.1,1455-1473).
cacggtcataagaggaaaa

SEQ ID NO: 674756 - DNA, 19 bp, Mus musculus
  siRNA target sequence for Ccnl1 (NM_019937.1,1511-1529).
ctcagatgttaccaagaaa

SEQ ID NO: 674757 - DNA, 19 bp, Mus musculus
  siRNA target sequence for Ccnl1 (NM_019937.1,1569-1587).
cgatctcgctcctttgaga

SEQ ID NO: 674758 - DNA, 19 bp, Mus musculus
  siRNA target sequence for Cdkn2c (NM_007671.2,272-290).
ggggacctagagcaactta

SEQ ID NO: 674759 - DNA, 19 bp, Mus musculus
  siRNA target sequence for Cdkn2c (NM_007671.2,274-292).
ggacctagagcaacttact

SEQ ID NO: 674760 - DNA, 19 bp, Mus musculus
  siRNA target sequence for Cdkn2c (NM_007671.2,275-293).
gacctagagcaacttacta

SEQ ID NO: 674761 - DNA, 19 bp, Mus musculus
  siRNA target sequence for Cdkn2c (NM_007671.2,277-295).
cctagagcaacttactagt

SEQ ID NO: 674762 - DNA, 19 bp, Mus musculus
  siRNA target sequence for Cdkn2c (NM_007671.2,278-296).
ctagagcaacttactagtt

SEQ ID NO: 674763 - DNA, 19 bp, Mus musculus
  siRNA target sequence for Cdkn2c (NM_007671.2,281-299).
gagcaacttactagtttgt

SEQ ID NO: 674764 - DNA, 19 bp, Mus musculus
  siRNA target sequence for Cdkn2c (NM_007671.2,294-312).
gtttgttgcaaaataatgt

SEQ ID NO: 674765 - DNA, 19 bp, Mus musculus
  siRNA target sequence for Cdkn2c (NM_007671.2,342-360).
gaactgcgctgcaggttat

SEQ ID NO: 674766 - DNA, 19 bp, Mus musculus
  siRNA target sequence for Cdkn2c (NM_007671.2,345-363).
ctgcgctgcaggttatgaa

SEQ ID NO: 674767 - DNA, 19 bp, Mus musculus
  siRNA target sequence for Cdkn2c (NM_007671.2,348-366).
cgctgcaggttatgaaact

SEQ ID NO: 674768 - DNA, 19 bp, Mus musculus
  siRNA target sequence for Cdkn2c (NM_007671.2,349-367).
gctgcaggttatgaaactt

SEQ ID NO: 674769 - DNA, 19 bp, Mus musculus
  siRNA target sequence for Cdkn2c (NM_007671.2,402-420).
gaggtgctaatcccaattt

SEQ ID NO: 674770 - DNA, 19 bp, Mus musculus
  siRNA target sequence for Cdkn2c (NM_007671.2,405-423).
gtgctaatcccaatttgaa

SEQ ID NO: 674771 - DNA, 19 bp, Mus musculus
  siRNA target sequence for Cdkn2c (NM_007671.2,614-632).
gtggggcatcggaaccata

SEQ ID NO: 674772 - DNA, 19 bp, Mus musculus
  siRNA target sequence for Cdkn2c (NM_007671.2,668-686).
ggaagaaatgaggtcatta

SEQ ID NO: 674773 - DNA, 19 bp, Mus musculus
  siRNA target sequence for Cul2 (NM_029402.1,232-250).
gctgttgttatgttggaat

SEQ ID NO: 674774 - DNA, 19 bp, Mus musculus
  siRNA target sequence for Cul2 (NM_029402.1,233-251).
ctgttgttatgttggaata

SEQ ID NO: 674775 - DNA, 19 bp, Mus musculus
  siRNA target sequence for Cul2 (NM_029402.1,274-292).
gaccgcttctcagatatct

SEQ ID NO: 674776 - DNA, 19 bp, Mus musculus
  siRNA target sequence for Cul2 (NM_029402.1,276-294).
ccgcttctcagatatctat

SEQ ID NO: 674777 - DNA, 19 bp, Mus musculus
  siRNA target sequence for Cul2 (NM_029402.1,365-383).
gtcacgttcggcatttgta

SEQ ID NO: 674778 - DNA, 19 bp, Mus musculus
  siRNA target sequence for Cul2 (NM_029402.1,367-385).
cacgttcggcatttgtata

SEQ ID NO: 674779 - DNA, 19 bp, Mus musculus
  siRNA target sequence for Cul2 (NM_029402.1,370-388).
gttcggcatttgtataaga

SEQ ID NO: 674780 - DNA, 19 bp, Mus musculus
  siRNA target sequence for Cul2 (NM_029402.1,412-430).
gtgcttgttatgtatcata

SEQ ID NO: 674781 - DNA, 19 bp, Mus musculus
  siRNA target sequence for Cul2 (NM_029402.1,487-505).
ctcaatacccagtatatta

SEQ ID NO: 674782 - DNA, 19 bp, Mus musculus
  siRNA target sequence for Cul2 (NM_029402.1,561-579).
gaatgaaccacttatggaa

SEQ ID NO: 674783 - DNA, 19 bp, Mus musculus
  siRNA target sequence for Cul2 (NM_029402.1,598-616).
gatatgtggaggaagttaa

SEQ ID NO: 674784 - DNA, 19 bp, Mus musculus
  siRNA target sequence for Cul2 (NM_029402.1,603-621).
gtggaggaagttaatggtt

SEQ ID NO: 674785 - DNA, 19 bp, Mus musculus
  siRNA target sequence for Cul2 (NM_029402.1,647-665).
ggatgctgcttcgagaaat

SEQ ID NO: 674786 - DNA, 19 bp, Mus musculus
  siRNA target sequence for Cul2 (NM_029402.1,648-666).
gatgctgcttcgagaaatt

SEQ ID NO: 674787 - DNA, 19 bp, Mus musculus
  siRNA target sequence for Cul2 (NM_029402.1,651-669).
gctgcttcgagaaattaaa

SEQ ID NO: 674788 - DNA, 19 bp, Mus musculus
  siRNA target sequence for Cul2 (NM_029402.1,725-743).
cctttgttcatgttgaaca

SEQ ID NO: 674789 - DNA, 19 bp, Mus musculus
  siRNA target sequence for Cul2 (NM_029402.1,736-754).
gttgaacagtataagaaaa

SEQ ID NO: 674790 - DNA, 19 bp, Mus musculus
  siRNA target sequence for Cul2 (NM_029402.1,801-819).
gactgaaacgggagaatat

SEQ ID NO: 674791 - DNA, 19 bp, Mus musculus
  siRNA target sequence for Cul2 (NM_029402.1,803-821).
ctgaaacgggagaatatta

SEQ ID NO: 674792 - DNA, 19 bp, Mus musculus
  siRNA target sequence for Cul2 (NM_029402.1,860-878).
gttcacagtatatggaaaa

SEQ ID NO: 674793 - DNA, 19 bp, Mus musculus
  siRNA target sequence for Cul2 (NM_029402.1,863-881).
cacagtatatggaaaaggt

SEQ ID NO: 674794 - DNA, 19 bp, Mus musculus
  siRNA target sequence for Cul2 (NM_029402.1,904-922).
gaaattagatgtcgaaaat

SEQ ID NO: 674795 - DNA, 19 bp, Mus musculus
  siRNA target sequence for Cul2 (NM_029402.1,911-929).
gatgtcgaaaatatttgca

SEQ ID NO: 674796 - DNA, 19 bp, Mus musculus
  siRNA target sequence for Cul2 (NM_029402.1,928-946).
catccaagttcatatacta

SEQ ID NO: 674797 - DNA, 19 bp, Mus musculus
  siRNA target sequence for Cul2 (NM_029402.1,938-956).
catatactaaagtgattca

SEQ ID NO: 674798 - DNA, 19 bp, Mus musculus
  siRNA target sequence for Cul2 (NM_029402.1,976-994).
gtagcagaccacttacagt

SEQ ID NO: 674799 - DNA, 19 bp, Mus musculus
  siRNA target sequence for Cul2 (NM_029402.1,980-998).
cagaccacttacagttctt

SEQ ID NO: 674800 - DNA, 19 bp, Mus musculus
  siRNA target sequence for Cul2 (NM_029402.1,1049-1067).
caaatatgtacgtcttact

SEQ ID NO: 674801 - DNA, 19 bp, Mus musculus
  siRNA target sequence for Cul2 (NM_029402.1,1137-1155).
cagagcgaccagtaacctt

SEQ ID NO: 674802 - DNA, 19 bp, Mus musculus
  siRNA target sequence for Cul2 (NM_029402.1,1175-1193).
cactatttgtggaatcagt

SEQ ID NO: 674803 - DNA, 19 bp, Mus musculus
  siRNA target sequence for Cul2 (NM_029402.1,1208-1226).
gtaaattcgttcaacttat

SEQ ID NO: 674804 - DNA, 19 bp, Mus musculus
  siRNA target sequence for Cul2 (NM_029402.1,1325-1343).
cgcctgaactgcttgctaa

SEQ ID NO: 674805 - DNA, 19 bp, Mus musculus
  siRNA target sequence for Cul2 (NM_029402.1,1373-1391).
cgaaggggatgactgaaaa

SEQ ID NO: 674806 - DNA, 19 bp, Mus musculus
  siRNA target sequence for Cul2 (NM_029402.1,1374-1392).
gaaggggatgactgaaaat

SEQ ID NO: 674807 - DNA, 19 bp, Mus musculus
  siRNA target sequence for Cul2 (NM_029402.1,1415-1433).
gcttcatcacagttttcaa

SEQ ID NO: 674808 - DNA, 19 bp, Mus musculus
  siRNA target sequence for Cul2 (NM_029402.1,1444-1462).
gacaaggacgtctttcaga

SEQ ID NO: 674809 - DNA, 19 bp, Mus musculus
  siRNA target sequence for Cul2 (NM_029402.1,1464-1482).
gttctatgcaagaatgcta

SEQ ID NO: 674810 - DNA, 19 bp, Mus musculus
  siRNA target sequence for Cul2 (NM_029402.1,1479-1497).
gctagcaaaacgtctaatt

SEQ ID NO: 674811 - DNA, 19 bp, Mus musculus
  siRNA target sequence for Cul2 (NM_029402.1,1492-1510).
ctaattcacgggttgtcta

SEQ ID NO: 674812 - DNA, 19 bp, Mus musculus
  siRNA target sequence for Cul2 (NM_029402.1,1498-1516).
cacgggttgtctatgtcta

SEQ ID NO: 674813 - DNA, 19 bp, Mus musculus
  siRNA target sequence for Cul2 (NM_029402.1,1512-1530).
gtctatggattctgaagaa

SEQ ID NO: 674814 - DNA, 19 bp, Mus musculus
  siRNA target sequence for Cul2 (NM_029402.1,1577-1595).
gcaagctgcatcgaatgta

SEQ ID NO: 674815 - DNA, 19 bp, Mus musculus
  siRNA target sequence for Cul2 (NM_029402.1,1578-1596).
caagctgcatcgaatgtat

SEQ ID NO: 674816 - DNA, 19 bp, Mus musculus
  siRNA target sequence for Cul2 (NM_029402.1,1581-1599).
gctgcatcgaatgtataca

SEQ ID NO: 674817 - DNA, 19 bp, Mus musculus
  siRNA target sequence for Cul2 (NM_029402.1,1607-1625).
gtgtcagcgctgatttgaa

SEQ ID NO: 674818 - DNA, 19 bp, Mus musculus
  siRNA target sequence for Cul2 (NM_029402.1,1609-1627).
gtcagcgctgatttgaaca

SEQ ID NO: 674819 - DNA, 19 bp, Mus musculus
  siRNA target sequence for Cul2 (NM_029402.1,1613-1631).
gcgctgatttgaacaataa

SEQ ID NO: 674820 - DNA, 19 bp, Mus musculus
  siRNA target sequence for Cul2 (NM_029402.1,1674-1692).
ggggattagtttccaaata

SEQ ID NO: 674821 - DNA, 19 bp, Mus musculus
  siRNA target sequence for Cul2 (NM_029402.1,1676-1694).
ggattagtttccaaatata

SEQ ID NO: 674822 - DNA, 19 bp, Mus musculus
  siRNA target sequence for Cul2 (NM_029402.1,1677-1695).
gattagtttccaaatatat

SEQ ID NO: 674823 - DNA, 19 bp, Mus musculus
  siRNA target sequence for Cul2 (NM_029402.1,1755-1773).
ccaagagctagagaaaagt

SEQ ID NO: 674824 - DNA, 19 bp, Mus musculus
  siRNA target sequence for Cul2 (NM_029402.1,1844-1862).
gtacaggtgaagttaaaat

SEQ ID NO: 674825 - DNA, 19 bp, Mus musculus
  siRNA target sequence for Cul2 (NM_029402.1,1849-1867).
ggtgaagttaaaatgaact

SEQ ID NO: 674826 - DNA, 19 bp, Mus musculus
  siRNA target sequence for Cul2 (NM_029402.1,1850-1868).
gtgaagttaaaatgaacta

SEQ ID NO: 674827 - DNA, 19 bp, Mus musculus
  siRNA target sequence for Cul2 (NM_029402.1,1866-1884).
ctatttgggaaaaccatat

SEQ ID NO: 674828 - DNA, 19 bp, Mus musculus
  siRNA target sequence for Cul2 (NM_029402.1,1874-1892).
gaaaaccatatgtagctat

SEQ ID NO: 674829 - DNA, 19 bp, Mus musculus
  siRNA target sequence for Cul2 (NM_029402.1,1879-1897).
ccatatgtagctatggtta

SEQ ID NO: 674830 - DNA, 19 bp, Mus musculus
  siRNA target sequence for Cul2 (NM_029402.1,1905-1923).
ccaaatggcagttcttctt

SEQ ID NO: 674831 - DNA, 19 bp, Mus musculus
  siRNA target sequence for Cul2 (NM_029402.1,2012-2030).
cattacttgatgtgaaaat

SEQ ID NO: 674832 - DNA, 19 bp, Mus musculus
  siRNA target sequence for Cul2 (NM_029402.1,2031-2049).
gattaaccatgattcagaa

SEQ ID NO: 674833 - DNA, 19 bp, Mus musculus
  siRNA target sequence for Cul2 (NM_029402.1,2056-2074).
gatatcgatgcagaatctt

SEQ ID NO: 674834 - DNA, 19 bp, Mus musculus
  siRNA target sequence for Cul2 (NM_029402.1,2143-2161).
gatacgccacaagtaatca

SEQ ID NO: 674835 - DNA, 19 bp, Mus musculus
  siRNA target sequence for Cul2 (NM_029402.1,2186-2204).
ccagtatcagcatgattaa

SEQ ID NO: 674836 - DNA, 19 bp, Mus musculus
  siRNA target sequence for Cul2 (NM_029402.1,2189-2207).
gtatcagcatgattaagaa

SEQ ID NO: 674837 - DNA, 19 bp, Mus musculus
  siRNA target sequence for Cul2 (NM_029402.1,2210-2228).
gcatagaagttctgataga

SEQ ID NO: 674838 - DNA, 19 bp, Mus musculus
  siRNA target sequence for Cul2 (NM_029402.1,2258-2276).
ctgcagatgaatacagtta

SEQ ID NO: 674839 - DNA, 19 bp, Mus musculus
  siRNA target sequence for Cul3 (NM_016716.2,215-233).
ccatggatgaaaaatatgt

SEQ ID NO: 674840 - DNA, 19 bp, Mus musculus
  siRNA target sequence for Cul3 (NM_016716.2,309-327).
ggagctctatagaaatgca

SEQ ID NO: 674841 - DNA, 19 bp, Mus musculus
  siRNA target sequence for Cul3 (NM_016716.2,310-328).
gagctctatagaaatgcat

SEQ ID NO: 674842 - DNA, 19 bp, Mus musculus
  siRNA target sequence for Cul3 (NM_016716.2,313-331).
ctctatagaaatgcatata

SEQ ID NO: 674843 - DNA, 19 bp, Mus musculus
  siRNA target sequence for Cul3 (NM_016716.2,326-344).
catatacaatggttttgca

SEQ ID NO: 674844 - DNA, 19 bp, Mus musculus
  siRNA target sequence for Cul3 (NM_016716.2,360-378).
gctctacactggactaaga

SEQ ID NO: 674845 - DNA, 19 bp, Mus musculus
  siRNA target sequence for Cul3 (NM_016716.2,368-386).
ctggactaagagaagttgt

SEQ ID NO: 674846 - DNA, 19 bp, Mus musculus
  siRNA target sequence for Cul3 (NM_016716.2,370-388).
ggactaagagaagttgtta

SEQ ID NO: 674847 - DNA, 19 bp, Mus musculus
  siRNA target sequence for Cul3 (NM_016716.2,385-403).
gttactgaacatctcataa

SEQ ID NO: 674848 - DNA, 19 bp, Mus musculus
  siRNA target sequence for Cul3 (NM_016716.2,418-436).
gatgtactaaattcattga

SEQ ID NO: 674849 - DNA, 19 bp, Mus musculus
  siRNA target sequence for Cul3 (NM_016716.2,527-545).
gtgtatatgtacaacagaa

SEQ ID NO: 674850 - DNA, 19 bp, Mus musculus
  siRNA target sequence for Cul3 (NM_016716.2,570-588).
gggattaataatttttcga

SEQ ID NO: 674851 - DNA, 19 bp, Mus musculus
  siRNA target sequence for Cul3 (NM_016716.2,608-626).
ggtgtattagggatcatct

SEQ ID NO: 674852 - DNA, 19 bp, Mus musculus
  siRNA target sequence for Cul3 (NM_016716.2,609-627).
gtgtattagggatcatctt

SEQ ID NO: 674853 - DNA, 19 bp, Mus musculus
  siRNA target sequence for Cul3 (NM_016716.2,619-637).
gatcatcttcggcaaactt

SEQ ID NO: 674854 - DNA, 19 bp, Mus musculus
  siRNA target sequence for Cul3 (NM_016716.2,628-646).
cggcaaactttattggata

SEQ ID NO: 674855 - DNA, 19 bp, Mus musculus
  siRNA target sequence for Cul3 (NM_016716.2,676-694).
gtagacagaggagcaataa

SEQ ID NO: 674856 - DNA, 19 bp, Mus musculus
  siRNA target sequence for Cul3 (NM_016716.2,685-703).
ggagcaataagaaatgctt

SEQ ID NO: 674857 - DNA, 19 bp, Mus musculus
  siRNA target sequence for Cul3 (NM_016716.2,740-758).
cagtctatgaggaagattt

SEQ ID NO: 674858 - DNA, 19 bp, Mus musculus
  siRNA target sequence for Cul3 (NM_016716.2,782-800).
ctgcagaattttttcagat

SEQ ID NO: 674859 - DNA, 19 bp, Mus musculus
  siRNA target sequence for Cul3 (NM_016716.2,832-850).
gcttcagtatatataaaga

SEQ ID NO: 674860 - DNA, 19 bp, Mus musculus
  siRNA target sequence for Cul3 (NM_016716.2,937-955).
gagagggaactcatttcca

SEQ ID NO: 674861 - DNA, 19 bp, Mus musculus
  siRNA target sequence for Cul3 (NM_016716.2,957-975).
gcacatgaagactattgta

SEQ ID NO: 674862 - DNA, 19 bp, Mus musculus
  siRNA target sequence for Cul3 (NM_016716.2,960-978).
catgaagactattgtagaa

SEQ ID NO: 674863 - DNA, 19 bp, Mus musculus
  siRNA target sequence for Cul3 (NM_016716.2,989-1007).
ctgggctagtacatatgct

SEQ ID NO: 674864 - DNA, 19 bp, Mus musculus
  siRNA target sequence for Cul3 (NM_016716.2,1027-1045).
gaccttgcttgcatgtaca

SEQ ID NO: 674865 - DNA, 19 bp, Mus musculus
  siRNA target sequence for Cul3 (NM_016716.2,1055-1073).
gtcgtgtgccaaatggttt

SEQ ID NO: 674866 - DNA, 19 bp, Mus musculus
  siRNA target sequence for Cul3 (NM_016716.2,1060-1078).
gtgccaaatggtttgaaga

SEQ ID NO: 674867 - DNA, 19 bp, Mus musculus
  siRNA target sequence for Cul3 (NM_016716.2,1087-1105).
gaatgtatgagttgttatt

SEQ ID NO: 674868 - DNA, 19 bp, Mus musculus
  siRNA target sequence for Cul3 (NM_016716.2,1171-1189).
cagggcttattggatctaa

SEQ ID NO: 674869 - DNA, 19 bp, Mus musculus
  siRNA target sequence for Cul3 (NM_016716.2,1182-1200).
ggatctaaagagtaggttt

SEQ ID NO: 674870 - DNA, 19 bp, Mus musculus
  siRNA target sequence for Cul3 (NM_016716.2,1210-1228).
ctccaagaatccttcaata

SEQ ID NO: 674871 - DNA, 19 bp, Mus musculus
  siRNA target sequence for Cul3 (NM_016716.2,1231-1249).
gaccggctctttaaacaga

SEQ ID NO: 674872 - DNA, 19 bp, Mus musculus
  siRNA target sequence for Cul3 (NM_016716.2,1236-1254).
gctctttaaacagactatt

SEQ ID NO: 674873 - DNA, 19 bp, Mus musculus
  siRNA target sequence for Cul3 (NM_016716.2,1239-1257).
ctttaaacagactattgct

SEQ ID NO: 674874 - DNA, 19 bp, Mus musculus
  siRNA target sequence for Cul3 (NM_016716.2,1258-1276).
ggggacttcgagtatttct

SEQ ID NO: 674875 - DNA, 19 bp, Mus musculus
  siRNA target sequence for Cul3 (NM_016716.2,1259-1277).
gggacttcgagtatttctt

SEQ ID NO: 674876 - DNA, 19 bp, Mus musculus
  siRNA target sequence for Cul3 (NM_016716.2,1260-1278).
ggacttcgagtatttctta

SEQ ID NO: 674877 - DNA, 19 bp, Mus musculus
  siRNA target sequence for Cul3 (NM_016716.2,1261-1279).
gacttcgagtatttcttaa

SEQ ID NO: 674878 - DNA, 19 bp, Mus musculus
  siRNA target sequence for Cul3 (NM_016716.2,1295-1313).
ctcctgaatacctctcatt

SEQ ID NO: 674879 - DNA, 19 bp, Mus musculus
  siRNA target sequence for Cul3 (NM_016716.2,1297-1315).
cctgaatacctctcattat

SEQ ID NO: 674880 - DNA, 19 bp, Mus musculus
  siRNA target sequence for Cul3 (NM_016716.2,1340-1358).
gagtcaaagggctaacaga

SEQ ID NO: 674881 - DNA, 19 bp, Mus musculus
  siRNA target sequence for Cul3 (NM_016716.2,1366-1384).
gtagaaacaatattggata

SEQ ID NO: 674882 - DNA, 19 bp, Mus musculus
  siRNA target sequence for Cul3 (NM_016716.2,1387-1405).
gcaatggtcctttttaggt

SEQ ID NO: 674883 - DNA, 19 bp, Mus musculus
  siRNA target sequence for Cul3 (NM_016716.2,1420-1438).
gatgtatttgaacgttatt

SEQ ID NO: 674884 - DNA, 19 bp, Mus musculus
  siRNA target sequence for Cul3 (NM_016716.2,1506-1524).
gatttctaaattaaagact

SEQ ID NO: 674885 - DNA, 19 bp, Mus musculus
  siRNA target sequence for Cul3 (NM_016716.2,1521-1539).
gactgagtgtggatgtcaa

SEQ ID NO: 674886 - DNA, 19 bp, Mus musculus
  siRNA target sequence for Cul3 (NM_016716.2,1558-1576).
ggaatgtttagggatatga

SEQ ID NO: 674887 - DNA, 19 bp, Mus musculus
  siRNA target sequence for Cul3 (NM_016716.2,1570-1588).
gatatgagcatctcaaaca

SEQ ID NO: 674888 - DNA, 19 bp, Mus musculus
  siRNA target sequence for Cul3 (NM_016716.2,1577-1595).
gcatctcaaacacaactat

SEQ ID NO: 674889 - DNA, 19 bp, Mus musculus
  siRNA target sequence for Cul3 (NM_016716.2,1581-1599).
ctcaaacacaactatggat

SEQ ID NO: 674890 - DNA, 19 bp, Mus musculus
  siRNA target sequence for Cul3 (NM_016716.2,1620-1638).
ggcaacgggggtctcttta

SEQ ID NO: 674891 - DNA, 19 bp, Mus musculus
  siRNA target sequence for Cul3 (NM_016716.2,1634-1652).
ctttaggtggtgttgatct

SEQ ID NO: 674892 - DNA, 19 bp, Mus musculus
  siRNA target sequence for Cul3 (NM_016716.2,1721-1739).
cagcaccaagacatgcttt

SEQ ID NO: 674893 - DNA, 19 bp, Mus musculus
  siRNA target sequence for Cul3 (NM_016716.2,1873-1891).
gttggcggtgcacaagtaa

SEQ ID NO: 674894 - DNA, 19 bp, Mus musculus
  siRNA target sequence for Cul3 (NM_016716.2,1885-1903).
caagtaactggttctaata

SEQ ID NO: 674895 - DNA, 19 bp, Mus musculus
  siRNA target sequence for Cul3 (NM_016716.2,2043-2061).
cctcgcctgtggtaaacca

SEQ ID NO: 674896 - DNA, 19 bp, Mus musculus
  siRNA target sequence for Cul3 (NM_016716.2,2044-2062).
ctcgcctgtggtaaaccaa

SEQ ID NO: 674897 - DNA, 19 bp, Mus musculus
  siRNA target sequence for Cul3 (NM_016716.2,2067-2085).
gcgggtcctcacaaaagaa

SEQ ID NO: 674898 - DNA, 19 bp, Mus musculus
  siRNA target sequence for Cul3 (NM_016716.2,2108-2126).
gtggccacatatttacagt

SEQ ID NO: 674899 - DNA, 19 bp, Mus musculus
  siRNA target sequence for Cul3 (NM_016716.2,2110-2128).
ggccacatatttacagtta

SEQ ID NO: 674900 - DNA, 19 bp, Mus musculus
  siRNA target sequence for Cul3 (NM_016716.2,2115-2133).
catatttacagttaatgat

SEQ ID NO: 674901 - DNA, 19 bp, Mus musculus
  siRNA target sequence for Cul3 (NM_016716.2,2350-2368).
ccaagtccagttgttatta

SEQ ID NO: 674902 - DNA, 19 bp, Mus musculus
  siRNA target sequence for Cul3 (NM_016716.2,2354-2372).
gtccagttgttattaagaa

SEQ ID NO: 674903 - DNA, 19 bp, Mus musculus
  siRNA target sequence for Cul3 (NM_016716.2,2359-2377).
gttgttattaagaaacgta

SEQ ID NO: 674904 - DNA, 19 bp, Mus musculus
  siRNA target sequence for Cul3 (NM_016716.2,2383-2401).
ggacttattgagagagaat

SEQ ID NO: 674905 - DNA, 19 bp, Mus musculus
  siRNA target sequence for Cul3 (NM_016716.2,2386-2404).
cttattgagagagaatatt

SEQ ID NO: 674906 - DNA, 19 bp, Mus musculus
  siRNA target sequence for Cul3 (NM_016716.2,2416-2434).
cctgaggatcgcaaagtat

SEQ ID NO: 674907 - DNA, 19 bp, Mus musculus
  siRNA target sequence for Cul3 (NM_016716.2,2419-2437).
gaggatcgcaaagtataca

SEQ ID NO: 674908 - DNA, 19 bp, Mus musculus
  siRNA target sequence for Cul3 (NM_016716.2,2421-2439).
ggatcgcaaagtatacaca

SEQ ID NO: 674909 - DNA, 19 bp, Mus musculus
  siRNA target sequence for Cul3 (NM_016716.2,2422-2440).
gatcgcaaagtatacacat

SEQ ID NO: 674910 - DNA, 19 bp, Mus musculus
  siRNA target sequence for Cul4a (NM_146207.1,577-595).
gcagagtaagaccattgat

SEQ ID NO: 674911 - DNA, 19 bp, Mus musculus
  siRNA target sequence for Cul4a (NM_146207.1,722-740).
gaagagactaactgtctat

SEQ ID NO: 674912 - DNA, 19 bp, Mus musculus
  siRNA target sequence for Cul4a (NM_146207.1,856-874).
cacacaaaaaccgttgatt

SEQ ID NO: 674913 - DNA, 19 bp, Mus musculus
  siRNA target sequence for Cul4a (NM_146207.1,895-913).
gttaggagaacatttgaca

SEQ ID NO: 674914 - DNA, 19 bp, Mus musculus
  siRNA target sequence for Cul4a (NM_146207.1,963-981).
ccgacctcacccagatgta

SEQ ID NO: 674915 - DNA, 19 bp, Mus musculus
  siRNA target sequence for Cul4a (NM_146207.1,1056-1074).
gaacaaccattgtcatcaa

SEQ ID NO: 674916 - DNA, 19 bp, Mus musculus
  siRNA target sequence for Cul4a (NM_146207.1,1158-1176).
ggaacgagcgcttcatcaa

SEQ ID NO: 674917 - DNA, 19 bp, Mus musculus
  siRNA target sequence for Cul4a (NM_146207.1,1309-1327).
cctggacaagatcatgatt

SEQ ID NO: 674918 - DNA, 19 bp, Mus musculus
  siRNA target sequence for Cul4a (NM_146207.1,1333-1351).
ccgtttcatccatggtaaa

SEQ ID NO: 674919 - DNA, 19 bp, Mus musculus
  siRNA target sequence for Cul4a (NM_146207.1,1335-1353).
gtttcatccatggtaaaga

SEQ ID NO: 674920 - DNA, 19 bp, Mus musculus
  siRNA target sequence for Cul4a (NM_146207.1,1580-1598).
ctcacggtgaacatactca

SEQ ID NO: 674921 - DNA, 19 bp, Mus musculus
  siRNA target sequence for Cul4a (NM_146207.1,1659-1677).
gacttcaggaagtattcaa

SEQ ID NO: 674922 - DNA, 19 bp, Mus musculus
  siRNA target sequence for Cul4a (NM_146207.1,1742-1760).
gtgctgaaggcggacttta

SEQ ID NO: 674923 - DNA, 19 bp, Mus musculus
  siRNA target sequence for Cul4a (NM_146207.1,1833-1851).
gatttagctttgaagaaat

SEQ ID NO: 674924 - DNA, 19 bp, Mus musculus
  siRNA target sequence for Cul4a (NM_146207.1,1876-1894).
cagtgagttgcgaagaaca

SEQ ID NO: 674925 - DNA, 19 bp, Mus musculus
  siRNA target sequence for Cul4a (NM_146207.1,1914-1932).
gtaaagcacgggtcctaat

SEQ ID NO: 674926 - DNA, 19 bp, Mus musculus
  siRNA target sequence for Cul4a (NM_146207.1,1919-1937).
gcacgggtcctaattaaaa

SEQ ID NO: 674927 - DNA, 19 bp, Mus musculus
  siRNA target sequence for Cul4a (NM_146207.1,1965-1983).
gagataagttcatcttcaa

SEQ ID NO: 674928 - DNA, 19 bp, Mus musculus
  siRNA target sequence for Cul4a (NM_146207.1,1997-2015).
cacaagttgttcagaataa

SEQ ID NO: 674929 - DNA, 19 bp, Mus musculus
  siRNA target sequence for Cul4a (NM_146207.1,2035-2053).
gaaggagaccgttgaagaa

SEQ ID NO: 674930 - DNA, 19 bp, Mus musculus
  siRNA target sequence for Cul4a (NM_146207.1,2095-2113).
ccagatcgacgctgctata

SEQ ID NO: 674931 - DNA, 19 bp, Mus musculus
  siRNA target sequence for Cul4a (NM_146207.1,2104-2122).
cgctgctatagtcagaata

SEQ ID NO: 674932 - DNA, 19 bp, Mus musculus
  siRNA target sequence for Cul4a (NM_146207.1,2137-2155).
gacacttggtcataatctt

SEQ ID NO: 674933 - DNA, 19 bp, Mus musculus
  siRNA target sequence for Cul4a (NM_146207.1,2217-2235).
ggattgagtcacttataga

SEQ ID NO: 674934 - DNA, 19 bp, Mus musculus
  siRNA target sequence for Cul4a (NM_146207.1,2242-2260).
ctatatggaacgagacaaa

SEQ ID NO: 674935 - DNA, 19 bp, Mus musculus
  siRNA target sequence for Cul4b (NM_028288.3,81-99).
gttcaactaggtctaaaga

SEQ ID NO: 674936 - DNA, 19 bp, Mus musculus
  siRNA target sequence for Cul4b (NM_028288.3,118-136).
cgactcagaagataacagt

SEQ ID NO: 674937 - DNA, 19 bp, Mus musculus
  siRNA target sequence for Cul4b (NM_028288.3,138-156).
cggaaacctccaatcaaga

SEQ ID NO: 674938 - DNA, 19 bp, Mus musculus
  siRNA target sequence for Cul4b (NM_028288.3,296-314).
ccaggcacttccggttttt

SEQ ID NO: 674939 - DNA, 19 bp, Mus musculus
  siRNA target sequence for Cul4b (NM_028288.3,365-383).
gccactgatggtaatacca

SEQ ID NO: 674940 - DNA, 19 bp, Mus musculus
  siRNA target sequence for Cul4b (NM_028288.3,450-468).
gtaacgagagagaagactt

SEQ ID NO: 674941 - DNA, 19 bp, Mus musculus
  siRNA target sequence for Cul4b (NM_028288.3,561-579).
cttccagccacgtacctat

SEQ ID NO: 674942 - DNA, 19 bp, Mus musculus
  siRNA target sequence for Cul4b (NM_028288.3,567-585).
gccacgtacctatacagaa

SEQ ID NO: 674943 - DNA, 19 bp, Mus musculus
  siRNA target sequence for Cul4b (NM_028288.3,583-601).
gaagaagctgcggtttgaa

SEQ ID NO: 674944 - DNA, 19 bp, Mus musculus
  siRNA target sequence for Cul4b (NM_028288.3,610-628).
ggagtttgtagggattgat

SEQ ID NO: 674945 - DNA, 19 bp, Mus musculus
  siRNA target sequence for Cul4b (NM_028288.3,611-629).
gagtttgtagggattgata

SEQ ID NO: 674946 - DNA, 19 bp, Mus musculus
  siRNA target sequence for Cul4b (NM_028288.3,617-635).
gtagggattgatacgaaaa

SEQ ID NO: 674947 - DNA, 19 bp, Mus musculus
  siRNA target sequence for Cul4b (NM_028288.3,710-728).
caacttaaaactaagagta

SEQ ID NO: 674948 - DNA, 19 bp, Mus musculus
  siRNA target sequence for Cul4b (NM_028288.3,713-731).
cttaaaactaagagtatat

SEQ ID NO: 674949 - DNA, 19 bp, Mus musculus
  siRNA target sequence for Cul4b (NM_028288.3,766-784).
cggcctggctaaatcttct

SEQ ID NO: 674950 - DNA, 19 bp, Mus musculus
  siRNA target sequence for Cul4b (NM_028288.3,767-785).
ggcctggctaaatcttcta

SEQ ID NO: 674951 - DNA, 19 bp, Mus musculus
  siRNA target sequence for Cul4b (NM_028288.3,788-806).
gcggtctctagctttgcta

SEQ ID NO: 674952 - DNA, 19 bp, Mus musculus
  siRNA target sequence for Cul4b (NM_028288.3,789-807).
cggtctctagctttgctaa

SEQ ID NO: 674953 - DNA, 19 bp, Mus musculus
  siRNA target sequence for Cul4b (NM_028288.3,817-835).
cggctcagctaagaagtta

SEQ ID NO: 674954 - DNA, 19 bp, Mus musculus
  siRNA target sequence for Cul4b (NM_028288.3,819-837).
gctcagctaagaagttagt

SEQ ID NO: 674955 - DNA, 19 bp, Mus musculus
  siRNA target sequence for Cul4b (NM_028288.3,822-840).
cagctaagaagttagtgat

SEQ ID NO: 674956 - DNA, 19 bp, Mus musculus
  siRNA target sequence for Cul4b (NM_028288.3,832-850).
gttagtgatcaagaacttt

SEQ ID NO: 674957 - DNA, 19 bp, Mus musculus
  siRNA target sequence for Cul4b (NM_028288.3,920-938).
gccattcagaatagtactt

SEQ ID NO: 674958 - DNA, 19 bp, Mus musculus
  siRNA target sequence for Cul4b (NM_028288.3,933-951).
gtacttcaattaagtacaa

SEQ ID NO: 674959 - DNA, 19 bp, Mus musculus
  siRNA target sequence for Cul4b (NM_028288.3,1018-1036).
gcagctgaggcagatatgt

SEQ ID NO: 674960 - DNA, 19 bp, Mus musculus
  siRNA target sequence for Cul4b (NM_028288.3,1075-1093).
ggattcattggatagtgtt

SEQ ID NO: 674961 - DNA, 19 bp, Mus musculus
  siRNA target sequence for Cul4b (NM_028288.3,1085-1103).
gatagtgttctttttctca

SEQ ID NO: 674962 - DNA, 19 bp, Mus musculus
  siRNA target sequence for Cul4b (NM_028288.3,1100-1118).
ctcaaaaagatcgatagat

SEQ ID NO: 674963 - DNA, 19 bp, Mus musculus
  siRNA target sequence for Cul4b (NM_028288.3,1129-1147).
ccactgtaggcaaatgata

SEQ ID NO: 674964 - DNA, 19 bp, Mus musculus
  siRNA target sequence for Cul4b (NM_028288.3,1218-1236).
gggacatgggattagagtt

SEQ ID NO: 674965 - DNA, 19 bp, Mus musculus
  siRNA target sequence for Cul4b (NM_028288.3,1220-1238).
gacatgggattagagttat

SEQ ID NO: 674966 - DNA, 19 bp, Mus musculus
  siRNA target sequence for Cul4b (NM_028288.3,1222-1240).
catgggattagagttattt

SEQ ID NO: 674967 - DNA, 19 bp, Mus musculus
  siRNA target sequence for Cul4b (NM_028288.3,1247-1265).
catattataagtgatcaaa

SEQ ID NO: 674968 - DNA, 19 bp, Mus musculus
  siRNA target sequence for Cul4b (NM_028288.3,1290-1308).
gcatccttctcttgattga

SEQ ID NO: 674969 - DNA, 19 bp, Mus musculus
  siRNA target sequence for Cul4b (NM_028288.3,1315-1333).
gcggaatggtgaagcaatt

SEQ ID NO: 674970 - DNA, 19 bp, Mus musculus
  siRNA target sequence for Cul4b (NM_028288.3,1317-1335).
ggaatggtgaagcaattga

SEQ ID NO: 674971 - DNA, 19 bp, Mus musculus
  siRNA target sequence for Cul4b (NM_028288.3,1318-1336).
gaatggtgaagcaattgat

SEQ ID NO: 674972 - DNA, 19 bp, Mus musculus
  siRNA target sequence for Cul4b (NM_028288.3,1322-1340).
ggtgaagcaattgatagaa

SEQ ID NO: 674973 - DNA, 19 bp, Mus musculus
  siRNA target sequence for Cul4b (NM_028288.3,1325-1343).
gaagcaattgatagaagtt

SEQ ID NO: 674974 - DNA, 19 bp, Mus musculus
  siRNA target sequence for Cul4b (NM_028288.3,1329-1347).
caattgatagaagtttact

SEQ ID NO: 674975 - DNA, 19 bp, Mus musculus
  siRNA target sequence for Cul4b (NM_028288.3,1346-1364).
cttcgaagccttttaagta

SEQ ID NO: 674976 - DNA, 19 bp, Mus musculus
  siRNA target sequence for Cul4b (NM_028288.3,1366-1384).
gctgtctgatttgcaaatt

SEQ ID NO: 674977 - DNA, 19 bp, Mus musculus
  siRNA target sequence for Cul4b (NM_028288.3,1437-1455).
cagccgaaggtcagaagtt

SEQ ID NO: 674978 - DNA, 19 bp, Mus musculus
  siRNA target sequence for Cul4b (NM_028288.3,1439-1457).
gccgaaggtcagaagttaa

SEQ ID NO: 674979 - DNA, 19 bp, Mus musculus
  siRNA target sequence for Cul4b (NM_028288.3,1440-1458).
ccgaaggtcagaagttaat

SEQ ID NO: 674980 - DNA, 19 bp, Mus musculus
  siRNA target sequence for Cul4b (NM_028288.3,1517-1535).
gctgacagacttattactt

SEQ ID NO: 674981 - DNA, 19 bp, Mus musculus
  siRNA target sequence for Cul4b (NM_028288.3,1518-1536).
ctgacagacttattactta

SEQ ID NO: 674982 - DNA, 19 bp, Mus musculus
  siRNA target sequence for Cul4b (NM_028288.3,1520-1538).
gacagacttattacttact

SEQ ID NO: 674983 - DNA, 19 bp, Mus musculus
  siRNA target sequence for Cul4b (NM_028288.3,1524-1542).
gacttattacttacttaga

SEQ ID NO: 674984 - DNA, 19 bp, Mus musculus
  siRNA target sequence for Cul4b (NM_028288.3,1606-1624).
ggcaattcttcaaaaaggt

SEQ ID NO: 674985 - DNA, 19 bp, Mus musculus
  siRNA target sequence for Cul4b (NM_028288.3,1608-1626).
caattcttcaaaaaggttt

SEQ ID NO: 674986 - DNA, 19 bp, Mus musculus
  siRNA target sequence for Cul4b (NM_028288.3,1701-1719).
gagttcaggttctcttaca

SEQ ID NO: 674987 - DNA, 19 bp, Mus musculus
  siRNA target sequence for Cul4b (NM_028288.3,1741-1759).
ggcttttggaagtaccatt

SEQ ID NO: 674988 - DNA, 19 bp, Mus musculus
  siRNA target sequence for Cul4b (NM_028288.3,1748-1766).
ggaagtaccattgttatta

SEQ ID NO: 674989 - DNA, 19 bp, Mus musculus
  siRNA target sequence for Cul4b (NM_028288.3,1749-1767).
gaagtaccattgttattaa

SEQ ID NO: 674990 - DNA, 19 bp, Mus musculus
  siRNA target sequence for Cul4b (NM_028288.3,1793-1811).
caagaattattggacttta

SEQ ID NO: 674991 - DNA, 19 bp, Mus musculus
  siRNA target sequence for Cul4b (NM_028288.3,1919-1937).
ccagctgaactgatagcta

SEQ ID NO: 674992 - DNA, 19 bp, Mus musculus
  siRNA target sequence for Cul4b (NM_028288.3,1920-1938).
cagctgaactgatagctaa

SEQ ID NO: 674993 - DNA, 19 bp, Mus musculus
  siRNA target sequence for Cul4b (NM_028288.3,1934-1952).
gctaagtatgtggattcaa

SEQ ID NO: 674994 - DNA, 19 bp, Mus musculus
  siRNA target sequence for Cul4b (NM_028288.3,1935-1953).
ctaagtatgtggattcaaa

SEQ ID NO: 674995 - DNA, 19 bp, Mus musculus
  siRNA target sequence for Cul4b (NM_028288.3,2048-2066).
gtttttgaggccttctata

SEQ ID NO: 674996 - DNA, 19 bp, Mus musculus
  siRNA target sequence for Cul4b (NM_028288.3,2150-2168).
gaatgtggagccgctttta

SEQ ID NO: 674997 - DNA, 19 bp, Mus musculus
  siRNA target sequence for Cul4b (NM_028288.3,2213-2231).
gatatcatgattcagttta

SEQ ID NO: 674998 - DNA, 19 bp, Mus musculus
  siRNA target sequence for Cul4b (NM_028288.3,2258-2276).
cctggcaatattgaattaa

SEQ ID NO: 674999 - DNA, 19 bp, Mus musculus
  siRNA target sequence for Cul4b (NM_028288.3,2296-2314).
gggttactggccaacatat

SEQ ID NO: 675000 - DNA, 19 bp, Mus musculus
  siRNA target sequence for Cul4b (NM_028288.3,2338-2356).
gccagagatggtaaagctt

SEQ ID NO: 675001 - DNA, 19 bp, Mus musculus
  siRNA target sequence for Cul4b (NM_028288.3,2560-2578).
gatagaggatggagaatta

SEQ ID NO: 675002 - DNA, 19 bp, Mus musculus
  siRNA target sequence for Cul4b (NM_028288.3,2658-2676).
gtgacaaatttatttgtaa

SEQ ID NO: 675003 - DNA, 19 bp, Mus musculus
  siRNA target sequence for Cul4b (NM_028288.3,2673-2691).
gtaatgacgatttcaaaca

SEQ ID NO: 675004 - DNA, 19 bp, Mus musculus
  siRNA target sequence for Cul4b (NM_028288.3,2680-2698).
cgatttcaaacacaaacta

SEQ ID NO: 675005 - DNA, 19 bp, Mus musculus
  siRNA target sequence for Cul4b (NM_028288.3,2690-2708).
cacaaactattcaggataa

SEQ ID NO: 675006 - DNA, 19 bp, Mus musculus
  siRNA target sequence for Cul4b (NM_028288.3,2798-2816).
gctgcgatcgttcgaatta

SEQ ID NO: 675007 - DNA, 19 bp, Mus musculus
  siRNA target sequence for Cul4b (NM_028288.3,2799-2817).
ctgcgatcgttcgaattat

SEQ ID NO: 675008 - DNA, 19 bp, Mus musculus
  siRNA target sequence for Cul4b (NM_028288.3,2801-2819).
gcgatcgttcgaattatga

SEQ ID NO: 675009 - DNA, 19 bp, Mus musculus
  siRNA target sequence for Cul4b (NM_028288.3,2802-2820).
cgatcgttcgaattatgaa

SEQ ID NO: 675010 - DNA, 19 bp, Mus musculus
  siRNA target sequence for Cul4b (NM_028288.3,2885-2903).
gttaaacctgctgatctta

SEQ ID NO: 675011 - DNA, 19 bp, Mus musculus
  siRNA target sequence for Cul4b (NM_028288.3,2927-2945).
gaccgggactacatggaaa

SEQ ID NO: 675012 - DNA, 19 bp, Mus musculus
  siRNA target sequence for Cul4b (NM_028288.3,2933-2951).
gactacatggaaagagata

SEQ ID NO: 675013 - DNA, 19 bp, Mus musculus
  siRNA target sequence for Cul4b (NM_028288.3,2966-2984).
cagtacaactatattgcat

SEQ ID NO: 675014 - DNA, 19 bp, Mus musculus
  siRNA target sequence for Cul5 (NM_027807.1,420-438).
ggcgacgtctaatctgtta

SEQ ID NO: 675015 - DNA, 19 bp, Mus musculus
  siRNA target sequence for Cul5 (NM_027807.1,421-439).
gcgacgtctaatctgttaa

SEQ ID NO: 675016 - DNA, 19 bp, Mus musculus
  siRNA target sequence for Cul5 (NM_027807.1,422-440).
cgacgtctaatctgttaaa

SEQ ID NO: 675017 - DNA, 19 bp, Mus musculus
  siRNA target sequence for Cul5 (NM_027807.1,425-443).
cgtctaatctgttaaagaa

SEQ ID NO: 675018 - DNA, 19 bp, Mus musculus
  siRNA target sequence for Cul5 (NM_027807.1,426-444).
gtctaatctgttaaagaat

SEQ ID NO: 675019 - DNA, 19 bp, Mus musculus
  siRNA target sequence for Cul5 (NM_027807.1,473-491).
gggacttcatgcatccaat

SEQ ID NO: 675020 - DNA, 19 bp, Mus musculus
  siRNA target sequence for Cul5 (NM_027807.1,477-495).
cttcatgcatccaattgtt

SEQ ID NO: 675021 - DNA, 19 bp, Mus musculus
  siRNA target sequence for Cul5 (NM_027807.1,529-547).
cagcagtggtttgatctat

SEQ ID NO: 675022 - DNA, 19 bp, Mus musculus
  siRNA target sequence for Cul5 (NM_027807.1,531-549).
gcagtggtttgatctattt

SEQ ID NO: 675023 - DNA, 19 bp, Mus musculus
  siRNA target sequence for Cul5 (NM_027807.1,532-550).
cagtggtttgatctatttt

SEQ ID NO: 675024 - DNA, 19 bp, Mus musculus
  siRNA target sequence for Cul5 (NM_027807.1,577-595).
gatgataaaggctcatcaa

SEQ ID NO: 675025 - DNA, 19 bp, Mus musculus
  siRNA target sequence for Cul5 (NM_027807.1,580-598).
gataaaggctcatcaaaaa

SEQ ID NO: 675026 - DNA, 19 bp, Mus musculus
  siRNA target sequence for Cul5 (NM_027807.1,587-605).
gctcatcaaaaattcatca

SEQ ID NO: 675027 - DNA, 19 bp, Mus musculus
  siRNA target sequence for Cul5 (NM_027807.1,653-671).
gtgtactgagccatcaaga

SEQ ID NO: 675028 - DNA, 19 bp, Mus musculus
  siRNA target sequence for Cul5 (NM_027807.1,700-718).
gttgaatggcggaaattct

SEQ ID NO: 675029 - DNA, 19 bp, Mus musculus
  siRNA target sequence for Cul5 (NM_027807.1,703-721).
gaatggcggaaattcttca

SEQ ID NO: 675030 - DNA, 19 bp, Mus musculus
  siRNA target sequence for Cul5 (NM_027807.1,726-744).
gtgtgatattttaccaaaa

SEQ ID NO: 675031 - DNA, 19 bp, Mus musculus
  siRNA target sequence for Cul5 (NM_027807.1,754-772).
caattagaggtgactctat

SEQ ID NO: 675032 - DNA, 19 bp, Mus musculus
  siRNA target sequence for Cul5 (NM_027807.1,823-841).
cgaaagctcatgcttgata

SEQ ID NO: 675033 - DNA, 19 bp, Mus musculus
  siRNA target sequence for Cul5 (NM_027807.1,835-853).
cttgatacgtggaatgagt

SEQ ID NO: 675034 - DNA, 19 bp, Mus musculus
  siRNA target sequence for Cul5 (NM_027807.1,842-860).
cgtggaatgagtcgatttt

SEQ ID NO: 675035 - DNA, 19 bp, Mus musculus
  siRNA target sequence for Cul5 (NM_027807.1,843-861).
gtggaatgagtcgattttt

SEQ ID NO: 675036 - DNA, 19 bp, Mus musculus
  siRNA target sequence for Cul5 (NM_027807.1,846-864).
gaatgagtcgattttttca

SEQ ID NO: 675037 - DNA, 19 bp, Mus musculus
  siRNA target sequence for Cul5 (NM_027807.1,850-868).
gagtcgattttttcaaata

SEQ ID NO: 675038 - DNA, 19 bp, Mus musculus
  siRNA target sequence for Cul5 (NM_027807.1,915-933).
gagattaggggaagctttt

SEQ ID NO: 675039 - DNA, 19 bp, Mus musculus
  siRNA target sequence for Cul5 (NM_027807.1,954-972).
ggtgcgagagtcctatgtt

SEQ ID NO: 675040 - DNA, 19 bp, Mus musculus
  siRNA target sequence for Cul5 (NM_027807.1,955-973).
gtgcgagagtcctatgtta

SEQ ID NO: 675041 - DNA, 19 bp, Mus musculus
  siRNA target sequence for Cul5 (NM_027807.1,957-975).
gcgagagtcctatgttaat

SEQ ID NO: 675042 - DNA, 19 bp, Mus musculus
  siRNA target sequence for Cul5 (NM_027807.1,959-977).
gagagtcctatgttaatct

SEQ ID NO: 675043 - DNA, 19 bp, Mus musculus
  siRNA target sequence for Cul5 (NM_027807.1,961-979).
gagtcctatgttaatcttt

SEQ ID NO: 675044 - DNA, 19 bp, Mus musculus
  siRNA target sequence for Cul5 (NM_027807.1,1041-1059).
ctcaacagagaggttttat

SEQ ID NO: 675045 - DNA, 19 bp, Mus musculus
  siRNA target sequence for Cul5 (NM_027807.1,1073-1091).
cctcatatttacagcaaaa

SEQ ID NO: 675046 - DNA, 19 bp, Mus musculus
  siRNA target sequence for Cul5 (NM_027807.1,1096-1114).
gtgcagaattacatgaaat

SEQ ID NO: 675047 - DNA, 19 bp, Mus musculus
  siRNA target sequence for Cul5 (NM_027807.1,1098-1116).
gcagaattacatgaaatat

SEQ ID NO: 675048 - DNA, 19 bp, Mus musculus
  siRNA target sequence for Cul5 (NM_027807.1,1148-1166).
gagcactccgatacttaga

SEQ ID NO: 675049 - DNA, 19 bp, Mus musculus
  siRNA target sequence for Cul5 (NM_027807.1,1150-1168).
gcactccgatacttagaaa

SEQ ID NO: 675050 - DNA, 19 bp, Mus musculus
  siRNA target sequence for Cul5 (NM_027807.1,1220-1238).
cgctggtgacctcctttaa

SEQ ID NO: 675051 - DNA, 19 bp, Mus musculus
  siRNA target sequence for Cul5 (NM_027807.1,1229-1247).
cctcctttaaagagactat

SEQ ID NO: 675052 - DNA, 19 bp, Mus musculus
  siRNA target sequence for Cul5 (NM_027807.1,1230-1248).
ctcctttaaagagactatt

SEQ ID NO: 675053 - DNA, 19 bp, Mus musculus
  siRNA target sequence for Cul5 (NM_027807.1,1265-1283).
gcatgatcaagcgaaatga

SEQ ID NO: 675054 - DNA, 19 bp, Mus musculus
  siRNA target sequence for Cul5 (NM_027807.1,1266-1284).
catgatcaagcgaaatgaa

SEQ ID NO: 675055 - DNA, 19 bp, Mus musculus
  siRNA target sequence for Cul5 (NM_027807.1,1269-1287).
gatcaagcgaaatgaaact

SEQ ID NO: 675056 - DNA, 19 bp, Mus musculus
  siRNA target sequence for Cul5 (NM_027807.1,1333-1351).
gggatagagccgatgttga

SEQ ID NO: 675057 - DNA, 19 bp, Mus musculus
  siRNA target sequence for Cul5 (NM_027807.1,1353-1371).
ggacttggaggagcatatt

SEQ ID NO: 675058 - DNA, 19 bp, Mus musculus
  siRNA target sequence for Cul5 (NM_027807.1,1354-1372).
gacttggaggagcatatta

SEQ ID NO: 675059 - DNA, 19 bp, Mus musculus
  siRNA target sequence for Cul5 (NM_027807.1,1356-1374).
cttggaggagcatattata

SEQ ID NO: 675060 - DNA, 19 bp, Mus musculus
  siRNA target sequence for Cul5 (NM_027807.1,1359-1377).
ggaggagcatattataagt

SEQ ID NO: 675061 - DNA, 19 bp, Mus musculus
  siRNA target sequence for Cul5 (NM_027807.1,1402-1420).
gcagctgaaaccatcacta

SEQ ID NO: 675062 - DNA, 19 bp, Mus musculus
  siRNA target sequence for Cul5 (NM_027807.1,1431-1449).
gaagtatgtggagcaatta

SEQ ID NO: 675063 - DNA, 19 bp, Mus musculus
  siRNA target sequence for Cul5 (NM_027807.1,1434-1452).
gtatgtggagcaattactt

SEQ ID NO: 675064 - DNA, 19 bp, Mus musculus
  siRNA target sequence for Cul5 (NM_027807.1,1470-1488).
cagtaaactggtcaaagaa

SEQ ID NO: 675065 - DNA, 19 bp, Mus musculus
  siRNA target sequence for Cul5 (NM_027807.1,1497-1515).
ggatgatcctcgtttcctt

SEQ ID NO: 675066 - DNA, 19 bp, Mus musculus
  siRNA target sequence for Cul5 (NM_027807.1,1498-1516).
gatgatcctcgtttcctta

SEQ ID NO: 675067 - DNA, 19 bp, Mus musculus
  siRNA target sequence for Cul5 (NM_027807.1,1520-1538).
caagagataaggcatataa

SEQ ID NO: 675068 - DNA, 19 bp, Mus musculus
  siRNA target sequence for Cul5 (NM_027807.1,1556-1574).
ctactatatttaaacttga

SEQ ID NO: 675069 - DNA, 19 bp, Mus musculus
  siRNA target sequence for Cul5 (NM_027807.1,1631-1649).
ccgagttgcttgccaatta

SEQ ID NO: 675070 - DNA, 19 bp, Mus musculus
  siRNA target sequence for Cul5 (NM_027807.1,1633-1651).
gagttgcttgccaattact

SEQ ID NO: 675071 - DNA, 19 bp, Mus musculus
  siRNA target sequence for Cul5 (NM_027807.1,1635-1653).
gttgcttgccaattactgt

SEQ ID NO: 675072 - DNA, 19 bp, Mus musculus
  siRNA target sequence for Cul5 (NM_027807.1,1652-1670).
gtgacatgttgttaaggaa

SEQ ID NO: 675073 - DNA, 19 bp, Mus musculus
  siRNA target sequence for Cul5 (NM_027807.1,1667-1685).
ggaaaacgccattaagcaa

SEQ ID NO: 675074 - DNA, 19 bp, Mus musculus
  siRNA target sequence for Cul5 (NM_027807.1,1673-1691).
cgccattaagcaaaaaact

SEQ ID NO: 675075 - DNA, 19 bp, Mus musculus
  siRNA target sequence for Cul5 (NM_027807.1,1723-1741).
gaagtgctcttggtactta

SEQ ID NO: 675076 - DNA, 19 bp, Mus musculus
  siRNA target sequence for Cul5 (NM_027807.1,1726-1744).
gtgctcttggtacttaaat

SEQ ID NO: 675077 - DNA, 19 bp, Mus musculus
  siRNA target sequence for Cul5 (NM_027807.1,1728-1746).
gctcttggtacttaaatat

SEQ ID NO: 675078 - DNA, 19 bp, Mus musculus
  siRNA target sequence for Cul5 (NM_027807.1,1735-1753).
gtacttaaatatgtacaaa

SEQ ID NO: 675079 - DNA, 19 bp, Mus musculus
  siRNA target sequence for Cul5 (NM_027807.1,1738-1756).
cttaaatatgtacaaaaca

SEQ ID NO: 675080 - DNA, 19 bp, Mus musculus
  siRNA target sequence for Cul5 (NM_027807.1,1789-1807).
cttacccgacgtctcatat

SEQ ID NO: 675081 - DNA, 19 bp, Mus musculus
  siRNA target sequence for Cul5 (NM_027807.1,1793-1811).
cccgacgtctcatattgga

SEQ ID NO: 675082 - DNA, 19 bp, Mus musculus
  siRNA target sequence for Cul5 (NM_027807.1,1845-1863).
ggtagagtggctaagagaa

SEQ ID NO: 675083 - DNA, 19 bp, Mus musculus
  siRNA target sequence for Cul5 (NM_027807.1,1874-1892).
cagcagattatgtgaacaa

SEQ ID NO: 675084 - DNA, 19 bp, Mus musculus
  siRNA target sequence for Cul5 (NM_027807.1,1890-1908).
caagcttgctagaatgttt

SEQ ID NO: 675085 - DNA, 19 bp, Mus musculus
  siRNA target sequence for Cul5 (NM_027807.1,1905-1923).
gtttcaggacataaaagta

SEQ ID NO: 675086 - DNA, 19 bp, Mus musculus
  siRNA target sequence for Cul5 (NM_027807.1,1930-1948).
gacttgaaccaagctttta

SEQ ID NO: 675087 - DNA, 19 bp, Mus musculus
  siRNA target sequence for Cul5 (NM_027807.1,1984-2002).
gctgattccgttaatataa

SEQ ID NO: 675088 - DNA, 19 bp, Mus musculus
  siRNA target sequence for Cul5 (NM_027807.1,1985-2003).
ctgattccgttaatataaa

SEQ ID NO: 675089 - DNA, 19 bp, Mus musculus
  siRNA target sequence for Cul5 (NM_027807.1,1987-2005).
gattccgttaatataaaga

SEQ ID NO: 675090 - DNA, 19 bp, Mus musculus
  siRNA target sequence for Cul5 (NM_027807.1,2027-2045).
ctagaagctccgagaaagt

SEQ ID NO: 675091 - DNA, 19 bp, Mus musculus
  siRNA target sequence for Cul5 (NM_027807.1,2060-2078).
ctactgaactggaggattt

SEQ ID NO: 675092 - DNA, 19 bp, Mus musculus
  siRNA target sequence for Cul5 (NM_027807.1,2073-2091).
ggatttgatacctgaagta

SEQ ID NO: 675093 - DNA, 19 bp, Mus musculus
  siRNA target sequence for Cul5 (NM_027807.1,2136-2154).
gcaccatctcatgtcaaat

SEQ ID NO: 675094 - DNA, 19 bp, Mus musculus
  siRNA target sequence for Cul5 (NM_027807.1,2139-2157).
ccatctcatgtcaaatgga

SEQ ID NO: 675095 - DNA, 19 bp, Mus musculus
  siRNA target sequence for Cul5 (NM_027807.1,2148-2166).
gtcaaatggaattataaca

SEQ ID NO: 675096 - DNA, 19 bp, Mus musculus
  siRNA target sequence for Cul5 (NM_027807.1,2176-2194).
gaagtaggtcagtatgatt

SEQ ID NO: 675097 - DNA, 19 bp, Mus musculus
  siRNA target sequence for Cul5 (NM_027807.1,2312-2330).
ggactttatggtctttagt

SEQ ID NO: 675098 - DNA, 19 bp, Mus musculus
  siRNA target sequence for Cul5 (NM_027807.1,2344-2362).
ctcaaacggcaagttttgt

SEQ ID NO: 675099 - DNA, 19 bp, Mus musculus
  siRNA target sequence for Cul5 (NM_027807.1,2384-2402).
cacccaaagattttacaga

SEQ ID NO: 675100 - DNA, 19 bp, Mus musculus
  siRNA target sequence for Cul5 (NM_027807.1,2425-2443).
caggacttcagtctcataa

SEQ ID NO: 675101 - DNA, 19 bp, Mus musculus
  siRNA target sequence for Cul5 (NM_027807.1,2427-2445).
ggacttcagtctcataaaa

SEQ ID NO: 675102 - DNA, 19 bp, Mus musculus
  siRNA target sequence for Cul5 (NM_027807.1,2428-2446).
gacttcagtctcataaaaa

SEQ ID NO: 675103 - DNA, 19 bp, Mus musculus
  siRNA target sequence for Cul5 (NM_027807.1,2433-2451).
cagtctcataaaaaatgca

SEQ ID NO: 675104 - DNA, 19 bp, Mus musculus
  siRNA target sequence for Cul5 (NM_027807.1,2499-2517).
cactacagaacgaatgaga

SEQ ID NO: 675105 - DNA, 19 bp, Mus musculus
  siRNA target sequence for Cul5 (NM_027807.1,2530-2548).
gaagggatagtccaactaa

SEQ ID NO: 675106 - DNA, 19 bp, Mus musculus
  siRNA target sequence for Cul5 (NM_027807.1,2533-2551).
gggatagtccaactaagaa

SEQ ID NO: 675107 - DNA, 19 bp, Mus musculus
  siRNA target sequence for Cul5 (NM_027807.1,2535-2553).
gatagtccaactaagaata

SEQ ID NO: 675108 - DNA, 19 bp, Mus musculus
  siRNA target sequence for Cul5 (NM_027807.1,2565-2583).
ggaagccatcatacaaata

SEQ ID NO: 675109 - DNA, 19 bp, Mus musculus
  siRNA target sequence for Cul5 (NM_027807.1,2566-2584).
gaagccatcatacaaataa

SEQ ID NO: 675110 - DNA, 19 bp, Mus musculus
  siRNA target sequence for Cul5 (NM_027807.1,2613-2631).
ccagctgcagactgaatta

SEQ ID NO: 675111 - DNA, 19 bp, Mus musculus
  siRNA target sequence for Cul5 (NM_027807.1,2619-2637).
gcagactgaattagtagaa

SEQ ID NO: 675112 - DNA, 19 bp, Mus musculus
  siRNA target sequence for Cul5 (NM_027807.1,2620-2638).
cagactgaattagtagaaa

SEQ ID NO: 675113 - DNA, 19 bp, Mus musculus
  siRNA target sequence for Cul5 (NM_027807.1,2622-2640).
gactgaattagtagaaatt

SEQ ID NO: 675114 - DNA, 19 bp, Mus musculus
  siRNA target sequence for Cul5 (NM_027807.1,2720-2738).
gggacgaggccgacatcaa

SEQ ID NO: 675115 - DNA, 19 bp, Mus musculus
  siRNA target sequence for G0s2 (NM_008059.1,188-206).
cccgagggaagctagtgaa

SEQ ID NO: 675116 - DNA, 19 bp, Mus musculus
  siRNA target sequence for Gmnn (NM_020567.1,306-324).
ggagggagcccaagagaat

SEQ ID NO: 675117 - DNA, 19 bp, Mus musculus
  siRNA target sequence for Gmnn (NM_020567.1,451-469).
ctagcatctcagacttcaa

SEQ ID NO: 675118 - DNA, 19 bp, Mus musculus
  siRNA target sequence for Gmnn (NM_020567.1,519-537).
ggaagcctttgatcttata

SEQ ID NO: 675119 - DNA, 19 bp, Mus musculus
  siRNA target sequence for Gmnn (NM_020567.1,524-542).
cctttgatcttataagtaa

SEQ ID NO: 675120 - DNA, 19 bp, Mus musculus
  siRNA target sequence for Gmnn (NM_020567.1,529-547).
gatcttataagtaaagaga

SEQ ID NO: 675121 - DNA, 19 bp, Mus musculus
  siRNA target sequence for Gmnn (NM_020567.1,746-764).
gtaatgaacctctggataa

SEQ ID NO: 675122 - DNA, 19 bp, Mus musculus
  siRNA target sequence for Pard6a (NM_019695.1,136-154).
gtcgaggtgaagagcaaat

SEQ ID NO: 675123 - DNA, 19 bp, Mus musculus
  siRNA target sequence for Pard6a (NM_019695.1,560-578).
gagtgaggctgcacaaaca

SEQ ID NO: 675124 - DNA, 19 bp, Mus musculus
  siRNA target sequence for Pard6a (NM_019695.1,589-607).
cgtcccctgggcttctaca

SEQ ID NO: 675125 - DNA, 19 bp, Mus musculus
  siRNA target sequence for Pard6a (NM_019695.1,832-850).
cctgccaaccagcgtaata

SEQ ID NO: 675126 - DNA, 19 bp, Mus musculus
  siRNA target sequence for Pard6a (NM_019695.1,833-851).
ctgccaaccagcgtaataa

SEQ ID NO: 675127 - DNA, 19 bp, Mus musculus
  siRNA target sequence for Pard6a (NM_019695.1,836-854).
ccaaccagcgtaataatgt

SEQ ID NO: 675128 - DNA, 19 bp, Mus musculus
  siRNA target sequence for Pard6a (NM_019695.1,960-978).
ccaccctccctgttctaat

SEQ ID NO: 675129 - DNA, 19 bp, Mus musculus
  siRNA target sequence for Pard6a (NM_019695.1,1096-1114).
ggcatgcgaggtgatgtta

SEQ ID NO: 675130 - DNA, 19 bp, Mus musculus
  siRNA target sequence for Pard6b (NM_021409.1,94-112).
cggttttcactggaaagat

SEQ ID NO: 675131 - DNA, 19 bp, Mus musculus
  siRNA target sequence for Pard6b (NM_021409.1,268-286).
ccactgctcaggattttta

SEQ ID NO: 675132 - DNA, 19 bp, Mus musculus
  siRNA target sequence for Pard6b (NM_021409.1,557-575).
cgcacggcttggagaaagt

SEQ ID NO: 675133 - DNA, 19 bp, Mus musculus
  siRNA target sequence for Pard6b (NM_021409.1,642-660).
caacgatgaggtgttagaa

SEQ ID NO: 675134 - DNA, 19 bp, Mus musculus
  siRNA target sequence for Pard6b (NM_021409.1,881-899).
gcgacgaggacgacatcat

SEQ ID NO: 675135 - DNA, 19 bp, Mus musculus
  siRNA target sequence for Pard6b (NM_021409.1,1079-1097).
cggaccagaaactcttaga

SEQ ID NO: 675136 - DNA, 19 bp, Mus musculus
  siRNA target sequence for Spin (NM_146043.1,336-354).
gacatctcacaaaaaacat

SEQ ID NO: 675137 - DNA, 19 bp, Mus musculus
  siRNA target sequence for Trp53bp2 (NM_173378.1,329-347).
ctaaggagcaacgcttaaa

SEQ ID NO: 675138 - DNA, 19 bp, Mus musculus
  siRNA target sequence for Trp53bp2 (NM_173378.1,333-351).
ggagcaacgcttaaagttt

SEQ ID NO: 675139 - DNA, 19 bp, Mus musculus
  siRNA target sequence for Trp53bp2 (NM_173378.1,334-352).
gagcaacgcttaaagtttt

SEQ ID NO: 675140 - DNA, 19 bp, Mus musculus
  siRNA target sequence for Trp53bp2 (NM_173378.1,336-354).
gcaacgcttaaagttttta

SEQ ID NO: 675141 - DNA, 19 bp, Mus musculus
  siRNA target sequence for Trp53bp2 (NM_173378.1,388-406).
gctgaacaggagaaactta

SEQ ID NO: 675142 - DNA, 19 bp, Mus musculus
  siRNA target sequence for Trp53bp2 (NM_173378.1,439-457).
gctaagcttaagaaagtga

SEQ ID NO: 675143 - DNA, 19 bp, Mus musculus
  siRNA target sequence for Trp53bp2 (NM_173378.1,488-506).
ggctgagcaacggaaaact

SEQ ID NO: 675144 - DNA, 19 bp, Mus musculus
  siRNA target sequence for Trp53bp2 (NM_173378.1,684-702).
gctgcagttaagaaacaaa

SEQ ID NO: 675145 - DNA, 19 bp, Mus musculus
  siRNA target sequence for Trp53bp2 (NM_173378.1,736-754).
cagagggagtgtttgaata

SEQ ID NO: 675146 - DNA, 19 bp, Mus musculus
  siRNA target sequence for Trp53bp2 (NM_173378.1,911-929).
ctgctgtaggcccttacat

SEQ ID NO: 675147 - DNA, 19 bp, Mus musculus
  siRNA target sequence for Trp53bp2 (NM_173378.1,1100-1118).
cagctagccccgattggaa

SEQ ID NO: 675148 - DNA, 19 bp, Mus musculus
  siRNA target sequence for Trp53bp2 (NM_173378.1,1110-1128).
cgattggaacccttccaat

SEQ ID NO: 675149 - DNA, 19 bp, Mus musculus
  siRNA target sequence for Trp53bp2 (NM_173378.1,1331-1349).
gggatgctcaggctgtaaa

SEQ ID NO: 675150 - DNA, 19 bp, Mus musculus
  siRNA target sequence for Trp53bp2 (NM_173378.1,1332-1350).
ggatgctcaggctgtaaat

SEQ ID NO: 675151 - DNA, 19 bp, Mus musculus
  siRNA target sequence for Trp53bp2 (NM_173378.1,1723-1741).
caggcaccaggaaaaaact

SEQ ID NO: 675152 - DNA, 19 bp, Mus musculus
  siRNA target sequence for Trp53bp2 (NM_173378.1,1791-1809).
ccacttttcaagtgtgtat

SEQ ID NO: 675153 - DNA, 19 bp, Mus musculus
  siRNA target sequence for Trp53bp2 (NM_173378.1,1806-1824).
gtatggcaagcctgtgata

SEQ ID NO: 675154 - DNA, 19 bp, Mus musculus
  siRNA target sequence for Trp53bp2 (NM_173378.1,1911-1929).
gaccgtttcttcagttcat

SEQ ID NO: 675155 - DNA, 19 bp, Mus musculus
  siRNA target sequence for Trp53bp2 (NM_173378.1,1913-1931).
ccgtttcttcagttcatga

SEQ ID NO: 675156 - DNA, 19 bp, Mus musculus
  siRNA target sequence for Trp53bp2 (NM_173378.1,1960-1978).
ccactcagcccaacaaaat

SEQ ID NO: 675157 - DNA, 19 bp, Mus musculus
  siRNA target sequence for Trp53bp2 (NM_173378.1,1961-1979).
cactcagcccaacaaaatt

SEQ ID NO: 675158 - DNA, 19 bp, Mus musculus
  siRNA target sequence for Trp53bp2 (NM_173378.1,1989-2007).
cttgtctaacccttatcga

SEQ ID NO: 675159 - DNA, 19 bp, Mus musculus
  siRNA target sequence for Trp53bp2 (NM_173378.1,2010-2028).
ccagagcgatgctgactta

SEQ ID NO: 675160 - DNA, 19 bp, Mus musculus
  siRNA target sequence for Trp53bp2 (NM_173378.1,2013-2031).
gagcgatgctgacttagaa

SEQ ID NO: 675161 - DNA, 19 bp, Mus musculus
  siRNA target sequence for Trp53bp2 (NM_173378.1,2062-2080).
cggccactaaagaaacgta

SEQ ID NO: 675162 - DNA, 19 bp, Mus musculus
  siRNA target sequence for Trp53bp2 (NM_173378.1,2073-2091).
gaaacgtagctccattaca

SEQ ID NO: 675163 - DNA, 19 bp, Mus musculus
  siRNA target sequence for Trp53bp2 (NM_173378.1,2101-2119).
ggccctaatgggccaaata

SEQ ID NO: 675164 - DNA, 19 bp, Mus musculus
  siRNA target sequence for Trp53bp2 (NM_173378.1,2102-2120).
gccctaatgggccaaatat

SEQ ID NO: 675165 - DNA, 19 bp, Mus musculus
  siRNA target sequence for Trp53bp2 (NM_173378.1,2103-2121).
ccctaatgggccaaatatt

SEQ ID NO: 675166 - DNA, 19 bp, Mus musculus
  siRNA target sequence for Trp53bp2 (NM_173378.1,2105-2123).
ctaatgggccaaatattca

SEQ ID NO: 675167 - DNA, 19 bp, Mus musculus
  siRNA target sequence for Trp53bp2 (NM_173378.1,2113-2131).
ccaaatattcagaaacttt

SEQ ID NO: 675168 - DNA, 19 bp, Mus musculus
  siRNA target sequence for Trp53bp2 (NM_173378.1,2176-2194).
ccctcacacccatctaagt

SEQ ID NO: 675169 - DNA, 19 bp, Mus musculus
  siRNA target sequence for Trp53bp2 (NM_173378.1,2178-2196).
ctcacacccatctaagtca

SEQ ID NO: 675170 - DNA, 19 bp, Mus musculus
  siRNA target sequence for Trp53bp2 (NM_173378.1,2219-2237).
cagagagctccgttgaaat

SEQ ID NO: 675171 - DNA, 19 bp, Mus musculus
  siRNA target sequence for Trp53bp2 (NM_173378.1,2399-2417).
gtaccaatctgcagaataa

SEQ ID NO: 675172 - DNA, 19 bp, Mus musculus
  siRNA target sequence for Trp53bp2 (NM_173378.1,2402-2420).
ccaatctgcagaataacgt

SEQ ID NO: 675173 - DNA, 19 bp, Mus musculus
  siRNA target sequence for Trp53bp2 (NM_173378.1,2403-2421).
caatctgcagaataacgta

SEQ ID NO: 675174 - DNA, 19 bp, Mus musculus
  siRNA target sequence for Trp53bp2 (NM_173378.1,2439-2457).
ggctccccacttacttgaa

SEQ ID NO: 675175 - DNA, 19 bp, Mus musculus
  siRNA target sequence for Trp53bp2 (NM_173378.1,2444-2462).
cccacttacttgaagtgta

SEQ ID NO: 675176 - DNA, 19 bp, Mus musculus
  siRNA target sequence for Trp53bp2 (NM_173378.1,2540-2558).
gtatgcgcccacctgaaat

SEQ ID NO: 675177 - DNA, 19 bp, Mus musculus
  siRNA target sequence for Trp53bp2 (NM_173378.1,2633-2651).
ggatgagggtgaaattcaa

SEQ ID NO: 675178 - DNA, 19 bp, Mus musculus
  siRNA target sequence for Trp53bp2 (NM_173378.1,2730-2748).
cccaagcctaccaaatgat

SEQ ID NO: 675179 - DNA, 19 bp, Mus musculus
  siRNA target sequence for Trp53bp2 (NM_173378.1,2752-2770).
ggcatcacagctcttcata

SEQ ID NO: 675180 - DNA, 19 bp, Mus musculus
  siRNA target sequence for Trp53bp2 (NM_173378.1,2811-2829).
ggtacagttcggtgtgaat

SEQ ID NO: 675181 - DNA, 19 bp, Mus musculus
  siRNA target sequence for Trp53bp2 (NM_173378.1,2815-2833).
cagttcggtgtgaatgtaa

SEQ ID NO: 675182 - DNA, 19 bp, Mus musculus
  siRNA target sequence for Trp53bp2 (NM_173378.1,2999-3017).
cgcagtgctcccagtttct

SEQ ID NO: 675183 - DNA, 19 bp, Mus musculus
  siRNA target sequence for Trp53bp2 (NM_173378.1,3048-3066).
gaacaaaggcgtcatttat

SEQ ID NO: 675184 - DNA, 19 bp, Mus musculus
  siRNA target sequence for Trp53bp2 (NM_173378.1,3051-3069).
caaaggcgtcatttatgca

SEQ ID NO: 675185 - DNA, 19 bp, Mus musculus
  siRNA target sequence for Trp53bp2 (NM_173378.1,3132-3150).
cgtcatccgcagagaagat

SEQ ID NO: 675186 - DNA, 19 bp, Mus musculus
  siRNA target sequence for Trp53bp2 (NM_173378.1,3186-3204).
cgataaggaaggatatgtt

SEQ ID NO: 675187 - DNA, 19 bp, Mus musculus
  siRNA target sequence for Trp53bp2 (NM_173378.1,3209-3227).
gcaacttgctaggactata

SEQ ID NO: 675188 - DNA, 19 bp, Mus musculus
  siRNA target sequence for Trp53bp2 (NM_173378.1,3220-3238).
ggactatacccaagaatta

SEQ ID NO: 675189 - DNA, 19 bp, Mus musculus
  siRNA target sequence for Trp53bp2 (NM_173378.1,3221-3239).
gactatacccaagaattaa

SEQ ID NO: 675190 - DNA, 19 bp, Mus musculus
  siRNA target sequence for Cdc16 (NM_027276.1,151-169).
gtcacttgccaatgctata

SEQ ID NO: 675191 - DNA, 19 bp, Mus musculus
  siRNA target sequence for Cdc16 (NM_027276.1,153-171).
cacttgccaatgctatata

SEQ ID NO: 675192 - DNA, 19 bp, Mus musculus
  siRNA target sequence for Cdc16 (NM_027276.1,158-176).
gccaatgctatatattgga

SEQ ID NO: 675193 - DNA, 19 bp, Mus musculus
  siRNA target sequence for Cdc16 (NM_027276.1,160-178).
caatgctatatattggatt

SEQ ID NO: 675194 - DNA, 19 bp, Mus musculus
  siRNA target sequence for Cdc16 (NM_027276.1,180-198).
gaatatggtctgaccaata

SEQ ID NO: 675195 - DNA, 19 bp, Mus musculus
  siRNA target sequence for Cdc16 (NM_027276.1,247-265).
cagaagacccatttgtcat

SEQ ID NO: 675196 - DNA, 19 bp, Mus musculus
  siRNA target sequence for Cdc16 (NM_027276.1,323-341).
gtttctcgatgctttggaa

SEQ ID NO: 675197 - DNA, 19 bp, Mus musculus
  siRNA target sequence for Cdc16 (NM_027276.1,363-381).
gaggtcacagttgacaaat

SEQ ID NO: 675198 - DNA, 19 bp, Mus musculus
  siRNA target sequence for Cdc16 (NM_027276.1,382-400).
gggaacctttgttgaacaa

SEQ ID NO: 675199 - DNA, 19 bp, Mus musculus
  siRNA target sequence for Cdc16 (NM_027276.1,384-402).
gaacctttgttgaacaact

SEQ ID NO: 675200 - DNA, 19 bp, Mus musculus
  siRNA target sequence for Cdc16 (NM_027276.1,406-424).
ggcatgtctgcagaaaact

SEQ ID NO: 675201 - DNA, 19 bp, Mus musculus
  siRNA target sequence for Cdc16 (NM_027276.1,408-426).
catgtctgcagaaaactta

SEQ ID NO: 675202 - DNA, 19 bp, Mus musculus
  siRNA target sequence for Cdc16 (NM_027276.1,436-454).
ctgaggctttggattacca

SEQ ID NO: 675203 - DNA, 19 bp, Mus musculus
  siRNA target sequence for Cdc16 (NM_027276.1,575-593).
caggcgagacgacacattt

SEQ ID NO: 675204 - DNA, 19 bp, Mus musculus
  siRNA target sequence for Cdc16 (NM_027276.1,578-596).
gcgagacgacacattttct

SEQ ID NO: 675205 - DNA, 19 bp, Mus musculus
  siRNA target sequence for Cdc16 (NM_027276.1,582-600).
gacgacacattttctgtta

SEQ ID NO: 675206 - DNA, 19 bp, Mus musculus
  siRNA target sequence for Cdc16 (NM_027276.1,585-603).
gacacattttctgttacaa

SEQ ID NO: 675207 - DNA, 19 bp, Mus musculus
  siRNA target sequence for Cdc16 (NM_027276.1,609-627).
ggtcactgcattgaaatgt

SEQ ID NO: 675208 - DNA, 19 bp, Mus musculus
  siRNA target sequence for Cdc16 (NM_027276.1,633-651).
ggggattcggaagcttata

SEQ ID NO: 675209 - DNA, 19 bp, Mus musculus
  siRNA target sequence for Cdc16 (NM_027276.1,687-705).
gacttcgatgtgcatacaa

SEQ ID NO: 675210 - DNA, 19 bp, Mus musculus
  siRNA target sequence for Cdc16 (NM_027276.1,698-716).
gcatacaatgaaaacacta

SEQ ID NO: 675211 - DNA, 19 bp, Mus musculus
  siRNA target sequence for Cdc16 (NM_027276.1,800-818).
gcaaaactccactaaagct

SEQ ID NO: 675212 - DNA, 19 bp, Mus musculus
  siRNA target sequence for Cdc16 (NM_027276.1,820-838).
cagagtccagacctaactt

SEQ ID NO: 675213 - DNA, 19 bp, Mus musculus
  siRNA target sequence for Cdc16 (NM_027276.1,881-899).
gctagagacgtctatgtca

SEQ ID NO: 675214 - DNA, 19 bp, Mus musculus
  siRNA target sequence for Cdc27 (NM_145436.1,132-150).
gcgctaaaccactatgctt

SEQ ID NO: 675215 - DNA, 19 bp, Mus musculus
  siRNA target sequence for Cdc27 (NM_145436.1,133-151).
cgctaaaccactatgctta

SEQ ID NO: 675216 - DNA, 19 bp, Mus musculus
  siRNA target sequence for Cdc27 (NM_145436.1,148-166).
cttaccgagatgcagtttt

SEQ ID NO: 675217 - DNA, 19 bp, Mus musculus
  siRNA target sequence for Cdc27 (NM_145436.1,167-185).
cctcgcagaacgactatat

SEQ ID NO: 675218 - DNA, 19 bp, Mus musculus
  siRNA target sequence for Cdc27 (NM_145436.1,170-188).
cgcagaacgactatatgca

SEQ ID NO: 675219 - DNA, 19 bp, Mus musculus
  siRNA target sequence for Cdc27 (NM_145436.1,237-255).
cgctcaggaaaggcttata

SEQ ID NO: 675220 - DNA, 19 bp, Mus musculus
  siRNA target sequence for Cdc27 (NM_145436.1,239-257).
ctcaggaaaggcttataaa

SEQ ID NO: 675221 - DNA, 19 bp, Mus musculus
  siRNA target sequence for Cdc27 (NM_145436.1,243-261).
ggaaaggcttataaagcat

SEQ ID NO: 675222 - DNA, 19 bp, Mus musculus
  siRNA target sequence for Cdc27 (NM_145436.1,248-266).
ggcttataaagcatataga

SEQ ID NO: 675223 - DNA, 19 bp, Mus musculus
  siRNA target sequence for Cdc27 (NM_145436.1,308-326).
cctgcttgcaaaatgttgt

SEQ ID NO: 675224 - DNA, 19 bp, Mus musculus
  siRNA target sequence for Cdc27 (NM_145436.1,346-364).
cagaaggggaacagatctt

SEQ ID NO: 675225 - DNA, 19 bp, Mus musculus
  siRNA target sequence for Cdc27 (NM_145436.1,370-388).
gtggagtgtttaataagca

SEQ ID NO: 675226 - DNA, 19 bp, Mus musculus
  siRNA target sequence for Cdc27 (NM_145436.1,401-419).
cgaccttgtcactgagttt

SEQ ID NO: 675227 - DNA, 19 bp, Mus musculus
  siRNA target sequence for Cdc27 (NM_145436.1,445-463).
ccttgttgggacatgtgta

SEQ ID NO: 675228 - DNA, 19 bp, Mus musculus
  siRNA target sequence for Cdc27 (NM_145436.1,446-464).
cttgttgggacatgtgtat

SEQ ID NO: 675229 - DNA, 19 bp, Mus musculus
  siRNA target sequence for Cdc27 (NM_145436.1,484-502).
ccaaagggtcagaatgtta

SEQ ID NO: 675230 - DNA, 19 bp, Mus musculus
  siRNA target sequence for Cdc27 (NM_145436.1,504-522).
caaaagagccttagtttaa

SEQ ID NO: 675231 - DNA, 19 bp, Mus musculus
  siRNA target sequence for Cdc27 (NM_145436.1,530-548).
cctctggtctccctttgaa

SEQ ID NO: 675232 - DNA, 19 bp, Mus musculus
  siRNA target sequence for Cdc27 (NM_145436.1,531-549).
ctctggtctccctttgaat

SEQ ID NO: 675233 - DNA, 19 bp, Mus musculus
  siRNA target sequence for Cdc27 (NM_145436.1,535-553).
ggtctccctttgaatcgtt

SEQ ID NO: 675234 - DNA, 19 bp, Mus musculus
  siRNA target sequence for Cdc27 (NM_145436.1,573-591).
ccagatcctgaccaaacat

SEQ ID NO: 675235 - DNA, 19 bp, Mus musculus
  siRNA target sequence for Cdc27 (NM_145436.1,574-592).
cagatcctgaccaaacatt

SEQ ID NO: 675236 - DNA, 19 bp, Mus musculus
  siRNA target sequence for Cdc27 (NM_145436.1,576-594).
gatcctgaccaaacattta

SEQ ID NO: 675237 - DNA, 19 bp, Mus musculus
  siRNA target sequence for Cdc27 (NM_145436.1,627-645).
cttcccaacacttgtacaa

SEQ ID NO: 675238 - DNA, 19 bp, Mus musculus
  siRNA target sequence for Cdc27 (NM_145436.1,632-650).
caacacttgtacaactcta

SEQ ID NO: 675239 - DNA, 19 bp, Mus musculus
  siRNA target sequence for Cdc27 (NM_145436.1,635-653).
cacttgtacaactctagta

SEQ ID NO: 675240 - DNA, 19 bp, Mus musculus
  siRNA target sequence for Cdc27 (NM_145436.1,640-658).
gtacaactctagtatctaa

SEQ ID NO: 675241 - DNA, 19 bp, Mus musculus
  siRNA target sequence for Cdc27 (NM_145436.1,643-661).
caactctagtatctaatca

SEQ ID NO: 675242 - DNA, 19 bp, Mus musculus
  siRNA target sequence for Cdc27 (NM_145436.1,651-669).
gtatctaatcacagtttat

SEQ ID NO: 675243 - DNA, 19 bp, Mus musculus
  siRNA target sequence for Cdc27 (NM_145436.1,655-673).
ctaatcacagtttatctca

SEQ ID NO: 675244 - DNA, 19 bp, Mus musculus
  siRNA target sequence for Cdc27 (NM_145436.1,703-721).
caccccaagacacaattga

SEQ ID NO: 675245 - DNA, 19 bp, Mus musculus
  siRNA target sequence for Cdc27 (NM_145436.1,734-752).
gaatttagaatcttccaat

SEQ ID NO: 675246 - DNA, 19 bp, Mus musculus
  siRNA target sequence for Cdc27 (NM_145436.1,758-776).
gtactccttgaatacagat

SEQ ID NO: 675247 - DNA, 19 bp, Mus musculus
  siRNA target sequence for Cdc27 (NM_145436.1,772-790).
cagattcctccgtgtctta

SEQ ID NO: 675248 - DNA, 19 bp, Mus musculus
  siRNA target sequence for Cdc27 (NM_145436.1,774-792).
gattcctccgtgtcttaca

SEQ ID NO: 675249 - DNA, 19 bp, Mus musculus
  siRNA target sequence for Cdc27 (NM_145436.1,785-803).
gtcttacattgattcaact

SEQ ID NO: 675250 - DNA, 19 bp, Mus musculus
  siRNA target sequence for Cdc27 (NM_145436.1,832-850).
gacctggtactgccatatt

SEQ ID NO: 675251 - DNA, 19 bp, Mus musculus
  siRNA target sequence for Cdc27 (NM_145436.1,834-852).
cctggtactgccatattat

SEQ ID NO: 675252 - DNA, 19 bp, Mus musculus
  siRNA target sequence for Cdc27 (NM_145436.1,837-855).
ggtactgccatattatcta

SEQ ID NO: 675253 - DNA, 19 bp, Mus musculus
  siRNA target sequence for Cdc27 (NM_145436.1,838-856).
gtactgccatattatctaa

SEQ ID NO: 675254 - DNA, 19 bp, Mus musculus
  siRNA target sequence for Cdc27 (NM_145436.1,841-859).
ctgccatattatctaaaca

SEQ ID NO: 675255 - DNA, 19 bp, Mus musculus
  siRNA target sequence for Cdc27 (NM_145436.1,853-871).
ctaaacaggttcaaaataa

SEQ ID NO: 675256 - DNA, 19 bp, Mus musculus
  siRNA target sequence for Cdc27 (NM_145436.1,874-892).
caaaaactggtcgaagttt

SEQ ID NO: 675257 - DNA, 19 bp, Mus musculus
  siRNA target sequence for Cdc27 (NM_145436.1,916-934).
gcccattaaccccaagttt

SEQ ID NO: 675258 - DNA, 19 bp, Mus musculus
  siRNA target sequence for Cdc27 (NM_145436.1,967-985).
gagatggatcctatttaca

SEQ ID NO: 675259 - DNA, 19 bp, Mus musculus
  siRNA target sequence for Cdc27 (NM_145436.1,969-987).
gatggatcctatttacaaa

SEQ ID NO: 675260 - DNA, 19 bp, Mus musculus
  siRNA target sequence for Cdc27 (NM_145436.1,994-1012).
ctaatacaccttctgtaat

SEQ ID NO: 675261 - DNA, 19 bp, Mus musculus
  siRNA target sequence for Cdc27 (NM_145436.1,1024-1042).
ccaccggagcacctacaaa

SEQ ID NO: 675262 - DNA, 19 bp, Mus musculus
  siRNA target sequence for Cdc27 (NM_145436.1,1025-1043).
caccggagcacctacaaaa

SEQ ID NO: 675263 - DNA, 19 bp, Mus musculus
  siRNA target sequence for Cdc27 (NM_145436.1,1080-1098).
ggccaaactggaacaaagt

SEQ ID NO: 675264 - DNA, 19 bp, Mus musculus
  siRNA target sequence for Cdc27 (NM_145436.1,1130-1148).
ggtcacaccagtacttgtt

SEQ ID NO: 675265 - DNA, 19 bp, Mus musculus
  siRNA target sequence for Cdc27 (NM_145436.1,1167-1185).
ggcccacaaacaagtacaa

SEQ ID NO: 675266 - DNA, 19 bp, Mus musculus
  siRNA target sequence for Cdc27 (NM_145436.1,1180-1198).
gtacaacacctcaggtatt

SEQ ID NO: 675267 - DNA, 19 bp, Mus musculus
  siRNA target sequence for Cdc27 (NM_145436.1,1227-1245).
gcattgcctcggagaagtt

SEQ ID NO: 675268 - DNA, 19 bp, Mus musculus
  siRNA target sequence for Cdc27 (NM_145436.1,1256-1274).
cactagtgacagttctaca

SEQ ID NO: 675269 - DNA, 19 bp, Mus musculus
  siRNA target sequence for Crip2 (NM_024223.1,251-269).
gcgctggctcctacatcta

SEQ ID NO: 675270 - DNA, 19 bp, Mus musculus
  siRNA target sequence for Crip2 (NM_024223.1,425-443).
gcaacaagagagtgtactt

SEQ ID NO: 675271 - DNA, 19 bp, Mus musculus
  siRNA target sequence for Mab21l1 (NM_010750.2,493-511).
ctggtctaccacctgaata

SEQ ID NO: 675272 - DNA, 19 bp, Mus musculus
  siRNA target sequence for Mab21l1 (NM_010750.2,496-514).
gtctaccacctgaataagt

SEQ ID NO: 675273 - DNA, 19 bp, Mus musculus
  siRNA target sequence for Mab21l1 (NM_010750.2,613-631).
caggaaccgcgtttcatca

SEQ ID NO: 675274 - DNA, 19 bp, Mus musculus
  siRNA target sequence for Mab21l1 (NM_010750.2,897-915).
gtgtagctacagagatgta

SEQ ID NO: 675275 - DNA, 19 bp, Mus musculus
  siRNA target sequence for Mab21l1 (NM_010750.2,929-947).
ctgacacgagcgaagtgaa

SEQ ID NO: 675276 - DNA, 19 bp, Mus musculus
  siRNA target sequence for Mab21l1 (NM_010750.2,951-969).
gagaatccgagataggtat

SEQ ID NO: 675277 - DNA, 19 bp, Mus musculus
  siRNA target sequence for Mab21l1 (NM_010750.2,1085-1103).
ctgaagggttcaatttgtt

SEQ ID NO: 675278 - DNA, 19 bp, Mus musculus
  siRNA target sequence for Mab21l1 (NM_010750.2,1087-1105).
gaagggttcaatttgttgt

SEQ ID NO: 675279 - DNA, 19 bp, Mus musculus
  siRNA target sequence for Mab21l1 (NM_010750.2,1265-1283).
caggccagcccctgaacaa

SEQ ID NO: 675280 - DNA, 19 bp, Mus musculus
  siRNA target sequence for Mab21l1 (NM_010750.2,1267-1285).
ggccagcccctgaacaact

SEQ ID NO: 675281 - DNA, 19 bp, Mus musculus
  siRNA target sequence for Mab21l1 (NM_010750.2,1381-1399).
cttctgcagctcatctcat

SEQ ID NO: 675282 - DNA, 19 bp, Mus musculus
  siRNA target sequence for Mab21l1 (NM_010750.2,1428-1446).
cttcttaccgaacttagat

SEQ ID NO: 675283 - DNA, 19 bp, Mus musculus
  siRNA target sequence for Mab21l1 (NM_010750.2,1436-1454).
cgaacttagatctgtttca

SEQ ID NO: 675284 - DNA, 19 bp, Mus musculus
  siRNA target sequence for Mab21l1 (NM_010750.2,1463-1481).
cccactcggccttggaaaa

SEQ ID NO: 675285 - DNA, 19 bp, Mus musculus
  siRNA target sequence for Mab21l1 (NM_010750.2,1519-1537).
ctgaccaacccaaaaagtt

SEQ ID NO: 675286 - DNA, 19 bp, Mus musculus
  siRNA target sequence for Mab21l1 (NM_010750.2,1529-1547).
caaaaagtttggaaaaact

SEQ ID NO: 675287 - DNA, 19 bp, Mus musculus
  siRNA target sequence for Bcl11b (NM_021399.1,280-298).
ggggacatcctggttttta

SEQ ID NO: 675288 - DNA, 19 bp, Mus musculus
  siRNA target sequence for Bcl11b (NM_021399.1,689-707).
cgcagtccccactcatgaa

SEQ ID NO: 675289 - DNA, 19 bp, Mus musculus
  siRNA target sequence for Bcl11b (NM_021399.1,695-713).
ccccactcatgaatttcct

SEQ ID NO: 675290 - DNA, 19 bp, Mus musculus
  siRNA target sequence for Bcl11b (NM_021399.1,821-839).
caccgccacgccatcactt

SEQ ID NO: 675291 - DNA, 19 bp, Mus musculus
  siRNA target sequence for Bcl11b (NM_021399.1,1982-2000).
cagcatcgcgccacttcat

SEQ ID NO: 675292 - DNA, 19 bp, Mus musculus
  siRNA target sequence for Bcl11b (NM_021399.1,1984-2002).
gcatcgcgccacttcatga

SEQ ID NO: 675293 - DNA, 19 bp, Mus musculus
  siRNA target sequence for Bcl11b (NM_021399.1,1985-2003).
catcgcgccacttcatgaa

SEQ ID NO: 675294 - DNA, 19 bp, Mus musculus
  siRNA target sequence for Bcl11b (NM_021399.1,2047-2065).
gccacatcgtcggaacatt

SEQ ID NO: 675295 - DNA, 19 bp, Mus musculus
  siRNA target sequence for Bcl11b (NM_021399.1,2468-2486).
gtgaacacttgctgactaa

SEQ ID NO: 675296 - DNA, 19 bp, Mus musculus
  siRNA target sequence for Bcl11b (NM_021399.1,2478-2496).
gctgactaatgatgtcaaa

SEQ ID NO: 675297 - DNA, 19 bp, Mus musculus
  siRNA target sequence for Scap2 (NM_018773.2,180-198).
gccctctccctgaggaaat

SEQ ID NO: 675298 - DNA, 19 bp, Mus musculus
  siRNA target sequence for Scap2 (NM_018773.2,182-200).
cctctccctgaggaaatta

SEQ ID NO: 675299 - DNA, 19 bp, Mus musculus
  siRNA target sequence for Scap2 (NM_018773.2,185-203).
ctccctgaggaaattagga

SEQ ID NO: 675300 - DNA, 19 bp, Mus musculus
  siRNA target sequence for Scap2 (NM_018773.2,202-220).
gaacctgttggcagatgtt

SEQ ID NO: 675301 - DNA, 19 bp, Mus musculus
  siRNA target sequence for Scap2 (NM_018773.2,415-433).
ctcagagcgctacgataaa

SEQ ID NO: 675302 - DNA, 19 bp, Mus musculus
  siRNA target sequence for Scap2 (NM_018773.2,421-439).
gcgctacgataaagatgat

SEQ ID NO: 675303 - DNA, 19 bp, Mus musculus
  siRNA target sequence for Scap2 (NM_018773.2,482-500).
caggaccttccttttgtca

SEQ ID NO: 675304 - DNA, 19 bp, Mus musculus
  siRNA target sequence for Scap2 (NM_018773.2,484-502).
ggaccttccttttgtcata

SEQ ID NO: 675305 - DNA, 19 bp, Mus musculus
  siRNA target sequence for Scap2 (NM_018773.2,485-503).
gaccttccttttgtcataa

SEQ ID NO: 675306 - DNA, 19 bp, Mus musculus
  siRNA target sequence for Scap2 (NM_018773.2,580-598).
cagcaaaacagtgttctat

SEQ ID NO: 675307 - DNA, 19 bp, Mus musculus
  siRNA target sequence for Scap2 (NM_018773.2,582-600).
gcaaaacagtgttctatta

SEQ ID NO: 675308 - DNA, 19 bp, Mus musculus
  siRNA target sequence for Scap2 (NM_018773.2,583-601).
caaaacagtgttctattat

SEQ ID NO: 675309 - DNA, 19 bp, Mus musculus
  siRNA target sequence for Scap2 (NM_018773.2,642-660).
caatagatggctatgatgt

SEQ ID NO: 675310 - DNA, 19 bp, Mus musculus
  siRNA target sequence for Scap2 (NM_018773.2,717-735).
gtgctcccgacaaacgtat

SEQ ID NO: 675311 - DNA, 19 bp, Mus musculus
  siRNA target sequence for Scap2 (NM_018773.2,720-738).
ctcccgacaaacgtatcta

SEQ ID NO: 675312 - DNA, 19 bp, Mus musculus
  siRNA target sequence for Scap2 (NM_018773.2,723-741).
ccgacaaacgtatctatca

SEQ ID NO: 675313 - DNA, 19 bp, Mus musculus
  siRNA target sequence for Scap2 (NM_018773.2,725-743).
gacaaacgtatctatcagt

SEQ ID NO: 675314 - DNA, 19 bp, Mus musculus
  siRNA target sequence for Scap2 (NM_018773.2,777-795).
gggtccagcagctgaaatt

SEQ ID NO: 675315 - DNA, 19 bp, Mus musculus
  siRNA target sequence for Scap2 (NM_018773.2,808-826).
cctgggatccgacgttatt

SEQ ID NO: 675316 - DNA, 19 bp, Mus musculus
  siRNA target sequence for Scap2 (NM_018773.2,811-829).
gggatccgacgttattcct

SEQ ID NO: 675317 - DNA, 19 bp, Mus musculus
  siRNA target sequence for Scap2 (NM_018773.2,846-864).
gaggagaattatatgatga

SEQ ID NO: 675318 - DNA, 19 bp, Mus musculus
  siRNA target sequence for Scap2 (NM_018773.2,898-916).
gaggagccagccaatcgat

SEQ ID NO: 675319 - DNA, 19 bp, Mus musculus
  siRNA target sequence for Scap2 (NM_018773.2,903-921).
gccagccaatcgatgatga

SEQ ID NO: 675320 - DNA, 19 bp, Mus musculus
  siRNA target sequence for Scap2 (NM_018773.2,907-925).
gccaatcgatgatgagatt

SEQ ID NO: 675321 - DNA, 19 bp, Mus musculus
  siRNA target sequence for Scap2 (NM_018773.2,908-926).
ccaatcgatgatgagattt

SEQ ID NO: 675322 - DNA, 19 bp, Mus musculus
  siRNA target sequence for Scap2 (NM_018773.2,909-927).
caatcgatgatgagattta

SEQ ID NO: 675323 - DNA, 19 bp, Mus musculus
  siRNA target sequence for Scap2 (NM_018773.2,1010-1028).
cacacctcaggagataaaa

SEQ ID NO: 675324 - DNA, 19 bp, Mus musculus
  siRNA target sequence for Scap2 (NM_018773.2,1029-1047).
gcactgattacgctaattt

SEQ ID NO: 675325 - DNA, 19 bp, Mus musculus
  siRNA target sequence for Scap2 (NM_018773.2,1030-1048).
cactgattacgctaatttt

SEQ ID NO: 675326 - DNA, 19 bp, Mus musculus
  siRNA target sequence for Scap2 (NM_018773.2,1032-1050).
ctgattacgctaattttta

SEQ ID NO: 675327 - DNA, 19 bp, Mus musculus
  siRNA target sequence for Scap2 (NM_018773.2,1074-1092).
gagctctgtctgatgagtt

SEQ ID NO: 675328 - DNA, 19 bp, Mus musculus
  siRNA target sequence for Scap2 (NM_018773.2,1103-1121).
cgtggtgatgtgatttaca

SEQ ID NO: 675329 - DNA, 19 bp, Mus musculus
  siRNA target sequence for Scap2 (NM_018773.2,1107-1125).
gtgatgtgatttacattct

SEQ ID NO: 675330 - DNA, 19 bp, Mus musculus
  siRNA target sequence for Scap2 (NM_018773.2,1109-1127).
gatgtgatttacattctta

SEQ ID NO: 675331 - DNA, 19 bp, Mus musculus
  siRNA target sequence for Scap2 (NM_018773.2,1124-1142).
cttagcaaggaatacaata

SEQ ID NO: 675332 - DNA, 19 bp, Mus musculus
  siRNA target sequence for Scap2 (NM_018773.2,1129-1147).
caaggaatacaatagatat

SEQ ID NO: 675333 - DNA, 19 bp, Mus musculus
  siRNA target sequence for Scap2 (NM_018773.2,1187-1205).
gtgcctaaagcctacctaa

SEQ ID NO: 675334 - DNA, 19 bp, Mus musculus
  siRNA target sequence for Scap2 (NM_018773.2,1191-1209).
ctaaagcctacctaatgga

SEQ ID NO: 675335 - DNA, 19 bp, Mus musculus
  siRNA target sequence for Slfn2 (NM_011408.1,368-386).
gaattctcacctcagaaaa

SEQ ID NO: 675336 - DNA, 19 bp, Mus musculus
  siRNA target sequence for Slfn2 (NM_011408.1,401-419).
catctctctagctgtatgt

SEQ ID NO: 675337 - DNA, 19 bp, Mus musculus
  siRNA target sequence for Slfn2 (NM_011408.1,438-456).
ggtggagcaatcaaggtta

SEQ ID NO: 675338 - DNA, 19 bp, Mus musculus
  siRNA target sequence for Slfn2 (NM_011408.1,439-457).
gtggagcaatcaaggttaa

SEQ ID NO: 675339 - DNA, 19 bp, Mus musculus
  siRNA target sequence for Slfn2 (NM_011408.1,441-459).
ggagcaatcaaggttaaaa

SEQ ID NO: 675340 - DNA, 19 bp, Mus musculus
  siRNA target sequence for Slfn2 (NM_011408.1,442-460).
gagcaatcaaggttaaaat

SEQ ID NO: 675341 - DNA, 19 bp, Mus musculus
  siRNA target sequence for Slfn2 (NM_011408.1,445-463).
caatcaaggttaaaattga

SEQ ID NO: 675342 - DNA, 19 bp, Mus musculus
  siRNA target sequence for Slfn2 (NM_011408.1,504-522).
gatttggaagcctctcttt

SEQ ID NO: 675343 - DNA, 19 bp, Mus musculus
  siRNA target sequence for Slfn2 (NM_011408.1,514-532).
cctctctttgtaaatgtct

SEQ ID NO: 675344 - DNA, 19 bp, Mus musculus
  siRNA target sequence for Slfn2 (NM_011408.1,568-586).
gcgaaggctacatttatat

SEQ ID NO: 675345 - DNA, 19 bp, Mus musculus
  siRNA target sequence for Slfn2 (NM_011408.1,570-588).
gaaggctacatttatatct

SEQ ID NO: 675346 - DNA, 19 bp, Mus musculus
  siRNA target sequence for Slfn2 (NM_011408.1,634-652).
ccctaagaaccaatttgta

SEQ ID NO: 675347 - DNA, 19 bp, Mus musculus
  siRNA target sequence for Slfn2 (NM_011408.1,635-653).
cctaagaaccaatttgtat

SEQ ID NO: 675348 - DNA, 19 bp, Mus musculus
  siRNA target sequence for Slfn2 (NM_011408.1,868-886).
ccagatccagatatgttga

SEQ ID NO: 675349 - DNA, 19 bp, Mus musculus
  siRNA target sequence for Slfn2 (NM_011408.1,869-887).
cagatccagatatgttgaa

SEQ ID NO: 675350 - DNA, 19 bp, Mus musculus
  siRNA target sequence for Slfn2 (NM_011408.1,877-895).
gatatgttgaagttacatt

SEQ ID NO: 675351 - DNA, 19 bp, Mus musculus
  siRNA target sequence for Slfn2 (NM_011408.1,882-900).
gttgaagttacattgcttt

SEQ ID NO: 675352 - DNA, 19 bp, Mus musculus
  siRNA target sequence for Slfn2 (NM_011408.1,911-929).
cctgcgaaaacgcatcaaa

SEQ ID NO: 675353 - DNA, 19 bp, Mus musculus
  siRNA target sequence for Slfn3 (NM_011409.1,290-308).
cgtggtcaaggctcacatt

SEQ ID NO: 675354 - DNA, 19 bp, Mus musculus
  siRNA target sequence for Slfn3 (NM_011409.1,340-358).
gaatgggactggatttggt

SEQ ID NO: 675355 - DNA, 19 bp, Mus musculus
  siRNA target sequence for Slfn3 (NM_011409.1,344-362).
gggactggatttggtaaat

SEQ ID NO: 675356 - DNA, 19 bp, Mus musculus
  siRNA target sequence for Slfn3 (NM_011409.1,380-398).
gcaccttcctcatgactat

SEQ ID NO: 675357 - DNA, 19 bp, Mus musculus
  siRNA target sequence for Slfn3 (NM_011409.1,388-406).
ctcatgactatctagactt

SEQ ID NO: 675358 - DNA, 19 bp, Mus musculus
  siRNA target sequence for Slfn3 (NM_011409.1,416-434).
caaagactactttttcgtt

SEQ ID NO: 675359 - DNA, 19 bp, Mus musculus
  siRNA target sequence for Slfn3 (NM_011409.1,444-462).
ccattgaagccgaatcaga

SEQ ID NO: 675360 - DNA, 19 bp, Mus musculus
  siRNA target sequence for Slfn3 (NM_011409.1,470-488).
ggggatcaccaccttgaaa

SEQ ID NO: 675361 - DNA, 19 bp, Mus musculus
  siRNA target sequence for Slfn3 (NM_011409.1,471-489).
gggatcaccaccttgaaaa

SEQ ID NO: 675362 - DNA, 19 bp, Mus musculus
  siRNA target sequence for Slfn3 (NM_011409.1,481-499).
ccttgaaaacgaacttgta

SEQ ID NO: 675363 - DNA, 19 bp, Mus musculus
  siRNA target sequence for Slfn3 (NM_011409.1,490-508).
cgaacttgtacagaagaat

SEQ ID NO: 675364 - DNA, 19 bp, Mus musculus
  siRNA target sequence for Slfn3 (NM_011409.1,509-527).
caactcaatctcagatgaa

SEQ ID NO: 675365 - DNA, 19 bp, Mus musculus
  siRNA target sequence for Slfn3 (NM_011409.1,546-564).
gtgcagctcctcaaatcca

SEQ ID NO: 675366 - DNA, 19 bp, Mus musculus
  siRNA target sequence for Slfn3 (NM_011409.1,565-583).
ggacagatcccgaagagaa

SEQ ID NO: 675367 - DNA, 19 bp, Mus musculus
  siRNA target sequence for Slfn3 (NM_011409.1,601-619).
gttcacctgggaaaatcgt

SEQ ID NO: 675368 - DNA, 19 bp, Mus musculus
  siRNA target sequence for Slfn3 (NM_011409.1,607-625).
ctgggaaaatcgtctgtaa

SEQ ID NO: 675369 - DNA, 19 bp, Mus musculus
  siRNA target sequence for Slfn3 (NM_011409.1,610-628).
ggaaaatcgtctgtaatga

SEQ ID NO: 675370 - DNA, 19 bp, Mus musculus
  siRNA target sequence for Slfn3 (NM_011409.1,611-629).
gaaaatcgtctgtaatgaa

SEQ ID NO: 675371 - DNA, 19 bp, Mus musculus
  siRNA target sequence for Slfn3 (NM_011409.1,617-635).
cgtctgtaatgaaacacta

SEQ ID NO: 675372 - DNA, 19 bp, Mus musculus
  siRNA target sequence for Slfn3 (NM_011409.1,618-636).
gtctgtaatgaaacactaa

SEQ ID NO: 675373 - DNA, 19 bp, Mus musculus
  siRNA target sequence for Slfn3 (NM_011409.1,620-638).
ctgtaatgaaacactaaat

SEQ ID NO: 675374 - DNA, 19 bp, Mus musculus
  siRNA target sequence for Slfn3 (NM_011409.1,681-699).
gagacattctgtttcacta

SEQ ID NO: 675375 - DNA, 19 bp, Mus musculus
  siRNA target sequence for Slfn3 (NM_011409.1,703-721).
ccatacatgctgaagtaaa

SEQ ID NO: 675376 - DNA, 19 bp, Mus musculus
  siRNA target sequence for Slfn3 (NM_011409.1,1568-1586).
cacaagcacaaaaatacgt

SEQ ID NO: 675377 - DNA, 19 bp, Mus musculus
  siRNA target sequence for Slfn3 (NM_011409.1,1570-1588).
caagcacaaaaatacgtta

SEQ ID NO: 675378 - DNA, 19 bp, Mus musculus
  siRNA target sequence for Cfdp (NM_011801.1,188-206).
gatgtcaatgaattagtaa

SEQ ID NO: 675379 - DNA, 19 bp, Mus musculus
  siRNA target sequence for Cfdp (NM_011801.1,193-211).
caatgaattagtaaaggaa

SEQ ID NO: 675380 - DNA, 19 bp, Mus musculus
  siRNA target sequence for Cfdp (NM_011801.1,389-407).
cttgggtcagagaatgcaa

SEQ ID NO: 675381 - DNA, 19 bp, Mus musculus
  siRNA target sequence for Cfdp (NM_011801.1,430-448).
gtgggccagcttccttaat

SEQ ID NO: 675382 - DNA, 19 bp, Mus musculus
  siRNA target sequence for Cfdp (NM_011801.1,433-451).
ggccagcttccttaatgat

SEQ ID NO: 675383 - DNA, 19 bp, Mus musculus
  siRNA target sequence for Cfdp (NM_011801.1,473-491).
gccccaggttcacaaacta

SEQ ID NO: 675384 - DNA, 19 bp, Mus musculus
  siRNA target sequence for Cfdp (NM_011801.1,509-527).
gaagagattagttcgaata

SEQ ID NO: 675385 - DNA, 19 bp, Mus musculus
  siRNA target sequence for Cfdp (NM_011801.1,553-571).
ggataagcctagagaatca

SEQ ID NO: 675386 - DNA, 19 bp, Mus musculus
  siRNA target sequence for Cfdp (NM_011801.1,601-619).
cttcgctggcgaagaagta

SEQ ID NO: 675387 - DNA, 19 bp, Mus musculus
  siRNA target sequence for Cfdp (NM_011801.1,621-639).
gggtgactaaggaagtaga

SEQ ID NO: 675388 - DNA, 19 bp, Mus musculus
  siRNA target sequence for Cfdp (NM_011801.1,648-666).
ctaaggaagcgaagtcttt

SEQ ID NO: 675389 - DNA, 19 bp, Mus musculus
  siRNA target sequence for Cfdp (NM_011801.1,802-820).
gatgagcacccttgagaaa

SEQ ID NO: 675390 - DNA, 19 bp, Mus musculus
  siRNA target sequence for Cfdp (NM_011801.1,807-825).
gcacccttgagaaatccaa

SEQ ID NO: 675391 - DNA, 19 bp, Mus musculus
  siRNA target sequence for Fancl (NM_025923.2,188-206).
ccgggagaaaactgtgtat

SEQ ID NO: 675392 - DNA, 19 bp, Mus musculus
  siRNA target sequence for Fancl (NM_025923.2,190-208).
gggagaaaactgtgtatga

SEQ ID NO: 675393 - DNA, 19 bp, Mus musculus
  siRNA target sequence for Fancl (NM_025923.2,199-217).
ctgtgtatgagggattcat

SEQ ID NO: 675394 - DNA, 19 bp, Mus musculus
  siRNA target sequence for Fancl (NM_025923.2,201-219).
gtgtatgagggattcattt

SEQ ID NO: 675395 - DNA, 19 bp, Mus musculus
  siRNA target sequence for Fancl (NM_025923.2,221-239).
ggctcagggaagtgacttt

SEQ ID NO: 675396 - DNA, 19 bp, Mus musculus
  siRNA target sequence for Fancl (NM_025923.2,232-250).
gtgactttcacctcagaat

SEQ ID NO: 675397 - DNA, 19 bp, Mus musculus
  siRNA target sequence for Fancl (NM_025923.2,272-290).
gctcaagaaggcaagatta

SEQ ID NO: 675398 - DNA, 19 bp, Mus musculus
  siRNA target sequence for Fancl (NM_025923.2,303-321).
cagctgaaaaatatactta

SEQ ID NO: 675399 - DNA, 19 bp, Mus musculus
  siRNA target sequence for Fancl (NM_025923.2,357-375).
cactctcctgatctaatga

SEQ ID NO: 675400 - DNA, 19 bp, Mus musculus
  siRNA target sequence for Fancl (NM_025923.2,361-379).
ctcctgatctaatgagttt

SEQ ID NO: 675401 - DNA, 19 bp, Mus musculus
  siRNA target sequence for Fancl (NM_025923.2,363-381).
cctgatctaatgagtttta

SEQ ID NO: 675402 - DNA, 19 bp, Mus musculus
  siRNA target sequence for Fancl (NM_025923.2,366-384).
gatctaatgagttttatga

SEQ ID NO: 675403 - DNA, 19 bp, Mus musculus
  siRNA target sequence for Fancl (NM_025923.2,461-479).
ctgcaaagaccttcttact

SEQ ID NO: 675404 - DNA, 19 bp, Mus musculus
  siRNA target sequence for Fancl (NM_025923.2,463-481).
gcaaagaccttcttactga

SEQ ID NO: 675405 - DNA, 19 bp, Mus musculus
  siRNA target sequence for Fancl (NM_025923.2,480-498).
gagataggagccattggtt

SEQ ID NO: 675406 - DNA, 19 bp, Mus musculus
  siRNA target sequence for Fancl (NM_025923.2,490-508).
ccattggttgggataaact

SEQ ID NO: 675407 - DNA, 19 bp, Mus musculus
  siRNA target sequence for Fancl (NM_025923.2,539-557).
caagttaaaagcagatgat

SEQ ID NO: 675408 - DNA, 19 bp, Mus musculus
  siRNA target sequence for Fancl (NM_025923.2,562-580).
ctggtaggaagcacctaat

SEQ ID NO: 675409 - DNA, 19 bp, Mus musculus
  siRNA target sequence for Fancl (NM_025923.2,564-582).
ggtaggaagcacctaatca

SEQ ID NO: 675410 - DNA, 19 bp, Mus musculus
  siRNA target sequence for Fancl (NM_025923.2,734-752).
ggatgttatggatgaaatt

SEQ ID NO: 675411 - DNA, 19 bp, Mus musculus
  siRNA target sequence for Fancl (NM_025923.2,802-820).
cagcacgcaggattgcatt

SEQ ID NO: 675412 - DNA, 19 bp, Mus musculus
  siRNA target sequence for Fancl (NM_025923.2,929-947).
gctgagtggtagcattcat

SEQ ID NO: 675413 - DNA, 19 bp, Mus musculus
  siRNA target sequence for Fancl (NM_025923.2,930-948).
ctgagtggtagcattcatt

SEQ ID NO: 675414 - DNA, 19 bp, Mus musculus
  siRNA target sequence for Fancl (NM_025923.2,960-978).
gaaaatagtctgttacaaa

SEQ ID NO: 675415 - DNA, 19 bp, Mus musculus
  siRNA target sequence for Fancl (NM_025923.2,1014-1032).
cgtagtatcttggaagaat

SEQ ID NO: 675416 - DNA, 19 bp, Mus musculus
  siRNA target sequence for Fancl (NM_025923.2,1022-1040).
cttggaagaatctgacttt

SEQ ID NO: 675417 - DNA, 19 bp, Mus musculus
  siRNA target sequence for Fancl (NM_025923.2,1046-1064).
ggactgtggaatctgttat

SEQ ID NO: 675418 - DNA, 19 bp, Mus musculus
  siRNA target sequence for Fancl (NM_025923.2,1090-1108).
ctgatcaagtgtgtaataa

SEQ ID NO: 675419 - DNA, 19 bp, Mus musculus
  siRNA target sequence for Fancl (NM_025923.2,1111-1129).
cccagtgtggacaaccttt

SEQ ID NO: 675420 - DNA, 19 bp, Mus musculus
  siRNA target sequence for Fancl (NM_025923.2,1119-1137).
ggacaacctttccatgaaa

SEQ ID NO: 675421 - DNA, 19 bp, Mus musculus
  siRNA target sequence for Fancl (NM_025923.2,1120-1138).
gacaacctttccatgaaat

SEQ ID NO: 675422 - DNA, 19 bp, Mus musculus
  siRNA target sequence for Fancl (NM_025923.2,1174-1192).
gcagacagagttttaacgt

SEQ ID NO: 675423 - DNA, 19 bp, Mus musculus
  siRNA target sequence for Fancl (NM_025923.2,1181-1199).
gagttttaacgtcttcttt

SEQ ID NO: 675424 - DNA, 19 bp, Mus musculus
  siRNA target sequence for Fancl (NM_025923.2,1203-1221).
gactgtccctattgtagta

SEQ ID NO: 675425 - DNA, 19 bp, Mus musculus
  siRNA target sequence for Fancl (NM_025923.2,1216-1234).
gtagtaagccaattacctt

SEQ ID NO: 675426 - DNA, 19 bp, Mus musculus
  siRNA target sequence for Fancl (NM_025923.2,1224-1242).
ccaattaccttgaaaatgt

SEQ ID NO: 675427 - DNA, 19 bp, Mus musculus
  siRNA target sequence for Sh2d2a (NM_021309.1,352-370).
gcccccaagggaatcatga

SEQ ID NO: 675428 - DNA, 19 bp, Mus musculus
  siRNA target sequence for Sh2d2a (NM_021309.1,453-471).
cccagcatgcaagttatga

SEQ ID NO: 675429 - DNA, 19 bp, Mus musculus
  siRNA target sequence for Sh2d2a (NM_021309.1,454-472).
ccagcatgcaagttatgaa

SEQ ID NO: 675430 - DNA, 19 bp, Mus musculus
  siRNA target sequence for Sh2d2a (NM_021309.1,879-897).
caggacctgcttgaacatt

SEQ ID NO: 675431 - DNA, 19 bp, Mus musculus
  siRNA target sequence for Sh2d2a (NM_021309.1,882-900).
gacctgcttgaacattaca

SEQ ID NO: 675432 - DNA, 19 bp, Mus musculus
  siRNA target sequence for Sh2d2a (NM_021309.1,914-932).
cagcccctacggagagata

SEQ ID NO: 675433 - DNA, 19 bp, Mus musculus
  siRNA target sequence for Sh2d2a (NM_021309.1,916-934).
gcccctacggagagatact

SEQ ID NO: 675434 - DNA, 19 bp, Mus musculus
  siRNA target sequence for Sh2d2a (NM_021309.1,918-936).
ccctacggagagatactca

SEQ ID NO: 675435 - DNA, 19 bp, Mus musculus
  siRNA target sequence for Sh2d2a (NM_021309.1,1161-1179).
cctcctgaagtctatacaa

SEQ ID NO: 675436 - DNA, 19 bp, Mus musculus
  siRNA target sequence for Sh2d2a (NM_021309.1,1278-1296).
ggggacgctcctagtaata

SEQ ID NO: 675437 - DNA, 19 bp, Mus musculus
  siRNA target sequence for Sh2d2a (NM_021309.1,1279-1297).
gggacgctcctagtaatat

SEQ ID NO: 675438 - DNA, 19 bp, Mus musculus
  siRNA target sequence for Sh2d2a (NM_021309.1,1281-1299).
gacgctcctagtaatatct

SEQ ID NO: 675439 - DNA, 19 bp, Mus musculus
  siRNA target sequence for Sh2d2a (NM_021309.1,1283-1301).
cgctcctagtaatatctat

SEQ ID NO: 675440 - DNA, 19 bp, Mus musculus
  siRNA target sequence for Tm4sf9 (NM_019571.1,418-436).
gtcagttgttgcatcaaat

SEQ ID NO: 675441 - DNA, 19 bp, Mus musculus
  siRNA target sequence for Tm4sf9 (NM_019571.1,467-485).
ggtttttgggaataacgtt

SEQ ID NO: 675442 - DNA, 19 bp, Mus musculus
  siRNA target sequence for Tm4sf9 (NM_019571.1,468-486).
gtttttgggaataacgttt

SEQ ID NO: 675443 - DNA, 19 bp, Mus musculus
  siRNA target sequence for Tm4sf9 (NM_019571.1,504-522).
ggcgtggaatgaaaaaggt

SEQ ID NO: 675444 - DNA, 19 bp, Mus musculus
  siRNA target sequence for Tm4sf9 (NM_019571.1,631-649).
ggagcacttcgggaaaaca

SEQ ID NO: 675445 - DNA, 19 bp, Mus musculus
  siRNA target sequence for Tm4sf9 (NM_019571.1,710-728).
ctggggtgttggcatttgt

SEQ ID NO: 675446 - DNA, 19 bp, Mus musculus
  siRNA target sequence for Tm4sf9 (NM_019571.1,863-881).
ctgatgattggaacctaaa

SEQ ID NO: 675447 - DNA, 19 bp, Mus musculus
  siRNA target sequence for Tm4sf9 (NM_019571.1,865-883).
gatgattggaacctaaata

SEQ ID NO: 675448 - DNA, 19 bp, Mus musculus
  siRNA target sequence for Tm4sf9 (NM_019571.1,922-940).
cgatgcggtgtgccatttt

SEQ ID NO: 675449 - DNA, 19 bp, Mus musculus
  siRNA target sequence for Tm4sf9 (NM_019571.1,1001-1019).
ggcagaaaccagaagttga

SEQ ID NO: 675450 - DNA, 19 bp, Mus musculus
  siRNA target sequence for Tm4sf9 (NM_019571.1,1015-1033).
gttgaccaacagattgtaa

SEQ ID NO: 675451 - DNA, 19 bp, Mus musculus
  siRNA target sequence for Tm4sf9 (NM_019571.1,1026-1044).
gattgtaatctacacaaaa

SEQ ID NO: 675452 - DNA, 19 bp, Mus musculus
  siRNA target sequence for Tm4sf9 (NM_019571.1,1068-1086).
gtggctacaggacaattta

SEQ ID NO: 675453 - DNA, 19 bp, Mus musculus
  siRNA target sequence for Tm4sf9 (NM_019571.1,1072-1090).
ctacaggacaatttaacca

SEQ ID NO: 675454 - DNA, 19 bp, Mus musculus
  siRNA target sequence for Tm4sf9 (NM_019571.1,1088-1106).
ccatcgtggctggtatttt

SEQ ID NO: 675455 - DNA, 19 bp, Mus musculus
  siRNA target sequence for Tm4sf9 (NM_019571.1,1092-1110).
cgtggctggtattttcata

SEQ ID NO: 675456 - DNA, 19 bp, Mus musculus
  siRNA target sequence for Mtap1b (NM_008634.1,150-168).
ctagacagcaagttctact

SEQ ID NO: 675457 - DNA, 19 bp, Mus musculus
  siRNA target sequence for Mtap1b (NM_008634.1,279-297).
gaccaggaactcaaacttt

SEQ ID NO: 675458 - DNA, 19 bp, Mus musculus
  siRNA target sequence for Mtap1b (NM_008634.1,284-302).
ggaactcaaacttttcgta

SEQ ID NO: 675459 - DNA, 19 bp, Mus musculus
  siRNA target sequence for Mtap1b (NM_008634.1,285-303).
gaactcaaacttttcgtat

SEQ ID NO: 675460 - DNA, 19 bp, Mus musculus
  siRNA target sequence for Mtap1b (NM_008634.1,306-324).
cgacactctgcaagattct

SEQ ID NO: 675461 - DNA, 19 bp, Mus musculus
  siRNA target sequence for Mtap1b (NM_008634.1,359-377).
ccgaagtgacgtcttagaa

SEQ ID NO: 675462 - DNA, 19 bp, Mus musculus
  siRNA target sequence for Mtap1b (NM_008634.1,360-378).
cgaagtgacgtcttagaaa

SEQ ID NO: 675463 - DNA, 19 bp, Mus musculus
  siRNA target sequence for Mtap1b (NM_008634.1,389-407).
gatcaacccttcagatgaa

SEQ ID NO: 675464 - DNA, 19 bp, Mus musculus
  siRNA target sequence for Mtap1b (NM_008634.1,415-433).
gcactgaggtgcgtttgat

SEQ ID NO: 675465 - DNA, 19 bp, Mus musculus
  siRNA target sequence for Mtap1b (NM_008634.1,418-436).
ctgaggtgcgtttgatgat

SEQ ID NO: 675466 - DNA, 19 bp, Mus musculus
  siRNA target sequence for Mtap1b (NM_008634.1,420-438).
gaggtgcgtttgatgatca

SEQ ID NO: 675467 - DNA, 19 bp, Mus musculus
  siRNA target sequence for Mtap1b (NM_008634.1,879-897).
gcagtgaacggattcaaca

SEQ ID NO: 675468 - DNA, 19 bp, Mus musculus
  siRNA target sequence for Mtap1b (NM_008634.1,998-1016).
caatttgcctgggatcaat

SEQ ID NO: 675469 - DNA, 19 bp, Mus musculus
  siRNA target sequence for Mtap1b (NM_008634.1,1019-1037).
catgctgcagcgcaagatt

SEQ ID NO: 675470 - DNA, 19 bp, Mus musculus
  siRNA target sequence for Mtap1b (NM_008634.1,1108-1126).
ctgacctgggggttgtgtt

SEQ ID NO: 675471 - DNA, 19 bp, Mus musculus
  siRNA target sequence for Mtap1b (NM_008634.1,1155-1173).
ccagaacccaacatcaaga

SEQ ID NO: 675472 - DNA, 19 bp, Mus musculus
  siRNA target sequence for Mtap1b (NM_008634.1,1156-1174).
cagaacccaacatcaagat

SEQ ID NO: 675473 - DNA, 19 bp, Mus musculus
  siRNA target sequence for Mtap1b (NM_008634.1,1236-1254).
ccagagcctctatttagaa

SEQ ID NO: 675474 - DNA, 19 bp, Mus musculus
  siRNA target sequence for Mtap1b (NM_008634.1,1241-1259).
gcctctatttagaagtgta

SEQ ID NO: 675475 - DNA, 19 bp, Mus musculus
  siRNA target sequence for Mtap1b (NM_008634.1,1373-1391).
gtggactggcaccaacaaa

SEQ ID NO: 675476 - DNA, 19 bp, Mus musculus
  siRNA target sequence for Mtap1b (NM_008634.1,1375-1393).
ggactggcaccaacaaaga

SEQ ID NO: 675477 - DNA, 19 bp, Mus musculus
  siRNA target sequence for Mtap1b (NM_008634.1,1409-1427).
cctgcccaatggtcaagaa

SEQ ID NO: 675478 - DNA, 19 bp, Mus musculus
  siRNA target sequence for Mtap1b (NM_008634.1,1414-1432).
ccaatggtcaagaagtaga

SEQ ID NO: 675479 - DNA, 19 bp, Mus musculus
  siRNA target sequence for Mtap1b (NM_008634.1,1428-1446).
gtagacatcccgatttcct

SEQ ID NO: 675480 - DNA, 19 bp, Mus musculus
  siRNA target sequence for Mtap1b (NM_008634.1,1433-1451).
catcccgatttcctactta

SEQ ID NO: 675481 - DNA, 19 bp, Mus musculus
  siRNA target sequence for Mtap1b (NM_008634.1,1485-1503).
gccaaccccgctgagaaaa

SEQ ID NO: 675482 - DNA, 19 bp, Mus musculus
  siRNA target sequence for Mtap1b (NM_008634.1,1486-1504).
ccaaccccgctgagaaaat

SEQ ID NO: 675483 - DNA, 19 bp, Mus musculus
  siRNA target sequence for Mtap1b (NM_008634.1,1641-1659).
gtgaaacaggtcaaactga

SEQ ID NO: 675484 - DNA, 19 bp, Mus musculus
  siRNA target sequence for Mtap1b (NM_008634.1,1643-1661).
gaaacaggtcaaactgaaa

SEQ ID NO: 675485 - DNA, 19 bp, Mus musculus
  siRNA target sequence for Mtap1b (NM_008634.1,1700-1718).
gaaaccagttgccagtaaa

SEQ ID NO: 675486 - DNA, 19 bp, Mus musculus
  siRNA target sequence for Mtap1b (NM_008634.1,1705-1723).
cagttgccagtaaatctgt

SEQ ID NO: 675487 - DNA, 19 bp, Mus musculus
  siRNA target sequence for Mtap1b (NM_008634.1,1932-1950).
gagagcaaacccaaagtca

SEQ ID NO: 675488 - DNA, 19 bp, Mus musculus
  siRNA target sequence for Mtap1b (NM_008634.1,1951-1969).
ccaaggacaaagtggtaaa

SEQ ID NO: 675489 - DNA, 19 bp, Mus musculus
  siRNA target sequence for Mtap1b (NM_008634.1,2294-2312).
gaagccatctgcgttaaaa

SEQ ID NO: 675490 - DNA, 19 bp, Mus musculus
  siRNA target sequence for Mtap1b (NM_008634.1,2297-2315).
gccatctgcgttaaaacca

SEQ ID NO: 675491 - DNA, 19 bp, Mus musculus
  siRNA target sequence for Mtap1b (NM_008634.1,2314-2332).
caaaagtagcgaagaaaga

SEQ ID NO: 675492 - DNA, 19 bp, Mus musculus
  siRNA target sequence for Mtap1b (NM_008634.1,2355-2373).
cttgctgctgggaaactca

SEQ ID NO: 675493 - DNA, 19 bp, Mus musculus
  siRNA target sequence for Mtap1b (NM_008634.1,2539-2557).
cccctgaggatctaaccaa

SEQ ID NO: 675494 - DNA, 19 bp, Mus musculus
  siRNA target sequence for Mtap1b (NM_008634.1,2860-2878).
ccggagactacgaagagaa

SEQ ID NO: 675495 - DNA, 19 bp, Mus musculus
  siRNA target sequence for Mtap1b (NM_008634.1,2948-2966).
gcacagccccacagaagat

SEQ ID NO: 675496 - DNA, 19 bp, Mus musculus
  siRNA target sequence for Mtap1b (NM_008634.1,3141-3159).
ggctatgagcccgacaaaa

SEQ ID NO: 675497 - DNA, 19 bp, Mus musculus
  siRNA target sequence for Mtap1b (NM_008634.1,3143-3161).
ctatgagcccgacaaaact

SEQ ID NO: 675498 - DNA, 19 bp, Mus musculus
  siRNA target sequence for Mtap1b (NM_008634.1,3279-3297).
cgagaacctgcatcttcaa

SEQ ID NO: 675499 - DNA, 19 bp, Mus musculus
  siRNA target sequence for Mtap1b (NM_008634.1,3280-3298).
gagaacctgcatcttcaat

SEQ ID NO: 675500 - DNA, 19 bp, Mus musculus
  siRNA target sequence for Mtap1b (NM_008634.1,3368-3386).
ccagcctgaggaattcact

SEQ ID NO: 675501 - DNA, 19 bp, Mus musculus
  siRNA target sequence for Mtap1b (NM_008634.1,3403-3421).
ctcagtctaccattgagat

SEQ ID NO: 675502 - DNA, 19 bp, Mus musculus
  siRNA target sequence for Mtap1b (NM_008634.1,3405-3423).
cagtctaccattgagatat

SEQ ID NO: 675503 - DNA, 19 bp, Mus musculus
  siRNA target sequence for Mtap1b (NM_008634.1,3407-3425).
gtctaccattgagatatct

SEQ ID NO: 675504 - DNA, 19 bp, Mus musculus
  siRNA target sequence for Mtap1b (NM_008634.1,3433-3451).
ctacgccaatggatgagat

SEQ ID NO: 675505 - DNA, 19 bp, Mus musculus
  siRNA target sequence for Mtap1b (NM_008634.1,3454-3472).
ctactcctcgtgatgtgat

SEQ ID NO: 675506 - DNA, 19 bp, Mus musculus
  siRNA target sequence for Mtap1b (NM_008634.1,3508-3526).
catctcaggagttcgtaaa

SEQ ID NO: 675507 - DNA, 19 bp, Mus musculus
  siRNA target sequence for Mtap1b (NM_008634.1,3513-3531).
caggagttcgtaaacatta

SEQ ID NO: 675508 - DNA, 19 bp, Mus musculus
  siRNA target sequence for Mtap1b (NM_008634.1,3516-3534).
gagttcgtaaacattacca

SEQ ID NO: 675509 - DNA, 19 bp, Mus musculus
  siRNA target sequence for Mtap1b (NM_008634.1,3518-3536).
gttcgtaaacattaccaaa

SEQ ID NO: 675510 - DNA, 19 bp, Mus musculus
  siRNA target sequence for Mtap1b (NM_008634.1,3521-3539).
cgtaaacattaccaaatat

SEQ ID NO: 675511 - DNA, 19 bp, Mus musculus
  siRNA target sequence for Mtap1b (NM_008634.1,3573-3591).
cctgctgttgcatcattca

SEQ ID NO: 675512 - DNA, 19 bp, Mus musculus
  siRNA target sequence for Mtap1b (NM_008634.1,3574-3592).
ctgctgttgcatcattcaa

SEQ ID NO: 675513 - DNA, 19 bp, Mus musculus
  siRNA target sequence for Mtap1b (NM_008634.1,3579-3597).
gttgcatcattcaatggat

SEQ ID NO: 675514 - DNA, 19 bp, Mus musculus
  siRNA target sequence for Mtap1b (NM_008634.1,3620-3638).
cgccactgatggtaaggat

SEQ ID NO: 675515 - DNA, 19 bp, Mus musculus
  siRNA target sequence for Mtap1b (NM_008634.1,3621-3639).
gccactgatggtaaggatt

SEQ ID NO: 675516 - DNA, 19 bp, Mus musculus
  siRNA target sequence for Mtap1b (NM_008634.1,3622-3640).
ccactgatggtaaggatta

SEQ ID NO: 675517 - DNA, 19 bp, Mus musculus
  siRNA target sequence for Mtap1b (NM_008634.1,3645-3663).
gcttccgcctccaccatat

SEQ ID NO: 675518 - DNA, 19 bp, Mus musculus
  siRNA target sequence for Mtap1b (NM_008634.1,3703-3721).
ctgctcttcgtgatgctta

SEQ ID NO: 675519 - DNA, 19 bp, Mus musculus
  siRNA target sequence for Mtap1b (NM_008634.1,3748-3766).
ccagtgccgagttagacat

SEQ ID NO: 675520 - DNA, 19 bp, Mus musculus
  siRNA target sequence for Mtap1b (NM_008634.1,3751-3769).
gtgccgagttagacatcaa

SEQ ID NO: 675521 - DNA, 19 bp, Mus musculus
  siRNA target sequence for Mtap1b (NM_008634.1,3755-3773).
cgagttagacatcaaagat

SEQ ID NO: 675522 - DNA, 19 bp, Mus musculus
  siRNA target sequence for Mtap1b (NM_008634.1,3774-3792).
gtttcagatgagagactta

SEQ ID NO: 675523 - DNA, 19 bp, Mus musculus
  siRNA target sequence for Mtap1b (NM_008634.1,3826-3844).
cgccatcccccatagagaa

SEQ ID NO: 675524 - DNA, 19 bp, Mus musculus
  siRNA target sequence for Mtap1b (NM_008634.1,3855-3873).
ggtgaacgtagcgtgaatt

SEQ ID NO: 675525 - DNA, 19 bp, Mus musculus
  siRNA target sequence for Mtap1b (NM_008634.1,3856-3874).
gtgaacgtagcgtgaattt

SEQ ID NO: 675526 - DNA, 19 bp, Mus musculus
  siRNA target sequence for Mtap1b (NM_008634.1,3858-3876).
gaacgtagcgtgaatttct

SEQ ID NO: 675527 - DNA, 19 bp, Mus musculus
  siRNA target sequence for Mtap1b (NM_008634.1,3877-3895).
ctctgacacccaatgagat

SEQ ID NO: 675528 - DNA, 19 bp, Mus musculus
  siRNA target sequence for Mtap1b (NM_008634.1,3879-3897).
ctgacacccaatgagatta

SEQ ID NO: 675529 - DNA, 19 bp, Mus musculus
  siRNA target sequence for Mtap1b (NM_008634.1,3941-3959).
gacccaggcagtagttgaa

SEQ ID NO: 675530 - DNA, 19 bp, Mus musculus
  siRNA target sequence for Mtap1b (NM_008634.1,3943-3961).
cccaggcagtagttgaaga

SEQ ID NO: 675531 - DNA, 19 bp, Mus musculus
  siRNA target sequence for Mtap1b (NM_008634.1,3948-3966).
gcagtagttgaagaacatt

SEQ ID NO: 675532 - DNA, 19 bp, Mus musculus
  siRNA target sequence for Mtap1b (NM_008634.1,4030-4048).
ctggccacacaccttacta

SEQ ID NO: 675533 - DNA, 19 bp, Mus musculus
  siRNA target sequence for Mtap1b (NM_008634.1,4035-4053).
cacacaccttactaccaat

SEQ ID NO: 675534 - DNA, 19 bp, Mus musculus
  siRNA target sequence for Mtap1b (NM_008634.1,4113-4131).
gttccagtgagctttgaat

SEQ ID NO: 675535 - DNA, 19 bp, Mus musculus
  siRNA target sequence for Mtap1b (NM_008634.1,4116-4134).
ccagtgagctttgaattca

SEQ ID NO: 675536 - DNA, 19 bp, Mus musculus
  siRNA target sequence for Mtap1b (NM_008634.1,4384-4402).
cttccactggtctttacca

SEQ ID NO: 675537 - DNA, 19 bp, Mus musculus
  siRNA target sequence for Mtap1b (NM_008634.1,4418-4436).
gaaaagcacgggcttcata

SEQ ID NO: 675538 - DNA, 19 bp, Mus musculus
  siRNA target sequence for Mtap1b (NM_008634.1,4426-4444).
cgggcttcatacccataaa

SEQ ID NO: 675539 - DNA, 19 bp, Mus musculus
  siRNA target sequence for Mtap1b (NM_008634.1,4471-4489).
ccagtgatgttgaaaccat

SEQ ID NO: 675540 - DNA, 19 bp, Mus musculus
  siRNA target sequence for Mtap1b (NM_008634.1,4482-4500).
gaaaccatgagttctcaat

SEQ ID NO: 675541 - DNA, 19 bp, Mus musculus
  siRNA target sequence for Mtap1b (NM_008634.1,4495-4513).
ctcaatcagctctagcttt

SEQ ID NO: 675542 - DNA, 19 bp, Mus musculus
  siRNA target sequence for Mtap1b (NM_008634.1,4536-4554).
gatgtatctccaacacaaa

SEQ ID NO: 675543 - DNA, 19 bp, Mus musculus
  siRNA target sequence for Mtap1b (NM_008634.1,4852-4870).
cagaaatgtctccatctaa

SEQ ID NO: 675544 - DNA, 19 bp, Mus musculus
  siRNA target sequence for Mtap1b (NM_008634.1,4879-4897).
gcccaagaccgatgtcaat

SEQ ID NO: 675545 - DNA, 19 bp, Mus musculus
  siRNA target sequence for Mtap1b (NM_008634.1,4880-4898).
cccaagaccgatgtcaatt

SEQ ID NO: 675546 - DNA, 19 bp, Mus musculus
  siRNA target sequence for Mtap1b (NM_008634.1,4881-4899).
ccaagaccgatgtcaattt

SEQ ID NO: 675547 - DNA, 19 bp, Mus musculus
  siRNA target sequence for Mtap1b (NM_008634.1,4917-4935).
cccaagacagccaaatcca

SEQ ID NO: 675548 - DNA, 19 bp, Mus musculus
  siRNA target sequence for Mtap1b (NM_008634.1,4956-4974).
cgatctgaacagtcttcta

SEQ ID NO: 675549 - DNA, 19 bp, Mus musculus
  siRNA target sequence for Mtap1b (NM_008634.1,4962-4980).
gaacagtcttctatgtcta

SEQ ID NO: 675550 - DNA, 19 bp, Mus musculus
  siRNA target sequence for Mtap1b (NM_008634.1,5118-5136).
gatatccaggactctagtt

SEQ ID NO: 675551 - DNA, 19 bp, Mus musculus
  siRNA target sequence for Mtap1b (NM_008634.1,5285-5303).
cactctctctgatgttgtt

SEQ ID NO: 675552 - DNA, 19 bp, Mus musculus
  siRNA target sequence for Mtap1b (NM_008634.1,5307-5325).
cccagagagatgtccttat

SEQ ID NO: 675553 - DNA, 19 bp, Mus musculus
  siRNA target sequence for Mtap1b (NM_008634.1,5308-5326).
ccagagagatgtccttata

SEQ ID NO: 675554 - DNA, 19 bp, Mus musculus
  siRNA target sequence for Mtap1b (NM_008634.1,5328-5346).
gcctcacttgcgtctgaaa

SEQ ID NO: 675555 - DNA, 19 bp, Mus musculus
  siRNA target sequence for Mtap1b (NM_008634.1,5329-5347).
cctcacttgcgtctgaaaa

SEQ ID NO: 675556 - DNA, 19 bp, Mus musculus
  siRNA target sequence for Mtap1b (NM_008634.1,5330-5348).
ctcacttgcgtctgaaaaa

SEQ ID NO: 675557 - DNA, 19 bp, Mus musculus
  siRNA target sequence for Mtap1b (NM_008634.1,5332-5350).
cacttgcgtctgaaaaagt

SEQ ID NO: 675558 - DNA, 19 bp, Mus musculus
  siRNA target sequence for Mtap1b (NM_008634.1,5369-5387).
gaagctctctccgaaatct

SEQ ID NO: 675559 - DNA, 19 bp, Mus musculus
  siRNA target sequence for Mtap1b (NM_008634.1,5373-5391).
ctctctccgaaatctgata

SEQ ID NO: 675560 - DNA, 19 bp, Mus musculus
  siRNA target sequence for Mtap1b (NM_008634.1,5412-5430).
gagtcctcacctttatatt

SEQ ID NO: 675561 - DNA, 19 bp, Mus musculus
  siRNA target sequence for Mtap1b (NM_008634.1,5414-5432).
gtcctcacctttatattca

SEQ ID NO: 675562 - DNA, 19 bp, Mus musculus
  siRNA target sequence for Mtap1b (NM_008634.1,5491-5509).
cctcttccccaccaataga

SEQ ID NO: 675563 - DNA, 19 bp, Mus musculus
  siRNA target sequence for Mtap1b (NM_008634.1,5537-5555).
ccgctcctcaatgctattt

SEQ ID NO: 675564 - DNA, 19 bp, Mus musculus
  siRNA target sequence for Mtap1b (NM_008634.1,5539-5557).
gctcctcaatgctatttga

SEQ ID NO: 675565 - DNA, 19 bp, Mus musculus
  siRNA target sequence for Mtap1b (NM_008634.1,5543-5561).
ctcaatgctatttgataca

SEQ ID NO: 675566 - DNA, 19 bp, Mus musculus
  siRNA target sequence for Mtap1b (NM_008634.1,5549-5567).
gctatttgatacaatgcaa

SEQ ID NO: 675567 - DNA, 19 bp, Mus musculus
  siRNA target sequence for Mtap1b (NM_008634.1,5568-5586).
catcatctggccttgaata

SEQ ID NO: 675568 - DNA, 19 bp, Mus musculus
  siRNA target sequence for Mtap1b (NM_008634.1,5579-5597).
cttgaatagagatttgact

SEQ ID NO: 675569 - DNA, 19 bp, Mus musculus
  siRNA target sequence for Mtap1b (NM_008634.1,5627-5645).
gaagacacccggagacttt

SEQ ID NO: 675570 - DNA, 19 bp, Mus musculus
  siRNA target sequence for Mtap1b (NM_008634.1,5632-5650).
cacccggagactttaacta

SEQ ID NO: 675571 - DNA, 19 bp, Mus musculus
  siRNA target sequence for Mtap1b (NM_008634.1,5642-5660).
ctttaactatgcctatcaa

SEQ ID NO: 675572 - DNA, 19 bp, Mus musculus
  siRNA target sequence for Mtap1b (NM_008634.1,5892-5910).
gaagagggtggctattcat

SEQ ID NO: 675573 - DNA, 19 bp, Mus musculus
  siRNA target sequence for Mtap1b (NM_008634.1,5930-5948).
gacacggacccctgaagta

SEQ ID NO: 675574 - DNA, 19 bp, Mus musculus
  siRNA target sequence for Mtap1b (NM_008634.1,6050-6068).
ctgtagctactcctatgaa

SEQ ID NO: 675575 - DNA, 19 bp, Mus musculus
  siRNA target sequence for Mtap1b (NM_008634.1,6113-6131).
ctacgagacaagtacaaaa

SEQ ID NO: 675576 - DNA, 19 bp, Mus musculus
  siRNA target sequence for Mtap1b (NM_008634.1,6147-6165).
gacacctctgcatactgtt

SEQ ID NO: 675577 - DNA, 19 bp, Mus musculus
  siRNA target sequence for Mtap1b (NM_008634.1,6235-6253).
gctacactacggaaaagaa

SEQ ID NO: 675578 - DNA, 19 bp, Mus musculus
  siRNA target sequence for Mtap1b (NM_008634.1,6270-6288).
cgccaggatgttgatttat

SEQ ID NO: 675579 - DNA, 19 bp, Mus musculus
  siRNA target sequence for Mtap1b (NM_008634.1,6332-6350).
ctcgccttccttcattaat

SEQ ID NO: 675580 - DNA, 19 bp, Mus musculus
  siRNA target sequence for Mtap1b (NM_008634.1,6431-6449).
cccaccttcaggaggaaaa

SEQ ID NO: 675581 - DNA, 19 bp, Mus musculus
  siRNA target sequence for Mtap1b (NM_008634.1,6557-6575).
cacagccgacgccaatatt

SEQ ID NO: 675582 - DNA, 19 bp, Mus musculus
  siRNA target sequence for Mtap1b (NM_008634.1,6561-6579).
gccgacgccaatattgact

SEQ ID NO: 675583 - DNA, 19 bp, Mus musculus
  siRNA target sequence for Mtap1b (NM_008634.1,6611-6629).
caaaaccgtcacatacaaa

SEQ ID NO: 675584 - DNA, 19 bp, Mus musculus
  siRNA target sequence for Mtap1b (NM_008634.1,6800-6818).
gtcctcttcacctgtcaaa

SEQ ID NO: 675585 - DNA, 19 bp, Mus musculus
  siRNA target sequence for Mtap1b (NM_008634.1,6917-6935).
gaaagaatccgtggaaaaa

SEQ ID NO: 675586 - DNA, 19 bp, Mus musculus
  siRNA target sequence for Mtap1b (NM_008634.1,7096-7114).
caggcctccctgtgtattt

SEQ ID NO: 675587 - DNA, 19 bp, Mus musculus
  siRNA target sequence for Mtap1b (NM_008634.1,7177-7195).
gagtgaggtcatcttacta

SEQ ID NO: 675588 - DNA, 19 bp, Mus musculus
  siRNA target sequence for Mtap1b (NM_008634.1,7421-7439).
cttccccgcatgcaagata

SEQ ID NO: 675589 - DNA, 19 bp, Mus musculus
  siRNA target sequence for Mtap1b (NM_008634.1,7426-7444).
ccgcatgcaagatagaact

SEQ ID NO: 675590 - DNA, 19 bp, Mus musculus
  siRNA target sequence for Tbce (NM_178337.1,99-117).
gtgacattttgccattaga

SEQ ID NO: 675591 - DNA, 19 bp, Mus musculus
  siRNA target sequence for Tbce (NM_178337.1,121-139).
cattggtagaagagttgaa

SEQ ID NO: 675592 - DNA, 19 bp, Mus musculus
  siRNA target sequence for Tbce (NM_178337.1,246-264).
ggagccacgaaggtactat

SEQ ID NO: 675593 - DNA, 19 bp, Mus musculus
  siRNA target sequence for Tbce (NM_178337.1,249-267).
gccacgaaggtactatgta

SEQ ID NO: 675594 - DNA, 19 bp, Mus musculus
  siRNA target sequence for Tbce (NM_178337.1,250-268).
ccacgaaggtactatgtat

SEQ ID NO: 675595 - DNA, 19 bp, Mus musculus
  siRNA target sequence for Tbce (NM_178337.1,251-269).
cacgaaggtactatgtatt

SEQ ID NO: 675596 - DNA, 19 bp, Mus musculus
  siRNA target sequence for Tbce (NM_178337.1,302-320).
gttcgtccaagcaaagtta

SEQ ID NO: 675597 - DNA, 19 bp, Mus musculus
  siRNA target sequence for Tbce (NM_178337.1,305-323).
cgtccaagcaaagttaatt

SEQ ID NO: 675598 - DNA, 19 bp, Mus musculus
  siRNA target sequence for Tbce (NM_178337.1,306-324).
gtccaagcaaagttaattt

SEQ ID NO: 675599 - DNA, 19 bp, Mus musculus
  siRNA target sequence for Tbce (NM_178337.1,389-407).
gaaaattcgtgttccttaa

SEQ ID NO: 675600 - DNA, 19 bp, Mus musculus
  siRNA target sequence for Tbce (NM_178337.1,422-440).
caagtgcaaactattggtt

SEQ ID NO: 675601 - DNA, 19 bp, Mus musculus
  siRNA target sequence for Tbce (NM_178337.1,437-455).
ggttttgaacatattacaa

SEQ ID NO: 675602 - DNA, 19 bp, Mus musculus
  siRNA target sequence for Tbce (NM_178337.1,550-568).
ccccaatattcgagttgta

SEQ ID NO: 675603 - DNA, 19 bp, Mus musculus
  siRNA target sequence for Tbce (NM_178337.1,551-569).
cccaatattcgagttgtaa

SEQ ID NO: 675604 - DNA, 19 bp, Mus musculus
  siRNA target sequence for Tbce (NM_178337.1,552-570).
ccaatattcgagttgtaaa

SEQ ID NO: 675605 - DNA, 19 bp, Mus musculus
  siRNA target sequence for Tbce (NM_178337.1,560-578).
cgagttgtaaatttatcca

SEQ ID NO: 675606 - DNA, 19 bp, Mus musculus
  siRNA target sequence for Tbce (NM_178337.1,563-581).
gttgtaaatttatccaaaa

SEQ ID NO: 675607 - DNA, 19 bp, Mus musculus
  siRNA target sequence for Tbce (NM_178337.1,680-698).
gactcaccaactctaacta

SEQ ID NO: 675608 - DNA, 19 bp, Mus musculus
  siRNA target sequence for Tbce (NM_178337.1,682-700).
ctcaccaactctaactaga

SEQ ID NO: 675609 - DNA, 19 bp, Mus musculus
  siRNA target sequence for Tbce (NM_178337.1,687-705).
caactctaactagaacatt

SEQ ID NO: 675610 - DNA, 19 bp, Mus musculus
  siRNA target sequence for Tbce (NM_178337.1,692-710).
ctaactagaacattttcta

SEQ ID NO: 675611 - DNA, 19 bp, Mus musculus
  siRNA target sequence for Tbce (NM_178337.1,718-736).
gactttagtcctaaacaaa

SEQ ID NO: 675612 - DNA, 19 bp, Mus musculus
  siRNA target sequence for Tbce (NM_178337.1,782-800).
ccagtcctcgaggaacttt

SEQ ID NO: 675613 - DNA, 19 bp, Mus musculus
  siRNA target sequence for Tbce (NM_178337.1,783-801).
cagtcctcgaggaacttta

SEQ ID NO: 675614 - DNA, 19 bp, Mus musculus
  siRNA target sequence for Tbce (NM_178337.1,802-820).
cctcaagtctaacaatatt

SEQ ID NO: 675615 - DNA, 19 bp, Mus musculus
  siRNA target sequence for Tbce (NM_178337.1,877-895).
ctccaacccatcaattgat

SEQ ID NO: 675616 - DNA, 19 bp, Mus musculus
  siRNA target sequence for Tbce (NM_178337.1,880-898).
caacccatcaattgatgaa

SEQ ID NO: 675617 - DNA, 19 bp, Mus musculus
  siRNA target sequence for Tbce (NM_178337.1,901-919).
ccagctgagccttatagca

SEQ ID NO: 675618 - DNA, 19 bp, Mus musculus
  siRNA target sequence for Tbce (NM_178337.1,986-1004).
gctgaaattggatgcaaaa

SEQ ID NO: 675619 - DNA, 19 bp, Mus musculus
  siRNA target sequence for Tbce (NM_178337.1,1039-1057).
caatgacaaccagatatca

SEQ ID NO: 675620 - DNA, 19 bp, Mus musculus
  siRNA target sequence for Tbce (NM_178337.1,1043-1061).
gacaaccagatatcagaat

SEQ ID NO: 675621 - DNA, 19 bp, Mus musculus
  siRNA target sequence for Tbce (NM_178337.1,1051-1069).
gatatcagaatggtcattt

SEQ ID NO: 675622 - DNA, 19 bp, Mus musculus
  siRNA target sequence for Tbce (NM_178337.1,1103-1121).
gccctgtcctgcactagaa

SEQ ID NO: 675623 - DNA, 19 bp, Mus musculus
  siRNA target sequence for Tbce (NM_178337.1,1104-1122).
ccctgtcctgcactagaaa

SEQ ID NO: 675624 - DNA, 19 bp, Mus musculus
  siRNA target sequence for Tbce (NM_178337.1,1226-1244).
gctgagctagattatcgaa

SEQ ID NO: 675625 - DNA, 19 bp, Mus musculus
  siRNA target sequence for Tbce (NM_178337.1,1227-1245).
ctgagctagattatcgaaa

SEQ ID NO: 675626 - DNA, 19 bp, Mus musculus
  siRNA target sequence for Tbce (NM_178337.1,1304-1322).
ccaaatgcagcgtttctct

SEQ ID NO: 675627 - DNA, 19 bp, Mus musculus
  siRNA target sequence for Tbce (NM_178337.1,1391-1409).
cagcagccattcatgctaa

SEQ ID NO: 675628 - DNA, 19 bp, Mus musculus
  siRNA target sequence for Tbce (NM_178337.1,1393-1411).
gcagccattcatgctaaaa

SEQ ID NO: 675629 - DNA, 19 bp, Mus musculus
  siRNA target sequence for Tbce (NM_178337.1,1418-1436).
ctactaaccctgaagataa

SEQ ID NO: 675630 - DNA, 19 bp, Mus musculus
  siRNA target sequence for Tbce (NM_178337.1,1429-1447).
gaagataaaatgctcaaat

SEQ ID NO: 675631 - DNA, 19 bp, Mus musculus
  siRNA target sequence for Tbce (NM_178337.1,1432-1450).
gataaaatgctcaaatcaa

SEQ ID NO: 675632 - DNA, 19 bp, Mus musculus
  siRNA target sequence for Tbce (NM_178337.1,1452-1470).
ctgaacggcaaatattaga

SEQ ID NO: 675633 - DNA, 19 bp, Mus musculus
  siRNA target sequence for Tbce (NM_178337.1,1489-1507).
catgacagttcaaaaggta

SEQ ID NO: 675634 - DNA, 19 bp, Mus musculus
  siRNA target sequence for Tbce (NM_178337.1,1519-1537).
gtcacgtcttctcaaagtt

SEQ ID NO: 675635 - DNA, 19 bp, Mus musculus
  siRNA target sequence for Tbce (NM_178337.1,1607-1625).
gacctacagccattacagt

SEQ ID NO: 675636 - DNA, 19 bp, Mus musculus
  siRNA target sequence for Tbce (NM_178337.1,1609-1627).
cctacagccattacagttt

SEQ ID NO: 675637 - DNA, 19 bp, Mus musculus
  siRNA target sequence for D2Ertd435e (NM_153387.1,222-240).
ggtacccagggtccatttt

SEQ ID NO: 675638 - DNA, 19 bp, Mus musculus
  siRNA target sequence for D2Ertd435e (NM_153387.1,357-375).
ctgagttcattgaacagta

SEQ ID NO: 675639 - DNA, 19 bp, Mus musculus
  siRNA target sequence for D2Ertd435e (NM_153387.1,530-548).
gacccgcatctctccatat

SEQ ID NO: 675640 - DNA, 19 bp, Mus musculus
  siRNA target sequence for D2Ertd435e (NM_153387.1,532-550).
cccgcatctctccatatca

SEQ ID NO: 675641 - DNA, 19 bp, Mus musculus
  siRNA target sequence for D2Ertd435e (NM_153387.1,541-559).
ctccatatcacatgtcaat

SEQ ID NO: 675642 - DNA, 19 bp, Mus musculus
  siRNA target sequence for D2Ertd435e (NM_153387.1,543-561).
ccatatcacatgtcaatta

SEQ ID NO: 675643 - DNA, 19 bp, Mus musculus
  siRNA target sequence for D2Ertd435e (NM_153387.1,591-609).
cctctgtgatggttgtagt

SEQ ID NO: 675644 - DNA, 19 bp, Mus musculus
  siRNA target sequence for D2Ertd435e (NM_153387.1,601-619).
ggttgtagtggagcaaatt

SEQ ID NO: 675645 - DNA, 19 bp, Mus musculus
  siRNA target sequence for D2Ertd435e (NM_153387.1,602-620).
gttgtagtggagcaaatta

SEQ ID NO: 675646 - DNA, 19 bp, Mus musculus
  siRNA target sequence for D2Ertd435e (NM_153387.1,690-708).
cagtccgaagcgcattaga

SEQ ID NO: 675647 - DNA, 19 bp, Mus musculus
  siRNA target sequence for D2Ertd435e (NM_153387.1,692-710).
gtccgaagcgcattagaaa

SEQ ID NO: 675648 - DNA, 19 bp, Mus musculus
  siRNA target sequence for D2Ertd435e (NM_153387.1,695-713).
cgaagcgcattagaaaaaa

SEQ ID NO: 675649 - DNA, 19 bp, Mus musculus
  siRNA target sequence for D2Ertd435e (NM_153387.1,699-717).
gcgcattagaaaaaatcct

SEQ ID NO: 675650 - DNA, 19 bp, Mus musculus
  siRNA target sequence for D2Ertd435e (NM_153387.1,726-744).
gccatggagtcatgtataa

SEQ ID NO: 675651 - DNA, 19 bp, Mus musculus
  siRNA target sequence for D2Ertd435e (NM_153387.1,727-745).
ccatggagtcatgtataaa

SEQ ID NO: 675652 - DNA, 19 bp, Mus musculus
  siRNA target sequence for D2Ertd435e (NM_153387.1,766-784).
gcatggactccttttggat

SEQ ID NO: 675653 - DNA, 19 bp, Mus musculus
  siRNA target sequence for D2Ertd435e (NM_153387.1,1018-1036).
cctctttgttggagaatct

SEQ ID NO: 675654 - DNA, 19 bp, Mus musculus
  siRNA target sequence for D2Ertd435e (NM_153387.1,1035-1053).
ctgtccaaatgtttgagaa

SEQ ID NO: 675655 - DNA, 19 bp, Mus musculus
  siRNA target sequence for D2Ertd435e (NM_153387.1,1074-1092).
ggaaagggtccatcttgaa

SEQ ID NO: 675656 - DNA, 19 bp, Mus musculus
  siRNA target sequence for D2Ertd435e (NM_153387.1,1075-1093).
gaaagggtccatcttgaaa

SEQ ID NO: 675657 - DNA, 19 bp, Mus musculus
  siRNA target sequence for D2Ertd435e (NM_153387.1,1080-1098).
ggtccatcttgaaaaacca

SEQ ID NO: 675658 - DNA, 19 bp, Mus musculus
  siRNA target sequence for D2Ertd435e (NM_153387.1,1172-1190).
gtggtagatcggattcgta

SEQ ID NO: 675659 - DNA, 19 bp, Mus musculus
  siRNA target sequence for D2Ertd435e (NM_153387.1,1222-1240).
ggtggaagagtcagattta

SEQ ID NO: 675660 - DNA, 19 bp, Mus musculus
  siRNA target sequence for D2Ertd435e (NM_153387.1,1244-1262).
ggtcagctgaagatcatta

SEQ ID NO: 675661 - DNA, 19 bp, Mus musculus
  siRNA target sequence for D2Ertd435e (NM_153387.1,1432-1450).
gcacctgacgattgagtat

SEQ ID NO: 675662 - DNA, 19 bp, Mus musculus
  siRNA target sequence for D2Ertd435e (NM_153387.1,1435-1453).
cctgacgattgagtatcat

SEQ ID NO: 675663 - DNA, 19 bp, Mus musculus
  siRNA target sequence for D2Ertd435e (NM_153387.1,1542-1560).
ctgctctagggctttccta

SEQ ID NO: 675664 - DNA, 19 bp, Mus musculus
  siRNA target sequence for D2Ertd435e (NM_153387.1,1622-1640).
gtttttaagtacttactga

SEQ ID NO: 675665 - DNA, 19 bp, Mus musculus
  siRNA target sequence for D2Ertd435e (NM_153387.1,1691-1709).
cagcgcaaacacctcaaat

SEQ ID NO: 675666 - DNA, 19 bp, Mus musculus
  siRNA target sequence for D2Ertd435e (NM_153387.1,1727-1745).
gtcaagtggcgcctaagaa

SEQ ID NO: 675667 - DNA, 19 bp, Mus musculus
  siRNA target sequence for D2Ertd435e (NM_153387.1,1753-1771).
ggccttcttggtagataat

SEQ ID NO: 675668 - DNA, 19 bp, Mus musculus
  siRNA target sequence for D2Ertd435e (NM_153387.1,1755-1773).
ccttcttggtagataatct

SEQ ID NO: 675669 - DNA, 19 bp, Mus musculus
  siRNA target sequence for D2Ertd435e (NM_153387.1,1819-1837).
gctgcttcatcagatcaat

SEQ ID NO: 675670 - DNA, 19 bp, Mus musculus
  siRNA target sequence for D2Ertd435e (NM_153387.1,1820-1838).
ctgcttcatcagatcaatt

SEQ ID NO: 675671 - DNA, 19 bp, Mus musculus
  siRNA target sequence for D2Ertd435e (NM_153387.1,1822-1840).
gcttcatcagatcaattct

SEQ ID NO: 675672 - DNA, 19 bp, Mus musculus
  siRNA target sequence for D2Ertd435e (NM_153387.1,1823-1841).
cttcatcagatcaattcta

SEQ ID NO: 675673 - DNA, 19 bp, Mus musculus
  siRNA target sequence for D2Ertd435e (NM_153387.1,1868-1886).
gcacacgaccacttcctaa

SEQ ID NO: 675674 - DNA, 19 bp, Mus musculus
  siRNA target sequence for D2Ertd435e (NM_153387.1,1873-1891).
cgaccacttcctaagcaat

SEQ ID NO: 675675 - DNA, 19 bp, Mus musculus
  siRNA target sequence for D2Ertd435e (NM_153387.1,2063-2081).
ctcctgttcaagattcttt

SEQ ID NO: 675676 - DNA, 19 bp, Mus musculus
  siRNA target sequence for D2Ertd435e (NM_153387.1,2107-2125).
ctcagatttggctcagtta

SEQ ID NO: 675677 - DNA, 19 bp, Mus musculus
  siRNA target sequence for D2Ertd435e (NM_153387.1,2126-2144).
ctgctccggctagactata

SEQ ID NO: 675678 - DNA, 19 bp, Mus musculus
  siRNA target sequence for D2Ertd435e (NM_153387.1,2128-2146).
gctccggctagactataat

SEQ ID NO: 675679 - DNA, 19 bp, Mus musculus
  siRNA target sequence for D2Ertd435e (NM_153387.1,2129-2147).
ctccggctagactataata

SEQ ID NO: 675680 - DNA, 19 bp, Mus musculus
  siRNA target sequence for D2Ertd435e (NM_153387.1,2131-2149).
ccggctagactataataaa

SEQ ID NO: 675681 - DNA, 19 bp, Mus musculus
  siRNA target sequence for D2Ertd435e (NM_153387.1,2132-2150).
cggctagactataataaat

SEQ ID NO: 675682 - DNA, 19 bp, Mus musculus
  siRNA target sequence for D2Ertd435e (NM_153387.1,2133-2151).
ggctagactataataaata

SEQ ID NO: 675683 - DNA, 19 bp, Mus musculus
  siRNA target sequence for Dctn3 (NM_016890.2,182-200).
gggagagggtgaagattct

SEQ ID NO: 675684 - DNA, 19 bp, Mus musculus
  siRNA target sequence for Dctn3 (NM_016890.2,189-207).
ggtgaagattctctacaaa

SEQ ID NO: 675685 - DNA, 19 bp, Mus musculus
  siRNA target sequence for Dctn3 (NM_016890.2,275-293).
cgaagttgcagttcatctt

SEQ ID NO: 675686 - DNA, 19 bp, Mus musculus
  siRNA target sequence for Dctn3 (NM_016890.2,326-344).
cactcctggaacaagtgaa

SEQ ID NO: 675687 - DNA, 19 bp, Mus musculus
  siRNA target sequence for Dctn3 (NM_016890.2,455-473).
cgatcactgaagagtctaa

SEQ ID NO: 675688 - DNA, 19 bp, Mus musculus
  siRNA target sequence for Dctn3 (NM_016890.2,484-502).
gaagggtataacaagacta

SEQ ID NO: 675689 - DNA, 19 bp, Mus musculus
  siRNA target sequence for Dctn3 (NM_016890.2,488-506).
ggtataacaagactacaat

SEQ ID NO: 675690 - DNA, 19 bp, Mus musculus
  siRNA target sequence for Dctn3 (NM_016890.2,529-547).
cagtgggatgagttactct

SEQ ID NO: 675691 - DNA, 19 bp, Mus musculus
  siRNA target sequence for Gtse1 (NM_013882.1,106-124).
gtagtaaaaaagaagactt

SEQ ID NO: 675692 - DNA, 19 bp, Mus musculus
  siRNA target sequence for Gtse1 (NM_013882.1,208-226).
ggcctgttggacataaaga

SEQ ID NO: 675693 - DNA, 19 bp, Mus musculus
  siRNA target sequence for Gtse1 (NM_013882.1,365-383).
ggccttacagatagaaagt

SEQ ID NO: 675694 - DNA, 19 bp, Mus musculus
  siRNA target sequence for Gtse1 (NM_013882.1,407-425).
ggctgccacgccccaaaat

SEQ ID NO: 675695 - DNA, 19 bp, Mus musculus
  siRNA target sequence for Gtse1 (NM_013882.1,453-471).
gtgcaggactcacagttaa

SEQ ID NO: 675696 - DNA, 19 bp, Mus musculus
  siRNA target sequence for Gtse1 (NM_013882.1,455-473).
gcaggactcacagttaaaa

SEQ ID NO: 675697 - DNA, 19 bp, Mus musculus
  siRNA target sequence for Gtse1 (NM_013882.1,674-692).
gccgttgccaagagaatca

SEQ ID NO: 675698 - DNA, 19 bp, Mus musculus
  siRNA target sequence for Gtse1 (NM_013882.1,675-693).
ccgttgccaagagaatcaa

SEQ ID NO: 675699 - DNA, 19 bp, Mus musculus
  siRNA target sequence for Gtse1 (NM_013882.1,677-695).
gttgccaagagaatcaagt

SEQ ID NO: 675700 - DNA, 19 bp, Mus musculus
  siRNA target sequence for Gtse1 (NM_013882.1,712-730).
gtcaggctgggcctcaaaa

SEQ ID NO: 675701 - DNA, 19 bp, Mus musculus
  siRNA target sequence for Gtse1 (NM_013882.1,714-732).
caggctgggcctcaaaaga

SEQ ID NO: 675702 - DNA, 19 bp, Mus musculus
  siRNA target sequence for Gtse1 (NM_013882.1,819-837).
gtgccagccagcattcaga

SEQ ID NO: 675703 - DNA, 19 bp, Mus musculus
  siRNA target sequence for Gtse1 (NM_013882.1,838-856).
ggacgaaactcgtgaatga

SEQ ID NO: 675704 - DNA, 19 bp, Mus musculus
  siRNA target sequence for Gtse1 (NM_013882.1,839-857).
gacgaaactcgtgaatgaa

SEQ ID NO: 675705 - DNA, 19 bp, Mus musculus
  siRNA target sequence for Gtse1 (NM_013882.1,841-859).
cgaaactcgtgaatgaaaa

SEQ ID NO: 675706 - DNA, 19 bp, Mus musculus
  siRNA target sequence for Gtse1 (NM_013882.1,957-975).
ggcaagttggggctaaaga

SEQ ID NO: 675707 - DNA, 19 bp, Mus musculus
  siRNA target sequence for Gtse1 (NM_013882.1,1097-1115).
cagtgaacaacgttcaagt

SEQ ID NO: 675708 - DNA, 19 bp, Mus musculus
  siRNA target sequence for Gtse1 (NM_013882.1,1352-1370).
gacacctcagttgaataaa

SEQ ID NO: 675709 - DNA, 19 bp, Mus musculus
  siRNA target sequence for Gtse1 (NM_013882.1,1386-1404).
cgacgggactcctatctga

SEQ ID NO: 675710 - DNA, 19 bp, Mus musculus
  siRNA target sequence for Gtse1 (NM_013882.1,1480-1498).
gaggagtaaccccaaagtt

SEQ ID NO: 675711 - DNA, 19 bp, Mus musculus
  siRNA target sequence for Gtse1 (NM_013882.1,1482-1500).
ggagtaaccccaaagttct

SEQ ID NO: 675712 - DNA, 19 bp, Mus musculus
  siRNA target sequence for Gtse1 (NM_013882.1,1760-1778).
gagaagatctacagttaga

SEQ ID NO: 675713 - DNA, 19 bp, Mus musculus
  siRNA target sequence for Gtse1 (NM_013882.1,1867-1885).
ccgtgcctcaagcacttaa

SEQ ID NO: 675714 - DNA, 19 bp, Mus musculus
  siRNA target sequence for Gtse1 (NM_013882.1,1871-1889).
gcctcaagcacttaacttt

SEQ ID NO: 675715 - DNA, 19 bp, Mus musculus
  siRNA target sequence for Gtse1 (NM_013882.1,1872-1890).
cctcaagcacttaactttt

SEQ ID NO: 675716 - DNA, 19 bp, Mus musculus
  siRNA target sequence for Gtse1 (NM_013882.1,2149-2167).
gcagctggcccctgattga

SEQ ID NO: 675717 - DNA, 19 bp, Mus musculus
  siRNA target sequence for Gtse1 (NM_013882.1,2160-2178).
ctgattgacctcataatga

SEQ ID NO: 675718 - DNA, 19 bp, Mus musculus
  siRNA target sequence for Gtse1 (NM_013882.1,2182-2200).
ctccagacatgggtagaaa

SEQ ID NO: 675719 - DNA, 19 bp, Mus musculus
  siRNA target sequence for Mtap4 (NM_008633.1,699-717).
ctagccaggttgaaggtat

SEQ ID NO: 675720 - DNA, 19 bp, Mus musculus
  siRNA target sequence for Mtap4 (NM_008633.1,739-757).
cctagccaatggtgatcat

SEQ ID NO: 675721 - DNA, 19 bp, Mus musculus
  siRNA target sequence for Mtap4 (NM_008633.1,815-833).
gactatccggattatcaga

SEQ ID NO: 675722 - DNA, 19 bp, Mus musculus
  siRNA target sequence for Mtap4 (NM_008633.1,874-892).
gcctcagcaagtgttagat

SEQ ID NO: 675723 - DNA, 19 bp, Mus musculus
  siRNA target sequence for Mtap4 (NM_008633.1,938-956).
gcagatctgctctttgtct

SEQ ID NO: 675724 - DNA, 19 bp, Mus musculus
  siRNA target sequence for Mtap4 (NM_008633.1,967-985).
cacgaacgcttctgcattt

SEQ ID NO: 675725 - DNA, 19 bp, Mus musculus
  siRNA target sequence for Mtap4 (NM_008633.1,1043-1061).
gcttccacggctgttgtat

SEQ ID NO: 675726 - DNA, 19 bp, Mus musculus
  siRNA target sequence for Mtap4 (NM_008633.1,1047-1065).
ccacggctgttgtatctca

SEQ ID NO: 675727 - DNA, 19 bp, Mus musculus
  siRNA target sequence for Mtap4 (NM_008633.1,1112-1130).
gtctccccagaggttacta

SEQ ID NO: 675728 - DNA, 19 bp, Mus musculus
  siRNA target sequence for Mtap4 (NM_008633.1,1114-1132).
ctccccagaggttactata

SEQ ID NO: 675729 - DNA, 19 bp, Mus musculus
  siRNA target sequence for Mtap4 (NM_008633.1,1116-1134).
ccccagaggttactataga

SEQ ID NO: 675730 - DNA, 19 bp, Mus musculus
  siRNA target sequence for Mtap4 (NM_008633.1,1117-1135).
cccagaggttactatagaa

SEQ ID NO: 675731 - DNA, 19 bp, Mus musculus
  siRNA target sequence for Mtap4 (NM_008633.1,1118-1136).
ccagaggttactatagaaa

SEQ ID NO: 675732 - DNA, 19 bp, Mus musculus
  siRNA target sequence for Mtap4 (NM_008633.1,1193-1211).
cagctgccagctaaagcat

SEQ ID NO: 675733 - DNA, 19 bp, Mus musculus
  siRNA target sequence for Mtap4 (NM_008633.1,1348-1366).
cacgcagccatctactgaa

SEQ ID NO: 675734 - DNA, 19 bp, Mus musculus
  siRNA target sequence for Mtap4 (NM_008633.1,1359-1377).
ctactgaatcggatatgtt

SEQ ID NO: 675735 - DNA, 19 bp, Mus musculus
  siRNA target sequence for Mtap4 (NM_008633.1,1414-1432).
ggcagcccacgctaacaat

SEQ ID NO: 675736 - DNA, 19 bp, Mus musculus
  siRNA target sequence for Mtap4 (NM_008633.1,1415-1433).
gcagcccacgctaacaata

SEQ ID NO: 675737 - DNA, 19 bp, Mus musculus
  siRNA target sequence for Mtap4 (NM_008633.1,1416-1434).
cagcccacgctaacaatat

SEQ ID NO: 675738 - DNA, 19 bp, Mus musculus
  siRNA target sequence for Mtap4 (NM_008633.1,1418-1436).
gcccacgctaacaatatca

SEQ ID NO: 675739 - DNA, 19 bp, Mus musculus
  siRNA target sequence for Mtap4 (NM_008633.1,1421-1439).
cacgctaacaatatcatat

SEQ ID NO: 675740 - DNA, 19 bp, Mus musculus
  siRNA target sequence for Mtap4 (NM_008633.1,1542-1560).
caacacttccaataaaaat

SEQ ID NO: 675741 - DNA, 19 bp, Mus musculus
  siRNA target sequence for Mtap4 (NM_008633.1,1569-1587).
caccacctgaggatgtgtt

SEQ ID NO: 675742 - DNA, 19 bp, Mus musculus
  siRNA target sequence for Mtap4 (NM_008633.1,1613-1631).
ccagccaagggcatggttt

SEQ ID NO: 675743 - DNA, 19 bp, Mus musculus
  siRNA target sequence for Mtap4 (NM_008633.1,1627-1645).
ggtttcactctcagaaata

SEQ ID NO: 675744 - DNA, 19 bp, Mus musculus
  siRNA target sequence for Mtap4 (NM_008633.1,1751-1769).
ccctcagatcccataacaa

SEQ ID NO: 675745 - DNA, 19 bp, Mus musculus
  siRNA target sequence for Mtap4 (NM_008633.1,1755-1773).
cagatcccataacaacatt

SEQ ID NO: 675746 - DNA, 19 bp, Mus musculus
  siRNA target sequence for Mtap4 (NM_008633.1,1761-1779).
ccataacaacattgacaaa

SEQ ID NO: 675747 - DNA, 19 bp, Mus musculus
  siRNA target sequence for Mtap4 (NM_008633.1,1871-1889).
gctccacccacagaaacaa

SEQ ID NO: 675748 - DNA, 19 bp, Mus musculus
  siRNA target sequence for Mtap4 (NM_008633.1,1944-1962).
gcaaggacgtggttatact

SEQ ID NO: 675749 - DNA, 19 bp, Mus musculus
  siRNA target sequence for Mtap4 (NM_008633.1,1954-1972).
ggttatacttccagaaaca

SEQ ID NO: 675750 - DNA, 19 bp, Mus musculus
  siRNA target sequence for Mtap4 (NM_008633.1,1975-1993).
ggtggctgagtttaacaat

SEQ ID NO: 675751 - DNA, 19 bp, Mus musculus
  siRNA target sequence for Mtap4 (NM_008633.1,1996-2014).
gactccactttcagaagaa

SEQ ID NO: 675752 - DNA, 19 bp, Mus musculus
  siRNA target sequence for Mtap4 (NM_008633.1,1998-2016).
ctccactttcagaagaaga

SEQ ID NO: 675753 - DNA, 19 bp, Mus musculus
  siRNA target sequence for Mtap4 (NM_008633.1,2038-2056).
gtctccgtctgcagaaaca

SEQ ID NO: 675754 - DNA, 19 bp, Mus musculus
  siRNA target sequence for Mtap4 (NM_008633.1,2059-2077).
ggctcccctggctaagaat

SEQ ID NO: 675755 - DNA, 19 bp, Mus musculus
  siRNA target sequence for Mtap4 (NM_008633.1,2162-2180).
gtagcaacagttccaatta

SEQ ID NO: 675756 - DNA, 19 bp, Mus musculus
  siRNA target sequence for Mtap4 (NM_008633.1,2219-2237).
gaagactcccagttagcat

SEQ ID NO: 675757 - DNA, 19 bp, Mus musculus
  siRNA target sequence for Mtap4 (NM_008633.1,2248-2266).
caagggacagtcaacagta

SEQ ID NO: 675758 - DNA, 19 bp, Mus musculus
  siRNA target sequence for Mtap4 (NM_008633.1,2294-2312).
gtcaaagctgcagaacaaa

SEQ ID NO: 675759 - DNA, 19 bp, Mus musculus
  siRNA target sequence for Mtap4 (NM_008633.1,2300-2318).
gctgcagaacaaatgtcta

SEQ ID NO: 675760 - DNA, 19 bp, Mus musculus
  siRNA target sequence for Mtap4 (NM_008633.1,2309-2327).
caaatgtctaccttaccaa

SEQ ID NO: 675761 - DNA, 19 bp, Mus musculus
  siRNA target sequence for Mtap4 (NM_008633.1,2314-2332).
gtctaccttaccaatagat

SEQ ID NO: 675762 - DNA, 19 bp, Mus musculus
  siRNA target sequence for Mtap4 (NM_008633.1,2337-2355).
cttctccattagagaactt

SEQ ID NO: 675763 - DNA, 19 bp, Mus musculus
  siRNA target sequence for Mtap4 (NM_008633.1,2528-2546).
cctgcaaagacttcaacat

SEQ ID NO: 675764 - DNA, 19 bp, Mus musculus
  siRNA target sequence for Mtap4 (NM_008633.1,2596-2614).
cacctctggtgggttgaat

SEQ ID NO: 675765 - DNA, 19 bp, Mus musculus
  siRNA target sequence for Mtap4 (NM_008633.1,2599-2617).
ctctggtgggttgaataaa

SEQ ID NO: 675766 - DNA, 19 bp, Mus musculus
  siRNA target sequence for Mtap4 (NM_008633.1,2720-2738).
gtgaagccaaagccaatta

SEQ ID NO: 675767 - DNA, 19 bp, Mus musculus
  siRNA target sequence for Mtap4 (NM_008633.1,2797-2815).
cctcaaacctggacctaaa

SEQ ID NO: 675768 - DNA, 19 bp, Mus musculus
  siRNA target sequence for Mtap4 (NM_008633.1,2817-2835).
ccaccccaaccgtttcaaa

SEQ ID NO: 675769 - DNA, 19 bp, Mus musculus
  siRNA target sequence for Mtap4 (NM_008633.1,2839-2857).
cacatctccctcaactctt

SEQ ID NO: 675770 - DNA, 19 bp, Mus musculus
  siRNA target sequence for Mtap4 (NM_008633.1,2863-2881).
cactggaccaagtagtaga

SEQ ID NO: 675771 - DNA, 19 bp, Mus musculus
  siRNA target sequence for Mtap4 (NM_008633.1,2932-2950).
gaaacctgctgatgtcaaa

SEQ ID NO: 675772 - DNA, 19 bp, Mus musculus
  siRNA target sequence for Mtap4 (NM_008633.1,2936-2954).
cctgctgatgtcaaaagga

SEQ ID NO: 675773 - DNA, 19 bp, Mus musculus
  siRNA target sequence for Mtap4 (NM_008633.1,3047-3065).
cccccagcagggatgactt

SEQ ID NO: 675774 - DNA, 19 bp, Mus musculus
  siRNA target sequence for Mtap4 (NM_008633.1,3102-3120).
cttctggggctctttctgt

SEQ ID NO: 675775 - DNA, 19 bp, Mus musculus
  siRNA target sequence for Mtap4 (NM_008633.1,3173-3191).
cgcctggccacaactgttt

SEQ ID NO: 675776 - DNA, 19 bp, Mus musculus
  siRNA target sequence for Mtap4 (NM_008633.1,3228-3246).
gctctacagaaaacatcaa

SEQ ID NO: 675777 - DNA, 19 bp, Mus musculus
  siRNA target sequence for Mtap4 (NM_008633.1,3349-3367).
cattgcgagtgcacagaaa

SEQ ID NO: 675778 - DNA, 19 bp, Mus musculus
  siRNA target sequence for Mtap4 (NM_008633.1,3525-3543).
gtgggtccaaagctaatat

SEQ ID NO: 675779 - DNA, 19 bp, Mus musculus
  siRNA target sequence for Mtap4 (NM_008633.1,3527-3545).
gggtccaaagctaatatca

SEQ ID NO: 675780 - DNA, 19 bp, Mus musculus
  siRNA target sequence for Mtap4 (NM_008633.1,3528-3546).
ggtccaaagctaatatcaa

SEQ ID NO: 675781 - DNA, 19 bp, Mus musculus
  siRNA target sequence for Mtap4 (NM_008633.1,3563-3581).
ggagatgtcaagattgaaa

SEQ ID NO: 675782 - DNA, 19 bp, Mus musculus
  siRNA target sequence for Pcnt2 (NM_008787.2,347-365).
ctaacttccgacagagaaa

SEQ ID NO: 675783 - DNA, 19 bp, Mus musculus
  siRNA target sequence for Pcnt2 (NM_008787.2,378-396).
ctgtccgaattcgaagaaa

SEQ ID NO: 675784 - DNA, 19 bp, Mus musculus
  siRNA target sequence for Pcnt2 (NM_008787.2,382-400).
ccgaattcgaagaaaaaga

SEQ ID NO: 675785 - DNA, 19 bp, Mus musculus
  siRNA target sequence for Pcnt2 (NM_008787.2,658-676).
cgcttgagcctgaacaaca

SEQ ID NO: 675786 - DNA, 19 bp, Mus musculus
  siRNA target sequence for Pcnt2 (NM_008787.2,895-913).
gagaagttacggtcagaaa

SEQ ID NO: 675787 - DNA, 19 bp, Mus musculus
  siRNA target sequence for Pcnt2 (NM_008787.2,957-975).
ggaatccgaaagagagtta

SEQ ID NO: 675788 - DNA, 19 bp, Mus musculus
  siRNA target sequence for Pcnt2 (NM_008787.2,968-986).
gagagttatgtttggaaaa

SEQ ID NO: 675789 - DNA, 19 bp, Mus musculus
  siRNA target sequence for Pcnt2 (NM_008787.2,1072-1090).
gttgaattggagaagattt

SEQ ID NO: 675790 - DNA, 19 bp, Mus musculus
  siRNA target sequence for Pcnt2 (NM_008787.2,1268-1286).
catcctatgaagacctaaa

SEQ ID NO: 675791 - DNA, 19 bp, Mus musculus
  siRNA target sequence for Pcnt2 (NM_008787.2,1489-1507).
gtctattttgagaagaagt

SEQ ID NO: 675792 - DNA, 19 bp, Mus musculus
  siRNA target sequence for Pcnt2 (NM_008787.2,1714-1732).
gactgtcaggtgaaactca

SEQ ID NO: 675793 - DNA, 19 bp, Mus musculus
  siRNA target sequence for Pcnt2 (NM_008787.2,1798-1816).
ctttcccgggaggaactaa

SEQ ID NO: 675794 - DNA, 19 bp, Mus musculus
  siRNA target sequence for Pcnt2 (NM_008787.2,1833-1851).
gagattagcctccatgttt

SEQ ID NO: 675795 - DNA, 19 bp, Mus musculus
  siRNA target sequence for Pcnt2 (NM_008787.2,1835-1853).
gattagcctccatgtttct

SEQ ID NO: 675796 - DNA, 19 bp, Mus musculus
  siRNA target sequence for Pcnt2 (NM_008787.2,1879-1897).
gagaaactgtccataatca

SEQ ID NO: 675797 - DNA, 19 bp, Mus musculus
  siRNA target sequence for Pcnt2 (NM_008787.2,1890-1908).
cataatcagcaggtttgaa

SEQ ID NO: 675798 - DNA, 19 bp, Mus musculus
  siRNA target sequence for Pcnt2 (NM_008787.2,2193-2211).
ggagcaagatgcctttctt

SEQ ID NO: 675799 - DNA, 19 bp, Mus musculus
  siRNA target sequence for Pcnt2 (NM_008787.2,2288-2306).
ggatggagcttgaaaccaa

SEQ ID NO: 675800 - DNA, 19 bp, Mus musculus
  siRNA target sequence for Pcnt2 (NM_008787.2,2469-2487).
ggccgacgttcagactatt

SEQ ID NO: 675801 - DNA, 19 bp, Mus musculus
  siRNA target sequence for Pcnt2 (NM_008787.2,2620-2638).
cttcagtccgtaagagata

SEQ ID NO: 675802 - DNA, 19 bp, Mus musculus
  siRNA target sequence for Pcnt2 (NM_008787.2,2836-2854).
gacgcgcacacagttgaaa

SEQ ID NO: 675803 - DNA, 19 bp, Mus musculus
  siRNA target sequence for Pcnt2 (NM_008787.2,2840-2858).
cgcacacagttgaaatgca

SEQ ID NO: 675804 - DNA, 19 bp, Mus musculus
  siRNA target sequence for Pcnt2 (NM_008787.2,3099-3117).
gagacttctcgatctgttt

SEQ ID NO: 675805 - DNA, 19 bp, Mus musculus
  siRNA target sequence for Pcnt2 (NM_008787.2,3189-3207).
cgaggatgctgcagataca

SEQ ID NO: 675806 - DNA, 19 bp, Mus musculus
  siRNA target sequence for Pcnt2 (NM_008787.2,3302-3320).
catcttccgtgtgtgaaat

SEQ ID NO: 675807 - DNA, 19 bp, Mus musculus
  siRNA target sequence for Pcnt2 (NM_008787.2,3326-3344).
gtcatgtgtgtgaaagctt

SEQ ID NO: 675808 - DNA, 19 bp, Mus musculus
  siRNA target sequence for Pcnt2 (NM_008787.2,3331-3349).
gtgtgtgaaagcttcttca

SEQ ID NO: 675809 - DNA, 19 bp, Mus musculus
  siRNA target sequence for Pcnt2 (NM_008787.2,3623-3641).
gcctccttgaaggattcaa

SEQ ID NO: 675810 - DNA, 19 bp, Mus musculus
  siRNA target sequence for Pcnt2 (NM_008787.2,3795-3813).
gaaggaaactttgactaat

SEQ ID NO: 675811 - DNA, 19 bp, Mus musculus
  siRNA target sequence for Pcnt2 (NM_008787.2,3798-3816).
ggaaactttgactaatgaa

SEQ ID NO: 675812 - DNA, 19 bp, Mus musculus
  siRNA target sequence for Pcnt2 (NM_008787.2,4027-4045).
ctagacaagcacttacgta

SEQ ID NO: 675813 - DNA, 19 bp, Mus musculus
  siRNA target sequence for Pcnt2 (NM_008787.2,4043-4061).
gtagccagcgtcagttcat

SEQ ID NO: 675814 - DNA, 19 bp, Mus musculus
  siRNA target sequence for Pcnt2 (NM_008787.2,4178-4196).
gccagtgcgtccagttaga

SEQ ID NO: 675815 - DNA, 19 bp, Mus musculus
  siRNA target sequence for Pcnt2 (NM_008787.2,4197-4215).
cgaggaggtggagttgtta

SEQ ID NO: 675816 - DNA, 19 bp, Mus musculus
  siRNA target sequence for Pcnt2 (NM_008787.2,4200-4218).
ggaggtggagttgttacaa

SEQ ID NO: 675817 - DNA, 19 bp, Mus musculus
  siRNA target sequence for Pcnt2 (NM_008787.2,4203-4221).
ggtggagttgttacaagaa

SEQ ID NO: 675818 - DNA, 19 bp, Mus musculus
  siRNA target sequence for Pcnt2 (NM_008787.2,4257-4275).
ggtcataaagaaagatttt

SEQ ID NO: 675819 - DNA, 19 bp, Mus musculus
  siRNA target sequence for Pcnt2 (NM_008787.2,4276-4294).
gccgatcaacaattgctaa

SEQ ID NO: 675820 - DNA, 19 bp, Mus musculus
  siRNA target sequence for Pcnt2 (NM_008787.2,4277-4295).
ccgatcaacaattgctaat

SEQ ID NO: 675821 - DNA, 19 bp, Mus musculus
  siRNA target sequence for Pcnt2 (NM_008787.2,4314-4332).
gcgcctcgaggagacaaat

SEQ ID NO: 675822 - DNA, 19 bp, Mus musculus
  siRNA target sequence for Pcnt2 (NM_008787.2,4326-4344).
gacaaatgccagcatacaa

SEQ ID NO: 675823 - DNA, 19 bp, Mus musculus
  siRNA target sequence for Pcnt2 (NM_008787.2,4527-4545).
ggaagcccaaccagatgta

SEQ ID NO: 675824 - DNA, 19 bp, Mus musculus
  siRNA target sequence for Pcnt2 (NM_008787.2,4528-4546).
gaagcccaaccagatgtaa

SEQ ID NO: 675825 - DNA, 19 bp, Mus musculus
  siRNA target sequence for Pcnt2 (NM_008787.2,4547-4565).
cagagagggcactcttaca

SEQ ID NO: 675826 - DNA, 19 bp, Mus musculus
  siRNA target sequence for Pcnt2 (NM_008787.2,4592-4610).
gaaactctgagattgatga

SEQ ID NO: 675827 - DNA, 19 bp, Mus musculus
  siRNA target sequence for Pcnt2 (NM_008787.2,4649-4667).
ggcaattacagaaggataa

SEQ ID NO: 675828 - DNA, 19 bp, Mus musculus
  siRNA target sequence for Pcnt2 (NM_008787.2,4686-4704).
gctccacgaagtcattgaa

SEQ ID NO: 675829 - DNA, 19 bp, Mus musculus
  siRNA target sequence for Pcnt2 (NM_008787.2,4687-4705).
ctccacgaagtcattgaaa

SEQ ID NO: 675830 - DNA, 19 bp, Mus musculus
  siRNA target sequence for Pcnt2 (NM_008787.2,5070-5088).
catcgagcagagagattta

SEQ ID NO: 675831 - DNA, 19 bp, Mus musculus
  siRNA target sequence for Pcnt2 (NM_008787.2,5100-5118).
cgtgaacaagtggaaagta

SEQ ID NO: 675832 - DNA, 19 bp, Mus musculus
  siRNA target sequence for Pcnt2 (NM_008787.2,5316-5334).
gcctcatgtggcatctatt

SEQ ID NO: 675833 - DNA, 19 bp, Mus musculus
  siRNA target sequence for Pcnt2 (NM_008787.2,5415-5433).
ggccgcacaggctaaggaa

SEQ ID NO: 675834 - DNA, 19 bp, Mus musculus
  siRNA target sequence for Pcnt2 (NM_008787.2,5472-5490).
ggcccaggtgagacaactt

SEQ ID NO: 675835 - DNA, 19 bp, Mus musculus
  siRNA target sequence for Pcnt2 (NM_008787.2,5474-5492).
cccaggtgagacaacttca

SEQ ID NO: 675836 - DNA, 19 bp, Mus musculus
  siRNA target sequence for Pcnt2 (NM_008787.2,5533-5551).
gacaccaactcggaaactt

SEQ ID NO: 675837 - DNA, 19 bp, Mus musculus
  siRNA target sequence for Pcnt2 (NM_008787.2,5538-5556).
caactcggaaacttgtaaa

SEQ ID NO: 675838 - DNA, 19 bp, Mus musculus
  siRNA target sequence for Pcnt2 (NM_008787.2,5543-5561).
cggaaacttgtaaattaca

SEQ ID NO: 675839 - DNA, 19 bp, Mus musculus
  siRNA target sequence for Pcnt2 (NM_008787.2,5577-5595).
ggaaaatgggccacgtaat

SEQ ID NO: 675840 - DNA, 19 bp, Mus musculus
  siRNA target sequence for Pcnt2 (NM_008787.2,5584-5602).
gggccacgtaatcattgtt

SEQ ID NO: 675841 - DNA, 19 bp, Mus musculus
  siRNA target sequence for Pcnt2 (NM_008787.2,5586-5604).
gccacgtaatcattgttgt

SEQ ID NO: 675842 - DNA, 19 bp, Mus musculus
  siRNA target sequence for Pcnt2 (NM_008787.2,5587-5605).
ccacgtaatcattgttgta

SEQ ID NO: 675843 - DNA, 19 bp, Mus musculus
  siRNA target sequence for Pcnt2 (NM_008787.2,5588-5606).
cacgtaatcattgttgtaa

SEQ ID NO: 675844 - DNA, 19 bp, Mus musculus
  siRNA target sequence for Pcnt2 (NM_008787.2,5624-5642).
catcgcctcccgatgatgt

SEQ ID NO: 675845 - DNA, 19 bp, Mus musculus
  siRNA target sequence for Pcnt2 (NM_008787.2,5627-5645).
cgcctcccgatgatgtact

SEQ ID NO: 675846 - DNA, 19 bp, Mus musculus
  siRNA target sequence for Pcnt2 (NM_008787.2,5628-5646).
gcctcccgatgatgtactt

SEQ ID NO: 675847 - DNA, 19 bp, Mus musculus
  siRNA target sequence for Pcnt2 (NM_008787.2,5629-5647).
cctcccgatgatgtactta

SEQ ID NO: 675848 - DNA, 19 bp, Mus musculus
  siRNA target sequence for Pcnt2 (NM_008787.2,5630-5648).
ctcccgatgatgtacttaa

SEQ ID NO: 675849 - DNA, 19 bp, Mus musculus
  siRNA target sequence for Pcnt2 (NM_008787.2,5632-5650).
cccgatgatgtacttaata

SEQ ID NO: 675850 - DNA, 19 bp, Mus musculus
  siRNA target sequence for Pcnt2 (NM_008787.2,5633-5651).
ccgatgatgtacttaatat

SEQ ID NO: 675851 - DNA, 19 bp, Mus musculus
  siRNA target sequence for Pcnt2 (NM_008787.2,5634-5652).
cgatgatgtacttaatatt

SEQ ID NO: 675852 - DNA, 19 bp, Mus musculus
  siRNA target sequence for Pcnt2 (NM_008787.2,5644-5662).
cttaatattgccaaaacca

SEQ ID NO: 675853 - DNA, 19 bp, Mus musculus
  siRNA target sequence for Pcnt2 (NM_008787.2,5660-5678).
ccacatgggatgtaattga

SEQ ID NO: 675854 - DNA, 19 bp, Mus musculus
  siRNA target sequence for Pcnt2 (NM_008787.2,5661-5679).
cacatgggatgtaattgat

SEQ ID NO: 675855 - DNA, 19 bp, Mus musculus
  siRNA target sequence for Pcnt2 (NM_008787.2,5663-5681).
catgggatgtaattgatat

SEQ ID NO: 675856 - DNA, 19 bp, Mus musculus
  siRNA target sequence for Pcnt2 (NM_008787.2,5666-5684).
gggatgtaattgatattat

SEQ ID NO: 675857 - DNA, 19 bp, Mus musculus
  siRNA target sequence for Pcnt2 (NM_008787.2,5667-5685).
ggatgtaattgatattatt

SEQ ID NO: 675858 - DNA, 19 bp, Mus musculus
  siRNA target sequence for Pcnt2 (NM_008787.2,5722-5740).
gatttccccactcaagaaa

SEQ ID NO: 675859 - DNA, 19 bp, Mus musculus
  siRNA target sequence for Pcnt2 (NM_008787.2,5730-5748).
cactcaagaaaagttaaca

SEQ ID NO: 675860 - DNA, 19 bp, Mus musculus
  siRNA target sequence for Pcnt2 (NM_008787.2,6001-6019).
gtgtcggggctgctttgtt

SEQ ID NO: 675861 - DNA, 19 bp, Mus musculus
  siRNA target sequence for Pcnt2 (NM_008787.2,6114-6132).
cgtcgaagactttatcgta

SEQ ID NO: 675862 - DNA, 19 bp, Mus musculus
  siRNA target sequence for Pcnt2 (NM_008787.2,6115-6133).
gtcgaagactttatcgtaa

SEQ ID NO: 675863 - DNA, 19 bp, Mus musculus
  siRNA target sequence for Pcnt2 (NM_008787.2,6118-6136).
gaagactttatcgtaacat

SEQ ID NO: 675864 - DNA, 19 bp, Mus musculus
  siRNA target sequence for Pcnt2 (NM_008787.2,6123-6141).
ctttatcgtaacatctttt

SEQ ID NO: 675865 - DNA, 19 bp, Mus musculus
  siRNA target sequence for Pcnt2 (NM_008787.2,6129-6147).
cgtaacatcttttgattct

SEQ ID NO: 675866 - DNA, 19 bp, Mus musculus
  siRNA target sequence for Pcnt2 (NM_008787.2,6218-6236).
cagacattgctatgatgtt

SEQ ID NO: 675867 - DNA, 19 bp, Mus musculus
  siRNA target sequence for Pcnt2 (NM_008787.2,6440-6458).
cctctagtgcactgaacaa

SEQ ID NO: 675868 - DNA, 19 bp, Mus musculus
  siRNA target sequence for Pcnt2 (NM_008787.2,6441-6459).
ctctagtgcactgaacaaa

SEQ ID NO: 675869 - DNA, 19 bp, Mus musculus
  siRNA target sequence for Pcnt2 (NM_008787.2,6563-6581).
cgtggagtgaggagctttt

SEQ ID NO: 675870 - DNA, 19 bp, Mus musculus
  siRNA target sequence for Pcnt2 (NM_008787.2,6630-6648).
gcagcctagaccttatggt

SEQ ID NO: 675871 - DNA, 19 bp, Mus musculus
  siRNA target sequence for Pcnt2 (NM_008787.2,6631-6649).
cagcctagaccttatggtt

SEQ ID NO: 675872 - DNA, 19 bp, Mus musculus
  siRNA target sequence for Pcnt2 (NM_008787.2,6635-6653).
ctagaccttatggttcaaa

SEQ ID NO: 675873 - DNA, 19 bp, Mus musculus
  siRNA target sequence for Pcnt2 (NM_008787.2,6683-6701).
ggctggagaaggttatcca

SEQ ID NO: 675874 - DNA, 19 bp, Mus musculus
  siRNA target sequence for Pcnt2 (NM_008787.2,6758-6776).
gcctgctagctgagattca

SEQ ID NO: 675875 - DNA, 19 bp, Mus musculus
  siRNA target sequence for Pcnt2 (NM_008787.2,6792-6810).
gctccgcatgacacactta

SEQ ID NO: 675876 - DNA, 19 bp, Mus musculus
  siRNA target sequence for Pcnt2 (NM_008787.2,6822-6840).
gaagctgcagcaattgtgt

SEQ ID NO: 675877 - DNA, 19 bp, Mus musculus
  siRNA target sequence for Pcnt2 (NM_008787.2,6882-6900).
gcaccagctacgaagacaa

SEQ ID NO: 675878 - DNA, 19 bp, Mus musculus
  siRNA target sequence for Pcnt2 (NM_008787.2,6928-6946).
caggaaaagtgcatagcaa

SEQ ID NO: 675879 - DNA, 19 bp, Mus musculus
  siRNA target sequence for Pcnt2 (NM_008787.2,6943-6961).
gcaaacgagttacagaaaa

SEQ ID NO: 675880 - DNA, 19 bp, Mus musculus
  siRNA target sequence for Pcnt2 (NM_008787.2,7799-7817).
gtcagcgtgatgagcataa

SEQ ID NO: 675881 - DNA, 19 bp, Mus musculus
  siRNA target sequence for Pcnt2 (NM_008787.2,7801-7819).
cagcgtgatgagcataaga

SEQ ID NO: 675882 - DNA, 19 bp, Mus musculus
  siRNA target sequence for Pcnt2 (NM_008787.2,7987-8005).
ggcctcctcacaagcttta

SEQ ID NO: 675883 - DNA, 19 bp, Mus musculus
  siRNA target sequence for Pcnt2 (NM_008787.2,7990-8008).
ctcctcacaagctttacca

SEQ ID NO: 675884 - DNA, 19 bp, Mus musculus
  siRNA target sequence for Pcnt2 (NM_008787.2,8015-8033).
cggtagacaggacaattaa

SEQ ID NO: 675885 - DNA, 19 bp, Mus musculus
  siRNA target sequence for Pcnt2 (NM_008787.2,8020-8038).
gacaggacaattaaagatt

SEQ ID NO: 675886 - DNA, 19 bp, Mus musculus
  siRNA target sequence for Pcnt2 (NM_008787.2,8039-8057).
ggacgtcatcaaatgagaa

SEQ ID NO: 675887 - DNA, 19 bp, Mus musculus
  siRNA target sequence for Pcnt2 (NM_008787.2,8181-8199).
caatgatgccctcacaaaa

SEQ ID NO: 675888 - DNA, 19 bp, Mus musculus
  siRNA target sequence for Pcnt2 (NM_008787.2,8281-8299).
cagaagggctgcgttctta

SEQ ID NO: 675889 - DNA, 19 bp, Mus musculus
  siRNA target sequence for Pcnt2 (NM_008787.2,8283-8301).
gaagggctgcgttcttaat

SEQ ID NO: 675890 - DNA, 19 bp, Mus musculus
  siRNA target sequence for Pcnt2 (NM_008787.2,8376-8394).
gcactcgcagactacaagt

SEQ ID NO: 675891 - DNA, 19 bp, Mus musculus
  siRNA target sequence for Pcnt2 (NM_008787.2,8431-8449).
ctgtacctgcactatctga

SEQ ID NO: 675892 - DNA, 19 bp, Mus musculus
  siRNA target sequence for Pcnt2 (NM_008787.2,8470-8488).
gctctgatttatcaaaaga

SEQ ID NO: 675893 - DNA, 19 bp, Mus musculus
  siRNA target sequence for Pcnt2 (NM_008787.2,8473-8491).
ctgatttatcaaaagaagt

SEQ ID NO: 675894 - DNA, 19 bp, Mus musculus
  siRNA target sequence for Pcnt2 (NM_008787.2,8475-8493).
gatttatcaaaagaagtat

SEQ ID NO: 675895 - DNA, 19 bp, Mus musculus
  siRNA target sequence for Pcnt2 (NM_008787.2,8554-8572).
cacttgggggtctttcctt

SEQ ID NO: 675896 - DNA, 19 bp, Mus musculus
  siRNA target sequence for Pcnt2 (NM_008787.2,8559-8577).
gggggtctttccttccaaa

SEQ ID NO: 675897 - DNA, 19 bp, Mus musculus
  siRNA target sequence for Pcnt2 (NM_008787.2,8654-8672).
ggttgcggtttttggttaa

SEQ ID NO: 675898 - DNA, 19 bp, Mus musculus
  siRNA target sequence for Pcnt2 (NM_008787.2,8851-8869).
ggctcaccgggcaaggaaa

SEQ ID NO: 675899 - DNA, 19 bp, Mus musculus
  siRNA target sequence for Pcnt2 (NM_008787.2,8857-8875).
ccgggcaaggaaagatcaa

SEQ ID NO: 675900 - DNA, 19 bp, Mus musculus
  siRNA target sequence for Pcnt2 (NM_008787.2,8859-8877).
gggcaaggaaagatcaact

SEQ ID NO: 675901 - DNA, 19 bp, Mus musculus
  siRNA target sequence for Pcnt2 (NM_008787.2,8860-8878).
ggcaaggaaagatcaactt

SEQ ID NO: 675902 - DNA, 19 bp, Mus musculus
  siRNA target sequence for Pcnt2 (NM_008787.2,8929-8947).
gagcactccttgacagaat

SEQ ID NO: 675903 - DNA, 19 bp, Mus musculus
  siRNA target sequence for Pcnt2 (NM_008787.2,8994-9012).
gccagattctactcagaaa

SEQ ID NO: 675904 - DNA, 19 bp, Mus musculus
  siRNA target sequence for Pcnt2 (NM_008787.2,8995-9013).
ccagattctactcagaaat

SEQ ID NO: 675905 - DNA, 19 bp, Mus musculus
  siRNA target sequence for Pcnt2 (NM_008787.2,9014-9032).
cctgccaccagaagattaa

SEQ ID NO: 675906 - DNA, 19 bp, Mus musculus
  siRNA target sequence for Pcnt2 (NM_008787.2,9015-9033).
ctgccaccagaagattaaa

SEQ ID NO: 675907 - DNA, 19 bp, Mus musculus
  siRNA target sequence for Spry2 (NM_011897.1,364-382).
ggagccggatccaagagat

SEQ ID NO: 675908 - DNA, 19 bp, Mus musculus
  siRNA target sequence for Spry2 (NM_011897.1,574-592).
ctcgcaggtccattcttca

SEQ ID NO: 675909 - DNA, 19 bp, Mus musculus
  siRNA target sequence for Spry2 (NM_011897.1,673-691).
ctcggaacagagactgtta

SEQ ID NO: 675910 - DNA, 19 bp, Mus musculus
  siRNA target sequence for Spry2 (NM_011897.1,779-797).
ccactgagcaaggatgatt

SEQ ID NO: 675911 - DNA, 19 bp, Mus musculus
  siRNA target sequence for Spry2 (NM_011897.1,909-927).
cagcccagaacgtcattga

SEQ ID NO: 675912 - DNA, 19 bp, Mus musculus
  siRNA target sequence for Spry2 (NM_011897.1,911-929).
gcccagaacgtcattgact

SEQ ID NO: 675913 - DNA, 19 bp, Mus musculus
  siRNA target sequence for Spry2 (NM_011897.1,912-930).
cccagaacgtcattgacta

SEQ ID NO: 675914 - DNA, 19 bp, Mus musculus
  siRNA target sequence for Spry2 (NM_011897.1,1152-1170).
cgggttgtcgttgtaaaaa

SEQ ID NO: 675915 - DNA, 19 bp, Mus musculus
  siRNA target sequence for Spry2 (NM_011897.1,1154-1172).
ggttgtcgttgtaaaaact

SEQ ID NO: 675916 - DNA, 19 bp, Mus musculus
  siRNA target sequence for Spry2 (NM_011897.1,1158-1176).
gtcgttgtaaaaactcaaa

SEQ ID NO: 675917 - DNA, 19 bp, Mus musculus
  siRNA target sequence for Spry2 (NM_011897.1,1205-1223).
ccccctaggaactttgaaa

SEQ ID NO: 675918 - DNA, 19 bp, Mus musculus
  siRNA target sequence for Tubgcp2 (NM_133755.1,233-251).
ggattcaccatgatgtcaa

SEQ ID NO: 675919 - DNA, 19 bp, Mus musculus
  siRNA target sequence for Tubgcp2 (NM_133755.1,360-378).
cagtgccaaggtcaaaatt

SEQ ID NO: 675920 - DNA, 19 bp, Mus musculus
  siRNA target sequence for Tubgcp2 (NM_133755.1,391-409).
cgaactcctgaggactttt

SEQ ID NO: 675921 - DNA, 19 bp, Mus musculus
  siRNA target sequence for Tubgcp2 (NM_133755.1,421-439).
gatgaactgaaatctaaaa

SEQ ID NO: 675922 - DNA, 19 bp, Mus musculus
  siRNA target sequence for Tubgcp2 (NM_133755.1,492-510).
caaagagacacttcagttt

SEQ ID NO: 675923 - DNA, 19 bp, Mus musculus
  siRNA target sequence for Tubgcp2 (NM_133755.1,679-697).
ctggaacttacaagaaaga

SEQ ID NO: 675924 - DNA, 19 bp, Mus musculus
  siRNA target sequence for Tubgcp2 (NM_133755.1,751-769).
ccagcatgggtgtatgaga

SEQ ID NO: 675925 - DNA, 19 bp, Mus musculus
  siRNA target sequence for Tubgcp2 (NM_133755.1,903-921).
ggatggcaggtatatcact

SEQ ID NO: 675926 - DNA, 19 bp, Mus musculus
  siRNA target sequence for Tubgcp2 (NM_133755.1,983-1001).
ccatccgggagctagtaaa

SEQ ID NO: 675927 - DNA, 19 bp, Mus musculus
  siRNA target sequence for Tubgcp2 (NM_133755.1,988-1006).
cgggagctagtaaacagaa

SEQ ID NO: 675928 - DNA, 19 bp, Mus musculus
  siRNA target sequence for Tubgcp2 (NM_133755.1,1056-1074).
gaagtcttcatttgaatat

SEQ ID NO: 675929 - DNA, 19 bp, Mus musculus
  siRNA target sequence for Tubgcp2 (NM_133755.1,1109-1127).
gaaccctagtaaaggaata

SEQ ID NO: 675930 - DNA, 19 bp, Mus musculus
  siRNA target sequence for Tubgcp2 (NM_133755.1,1183-1201).
cagaagctctggttctaca

SEQ ID NO: 675931 - DNA, 19 bp, Mus musculus
  siRNA target sequence for Tubgcp2 (NM_133755.1,1297-1315).
catgataggagcttcaact

SEQ ID NO: 675932 - DNA, 19 bp, Mus musculus
  siRNA target sequence for Tubgcp2 (NM_133755.1,1300-1318).
gataggagcttcaactaca

SEQ ID NO: 675933 - DNA, 19 bp, Mus musculus
  siRNA target sequence for Tubgcp2 (NM_133755.1,1339-1357).
gagctgtgcctctatctga

SEQ ID NO: 675934 - DNA, 19 bp, Mus musculus
  siRNA target sequence for Tubgcp2 (NM_133755.1,1364-1382).
cagccagtgcaccttactt

SEQ ID NO: 675935 - DNA, 19 bp, Mus musculus
  siRNA target sequence for Tubgcp2 (NM_133755.1,1401-1419).
gatctataggggcatcatt

SEQ ID NO: 675936 - DNA, 19 bp, Mus musculus
  siRNA target sequence for Tubgcp2 (NM_133755.1,1483-1501).
gactacaacgacaagtact

SEQ ID NO: 675937 - DNA, 19 bp, Mus musculus
  siRNA target sequence for Tubgcp2 (NM_133755.1,1572-1590).
cagcacaggaaaataccta

SEQ ID NO: 675938 - DNA, 19 bp, Mus musculus
  siRNA target sequence for Tubgcp2 (NM_133755.1,1575-1593).
cacaggaaaatacctaaat

SEQ ID NO: 675939 - DNA, 19 bp, Mus musculus
  siRNA target sequence for Tubgcp2 (NM_133755.1,1601-1619).
gagagtgtggtcatgatgt

SEQ ID NO: 675940 - DNA, 19 bp, Mus musculus
  siRNA target sequence for Tubgcp2 (NM_133755.1,1623-1641).
ctgtcccgtagccaaagaa

SEQ ID NO: 675941 - DNA, 19 bp, Mus musculus
  siRNA target sequence for Tubgcp2 (NM_133755.1,1625-1643).
gtcccgtagccaaagaaat

SEQ ID NO: 675942 - DNA, 19 bp, Mus musculus
  siRNA target sequence for Tubgcp2 (NM_133755.1,1627-1645).
cccgtagccaaagaaatca

SEQ ID NO: 675943 - DNA, 19 bp, Mus musculus
  siRNA target sequence for Tubgcp2 (NM_133755.1,1628-1646).
ccgtagccaaagaaatcat

SEQ ID NO: 675944 - DNA, 19 bp, Mus musculus
  siRNA target sequence for Tubgcp2 (NM_133755.1,1667-1685).
catatgtggagcagataga

SEQ ID NO: 675945 - DNA, 19 bp, Mus musculus
  siRNA target sequence for Tubgcp2 (NM_133755.1,1680-1698).
gatagagaaagcgttcaat

SEQ ID NO: 675946 - DNA, 19 bp, Mus musculus
  siRNA target sequence for Tubgcp2 (NM_133755.1,1842-1860).
gccagtggaggacatcata

SEQ ID NO: 675947 - DNA, 19 bp, Mus musculus
  siRNA target sequence for Tubgcp2 (NM_133755.1,1844-1862).
cagtggaggacatcatact

SEQ ID NO: 675948 - DNA, 19 bp, Mus musculus
  siRNA target sequence for Tubgcp2 (NM_133755.1,1953-1971).
gcctcacgacctaatcact

SEQ ID NO: 675949 - DNA, 19 bp, Mus musculus
  siRNA target sequence for Tubgcp2 (NM_133755.1,2090-2108).
ggcccctgtcactgattat

SEQ ID NO: 675950 - DNA, 19 bp, Mus musculus
  siRNA target sequence for Tubgcp2 (NM_133755.1,2092-2110).
cccctgtcactgattatta

SEQ ID NO: 675951 - DNA, 19 bp, Mus musculus
  siRNA target sequence for Tubgcp2 (NM_133755.1,2093-2111).
ccctgtcactgattattaa

SEQ ID NO: 675952 - DNA, 19 bp, Mus musculus
  siRNA target sequence for Tubgcp2 (NM_133755.1,2095-2113).
ctgtcactgattattaaca

SEQ ID NO: 675953 - DNA, 19 bp, Mus musculus
  siRNA target sequence for Tubgcp2 (NM_133755.1,2140-2158).
ctcttccgacacatgttct

SEQ ID NO: 675954 - DNA, 19 bp, Mus musculus
  siRNA target sequence for Tubgcp2 (NM_133755.1,2268-2286).
gcagcgaatgctcaacttt

SEQ ID NO: 675955 - DNA, 19 bp, Mus musculus
  siRNA target sequence for Tubgcp2 (NM_133755.1,2333-2351).
cctggcacatccttgagaa

SEQ ID NO: 675956 - DNA, 19 bp, Mus musculus
  siRNA target sequence for Tubgcp2 (NM_133755.1,2475-2493).
gtccgtatgcgtcatgttt

SEQ ID NO: 675957 - DNA, 19 bp, Mus musculus
  siRNA target sequence for Tubgcp2 (NM_133755.1,2479-2497).
gtatgcgtcatgtttacca

SEQ ID NO: 675958 - DNA, 19 bp, Mus musculus
  siRNA target sequence for Tubgcp2 (NM_133755.1,2501-2519).
gtatgcagaaatttacaca

SEQ ID NO: 675959 - DNA, 19 bp, Mus musculus
  siRNA target sequence for Tubgcp2 (NM_133755.1,2791-2809).
gtcatctccagactagatt

SEQ ID NO: 675960 - DNA, 19 bp, Mus musculus
  siRNA target sequence for Tubgcp3 (NM_198031.1,193-211).
caacttcgctccaactgtt

SEQ ID NO: 675961 - DNA, 19 bp, Mus musculus
  siRNA target sequence for Tubgcp3 (NM_198031.1,196-214).
cttcgctccaactgttgaa

SEQ ID NO: 675962 - DNA, 19 bp, Mus musculus
  siRNA target sequence for Tubgcp3 (NM_198031.1,227-245).
ctagtagctgaaaaaatca

SEQ ID NO: 675963 - DNA, 19 bp, Mus musculus
  siRNA target sequence for Tubgcp3 (NM_198031.1,275-293).
gcggacgccgcactgtttt

SEQ ID NO: 675964 - DNA, 19 bp, Mus musculus
  siRNA target sequence for Tubgcp3 (NM_198031.1,314-332).
cattcgcagggagttttga

SEQ ID NO: 675965 - DNA, 19 bp, Mus musculus
  siRNA target sequence for Tubgcp3 (NM_198031.1,318-336).
cgcagggagttttgaagaa

SEQ ID NO: 675966 - DNA, 19 bp, Mus musculus
  siRNA target sequence for Tubgcp3 (NM_198031.1,403-421).
gaccagctacgcttcctta

SEQ ID NO: 675967 - DNA, 19 bp, Mus musculus
  siRNA target sequence for Tubgcp3 (NM_198031.1,405-423).
ccagctacgcttccttatt

SEQ ID NO: 675968 - DNA, 19 bp, Mus musculus
  siRNA target sequence for Tubgcp3 (NM_198031.1,406-424).
cagctacgcttccttattt

SEQ ID NO: 675969 - DNA, 19 bp, Mus musculus
  siRNA target sequence for Tubgcp3 (NM_198031.1,447-465).
ctcactcgacgccttacta

SEQ ID NO: 675970 - DNA, 19 bp, Mus musculus
  siRNA target sequence for Tubgcp3 (NM_198031.1,451-469).
ctcgacgccttactactat

SEQ ID NO: 675971 - DNA, 19 bp, Mus musculus
  siRNA target sequence for Tubgcp3 (NM_198031.1,782-800).
ggtggcacattggaagtta

SEQ ID NO: 675972 - DNA, 19 bp, Mus musculus
  siRNA target sequence for Tubgcp3 (NM_198031.1,806-824).
gctgctcttgtgagagata

SEQ ID NO: 675973 - DNA, 19 bp, Mus musculus
  siRNA target sequence for Tubgcp3 (NM_198031.1,819-837).
gagatattctctacgtatt

SEQ ID NO: 675974 - DNA, 19 bp, Mus musculus
  siRNA target sequence for Tubgcp3 (NM_198031.1,832-850).
cgtattccagggcattgat

SEQ ID NO: 675975 - DNA, 19 bp, Mus musculus
  siRNA target sequence for Tubgcp3 (NM_198031.1,876-894).
ctgaaaactgttacaaagt

SEQ ID NO: 675976 - DNA, 19 bp, Mus musculus
  siRNA target sequence for Tubgcp3 (NM_198031.1,896-914).
gaagcgaaggcaaacttaa

SEQ ID NO: 675977 - DNA, 19 bp, Mus musculus
  siRNA target sequence for Tubgcp3 (NM_198031.1,950-968).
gagttgggatggttgcata

SEQ ID NO: 675978 - DNA, 19 bp, Mus musculus
  siRNA target sequence for Tubgcp3 (NM_198031.1,952-970).
gttgggatggttgcataat

SEQ ID NO: 675979 - DNA, 19 bp, Mus musculus
  siRNA target sequence for Tubgcp3 (NM_198031.1,961-979).
gttgcataataaaatcaga

SEQ ID NO: 675980 - DNA, 19 bp, Mus musculus
  siRNA target sequence for Tubgcp3 (NM_198031.1,997-1015).
gagtctggaccgctcattt

SEQ ID NO: 675981 - DNA, 19 bp, Mus musculus
  siRNA target sequence for Tubgcp3 (NM_198031.1,1006-1024).
ccgctcatttggacttgta

SEQ ID NO: 675982 - DNA, 19 bp, Mus musculus
  siRNA target sequence for Tubgcp3 (NM_198031.1,1112-1130).
gatgatcagggtgtgaatt

SEQ ID NO: 675983 - DNA, 19 bp, Mus musculus
  siRNA target sequence for Tubgcp3 (NM_198031.1,1184-1202).
cccaaaataagattaaaga

SEQ ID NO: 675984 - DNA, 19 bp, Mus musculus
  siRNA target sequence for Tubgcp3 (NM_198031.1,1259-1277).
gctgttcatgcctatacaa

SEQ ID NO: 675985 - DNA, 19 bp, Mus musculus
  siRNA target sequence for Tubgcp3 (NM_198031.1,1260-1278).
ctgttcatgcctatacaaa

SEQ ID NO: 675986 - DNA, 19 bp, Mus musculus
  siRNA target sequence for Tubgcp3 (NM_198031.1,1262-1280).
gttcatgcctatacaaaga

SEQ ID NO: 675987 - DNA, 19 bp, Mus musculus
  siRNA target sequence for Tubgcp3 (NM_198031.1,1283-1301).
ggggacccctacatgaagt

SEQ ID NO: 675988 - DNA, 19 bp, Mus musculus
  siRNA target sequence for Tubgcp3 (NM_198031.1,1351-1369).
cctctaccggtggatatat

SEQ ID NO: 675989 - DNA, 19 bp, Mus musculus
  siRNA target sequence for Tubgcp3 (NM_198031.1,1354-1372).
ctaccggtggatatatgat

SEQ ID NO: 675990 - DNA, 19 bp, Mus musculus
  siRNA target sequence for Tubgcp3 (NM_198031.1,1384-1402).
ggacacttaccacgaattt

SEQ ID NO: 675991 - DNA, 19 bp, Mus musculus
  siRNA target sequence for Tubgcp3 (NM_198031.1,1385-1403).
gacacttaccacgaatttt

SEQ ID NO: 675992 - DNA, 19 bp, Mus musculus
  siRNA target sequence for Tubgcp3 (NM_198031.1,1387-1405).
cacttaccacgaatttttt

SEQ ID NO: 675993 - DNA, 19 bp, Mus musculus
  siRNA target sequence for Tubgcp3 (NM_198031.1,1389-1407).
cttaccacgaattttttgt

SEQ ID NO: 675994 - DNA, 19 bp, Mus musculus
  siRNA target sequence for Tubgcp3 (NM_198031.1,1408-1426).
ggcgtctgatccaacagtt

SEQ ID NO: 675995 - DNA, 19 bp, Mus musculus
  siRNA target sequence for Tubgcp3 (NM_198031.1,1409-1427).
gcgtctgatccaacagtta

SEQ ID NO: 675996 - DNA, 19 bp, Mus musculus
  siRNA target sequence for Tubgcp3 (NM_198031.1,1410-1428).
cgtctgatccaacagttaa

SEQ ID NO: 675997 - DNA, 19 bp, Mus musculus
  siRNA target sequence for Tubgcp3 (NM_198031.1,1411-1429).
gtctgatccaacagttaaa

SEQ ID NO: 675998 - DNA, 19 bp, Mus musculus
  siRNA target sequence for Tubgcp3 (NM_198031.1,1437-1455).
gtctatggcacgacaagta

SEQ ID NO: 675999 - DNA, 19 bp, Mus musculus
  siRNA target sequence for Tubgcp3 (NM_198031.1,1439-1457).
ctatggcacgacaagtata

SEQ ID NO: 676000 - DNA, 19 bp, Mus musculus
  siRNA target sequence for Tubgcp3 (NM_198031.1,1514-1532).
cttttgataggaaagtcaa

SEQ ID NO: 676001 - DNA, 19 bp, Mus musculus
  siRNA target sequence for Tubgcp3 (NM_198031.1,1540-1558).
cttgcaccaagtttgtcat

SEQ ID NO: 676002 - DNA, 19 bp, Mus musculus
  siRNA target sequence for Tubgcp3 (NM_198031.1,1559-1577).
gatcagacacctactacaa

SEQ ID NO: 676003 - DNA, 19 bp, Mus musculus
  siRNA target sequence for Tubgcp3 (NM_198031.1,1562-1580).
cagacacctactacaaaaa

SEQ ID NO: 676004 - DNA, 19 bp, Mus musculus
  siRNA target sequence for Tubgcp3 (NM_198031.1,1612-1630).
ccgtgacgctgcggattta

SEQ ID NO: 676005 - DNA, 19 bp, Mus musculus
  siRNA target sequence for Tubgcp3 (NM_198031.1,1613-1631).
cgtgacgctgcggatttat

SEQ ID NO: 676006 - DNA, 19 bp, Mus musculus
  siRNA target sequence for Tubgcp3 (NM_198031.1,1616-1634).
gacgctgcggatttattca

SEQ ID NO: 676007 - DNA, 19 bp, Mus musculus
  siRNA target sequence for Tubgcp3 (NM_198031.1,1618-1636).
cgctgcggatttattcaca

SEQ ID NO: 676008 - DNA, 19 bp, Mus musculus
  siRNA target sequence for Tubgcp3 (NM_198031.1,1639-1657).
cttagaaaacgcatttcaa

SEQ ID NO: 676009 - DNA, 19 bp, Mus musculus
  siRNA target sequence for Tubgcp3 (NM_198031.1,1699-1717).
gttggatgtcctcaataaa

SEQ ID NO: 676010 - DNA, 19 bp, Mus musculus
  siRNA target sequence for Tubgcp3 (NM_198031.1,1778-1796).
gacttcatacggcacttaa

SEQ ID NO: 676011 - DNA, 19 bp, Mus musculus
  siRNA target sequence for Tubgcp3 (NM_198031.1,1783-1801).
catacggcacttaatggat

SEQ ID NO: 676012 - DNA, 19 bp, Mus musculus
  siRNA target sequence for Tubgcp3 (NM_198031.1,1804-1822).
gctcaaaccagaacttgtt

SEQ ID NO: 676013 - DNA, 19 bp, Mus musculus
  siRNA target sequence for Tubgcp3 (NM_198031.1,1820-1838).
gttcggccagcaacaactt

SEQ ID NO: 676014 - DNA, 19 bp, Mus musculus
  siRNA target sequence for Tubgcp3 (NM_198031.1,1823-1841).
cggccagcaacaactttgt

SEQ ID NO: 676015 - DNA, 19 bp, Mus musculus
  siRNA target sequence for Tubgcp3 (NM_198031.1,1824-1842).
ggccagcaacaactttgta

SEQ ID NO: 676016 - DNA, 19 bp, Mus musculus
  siRNA target sequence for Tubgcp3 (NM_198031.1,1825-1843).
gccagcaacaactttgtat

SEQ ID NO: 676017 - DNA, 19 bp, Mus musculus
  siRNA target sequence for Tubgcp3 (NM_198031.1,1833-1851).
caactttgtatcagcataa

SEQ ID NO: 676018 - DNA, 19 bp, Mus musculus
  siRNA target sequence for Tubgcp3 (NM_198031.1,1852-1870).
cttgacggggattcttgaa

SEQ ID NO: 676019 - DNA, 19 bp, Mus musculus
  siRNA target sequence for Tubgcp3 (NM_198031.1,1855-1873).
gacggggattcttgaaact

SEQ ID NO: 676020 - DNA, 19 bp, Mus musculus
  siRNA target sequence for Tubgcp3 (NM_198031.1,2073-2091).
ccaagcgcatggagtacat

SEQ ID NO: 676021 - DNA, 19 bp, Mus musculus
  siRNA target sequence for Tubgcp3 (NM_198031.1,2391-2409).
gagccgtgtttgaccaaat

SEQ ID NO: 676022 - DNA, 19 bp, Mus musculus
  siRNA target sequence for Tubgcp3 (NM_198031.1,2393-2411).
gccgtgtttgaccaaatca

SEQ ID NO: 676023 - DNA, 19 bp, Mus musculus
  siRNA target sequence for Tubgcp3 (NM_198031.1,2394-2412).
ccgtgtttgaccaaatcat

SEQ ID NO: 676024 - DNA, 19 bp, Mus musculus
  siRNA target sequence for Tubgcp3 (NM_198031.1,2395-2413).
cgtgtttgaccaaatcatt

SEQ ID NO: 676025 - DNA, 19 bp, Mus musculus
  siRNA target sequence for Tubgcp3 (NM_198031.1,2398-2416).
gtttgaccaaatcattgaa

SEQ ID NO: 676026 - DNA, 19 bp, Mus musculus
  siRNA target sequence for Tubgcp3 (NM_198031.1,2467-2485).
gaggcgtctgcagtttgaa

SEQ ID NO: 676027 - DNA, 19 bp, Mus musculus
  siRNA target sequence for Tubgcp3 (NM_198031.1,2573-2591).
caggactccataccaaaaa

SEQ ID NO: 676028 - DNA, 19 bp, Mus musculus
  siRNA target sequence for Tubgcp3 (NM_198031.1,2576-2594).
gactccataccaaaaatgt

SEQ ID NO: 676029 - DNA, 19 bp, Mus musculus
  siRNA target sequence for Tubgcp3 (NM_198031.1,2595-2613).
gctcacagttgcgaatatt

SEQ ID NO: 676030 - DNA, 19 bp, Mus musculus
  siRNA target sequence for Tubgcp3 (NM_198031.1,2631-2649).
gtgtggtgcagcagtttct

SEQ ID NO: 676031 - DNA, 19 bp, Mus musculus
  siRNA target sequence for Tubgcp3 (NM_198031.1,2642-2660).
cagtttctggtgttactca

SEQ ID NO: 676032 - DNA, 19 bp, Mus musculus
  siRNA target sequence for Tubgcp3 (NM_198031.1,2662-2680).
gaccagctctgatgaaagt

SEQ ID NO: 676033 - DNA, 19 bp, Mus musculus
  siRNA target sequence for Tubgcp3 (NM_198031.1,2664-2682).
ccagctctgatgaaagtct

SEQ ID NO: 676034 - DNA, 19 bp, Mus musculus
  siRNA target sequence for Tubgcp3 (NM_198031.1,2694-2712).
gcttcagattggacttcaa

SEQ ID NO: 676035 - DNA, 19 bp, Mus musculus
  siRNA target sequence for Tubgcp3 (NM_198031.1,2705-2723).
gacttcaacgaacattaca

SEQ ID NO: 676036 - DNA, 19 bp, Mus musculus
  siRNA target sequence for Waspip (NM_153138.2,283-301).
gaagtgccccaatattgga

SEQ ID NO: 676037 - DNA, 19 bp, Mus musculus
  siRNA target sequence for Waspip (NM_153138.2,291-309).
ccaatattggacaaaccaa

SEQ ID NO: 676038 - DNA, 19 bp, Mus musculus
  siRNA target sequence for Waspip (NM_153138.2,292-310).
caatattggacaaaccaaa

SEQ ID NO: 676039 - DNA, 19 bp, Mus musculus
  siRNA target sequence for Waspip (NM_153138.2,466-484).
ccgccaacagggataatga

SEQ ID NO: 676040 - DNA, 19 bp, Mus musculus
  siRNA target sequence for Waspip (NM_153138.2,467-485).
cgccaacagggataatgat

SEQ ID NO: 676041 - DNA, 19 bp, Mus musculus
  siRNA target sequence for Waspip (NM_153138.2,468-486).
gccaacagggataatgatt

SEQ ID NO: 676042 - DNA, 19 bp, Mus musculus
  siRNA target sequence for Waspip (NM_153138.2,493-511).
gaagccgaccaccgatttt

SEQ ID NO: 676043 - DNA, 19 bp, Mus musculus
  siRNA target sequence for Waspip (NM_153138.2,612-630).
gagccacccaggaacagaa

SEQ ID NO: 676044 - DNA, 19 bp, Mus musculus
  siRNA target sequence for Waspip (NM_153138.2,644-662).
gcctgacgtgggctcaaaa

SEQ ID NO: 676045 - DNA, 19 bp, Mus musculus
  siRNA target sequence for Waspip (NM_153138.2,1390-1408).
cctccacatcagttcgaaa

SEQ ID NO: 676046 - DNA, 19 bp, Mus musculus
  siRNA target sequence for Waspip (NM_153138.2,1391-1409).
ctccacatcagttcgaaat

SEQ ID NO: 676047 - DNA, 19 bp, Mus musculus
  siRNA target sequence for Waspip (NM_153138.2,1437-1455).
gagtgggaaagcagattct

SEQ ID NO: 676048 - DNA, 19 bp, Mus musculus
  siRNA target sequence for Waspip (NM_153138.2,1454-1472).
ctacttccatccgatttct

SEQ ID NO: 676049 - DNA, 19 bp, Mus musculus
  siRNA target sequence for Waspip (NM_153138.2,1481-1499).
gcctccagagccatacgta

SEQ ID NO: 676050 - DNA, 19 bp, Mus musculus
  siRNA target sequence for Waspip (NM_153138.2,1545-1563).
cgaagtggatccaacagaa

SEQ ID NO: 676051 - DNA, 19 bp, Mus musculus
  siRNA target sequence for Dock2 (NM_033374.1,32-50).
gtcacggagtggctatcta

SEQ ID NO: 676052 - DNA, 19 bp, Mus musculus
  siRNA target sequence for Dock2 (NM_033374.1,34-52).
cacggagtggctatctaca

SEQ ID NO: 676053 - DNA, 19 bp, Mus musculus
  siRNA target sequence for Dock2 (NM_033374.1,38-56).
gagtggctatctacaactt

SEQ ID NO: 676054 - DNA, 19 bp, Mus musculus
  siRNA target sequence for Dock2 (NM_033374.1,95-113).
gcgatgtggtacgaataca

SEQ ID NO: 676055 - DNA, 19 bp, Mus musculus
  siRNA target sequence for Dock2 (NM_033374.1,137-155).
gagggtacctcataaagca

SEQ ID NO: 676056 - DNA, 19 bp, Mus musculus
  siRNA target sequence for Dock2 (NM_033374.1,139-157).
gggtacctcataaagcata

SEQ ID NO: 676057 - DNA, 19 bp, Mus musculus
  siRNA target sequence for Dock2 (NM_033374.1,140-158).
ggtacctcataaagcataa

SEQ ID NO: 676058 - DNA, 19 bp, Mus musculus
  siRNA target sequence for Dock2 (NM_033374.1,182-200).
catcctttatccatctcaa

SEQ ID NO: 676059 - DNA, 19 bp, Mus musculus
  siRNA target sequence for Dock2 (NM_033374.1,453-471).
gatcgactatggcaacaaa

SEQ ID NO: 676060 - DNA, 19 bp, Mus musculus
  siRNA target sequence for Dock2 (NM_033374.1,557-575).
ctcacgaggaggcaactta

SEQ ID NO: 676061 - DNA, 19 bp, Mus musculus
  siRNA target sequence for Dock2 (NM_033374.1,559-577).
cacgaggaggcaacttaca

SEQ ID NO: 676062 - DNA, 19 bp, Mus musculus
  siRNA target sequence for Dock2 (NM_033374.1,561-579).
cgaggaggcaacttacaaa

SEQ ID NO: 676063 - DNA, 19 bp, Mus musculus
  siRNA target sequence for Dock2 (NM_033374.1,565-583).
gaggcaacttacaaaatca

SEQ ID NO: 676064 - DNA, 19 bp, Mus musculus
  siRNA target sequence for Dock2 (NM_033374.1,567-585).
ggcaacttacaaaatcaca

SEQ ID NO: 676065 - DNA, 19 bp, Mus musculus
  siRNA target sequence for Dock2 (NM_033374.1,672-690).
cgtctttgtgagaaacttt

SEQ ID NO: 676066 - DNA, 19 bp, Mus musculus
  siRNA target sequence for Dock2 (NM_033374.1,717-735).
gctcttcatgtctctctat

SEQ ID NO: 676067 - DNA, 19 bp, Mus musculus
  siRNA target sequence for Dock2 (NM_033374.1,805-823).
gaaattgagatgctcaata

SEQ ID NO: 676068 - DNA, 19 bp, Mus musculus
  siRNA target sequence for Dock2 (NM_033374.1,859-877).
gacctcaacagggataaga

SEQ ID NO: 676069 - DNA, 19 bp, Mus musculus
  siRNA target sequence for Dock2 (NM_033374.1,862-880).
ctcaacagggataagattt

SEQ ID NO: 676070 - DNA, 19 bp, Mus musculus
  siRNA target sequence for Dock2 (NM_033374.1,1057-1075).
gtctcagctgagaacgatt

SEQ ID NO: 676071 - DNA, 19 bp, Mus musculus
  siRNA target sequence for Dock2 (NM_033374.1,1061-1079).
cagctgagaacgatttcct

SEQ ID NO: 676072 - DNA, 19 bp, Mus musculus
  siRNA target sequence for Dock2 (NM_033374.1,1275-1293).
catctacatcactctctta

SEQ ID NO: 676073 - DNA, 19 bp, Mus musculus
  siRNA target sequence for Dock2 (NM_033374.1,1278-1296).
ctacatcactctcttacaa

SEQ ID NO: 676074 - DNA, 19 bp, Mus musculus
  siRNA target sequence for Dock2 (NM_033374.1,1297-1315).
ggtgactttgacaagtaca

SEQ ID NO: 676075 - DNA, 19 bp, Mus musculus
  siRNA target sequence for Dock2 (NM_033374.1,1371-1389).
caaagtgctacctaatgca

SEQ ID NO: 676076 - DNA, 19 bp, Mus musculus
  siRNA target sequence for Dock2 (NM_033374.1,1437-1455).
cgtctactaccaagtcaaa

SEQ ID NO: 676077 - DNA, 19 bp, Mus musculus
  siRNA target sequence for Dock2 (NM_033374.1,1501-1519).
gatatgcagaggatccatt

SEQ ID NO: 676078 - DNA, 19 bp, Mus musculus
  siRNA target sequence for Dock2 (NM_033374.1,1515-1533).
ccatttgaggttcatgttt

SEQ ID NO: 676079 - DNA, 19 bp, Mus musculus
  siRNA target sequence for Dock2 (NM_033374.1,1537-1555).
caccgctcatcactagaat

SEQ ID NO: 676080 - DNA, 19 bp, Mus musculus
  siRNA target sequence for Dock2 (NM_033374.1,1539-1557).
ccgctcatcactagaatct

SEQ ID NO: 676081 - DNA, 19 bp, Mus musculus
  siRNA target sequence for Dock2 (NM_033374.1,1540-1558).
cgctcatcactagaatcta

SEQ ID NO: 676082 - DNA, 19 bp, Mus musculus
  siRNA target sequence for Dock2 (NM_033374.1,1541-1559).
gctcatcactagaatctaa

SEQ ID NO: 676083 - DNA, 19 bp, Mus musculus
  siRNA target sequence for Dock2 (NM_033374.1,1542-1560).
ctcatcactagaatctaaa

SEQ ID NO: 676084 - DNA, 19 bp, Mus musculus
  siRNA target sequence for Dock2 (NM_033374.1,1547-1565).
cactagaatctaaagataa

SEQ ID NO: 676085 - DNA, 19 bp, Mus musculus
  siRNA target sequence for Dock2 (NM_033374.1,1695-1713).
cctgacacttccttcttat

SEQ ID NO: 676086 - DNA, 19 bp, Mus musculus
  siRNA target sequence for Dock2 (NM_033374.1,1698-1716).
gacacttccttcttatcga

SEQ ID NO: 676087 - DNA, 19 bp, Mus musculus
  siRNA target sequence for Dock2 (NM_033374.1,1714-1732).
cgacaccccgtggaaaaca

SEQ ID NO: 676088 - DNA, 19 bp, Mus musculus
  siRNA target sequence for Dock2 (NM_033374.1,1715-1733).
gacaccccgtggaaaacaa

SEQ ID NO: 676089 - DNA, 19 bp, Mus musculus
  siRNA target sequence for Dock2 (NM_033374.1,2777-2795).
gccgagatcacgctttgat

SEQ ID NO: 676090 - DNA, 19 bp, Mus musculus
  siRNA target sequence for Dock2 (NM_033374.1,2778-2796).
ccgagatcacgctttgatt

SEQ ID NO: 676091 - DNA, 19 bp, Mus musculus
  siRNA target sequence for Dock2 (NM_033374.1,2779-2797).
cgagatcacgctttgatta

SEQ ID NO: 676092 - DNA, 19 bp, Mus musculus
  siRNA target sequence for Dock2 (NM_033374.1,2810-2828).
cgtgtatgacagctatctt

SEQ ID NO: 676093 - DNA, 19 bp, Mus musculus
  siRNA target sequence for Dock2 (NM_033374.1,2835-2853).
gatgggcgaccaacactat

SEQ ID NO: 676094 - DNA, 19 bp, Mus musculus
  siRNA target sequence for Dock2 (NM_033374.1,2838-2856).
gggcgaccaacactattca

SEQ ID NO: 676095 - DNA, 19 bp, Mus musculus
  siRNA target sequence for Dock2 (NM_033374.1,2839-2857).
ggcgaccaacactattcat

SEQ ID NO: 676096 - DNA, 19 bp, Mus musculus
  siRNA target sequence for Dock2 (NM_033374.1,2840-2858).
gcgaccaacactattcatt

SEQ ID NO: 676097 - DNA, 19 bp, Mus musculus
  siRNA target sequence for Dock2 (NM_033374.1,2841-2859).
cgaccaacactattcattt

SEQ ID NO: 676098 - DNA, 19 bp, Mus musculus
  siRNA target sequence for Dock2 (NM_033374.1,2842-2860).
gaccaacactattcatttt

SEQ ID NO: 676099 - DNA, 19 bp, Mus musculus
  siRNA target sequence for Dock2 (NM_033374.1,2887-2905).
gaccttgtggacttcttga

SEQ ID NO: 676100 - DNA, 19 bp, Mus musculus
  siRNA target sequence for Dock2 (NM_033374.1,3093-3111).
ggcagttgcctttatcact

SEQ ID NO: 676101 - DNA, 19 bp, Mus musculus
  siRNA target sequence for Dock2 (NM_033374.1,3197-3215).
gattctccatccgtgatat

SEQ ID NO: 676102 - DNA, 19 bp, Mus musculus
  siRNA target sequence for Dock2 (NM_033374.1,3257-3275).
gcatggtgggacctatatt

SEQ ID NO: 676103 - DNA, 19 bp, Mus musculus
  siRNA target sequence for Dock2 (NM_033374.1,3262-3280).
gtgggacctatattagaga

SEQ ID NO: 676104 - DNA, 19 bp, Mus musculus
  siRNA target sequence for Dock2 (NM_033374.1,3643-3661).
cgggaagagatgtacataa

SEQ ID NO: 676105 - DNA, 19 bp, Mus musculus
  siRNA target sequence for Dock2 (NM_033374.1,3833-3851).
cactctatgagaccattat

SEQ ID NO: 676106 - DNA, 19 bp, Mus musculus
  siRNA target sequence for Dock2 (NM_033374.1,3843-3861).
gaccattataggctacttt

SEQ ID NO: 676107 - DNA, 19 bp, Mus musculus
  siRNA target sequence for Dock2 (NM_033374.1,3965-3983).
cccagcaggccaaattcta

SEQ ID NO: 676108 - DNA, 19 bp, Mus musculus
  siRNA target sequence for Dock2 (NM_033374.1,4066-4084).
cggaacaaagtgttcatct

SEQ ID NO: 676109 - DNA, 19 bp, Mus musculus
  siRNA target sequence for Dock2 (NM_033374.1,4153-4171).
gaaaagatgaacacaactt

SEQ ID NO: 676110 - DNA, 19 bp, Mus musculus
  siRNA target sequence for Dock2 (NM_033374.1,4205-4223).
gccagtacatccagtgttt

SEQ ID NO: 676111 - DNA, 19 bp, Mus musculus
  siRNA target sequence for Dock2 (NM_033374.1,4209-4227).
gtacatccagtgtttcact

SEQ ID NO: 676112 - DNA, 19 bp, Mus musculus
  siRNA target sequence for Dock2 (NM_033374.1,4246-4264).
gaacaccccaggttcaaga

SEQ ID NO: 676113 - DNA, 19 bp, Mus musculus
  siRNA target sequence for Dock2 (NM_033374.1,4249-4267).
caccccaggttcaagaaca

SEQ ID NO: 676114 - DNA, 19 bp, Mus musculus
  siRNA target sequence for Dock2 (NM_033374.1,4272-4290).
ggtgcctgaccagatcata

SEQ ID NO: 676115 - DNA, 19 bp, Mus musculus
  siRNA target sequence for Dock2 (NM_033374.1,4273-4291).
gtgcctgaccagatcataa

SEQ ID NO: 676116 - DNA, 19 bp, Mus musculus
  siRNA target sequence for Dock2 (NM_033374.1,4276-4294).
cctgaccagatcataaact

SEQ ID NO: 676117 - DNA, 19 bp, Mus musculus
  siRNA target sequence for Dock2 (NM_033374.1,4293-4311).
cttttacaagtctaattat

SEQ ID NO: 676118 - DNA, 19 bp, Mus musculus
  siRNA target sequence for Dock2 (NM_033374.1,4439-4457).
ggtttgaggtagttcacat

SEQ ID NO: 676119 - DNA, 19 bp, Mus musculus
  siRNA target sequence for Dock2 (NM_033374.1,4540-4558).
cagtaccagagtgatgaaa

SEQ ID NO: 676120 - DNA, 19 bp, Mus musculus
  siRNA target sequence for Dock2 (NM_033374.1,4617-4635).
gggaggcttcgccaagtat

SEQ ID NO: 676121 - DNA, 19 bp, Mus musculus
  siRNA target sequence for Dock2 (NM_033374.1,4622-4640).
gcttcgccaagtatgagaa

SEQ ID NO: 676122 - DNA, 19 bp, Mus musculus
  siRNA target sequence for Dock2 (NM_033374.1,4974-4992).
caaagtccccgcagaaagt

SEQ ID NO: 676123 - DNA, 19 bp, Mus musculus
  siRNA target sequence for Dock2 (NM_033374.1,5077-5095).
ctgcgtcggtccaagaaaa

SEQ ID NO: 676124 - DNA, 19 bp, Mus musculus
  siRNA target sequence for Dock2 (NM_033374.1,5080-5098).
cgtcggtccaagaaaagga

SEQ ID NO: 676125 - DNA, 19 bp, Mus musculus
  siRNA target sequence for Hps1 (NM_019424.1,179-197).
gcgcagaggtcctcttcta

SEQ ID NO: 676126 - DNA, 19 bp, Mus musculus
  siRNA target sequence for Hps1 (NM_019424.1,360-378).
ctgcttctcaacagaaaat

SEQ ID NO: 676127 - DNA, 19 bp, Mus musculus
  siRNA target sequence for Hps1 (NM_019424.1,659-677).
cagtggagcggctcattca

SEQ ID NO: 676128 - DNA, 19 bp, Mus musculus
  siRNA target sequence for Hps1 (NM_019424.1,794-812).
gcaagctgttggctttcta

SEQ ID NO: 676129 - DNA, 19 bp, Mus musculus
  siRNA target sequence for Hps1 (NM_019424.1,1218-1236).
cctggatgccaacataaaa

SEQ ID NO: 676130 - DNA, 19 bp, Mus musculus
  siRNA target sequence for Hps1 (NM_019424.1,1589-1607).
gacagctgtgtgtcatcta

SEQ ID NO: 676131 - DNA, 19 bp, Mus musculus
  siRNA target sequence for Hps1 (NM_019424.1,1780-1798).
ggcctggtccacttcatct

SEQ ID NO: 676132 - DNA, 19 bp, Mus musculus
  siRNA target sequence for Hps1 (NM_019424.1,1999-2017).
ctgtggttcgagaatgaca

SEQ ID NO: 676133 - DNA, 19 bp, Mus musculus
  siRNA target sequence for Hps1 (NM_019424.1,2083-2101).
ctgggaggtgactactaca

SEQ ID NO: 676134 - DNA, 19 bp, Mus musculus
  siRNA target sequence for Hps3 (NM_080634.2,223-241).
cagcgaagccggagactat

SEQ ID NO: 676135 - DNA, 19 bp, Mus musculus
  siRNA target sequence for Hps3 (NM_080634.2,225-243).
gcgaagccggagactatct

SEQ ID NO: 676136 - DNA, 19 bp, Mus musculus
  siRNA target sequence for Hps3 (NM_080634.2,234-252).
gagactatctggtagcaat

SEQ ID NO: 676137 - DNA, 19 bp, Mus musculus
  siRNA target sequence for Hps3 (NM_080634.2,278-296).
ctgcgtgcttacgtgaatt

SEQ ID NO: 676138 - DNA, 19 bp, Mus musculus
  siRNA target sequence for Hps3 (NM_080634.2,281-299).
cgtgcttacgtgaattgga

SEQ ID NO: 676139 - DNA, 19 bp, Mus musculus
  siRNA target sequence for Hps3 (NM_080634.2,321-339).
cccgtgtgtgcattcgaat

SEQ ID NO: 676140 - DNA, 19 bp, Mus musculus
  siRNA target sequence for Hps3 (NM_080634.2,336-354).
gaatggttggccacaatgt

SEQ ID NO: 676141 - DNA, 19 bp, Mus musculus
  siRNA target sequence for Hps3 (NM_080634.2,381-399).
gagaccagatgtctataat

SEQ ID NO: 676142 - DNA, 19 bp, Mus musculus
  siRNA target sequence for Hps3 (NM_080634.2,419-437).
gcccctttgtgcttttcgt

SEQ ID NO: 676143 - DNA, 19 bp, Mus musculus
  siRNA target sequence for Hps3 (NM_080634.2,499-517).
gaagtatgatatcattaat

SEQ ID NO: 676144 - DNA, 19 bp, Mus musculus
  siRNA target sequence for Hps3 (NM_080634.2,526-544).
ctcaatattgaactttgaa

SEQ ID NO: 676145 - DNA, 19 bp, Mus musculus
  siRNA target sequence for Hps3 (NM_080634.2,545-563).
cgttcattaattatacaca

SEQ ID NO: 676146 - DNA, 19 bp, Mus musculus
  siRNA target sequence for Hps3 (NM_080634.2,549-567).
cattaattatacacataga

SEQ ID NO: 676147 - DNA, 19 bp, Mus musculus
  siRNA target sequence for Hps3 (NM_080634.2,680-698).
gaccaccacccacaagaaa

SEQ ID NO: 676148 - DNA, 19 bp, Mus musculus
  siRNA target sequence for Hps3 (NM_080634.2,692-710).
caagaaaccagcaatccat

SEQ ID NO: 676149 - DNA, 19 bp, Mus musculus
  siRNA target sequence for Hps3 (NM_080634.2,718-736).
ggcggaaggtgtcagtaat

SEQ ID NO: 676150 - DNA, 19 bp, Mus musculus
  siRNA target sequence for Hps3 (NM_080634.2,720-738).
cggaaggtgtcagtaatga

SEQ ID NO: 676151 - DNA, 19 bp, Mus musculus
  siRNA target sequence for Hps3 (NM_080634.2,721-739).
ggaaggtgtcagtaatgaa

SEQ ID NO: 676152 - DNA, 19 bp, Mus musculus
  siRNA target sequence for Hps3 (NM_080634.2,875-893).
cgtgttcggcatctattgt

SEQ ID NO: 676153 - DNA, 19 bp, Mus musculus
  siRNA target sequence for Hps3 (NM_080634.2,876-894).
gtgttcggcatctattgta

SEQ ID NO: 676154 - DNA, 19 bp, Mus musculus
  siRNA target sequence for Hps3 (NM_080634.2,878-896).
gttcggcatctattgtata

SEQ ID NO: 676155 - DNA, 19 bp, Mus musculus
  siRNA target sequence for Hps3 (NM_080634.2,897-915).
gacgttttgctccagatat

SEQ ID NO: 676156 - DNA, 19 bp, Mus musculus
  siRNA target sequence for Hps3 (NM_080634.2,899-917).
cgttttgctccagatattt

SEQ ID NO: 676157 - DNA, 19 bp, Mus musculus
  siRNA target sequence for Hps3 (NM_080634.2,921-939).
cctatgtcttgtctgataa

SEQ ID NO: 676158 - DNA, 19 bp, Mus musculus
  siRNA target sequence for Hps3 (NM_080634.2,933-951).
ctgataacatcaagttaca

SEQ ID NO: 676159 - DNA, 19 bp, Mus musculus
  siRNA target sequence for Hps3 (NM_080634.2,1055-1073).
cctcatgtgggctatctgt

SEQ ID NO: 676160 - DNA, 19 bp, Mus musculus
  siRNA target sequence for Hps3 (NM_080634.2,1056-1074).
ctcatgtgggctatctgta

SEQ ID NO: 676161 - DNA, 19 bp, Mus musculus
  siRNA target sequence for Hps3 (NM_080634.2,1229-1247).
gacctatacatggatacta

SEQ ID NO: 676162 - DNA, 19 bp, Mus musculus
  siRNA target sequence for Hps3 (NM_080634.2,1257-1275).
cttgcccacctgtcagtat

SEQ ID NO: 676163 - DNA, 19 bp, Mus musculus
  siRNA target sequence for Hps3 (NM_080634.2,1279-1297).
cgtttgtgctctaaggata

SEQ ID NO: 676164 - DNA, 19 bp, Mus musculus
  siRNA target sequence for Hps3 (NM_080634.2,1289-1307).
ctaaggatacagcttttca

SEQ ID NO: 676165 - DNA, 19 bp, Mus musculus
  siRNA target sequence for Hps3 (NM_080634.2,1397-1415).
cccaagaaacttatttcta

SEQ ID NO: 676166 - DNA, 19 bp, Mus musculus
  siRNA target sequence for Hps3 (NM_080634.2,1453-1471).
ggctgaagcggcatggaat

SEQ ID NO: 676167 - DNA, 19 bp, Mus musculus
  siRNA target sequence for Hps3 (NM_080634.2,1514-1532).
gaaatggtagactatagta

SEQ ID NO: 676168 - DNA, 19 bp, Mus musculus
  siRNA target sequence for Hps3 (NM_080634.2,1677-1695).
gacaccttggagactgtta

SEQ ID NO: 676169 - DNA, 19 bp, Mus musculus
  siRNA target sequence for Hps3 (NM_080634.2,1724-1742).
ctcgccttgccgtactata

SEQ ID NO: 676170 - DNA, 19 bp, Mus musculus
  siRNA target sequence for Hps3 (NM_080634.2,1727-1745).
gccttgccgtactataaga

SEQ ID NO: 676171 - DNA, 19 bp, Mus musculus
  siRNA target sequence for Hps3 (NM_080634.2,1728-1746).
ccttgccgtactataagat

SEQ ID NO: 676172 - DNA, 19 bp, Mus musculus
  siRNA target sequence for Hps3 (NM_080634.2,1819-1837).
gagaggactagtattttat

SEQ ID NO: 676173 - DNA, 19 bp, Mus musculus
  siRNA target sequence for Hps3 (NM_080634.2,1821-1839).
gaggactagtattttatat

SEQ ID NO: 676174 - DNA, 19 bp, Mus musculus
  siRNA target sequence for Hps3 (NM_080634.2,1861-1879).
cctggatgaagaattaagt

SEQ ID NO: 676175 - DNA, 19 bp, Mus musculus
  siRNA target sequence for Hps3 (NM_080634.2,1892-1910).
gcaaaagtggctcagatat

SEQ ID NO: 676176 - DNA, 19 bp, Mus musculus
  siRNA target sequence for Hps3 (NM_080634.2,1950-1968).
ctagcccttctatgaagaa

SEQ ID NO: 676177 - DNA, 19 bp, Mus musculus
  siRNA target sequence for Hps3 (NM_080634.2,1954-1972).
cccttctatgaagaatatt

SEQ ID NO: 676178 - DNA, 19 bp, Mus musculus
  siRNA target sequence for Hps3 (NM_080634.2,1966-1984).
gaatattgatcccttaact

SEQ ID NO: 676179 - DNA, 19 bp, Mus musculus
  siRNA target sequence for Hps3 (NM_080634.2,2008-2026).
ggatagttgtggagtttca

SEQ ID NO: 676180 - DNA, 19 bp, Mus musculus
  siRNA target sequence for Hps3 (NM_080634.2,2019-2037).
gagtttcacccgtcttagt

SEQ ID NO: 676181 - DNA, 19 bp, Mus musculus
  siRNA target sequence for Hps3 (NM_080634.2,2021-2039).
gtttcacccgtcttagtga

SEQ ID NO: 676182 - DNA, 19 bp, Mus musculus
  siRNA target sequence for Hps3 (NM_080634.2,2072-2090).
ggagatcttgacatgtaca

SEQ ID NO: 676183 - DNA, 19 bp, Mus musculus
  siRNA target sequence for Hps3 (NM_080634.2,2179-2197).
gattgttcctacagaactt

SEQ ID NO: 676184 - DNA, 19 bp, Mus musculus
  siRNA target sequence for Hps3 (NM_080634.2,2245-2263).
cctgggcttacagaagaat

SEQ ID NO: 676185 - DNA, 19 bp, Mus musculus
  siRNA target sequence for Hps3 (NM_080634.2,2248-2266).
gggcttacagaagaatgat

SEQ ID NO: 676186 - DNA, 19 bp, Mus musculus
  siRNA target sequence for Hps3 (NM_080634.2,2250-2268).
gcttacagaagaatgataa

SEQ ID NO: 676187 - DNA, 19 bp, Mus musculus
  siRNA target sequence for Hps3 (NM_080634.2,2333-2351).
ccgcagcttttgatagact

SEQ ID NO: 676188 - DNA, 19 bp, Mus musculus
  siRNA target sequence for Hps3 (NM_080634.2,2334-2352).
cgcagcttttgatagactt

SEQ ID NO: 676189 - DNA, 19 bp, Mus musculus
  siRNA target sequence for Hps3 (NM_080634.2,2423-2441).
cagtacgtttggaggttat

SEQ ID NO: 676190 - DNA, 19 bp, Mus musculus
  siRNA target sequence for Hps3 (NM_080634.2,2425-2443).
gtacgtttggaggttatct

SEQ ID NO: 676191 - DNA, 19 bp, Mus musculus
  siRNA target sequence for Hps3 (NM_080634.2,2475-2493).
gaacagcggaggatttgat

SEQ ID NO: 676192 - DNA, 19 bp, Mus musculus
  siRNA target sequence for Hps3 (NM_080634.2,2478-2496).
cagcggaggatttgataaa

SEQ ID NO: 676193 - DNA, 19 bp, Mus musculus
  siRNA target sequence for Hps3 (NM_080634.2,2525-2543).
ccatgggttcatgtgttaa

SEQ ID NO: 676194 - DNA, 19 bp, Mus musculus
  siRNA target sequence for Hps3 (NM_080634.2,2550-2568).
ctgattccttagctgataa

SEQ ID NO: 676195 - DNA, 19 bp, Mus musculus
  siRNA target sequence for Hps3 (NM_080634.2,2631-2649).
cctccattattccgttttt

SEQ ID NO: 676196 - DNA, 19 bp, Mus musculus
  siRNA target sequence for Hps3 (NM_080634.2,2634-2652).
ccattattccgtttttgga

SEQ ID NO: 676197 - DNA, 19 bp, Mus musculus
  siRNA target sequence for Hps3 (NM_080634.2,2698-2716).
ctgccatacacgcttacaa

SEQ ID NO: 676198 - DNA, 19 bp, Mus musculus
  siRNA target sequence for Hps3 (NM_080634.2,2700-2718).
gccatacacgcttacaaga

SEQ ID NO: 676199 - DNA, 19 bp, Mus musculus
  siRNA target sequence for Hps3 (NM_080634.2,2706-2724).
cacgcttacaagagtatga

SEQ ID NO: 676200 - DNA, 19 bp, Mus musculus
  siRNA target sequence for Hps3 (NM_080634.2,2709-2727).
gcttacaagagtatgaaca

SEQ ID NO: 676201 - DNA, 19 bp, Mus musculus
  siRNA target sequence for Hps3 (NM_080634.2,2762-2780).
gccgtcattgcgtatgcta

SEQ ID NO: 676202 - DNA, 19 bp, Mus musculus
  siRNA target sequence for Hps3 (NM_080634.2,2763-2781).
ccgtcattgcgtatgctaa

SEQ ID NO: 676203 - DNA, 19 bp, Mus musculus
  siRNA target sequence for Hps3 (NM_080634.2,2764-2782).
cgtcattgcgtatgctaat

SEQ ID NO: 676204 - DNA, 19 bp, Mus musculus
  siRNA target sequence for Hps3 (NM_080634.2,2886-2904).
cattgttaaaagaaacctt

SEQ ID NO: 676205 - DNA, 19 bp, Mus musculus
  siRNA target sequence for Hps3 (NM_080634.2,2932-2950).
gagggatttcttgaatgtt

SEQ ID NO: 676206 - DNA, 19 bp, Mus musculus
  siRNA target sequence for Hps3 (NM_080634.2,3004-3022).
ccggaagaaatcactaact

SEQ ID NO: 676207 - DNA, 19 bp, Mus musculus
  siRNA target sequence for 1110064N10Rik (NM_026396.2,263-281).
gttgatgcctcattctaaa

SEQ ID NO: 676208 - DNA, 19 bp, Mus musculus
  siRNA target sequence for 1110064N10Rik (NM_026396.2,296-314).
ggatcgtaaagataaatta

SEQ ID NO: 676209 - DNA, 19 bp, Mus musculus
  siRNA target sequence for 1110064N10Rik (NM_026396.2,297-315).
gatcgtaaagataaattat

SEQ ID NO: 676210 - DNA, 19 bp, Mus musculus
  siRNA target sequence for 1110064N10Rik (NM_026396.2,329-347).
ggtctgtgaaatgaaaaat

SEQ ID NO: 676211 - DNA, 19 bp, Mus musculus
  siRNA target sequence for 1110064N10Rik (NM_026396.2,377-395).
gaaaaaacaggatctctat

SEQ ID NO: 676212 - DNA, 19 bp, Mus musculus
  siRNA target sequence for 1110064N10Rik (NM_026396.2,390-408).
ctctatatgtggctttcaa

SEQ ID NO: 676213 - DNA, 19 bp, Mus musculus
  siRNA target sequence for 1110064N10Rik (NM_026396.2,392-410).
ctatatgtggctttcaaat

SEQ ID NO: 676214 - DNA, 19 bp, Mus musculus
  siRNA target sequence for 1110064N10Rik (NM_026396.2,420-438).
ggtccatctgccaaattct

SEQ ID NO: 676215 - DNA, 19 bp, Mus musculus
  siRNA target sequence for 1110064N10Rik (NM_026396.2,431-449).
caaattcttggttcaaaat

SEQ ID NO: 676216 - DNA, 19 bp, Mus musculus
  siRNA target sequence for 1110064N10Rik (NM_026396.2,534-552).
gacttgccacattatgctt

SEQ ID NO: 676217 - DNA, 19 bp, Mus musculus
  siRNA target sequence for 1110064N10Rik (NM_026396.2,581-599).
cagtacgccacgataccat

SEQ ID NO: 676218 - DNA, 19 bp, Mus musculus
  siRNA target sequence for 1110064N10Rik (NM_026396.2,634-652).
cgttcaccattctggataa

SEQ ID NO: 676219 - DNA, 19 bp, Mus musculus
  siRNA target sequence for 1110064N10Rik (NM_026396.2,665-683).
ccggaacttccagattata

SEQ ID NO: 676220 - DNA, 19 bp, Mus musculus
  siRNA target sequence for 1110064N10Rik (NM_026396.2,692-710).
cgctgctctagtggaaata

SEQ ID NO: 676221 - DNA, 19 bp, Mus musculus
  siRNA target sequence for 1110064N10Rik (NM_026396.2,711-729).
ggacctcgttttgttttaa

SEQ ID NO: 676222 - DNA, 19 bp, Mus musculus
  siRNA target sequence for 1110064N10Rik (NM_026396.2,755-773).
ctttggaggaccaacctta

SEQ ID NO: 676223 - DNA, 19 bp, Mus musculus
  siRNA target sequence for 1110064N10Rik (NM_026396.2,760-778).
gaggaccaaccttatatga

SEQ ID NO: 676224 - DNA, 19 bp, Mus musculus
  siRNA target sequence for 1110064N10Rik (NM_026396.2,762-780).
ggaccaaccttatatgaaa

SEQ ID NO: 676225 - DNA, 19 bp, Mus musculus
  siRNA target sequence for 1110064N10Rik (NM_026396.2,763-781).
gaccaaccttatatgaaaa

SEQ ID NO: 676226 - DNA, 19 bp, Mus musculus
  siRNA target sequence for 1110064N10Rik (NM_026396.2,803-821).
catgcatcggcgtgtcata

SEQ ID NO: 676227 - DNA, 19 bp, Mus musculus
  siRNA target sequence for 1110064N10Rik (NM_026396.2,807-825).
catcggcgtgtcataagat

SEQ ID NO: 676228 - DNA, 19 bp, Mus musculus
  siRNA target sequence for 1110064N10Rik (NM_026396.2,830-848).
cacagctgccaagtataga

SEQ ID NO: 676229 - DNA, 19 bp, Mus musculus
  siRNA target sequence for 1110064N10Rik (NM_026396.2,922-940).
ctgcagacgtgtttgttat

SEQ ID NO: 676230 - DNA, 19 bp, Mus musculus
  siRNA target sequence for 1110064N10Rik (NM_026396.2,950-968).
ggagaagccagtagaaata

SEQ ID NO: 676231 - DNA, 19 bp, Mus musculus
  siRNA target sequence for 1110064N10Rik (NM_026396.2,1006-1024).
caaggaagagacggattta

SEQ ID NO: 676232 - DNA, 19 bp, Mus musculus
  siRNA target sequence for Ebna1bp2 (NM_026932.2,264-282).
gtgagtggcctgaaacagt

SEQ ID NO: 676233 - DNA, 19 bp, Mus musculus
  siRNA target sequence for Ebna1bp2 (NM_026932.2,281-299).
gtgcttggctgaattcaga

SEQ ID NO: 676234 - DNA, 19 bp, Mus musculus
  siRNA target sequence for Ebna1bp2 (NM_026932.2,303-321).
gatctggagtgggttgaaa

SEQ ID NO: 676235 - DNA, 19 bp, Mus musculus
  siRNA target sequence for Ebna1bp2 (NM_026932.2,389-407).
ccagaagaaaggcgttaat

SEQ ID NO: 676236 - DNA, 19 bp, Mus musculus
  siRNA target sequence for Ebna1bp2 (NM_026932.2,392-410).
gaagaaaggcgttaatcca

SEQ ID NO: 676237 - DNA, 19 bp, Mus musculus
  siRNA target sequence for Ebna1bp2 (NM_026932.2,506-524).
gaagaggcccaccgattat

SEQ ID NO: 676238 - DNA, 19 bp, Mus musculus
  siRNA target sequence for Ebna1bp2 (NM_026932.2,509-527).
gaggcccaccgattatttt

SEQ ID NO: 676239 - DNA, 19 bp, Mus musculus
  siRNA target sequence for Ebna1bp2 (NM_026932.2,512-530).
gcccaccgattattttgca

SEQ ID NO: 676240 - DNA, 19 bp, Mus musculus
  siRNA target sequence for Ebna1bp2 (NM_026932.2,544-562).
ctgatcagcagatgcaaaa

SEQ ID NO: 676241 - DNA, 19 bp, Mus musculus
  siRNA target sequence for Ebna1bp2 (NM_026932.2,624-642).
cttcgagcgcttaggaaat

SEQ ID NO: 676242 - DNA, 19 bp, Mus musculus
  siRNA target sequence for Ebna1bp2 (NM_026932.2,685-703).
gggagaaagcacacatgat

SEQ ID NO: 676243 - DNA, 19 bp, Mus musculus
  siRNA target sequence for Ebna1bp2 (NM_026932.2,822-840).
gggcctaatgccaaacgaa

SEQ ID NO: 676244 - DNA, 19 bp, Mus musculus
  siRNA target sequence for Nol5a (NM_024193.1,113-131).
cgcaggtggaggaatgtgt

SEQ ID NO: 676245 - DNA, 19 bp, Mus musculus
  siRNA target sequence for Nol5a (NM_024193.1,123-141).
ggaatgtgtgcttaacctt

SEQ ID NO: 676246 - DNA, 19 bp, Mus musculus
  siRNA target sequence for Nol5a (NM_024193.1,267-285).
gacatacctgccatctaaa

SEQ ID NO: 676247 - DNA, 19 bp, Mus musculus
  siRNA target sequence for Nol5a (NM_024193.1,318-336).
caagattggtgctgcaata

SEQ ID NO: 676248 - DNA, 19 bp, Mus musculus
  siRNA target sequence for Nol5a (NM_024193.1,360-378).
ccagactggtggtgtgata

SEQ ID NO: 676249 - DNA, 19 bp, Mus musculus
  siRNA target sequence for Nol5a (NM_024193.1,397-415).
gttcgtctgcatttccata

SEQ ID NO: 676250 - DNA, 19 bp, Mus musculus
  siRNA target sequence for Nol5a (NM_024193.1,423-441).
gaagggtctgacagatctt

SEQ ID NO: 676251 - DNA, 19 bp, Mus musculus
  siRNA target sequence for Nol5a (NM_024193.1,434-452).
cagatctttctgcttgtaa

SEQ ID NO: 676252 - DNA, 19 bp, Mus musculus
  siRNA target sequence for Nol5a (NM_024193.1,477-495).
ctactctcgtgccaaagtt

SEQ ID NO: 676253 - DNA, 19 bp, Mus musculus
  siRNA target sequence for Nol5a (NM_024193.1,480-498).
ctctcgtgccaaagttaaa

SEQ ID NO: 676254 - DNA, 19 bp, Mus musculus
  siRNA target sequence for Nol5a (NM_024193.1,482-500).
ctcgtgccaaagttaaatt

SEQ ID NO: 676255 - DNA, 19 bp, Mus musculus
  siRNA target sequence for Nol5a (NM_024193.1,484-502).
cgtgccaaagttaaattta

SEQ ID NO: 676256 - DNA, 19 bp, Mus musculus
  siRNA target sequence for Nol5a (NM_024193.1,510-528).
ccgagtggacaacatgatt

SEQ ID NO: 676257 - DNA, 19 bp, Mus musculus
  siRNA target sequence for Nol5a (NM_024193.1,559-577).
gataaagatatcaatacct

SEQ ID NO: 676258 - DNA, 19 bp, Mus musculus
  siRNA target sequence for Nol5a (NM_024193.1,777-795).
catgggcatggacatatct

SEQ ID NO: 676259 - DNA, 19 bp, Mus musculus
  siRNA target sequence for Nol5a (NM_024193.1,794-812).
ctgctatcgacttgataaa

SEQ ID NO: 676260 - DNA, 19 bp, Mus musculus
  siRNA target sequence for Nol5a (NM_024193.1,797-815).
ctatcgacttgataaacat

SEQ ID NO: 676261 - DNA, 19 bp, Mus musculus
  siRNA target sequence for Nol5a (NM_024193.1,827-845).
ccagtcgtgtggtgtcttt

SEQ ID NO: 676262 - DNA, 19 bp, Mus musculus
  siRNA target sequence for Nol5a (NM_024193.1,905-923).
ccagcctgtcagccttaat

SEQ ID NO: 676263 - DNA, 19 bp, Mus musculus
  siRNA target sequence for Nol5a (NM_024193.1,906-924).
cagcctgtcagccttaatt

SEQ ID NO: 676264 - DNA, 19 bp, Mus musculus
  siRNA target sequence for Terf2ip (NM_020584.1,154-172).
gcagcgccatgtcgtttta

SEQ ID NO: 676265 - DNA, 19 bp, Mus musculus
  siRNA target sequence for Terf2ip (NM_020584.1,157-175).
gcgccatgtcgttttacgt

SEQ ID NO: 676266 - DNA, 19 bp, Mus musculus
  siRNA target sequence for Terf2ip (NM_020584.1,733-751).
gcggagagccacagaacaa

SEQ ID NO: 676267 - DNA, 19 bp, Mus musculus
  siRNA target sequence for Tinf2 (NM_145705.2,465-483).
ggaggcacgggaaaatttt

SEQ ID NO: 676268 - DNA, 19 bp, Mus musculus
  siRNA target sequence for Tinf2 (NM_145705.2,469-487).
gcacgggaaaatttttgct

SEQ ID NO: 676269 - DNA, 19 bp, Mus musculus
  siRNA target sequence for Tinf2 (NM_145705.2,531-549).
ggaactagaacaagactat

SEQ ID NO: 676270 - DNA, 19 bp, Mus musculus
  siRNA target sequence for Tinf2 (NM_145705.2,573-591).
ggaaaagctgttgtttgaa

SEQ ID NO: 676271 - DNA, 19 bp, Mus musculus
  siRNA target sequence for Tinf2 (NM_145705.2,639-657).
gcttcaggatgctctaagt

SEQ ID NO: 676272 - DNA, 19 bp, Mus musculus
  siRNA target sequence for Tinf2 (NM_145705.2,670-688).
ggctcgttcatcacttctt

SEQ ID NO: 676273 - DNA, 19 bp, Mus musculus
  siRNA target sequence for Tinf2 (NM_145705.2,695-713).
ctttgcaccagtatggtat

SEQ ID NO: 676274 - DNA, 19 bp, Mus musculus
  siRNA target sequence for Tinf2 (NM_145705.2,714-732).
ggacatggggtggacattt

SEQ ID NO: 676275 - DNA, 19 bp, Mus musculus
  siRNA target sequence for Tinf2 (NM_145705.2,717-735).
catggggtggacatttcca

SEQ ID NO: 676276 - DNA, 19 bp, Mus musculus
  siRNA target sequence for Tinf2 (NM_145705.2,907-925).
cctttgggaaagcgaaaat

SEQ ID NO: 676277 - DNA, 19 bp, Mus musculus
  siRNA target sequence for Tinf2 (NM_145705.2,918-936).
gcgaaaatcccgatcacat

SEQ ID NO: 676278 - DNA, 19 bp, Mus musculus
  siRNA target sequence for Tinf2 (NM_145705.2,919-937).
cgaaaatcccgatcacatt

SEQ ID NO: 676279 - DNA, 19 bp, Mus musculus
  siRNA target sequence for Tinf2 (NM_145705.2,945-963).
ggcaaaggcgtgccataaa

SEQ ID NO: 676280 - DNA, 19 bp, Mus musculus
  siRNA target sequence for Tinf2 (NM_145705.2,976-994).
gtcatgctactcccattta

SEQ ID NO: 676281 - DNA, 19 bp, Mus musculus
  siRNA target sequence for Tinf2 (NM_145705.2,1004-1022).
gcttaccagctcaagactt

SEQ ID NO: 676282 - DNA, 19 bp, Mus musculus
  siRNA target sequence for Tinf2 (NM_145705.2,1092-1110).
cacggaggaggctaagact

SEQ ID NO: 676283 - DNA, 19 bp, Mus musculus
  siRNA target sequence for Tinf2 (NM_145705.2,1193-1211).
gcgtggatcctctaagaca

SEQ ID NO: 676284 - DNA, 19 bp, Mus musculus
  siRNA target sequence for Tinf2 (NM_145705.2,1214-1232).
catcaccgcctcttacagt

SEQ ID NO: 676285 - DNA, 19 bp, Mus musculus
  siRNA target sequence for Tinf2 (NM_145705.2,1277-1295).
ccataggggacttggtttt

SEQ ID NO: 676286 - DNA, 19 bp, Mus musculus
  siRNA target sequence for Tinf2 (NM_145705.2,1361-1379).
cgaagtttgacacctatat

SEQ ID NO: 676287 - DNA, 19 bp, Mus musculus
  siRNA target sequence for Tinf2 (NM_145705.2,1374-1392).
ctatatccccatgttttgt

SEQ ID NO: 676288 - DNA, 19 bp, Mus musculus
  siRNA target sequence for Palm (NM_023128.2,446-464).
cgttgggtaccccaaaaga

SEQ ID NO: 676289 - DNA, 19 bp, Mus musculus
  siRNA target sequence for Palm (NM_023128.2,494-512).
cagggggatccacaatgat

SEQ ID NO: 676290 - DNA, 19 bp, Mus musculus
  siRNA target sequence for Palm (NM_023128.2,496-514).
gggggatccacaatgatga

SEQ ID NO: 676291 - DNA, 19 bp, Mus musculus
  siRNA target sequence for Palm (NM_023128.2,617-635).
ctcagggcgtgaaagtcta

SEQ ID NO: 676292 - DNA, 19 bp, Mus musculus
  siRNA target sequence for Palm (NM_023128.2,633-651).
ctacgaggacgaaacaaaa

SEQ ID NO: 676293 - DNA, 19 bp, Mus musculus
  siRNA target sequence for Palm (NM_023128.2,1032-1050).
ggagcccgcacctctcaat

SEQ ID NO: 676294 - DNA, 19 bp, Mus musculus
  siRNA target sequence for Palm (NM_023128.2,1140-1158).
gaagcctcgctgtagatgt

SEQ ID NO: 676295 - DNA, 19 bp, Mus musculus
  siRNA target sequence for Palm (NM_023128.2,1143-1161).
gcctcgctgtagatgttgt

SEQ ID NO: 676296 - DNA, 19 bp, Mus musculus
  siRNA target sequence for Palm (NM_023128.2,1144-1162).
cctcgctgtagatgttgtt

SEQ ID NO: 676297 - DNA, 19 bp, Mus musculus
  siRNA target sequence for Gtrgeo22 (NM_148934.1,19-37).
ccgctgcccccaacaaaga

SEQ ID NO: 676298 - DNA, 19 bp, Mus musculus
  siRNA target sequence for Gtrgeo22 (NM_148934.1,20-38).
cgctgcccccaacaaagat

SEQ ID NO: 676299 - DNA, 19 bp, Mus musculus
  siRNA target sequence for Gtrgeo22 (NM_148934.1,182-200).
gcgcagccctcctaaaggt

SEQ ID NO: 676300 - DNA, 19 bp, Mus musculus
  siRNA target sequence for Gtrgeo22 (NM_148934.1,239-257).
cgcactacttcgagaacat

SEQ ID NO: 676301 - DNA, 19 bp, Mus musculus
  siRNA target sequence for Gtrgeo22 (NM_148934.1,374-392).
ggaccgccttcaacaacaa

SEQ ID NO: 676302 - DNA, 19 bp, Mus musculus
  siRNA target sequence for Gtrgeo22 (NM_148934.1,599-617).
gctttgtgctgctggaatt

SEQ ID NO: 676303 - DNA, 19 bp, Mus musculus
  siRNA target sequence for Cap1 (NM_007598.2,194-212).
cccgtggcagagtacttga

SEQ ID NO: 676304 - DNA, 19 bp, Mus musculus
  siRNA target sequence for Cap1 (NM_007598.2,397-415).
gaaccgaggcagcaagttt

SEQ ID NO: 676305 - DNA, 19 bp, Mus musculus
  siRNA target sequence for Cap1 (NM_007598.2,400-418).
ccgaggcagcaagtttttt

SEQ ID NO: 676306 - DNA, 19 bp, Mus musculus
  siRNA target sequence for Cap1 (NM_007598.2,405-423).
gcagcaagttttttaatca

SEQ ID NO: 676307 - DNA, 19 bp, Mus musculus
  siRNA target sequence for Cap1 (NM_007598.2,408-426).
gcaagttttttaatcatct

SEQ ID NO: 676308 - DNA, 19 bp, Mus musculus
  siRNA target sequence for Cap1 (NM_007598.2,618-636).
cttacatcaaggagtttca

SEQ ID NO: 676309 - DNA, 19 bp, Mus musculus
  siRNA target sequence for Cap1 (NM_007598.2,622-640).
catcaaggagtttcatact

SEQ ID NO: 676310 - DNA, 19 bp, Mus musculus
  siRNA target sequence for Cap1 (NM_007598.2,625-643).
caaggagtttcatactact

SEQ ID NO: 676311 - DNA, 19 bp, Mus musculus
  siRNA target sequence for Cap1 (NM_007598.2,914-932).
cggagtggccccaaaccat

SEQ ID NO: 676312 - DNA, 19 bp, Mus musculus
  siRNA target sequence for Cap1 (NM_007598.2,1303-1321).
ctccctggactgtgagata

SEQ ID NO: 676313 - DNA, 19 bp, Mus musculus
  siRNA target sequence for Cap1 (NM_007598.2,1329-1347).
ccaaatcttctgagatgaa

SEQ ID NO: 676314 - DNA, 19 bp, Mus musculus
  siRNA target sequence for Cap1 (NM_007598.2,1389-1407).
cagtccccgagcagttcaa

SEQ ID NO: 676315 - DNA, 19 bp, Mus musculus
  siRNA target sequence for Tro (NM_019548.1,107-125).
ccactaatgtcctcttcaa

SEQ ID NO: 676316 - DNA, 19 bp, Mus musculus
  siRNA target sequence for Tro (NM_019548.1,133-151).
gctactaccagaaatagct

SEQ ID NO: 676317 - DNA, 19 bp, Mus musculus
  siRNA target sequence for Tro (NM_019548.1,686-704).
ctagtgcccctttctgtaa

SEQ ID NO: 676318 - DNA, 19 bp, Mus musculus
  siRNA target sequence for Tro (NM_019548.1,931-949).
ggtgcacccagcattaata

SEQ ID NO: 676319 - DNA, 19 bp, Mus musculus
  siRNA target sequence for Tro (NM_019548.1,937-955).
cccagcattaatagtagta

SEQ ID NO: 676320 - DNA, 19 bp, Mus musculus
  siRNA target sequence for Tro (NM_019548.1,959-977).
gtggatccagcgttagctt

SEQ ID NO: 676321 - DNA, 19 bp, Mus musculus
  siRNA target sequence for Tro (NM_019548.1,1012-1030).
ggtggaccctgtattagtt

SEQ ID NO: 676322 - DNA, 19 bp, Mus musculus
  siRNA target sequence for Tro (NM_019548.1,1013-1031).
gtggaccctgtattagttt

SEQ ID NO: 676323 - DNA, 19 bp, Mus musculus
  siRNA target sequence for Tro (NM_019548.1,1300-1318).
ggttctcctagcaccaata

SEQ ID NO: 676324 - DNA, 19 bp, Mus musculus
  siRNA target sequence for Tro (NM_019548.1,1543-1561).
gccataagtaccagcttta

SEQ ID NO: 676325 - DNA, 19 bp, Mus musculus
  siRNA target sequence for Tro (NM_019548.1,1545-1563).
cataagtaccagctttagt

SEQ ID NO: 676326 - DNA, 19 bp, Mus musculus
  siRNA target sequence for Tro (NM_019548.1,2288-2306).
ccactaccagcgttagctt

SEQ ID NO: 676327 - DNA, 19 bp, Mus musculus
  siRNA target sequence for Tro (NM_019548.1,2289-2307).
cactaccagcgttagcttt

SEQ ID NO: 676328 - DNA, 19 bp, Mus musculus
  siRNA target sequence for Tro (NM_019548.1,2374-2392).
gcatctaacaccaacctat

SEQ ID NO: 676329 - DNA, 19 bp, Mus musculus
  siRNA target sequence for Tro (NM_019548.1,2378-2396).
ctaacaccaacctatgctt

SEQ ID NO: 676330 - DNA, 19 bp, Mus musculus
  siRNA target sequence for Tro (NM_019548.1,2431-2449).
gctaccagtgccaatttca

SEQ ID NO: 676331 - DNA, 19 bp, Mus musculus
  siRNA target sequence for Tro (NM_019548.1,2435-2453).
ccagtgccaatttcaatga

SEQ ID NO: 676332 - DNA, 19 bp, Mus musculus
  siRNA target sequence for Tro (NM_019548.1,2452-2470).
gaggggcacagcatcagtt

SEQ ID NO: 676333 - DNA, 19 bp, Mus musculus
  siRNA target sequence for Tro (NM_019548.1,2454-2472).
ggggcacagcatcagtttt

SEQ ID NO: 676334 - DNA, 19 bp, Mus musculus
  siRNA target sequence for Tro (NM_019548.1,2577-2595).
ccccagtgctagcttcaat

SEQ ID NO: 676335 - DNA, 19 bp, Mus musculus
  siRNA target sequence for Tro (NM_019548.1,2637-2655).
caccagcacggatttcagt

SEQ ID NO: 676336 - DNA, 19 bp, Mus musculus
  siRNA target sequence for Tro (NM_019548.1,2654-2672).
gtggtggactaaatcataa

SEQ ID NO: 676337 - DNA, 19 bp, Mus musculus
  siRNA target sequence for Tro (NM_019548.1,2712-2730).
caatggtggactaaacact

SEQ ID NO: 676338 - DNA, 19 bp, Mus musculus
  siRNA target sequence for Tro (NM_019548.1,2722-2740).
ctaaacactaacactgatt

SEQ ID NO: 676339 - DNA, 19 bp, Mus musculus
  siRNA target sequence for Tro (NM_019548.1,2881-2899).
ggtgcaggctttagtgtaa

SEQ ID NO: 676340 - DNA, 19 bp, Mus musculus
  siRNA target sequence for Tro (NM_019548.1,2932-2950).
cctaatgccagcttcaaca

SEQ ID NO: 676341 - DNA, 19 bp, Mus musculus
  siRNA target sequence for Tro (NM_019548.1,3038-3056).
gtaatggacccagttctat

SEQ ID NO: 676342 - DNA, 19 bp, Mus musculus
  siRNA target sequence for Tro (NM_019548.1,3123-3141).
cggtggtggaccaagtaca

SEQ ID NO: 676343 - DNA, 19 bp, Mus musculus
  siRNA target sequence for Cish (NM_009895.2,568-586).
ggtggtactggggttctat

SEQ ID NO: 676344 - DNA, 19 bp, Mus musculus
  siRNA target sequence for Cish (NM_009895.2,569-587).
gtggtactggggttctatt

SEQ ID NO: 676345 - DNA, 19 bp, Mus musculus
  siRNA target sequence for Cish (NM_009895.2,623-641).
gccggagggtacattccta

SEQ ID NO: 676346 - DNA, 19 bp, Mus musculus
  siRNA target sequence for Cish (NM_009895.2,736-754).
gcttccggctggactctaa

SEQ ID NO: 676347 - DNA, 19 bp, Mus musculus
  siRNA target sequence for Cish (NM_009895.2,747-765).
gactctaactgcttgtcaa

SEQ ID NO: 676348 - DNA, 19 bp, Mus musculus
  siRNA target sequence for Nap4 (NM_138657.1,465-483).
gagagcctggagactaaca

SEQ ID NO: 676349 - DNA, 19 bp, Mus musculus
  siRNA target sequence for Nap4 (NM_138657.1,702-720).
cggaagggctccttcaaaa

SEQ ID NO: 676350 - DNA, 19 bp, Mus musculus
  siRNA target sequence for Nap4 (NM_138657.1,881-899).
caggttgacaagaactcaa

SEQ ID NO: 676351 - DNA, 19 bp, Mus musculus
  siRNA target sequence for Nap4 (NM_138657.1,954-972).
cttgtggacgtggacattt

SEQ ID NO: 676352 - DNA, 19 bp, Mus musculus
  siRNA target sequence for Nap4 (NM_138657.1,1285-1303).
ggtactggggacctatgaa

SEQ ID NO: 676353 - DNA, 19 bp, Mus musculus
  siRNA target sequence for Nap4 (NM_138657.1,1286-1304).
gtactggggacctatgaat

SEQ ID NO: 676354 - DNA, 19 bp, Mus musculus
  siRNA target sequence for Nap4 (NM_138657.1,1311-1329).
gatgcagagatgaaactga

SEQ ID NO: 676355 - DNA, 19 bp, Mus musculus
  siRNA target sequence for Nap4 (NM_138657.1,1366-1384).
gctctgatcctcgttacat

SEQ ID NO: 676356 - DNA, 19 bp, Mus musculus
  siRNA target sequence for Nap4 (NM_138657.1,1462-1480).
ggtgccatcccaagtttga

SEQ ID NO: 676357 - DNA, 19 bp, Mus musculus
  siRNA target sequence for Nap4 (NM_138657.1,1529-1547).
ctccaagaacgggaaattt

SEQ ID NO: 676358 - DNA, 19 bp, Mus musculus
  siRNA target sequence for Nap4 (NM_138657.1,1531-1549).
ccaagaacgggaaatttct

SEQ ID NO: 676359 - DNA, 19 bp, Mus musculus
  siRNA target sequence for Nap4 (NM_138657.1,1540-1558).
ggaaatttctctatttcct

SEQ ID NO: 676360 - DNA, 19 bp, Mus musculus
  siRNA target sequence for Nap4 (NM_138657.1,1666-1684).
ggcagcttgtccgaataga

SEQ ID NO: 676361 - DNA, 19 bp, Mus musculus
  siRNA target sequence for Nap4 (NM_138657.1,1716-1734).
ctgatctcttacattcgaa

SEQ ID NO: 676362 - DNA, 19 bp, Mus musculus
  siRNA target sequence for Nap4 (NM_138657.1,1723-1741).
cttacattcgaaagttcta

SEQ ID NO: 676363 - DNA, 19 bp, Mus musculus
  siRNA target sequence for Socs2 (NM_007706.1,371-389).
ggggaagtatgactgttaa

SEQ ID NO: 676364 - DNA, 19 bp, Mus musculus
  siRNA target sequence for Socs2 (NM_007706.1,374-392).
gaagtatgactgttaatga

SEQ ID NO: 676365 - DNA, 19 bp, Mus musculus
  siRNA target sequence for Socs2 (NM_007706.1,419-437).
cagaaggaactttcttgat

SEQ ID NO: 676366 - DNA, 19 bp, Mus musculus
  siRNA target sequence for Socs2 (NM_007706.1,440-458).
gagatagttcgcattcaga

SEQ ID NO: 676367 - DNA, 19 bp, Mus musculus
  siRNA target sequence for Socs2 (NM_007706.1,451-469).
cattcagactacctactaa

SEQ ID NO: 676368 - DNA, 19 bp, Mus musculus
  siRNA target sequence for Socs2 (NM_007706.1,457-475).
gactacctactaactatat

SEQ ID NO: 676369 - DNA, 19 bp, Mus musculus
  siRNA target sequence for Socs2 (NM_007706.1,466-484).
ctaactatatccgttaaga

SEQ ID NO: 676370 - DNA, 19 bp, Mus musculus
  siRNA target sequence for Socs2 (NM_007706.1,500-518).
ctaacctgcggattgagta

SEQ ID NO: 676371 - DNA, 19 bp, Mus musculus
  siRNA target sequence for Socs3 (NM_007707.2,500-518).
caggagagcggattctact

SEQ ID NO: 676372 - DNA, 19 bp, Mus musculus
  siRNA target sequence for Socs3 (NM_007707.2,597-615).
cggaccagcgccacttctt

SEQ ID NO: 676373 - DNA, 19 bp, Mus musculus
  siRNA target sequence for Socs3 (NM_007707.2,855-873).
cccccaagagagcttacta

SEQ ID NO: 676374 - DNA, 19 bp, Mus musculus
  siRNA target sequence for Socs3 (NM_007707.2,857-875).
cccaagagagcttactaca

SEQ ID NO: 676375 - DNA, 19 bp, Mus musculus
  siRNA target sequence for Socs3 (NM_007707.2,858-876).
ccaagagagcttactacat

SEQ ID NO: 676376 - DNA, 19 bp, Mus musculus
  siRNA target sequence for Socs3 (NM_007707.2,862-880).
gagagcttactacatctat

SEQ ID NO: 676377 - DNA, 19 bp, Mus musculus
  siRNA target sequence for Socs7 (NM_080843.1,3-21).
ggctgaaaacaatagtaaa

SEQ ID NO: 676378 - DNA, 19 bp, Mus musculus
  siRNA target sequence for Socs7 (NM_080843.1,123-141).
gagttgttctgaatctgaa

SEQ ID NO: 676379 - DNA, 19 bp, Mus musculus
  siRNA target sequence for Socs7 (NM_080843.1,143-161).
ccataggtactgttgagaa

SEQ ID NO: 676380 - DNA, 19 bp, Mus musculus
  siRNA target sequence for Socs7 (NM_080843.1,144-162).
cataggtactgttgagaat

SEQ ID NO: 676381 - DNA, 19 bp, Mus musculus
  siRNA target sequence for Socs7 (NM_080843.1,200-218).
gctgttcgtccattgagtt

SEQ ID NO: 676382 - DNA, 19 bp, Mus musculus
  siRNA target sequence for Socs7 (NM_080843.1,253-271).
ggccgatcccttaaacaga

SEQ ID NO: 676383 - DNA, 19 bp, Mus musculus
  siRNA target sequence for Socs7 (NM_080843.1,254-272).
gccgatcccttaaacagaa

SEQ ID NO: 676384 - DNA, 19 bp, Mus musculus
  siRNA target sequence for Socs7 (NM_080843.1,255-273).
ccgatcccttaaacagaaa

SEQ ID NO: 676385 - DNA, 19 bp, Mus musculus
  siRNA target sequence for Socs7 (NM_080843.1,331-349).
ccagggcttccatctaaaa

SEQ ID NO: 676386 - DNA, 19 bp, Mus musculus
  siRNA target sequence for Socs7 (NM_080843.1,367-385).
gaactcatgttagataagt

SEQ ID NO: 676387 - DNA, 19 bp, Mus musculus
  siRNA target sequence for Socs7 (NM_080843.1,420-438).
gtggcattttattaaacga

SEQ ID NO: 676388 - DNA, 19 bp, Mus musculus
  siRNA target sequence for Socs7 (NM_080843.1,453-471).
gagtcccaactcagatgaa

SEQ ID NO: 676389 - DNA, 19 bp, Mus musculus
  siRNA target sequence for Socs7 (NM_080843.1,549-567).
ctgtttctcacataccaat

SEQ ID NO: 676390 - DNA, 19 bp, Mus musculus
  siRNA target sequence for Socs7 (NM_080843.1,614-632).
gtcacataactggttctat

SEQ ID NO: 676391 - DNA, 19 bp, Mus musculus
  siRNA target sequence for Socs7 (NM_080843.1,623-641).
ctggttctatgatgaactt

SEQ ID NO: 676392 - DNA, 19 bp, Mus musculus
  siRNA target sequence for Socs7 (NM_080843.1,645-663).
cacaaacaacagcatagaa

SEQ ID NO: 676393 - DNA, 19 bp, Mus musculus
  siRNA target sequence for Socs7 (NM_080843.1,854-872).
ggggtgtcatggacaaata

SEQ ID NO: 676394 - DNA, 19 bp, Mus musculus
  siRNA target sequence for Socs7 (NM_080843.1,902-920).
cagagggcacctttttact

SEQ ID NO: 676395 - DNA, 19 bp, Mus musculus
  siRNA target sequence for Socs7 (NM_080843.1,925-943).
gattcagcgcaggaagatt

SEQ ID NO: 676396 - DNA, 19 bp, Mus musculus
  siRNA target sequence for Socs7 (NM_080843.1,931-949).
gcgcaggaagattatttat

SEQ ID NO: 676397 - DNA, 19 bp, Mus musculus
  siRNA target sequence for Socs7 (NM_080843.1,1000-1018).
cagtggaatcataacttta

SEQ ID NO: 676398 - DNA, 19 bp, Mus musculus
  siRNA target sequence for Socs7 (NM_080843.1,1004-1022).
ggaatcataactttagctt

SEQ ID NO: 676399 - DNA, 19 bp, Mus musculus
  siRNA target sequence for Socs7 (NM_080843.1,1005-1023).
gaatcataactttagcttt

SEQ ID NO: 676400 - DNA, 19 bp, Mus musculus
  siRNA target sequence for Socs7 (NM_080843.1,1044-1062).
cttccattctcctgatatt

SEQ ID NO: 676401 - DNA, 19 bp, Mus musculus
  siRNA target sequence for Socs7 (NM_080843.1,1047-1065).
ccattctcctgatattact

SEQ ID NO: 676402 - DNA, 19 bp, Mus musculus
  siRNA target sequence for Socs7 (NM_080843.1,1138-1156).
cggacgttccccttttcct

SEQ ID NO: 676403 - DNA, 19 bp, Mus musculus
  siRNA target sequence for Socs7 (NM_080843.1,1139-1157).
ggacgttccccttttcctt

SEQ ID NO: 676404 - DNA, 19 bp, Mus musculus
  siRNA target sequence for Socs7 (NM_080843.1,1148-1166).
ccttttccttgcagcatat

SEQ ID NO: 676405 - DNA, 19 bp, Mus musculus
  siRNA target sequence for Socs7 (NM_080843.1,1169-1187).
gcagaacggttatttgtaa

SEQ ID NO: 676406 - DNA, 19 bp, Mus musculus
  siRNA target sequence for Socs7 (NM_080843.1,1170-1188).
cagaacggttatttgtaat

SEQ ID NO: 676407 - DNA, 19 bp, Mus musculus
  siRNA target sequence for Socs7 (NM_080843.1,1221-1239).
cattccttcgcctatgaaa

SEQ ID NO: 676408 - DNA, 19 bp, Mus musculus
  siRNA target sequence for Socs7 (NM_080843.1,1225-1243).
ccttcgcctatgaaattgt

SEQ ID NO: 676409 - DNA, 19 bp, Mus musculus
  siRNA target sequence for Socs7 (NM_080843.1,1226-1244).
cttcgcctatgaaattgta

SEQ ID NO: 676410 - DNA, 19 bp, Mus musculus
  siRNA target sequence for Frda (NM_008044.1,170-188).
cccgccacgcccatttgaa

SEQ ID NO: 676411 - DNA, 19 bp, Mus musculus
  siRNA target sequence for Slc9a3r1 (NM_012030.1,421-439).
ccgacgagcgtctcaagaa

SEQ ID NO: 676412 - DNA, 19 bp, Mus musculus
  siRNA target sequence for Slc9a3r1 (NM_012030.1,579-597).
cggctctgcaccatgaaga

SEQ ID NO: 676413 - DNA, 19 bp, Mus musculus
  siRNA target sequence for Slc9a3r1 (NM_012030.1,624-642).
ctgcacagcgacaagtcta

SEQ ID NO: 676414 - DNA, 19 bp, Mus musculus
  siRNA target sequence for Slc9a3r1 (NM_012030.1,901-919).
gcaatggagagatacagaa

SEQ ID NO: 676415 - DNA, 19 bp, Mus musculus
  siRNA target sequence for Apg5l (NM_053069.2,320-338).
gtggtttggacgaattcca

SEQ ID NO: 676416 - DNA, 19 bp, Mus musculus
  siRNA target sequence for Apg5l (NM_053069.2,330-348).
cgaattccaacttgcttta

SEQ ID NO: 676417 - DNA, 19 bp, Mus musculus
  siRNA target sequence for Apg5l (NM_053069.2,349-367).
ctctctatcaggatgagat

SEQ ID NO: 676418 - DNA, 19 bp, Mus musculus
  siRNA target sequence for Apg5l (NM_053069.2,353-371).
ctatcaggatgagataact

SEQ ID NO: 676419 - DNA, 19 bp, Mus musculus
  siRNA target sequence for Apg5l (NM_053069.2,382-400).
cagaaccatactatttgct

SEQ ID NO: 676420 - DNA, 19 bp, Mus musculus
  siRNA target sequence for Apg5l (NM_053069.2,384-402).
gaaccatactatttgcttt

SEQ ID NO: 676421 - DNA, 19 bp, Mus musculus
  siRNA target sequence for Apg5l (NM_053069.2,424-442).
cgttggtaactgacaaagt

SEQ ID NO: 676422 - DNA, 19 bp, Mus musculus
  siRNA target sequence for Apg5l (NM_053069.2,523-541).
ggcattatccaattggttt

SEQ ID NO: 676423 - DNA, 19 bp, Mus musculus
  siRNA target sequence for Apg5l (NM_053069.2,524-542).
gcattatccaattggttta

SEQ ID NO: 676424 - DNA, 19 bp, Mus musculus
  siRNA target sequence for Apg5l (NM_053069.2,549-567).
gatcttcttgcatcaagtt

SEQ ID NO: 676425 - DNA, 19 bp, Mus musculus
  siRNA target sequence for Apg5l (NM_053069.2,645-663).
gcggttgaggctcacttta

SEQ ID NO: 676426 - DNA, 19 bp, Mus musculus
  siRNA target sequence for Apg5l (NM_053069.2,646-664).
cggttgaggctcactttat

SEQ ID NO: 676427 - DNA, 19 bp, Mus musculus
  siRNA target sequence for Apg5l (NM_053069.2,648-666).
gttgaggctcactttatgt

SEQ ID NO: 676428 - DNA, 19 bp, Mus musculus
  siRNA target sequence for Apg5l (NM_053069.2,659-677).
ctttatgtcgtgtatgaaa

SEQ ID NO: 676429 - DNA, 19 bp, Mus musculus
  siRNA target sequence for Apg5l (NM_053069.2,681-699).
gctgatgctttaaagcata

SEQ ID NO: 676430 - DNA, 19 bp, Mus musculus
  siRNA target sequence for Apg5l (NM_053069.2,684-702).
gatgctttaaagcataaaa

SEQ ID NO: 676431 - DNA, 19 bp, Mus musculus
  siRNA target sequence for Apg5l (NM_053069.2,703-721).
gtcaagtgatcaacgaaat

SEQ ID NO: 676432 - DNA, 19 bp, Mus musculus
  siRNA target sequence for Apg5l (NM_053069.2,794-812).
ccggaaactcatggaatat

SEQ ID NO: 676433 - DNA, 19 bp, Mus musculus
  siRNA target sequence for Apg5l (NM_053069.2,797-815).
gaaactcatggaatatcct

SEQ ID NO: 676434 - DNA, 19 bp, Mus musculus
  siRNA target sequence for Apg5l (NM_053069.2,834-852).
cgttatatcccctttagaa

SEQ ID NO: 676435 - DNA, 19 bp, Mus musculus
  siRNA target sequence for Apg5l (NM_053069.2,835-853).
gttatatcccctttagaat

SEQ ID NO: 676436 - DNA, 19 bp, Mus musculus
  siRNA target sequence for Apg5l (NM_053069.2,865-883).
cgacggagcggcctttcat

SEQ ID NO: 676437 - DNA, 19 bp, Mus musculus
  siRNA target sequence for Apg5l (NM_053069.2,1059-1077).
ctgagctacccagataact

SEQ ID NO: 676438 - DNA, 19 bp, Mus musculus
  siRNA target sequence for Apg5l (NM_053069.2,1061-1079).
gagctacccagataacttt

SEQ ID NO: 676439 - DNA, 19 bp, Mus musculus
  siRNA target sequence for Apg5l (NM_053069.2,1063-1081).
gctacccagataactttct

SEQ ID NO: 676440 - DNA, 19 bp, Mus musculus
  siRNA target sequence for Apg5l (NM_053069.2,1064-1082).
ctacccagataactttctt

SEQ ID NO: 676441 - DNA, 19 bp, Mus musculus
  siRNA target sequence for Becn1 (NM_019584.2,310-328).
ggaggaagaggctaactca

SEQ ID NO: 676442 - DNA, 19 bp, Mus musculus
  siRNA target sequence for Becn1 (NM_019584.2,362-380).
ggtgtctctcgaagattca

SEQ ID NO: 676443 - DNA, 19 bp, Mus musculus
  siRNA target sequence for Becn1 (NM_019584.2,363-381).
gtgtctctcgaagattcat

SEQ ID NO: 676444 - DNA, 19 bp, Mus musculus
  siRNA target sequence for Becn1 (NM_019584.2,391-409).
caggatgatgtctacagaa

SEQ ID NO: 676445 - DNA, 19 bp, Mus musculus
  siRNA target sequence for Becn1 (NM_019584.2,400-418).
gtctacagaaagtgctaat

SEQ ID NO: 676446 - DNA, 19 bp, Mus musculus
  siRNA target sequence for Becn1 (NM_019584.2,430-448).
gatcggggaggcatctgat

SEQ ID NO: 676447 - DNA, 19 bp, Mus musculus
  siRNA target sequence for Becn1 (NM_019584.2,552-570).
gcacagacactcttttaga

SEQ ID NO: 676448 - DNA, 19 bp, Mus musculus
  siRNA target sequence for Becn1 (NM_019584.2,634-652).
gatcctagagcagatgaat

SEQ ID NO: 676449 - DNA, 19 bp, Mus musculus
  siRNA target sequence for Becn1 (NM_019584.2,815-833).
cagtaccagcgggagtata

SEQ ID NO: 676450 - DNA, 19 bp, Mus musculus
  siRNA target sequence for Becn1 (NM_019584.2,817-835).
gtaccagcgggagtatagt

SEQ ID NO: 676451 - DNA, 19 bp, Mus musculus
  siRNA target sequence for Becn1 (NM_019584.2,827-845).
gagtatagtgagtttaaaa

SEQ ID NO: 676452 - DNA, 19 bp, Mus musculus
  siRNA target sequence for Becn1 (NM_019584.2,976-994).
gtttggcacaatcaataat

SEQ ID NO: 676453 - DNA, 19 bp, Mus musculus
  siRNA target sequence for Becn1 (NM_019584.2,1076-1094).
catgctttggccaataaga

SEQ ID NO: 676454 - DNA, 19 bp, Mus musculus
  siRNA target sequence for Becn1 (NM_019584.2,1118-1136).
cgacttgttccctatggaa

SEQ ID NO: 676455 - DNA, 19 bp, Mus musculus
  siRNA target sequence for Becn1 (NM_019584.2,1119-1137).
gacttgttccctatggaaa

SEQ ID NO: 676456 - DNA, 19 bp, Mus musculus
  siRNA target sequence for Becn1 (NM_019584.2,1124-1142).
gttccctatggaaatcatt

SEQ ID NO: 676457 - DNA, 19 bp, Mus musculus
  siRNA target sequence for Becn1 (NM_019584.2,1128-1146).
cctatggaaatcattccta

SEQ ID NO: 676458 - DNA, 19 bp, Mus musculus
  siRNA target sequence for Becn1 (NM_019584.2,1129-1147).
ctatggaaatcattcctat

SEQ ID NO: 676459 - DNA, 19 bp, Mus musculus
  siRNA target sequence for Becn1 (NM_019584.2,1153-1171).
gtctctgacagacaaatct

SEQ ID NO: 676460 - DNA, 19 bp, Mus musculus
  siRNA target sequence for Becn1 (NM_019584.2,1170-1188).
ctaaggagttgccgttata

SEQ ID NO: 676461 - DNA, 19 bp, Mus musculus
  siRNA target sequence for Becn1 (NM_019584.2,1174-1192).
ggagttgccgttatactgt

SEQ ID NO: 676462 - DNA, 19 bp, Mus musculus
  siRNA target sequence for Becn1 (NM_019584.2,1175-1193).
gagttgccgttatactgtt

SEQ ID NO: 676463 - DNA, 19 bp, Mus musculus
  siRNA target sequence for Becn1 (NM_019584.2,1231-1249).
ccatgcaatggtagctttt

SEQ ID NO: 676464 - DNA, 19 bp, Mus musculus
  siRNA target sequence for Becn1 (NM_019584.2,1364-1382).
ggctcctattccatcaaaa

SEQ ID NO: 676465 - DNA, 19 bp, Mus musculus
  siRNA target sequence for Becn1 (NM_019584.2,1407-1425).
ggacaaaagcgctcaagtt

SEQ ID NO: 676466 - DNA, 19 bp, Mus musculus
  siRNA target sequence for Becn1 (NM_019584.2,1410-1428).
caaaagcgctcaagttcat

SEQ ID NO: 676467 - DNA, 19 bp, Mus musculus
  siRNA target sequence for 5430413I02Ri (NM_019976.1,293-311).
cagggtgtgcggtttagct

SEQ ID NO: 676468 - DNA, 19 bp, Mus musculus
  siRNA target sequence for 5430413I02Ri (NM_019976.1,551-569).
gggctccggagcagtgata

SEQ ID NO: 676469 - DNA, 19 bp, Mus musculus
  siRNA target sequence for 5430413I02Ri (NM_019976.1,553-571).
gctccggagcagtgataaa

SEQ ID NO: 676470 - DNA, 19 bp, Mus musculus
  siRNA target sequence for 5430413I02Ri (NM_019976.1,554-572).
ctccggagcagtgataaaa

SEQ ID NO: 676471 - DNA, 19 bp, Mus musculus
  siRNA target sequence for 5430413I02Ri (NM_019976.1,631-649).
ggaatcacccacttgcaat

SEQ ID NO: 676472 - DNA, 19 bp, Mus musculus
  siRNA target sequence for C230094B15Rik (NM_172446.1,113-131).
ggtcccacttcctttccaa

SEQ ID NO: 676473 - DNA, 19 bp, Mus musculus
  siRNA target sequence for C230094B15Rik (NM_172446.1,329-347).
cgtgtcgctggtcattgat

SEQ ID NO: 676474 - DNA, 19 bp, Mus musculus
  siRNA target sequence for C230094B15Rik (NM_172446.1,511-529).
ctcgccgctgtggtatgat

SEQ ID NO: 676475 - DNA, 19 bp, Mus musculus
  siRNA target sequence for C230094B15Rik (NM_172446.1,513-531).
cgccgctgtggtatgatca

SEQ ID NO: 676476 - DNA, 19 bp, Mus musculus
  siRNA target sequence for C230094B15Rik (NM_172446.1,697-715).
gcggctactgcagtatgta

SEQ ID NO: 676477 - DNA, 19 bp, Mus musculus
  siRNA target sequence for C230094B15Rik (NM_172446.1,698-716).
cggctactgcagtatgtat

SEQ ID NO: 676478 - DNA, 19 bp, Mus musculus
  siRNA target sequence for C230094B15Rik (NM_172446.1,699-717).
ggctactgcagtatgtatt

SEQ ID NO: 676479 - DNA, 19 bp, Mus musculus
  siRNA target sequence for C230094B15Rik (NM_172446.1,700-718).
gctactgcagtatgtattt

SEQ ID NO: 676480 - DNA, 19 bp, Mus musculus
  siRNA target sequence for C230094B15Rik (NM_172446.1,802-820).
ggcgtcggcacctcaaact

SEQ ID NO: 676481 - DNA, 19 bp, Mus musculus
  siRNA target sequence for C230094B15Rik (NM_172446.1,804-822).
cgtcggcacctcaaactca

SEQ ID NO: 676482 - DNA, 19 bp, Mus musculus
  siRNA target sequence for C230094B15Rik (NM_172446.1,1203-1221).
ggttttggcctcttgcaaa

SEQ ID NO: 676483 - DNA, 19 bp, Mus musculus
  siRNA target sequence for C230094B15Rik (NM_172446.1,1234-1252).
ctcttttcccgcatcctta

SEQ ID NO: 676484 - DNA, 19 bp, Mus musculus
  siRNA target sequence for C230094B15Rik (NM_172446.1,1419-1437).
cctggtggcggcacaatgt

SEQ ID NO: 676485 - DNA, 19 bp, Mus musculus
  siRNA target sequence for C230094B15Rik (NM_172446.1,1515-1533).
ccgacgtttcccatgttct

SEQ ID NO: 676486 - DNA, 19 bp, Mus musculus
  siRNA target sequence for C230094B15Rik (NM_172446.1,1573-1591).
ccgctcagagccaagctaa

SEQ ID NO: 676487 - DNA, 19 bp, Mus musculus
  siRNA target sequence for C230094B15Rik (NM_172446.1,1670-1688).
cggtgccgagccagctaaa

SEQ ID NO: 676488 - DNA, 19 bp, Mus musculus
  siRNA target sequence for C230094B15Rik (NM_172446.1,1672-1690).
gtgccgagccagctaaaga

SEQ ID NO: 676489 - DNA, 19 bp, Mus musculus
  siRNA target sequence for C230094B15Rik (NM_172446.1,1809-1827).
ccacctgctcgcaaaagct

SEQ ID NO: 676490 - DNA, 19 bp, Mus musculus
  siRNA target sequence for C230094B15Rik (NM_172446.1,1839-1857).
gccttccgacccgtagtta

SEQ ID NO: 676491 - DNA, 19 bp, Mus musculus
  siRNA target sequence for C230094B15Rik (NM_172446.1,1840-1858).
ccttccgacccgtagttaa

SEQ ID NO: 676492 - DNA, 19 bp, Mus musculus
  siRNA target sequence for C230094B15Rik (NM_172446.1,1844-1862).
ccgacccgtagttaaggat

SEQ ID NO: 676493 - DNA, 19 bp, Mus musculus
  siRNA target sequence for C230094B15Rik (NM_172446.1,2391-2409).
gacgaacacgtgaagagta

SEQ ID NO: 676494 - DNA, 19 bp, Mus musculus
  siRNA target sequence for C230094B15Rik (NM_172446.1,2464-2482).
cccacgagccggataagga

SEQ ID NO: 676495 - DNA, 19 bp, Mus musculus
  siRNA target sequence for C230094B15Rik (NM_172446.1,2471-2489).
gccggataaggaagacaat

SEQ ID NO: 676496 - DNA, 19 bp, Mus musculus
  siRNA target sequence for C230094B15Rik (NM_172446.1,2555-2573).
gccaagccctgcaaataca

SEQ ID NO: 676497 - DNA, 19 bp, Mus musculus
  siRNA target sequence for C230094B15Rik (NM_172446.1,2581-2599).
gtgaggatgggctcacttt

SEQ ID NO: 676498 - DNA, 19 bp, Mus musculus
  siRNA target sequence for C230094B15Rik (NM_172446.1,2796-2814).
gtcagagataccttgtgta

SEQ ID NO: 676499 - DNA, 19 bp, Mus musculus
  siRNA target sequence for Dach1 (NM_007826.1,46-64).
cctcaacccccgatctcta

SEQ ID NO: 676500 - DNA, 19 bp, Mus musculus
  siRNA target sequence for Dach1 (NM_007826.1,49-67).
caacccccgatctctactt

SEQ ID NO: 676501 - DNA, 19 bp, Mus musculus
  siRNA target sequence for Dach1 (NM_007826.1,529-547).
cagaataatgagtgcaaaa

SEQ ID NO: 676502 - DNA, 19 bp, Mus musculus
  siRNA target sequence for Dach1 (NM_007826.1,565-583).
gccaaagtggcttccttta

SEQ ID NO: 676503 - DNA, 19 bp, Mus musculus
  siRNA target sequence for Dach1 (NM_007826.1,760-778).
gtgaaccgctgcaaactca

SEQ ID NO: 676504 - DNA, 19 bp, Mus musculus
  siRNA target sequence for Dach1 (NM_007826.1,792-810).
cttcgagaccctctacaat

SEQ ID NO: 676505 - DNA, 19 bp, Mus musculus
  siRNA target sequence for Dach1 (NM_007826.1,796-814).
gagaccctctacaatgact

SEQ ID NO: 676506 - DNA, 19 bp, Mus musculus
  siRNA target sequence for Dach1 (NM_007826.1,1086-1104).
ggacatgaattcaagtgtt

SEQ ID NO: 676507 - DNA, 19 bp, Mus musculus
  siRNA target sequence for Dach1 (NM_007826.1,1262-1280).
gactggaacttccttttat

SEQ ID NO: 676508 - DNA, 19 bp, Mus musculus
  siRNA target sequence for Dach1 (NM_007826.1,1267-1285).
gaacttccttttatgatga

SEQ ID NO: 676509 - DNA, 19 bp, Mus musculus
  siRNA target sequence for Dach1 (NM_007826.1,1284-1302).
gatgccccaccctctcatt

SEQ ID NO: 676510 - DNA, 19 bp, Mus musculus
  siRNA target sequence for Dach1 (NM_007826.1,1356-1374).
ccttagcaccattgcaaat

SEQ ID NO: 676511 - DNA, 19 bp, Mus musculus
  siRNA target sequence for Dach1 (NM_007826.1,1357-1375).
cttagcaccattgcaaata

SEQ ID NO: 676512 - DNA, 19 bp, Mus musculus
  siRNA target sequence for Dach1 (NM_007826.1,1412-1430).
gggtggagacatctgttat

SEQ ID NO: 676513 - DNA, 19 bp, Mus musculus
  siRNA target sequence for Dach1 (NM_007826.1,1413-1431).
ggtggagacatctgttatt

SEQ ID NO: 676514 - DNA, 19 bp, Mus musculus
  siRNA target sequence for Dach1 (NM_007826.1,1414-1432).
gtggagacatctgttatta

SEQ ID NO: 676515 - DNA, 19 bp, Mus musculus
  siRNA target sequence for Dach1 (NM_007826.1,1565-1583).
gaatccctgtccatcagaa

SEQ ID NO: 676516 - DNA, 19 bp, Mus musculus
  siRNA target sequence for Dach1 (NM_007826.1,1682-1700).
caaaacggatccacattga

SEQ ID NO: 676517 - DNA, 19 bp, Mus musculus
  siRNA target sequence for Dach1 (NM_007826.1,1688-1706).
ggatccacattgaaaaaga

SEQ ID NO: 676518 - DNA, 19 bp, Mus musculus
  siRNA target sequence for Dach1 (NM_007826.1,1740-1758).
cagcatcgacaaactttct

SEQ ID NO: 676519 - DNA, 19 bp, Mus musculus
  siRNA target sequence for Dach1 (NM_007826.1,1743-1761).
catcgacaaactttctcta

SEQ ID NO: 676520 - DNA, 19 bp, Mus musculus
  siRNA target sequence for Dach1 (NM_007826.1,1746-1764).
cgacaaactttctctaact

SEQ ID NO: 676521 - DNA, 19 bp, Mus musculus
  siRNA target sequence for Dach1 (NM_007826.1,2128-2146).
gacagtctccgggtcttaa

SEQ ID NO: 676522 - DNA, 19 bp, Mus musculus
  siRNA target sequence for Dach1 (NM_007826.1,2130-2148).
cagtctccgggtcttaaat

SEQ ID NO: 676523 - DNA, 19 bp, Mus musculus
  siRNA target sequence for Dach1 (NM_007826.1,2132-2150).
gtctccgggtcttaaatga

SEQ ID NO: 676524 - DNA, 19 bp, Mus musculus
  siRNA target sequence for Dach1 (NM_007826.1,2151-2169).
ctccctgacccctgagata

SEQ ID NO: 676525 - DNA, 19 bp, Mus musculus
  siRNA target sequence for Dach2 (NM_033605.1,240-258).
cgggctgaacccctgtatt

SEQ ID NO: 676526 - DNA, 19 bp, Mus musculus
  siRNA target sequence for Dach2 (NM_033605.1,243-261).
gctgaacccctgtattcgt

SEQ ID NO: 676527 - DNA, 19 bp, Mus musculus
  siRNA target sequence for Dach2 (NM_033605.1,277-295).
ctcgcctaacccctaacat

SEQ ID NO: 676528 - DNA, 19 bp, Mus musculus
  siRNA target sequence for Dach2 (NM_033605.1,279-297).
cgcctaacccctaacatga

SEQ ID NO: 676529 - DNA, 19 bp, Mus musculus
  siRNA target sequence for Dach2 (NM_033605.1,280-298).
gcctaacccctaacatgat

SEQ ID NO: 676530 - DNA, 19 bp, Mus musculus
  siRNA target sequence for Dach2 (NM_033605.1,288-306).
cctaacatgatcaacagtt

SEQ ID NO: 676531 - DNA, 19 bp, Mus musculus
  siRNA target sequence for Dach2 (NM_033605.1,289-307).
ctaacatgatcaacagttt

SEQ ID NO: 676532 - DNA, 19 bp, Mus musculus
  siRNA target sequence for Dach2 (NM_033605.1,304-322).
gtttcatggccaataacca

SEQ ID NO: 676533 - DNA, 19 bp, Mus musculus
  siRNA target sequence for Dach2 (NM_033605.1,415-433).
gggtgaaggtagcttcatt

SEQ ID NO: 676534 - DNA, 19 bp, Mus musculus
  siRNA target sequence for Dach2 (NM_033605.1,460-478).
gcctgccgcaagtctttga

SEQ ID NO: 676535 - DNA, 19 bp, Mus musculus
  siRNA target sequence for Dach2 (NM_033605.1,466-484).
cgcaagtctttgacctttt

SEQ ID NO: 676536 - DNA, 19 bp, Mus musculus
  siRNA target sequence for Dach2 (NM_033605.1,530-548).
gaagagactcgacatatct

SEQ ID NO: 676537 - DNA, 19 bp, Mus musculus
  siRNA target sequence for Dach2 (NM_033605.1,562-580).
ctgtagagcaagttcgaat

SEQ ID NO: 676538 - DNA, 19 bp, Mus musculus
  siRNA target sequence for Dach2 (NM_033605.1,603-621).
cagccaggggtgaatcgtt

SEQ ID NO: 676539 - DNA, 19 bp, Mus musculus
  siRNA target sequence for Dach2 (NM_033605.1,745-763).
gttctttgggagtattgca

SEQ ID NO: 676540 - DNA, 19 bp, Mus musculus
  siRNA target sequence for Dach2 (NM_033605.1,752-770).
gggagtattgcaagataat

SEQ ID NO: 676541 - DNA, 19 bp, Mus musculus
  siRNA target sequence for Dach2 (NM_033605.1,789-807).
gcagtcccaggcctcttat

SEQ ID NO: 676542 - DNA, 19 bp, Mus musculus
  siRNA target sequence for Dach2 (NM_033605.1,984-1002).
gataaagataagatacaat

SEQ ID NO: 676543 - DNA, 19 bp, Mus musculus
  siRNA target sequence for Dach2 (NM_033605.1,1018-1036).
ctggacctcaacatggaat

SEQ ID NO: 676544 - DNA, 19 bp, Mus musculus
  siRNA target sequence for Dach2 (NM_033605.1,1103-1121).
gaatcacctgctaagcaat

SEQ ID NO: 676545 - DNA, 19 bp, Mus musculus
  siRNA target sequence for Dach2 (NM_033605.1,1122-1140).
cgtctggatctcccattta

SEQ ID NO: 676546 - DNA, 19 bp, Mus musculus
  siRNA target sequence for Dach2 (NM_033605.1,1208-1226).
gatgaatcatctcaatact

SEQ ID NO: 676547 - DNA, 19 bp, Mus musculus
  siRNA target sequence for Dach2 (NM_033605.1,1211-1229).
gaatcatctcaatactatt

SEQ ID NO: 676548 - DNA, 19 bp, Mus musculus
  siRNA target sequence for Dach2 (NM_033605.1,1399-1417).
cctcgcagatggatcatca

SEQ ID NO: 676549 - DNA, 19 bp, Mus musculus
  siRNA target sequence for Dach2 (NM_033605.1,1400-1418).
ctcgcagatggatcatcat

SEQ ID NO: 676550 - DNA, 19 bp, Mus musculus
  siRNA target sequence for Dach2 (NM_033605.1,1403-1421).
gcagatggatcatcattca

SEQ ID NO: 676551 - DNA, 19 bp, Mus musculus
  siRNA target sequence for Dach2 (NM_033605.1,1420-1438).
cagagagaatggttatgat

SEQ ID NO: 676552 - DNA, 19 bp, Mus musculus
  siRNA target sequence for Dach2 (NM_033605.1,1430-1448).
ggttatgatgcccaacaat

SEQ ID NO: 676553 - DNA, 19 bp, Mus musculus
  siRNA target sequence for Dach2 (NM_033605.1,1458-1476).
cttattgttgaccaagata

SEQ ID NO: 676554 - DNA, 19 bp, Mus musculus
  siRNA target sequence for Dach2 (NM_033605.1,1643-1661).
gactctgttgaccaacatt

SEQ ID NO: 676555 - DNA, 19 bp, Mus musculus
  siRNA target sequence for Dach2 (NM_033605.1,1788-1806).
cttgcagttgagcttcaaa

SEQ ID NO: 676556 - DNA, 19 bp, Mus musculus
  siRNA target sequence for Dach2 (NM_033605.1,1799-1817).
gcttcaaagcagaagtaca

SEQ ID NO: 676557 - DNA, 19 bp, Mus musculus
  siRNA target sequence for Dach2 (NM_033605.1,1807-1825).
gcagaagtacaatgcaaaa

SEQ ID NO: 676558 - DNA, 19 bp, Mus musculus
  siRNA target sequence for Dach2 (NM_033605.1,1966-1984).
gaattccagatattgaaat

SEQ ID NO: 676559 - DNA, 19 bp, Mus musculus
  siRNA target sequence for Dach2 (NM_033605.1,2017-2035).
ctatgcaaggaggtaacta

SEQ ID NO: 676560 - DNA, 19 bp, Mus musculus
  siRNA target sequence for Dach2 (NM_033605.1,2022-2040).
caaggaggtaactattact

SEQ ID NO: 676561 - DNA, 19 bp, Mus musculus
  siRNA target sequence for Dach2 (NM_033605.1,2025-2043).
ggaggtaactattactgtt

SEQ ID NO: 676562 - DNA, 19 bp, Mus musculus
  siRNA target sequence for Dach2 (NM_033605.1,2026-2044).
gaggtaactattactgttt

SEQ ID NO: 676563 - DNA, 19 bp, Mus musculus
  siRNA target sequence for Frat1 (NM_008043.2,699-717).
cgcgacagctacagttaca

SEQ ID NO: 676564 - DNA, 19 bp, Mus musculus
  siRNA target sequence for Frat1 (NM_008043.2,807-825).
gcgaccctggcgctttcat

SEQ ID NO: 676565 - DNA, 19 bp, Mus musculus
  siRNA target sequence for Mllt2h (NM_133919.2,368-386).
cacgtcctgtcggtaacat

SEQ ID NO: 676566 - DNA, 19 bp, Mus musculus
  siRNA target sequence for Mllt2h (NM_133919.2,370-388).
cgtcctgtcggtaacatta

SEQ ID NO: 676567 - DNA, 19 bp, Mus musculus
  siRNA target sequence for Mllt2h (NM_133919.2,424-442).
ccaagtctccacaccaaaa

SEQ ID NO: 676568 - DNA, 19 bp, Mus musculus
  siRNA target sequence for Mllt2h (NM_133919.2,425-443).
caagtctccacaccaaaat

SEQ ID NO: 676569 - DNA, 19 bp, Mus musculus
  siRNA target sequence for Mllt2h (NM_133919.2,573-591).
cccggtgccccctctatca

SEQ ID NO: 676570 - DNA, 19 bp, Mus musculus
  siRNA target sequence for Mllt2h (NM_133919.2,637-655).
ggcgttagcagtaaaagct

SEQ ID NO: 676571 - DNA, 19 bp, Mus musculus
  siRNA target sequence for Mllt2h (NM_133919.2,689-707).
cgaaggcccaagataaaga

SEQ ID NO: 676572 - DNA, 19 bp, Mus musculus
  siRNA target sequence for Mllt2h (NM_133919.2,906-924).
ctatggtcagcaaagcttt

SEQ ID NO: 676573 - DNA, 19 bp, Mus musculus
  siRNA target sequence for Mllt2h (NM_133919.2,996-1014).
gcagccgtactccaatgaa

SEQ ID NO: 676574 - DNA, 19 bp, Mus musculus
  siRNA target sequence for Mllt2h (NM_133919.2,1017-1035).
ccattgcgttgaagagatt

SEQ ID NO: 676575 - DNA, 19 bp, Mus musculus
  siRNA target sequence for Mllt2h (NM_133919.2,1022-1040).
gcgttgaagagattctgaa

SEQ ID NO: 676576 - DNA, 19 bp, Mus musculus
  siRNA target sequence for Mllt2h (NM_133919.2,1099-1117).
gagccgtccagatttcctt

SEQ ID NO: 676577 - DNA, 19 bp, Mus musculus
  siRNA target sequence for Mllt2h (NM_133919.2,1477-1495).
gagcctccgacgacaaaca

SEQ ID NO: 676578 - DNA, 19 bp, Mus musculus
  siRNA target sequence for Mllt2h (NM_133919.2,1479-1497).
gcctccgacgacaaacaaa

SEQ ID NO: 676579 - DNA, 19 bp, Mus musculus
  siRNA target sequence for Mllt2h (NM_133919.2,1480-1498).
cctccgacgacaaacaaat

SEQ ID NO: 676580 - DNA, 19 bp, Mus musculus
  siRNA target sequence for Mllt2h (NM_133919.2,2184-2202).
ctgccgacaggctgtgatt

SEQ ID NO: 676581 - DNA, 19 bp, Mus musculus
  siRNA target sequence for Mllt2h (NM_133919.2,2205-2223).
ccaaggggacggctgtaaa

SEQ ID NO: 676582 - DNA, 19 bp, Mus musculus
  siRNA target sequence for Mllt2h (NM_133919.2,2210-2228).
gggacggctgtaaagacaa

SEQ ID NO: 676583 - DNA, 19 bp, Mus musculus
  siRNA target sequence for Mllt2h (NM_133919.2,2845-2863).
ccttctttgccgaatggta

SEQ ID NO: 676584 - DNA, 19 bp, Mus musculus
  siRNA target sequence for Mllt2h (NM_133919.2,2846-2864).
cttctttgccgaatggtaa

SEQ ID NO: 676585 - DNA, 19 bp, Mus musculus
  siRNA target sequence for Mllt2h (NM_133919.2,2856-2874).
gaatggtaacgctaaacca

SEQ ID NO: 676586 - DNA, 19 bp, Mus musculus
  siRNA target sequence for Mllt2h (NM_133919.2,2898-2916).
cagacaacaagctgacttt

SEQ ID NO: 676587 - DNA, 19 bp, Mus musculus
  siRNA target sequence for Mllt2h (NM_133919.2,2900-2918).
gacaacaagctgactttca

SEQ ID NO: 676588 - DNA, 19 bp, Mus musculus
  siRNA target sequence for Mllt2h (NM_133919.2,2917-2935).
cacatgaaggaggctaaaa

SEQ ID NO: 676589 - DNA, 19 bp, Mus musculus
  siRNA target sequence for Mllt2h (NM_133919.2,2961-2979).
ggtagacaaggctggaaaa

SEQ ID NO: 676590 - DNA, 19 bp, Mus musculus
  siRNA target sequence for Mllt2h (NM_133919.2,2994-3012).
ggaagccgtcctctctttt

SEQ ID NO: 676591 - DNA, 19 bp, Mus musculus
  siRNA target sequence for Mllt2h (NM_133919.2,2995-3013).
gaagccgtcctctctttta

SEQ ID NO: 676592 - DNA, 19 bp, Mus musculus
  siRNA target sequence for Mllt2h (NM_133919.2,2999-3017).
ccgtcctctcttttatcga

SEQ ID NO: 676593 - DNA, 19 bp, Mus musculus
  siRNA target sequence for Mllt2h (NM_133919.2,3076-3094).
gaaaccatagacctcatta

SEQ ID NO: 676594 - DNA, 19 bp, Mus musculus
  siRNA target sequence for Mllt2h (NM_133919.2,3080-3098).
ccatagacctcattaggta

SEQ ID NO: 676595 - DNA, 19 bp, Mus musculus
  siRNA target sequence for Mllt2h (NM_133919.2,3081-3099).
catagacctcattaggtat

SEQ ID NO: 676596 - DNA, 19 bp, Mus musculus
  siRNA target sequence for Mllt2h (NM_133919.2,3095-3113).
ggtatgtgatgtcactaaa

SEQ ID NO: 676597 - DNA, 19 bp, Mus musculus
  siRNA target sequence for Mllt2h (NM_133919.2,3096-3114).
gtatgtgatgtcactaaaa

SEQ ID NO: 676598 - DNA, 19 bp, Mus musculus
  siRNA target sequence for Mllt2h (NM_133919.2,3172-3190).
cgttgccagtcccttttga

SEQ ID NO: 676599 - DNA, 19 bp, Mus musculus
  siRNA target sequence for Mllt2h (NM_133919.2,3196-3214).
gcgatgtttcgatgtaaga

SEQ ID NO: 676600 - DNA, 19 bp, Mus musculus
  siRNA target sequence for Mllt2h (NM_133919.2,3197-3215).
cgatgtttcgatgtaagaa

SEQ ID NO: 676601 - DNA, 19 bp, Mus musculus
  siRNA target sequence for Mllt2h (NM_133919.2,3239-3257).
gtactctcagtgaacactt

SEQ ID NO: 676602 - DNA, 19 bp, Mus musculus
  siRNA target sequence for Mllt2h (NM_133919.2,3244-3262).
ctcagtgaacacttcaaga

SEQ ID NO: 676603 - DNA, 19 bp, Mus musculus
  siRNA target sequence for Mllt2h (NM_133919.2,3357-3375).
cgtggggtcccaatcaagt

SEQ ID NO: 676604 - DNA, 19 bp, Mus musculus
  siRNA target sequence for Mllt2h (NM_133919.2,3592-3610).
gacctggtgcactacacaa

SEQ ID NO: 676605 - DNA, 19 bp, Mus musculus
  siRNA target sequence for Ngef (NM_019867.1,371-389).
ggagaaacctcattgaaca

SEQ ID NO: 676606 - DNA, 19 bp, Mus musculus
  siRNA target sequence for Ngef (NM_019867.1,372-390).
gagaaacctcattgaacaa

SEQ ID NO: 676607 - DNA, 19 bp, Mus musculus
  siRNA target sequence for Ngef (NM_019867.1,374-392).
gaaacctcattgaacaaat

SEQ ID NO: 676608 - DNA, 19 bp, Mus musculus
  siRNA target sequence for Ngef (NM_019867.1,395-413).
ggctcctgtatcaagagta

SEQ ID NO: 676609 - DNA, 19 bp, Mus musculus
  siRNA target sequence for Ngef (NM_019867.1,406-424).
caagagtatagagacaaat

SEQ ID NO: 676610 - DNA, 19 bp, Mus musculus
  siRNA target sequence for Ngef (NM_019867.1,409-427).
gagtatagagacaaatcga

SEQ ID NO: 676611 - DNA, 19 bp, Mus musculus
  siRNA target sequence for Ngef (NM_019867.1,725-743).
ctgaggcctcctactataa

SEQ ID NO: 676612 - DNA, 19 bp, Mus musculus
  siRNA target sequence for Ngef (NM_019867.1,816-834).
ccacatcctcttttccaat

SEQ ID NO: 676613 - DNA, 19 bp, Mus musculus
  siRNA target sequence for Ngef (NM_019867.1,851-869).
ctgtcagtgagcggttttt

SEQ ID NO: 676614 - DNA, 19 bp, Mus musculus
  siRNA target sequence for Ngef (NM_019867.1,887-905).
gcatggaggagaacattgt

SEQ ID NO: 676615 - DNA, 19 bp, Mus musculus
  siRNA target sequence for Ngef (NM_019867.1,935-953).
gttacgcagctgatcactt

SEQ ID NO: 676616 - DNA, 19 bp, Mus musculus
  siRNA target sequence for Ngef (NM_019867.1,946-964).
gatcacttctcggtctata

SEQ ID NO: 676617 - DNA, 19 bp, Mus musculus
  siRNA target sequence for Ngef (NM_019867.1,949-967).
cacttctcggtctatatca

SEQ ID NO: 676618 - DNA, 19 bp, Mus musculus
  siRNA target sequence for Ngef (NM_019867.1,951-969).
cttctcggtctatatcact

SEQ ID NO: 676619 - DNA, 19 bp, Mus musculus
  siRNA target sequence for Ngef (NM_019867.1,1028-1046).
ccgctttccgggaactgat

SEQ ID NO: 676620 - DNA, 19 bp, Mus musculus
  siRNA target sequence for Ngef (NM_019867.1,1221-1239).
ggtggtaaaggcatgcaat

SEQ ID NO: 676621 - DNA, 19 bp, Mus musculus
  siRNA target sequence for Ngef (NM_019867.1,1533-1551).
ggaggaccagggtcaaaca

SEQ ID NO: 676622 - DNA, 19 bp, Mus musculus
  siRNA target sequence for Ngef (NM_019867.1,1544-1562).
gtcaaacactggctaatgt

SEQ ID NO: 676623 - DNA, 19 bp, Mus musculus
  siRNA target sequence for Ngef (NM_019867.1,1550-1568).
cactggctaatgtgttcat

SEQ ID NO: 676624 - DNA, 19 bp, Mus musculus
  siRNA target sequence for Ngef (NM_019867.1,1594-1612).
gaccgagaggccacctata

SEQ ID NO: 676625 - DNA, 19 bp, Mus musculus
  siRNA target sequence for Ngef (NM_019867.1,1925-1943).
gtttccgggtacataagat

SEQ ID NO: 676626 - DNA, 19 bp, Mus musculus
  siRNA target sequence for Ngef (NM_019867.1,1952-1970).
ctcagcgcagccagaataa

SEQ ID NO: 676627 - DNA, 19 bp, Mus musculus
  siRNA target sequence for Skil (NM_011386.1,525-543).
ccttagttcagggttcaaa

SEQ ID NO: 676628 - DNA, 19 bp, Mus musculus
  siRNA target sequence for Skil (NM_011386.1,572-590).
ggcagtcctcctgtgaaaa

SEQ ID NO: 676629 - DNA, 19 bp, Mus musculus
  siRNA target sequence for Skil (NM_011386.1,643-661).
ggagcacttagatgactat

SEQ ID NO: 676630 - DNA, 19 bp, Mus musculus
  siRNA target sequence for Skil (NM_011386.1,697-715).
caagcgaaaccgtgtttct

SEQ ID NO: 676631 - DNA, 19 bp, Mus musculus
  siRNA target sequence for Skil (NM_011386.1,700-718).
gcgaaaccgtgtttctcta

SEQ ID NO: 676632 - DNA, 19 bp, Mus musculus
  siRNA target sequence for Skil (NM_011386.1,758-776).
ctggcacaattccacttaa

SEQ ID NO: 676633 - DNA, 19 bp, Mus musculus
  siRNA target sequence for Skil (NM_011386.1,793-811).
gggtggaccagcagcattt

SEQ ID NO: 676634 - DNA, 19 bp, Mus musculus
  siRNA target sequence for Skil (NM_011386.1,834-852).
gcatgtcaccgactgtatt

SEQ ID NO: 676635 - DNA, 19 bp, Mus musculus
  siRNA target sequence for Skil (NM_011386.1,937-955).
ggaaggggagtctatttct

SEQ ID NO: 676636 - DNA, 19 bp, Mus musculus
  siRNA target sequence for Skil (NM_011386.1,938-956).
gaaggggagtctatttctt

SEQ ID NO: 676637 - DNA, 19 bp, Mus musculus
  siRNA target sequence for Skil (NM_011386.1,985-1003).
ctgtttgccccaagtctta

SEQ ID NO: 676638 - DNA, 19 bp, Mus musculus
  siRNA target sequence for Skil (NM_011386.1,1006-1024).
ctctgtcctccgagaattt

SEQ ID NO: 676639 - DNA, 19 bp, Mus musculus
  siRNA target sequence for Skil (NM_011386.1,1033-1051).
gcagataaacacagtatgt

SEQ ID NO: 676640 - DNA, 19 bp, Mus musculus
  siRNA target sequence for Skil (NM_011386.1,1057-1075).
gctgtacatctattgttca

SEQ ID NO: 676641 - DNA, 19 bp, Mus musculus
  siRNA target sequence for Skil (NM_011386.1,1086-1104).
cagaccagcttcatatctt

SEQ ID NO: 676642 - DNA, 19 bp, Mus musculus
  siRNA target sequence for Skil (NM_011386.1,1088-1106).
gaccagcttcatatcttaa

SEQ ID NO: 676643 - DNA, 19 bp, Mus musculus
  siRNA target sequence for Skil (NM_011386.1,1117-1135).
gatactcccatttaatgct

SEQ ID NO: 676644 - DNA, 19 bp, Mus musculus
  siRNA target sequence for Skil (NM_011386.1,1156-1174).
gttgaccgatgcacaaaga

SEQ ID NO: 676645 - DNA, 19 bp, Mus musculus
  siRNA target sequence for Skil (NM_011386.1,1169-1187).
caaagactctgtaatgctt

SEQ ID NO: 676646 - DNA, 19 bp, Mus musculus
  siRNA target sequence for Skil (NM_011386.1,1173-1191).
gactctgtaatgctttact

SEQ ID NO: 676647 - DNA, 19 bp, Mus musculus
  siRNA target sequence for Skil (NM_011386.1,1192-1210).
gcggccacgaacttttcct

SEQ ID NO: 676648 - DNA, 19 bp, Mus musculus
  siRNA target sequence for Skil (NM_011386.1,1197-1215).
cacgaacttttcctcaaaa

SEQ ID NO: 676649 - DNA, 19 bp, Mus musculus
  siRNA target sequence for Skil (NM_011386.1,1320-1338).
cgcctcagttttatgttca

SEQ ID NO: 676650 - DNA, 19 bp, Mus musculus
  siRNA target sequence for Skil (NM_011386.1,1459-1477).
caagtggcactgttacctt

SEQ ID NO: 676651 - DNA, 19 bp, Mus musculus
  siRNA target sequence for Skil (NM_011386.1,1475-1493).
cttcatgtgaaccaaaaat

SEQ ID NO: 676652 - DNA, 19 bp, Mus musculus
  siRNA target sequence for Skil (NM_011386.1,1496-1514).
ctagggacacccgaagaaa

SEQ ID NO: 676653 - DNA, 19 bp, Mus musculus
  siRNA target sequence for Skil (NM_011386.1,1549-1567).
gaagtttagcatgagaaat

SEQ ID NO: 676654 - DNA, 19 bp, Mus musculus
  siRNA target sequence for Skil (NM_011386.1,1552-1570).
gtttagcatgagaaatgga

SEQ ID NO: 676655 - DNA, 19 bp, Mus musculus
  siRNA target sequence for Skil (NM_011386.1,1569-1587).
gaaagagaatccaatcaaa

SEQ ID NO: 676656 - DNA, 19 bp, Mus musculus
  siRNA target sequence for Skil (NM_011386.1,1596-1614).
caccatcgggaatggaatt

SEQ ID NO: 676657 - DNA, 19 bp, Mus musculus
  siRNA target sequence for Skil (NM_011386.1,1617-1635).
catcatggtatcctgttat

SEQ ID NO: 676658 - DNA, 19 bp, Mus musculus
  siRNA target sequence for Skil (NM_011386.1,1623-1641).
ggtatcctgttataaaaca

SEQ ID NO: 676659 - DNA, 19 bp, Mus musculus
  siRNA target sequence for Skil (NM_011386.1,1693-1711).
cctgtacatgtgtgacaaa

SEQ ID NO: 676660 - DNA, 19 bp, Mus musculus
  siRNA target sequence for Skil (NM_011386.1,1712-1730).
gtggttgcaccgaatgtgt

SEQ ID NO: 676661 - DNA, 19 bp, Mus musculus
  siRNA target sequence for Skil (NM_011386.1,1743-1761).
ctgcgtcccagtctaaaga

SEQ ID NO: 676662 - DNA, 19 bp, Mus musculus
  siRNA target sequence for Skil (NM_011386.1,1817-1835).
gagagtagtcagcatcaaa

SEQ ID NO: 676663 - DNA, 19 bp, Mus musculus
  siRNA target sequence for Skil (NM_011386.1,1899-1917).
gagaattatacagttgttt

SEQ ID NO: 676664 - DNA, 19 bp, Mus musculus
  siRNA target sequence for Skil (NM_011386.1,1911-1929).
gttgtttagattcatcaat

SEQ ID NO: 676665 - DNA, 19 bp, Mus musculus
  siRNA target sequence for Skil (NM_011386.1,1930-1948).
ctcaaataattctacaagt

SEQ ID NO: 676666 - DNA, 19 bp, Mus musculus
  siRNA target sequence for Skil (NM_011386.1,1990-2008).
cacaagcaagcgtgattca

SEQ ID NO: 676667 - DNA, 19 bp, Mus musculus
  siRNA target sequence for Skil (NM_011386.1,1992-2010).
caagcaagcgtgattcaga

SEQ ID NO: 676668 - DNA, 19 bp, Mus musculus
  siRNA target sequence for Skil (NM_011386.1,2071-2089).
cgtgatgagaacctatgta

SEQ ID NO: 676669 - DNA, 19 bp, Mus musculus
  siRNA target sequence for Skil (NM_011386.1,2072-2090).
gtgatgagaacctatgtaa

SEQ ID NO: 676670 - DNA, 19 bp, Mus musculus
  siRNA target sequence for Skil (NM_011386.1,2213-2231).
gagcttgagtcgttacaga

SEQ ID NO: 676671 - DNA, 19 bp, Mus musculus
  siRNA target sequence for Skil (NM_011386.1,2247-2265).
ggatggaggaattctatat

SEQ ID NO: 676672 - DNA, 19 bp, Mus musculus
  siRNA target sequence for Skil (NM_011386.1,2248-2266).
gatggaggaattctatatt

SEQ ID NO: 676673 - DNA, 19 bp, Mus musculus
  siRNA target sequence for Ssh3bp1 (NM_007380.1,115-133).
gctcgaagagagattggta

SEQ ID NO: 676674 - DNA, 19 bp, Mus musculus
  siRNA target sequence for Ssh3bp1 (NM_007380.1,116-134).
ctcgaagagagattggtat

SEQ ID NO: 676675 - DNA, 19 bp, Mus musculus
  siRNA target sequence for Ssh3bp1 (NM_007380.1,193-211).
gagcgtcctgtcaggtata

SEQ ID NO: 676676 - DNA, 19 bp, Mus musculus
  siRNA target sequence for Ssh3bp1 (NM_007380.1,195-213).
gcgtcctgtcaggtatatt

SEQ ID NO: 676677 - DNA, 19 bp, Mus musculus
  siRNA target sequence for Ssh3bp1 (NM_007380.1,214-232).
cggaaacctatcgactata

SEQ ID NO: 676678 - DNA, 19 bp, Mus musculus
  siRNA target sequence for Ssh3bp1 (NM_007380.1,216-234).
gaaacctatcgactataca

SEQ ID NO: 676679 - DNA, 19 bp, Mus musculus
  siRNA target sequence for Ssh3bp1 (NM_007380.1,256-274).
ggagttaagcacggaaata

SEQ ID NO: 676680 - DNA, 19 bp, Mus musculus
  siRNA target sequence for Ssh3bp1 (NM_007380.1,257-275).
gagttaagcacggaaataa

SEQ ID NO: 676681 - DNA, 19 bp, Mus musculus
  siRNA target sequence for Ssh3bp1 (NM_007380.1,283-301).
gcaagaactggcacattgt

SEQ ID NO: 676682 - DNA, 19 bp, Mus musculus
  siRNA target sequence for Ssh3bp1 (NM_007380.1,365-383).
gacggaataccccttacaa

SEQ ID NO: 676683 - DNA, 19 bp, Mus musculus
  siRNA target sequence for Ssh3bp1 (NM_007380.1,367-385).
cggaataccccttacaaaa

SEQ ID NO: 676684 - DNA, 19 bp, Mus musculus
  siRNA target sequence for Ssh3bp1 (NM_007380.1,407-425).
caacagttcccaatgacta

SEQ ID NO: 676685 - DNA, 19 bp, Mus musculus
  siRNA target sequence for Ssh3bp1 (NM_007380.1,551-569).
gcagcattggcattcctat

SEQ ID NO: 676686 - DNA, 19 bp, Mus musculus
  siRNA target sequence for Ssh3bp1 (NM_007380.1,552-570).
cagcattggcattcctatt

SEQ ID NO: 676687 - DNA, 19 bp, Mus musculus
  siRNA target sequence for Ssh3bp1 (NM_007380.1,754-772).
ggaggtccacttttattct

SEQ ID NO: 676688 - DNA, 19 bp, Mus musculus
  siRNA target sequence for Ssh3bp1 (NM_007380.1,854-872).
gcagggtgcaaggaaacat

SEQ ID NO: 676689 - DNA, 19 bp, Mus musculus
  siRNA target sequence for Ssh3bp1 (NM_007380.1,855-873).
cagggtgcaaggaaacatt

SEQ ID NO: 676690 - DNA, 19 bp, Mus musculus
  siRNA target sequence for Ssh3bp1 (NM_007380.1,985-1003).
gctgcagtagttcagtata

SEQ ID NO: 676691 - DNA, 19 bp, Mus musculus
  siRNA target sequence for Ssh3bp1 (NM_007380.1,999-1017).
gtatagtgacccatatgca

SEQ ID NO: 676692 - DNA, 19 bp, Mus musculus
  siRNA target sequence for Ssh3bp1 (NM_007380.1,1034-1052).
gggcttccccaagaactat

SEQ ID NO: 676693 - DNA, 19 bp, Mus musculus
  siRNA target sequence for Ssh3bp1 (NM_007380.1,1041-1059).
cccaagaactatattgaga

SEQ ID NO: 676694 - DNA, 19 bp, Mus musculus
  siRNA target sequence for Ssh3bp1 (NM_007380.1,1046-1064).
gaactatattgagaaagtt

SEQ ID NO: 676695 - DNA, 19 bp, Mus musculus
  siRNA target sequence for Ssh3bp1 (NM_007380.1,1049-1067).
ctatattgagaaagttgtt

SEQ ID NO: 676696 - DNA, 19 bp, Mus musculus
  siRNA target sequence for Ssh3bp1 (NM_007380.1,1077-1095).
gattatataccaaaagaca

SEQ ID NO: 676697 - DNA, 19 bp, Mus musculus
  siRNA target sequence for Ssh3bp1 (NM_007380.1,1101-1119).
gatgagctgtcctttaaaa

SEQ ID NO: 676698 - DNA, 19 bp, Mus musculus
  siRNA target sequence for Ssh3bp1 (NM_007380.1,1122-1140).
gggtgcaatcatctatgtt

SEQ ID NO: 676699 - DNA, 19 bp, Mus musculus
  siRNA target sequence for Ssh3bp1 (NM_007380.1,1123-1141).
ggtgcaatcatctatgtta

SEQ ID NO: 676700 - DNA, 19 bp, Mus musculus
  siRNA target sequence for Ssh3bp1 (NM_007380.1,1126-1144).
gcaatcatctatgttataa

SEQ ID NO: 676701 - DNA, 19 bp, Mus musculus
  siRNA target sequence for Ssh3bp1 (NM_007380.1,1164-1182).
gtttgaaggagtttgcaat

SEQ ID NO: 676702 - DNA, 19 bp, Mus musculus
  siRNA target sequence for Api5 (NM_007466.1,1019-1037).
gataagttattggagtata

SEQ ID NO: 676703 - DNA, 19 bp, Mus musculus
  siRNA target sequence for Api5 (NM_007466.1,1107-1125).
gttatgtggagtgcttatt

SEQ ID NO: 676704 - DNA, 19 bp, Mus musculus
  siRNA target sequence for Api5 (NM_007466.1,1115-1133).
gagtgcttattgtacagtt

SEQ ID NO: 676705 - DNA, 19 bp, Mus musculus
  siRNA target sequence for Api5 (NM_007466.1,1165-1183).
cttaacagccaaactgaat

SEQ ID NO: 676706 - DNA, 19 bp, Mus musculus
  siRNA target sequence for Api5 (NM_007466.1,1178-1196).
ctgaatgcagaaaaactca

SEQ ID NO: 676707 - DNA, 19 bp, Mus musculus
  siRNA target sequence for Api5 (NM_007466.1,1325-1343).
gcactgaaaataacaaaca

SEQ ID NO: 676708 - DNA, 19 bp, Mus musculus
  siRNA target sequence for Api5 (NM_007466.1,1338-1356).
caaacaatatcaatgtttt

SEQ ID NO: 676709 - DNA, 19 bp, Mus musculus
  siRNA target sequence for Api5 (NM_007466.1,1413-1431).
ggaaacctgtgcagaaagt

SEQ ID NO: 676710 - DNA, 19 bp, Mus musculus
  siRNA target sequence for Api5 (NM_007466.1,1430-1448).
gttgagattgggcaaaaga

SEQ ID NO: 676711 - DNA, 19 bp, Mus musculus
  siRNA target sequence for Api5 (NM_007466.1,1470-1488).
caggttcaccacctaagaa

SEQ ID NO: 676712 - DNA, 19 bp, Mus musculus
  siRNA target sequence for Api5 (NM_007466.1,1472-1490).
ggttcaccacctaagaagt

SEQ ID NO: 676713 - DNA, 19 bp, Mus musculus
  siRNA target sequence for Api5 (NM_007466.1,1509-1527).
gagatgccagacagattta

SEQ ID NO: 676714 - DNA, 19 bp, Mus musculus
  siRNA target sequence for Api5 (NM_007466.1,1511-1529).
gatgccagacagatttata

SEQ ID NO: 676715 - DNA, 19 bp, Mus musculus
  siRNA target sequence for Api5 (NM_007466.1,1532-1550).
cctccgagtggaaagtaca

SEQ ID NO: 676716 - DNA, 19 bp, Mus musculus
  siRNA target sequence for Api5 (NM_007466.1,1552-1570).
cagcaatctgagcaacttt

SEQ ID NO: 676717 - DNA, 19 bp, Mus musculus
  siRNA target sequence for Api5 (NM_007466.1,1554-1572).
gcaatctgagcaactttaa

SEQ ID NO: 676718 - DNA, 19 bp, Mus musculus
  siRNA target sequence for Api5 (NM_007466.1,1555-1573).
caatctgagcaactttaat

SEQ ID NO: 676719 - DNA, 19 bp, Mus musculus
  siRNA target sequence for Bcl2l10 (NM_013479.1,183-201).
ggctgctgtctgactacat

SEQ ID NO: 676720 - DNA, 19 bp, Mus musculus
  siRNA target sequence for Bcl2l10 (NM_013479.1,184-202).
gctgctgtctgactacata

SEQ ID NO: 676721 - DNA, 19 bp, Mus musculus
  siRNA target sequence for Bcl2l10 (NM_013479.1,185-203).
ctgctgtctgactacatat

SEQ ID NO: 676722 - DNA, 19 bp, Mus musculus
  siRNA target sequence for Bcl2l10 (NM_013479.1,293-311).
caggagcaccaagaatttt

SEQ ID NO: 676723 - DNA, 19 bp, Mus musculus
  siRNA target sequence for Bcl2l10 (NM_013479.1,433-451).
ggggacgcttatgaatcaa

SEQ ID NO: 676724 - DNA, 19 bp, Mus musculus
  siRNA target sequence for Bcl2l10 (NM_013479.1,508-526).
ccgagactgctgtctcata

SEQ ID NO: 676725 - DNA, 19 bp, Mus musculus
  siRNA target sequence for Bcl2l10 (NM_013479.1,510-528).
gagactgctgtctcatagt

SEQ ID NO: 676726 - DNA, 19 bp, Mus musculus
  siRNA target sequence for Bcl2l10 (NM_013479.1,599-617).
ggcttttgccgcttcttca

SEQ ID NO: 676727 - DNA, 19 bp, Mus musculus
  siRNA target sequence for Bcl2l10 (NM_013479.1,608-626).
cgcttcttcaagaatcctt

SEQ ID NO: 676728 - DNA, 19 bp, Mus musculus
  siRNA target sequence for Bcl2l10 (NM_013479.1,683-701).
gcaacagccatctttttta

SEQ ID NO: 676729 - DNA, 19 bp, Mus musculus
  siRNA target sequence for Birc1e (NM_010870.1,3223-3241).
cacggatgcagcagatcaa

SEQ ID NO: 676730 - DNA, 19 bp, Mus musculus
  siRNA target sequence for Birc2 (NM_007464.1,346-364).
ctgacacctttgagttgaa

SEQ ID NO: 676731 - DNA, 19 bp, Mus musculus
  siRNA target sequence for Birc2 (NM_007464.1,350-368).
cacctttgagttgaagtat

SEQ ID NO: 676732 - DNA, 19 bp, Mus musculus
  siRNA target sequence for Birc2 (NM_007464.1,357-375).
gagttgaagtatgactttt

SEQ ID NO: 676733 - DNA, 19 bp, Mus musculus
  siRNA target sequence for Birc2 (NM_007464.1,389-407).
ccgattgtccacgtattca

SEQ ID NO: 676734 - DNA, 19 bp, Mus musculus
  siRNA target sequence for Birc2 (NM_007464.1,502-520).
gtggcctgatgctagacaa

SEQ ID NO: 676735 - DNA, 19 bp, Mus musculus
  siRNA target sequence for Birc2 (NM_007464.1,681-699).
gagaatactggctatttca

SEQ ID NO: 676736 - DNA, 19 bp, Mus musculus
  siRNA target sequence for Birc2 (NM_007464.1,683-701).
gaatactggctatttcagt

SEQ ID NO: 676737 - DNA, 19 bp, Mus musculus
  siRNA target sequence for Birc2 (NM_007464.1,734-752).
gaacttccgagcaaatcaa

SEQ ID NO: 676738 - DNA, 19 bp, Mus musculus
  siRNA target sequence for Birc2 (NM_007464.1,740-758).
ccgagcaaatcaagattgt

SEQ ID NO: 676739 - DNA, 19 bp, Mus musculus
  siRNA target sequence for Birc2 (NM_007464.1,797-815).
cacagagaaggccagatta

SEQ ID NO: 676740 - DNA, 19 bp, Mus musculus
  siRNA target sequence for Birc2 (NM_007464.1,829-847).
catggccattgtcttttct

SEQ ID NO: 676741 - DNA, 19 bp, Mus musculus
  siRNA target sequence for Birc2 (NM_007464.1,915-933).
gcgtgcgatgggaaactga

SEQ ID NO: 676742 - DNA, 19 bp, Mus musculus
  siRNA target sequence for Birc2 (NM_007464.1,983-1001).
ccccagctgtccgttctta

SEQ ID NO: 676743 - DNA, 19 bp, Mus musculus
  siRNA target sequence for Birc2 (NM_007464.1,984-1002).
cccagctgtccgttcttaa

SEQ ID NO: 676744 - DNA, 19 bp, Mus musculus
  siRNA target sequence for Birc2 (NM_007464.1,985-1003).
ccagctgtccgttcttaaa

SEQ ID NO: 676745 - DNA, 19 bp, Mus musculus
  siRNA target sequence for Birc2 (NM_007464.1,986-1004).
cagctgtccgttcttaaaa

SEQ ID NO: 676746 - DNA, 19 bp, Mus musculus
  siRNA target sequence for Birc2 (NM_007464.1,988-1006).
gctgtccgttcttaaaaga

SEQ ID NO: 676747 - DNA, 19 bp, Mus musculus
  siRNA target sequence for Birc2 (NM_007464.1,991-1009).
gtccgttcttaaaagactt

SEQ ID NO: 676748 - DNA, 19 bp, Mus musculus
  siRNA target sequence for Birc2 (NM_007464.1,1014-1032).
cagtctgcttcgagataca

SEQ ID NO: 676749 - DNA, 19 bp, Mus musculus
  siRNA target sequence for Birc2 (NM_007464.1,1016-1034).
gtctgcttcgagatacact

SEQ ID NO: 676750 - DNA, 19 bp, Mus musculus
  siRNA target sequence for Birc2 (NM_007464.1,1024-1042).
cgagatacactgtctctaa

SEQ ID NO: 676751 - DNA, 19 bp, Mus musculus
  siRNA target sequence for Birc2 (NM_007464.1,1061-1079).
cgcagcccgtattagaaca

SEQ ID NO: 676752 - DNA, 19 bp, Mus musculus
  siRNA target sequence for Birc2 (NM_007464.1,1065-1083).
gcccgtattagaacattct

SEQ ID NO: 676753 - DNA, 19 bp, Mus musculus
  siRNA target sequence for Birc2 (NM_007464.1,1067-1085).
ccgtattagaacattctct

SEQ ID NO: 676754 - DNA, 19 bp, Mus musculus
  siRNA target sequence for Birc2 (NM_007464.1,1068-1086).
cgtattagaacattctcta

SEQ ID NO: 676755 - DNA, 19 bp, Mus musculus
  siRNA target sequence for Birc2 (NM_007464.1,1082-1100).
ctctaactggccttctagt

SEQ ID NO: 676756 - DNA, 19 bp, Mus musculus
  siRNA target sequence for Birc2 (NM_007464.1,1091-1109).
gccttctagtgcactagtt

SEQ ID NO: 676757 - DNA, 19 bp, Mus musculus
  siRNA target sequence for Birc2 (NM_007464.1,1093-1111).
cttctagtgcactagttca

SEQ ID NO: 676758 - DNA, 19 bp, Mus musculus
  siRNA target sequence for Birc2 (NM_007464.1,1254-1272).
gagtacttgctcagaatca

SEQ ID NO: 676759 - DNA, 19 bp, Mus musculus
  siRNA target sequence for Birc2 (NM_007464.1,1317-1335).
ctacttgagcagctattat

SEQ ID NO: 676760 - DNA, 19 bp, Mus musculus
  siRNA target sequence for Birc2 (NM_007464.1,1320-1338).
cttgagcagctattatcta

SEQ ID NO: 676761 - DNA, 19 bp, Mus musculus
  siRNA target sequence for Birc2 (NM_007464.1,1528-1546).
ccgtcagtgacctcgttat

SEQ ID NO: 676762 - DNA, 19 bp, Mus musculus
  siRNA target sequence for Birc2 (NM_007464.1,1529-1547).
cgtcagtgacctcgttata

SEQ ID NO: 676763 - DNA, 19 bp, Mus musculus
  siRNA target sequence for Birc2 (NM_007464.1,1615-1633).
cagatgatctagcactaat

SEQ ID NO: 676764 - DNA, 19 bp, Mus musculus
  siRNA target sequence for Birc2 (NM_007464.1,1626-1644).
gcactaatccggaagaaca

SEQ ID NO: 676765 - DNA, 19 bp, Mus musculus
  siRNA target sequence for Birc2 (NM_007464.1,1724-1742).
ggagtgcaatgctgtgaaa

SEQ ID NO: 676766 - DNA, 19 bp, Mus musculus
  siRNA target sequence for Birc2 (NM_007464.1,1729-1747).
gcaatgctgtgaaacagaa

SEQ ID NO: 676767 - DNA, 19 bp, Mus musculus
  siRNA target sequence for Birc2 (NM_007464.1,1807-1825).
cagcaacctcattcagaaa

SEQ ID NO: 676768 - DNA, 19 bp, Mus musculus
  siRNA target sequence for Birc2 (NM_007464.1,1809-1827).
gcaacctcattcagaaact

SEQ ID NO: 676769 - DNA, 19 bp, Mus musculus
  siRNA target sequence for Birc2 (NM_007464.1,1845-1863).
cctgcgttatacagagata

SEQ ID NO: 676770 - DNA, 19 bp, Mus musculus
  siRNA target sequence for Birc2 (NM_007464.1,1846-1864).
ctgcgttatacagagatat

SEQ ID NO: 676771 - DNA, 19 bp, Mus musculus
  siRNA target sequence for Birc2 (NM_007464.1,1849-1867).
cgttatacagagatatatt

SEQ ID NO: 676772 - DNA, 19 bp, Mus musculus
  siRNA target sequence for Birc2 (NM_007464.1,1982-2000).
ggtatccatcgtgttcatt

SEQ ID NO: 676773 - DNA, 19 bp, Mus musculus
  siRNA target sequence for Birc3 (NM_007465.1,1774-1792).
gaagggtcaggagtttgtt

SEQ ID NO: 676774 - DNA, 19 bp, Mus musculus
  siRNA target sequence for Birc3 (NM_007465.1,1777-1795).
gggtcaggagtttgttgat

SEQ ID NO: 676775 - DNA, 19 bp, Mus musculus
  siRNA target sequence for Birc3 (NM_007465.1,1783-1801).
ggagtttgttgatgagatt

SEQ ID NO: 676776 - DNA, 19 bp, Mus musculus
  siRNA target sequence for Birc3 (NM_007465.1,1786-1804).
gtttgttgatgagattcaa

SEQ ID NO: 676777 - DNA, 19 bp, Mus musculus
  siRNA target sequence for Birc3 (NM_007465.1,2034-2052).
ggaccgtcaatgatattgt

SEQ ID NO: 676778 - DNA, 19 bp, Mus musculus
  siRNA target sequence for Birc3 (NM_007465.1,2121-2139).
catcaggtgacttatcact

SEQ ID NO: 676779 - DNA, 19 bp, Mus musculus
  siRNA target sequence for Birc3 (NM_007465.1,2138-2156).
ctgattcggaagaatagaa

SEQ ID NO: 676780 - DNA, 19 bp, Mus musculus
  siRNA target sequence for Birc3 (NM_007465.1,2190-2208).
ctatcctggataatcttct

SEQ ID NO: 676781 - DNA, 19 bp, Mus musculus
  siRNA target sequence for Birc3 (NM_007465.1,2214-2232).
ccagtgtaattacaaaaca

SEQ ID NO: 676782 - DNA, 19 bp, Mus musculus
  siRNA target sequence for Birc3 (NM_007465.1,2226-2244).
caaaacaggaacatgatat

SEQ ID NO: 676783 - DNA, 19 bp, Mus musculus
  siRNA target sequence for Birc3 (NM_007465.1,2233-2251).
ggaacatgatattattaga

SEQ ID NO: 676784 - DNA, 19 bp, Mus musculus
  siRNA target sequence for Birc3 (NM_007465.1,2276-2294).
gcaagagagcttattgaca

SEQ ID NO: 676785 - DNA, 19 bp, Mus musculus
  siRNA target sequence for Birc3 (NM_007465.1,2284-2302).
gcttattgacaccgtttta

SEQ ID NO: 676786 - DNA, 19 bp, Mus musculus
  siRNA target sequence for Birc3 (NM_007465.1,2323-2341).
caacatcttcaaaaactct

SEQ ID NO: 676787 - DNA, 19 bp, Mus musculus
  siRNA target sequence for Birc3 (NM_007465.1,2354-2372).
gactccacgttatatgaaa

SEQ ID NO: 676788 - DNA, 19 bp, Mus musculus
  siRNA target sequence for Birc3 (NM_007465.1,2358-2376).
ccacgttatatgaaaactt

SEQ ID NO: 676789 - DNA, 19 bp, Mus musculus
  siRNA target sequence for Birc3 (NM_007465.1,2359-2377).
cacgttatatgaaaactta

SEQ ID NO: 676790 - DNA, 19 bp, Mus musculus
  siRNA target sequence for Birc3 (NM_007465.1,2361-2379).
cgttatatgaaaacttatt

SEQ ID NO: 676791 - DNA, 19 bp, Mus musculus
  siRNA target sequence for Birc3 (NM_007465.1,2395-2413).
gaagtatattccaacagaa

SEQ ID NO: 676792 - DNA, 19 bp, Mus musculus
  siRNA target sequence for Birc3 (NM_007465.1,2414-2432).
gacgtttcaggcttgtcat

SEQ ID NO: 676793 - DNA, 19 bp, Mus musculus
  siRNA target sequence for Birc3 (NM_007465.1,2440-2458).
gcagttgcggagattacaa

SEQ ID NO: 676794 - DNA, 19 bp, Mus musculus
  siRNA target sequence for Birc3 (NM_007465.1,2443-2461).
gttgcggagattacaagaa

SEQ ID NO: 676795 - DNA, 19 bp, Mus musculus
  siRNA target sequence for Birc3 (NM_007465.1,2514-2532).
cgtgtggtcatctagtagt

SEQ ID NO: 676796 - DNA, 19 bp, Mus musculus
  siRNA target sequence for Birc3 (NM_007465.1,2539-2557).
ggaatgtgccccttctcta

SEQ ID NO: 676797 - DNA, 19 bp, Mus musculus
  siRNA target sequence for Birc3 (NM_007465.1,2540-2558).
gaatgtgccccttctctaa

SEQ ID NO: 676798 - DNA, 19 bp, Mus musculus
  siRNA target sequence for Birc4 (NM_009688.1,694-712).
gaactagaacttttgtact

SEQ ID NO: 676799 - DNA, 19 bp, Mus musculus
  siRNA target sequence for Birc4 (NM_009688.1,749-767).
gtttaatagattaaaaaca

SEQ ID NO: 676800 - DNA, 19 bp, Mus musculus
  siRNA target sequence for Birc4 (NM_009688.1,757-775).
gattaaaaacatttgctaa

SEQ ID NO: 676801 - DNA, 19 bp, Mus musculus
  siRNA target sequence for Birc4 (NM_009688.1,771-789).
gctaacttcccaagtagta

SEQ ID NO: 676802 - DNA, 19 bp, Mus musculus
  siRNA target sequence for Birc4 (NM_009688.1,812-830).
ggcgcgagctgggtttctt

SEQ ID NO: 676803 - DNA, 19 bp, Mus musculus
  siRNA target sequence for Birc4 (NM_009688.1,813-831).
gcgcgagctgggtttcttt

SEQ ID NO: 676804 - DNA, 19 bp, Mus musculus
  siRNA target sequence for Birc4 (NM_009688.1,814-832).
cgcgagctgggtttcttta

SEQ ID NO: 676805 - DNA, 19 bp, Mus musculus
  siRNA target sequence for Birc4 (NM_009688.1,846-864).
gacaccgtgcaatgtttca

SEQ ID NO: 676806 - DNA, 19 bp, Mus musculus
  siRNA target sequence for Birc4 (NM_009688.1,848-866).
caccgtgcaatgtttcagt

SEQ ID NO: 676807 - DNA, 19 bp, Mus musculus
  siRNA target sequence for Birc4 (NM_009688.1,854-872).
gcaatgtttcagttgtcat

SEQ ID NO: 676808 - DNA, 19 bp, Mus musculus
  siRNA target sequence for Birc4 (NM_009688.1,865-883).
gttgtcatgcggcaataga

SEQ ID NO: 676809 - DNA, 19 bp, Mus musculus
  siRNA target sequence for Birc4 (NM_009688.1,870-888).
catgcggcaatagatagat

SEQ ID NO: 676810 - DNA, 19 bp, Mus musculus
  siRNA target sequence for Birc4 (NM_009688.1,931-949).
ccccaaattgcagatttat

SEQ ID NO: 676811 - DNA, 19 bp, Mus musculus
  siRNA target sequence for Birc4 (NM_009688.1,988-1006).
caaatcctggtatccaaaa

SEQ ID NO: 676812 - DNA, 19 bp, Mus musculus
  siRNA target sequence for Birc4 (NM_009688.1,1008-1026).
ggccagtacaaatctgaaa

SEQ ID NO: 676813 - DNA, 19 bp, Mus musculus
  siRNA target sequence for Birc4 (NM_009688.1,1011-1029).
cagtacaaatctgaaaact

SEQ ID NO: 676814 - DNA, 19 bp, Mus musculus
  siRNA target sequence for Birc4 (NM_009688.1,1069-1087).
ctgagactcatgctgatta

SEQ ID NO: 676815 - DNA, 19 bp, Mus musculus
  siRNA target sequence for Birc4 (NM_009688.1,1113-1131).
gatatttcagacaccatat

SEQ ID NO: 676816 - DNA, 19 bp, Mus musculus
  siRNA target sequence for Birc4 (NM_009688.1,1142-1160).
ccctgccatgtgtagtgaa

SEQ ID NO: 676817 - DNA, 19 bp, Mus musculus
  siRNA target sequence for Birc4 (NM_009688.1,1161-1179).
gaagccagattgaagtcat

SEQ ID NO: 676818 - DNA, 19 bp, Mus musculus
  siRNA target sequence for Birc4 (NM_009688.1,1165-1183).
ccagattgaagtcatttca

SEQ ID NO: 676819 - DNA, 19 bp, Mus musculus
  siRNA target sequence for Birc4 (NM_009688.1,1168-1186).
gattgaagtcatttcagaa

SEQ ID NO: 676820 - DNA, 19 bp, Mus musculus
  siRNA target sequence for Birc4 (NM_009688.1,1189-1207).
ggccggactatgctcattt

SEQ ID NO: 676821 - DNA, 19 bp, Mus musculus
  siRNA target sequence for Birc4 (NM_009688.1,1190-1208).
gccggactatgctcattta

SEQ ID NO: 676822 - DNA, 19 bp, Mus musculus
  siRNA target sequence for Birc4 (NM_009688.1,1191-1209).
ccggactatgctcatttaa

SEQ ID NO: 676823 - DNA, 19 bp, Mus musculus
  siRNA target sequence for Birc4 (NM_009688.1,1418-1436).
cccaaattcaacaaactct

SEQ ID NO: 676824 - DNA, 19 bp, Mus musculus
  siRNA target sequence for Birc4 (NM_009688.1,1464-1482).
gaagcacggatcgttactt

SEQ ID NO: 676825 - DNA, 19 bp, Mus musculus
  siRNA target sequence for Birc4 (NM_009688.1,1470-1488).
cggatcgttacttttggaa

SEQ ID NO: 676826 - DNA, 19 bp, Mus musculus
  siRNA target sequence for Birc4 (NM_009688.1,1489-1507).
catggacatcctcagttaa

SEQ ID NO: 676827 - DNA, 19 bp, Mus musculus
  siRNA target sequence for Birc4 (NM_009688.1,1641-1659).
ccagggtgcaaatacctat

SEQ ID NO: 676828 - DNA, 19 bp, Mus musculus
  siRNA target sequence for Birc4 (NM_009688.1,1642-1660).
cagggtgcaaatacctatt

SEQ ID NO: 676829 - DNA, 19 bp, Mus musculus
  siRNA target sequence for Birc4 (NM_009688.1,1645-1663).
ggtgcaaatacctattgga

SEQ ID NO: 676830 - DNA, 19 bp, Mus musculus
  siRNA target sequence for Birc4 (NM_009688.1,1665-1683).
gagaaggggcaagaatata

SEQ ID NO: 676831 - DNA, 19 bp, Mus musculus
  siRNA target sequence for Birc4 (NM_009688.1,1789-1807).
ctatggtgcaagaagctat

SEQ ID NO: 676832 - DNA, 19 bp, Mus musculus
  siRNA target sequence for Birc4 (NM_009688.1,1793-1811).
ggtgcaagaagctatacga

SEQ ID NO: 676833 - DNA, 19 bp, Mus musculus
  siRNA target sequence for Birc4 (NM_009688.1,1794-1812).
gtgcaagaagctatacgaa

SEQ ID NO: 676834 - DNA, 19 bp, Mus musculus
  siRNA target sequence for Birc4 (NM_009688.1,1803-1821).
gctatacgaatgggattta

SEQ ID NO: 676835 - DNA, 19 bp, Mus musculus
  siRNA target sequence for Birc4 (NM_009688.1,1868-1886).
cgggagcagctatctatca

SEQ ID NO: 676836 - DNA, 19 bp, Mus musculus
  siRNA target sequence for Birc4 (NM_009688.1,1870-1888).
ggagcagctatctatcact

SEQ ID NO: 676837 - DNA, 19 bp, Mus musculus
  siRNA target sequence for Birc4 (NM_009688.1,1871-1889).
gagcagctatctatcactt

SEQ ID NO: 676838 - DNA, 19 bp, Mus musculus
  siRNA target sequence for Birc4 (NM_009688.1,1892-1910).
ggtcctgattgcagatctt

SEQ ID NO: 676839 - DNA, 19 bp, Mus musculus
  siRNA target sequence for Birc4 (NM_009688.1,1913-1931).
gagtgctcagaaagataat

SEQ ID NO: 676840 - DNA, 19 bp, Mus musculus
  siRNA target sequence for Birc4 (NM_009688.1,1937-1955).
ggatgagtcaagtcaaact

SEQ ID NO: 676841 - DNA, 19 bp, Mus musculus
  siRNA target sequence for Birc4 (NM_009688.1,2119-2137).
gctacaccgtcattacgtt

SEQ ID NO: 676842 - DNA, 19 bp, Mus musculus
  siRNA target sequence for Stambp (NM_024239.1,88-106).
gaccgggtgaggattctgt

SEQ ID NO: 676843 - DNA, 19 bp, Mus musculus
  siRNA target sequence for Stambp (NM_024239.1,115-133).
gggagtgcagttgagttaa

SEQ ID NO: 676844 - DNA, 19 bp, Mus musculus
  siRNA target sequence for Stambp (NM_024239.1,116-134).
ggagtgcagttgagttaaa

SEQ ID NO: 676845 - DNA, 19 bp, Mus musculus
  siRNA target sequence for Stambp (NM_024239.1,117-135).
gagtgcagttgagttaaat

SEQ ID NO: 676846 - DNA, 19 bp, Mus musculus
  siRNA target sequence for Stambp (NM_024239.1,184-202).
cgcatggcgtccgtttact

SEQ ID NO: 676847 - DNA, 19 bp, Mus musculus
  siRNA target sequence for Stambp (NM_024239.1,203-221).
cggaagaaggcaacattga

SEQ ID NO: 676848 - DNA, 19 bp, Mus musculus
  siRNA target sequence for Stambp (NM_024239.1,227-245).
cctttatcctctacaacaa

SEQ ID NO: 676849 - DNA, 19 bp, Mus musculus
  siRNA target sequence for Stambp (NM_024239.1,255-273).
gctgtttattgaaaaactt

SEQ ID NO: 676850 - DNA, 19 bp, Mus musculus
  siRNA target sequence for Stambp (NM_024239.1,275-293).
cgaaacaccgagactacaa

SEQ ID NO: 676851 - DNA, 19 bp, Mus musculus
  siRNA target sequence for Stambp (NM_024239.1,288-306).
ctacaaatcagctatcatt

SEQ ID NO: 676852 - DNA, 19 bp, Mus musculus
  siRNA target sequence for Stambp (NM_024239.1,299-317).
ctatcattcctgagaagaa

SEQ ID NO: 676853 - DNA, 19 bp, Mus musculus
  siRNA target sequence for Stambp (NM_024239.1,389-407).
gatacaccaaagaatatga

SEQ ID NO: 676854 - DNA, 19 bp, Mus musculus
  siRNA target sequence for Stambp (NM_024239.1,698-716).
cgcagactccagactgtaa

SEQ ID NO: 676855 - DNA, 19 bp, Mus musculus
  siRNA target sequence for Stambp (NM_024239.1,770-788).
gagcgttaagcgtcataga

SEQ ID NO: 676856 - DNA, 19 bp, Mus musculus
  siRNA target sequence for Stambp (NM_024239.1,772-790).
gcgttaagcgtcatagaaa

SEQ ID NO: 676857 - DNA, 19 bp, Mus musculus
  siRNA target sequence for Stambp (NM_024239.1,773-791).
cgttaagcgtcatagaaaa

SEQ ID NO: 676858 - DNA, 19 bp, Mus musculus
  siRNA target sequence for Stambp (NM_024239.1,774-792).
gttaagcgtcatagaaaat

SEQ ID NO: 676859 - DNA, 19 bp, Mus musculus
  siRNA target sequence for Stambp (NM_024239.1,832-850).
cgtaatctgtgctcagaat

SEQ ID NO: 676860 - DNA, 19 bp, Mus musculus
  siRNA target sequence for Stambp (NM_024239.1,1179-1197).
ctttaagctaactgactat

SEQ ID NO: 676861 - DNA, 19 bp, Mus musculus
  siRNA target sequence for 6430628I05Rik (NM_025858.1,158-176).
gccctttggtgaagacaat

SEQ ID NO: 676862 - DNA, 19 bp, Mus musculus
  siRNA target sequence for 6430628I05Rik (NM_025858.1,210-228).
ggttcctgttccaaccaat

SEQ ID NO: 676863 - DNA, 19 bp, Mus musculus
  siRNA target sequence for 6430628I05Rik (NM_025858.1,332-350).
gggttcagcgctgaaattt

SEQ ID NO: 676864 - DNA, 19 bp, Mus musculus
  siRNA target sequence for 6430628I05Rik (NM_025858.1,401-419).
cattggcgtgaccatcttt

SEQ ID NO: 676865 - DNA, 19 bp, Mus musculus
  siRNA target sequence for 6430628I05Rik (NM_025858.1,577-595).
gctatcctggaccaacata

SEQ ID NO: 676866 - DNA, 19 bp, Mus musculus
  siRNA target sequence for Perp (NM_022032.1,188-206).
ccatcgccttcgacatcat

SEQ ID NO: 676867 - DNA, 19 bp, Mus musculus
  siRNA target sequence for Perp (NM_022032.1,543-561).
cgataaccctgctgttaat

SEQ ID NO: 676868 - DNA, 19 bp, Mus musculus
  siRNA target sequence for Perp (NM_022032.1,550-568).
cctgctgttaattacatct

SEQ ID NO: 676869 - DNA, 19 bp, Mus musculus
  siRNA target sequence for Perp (NM_022032.1,556-574).
gttaattacatctataact

SEQ ID NO: 676870 - DNA, 19 bp, Mus musculus
  siRNA target sequence for Perp (NM_022032.1,616-634).
ggttgttccttcttcttct

SEQ ID NO: 676871 - DNA, 19 bp, Mus musculus
  siRNA target sequence for Pmaip1 (NM_021451.1,271-289).
gagtgcaccggacataact

SEQ ID NO: 676872 - DNA, 19 bp, Mus musculus
  siRNA target sequence for Pmaip1 (NM_021451.1,273-291).
gtgcaccggacataactgt

SEQ ID NO: 676873 - DNA, 19 bp, Mus musculus
  siRNA target sequence for Pmaip1 (NM_021451.1,308-326).
cctgggaagtcgcaaaaga

SEQ ID NO: 676874 - DNA, 19 bp, Mus musculus
  siRNA target sequence for Pmaip1 (NM_021451.1,354-372).
gggtgccagcagacttgaa

SEQ ID NO: 676875 - DNA, 19 bp, Mus musculus
  siRNA target sequence for Pmaip1 (NM_021451.1,396-414).
ggattggagacaaagtgaa

SEQ ID NO: 676876 - DNA, 19 bp, Mus musculus
  siRNA target sequence for Pmaip1 (NM_021451.1,419-437).
cggcagaaacttctgaatt

SEQ ID NO: 676877 - DNA, 19 bp, Mus musculus
  siRNA target sequence for Pmaip1 (NM_021451.1,439-457).
gatttccaagctcttcaat

SEQ ID NO: 676878 - DNA, 19 bp, Mus musculus
  siRNA target sequence for Pmaip1 (NM_021451.1,444-462).
ccaagctcttcaatttagt

SEQ ID NO: 676879 - DNA, 19 bp, Mus musculus
  siRNA target sequence for Pmaip1 (NM_021451.1,445-463).
caagctcttcaatttagta

SEQ ID NO: 676880 - DNA, 19 bp, Mus musculus
  siRNA target sequence for Trp53inp1 (NM_021897.1,286-304).
ggcgaagtcactacttctt

SEQ ID NO: 676881 - DNA, 19 bp, Mus musculus
  siRNA target sequence for Trp53inp1 (NM_021897.1,347-365).
ggattcttgttgacttcat

SEQ ID NO: 676882 - DNA, 19 bp, Mus musculus
  siRNA target sequence for Trp53inp1 (NM_021897.1,352-370).
cttgttgacttcatagata

SEQ ID NO: 676883 - DNA, 19 bp, Mus musculus
  siRNA target sequence for Trp53inp1 (NM_021897.1,455-473).
cctgtttacctgcatcttt

SEQ ID NO: 676884 - DNA, 19 bp, Mus musculus
  siRNA target sequence for Trp53inp1 (NM_021897.1,574-592).
ggtggattaaccactatca

SEQ ID NO: 676885 - DNA, 19 bp, Mus musculus
  siRNA target sequence for Trp53inp1 (NM_021897.1,608-626).
ctatggaaaaccttctcat

SEQ ID NO: 676886 - DNA, 19 bp, Mus musculus
  siRNA target sequence for Trp53inp1 (NM_021897.1,684-702).
ggcgagttgtggaaatgat

SEQ ID NO: 676887 - DNA, 19 bp, Mus musculus
  siRNA target sequence for Trp53inp1 (NM_021897.1,686-704).
cgagttgtggaaatgatga

SEQ ID NO: 676888 - DNA, 19 bp, Mus musculus
  siRNA target sequence for Trp53inp1 (NM_021897.1,781-799).
gctgctcaggcaacatttt

SEQ ID NO: 676889 - DNA, 19 bp, Mus musculus
  siRNA target sequence for Trp53inp1 (NM_021897.1,785-803).
ctcaggcaacatttttgga

SEQ ID NO: 676890 - DNA, 19 bp, Mus musculus
  siRNA target sequence for Trp53inp1 (NM_021897.1,820-838).
cgcccttcccagtggataa

SEQ ID NO: 676891 - DNA, 19 bp, Mus musculus
  siRNA target sequence for Trp53inp1 (NM_021897.1,821-839).
gcccttcccagtggataaa

SEQ ID NO: 676892 - DNA, 19 bp, Mus musculus
  siRNA target sequence for Trp53inp1 (NM_021897.1,877-895).
ctccgtcgccagaacctta

SEQ ID NO: 676893 - DNA, 19 bp, Mus musculus
  siRNA target sequence for Trp53inp1 (NM_021897.1,953-971).
gcccacgccagtacaatta

SEQ ID NO: 676894 - DNA, 19 bp, Mus musculus
  siRNA target sequence for Trp53inp1 (NM_021897.1,955-973).
ccacgccagtacaattact

SEQ ID NO: 676895 - DNA, 19 bp, Mus musculus
  siRNA target sequence for Bak1 (NM_007523.1,348-366).
gtctttcgaagctacgttt

SEQ ID NO: 676896 - DNA, 19 bp, Mus musculus
  siRNA target sequence for Bak1 (NM_007523.1,350-368).
ctttcgaagctacgttttt

SEQ ID NO: 676897 - DNA, 19 bp, Mus musculus
  siRNA target sequence for Bak1 (NM_007523.1,480-498).
gctctcatcggagatgata

SEQ ID NO: 676898 - DNA, 19 bp, Mus musculus
  siRNA target sequence for Bak1 (NM_007523.1,481-499).
ctctcatcggagatgatat

SEQ ID NO: 676899 - DNA, 19 bp, Mus musculus
  siRNA target sequence for Bak1 (NM_007523.1,559-577).
ggaatgcctacgaactctt

SEQ ID NO: 676900 - DNA, 19 bp, Mus musculus
  siRNA target sequence for Bak1 (NM_007523.1,584-602).
gatcgcctccagcctattt

SEQ ID NO: 676901 - DNA, 19 bp, Mus musculus
  siRNA target sequence for Bak1 (NM_007523.1,588-606).
gcctccagcctatttaaga

SEQ ID NO: 676902 - DNA, 19 bp, Mus musculus
  siRNA target sequence for Bak1 (NM_007523.1,700-718).
gccaggtgacctgcttttt

SEQ ID NO: 676903 - DNA, 19 bp, Mus musculus
  siRNA target sequence for Bak1 (NM_007523.1,709-727).
cctgctttttggctgatat

SEQ ID NO: 676904 - DNA, 19 bp, Mus musculus
  siRNA target sequence for Axud1 (NM_153287.2,306-324).
caggtcacgtggcctttaa

SEQ ID NO: 676905 - DNA, 19 bp, Mus musculus
  siRNA target sequence for Axud1 (NM_153287.2,325-343).
cggcatcaccgtctactat

SEQ ID NO: 676906 - DNA, 19 bp, Mus musculus
  siRNA target sequence for Axud1 (NM_153287.2,326-344).
ggcatcaccgtctactatt

SEQ ID NO: 676907 - DNA, 19 bp, Mus musculus
  siRNA target sequence for Axud1 (NM_153287.2,433-451).
ctccttagctgagtttaca

SEQ ID NO: 676908 - DNA, 19 bp, Mus musculus
  siRNA target sequence for Axud1 (NM_153287.2,435-453).
ccttagctgagtttacaca

SEQ ID NO: 676909 - DNA, 19 bp, Mus musculus
  siRNA target sequence for Axud1 (NM_153287.2,639-657).
gcctggaggaagccaattt

SEQ ID NO: 676910 - DNA, 19 bp, Mus musculus
  siRNA target sequence for Axud1 (NM_153287.2,897-915).
ccaatggtcgagtggaatt

SEQ ID NO: 676911 - DNA, 19 bp, Mus musculus
  siRNA target sequence for Axud1 (NM_153287.2,903-921).
gtcgagtggaattcaatca

SEQ ID NO: 676912 - DNA, 19 bp, Mus musculus
  siRNA target sequence for Axud1 (NM_153287.2,905-923).
cgagtggaattcaatcaga

SEQ ID NO: 676913 - DNA, 19 bp, Mus musculus
  siRNA target sequence for Axud1 (NM_153287.2,1195-1213).
ccggtctggcgtagatgaa

SEQ ID NO: 676914 - DNA, 19 bp, Mus musculus
  siRNA target sequence for Axud1 (NM_153287.2,1286-1304).
ggtgtgggcaacttggata

SEQ ID NO: 676915 - DNA, 19 bp, Mus musculus
  siRNA target sequence for Axud1 (NM_153287.2,1287-1305).
gtgtgggcaacttggataa

SEQ ID NO: 676916 - DNA, 19 bp, Mus musculus
  siRNA target sequence for Axud1 (NM_153287.2,1401-1419).
cgggcatcctagatgagaa

SEQ ID NO: 676917 - DNA, 19 bp, Mus musculus
  siRNA target sequence for Axud1 (NM_153287.2,1573-1591).
ccaggctctgccagattat

SEQ ID NO: 676918 - DNA, 19 bp, Mus musculus
  siRNA target sequence for Axud1 (NM_153287.2,1574-1592).
caggctctgccagattata

SEQ ID NO: 676919 - DNA, 19 bp, Mus musculus
  siRNA target sequence for Axud1 (NM_153287.2,1576-1594).
ggctctgccagattatagt

SEQ ID NO: 676920 - DNA, 19 bp, Mus musculus
  siRNA target sequence for Axud1 (NM_153287.2,1723-1741).
gtctgagccggttacagaa

SEQ ID NO: 676921 - DNA, 19 bp, Mus musculus
  siRNA target sequence for Axud1 (NM_153287.2,1779-1797).
ctgccttggcacctttgtt

SEQ ID NO: 676922 - DNA, 19 bp, Mus musculus
  siRNA target sequence for Bad (NM_007522.1,845-863).
ggagcttagcccttttcga

SEQ ID NO: 676923 - DNA, 19 bp, Mus musculus
  siRNA target sequence for Bad (NM_007522.1,1015-1033).
gctggacgcgcattatcca

SEQ ID NO: 676924 - DNA, 19 bp, Mus musculus
  siRNA target sequence for Bcl2l (NM_009743.2,168-186).
cagctggagtcagtttagt

SEQ ID NO: 676925 - DNA, 19 bp, Mus musculus
  siRNA target sequence for Bcl2l (NM_009743.2,170-188).
gctggagtcagtttagtga

SEQ ID NO: 676926 - DNA, 19 bp, Mus musculus
  siRNA target sequence for Bcl2l (NM_009743.2,240-258).
gacccccagtgccatcaat

SEQ ID NO: 676927 - DNA, 19 bp, Mus musculus
  siRNA target sequence for Bcl2l (NM_009743.2,408-426).
gagagcgttcagtgatcta

SEQ ID NO: 676928 - DNA, 19 bp, Mus musculus
  siRNA target sequence for Bcl2l (NM_009743.2,448-466).
ccagggaccgcgtatcaga

SEQ ID NO: 676929 - DNA, 19 bp, Mus musculus
  siRNA target sequence for Bcl2l (NM_009743.2,515-533).
gtcgcatcgtggccttttt

SEQ ID NO: 676930 - DNA, 19 bp, Mus musculus
  siRNA target sequence for Bcl2l (NM_009743.2,517-535).
cgcatcgtggcctttttct

SEQ ID NO: 676931 - DNA, 19 bp, Mus musculus
  siRNA target sequence for Bcl2l (NM_009743.2,554-572).
gcgtggaaagcgtagacaa

SEQ ID NO: 676932 - DNA, 19 bp, Mus musculus
  siRNA target sequence for Bcl2l (NM_009743.2,608-626).
ggatggccacctatctgaa

SEQ ID NO: 676933 - DNA, 19 bp, Mus musculus
  siRNA target sequence for Bcl2l (NM_009743.2,678-696).
ggatctctacgggaacaat

SEQ ID NO: 676934 - DNA, 19 bp, Mus musculus
  siRNA target sequence for Bcl2l11 (NM_009754.1,10-28).
caaccttctgatgtaagtt

SEQ ID NO: 676935 - DNA, 19 bp, Mus musculus
  siRNA target sequence for Bcl2l11 (NM_009754.1,197-215).
ggatcggagacgagttcaa

SEQ ID NO: 676936 - DNA, 19 bp, Mus musculus
  siRNA target sequence for Bcl2l11 (NM_009754.1,202-220).
ggagacgagttcaacgaaa

SEQ ID NO: 676937 - DNA, 19 bp, Mus musculus
  siRNA target sequence for Bcl2l11 (NM_009754.1,205-223).
gacgagttcaacgaaactt

SEQ ID NO: 676938 - DNA, 19 bp, Mus musculus
  siRNA target sequence for Bcl2l11 (NM_009754.1,208-226).
gagttcaacgaaacttaca

SEQ ID NO: 676939 - DNA, 19 bp, Mus musculus
  siRNA target sequence for Bcl2l11 (NM_009754.1,210-228).
gttcaacgaaacttacaca

SEQ ID NO: 676940 - DNA, 19 bp, Mus musculus
  siRNA target sequence for Bcl2l11 (NM_009754.1,265-283).
gaccaccctcaaatggtta

SEQ ID NO: 676941 - DNA, 19 bp, Mus musculus
  siRNA target sequence for Bcl2l11 (NM_009754.1,268-286).
caccctcaaatggttatct

SEQ ID NO: 676942 - DNA, 19 bp, Mus musculus
  siRNA target sequence for Bcl2l11 (NM_009754.1,279-297).
ggttatcttacaactgtta

SEQ ID NO: 676943 - DNA, 19 bp, Mus musculus
  siRNA target sequence for Bcl2l11 (NM_009754.1,289-307).
caactgttacgctttatct

SEQ ID NO: 676944 - DNA, 19 bp, Mus musculus
  siRNA target sequence for Bcl2l2 (NM_007537.1,213-231).
ctctagtggctgactttgt

SEQ ID NO: 676945 - DNA, 19 bp, Mus musculus
  siRNA target sequence for Bcl2l2 (NM_007537.1,222-240).
ctgactttgtaggctataa

SEQ ID NO: 676946 - DNA, 19 bp, Mus musculus
  siRNA target sequence for Bcl2l2 (NM_007537.1,459-477).
gccgtcttgtggcattctt

SEQ ID NO: 676947 - DNA, 19 bp, Mus musculus
  siRNA target sequence for Bcl2l2 (NM_007537.1,464-482).
cttgtggcattctttgtct

SEQ ID NO: 676948 - DNA, 19 bp, Mus musculus
  siRNA target sequence for Bcl2l2 (NM_007537.1,537-555).
gacaagtgcaggattggat

SEQ ID NO: 676949 - DNA, 19 bp, Mus musculus
  siRNA target sequence for Bcl2l2 (NM_007537.1,612-630).
cggagttcacagctctata

SEQ ID NO: 676950 - DNA, 19 bp, Mus musculus
  siRNA target sequence for Bid (NM_007544.2,354-372).
ccttcaaccaaggaagaat

SEQ ID NO: 676951 - DNA, 19 bp, Mus musculus
  siRNA target sequence for Bid (NM_007544.2,355-373).
cttcaaccaaggaagaata

SEQ ID NO: 676952 - DNA, 19 bp, Mus musculus
  siRNA target sequence for Bid (NM_007544.2,418-436).
cagacatctcgcccaaata

SEQ ID NO: 676953 - DNA, 19 bp, Mus musculus
  siRNA target sequence for Bid (NM_007544.2,429-447).
cccaaataggcgatgagat

SEQ ID NO: 676954 - DNA, 19 bp, Mus musculus
  siRNA target sequence for Bid (NM_007544.2,482-500).
ctagccgcacagttcatga

SEQ ID NO: 676955 - DNA, 19 bp, Mus musculus
  siRNA target sequence for Bid (NM_007544.2,509-527).
ctgtcggaggaagacaaaa

SEQ ID NO: 676956 - DNA, 19 bp, Mus musculus
  siRNA target sequence for Bid (NM_007544.2,590-608).
gacaaggccatgctgataa

SEQ ID NO: 676957 - DNA, 19 bp, Mus musculus
  siRNA target sequence for Bid (NM_007544.2,636-654).
ccagtcacgcaccatcttt

SEQ ID NO: 676958 - DNA, 19 bp, Mus musculus
  siRNA target sequence for Bid (NM_007544.2,651-669).
ctttgctccgtgatgtctt

SEQ ID NO: 676959 - DNA, 19 bp, Mus musculus
  siRNA target sequence for Bid (NM_007544.2,670-688).
ccacacgactgtcaacttt

SEQ ID NO: 676960 - DNA, 19 bp, Mus musculus
  siRNA target sequence for Bid (NM_007544.2,671-689).
cacacgactgtcaacttta

SEQ ID NO: 676961 - DNA, 19 bp, Mus musculus
  siRNA target sequence for Bid (NM_007544.2,673-691).
cacgactgtcaactttatt

SEQ ID NO: 676962 - DNA, 19 bp, Mus musculus
  siRNA target sequence for Bnip2 (NM_016787.2,284-302).
gaagattttccaatacctt

SEQ ID NO: 676963 - DNA, 19 bp, Mus musculus
  siRNA target sequence for Bnip2 (NM_016787.2,316-334).
cagcattgaagcagataca

SEQ ID NO: 676964 - DNA, 19 bp, Mus musculus
  siRNA target sequence for Bnip2 (NM_016787.2,318-336).
gcattgaagcagatacact

SEQ ID NO: 676965 - DNA, 19 bp, Mus musculus
  siRNA target sequence for Bnip2 (NM_016787.2,319-337).
cattgaagcagatacacta

SEQ ID NO: 676966 - DNA, 19 bp, Mus musculus
  siRNA target sequence for Bnip2 (NM_016787.2,450-468).
ctctgtggtccgatgattt

SEQ ID NO: 676967 - DNA, 19 bp, Mus musculus
  siRNA target sequence for Bnip2 (NM_016787.2,454-472).
gtggtccgatgatttggat

SEQ ID NO: 676968 - DNA, 19 bp, Mus musculus
  siRNA target sequence for Bnip2 (NM_016787.2,579-597).
ggaaaggctcgattactga

SEQ ID NO: 676969 - DNA, 19 bp, Mus musculus
  siRNA target sequence for Bnip2 (NM_016787.2,629-647).
cgccgctggcgcatgttca

SEQ ID NO: 676970 - DNA, 19 bp, Mus musculus
  siRNA target sequence for Bnip2 (NM_016787.2,682-700).
ggcgatcgagccctacaaa

SEQ ID NO: 676971 - DNA, 19 bp, Mus musculus
  siRNA target sequence for Bnip2 (NM_016787.2,683-701).
gcgatcgagccctacaaaa

SEQ ID NO: 676972 - DNA, 19 bp, Mus musculus
  siRNA target sequence for Bnip2 (NM_016787.2,684-702).
cgatcgagccctacaaaaa

SEQ ID NO: 676973 - DNA, 19 bp, Mus musculus
  siRNA target sequence for Bnip2 (NM_016787.2,685-703).
gatcgagccctacaaaaaa

SEQ ID NO: 676974 - DNA, 19 bp, Mus musculus
  siRNA target sequence for Bnip2 (NM_016787.2,735-753).
gcttaaatgccattgttgt

SEQ ID NO: 676975 - DNA, 19 bp, Mus musculus
  siRNA target sequence for Bnip2 (NM_016787.2,736-754).
cttaaatgccattgttgta

SEQ ID NO: 676976 - DNA, 19 bp, Mus musculus
  siRNA target sequence for Bnip2 (NM_016787.2,782-800).
ggtcagcctaactatagat

SEQ ID NO: 676977 - DNA, 19 bp, Mus musculus
  siRNA target sequence for Bnip2 (NM_016787.2,783-801).
gtcagcctaactatagata

SEQ ID NO: 676978 - DNA, 19 bp, Mus musculus
  siRNA target sequence for Bnip2 (NM_016787.2,785-803).
cagcctaactatagatatt

SEQ ID NO: 676979 - DNA, 19 bp, Mus musculus
  siRNA target sequence for Bnip2 (NM_016787.2,798-816).
gatatttgatggacaatct

SEQ ID NO: 676980 - DNA, 19 bp, Mus musculus
  siRNA target sequence for Bnip2 (NM_016787.2,808-826).
ggacaatctctttaaatat

SEQ ID NO: 676981 - DNA, 19 bp, Mus musculus
  siRNA target sequence for Bnip2 (NM_016787.2,885-903).
gtgcgacaactcgaagaaa

SEQ ID NO: 676982 - DNA, 19 bp, Mus musculus
  siRNA target sequence for Bnip2 (NM_016787.2,888-906).
cgacaactcgaagaaaaat

SEQ ID NO: 676983 - DNA, 19 bp, Mus musculus
  siRNA target sequence for Bnip2 (NM_016787.2,930-948).
gatgctaccagcaaattga

SEQ ID NO: 676984 - DNA, 19 bp, Mus musculus
  siRNA target sequence for Bnip2 (NM_016787.2,934-952).
ctaccagcaaattgataga

SEQ ID NO: 676985 - DNA, 19 bp, Mus musculus
  siRNA target sequence for Bnip2 (NM_016787.2,940-958).
gcaaattgatagacgatta

SEQ ID NO: 676986 - DNA, 19 bp, Mus musculus
  siRNA target sequence for Bnip2 (NM_016787.2,941-959).
caaattgatagacgattaa

SEQ ID NO: 676987 - DNA, 19 bp, Mus musculus
  siRNA target sequence for Bnip2 (NM_016787.2,951-969).
gacgattaaggaaaaacct

SEQ ID NO: 676988 - DNA, 19 bp, Mus musculus
  siRNA target sequence for Bnip2 (NM_016787.2,986-1004).
gtgcacccctcttggttta

SEQ ID NO: 676989 - DNA, 19 bp, Mus musculus
  siRNA target sequence for Bnip2 (NM_016787.2,1018-1036).
ggctgttacacgaccattt

SEQ ID NO: 676990 - DNA, 19 bp, Mus musculus
  siRNA target sequence for Bnip2 (NM_016787.2,1019-1037).
gctgttacacgaccattta

SEQ ID NO: 676991 - DNA, 19 bp, Mus musculus
  siRNA target sequence for Bnip2 (NM_016787.2,1020-1038).
ctgttacacgaccatttat

SEQ ID NO: 676992 - DNA, 19 bp, Mus musculus
  siRNA target sequence for Bnip2 (NM_016787.2,1022-1040).
gttacacgaccatttatca

SEQ ID NO: 676993 - DNA, 19 bp, Mus musculus
  siRNA target sequence for Bnip2 (NM_016787.2,1028-1046).
cgaccatttatcagttcaa

SEQ ID NO: 676994 - DNA, 19 bp, Mus musculus
  siRNA target sequence for Bnip2 (NM_016787.2,1031-1049).
ccatttatcagttcaaagt

SEQ ID NO: 676995 - DNA, 19 bp, Mus musculus
  siRNA target sequence for Bnip2 (NM_016787.2,1032-1050).
catttatcagttcaaagtt

SEQ ID NO: 676996 - DNA, 19 bp, Mus musculus
  siRNA target sequence for Bnip2 (NM_016787.2,1044-1062).
caaagttcagtcagaagat

SEQ ID NO: 676997 - DNA, 19 bp, Mus musculus
  siRNA target sequence for Bnip3 (NM_009760.2,197-215).
cctccgtctctatttataa

SEQ ID NO: 676998 - DNA, 19 bp, Mus musculus
  siRNA target sequence for Bnip3 (NM_009760.2,201-219).
cgtctctatttataatggt

SEQ ID NO: 676999 - DNA, 19 bp, Mus musculus
  siRNA target sequence for Bnip3 (NM_009760.2,262-280).
cgaagtagctccaagagtt

SEQ ID NO: 677000 - DNA, 19 bp, Mus musculus
  siRNA target sequence for Bnip3 (NM_009760.2,323-341).
ccaacagagctgaaataga

SEQ ID NO: 677001 - DNA, 19 bp, Mus musculus
  siRNA target sequence for Bnip3 (NM_009760.2,346-364).
cacagctttggcgagaaaa

SEQ ID NO: 677002 - DNA, 19 bp, Mus musculus
  siRNA target sequence for Bnip3 (NM_009760.2,401-419).
gaagagaagttgaaagtat

SEQ ID NO: 677003 - DNA, 19 bp, Mus musculus
  siRNA target sequence for Bnip3 (NM_009760.2,455-473).
caagtcgaccagaaaatat

SEQ ID NO: 677004 - DNA, 19 bp, Mus musculus
  siRNA target sequence for Bnip3 (NM_009760.2,530-548).
gaaacacaagcgttatgaa

SEQ ID NO: 677005 - DNA, 19 bp, Mus musculus
  siRNA target sequence for Bnip3 (NM_009760.2,568-586).
gcagactttctgaaggttt

SEQ ID NO: 677006 - DNA, 19 bp, Mus musculus
  siRNA target sequence for Bnip3 (NM_009760.2,643-661).
ggaaggcgtctgacaactt

SEQ ID NO: 677007 - DNA, 19 bp, Mus musculus
  siRNA target sequence for Bok (NM_016778.1,227-245).
gatcatggacgcctttgat

SEQ ID NO: 677008 - DNA, 19 bp, Mus musculus
  siRNA target sequence for Card11 (NM_175362.1,231-249).
ggccagctatggatgacta

SEQ ID NO: 677009 - DNA, 19 bp, Mus musculus
  siRNA target sequence for Card11 (NM_175362.1,285-303).
gggataacgtggaatgcaa

SEQ ID NO: 677010 - DNA, 19 bp, Mus musculus
  siRNA target sequence for Card11 (NM_175362.1,438-456).
gccgattgttggacattct

SEQ ID NO: 677011 - DNA, 19 bp, Mus musculus
  siRNA target sequence for Card11 (NM_175362.1,439-457).
ccgattgttggacattctt

SEQ ID NO: 677012 - DNA, 19 bp, Mus musculus
  siRNA target sequence for Card11 (NM_175362.1,545-563).
gaacccacccggagattct

SEQ ID NO: 677013 - DNA, 19 bp, Mus musculus
  siRNA target sequence for Card11 (NM_175362.1,610-628).
gatgaacgaggtcatcaaa

SEQ ID NO: 677014 - DNA, 19 bp, Mus musculus
  siRNA target sequence for Card11 (NM_175362.1,741-759).
ccttccaggagcgatacta

SEQ ID NO: 677015 - DNA, 19 bp, Mus musculus
  siRNA target sequence for Card11 (NM_175362.1,746-764).
caggagcgatactacaaga

SEQ ID NO: 677016 - DNA, 19 bp, Mus musculus
  siRNA target sequence for Card11 (NM_175362.1,749-767).
gagcgatactacaagatga

SEQ ID NO: 677017 - DNA, 19 bp, Mus musculus
  siRNA target sequence for Card11 (NM_175362.1,772-790).
ggagcgggacagctacaat

SEQ ID NO: 677018 - DNA, 19 bp, Mus musculus
  siRNA target sequence for Card11 (NM_175362.1,811-829).
ggacgacaactacaactta

SEQ ID NO: 677019 - DNA, 19 bp, Mus musculus
  siRNA target sequence for Card11 (NM_175362.1,1039-1057).
gatgctgaagacgaaaatt

SEQ ID NO: 677020 - DNA, 19 bp, Mus musculus
  siRNA target sequence for Card11 (NM_175362.1,1253-1271).
gacctggaactcaagtgtt

SEQ ID NO: 677021 - DNA, 19 bp, Mus musculus
  siRNA target sequence for Card11 (NM_175362.1,1280-1298).
gggaaggactgtgaaatgt

SEQ ID NO: 677022 - DNA, 19 bp, Mus musculus
  siRNA target sequence for Card11 (NM_175362.1,1304-1322).
caccgcatgaacacagtta

SEQ ID NO: 677023 - DNA, 19 bp, Mus musculus
  siRNA target sequence for Card11 (NM_175362.1,1460-1478).
gatgagatgcgtattgaga

SEQ ID NO: 677024 - DNA, 19 bp, Mus musculus
  siRNA target sequence for Card11 (NM_175362.1,1667-1685).
cccgaagacagcaagtact

SEQ ID NO: 677025 - DNA, 19 bp, Mus musculus
  siRNA target sequence for Card11 (NM_175362.1,1768-1786).
gcaagcatctgagtttcaa

SEQ ID NO: 677026 - DNA, 19 bp, Mus musculus
  siRNA target sequence for Card11 (NM_175362.1,1808-1826).
gggcacgaagaggatttca

SEQ ID NO: 677027 - DNA, 19 bp, Mus musculus
  siRNA target sequence for Card11 (NM_175362.1,1810-1828).
gcacgaagaggatttcaca

SEQ ID NO: 677028 - DNA, 19 bp, Mus musculus
  siRNA target sequence for Card11 (NM_175362.1,1901-1919).
cgcagcagcatcatgtcaa

SEQ ID NO: 677029 - DNA, 19 bp, Mus musculus
  siRNA target sequence for Card11 (NM_175362.1,1902-1920).
gcagcagcatcatgtcaat

SEQ ID NO: 677030 - DNA, 19 bp, Mus musculus
  siRNA target sequence for Card11 (NM_175362.1,2005-2023).
cgatagctgtgggtttgat

SEQ ID NO: 677031 - DNA, 19 bp, Mus musculus
  siRNA target sequence for Card11 (NM_175362.1,2042-2060).
gaaaatcacgaacgttatt

SEQ ID NO: 677032 - DNA, 19 bp, Mus musculus
  siRNA target sequence for Card11 (NM_175362.1,2134-2152).
gcaggtcaacctcatgtta

SEQ ID NO: 677033 - DNA, 19 bp, Mus musculus
  siRNA target sequence for Card11 (NM_175362.1,2138-2156).
gtcaacctcatgttacgaa

SEQ ID NO: 677034 - DNA, 19 bp, Mus musculus
  siRNA target sequence for Card11 (NM_175362.1,2144-2162).
ctcatgttacgaaagttct

SEQ ID NO: 677035 - DNA, 19 bp, Mus musculus
  siRNA target sequence for Card11 (NM_175362.1,2230-2248).
ccagcacacaactctgaat

SEQ ID NO: 677036 - DNA, 19 bp, Mus musculus
  siRNA target sequence for Card11 (NM_175362.1,2292-2310).
cacgcgggagcttcattca

SEQ ID NO: 677037 - DNA, 19 bp, Mus musculus
  siRNA target sequence for Card11 (NM_175362.1,2294-2312).
cgcgggagcttcattcact

SEQ ID NO: 677038 - DNA, 19 bp, Mus musculus
  siRNA target sequence for Card11 (NM_175362.1,2468-2486).
ctcatcactctgcattaca

SEQ ID NO: 677039 - DNA, 19 bp, Mus musculus
  siRNA target sequence for Card11 (NM_175362.1,2943-2961).
gccggtcagaaaacaagta

SEQ ID NO: 677040 - DNA, 19 bp, Mus musculus
  siRNA target sequence for Card11 (NM_175362.1,2945-2963).
cggtcagaaaacaagtaca

SEQ ID NO: 677041 - DNA, 19 bp, Mus musculus
  siRNA target sequence for Card11 (NM_175362.1,2976-2994).
gcaatgagcgcgtgagaat

SEQ ID NO: 677042 - DNA, 19 bp, Mus musculus
  siRNA target sequence for Card11 (NM_175362.1,2981-2999).
gagcgcgtgagaatcatct

SEQ ID NO: 677043 - DNA, 19 bp, Mus musculus
  siRNA target sequence for Card11 (NM_175362.1,3411-3429).
gtgtgcgcgacctgatcaa

SEQ ID NO: 677044 - DNA, 19 bp, Mus musculus
  siRNA target sequence for Card11 (NM_175362.1,3413-3431).
gtgcgcgacctgatcaagt

SEQ ID NO: 677045 - DNA, 19 bp, Mus musculus
  siRNA target sequence for Card11 (NM_175362.1,3534-3552).
gagtgtgcaggctcaaaga

SEQ ID NO: 677046 - DNA, 19 bp, Mus musculus
  siRNA target sequence for Card14 (NM_130886.2,331-349).
gaactgtgccgcatggatt

SEQ ID NO: 677047 - DNA, 19 bp, Mus musculus
  siRNA target sequence for Card14 (NM_130886.2,889-907).
cacgaggtcctgaaactga

SEQ ID NO: 677048 - DNA, 19 bp, Mus musculus
  siRNA target sequence for Card14 (NM_130886.2,1024-1042).
cagcgagcaagccttgtat

SEQ ID NO: 677049 - DNA, 19 bp, Mus musculus
  siRNA target sequence for Card14 (NM_130886.2,1035-1053).
ccttgtatcgtcatgtgaa

SEQ ID NO: 677050 - DNA, 19 bp, Mus musculus
  siRNA target sequence for Card14 (NM_130886.2,1036-1054).
cttgtatcgtcatgtgaaa

SEQ ID NO: 677051 - DNA, 19 bp, Mus musculus
  siRNA target sequence for Card14 (NM_130886.2,1044-1062).
gtcatgtgaaagagaatct

SEQ ID NO: 677052 - DNA, 19 bp, Mus musculus
  siRNA target sequence for Card14 (NM_130886.2,1099-1117).
cctcagggagaagaactaa

SEQ ID NO: 677053 - DNA, 19 bp, Mus musculus
  siRNA target sequence for Card14 (NM_130886.2,1100-1118).
ctcagggagaagaactaaa

SEQ ID NO: 677054 - DNA, 19 bp, Mus musculus
  siRNA target sequence for Card14 (NM_130886.2,1804-1822).
gaagaccccgagtctctaa

SEQ ID NO: 677055 - DNA, 19 bp, Mus musculus
  siRNA target sequence for Card14 (NM_130886.2,1946-1964).
cttcccggagcctgaatgt

SEQ ID NO: 677056 - DNA, 19 bp, Mus musculus
  siRNA target sequence for Card14 (NM_130886.2,1996-2014).
ccagcccgcaagatcctaa

SEQ ID NO: 677057 - DNA, 19 bp, Mus musculus
  siRNA target sequence for Card14 (NM_130886.2,2046-2064).
cgcgttgctggaacagatt

SEQ ID NO: 677058 - DNA, 19 bp, Mus musculus
  siRNA target sequence for Card14 (NM_130886.2,2163-2181).
gatggtggactataaacct

SEQ ID NO: 677059 - DNA, 19 bp, Mus musculus
  siRNA target sequence for Card14 (NM_130886.2,2200-2218).
gccactctggagaatacaa

SEQ ID NO: 677060 - DNA, 19 bp, Mus musculus
  siRNA target sequence for Card14 (NM_130886.2,2462-2480).
ggcatgcccaccatgtgaa

SEQ ID NO: 677061 - DNA, 19 bp, Mus musculus
  siRNA target sequence for Card14 (NM_130886.2,2478-2496).
gaacccctacaccatgaaa

SEQ ID NO: 677062 - DNA, 19 bp, Mus musculus
  siRNA target sequence for Card14 (NM_130886.2,2609-2627).
cacagaagttagtacgaat

SEQ ID NO: 677063 - DNA, 19 bp, Mus musculus
  siRNA target sequence for Card14 (NM_130886.2,2849-2867).
gtctcctccaaggttttaa

SEQ ID NO: 677064 - DNA, 19 bp, Mus musculus
  siRNA target sequence for Card14 (NM_130886.2,2937-2955).
ggagggagagtcaataggt

SEQ ID NO: 677065 - DNA, 19 bp, Mus musculus
  siRNA target sequence for Card14 (NM_130886.2,2983-3001).
gtggagtccctcatgaata

SEQ ID NO: 677066 - DNA, 19 bp, Mus musculus
  siRNA target sequence for Card14 (NM_130886.2,3078-3096).
catccatgtctctgtcaat

SEQ ID NO: 677067 - DNA, 19 bp, Mus musculus
  siRNA target sequence for Cias1 (NM_145827.1,356-374).
gcgagacctctgggaaaaa

SEQ ID NO: 677068 - DNA, 19 bp, Mus musculus
  siRNA target sequence for Cias1 (NM_145827.1,398-416).
gaatgacacgtgtacatca

SEQ ID NO: 677069 - DNA, 19 bp, Mus musculus
  siRNA target sequence for Cias1 (NM_145827.1,402-420).
gacacgtgtacatcacatt

SEQ ID NO: 677070 - DNA, 19 bp, Mus musculus
  siRNA target sequence for Cias1 (NM_145827.1,465-483).
ggtttgctgggatatctct

SEQ ID NO: 677071 - DNA, 19 bp, Mus musculus
  siRNA target sequence for Cias1 (NM_145827.1,480-498).
ctctcccgcatctccattt

SEQ ID NO: 677072 - DNA, 19 bp, Mus musculus
  siRNA target sequence for Cias1 (NM_145827.1,482-500).
ctcccgcatctccatttgt

SEQ ID NO: 677073 - DNA, 19 bp, Mus musculus
  siRNA target sequence for Cias1 (NM_145827.1,484-502).
cccgcatctccatttgtaa

SEQ ID NO: 677074 - DNA, 19 bp, Mus musculus
  siRNA target sequence for Cias1 (NM_145827.1,485-503).
ccgcatctccatttgtaaa

SEQ ID NO: 677075 - DNA, 19 bp, Mus musculus
  siRNA target sequence for Cias1 (NM_145827.1,513-531).
gattactgtaagatgtaca

SEQ ID NO: 677076 - DNA, 19 bp, Mus musculus
  siRNA target sequence for Cias1 (NM_145827.1,544-562).
gaagcaggttctactctat

SEQ ID NO: 677077 - DNA, 19 bp, Mus musculus
  siRNA target sequence for Cias1 (NM_145827.1,547-565).
gcaggttctactctatcaa

SEQ ID NO: 677078 - DNA, 19 bp, Mus musculus
  siRNA target sequence for Cias1 (NM_145827.1,696-714).
cgggacagccccatgagtt

SEQ ID NO: 677079 - DNA, 19 bp, Mus musculus
  siRNA target sequence for Cias1 (NM_145827.1,813-831).
ctagccaggaagattatgt

SEQ ID NO: 677080 - DNA, 19 bp, Mus musculus
  siRNA target sequence for Cias1 (NM_145827.1,922-940).
gtctagcagacctgattgt

SEQ ID NO: 677081 - DNA, 19 bp, Mus musculus
  siRNA target sequence for Cias1 (NM_145827.1,1111-1129).
gcctcatccgaaagaaact

SEQ ID NO: 677082 - DNA, 19 bp, Mus musculus
  siRNA target sequence for Cias1 (NM_145827.1,1140-1158).
gcctctctgctcataacga

SEQ ID NO: 677083 - DNA, 19 bp, Mus musculus
  siRNA target sequence for Cias1 (NM_145827.1,1165-1183).
cggtagccttggagaaact

SEQ ID NO: 677084 - DNA, 19 bp, Mus musculus
  siRNA target sequence for Cias1 (NM_145827.1,1214-1232).
ggagatcctaggtttctct

SEQ ID NO: 677085 - DNA, 19 bp, Mus musculus
  siRNA target sequence for Cias1 (NM_145827.1,1248-1266).
gagtatttctttaagtatt

SEQ ID NO: 677086 - DNA, 19 bp, Mus musculus
  siRNA target sequence for Cias1 (NM_145827.1,1300-1318).
ggctgatccaagagaatga

SEQ ID NO: 677087 - DNA, 19 bp, Mus musculus
  siRNA target sequence for Cias1 (NM_145827.1,1369-1387).
cggggctaaagcaacagat

SEQ ID NO: 677088 - DNA, 19 bp, Mus musculus
  siRNA target sequence for Cias1 (NM_145827.1,1429-1447).
cggccgtctacgtcttctt

SEQ ID NO: 677089 - DNA, 19 bp, Mus musculus
  siRNA target sequence for Cias1 (NM_145827.1,1522-1540).
cactggctgcggatggaat

SEQ ID NO: 677090 - DNA, 19 bp, Mus musculus
  siRNA target sequence for Cias1 (NM_145827.1,1544-1562).
gaaccagaaaatcctattt

SEQ ID NO: 677091 - DNA, 19 bp, Mus musculus
  siRNA target sequence for Cias1 (NM_145827.1,1644-1662).
gtggactgcgagagattct

SEQ ID NO: 677092 - DNA, 19 bp, Mus musculus
  siRNA target sequence for Cias1 (NM_145827.1,1647-1665).
gactgcgagagattctaca

SEQ ID NO: 677093 - DNA, 19 bp, Mus musculus
  siRNA target sequence for Cias1 (NM_145827.1,1694-1712).
cttcgctgctatgtactat

SEQ ID NO: 677094 - DNA, 19 bp, Mus musculus
  siRNA target sequence for Cias1 (NM_145827.1,1759-1777).
gaggttgttcagatcttct

SEQ ID NO: 677095 - DNA, 19 bp, Mus musculus
  siRNA target sequence for Cias1 (NM_145827.1,1762-1780).
gttgttcagatcttctgaa

SEQ ID NO: 677096 - DNA, 19 bp, Mus musculus
  siRNA target sequence for Cias1 (NM_145827.1,1787-1805).
cgtgaaggtcctactagaa

SEQ ID NO: 677097 - DNA, 19 bp, Mus musculus
  siRNA target sequence for Cias1 (NM_145827.1,1790-1808).
gaaggtcctactagaaaat

SEQ ID NO: 677098 - DNA, 19 bp, Mus musculus
  siRNA target sequence for Cias1 (NM_145827.1,1821-1839).
gaaaaaggctatctgattt

SEQ ID NO: 677099 - DNA, 19 bp, Mus musculus
  siRNA target sequence for Cias1 (NM_145827.1,1871-1889).
ccaggagagaacctcttat

SEQ ID NO: 677100 - DNA, 19 bp, Mus musculus
  siRNA target sequence for Cias1 (NM_145827.1,1872-1890).
caggagagaacctcttatt

SEQ ID NO: 677101 - DNA, 19 bp, Mus musculus
  siRNA target sequence for Cias1 (NM_145827.1,1993-2011).
gccaactggaactgttcta

SEQ ID NO: 677102 - DNA, 19 bp, Mus musculus
  siRNA target sequence for Cias1 (NM_145827.1,2057-2075).
ggaccactttcccaaaatt

SEQ ID NO: 677103 - DNA, 19 bp, Mus musculus
  siRNA target sequence for Cias1 (NM_145827.1,2106-2124).
gtggtttcctccttttgta

SEQ ID NO: 677104 - DNA, 19 bp, Mus musculus
  siRNA target sequence for Cias1 (NM_145827.1,2109-2127).
gtttcctccttttgtatta

SEQ ID NO: 677105 - DNA, 19 bp, Mus musculus
  siRNA target sequence for Cias1 (NM_145827.1,2155-2173).
ccctgggtttttttcacaa

SEQ ID NO: 677106 - DNA, 19 bp, Mus musculus
  siRNA target sequence for Cias1 (NM_145827.1,2411-2429).
gcacccaggctgtaacatt

SEQ ID NO: 677107 - DNA, 19 bp, Mus musculus
  siRNA target sequence for Cias1 (NM_145827.1,2661-2679).
gttctgagctccaaccatt

SEQ ID NO: 677108 - DNA, 19 bp, Mus musculus
  siRNA target sequence for Cias1 (NM_145827.1,2680-2698).
ctctgaccagactgtacat

SEQ ID NO: 677109 - DNA, 19 bp, Mus musculus
  siRNA target sequence for Cias1 (NM_145827.1,2727-2745).
gtccaagttttgtgtgaaa

SEQ ID NO: 677110 - DNA, 19 bp, Mus musculus
  siRNA target sequence for Cias1 (NM_145827.1,2733-2751).
gttttgtgtgaaaagatga

SEQ ID NO: 677111 - DNA, 19 bp, Mus musculus
  siRNA target sequence for Cias1 (NM_145827.1,2795-2813).
cggccttacttcaatctgt

SEQ ID NO: 677112 - DNA, 19 bp, Mus musculus
  siRNA target sequence for Cias1 (NM_145827.1,2796-2814).
ggccttacttcaatctgtt

SEQ ID NO: 677113 - DNA, 19 bp, Mus musculus
  siRNA target sequence for Cias1 (NM_145827.1,2799-2817).
cttacttcaatctgttgtt

SEQ ID NO: 677114 - DNA, 19 bp, Mus musculus
  siRNA target sequence for Cias1 (NM_145827.1,2861-2879).
cctctatctacgaagcaat

SEQ ID NO: 677115 - DNA, 19 bp, Mus musculus
  siRNA target sequence for Cias1 (NM_145827.1,2924-2942).
gcacccggactgtaaacta

SEQ ID NO: 677116 - DNA, 19 bp, Mus musculus
  siRNA target sequence for Cias1 (NM_145827.1,2929-2947).
cggactgtaaactacagat

SEQ ID NO: 677117 - DNA, 19 bp, Mus musculus
  siRNA target sequence for Cias1 (NM_145827.1,2989-3007).
ggaatctctccacaattct

SEQ ID NO: 677118 - DNA, 19 bp, Mus musculus
  siRNA target sequence for Cias1 (NM_145827.1,3035-3053).
gaacctgggcaacaatgat

SEQ ID NO: 677119 - DNA, 19 bp, Mus musculus
  siRNA target sequence for Cias1 (NM_145827.1,3125-3143).
gttgggtgaaatgtactta

SEQ ID NO: 677120 - DNA, 19 bp, Mus musculus
  siRNA target sequence for Cias1 (NM_145827.1,3189-3207).
cctgagctgactatagtct

SEQ ID NO: 677121 - DNA, 19 bp, Mus musculus
  siRNA target sequence for Cias1 (NM_145827.1,3190-3208).
ctgagctgactatagtctt

SEQ ID NO: 677122 - DNA, 19 bp, Mus musculus
  siRNA target sequence for Cidea (NM_007702.1,316-334).
cgcccttttcgagtttcaa

SEQ ID NO: 677123 - DNA, 19 bp, Mus musculus
  siRNA target sequence for Cidea (NM_007702.1,403-421).
gatgtcttagtcatcacaa

SEQ ID NO: 677124 - DNA, 19 bp, Mus musculus
  siRNA target sequence for Cidea (NM_007702.1,496-514).
gacaacacgcatttcatga

SEQ ID NO: 677125 - DNA, 19 bp, Mus musculus
  siRNA target sequence for Cidea (NM_007702.1,536-554).
ggacaccgggtagtaagta

SEQ ID NO: 677126 - DNA, 19 bp, Mus musculus
  siRNA target sequence for Cidea (NM_007702.1,537-555).
gacaccgggtagtaagtat

SEQ ID NO: 677127 - DNA, 19 bp, Mus musculus
  siRNA target sequence for Cidea (NM_007702.1,539-557).
caccgggtagtaagtatgt

SEQ ID NO: 677128 - DNA, 19 bp, Mus musculus
  siRNA target sequence for Cidea (NM_007702.1,596-614).
gagtcaccttcgacctata

SEQ ID NO: 677129 - DNA, 19 bp, Mus musculus
  siRNA target sequence for Cidea (NM_007702.1,633-651).
cttcctcggctgtctcaat

SEQ ID NO: 677130 - DNA, 19 bp, Mus musculus
  siRNA target sequence for Cidea (NM_007702.1,659-677).
ccacgatgtacgagatgta

SEQ ID NO: 677131 - DNA, 19 bp, Mus musculus
  siRNA target sequence for Cidea (NM_007702.1,711-729).
caaggccgtgttaaggaat

SEQ ID NO: 677132 - DNA, 19 bp, Mus musculus
  siRNA target sequence for Cidea (NM_007702.1,778-796).
gtctatgcgggcacataca

SEQ ID NO: 677133 - DNA, 19 bp, Mus musculus
  siRNA target sequence for Cideb (NM_009894.1,151-169).
ggcctgctaaggtcagtat

SEQ ID NO: 677134 - DNA, 19 bp, Mus musculus
  siRNA target sequence for Cideb (NM_009894.1,600-618).
catgagctgtgatttccaa

SEQ ID NO: 677135 - DNA, 19 bp, Mus musculus
  siRNA target sequence for Cideb (NM_009894.1,616-634).
caaggagttggccctaaaa

SEQ ID NO: 677136 - DNA, 19 bp, Mus musculus
  siRNA target sequence for Cradd (NM_009950.1,264-282).
caggcctccggaagacaat

SEQ ID NO: 677137 - DNA, 19 bp, Mus musculus
  siRNA target sequence for Cradd (NM_009950.1,465-483).
cagaccagcagattaacca

SEQ ID NO: 677138 - DNA, 19 bp, Mus musculus
  siRNA target sequence for Dffa (NM_010044.1,39-57).
cgatgtccggcctctcaaa

SEQ ID NO: 677139 - DNA, 19 bp, Mus musculus
  siRNA target sequence for Dffa (NM_010044.1,145-163).
ctcctggccattgataagt

SEQ ID NO: 677140 - DNA, 19 bp, Mus musculus
  siRNA target sequence for Dffa (NM_010044.1,233-251).
gccttccttccaatacgaa

SEQ ID NO: 677141 - DNA, 19 bp, Mus musculus
  siRNA target sequence for Dffa (NM_010044.1,239-257).
cttccaatacgaagtttgt

SEQ ID NO: 677142 - DNA, 19 bp, Mus musculus
  siRNA target sequence for Dffa (NM_010044.1,598-616).
gagaaagagggcaacatct

SEQ ID NO: 677143 - DNA, 19 bp, Mus musculus
  siRNA target sequence for Diablo (NM_023232.2,108-126).
gtcttggctaactctaaga

SEQ ID NO: 677144 - DNA, 19 bp, Mus musculus
  siRNA target sequence for Diablo (NM_023232.2,110-128).
cttggctaactctaagaaa

SEQ ID NO: 677145 - DNA, 19 bp, Mus musculus
  siRNA target sequence for Diablo (NM_023232.2,129-147).
cgctgtttctcagaattga

SEQ ID NO: 677146 - DNA, 19 bp, Mus musculus
  siRNA target sequence for Diablo (NM_023232.2,130-148).
gctgtttctcagaattgat

SEQ ID NO: 677147 - DNA, 19 bp, Mus musculus
  siRNA target sequence for Diablo (NM_023232.2,190-208).
cactgtgtgcggttcctat

SEQ ID NO: 677148 - DNA, 19 bp, Mus musculus
  siRNA target sequence for Diablo (NM_023232.2,194-212).
gtgtgcggttcctattgct

SEQ ID NO: 677149 - DNA, 19 bp, Mus musculus
  siRNA target sequence for Diablo (NM_023232.2,200-218).
ggttcctattgctcagaaa

SEQ ID NO: 677150 - DNA, 19 bp, Mus musculus
  siRNA target sequence for Diablo (NM_023232.2,201-219).
gttcctattgctcagaaat

SEQ ID NO: 677151 - DNA, 19 bp, Mus musculus
  siRNA target sequence for Diablo (NM_023232.2,232-250).
ctctcagtaacgaagcatt

SEQ ID NO: 677152 - DNA, 19 bp, Mus musculus
  siRNA target sequence for Diablo (NM_023232.2,307-325).
ccacctacgcgctgattga

SEQ ID NO: 677153 - DNA, 19 bp, Mus musculus
  siRNA target sequence for Diablo (NM_023232.2,308-326).
cacctacgcgctgattgaa

SEQ ID NO: 677154 - DNA, 19 bp, Mus musculus
  siRNA target sequence for Diablo (NM_023232.2,324-342).
gaagcaatcaccgagtata

SEQ ID NO: 677155 - DNA, 19 bp, Mus musculus
  siRNA target sequence for Diablo (NM_023232.2,327-345).
gcaatcaccgagtatacta

SEQ ID NO: 677156 - DNA, 19 bp, Mus musculus
  siRNA target sequence for Diablo (NM_023232.2,328-346).
caatcaccgagtatactaa

SEQ ID NO: 677157 - DNA, 19 bp, Mus musculus
  siRNA target sequence for Diablo (NM_023232.2,348-366).
gctgtttacacgttagtgt

SEQ ID NO: 677158 - DNA, 19 bp, Mus musculus
  siRNA target sequence for Diablo (NM_023232.2,369-387).
ctgtaccgacaatatacaa

SEQ ID NO: 677159 - DNA, 19 bp, Mus musculus
  siRNA target sequence for Diablo (NM_023232.2,423-441).
gaggtgtggcaggtaatta

SEQ ID NO: 677160 - DNA, 19 bp, Mus musculus
  siRNA target sequence for Diablo (NM_023232.2,428-446).
gtggcaggtaattatagga

SEQ ID NO: 677161 - DNA, 19 bp, Mus musculus
  siRNA target sequence for Diablo (NM_023232.2,447-465).
gccagagttgagatgactt

SEQ ID NO: 677162 - DNA, 19 bp, Mus musculus
  siRNA target sequence for Diablo (NM_023232.2,451-469).
gagttgagatgacttcaaa

SEQ ID NO: 677163 - DNA, 19 bp, Mus musculus
  siRNA target sequence for Fadd (NM_010175.2,133-151).
gagcgcgtgagcaaacgaa

SEQ ID NO: 677164 - DNA, 19 bp, Mus musculus
  siRNA target sequence for Fadd (NM_010175.2,343-361).
gtggcatttgacattgtgt

SEQ ID NO: 677165 - DNA, 19 bp, Mus musculus
  siRNA target sequence for Fadd (NM_010175.2,518-536).
cggtggccggactggttaa

SEQ ID NO: 677166 - DNA, 19 bp, Mus musculus
  siRNA target sequence for Fadd (NM_010175.2,545-563).
ggacctgcaggctgaatct

SEQ ID NO: 677167 - DNA, 19 bp, Mus musculus
  siRNA target sequence for Fadd (NM_010175.2,612-630).
gaatatgtccccagtacta

SEQ ID NO: 677168 - DNA, 19 bp, Mus musculus
  siRNA target sequence for Faf1 (NM_007983.2,451-469).
gtactggtattgaaaacat

SEQ ID NO: 677169 - DNA, 19 bp, Mus musculus
  siRNA target sequence for Faf1 (NM_007983.2,467-485).
catcgatgaagctattaca

SEQ ID NO: 677170 - DNA, 19 bp, Mus musculus
  siRNA target sequence for Faf1 (NM_007983.2,486-504).
ctgcttgagcaaaataact

SEQ ID NO: 677171 - DNA, 19 bp, Mus musculus
  siRNA target sequence for Faf1 (NM_007983.2,509-527).
cttggtggcagctattaat

SEQ ID NO: 677172 - DNA, 19 bp, Mus musculus
  siRNA target sequence for Faf1 (NM_007983.2,512-530).
ggtggcagctattaatggt

SEQ ID NO: 677173 - DNA, 19 bp, Mus musculus
  siRNA target sequence for Faf1 (NM_007983.2,529-547).
gtgtaataccacaggaaaa

SEQ ID NO: 677174 - DNA, 19 bp, Mus musculus
  siRNA target sequence for Faf1 (NM_007983.2,643-661).
cagcgtttcgacctgtaat

SEQ ID NO: 677175 - DNA, 19 bp, Mus musculus
  siRNA target sequence for Faf1 (NM_007983.2,662-680).
gccatccaggcagattgta

SEQ ID NO: 677176 - DNA, 19 bp, Mus musculus
  siRNA target sequence for Faf1 (NM_007983.2,664-682).
catccaggcagattgtaga

SEQ ID NO: 677177 - DNA, 19 bp, Mus musculus
  siRNA target sequence for Faf1 (NM_007983.2,809-827).
gcctaaaatgctgttaaaa

SEQ ID NO: 677178 - DNA, 19 bp, Mus musculus
  siRNA target sequence for Faf1 (NM_007983.2,849-867).
gaagacagtacggtcttaa

SEQ ID NO: 677179 - DNA, 19 bp, Mus musculus
  siRNA target sequence for Faf1 (NM_007983.2,852-870).
gacagtacggtcttaaaat

SEQ ID NO: 677180 - DNA, 19 bp, Mus musculus
  siRNA target sequence for Faf1 (NM_007983.2,854-872).
cagtacggtcttaaaatca

SEQ ID NO: 677181 - DNA, 19 bp, Mus musculus
  siRNA target sequence for Faf1 (NM_007983.2,856-874).
gtacggtcttaaaatcact

SEQ ID NO: 677182 - DNA, 19 bp, Mus musculus
  siRNA target sequence for Faf1 (NM_007983.2,876-894).
cacttgccaaaaaacaaca

SEQ ID NO: 677183 - DNA, 19 bp, Mus musculus
  siRNA target sequence for Faf1 (NM_007983.2,948-966).
ggtgccctgcaggaatcat

SEQ ID NO: 677184 - DNA, 19 bp, Mus musculus
  siRNA target sequence for Faf1 (NM_007983.2,956-974).
gcaggaatcattaaatcaa

SEQ ID NO: 677185 - DNA, 19 bp, Mus musculus
  siRNA target sequence for Faf1 (NM_007983.2,957-975).
caggaatcattaaatcaaa

SEQ ID NO: 677186 - DNA, 19 bp, Mus musculus
  siRNA target sequence for Faf1 (NM_007983.2,960-978).
gaatcattaaatcaaaact

SEQ ID NO: 677187 - DNA, 19 bp, Mus musculus
  siRNA target sequence for Faf1 (NM_007983.2,1036-1054).
gaagcagtaccgttcaaga

SEQ ID NO: 677188 - DNA, 19 bp, Mus musculus
  siRNA target sequence for Faf1 (NM_007983.2,1042-1060).
gtaccgttcaagaggtaaa

SEQ ID NO: 677189 - DNA, 19 bp, Mus musculus
  siRNA target sequence for Faf1 (NM_007983.2,1070-1088).
gtatgaccttacaagcata

SEQ ID NO: 677190 - DNA, 19 bp, Mus musculus
  siRNA target sequence for Faf1 (NM_007983.2,1126-1144).
ctgccaccgatgactcaat

SEQ ID NO: 677191 - DNA, 19 bp, Mus musculus
  siRNA target sequence for Faf1 (NM_007983.2,1128-1146).
gccaccgatgactcaatgt

SEQ ID NO: 677192 - DNA, 19 bp, Mus musculus
  siRNA target sequence for Faf1 (NM_007983.2,1130-1148).
caccgatgactcaatgtgt

SEQ ID NO: 677193 - DNA, 19 bp, Mus musculus
  siRNA target sequence for Faf1 (NM_007983.2,1153-1171).
ctgaatcaggcctctctta

SEQ ID NO: 677194 - DNA, 19 bp, Mus musculus
  siRNA target sequence for Faf1 (NM_007983.2,1168-1186).
cttatccctgccatcgatt

SEQ ID NO: 677195 - DNA, 19 bp, Mus musculus
  siRNA target sequence for Faf1 (NM_007983.2,1174-1192).
cctgccatcgattaactgt

SEQ ID NO: 677196 - DNA, 19 bp, Mus musculus
  siRNA target sequence for Faf1 (NM_007983.2,1217-1235).
gacccgtgagcaatcagaa

SEQ ID NO: 677197 - DNA, 19 bp, Mus musculus
  siRNA target sequence for Faf1 (NM_007983.2,1238-1256).
gcaaagcacggatgttcat

SEQ ID NO: 677198 - DNA, 19 bp, Mus musculus
  siRNA target sequence for Faf1 (NM_007983.2,1239-1257).
caaagcacggatgttcata

SEQ ID NO: 677199 - DNA, 19 bp, Mus musculus
  siRNA target sequence for Faf1 (NM_007983.2,1308-1326).
gtggatgacggagaagtat

SEQ ID NO: 677200 - DNA, 19 bp, Mus musculus
  siRNA target sequence for Faf1 (NM_007983.2,1310-1328).
ggatgacggagaagtattt

SEQ ID NO: 677201 - DNA, 19 bp, Mus musculus
  siRNA target sequence for Faf1 (NM_007983.2,1367-1385).
gccagaaaacgcagaaaat

SEQ ID NO: 677202 - DNA, 19 bp, Mus musculus
  siRNA target sequence for Faf1 (NM_007983.2,1389-1407).
ggagatgccttattacaat

SEQ ID NO: 677203 - DNA, 19 bp, Mus musculus
  siRNA target sequence for Faf1 (NM_007983.2,1390-1408).
gagatgccttattacaatt

SEQ ID NO: 677204 - DNA, 19 bp, Mus musculus
  siRNA target sequence for Faf1 (NM_007983.2,1392-1410).
gatgccttattacaattta

SEQ ID NO: 677205 - DNA, 19 bp, Mus musculus
  siRNA target sequence for Faf1 (NM_007983.2,1505-1523).
ccgagacagaaaacttctt

SEQ ID NO: 677206 - DNA, 19 bp, Mus musculus
  siRNA target sequence for Faf1 (NM_007983.2,1513-1531).
gaaaacttcttgctatcta

SEQ ID NO: 677207 - DNA, 19 bp, Mus musculus
  siRNA target sequence for Faf1 (NM_007983.2,1532-1550).
cctccaccatgatgaaagt

SEQ ID NO: 677208 - DNA, 19 bp, Mus musculus
  siRNA target sequence for Faf1 (NM_007983.2,1580-1598).
gctttgtgctgaatccatt

SEQ ID NO: 677209 - DNA, 19 bp, Mus musculus
  siRNA target sequence for Faf1 (NM_007983.2,1603-1621).
cctatctgagtcaaaattt

SEQ ID NO: 677210 - DNA, 19 bp, Mus musculus
  siRNA target sequence for Faf1 (NM_007983.2,1604-1622).
ctatctgagtcaaaatttt

SEQ ID NO: 677211 - DNA, 19 bp, Mus musculus
  siRNA target sequence for Faf1 (NM_007983.2,1660-1678).
gagcaagatttctgacaat

SEQ ID NO: 677212 - DNA, 19 bp, Mus musculus
  siRNA target sequence for Faf1 (NM_007983.2,1662-1680).
gcaagatttctgacaatgt

SEQ ID NO: 677213 - DNA, 19 bp, Mus musculus
  siRNA target sequence for Faf1 (NM_007983.2,1697-1715).
cagcgttattgcacaaact

SEQ ID NO: 677214 - DNA, 19 bp, Mus musculus
  siRNA target sequence for Faf1 (NM_007983.2,1699-1717).
gcgttattgcacaaactat

SEQ ID NO: 677215 - DNA, 19 bp, Mus musculus
  siRNA target sequence for Faf1 (NM_007983.2,1760-1778).
catgggaaagcgatcatct

SEQ ID NO: 677216 - DNA, 19 bp, Mus musculus
  siRNA target sequence for Faf1 (NM_007983.2,1765-1783).
gaaagcgatcatctaatga

SEQ ID NO: 677217 - DNA, 19 bp, Mus musculus
  siRNA target sequence for Faf1 (NM_007983.2,1771-1789).
gatcatctaatgaagtgtt

SEQ ID NO: 677218 - DNA, 19 bp, Mus musculus
  siRNA target sequence for Faf1 (NM_007983.2,1794-1812).
gtgatacaaggtaatacaa

SEQ ID NO: 677219 - DNA, 19 bp, Mus musculus
  siRNA target sequence for Faf1 (NM_007983.2,1796-1814).
gatacaaggtaatacaaca

SEQ ID NO: 677220 - DNA, 19 bp, Mus musculus
  siRNA target sequence for Faf1 (NM_007983.2,1815-1833).
gtggatgagttaatgatga

SEQ ID NO: 677221 - DNA, 19 bp, Mus musculus
  siRNA target sequence for Faf1 (NM_007983.2,2018-2036).
gcagattcgcaaagaacaa

SEQ ID NO: 677222 - DNA, 19 bp, Mus musculus
  siRNA target sequence for Faf1 (NM_007983.2,2021-2039).
gattcgcaaagaacaagaa

SEQ ID NO: 677223 - DNA, 19 bp, Mus musculus
  siRNA target sequence for Faf1 (NM_007983.2,2183-2201).
gctccagattgtctttgat

SEQ ID NO: 677224 - DNA, 19 bp, Mus musculus
  siRNA target sequence for Faf1 (NM_007983.2,2208-2226).
gcttccaagggatttccat

SEQ ID NO: 677225 - DNA, 19 bp, Mus musculus
  siRNA target sequence for Faf1 (NM_007983.2,2217-2235).
ggatttccatgggatgaat

SEQ ID NO: 677226 - DNA, 19 bp, Mus musculus
  siRNA target sequence for Faf1 (NM_007983.2,2218-2236).
gatttccatgggatgaatt

SEQ ID NO: 677227 - DNA, 19 bp, Mus musculus
  siRNA target sequence for Faf1 (NM_007983.2,2223-2241).
ccatgggatgaattcaagt

SEQ ID NO: 677228 - DNA, 19 bp, Mus musculus
  siRNA target sequence for Faf1 (NM_007983.2,2227-2245).
gggatgaattcaagttact

SEQ ID NO: 677229 - DNA, 19 bp, Mus musculus
  siRNA target sequence for Faf1 (NM_007983.2,2229-2247).
gatgaattcaagttactga

SEQ ID NO: 677230 - DNA, 19 bp, Mus musculus
  siRNA target sequence for Faf1 (NM_007983.2,2252-2270).
ctttcctaggagagatgta

SEQ ID NO: 677231 - DNA, 19 bp, Mus musculus
  siRNA target sequence for Faf1 (NM_007983.2,2257-2275).
ctaggagagatgtaactca

SEQ ID NO: 677232 - DNA, 19 bp, Mus musculus
  siRNA target sequence for Faf1 (NM_007983.2,2272-2290).
ctcagctagaccccaataa

SEQ ID NO: 677233 - DNA, 19 bp, Mus musculus
  siRNA target sequence for Faf1 (NM_007983.2,2274-2292).
cagctagaccccaataagt

SEQ ID NO: 677234 - DNA, 19 bp, Mus musculus
  siRNA target sequence for Faf1 (NM_007983.2,2276-2294).
gctagaccccaataagtca

SEQ ID NO: 677235 - DNA, 19 bp, Mus musculus
  siRNA target sequence for Faf1 (NM_007983.2,2277-2295).
ctagaccccaataagtcat

SEQ ID NO: 677236 - DNA, 19 bp, Mus musculus
  siRNA target sequence for Fsp27 (NM_178373.2,363-381).
caaaagataccatgttcat

SEQ ID NO: 677237 - DNA, 19 bp, Mus musculus
  siRNA target sequence for Fsp27 (NM_178373.2,403-421).
gtggaagcccccatcagaa

SEQ ID NO: 677238 - DNA, 19 bp, Mus musculus
  siRNA target sequence for Fsp27 (NM_178373.2,453-471).
cccagaagccaactaagaa

SEQ ID NO: 677239 - DNA, 19 bp, Mus musculus
  siRNA target sequence for Fsp27 (NM_178373.2,562-580).
cacatactcgctttcctat

SEQ ID NO: 677240 - DNA, 19 bp, Mus musculus
  siRNA target sequence for Mcl1 (NM_008562.2,296-314).
ccgaaaggcggctgcataa

SEQ ID NO: 677241 - DNA, 19 bp, Mus musculus
  siRNA target sequence for Mcl1 (NM_008562.2,298-316).
gaaaggcggctgcataagt

SEQ ID NO: 677242 - DNA, 19 bp, Mus musculus
  siRNA target sequence for Mcl1 (NM_008562.2,545-563).
gccagtcgctggagatcat

SEQ ID NO: 677243 - DNA, 19 bp, Mus musculus
  siRNA target sequence for Mcl1 (NM_008562.2,714-732).
ccggaaactggacattaaa

SEQ ID NO: 677244 - DNA, 19 bp, Mus musculus
  siRNA target sequence for Mcl1 (NM_008562.2,715-733).
cggaaactggacattaaaa

SEQ ID NO: 677245 - DNA, 19 bp, Mus musculus
  siRNA target sequence for Mcl1 (NM_008562.2,735-753).
cgaaggcgatgttaaatct

SEQ ID NO: 677246 - DNA, 19 bp, Mus musculus
  siRNA target sequence for Mcl1 (NM_008562.2,741-759).
cgatgttaaatctttttct

SEQ ID NO: 677247 - DNA, 19 bp, Mus musculus
  siRNA target sequence for Mcl1 (NM_008562.2,752-770).
ctttttctcgagtaatggt

SEQ ID NO: 677248 - DNA, 19 bp, Mus musculus
  siRNA target sequence for Mcl1 (NM_008562.2,760-778).
cgagtaatggtccatgttt

SEQ ID NO: 677249 - DNA, 19 bp, Mus musculus
  siRNA target sequence for Mcl1 (NM_008562.2,761-779).
gagtaatggtccatgtttt

SEQ ID NO: 677250 - DNA, 19 bp, Mus musculus
  siRNA target sequence for Mcl1 (NM_008562.2,802-820).
ggcaggattgtgactctta

SEQ ID NO: 677251 - DNA, 19 bp, Mus musculus
  siRNA target sequence for Mcl1 (NM_008562.2,803-821).
gcaggattgtgactcttat

SEQ ID NO: 677252 - DNA, 19 bp, Mus musculus
  siRNA target sequence for Mcl1 (NM_008562.2,804-822).
caggattgtgactcttatt

SEQ ID NO: 677253 - DNA, 19 bp, Mus musculus
  siRNA target sequence for Mcl1 (NM_008562.2,849-867).
cttaaagagcgtaaaccaa

SEQ ID NO: 677254 - DNA, 19 bp, Mus musculus
  siRNA target sequence for Mcl1 (NM_008562.2,857-875).
gcgtaaaccaagaaagctt

SEQ ID NO: 677255 - DNA, 19 bp, Mus musculus
  siRNA target sequence for Mcl1 (NM_008562.2,873-891).
cttcatcgaaccattagca

SEQ ID NO: 677256 - DNA, 19 bp, Mus musculus
  siRNA target sequence for Mcl1 (NM_008562.2,880-898).
gaaccattagcagaaacta

SEQ ID NO: 677257 - DNA, 19 bp, Mus musculus
  siRNA target sequence for Mcl1 (NM_008562.2,883-901).
ccattagcagaaactatca

SEQ ID NO: 677258 - DNA, 19 bp, Mus musculus
  siRNA target sequence for Mcl1 (NM_008562.2,926-944).
gggactggcttgtcaaaca

SEQ ID NO: 677259 - DNA, 19 bp, Mus musculus
  siRNA target sequence for Mcl1 (NM_008562.2,927-945).
ggactggcttgtcaaacaa

SEQ ID NO: 677260 - DNA, 19 bp, Mus musculus
  siRNA target sequence for Mcl1 (NM_008562.2,988-1006).
ctagaaggcggcatcagaa

SEQ ID NO: 677261 - DNA, 19 bp, Mus musculus
  siRNA target sequence for Mcl1 (NM_008562.2,1043-1061).
gggctggtctggcatatct

SEQ ID NO: 677262 - DNA, 19 bp, Mus musculus
  siRNA target sequence for Mcl1 (NM_008562.2,1044-1062).
ggctggtctggcatatcta

SEQ ID NO: 677263 - DNA, 19 bp, Mus musculus
  siRNA target sequence for Mcl1 (NM_008562.2,1045-1063).
gctggtctggcatatctaa

SEQ ID NO: 677264 - DNA, 19 bp, Mus musculus
  siRNA target sequence for Mcl1 (NM_008562.2,1046-1064).
ctggtctggcatatctaat

SEQ ID NO: 677265 - DNA, 19 bp, Mus musculus
  siRNA target sequence for Pdcd1 (NM_008798.1,78-96).
ggtaccctggtcattcact

SEQ ID NO: 677266 - DNA, 19 bp, Mus musculus
  siRNA target sequence for Pdcd1 (NM_008798.1,79-97).
gtaccctggtcattcactt

SEQ ID NO: 677267 - DNA, 19 bp, Mus musculus
  siRNA target sequence for Pdcd1 (NM_008798.1,239-257).
ggtcggaggatcttatgct

SEQ ID NO: 677268 - DNA, 19 bp, Mus musculus
  siRNA target sequence for Pdcd1 (NM_008798.1,281-299).
gcaaccagactgaaaaaca

SEQ ID NO: 677269 - DNA, 19 bp, Mus musculus
  siRNA target sequence for Pdcd1 (NM_008798.1,371-389).
ggcatgacttccacatgaa

SEQ ID NO: 677270 - DNA, 19 bp, Mus musculus
  siRNA target sequence for Pdcd1 (NM_008798.1,397-415).
gacacacggcgcaatgaca

SEQ ID NO: 677271 - DNA, 19 bp, Mus musculus
  siRNA target sequence for Pdcd1 (NM_008798.1,482-500).
cagagctcgtggtaacaga

SEQ ID NO: 677272 - DNA, 19 bp, Mus musculus
  siRNA target sequence for Pdcd1 (NM_008798.1,507-525).
cctggagacctcaacaaga

SEQ ID NO: 677273 - DNA, 19 bp, Mus musculus
  siRNA target sequence for Pdcd1 (NM_008798.1,508-526).
ctggagacctcaacaagat

SEQ ID NO: 677274 - DNA, 19 bp, Mus musculus
  siRNA target sequence for Pdcd1 (NM_008798.1,510-528).
ggagacctcaacaagatat

SEQ ID NO: 677275 - DNA, 19 bp, Mus musculus
  siRNA target sequence for Pdcd5 (NM_019746.2,205-223).
cagcccaacaggaagcaaa

SEQ ID NO: 677276 - DNA, 19 bp, Mus musculus
  siRNA target sequence for Pdcd5 (NM_019746.2,237-255).
gaaatgagaaacagtatct

SEQ ID NO: 677277 - DNA, 19 bp, Mus musculus
  siRNA target sequence for Pdcd5 (NM_019746.2,250-268).
gtatcttagcccaagttct

SEQ ID NO: 677278 - DNA, 19 bp, Mus musculus
  siRNA target sequence for Pdcd5 (NM_019746.2,284-302).
ggccagattaagtaactta

SEQ ID NO: 677279 - DNA, 19 bp, Mus musculus
  siRNA target sequence for Pdcd5 (NM_019746.2,486-504).
gaagacgacgccgattact

SEQ ID NO: 677280 - DNA, 19 bp, Mus musculus
  siRNA target sequence for Pdcd6ip (NM_011052.1,200-218).
cgttgctgaggtattatga

SEQ ID NO: 677281 - DNA, 19 bp, Mus musculus
  siRNA target sequence for Pdcd6ip (NM_011052.1,239-257).
ccaagttcccattttctga

SEQ ID NO: 677282 - DNA, 19 bp, Mus musculus
  siRNA target sequence for Pdcd6ip (NM_011052.1,289-307).
gatgcttttgataaaggtt

SEQ ID NO: 677283 - DNA, 19 bp, Mus musculus
  siRNA target sequence for Pdcd6ip (NM_011052.1,310-328).
ctttttggagggtctgtaa

SEQ ID NO: 677284 - DNA, 19 bp, Mus musculus
  siRNA target sequence for Pdcd6ip (NM_011052.1,334-352).
gctcttgcaagcttaggat

SEQ ID NO: 677285 - DNA, 19 bp, Mus musculus
  siRNA target sequence for Pdcd6ip (NM_011052.1,340-358).
gcaagcttaggatatgaaa

SEQ ID NO: 677286 - DNA, 19 bp, Mus musculus
  siRNA target sequence for Pdcd6ip (NM_011052.1,467-485).
ctagtggtgcctttttaca

SEQ ID NO: 677287 - DNA, 19 bp, Mus musculus
  siRNA target sequence for Pdcd6ip (NM_011052.1,522-540).
gcctactgtggacatatct

SEQ ID NO: 677288 - DNA, 19 bp, Mus musculus
  siRNA target sequence for Pdcd6ip (NM_011052.1,531-549).
ggacatatctccagatact

SEQ ID NO: 677289 - DNA, 19 bp, Mus musculus
  siRNA target sequence for Pdcd6ip (NM_011052.1,550-568).
gttggaactctcagtctta

SEQ ID NO: 677290 - DNA, 19 bp, Mus musculus
  siRNA target sequence for Pdcd6ip (NM_011052.1,553-571).
ggaactctcagtcttatta

SEQ ID NO: 677291 - DNA, 19 bp, Mus musculus
  siRNA target sequence for Pdcd6ip (NM_011052.1,554-572).
gaactctcagtcttattat

SEQ ID NO: 677292 - DNA, 19 bp, Mus musculus
  siRNA target sequence for Pdcd6ip (NM_011052.1,577-595).
gctcaagctcaagaagtat

SEQ ID NO: 677293 - DNA, 19 bp, Mus musculus
  siRNA target sequence for Pdcd6ip (NM_011052.1,578-596).
ctcaagctcaagaagtatt

SEQ ID NO: 677294 - DNA, 19 bp, Mus musculus
  siRNA target sequence for Pdcd6ip (NM_011052.1,607-625).
gccacaagagataagatga

SEQ ID NO: 677295 - DNA, 19 bp, Mus musculus
  siRNA target sequence for Pdcd6ip (NM_011052.1,707-725).
cgctccccaaggaggtatt

SEQ ID NO: 677296 - DNA, 19 bp, Mus musculus
  siRNA target sequence for Pdcd6ip (NM_011052.1,863-881).
cctctcgctatgatgagta

SEQ ID NO: 677297 - DNA, 19 bp, Mus musculus
  siRNA target sequence for Pdcd6ip (NM_011052.1,864-882).
ctctcgctatgatgagtat

SEQ ID NO: 677298 - DNA, 19 bp, Mus musculus
  siRNA target sequence for Pdcd6ip (NM_011052.1,868-886).
cgctatgatgagtatgtca

SEQ ID NO: 677299 - DNA, 19 bp, Mus musculus
  siRNA target sequence for Pdcd6ip (NM_011052.1,869-887).
gctatgatgagtatgtcaa

SEQ ID NO: 677300 - DNA, 19 bp, Mus musculus
  siRNA target sequence for Pdcd6ip (NM_011052.1,965-983).
gtgttccggaccttaagga

SEQ ID NO: 677301 - DNA, 19 bp, Mus musculus
  siRNA target sequence for Pdcd6ip (NM_011052.1,998-1016).
gcaaagccacacttgtgaa

SEQ ID NO: 677302 - DNA, 19 bp, Mus musculus
  siRNA target sequence for Pdcd6ip (NM_011052.1,1055-1073).
cggatttgtttgagaagat

SEQ ID NO: 677303 - DNA, 19 bp, Mus musculus
  siRNA target sequence for Pdcd6ip (NM_011052.1,1093-1111).
cagtccctggctgtgttta

SEQ ID NO: 677304 - DNA, 19 bp, Mus musculus
  siRNA target sequence for Pdcd6ip (NM_011052.1,1095-1113).
gtccctggctgtgtttagt

SEQ ID NO: 677305 - DNA, 19 bp, Mus musculus
  siRNA target sequence for Pdcd6ip (NM_011052.1,1123-1141).
gctgacttggtcaacagat

SEQ ID NO: 677306 - DNA, 19 bp, Mus musculus
  siRNA target sequence for Pdcd6ip (NM_011052.1,1126-1144).
gacttggtcaacagatcaa

SEQ ID NO: 677307 - DNA, 19 bp, Mus musculus
  siRNA target sequence for Pdcd6ip (NM_011052.1,1233-1251).
cactgtacctcagtctata

SEQ ID NO: 677308 - DNA, 19 bp, Mus musculus
  siRNA target sequence for Pdcd6ip (NM_011052.1,1237-1255).
gtacctcagtctatactta

SEQ ID NO: 677309 - DNA, 19 bp, Mus musculus
  siRNA target sequence for Pdcd6ip (NM_011052.1,1241-1259).
ctcagtctatacttaccaa

SEQ ID NO: 677310 - DNA, 19 bp, Mus musculus
  siRNA target sequence for Pdcd6ip (NM_011052.1,1257-1275).
caagtctacatctgtagtt

SEQ ID NO: 677311 - DNA, 19 bp, Mus musculus
  siRNA target sequence for Pdcd6ip (NM_011052.1,1260-1278).
gtctacatctgtagttgaa

SEQ ID NO: 677312 - DNA, 19 bp, Mus musculus
  siRNA target sequence for Pdcd6ip (NM_011052.1,1262-1280).
ctacatctgtagttgaaca

SEQ ID NO: 677313 - DNA, 19 bp, Mus musculus
  siRNA target sequence for Pdcd6ip (NM_011052.1,1295-1313).
ctgtcgaccagctgataaa

SEQ ID NO: 677314 - DNA, 19 bp, Mus musculus
  siRNA target sequence for Pdcd6ip (NM_011052.1,1354-1372).
gaggagtcgctaagattgt

SEQ ID NO: 677315 - DNA, 19 bp, Mus musculus
  siRNA target sequence for Pdcd6ip (NM_011052.1,1395-1413).
caatgatttaagagcaaaa

SEQ ID NO: 677316 - DNA, 19 bp, Mus musculus
  siRNA target sequence for Pdcd6ip (NM_011052.1,1428-1446).
gcaaaggactccatccaat

SEQ ID NO: 677317 - DNA, 19 bp, Mus musculus
  siRNA target sequence for Pdcd6ip (NM_011052.1,1449-1467).
cctgtacaagcctttacga

SEQ ID NO: 677318 - DNA, 19 bp, Mus musculus
  siRNA target sequence for Pdcd6ip (NM_011052.1,1479-1497).
caaattcagagccgtttta

SEQ ID NO: 677319 - DNA, 19 bp, Mus musculus
  siRNA target sequence for Pdcd6ip (NM_011052.1,1485-1503).
cagagccgttttagataaa

SEQ ID NO: 677320 - DNA, 19 bp, Mus musculus
  siRNA target sequence for Pdcd6ip (NM_011052.1,1632-1650).
gggcagcgaggttgtaagt

SEQ ID NO: 677321 - DNA, 19 bp, Mus musculus
  siRNA target sequence for Pdcd6ip (NM_011052.1,1642-1660).
gttgtaagtgtcttaaagt

SEQ ID NO: 677322 - DNA, 19 bp, Mus musculus
  siRNA target sequence for Pdcd6ip (NM_011052.1,1649-1667).
gtgtcttaaagtccttatt

SEQ ID NO: 677323 - DNA, 19 bp, Mus musculus
  siRNA target sequence for Pdcd6ip (NM_011052.1,1651-1669).
gtcttaaagtccttattat

SEQ ID NO: 677324 - DNA, 19 bp, Mus musculus
  siRNA target sequence for Pdcd6ip (NM_011052.1,1653-1671).
cttaaagtccttattatca

SEQ ID NO: 677325 - DNA, 19 bp, Mus musculus
  siRNA target sequence for Pdcd6ip (NM_011052.1,1659-1677).
gtccttattatcaaatctt

SEQ ID NO: 677326 - DNA, 19 bp, Mus musculus
  siRNA target sequence for Pdcd6ip (NM_011052.1,1662-1680).
cttattatcaaatcttgat

SEQ ID NO: 677327 - DNA, 19 bp, Mus musculus
  siRNA target sequence for Pdcd6ip (NM_011052.1,1765-1783).
gcccaagatggcgtgataa

SEQ ID NO: 677328 - DNA, 19 bp, Mus musculus
  siRNA target sequence for Pdcd6ip (NM_011052.1,1766-1784).
cccaagatggcgtgataaa

SEQ ID NO: 677329 - DNA, 19 bp, Mus musculus
  siRNA target sequence for Pdcd6ip (NM_011052.1,1767-1785).
ccaagatggcgtgataaat

SEQ ID NO: 677330 - DNA, 19 bp, Mus musculus
  siRNA target sequence for Pdcd6ip (NM_011052.1,1818-1836).
gatctatggcggtctaaca

SEQ ID NO: 677331 - DNA, 19 bp, Mus musculus
  siRNA target sequence for Pdcd6ip (NM_011052.1,1826-1844).
gcggtctaacaagtaaagt

SEQ ID NO: 677332 - DNA, 19 bp, Mus musculus
  siRNA target sequence for Pdcd6ip (NM_011052.1,1869-1887).
gggacttctaaaaaatata

SEQ ID NO: 677333 - DNA, 19 bp, Mus musculus
  siRNA target sequence for Pdcd6ip (NM_011052.1,1897-1915).
caccaagaattctccaaaa

SEQ ID NO: 677334 - DNA, 19 bp, Mus musculus
  siRNA target sequence for Pdcd6ip (NM_011052.1,1925-1943).
ctaacaacgaggctaactt

SEQ ID NO: 677335 - DNA, 19 bp, Mus musculus
  siRNA target sequence for Pdcd6ip (NM_011052.1,1973-1991).
ctgcgtatgacaactttgt

SEQ ID NO: 677336 - DNA, 19 bp, Mus musculus
  siRNA target sequence for Pdcd6ip (NM_011052.1,1976-1994).
cgtatgacaactttgttga

SEQ ID NO: 677337 - DNA, 19 bp, Mus musculus
  siRNA target sequence for Pdcd6ip (NM_011052.1,1993-2011).
gagcttgtagctaacttga

SEQ ID NO: 677338 - DNA, 19 bp, Mus musculus
  siRNA target sequence for Pdcd6ip (NM_011052.1,2018-2036).
gcacaaagttttacaatga

SEQ ID NO: 677339 - DNA, 19 bp, Mus musculus
  siRNA target sequence for Pdcd6ip (NM_011052.1,2052-2070).
ggtcaggttccagaacaaa

SEQ ID NO: 677340 - DNA, 19 bp, Mus musculus
  siRNA target sequence for Pdcd6ip (NM_011052.1,2053-2071).
gtcaggttccagaacaaat

SEQ ID NO: 677341 - DNA, 19 bp, Mus musculus
  siRNA target sequence for Pdcd6ip (NM_011052.1,2475-2493).
cgcatatggccagtacaat

SEQ ID NO: 677342 - DNA, 19 bp, Mus musculus
  siRNA target sequence for Pdcd6ip (NM_011052.1,2476-2494).
gcatatggccagtacaata

SEQ ID NO: 677343 - DNA, 19 bp, Mus musculus
  siRNA target sequence for Pdcd6ip (NM_011052.1,2477-2495).
catatggccagtacaatat

SEQ ID NO: 677344 - DNA, 19 bp, Mus musculus
  siRNA target sequence for Pdcd7 (NM_016688.1,963-981).
ggggtcttagctgaagtaa

SEQ ID NO: 677345 - DNA, 19 bp, Mus musculus
  siRNA target sequence for Pdcd7 (NM_016688.1,968-986).
cttagctgaagtaaggaaa

SEQ ID NO: 677346 - DNA, 19 bp, Mus musculus
  siRNA target sequence for Pdcd7 (NM_016688.1,1013-1031).
ggacattctgcgtgcttta

SEQ ID NO: 677347 - DNA, 19 bp, Mus musculus
  siRNA target sequence for Pdcd7 (NM_016688.1,1090-1108).
cttcagcggatgagacttt

SEQ ID NO: 677348 - DNA, 19 bp, Mus musculus
  siRNA target sequence for Pdcd7 (NM_016688.1,1105-1123).
ctttcgagcaccatcttca

SEQ ID NO: 677349 - DNA, 19 bp, Mus musculus
  siRNA target sequence for Pdcd7 (NM_016688.1,1125-1143).
cggctgagaaagctcatta

SEQ ID NO: 677350 - DNA, 19 bp, Mus musculus
  siRNA target sequence for Pdcd7 (NM_016688.1,1342-1360).
cattccggcagtattacct

SEQ ID NO: 677351 - DNA, 19 bp, Mus musculus
  siRNA target sequence for Pdcd7 (NM_016688.1,1399-1417).
ggcatgattgggatcagta

SEQ ID NO: 677352 - DNA, 19 bp, Mus musculus
  siRNA target sequence for Pdcd7 (NM_016688.1,1415-1433).
gtacctggtaccatctgat

SEQ ID NO: 677353 - DNA, 19 bp, Mus musculus
  siRNA target sequence for Pdcd7 (NM_016688.1,1418-1436).
cctggtaccatctgatcat

SEQ ID NO: 677354 - DNA, 19 bp, Mus musculus
  siRNA target sequence for Rb1cc1 (NM_009826.3,479-497).
ccggaaccacgctgacatt

SEQ ID NO: 677355 - DNA, 19 bp, Mus musculus
  siRNA target sequence for Rb1cc1 (NM_009826.3,480-498).
cggaaccacgctgacattt

SEQ ID NO: 677356 - DNA, 19 bp, Mus musculus
  siRNA target sequence for Rb1cc1 (NM_009826.3,482-500).
gaaccacgctgacatttga

SEQ ID NO: 677357 - DNA, 19 bp, Mus musculus
  siRNA target sequence for Rb1cc1 (NM_009826.3,516-534).
gcaaactgtggctgatctt

SEQ ID NO: 677358 - DNA, 19 bp, Mus musculus
  siRNA target sequence for Rb1cc1 (NM_009826.3,517-535).
caaactgtggctgatctta

SEQ ID NO: 677359 - DNA, 19 bp, Mus musculus
  siRNA target sequence for Rb1cc1 (NM_009826.3,538-556).
catgccattcaaagcaaat

SEQ ID NO: 677360 - DNA, 19 bp, Mus musculus
  siRNA target sequence for Rb1cc1 (NM_009826.3,541-559).
gccattcaaagcaaataca

SEQ ID NO: 677361 - DNA, 19 bp, Mus musculus
  siRNA target sequence for Rb1cc1 (NM_009826.3,638-656).
gcgctgggacggacacaaa

SEQ ID NO: 677362 - DNA, 19 bp, Mus musculus
  siRNA target sequence for Rb1cc1 (NM_009826.3,645-663).
gacggacacaaatccaatt

SEQ ID NO: 677363 - DNA, 19 bp, Mus musculus
  siRNA target sequence for Rb1cc1 (NM_009826.3,647-665).
cggacacaaatccaatttt

SEQ ID NO: 677364 - DNA, 19 bp, Mus musculus
  siRNA target sequence for Rb1cc1 (NM_009826.3,648-666).
ggacacaaatccaattttt

SEQ ID NO: 677365 - DNA, 19 bp, Mus musculus
  siRNA target sequence for Rb1cc1 (NM_009826.3,696-714).
ccgtgcacctgctattcct

SEQ ID NO: 677366 - DNA, 19 bp, Mus musculus
  siRNA target sequence for Rb1cc1 (NM_009826.3,697-715).
cgtgcacctgctattccta

SEQ ID NO: 677367 - DNA, 19 bp, Mus musculus
  siRNA target sequence for Rb1cc1 (NM_009826.3,698-716).
gtgcacctgctattcctaa

SEQ ID NO: 677368 - DNA, 19 bp, Mus musculus
  siRNA target sequence for Rb1cc1 (NM_009826.3,719-737).
ctaccttttcaacagaaaa

SEQ ID NO: 677369 - DNA, 19 bp, Mus musculus
  siRNA target sequence for Rb1cc1 (NM_009826.3,806-824).
cacagcttgcagtggaaat

SEQ ID NO: 677370 - DNA, 19 bp, Mus musculus
  siRNA target sequence for Rb1cc1 (NM_009826.3,864-882).
gcttgtccatgatgaacat

SEQ ID NO: 677371 - DNA, 19 bp, Mus musculus
  siRNA target sequence for Rb1cc1 (NM_009826.3,932-950).
caaattcataccaaaaact

SEQ ID NO: 677372 - DNA, 19 bp, Mus musculus
  siRNA target sequence for Rb1cc1 (NM_009826.3,1027-1045).
ggaactgctgtttcagtaa

SEQ ID NO: 677373 - DNA, 19 bp, Mus musculus
  siRNA target sequence for Rb1cc1 (NM_009826.3,1028-1046).
gaactgctgtttcagtaat

SEQ ID NO: 677374 - DNA, 19 bp, Mus musculus
  siRNA target sequence for Rb1cc1 (NM_009826.3,1066-1084).
gagtgcctaaccagacata

SEQ ID NO: 677375 - DNA, 19 bp, Mus musculus
  siRNA target sequence for Rb1cc1 (NM_009826.3,1068-1086).
gtgcctaaccagacatagt

SEQ ID NO: 677376 - DNA, 19 bp, Mus musculus
  siRNA target sequence for Rb1cc1 (NM_009826.3,1070-1088).
gcctaaccagacatagtta

SEQ ID NO: 677377 - DNA, 19 bp, Mus musculus
  siRNA target sequence for Rb1cc1 (NM_009826.3,1072-1090).
ctaaccagacatagttaca

SEQ ID NO: 677378 - DNA, 19 bp, Mus musculus
  siRNA target sequence for Rb1cc1 (NM_009826.3,1081-1099).
catagttacagggaatgtt

SEQ ID NO: 677379 - DNA, 19 bp, Mus musculus
  siRNA target sequence for Rb1cc1 (NM_009826.3,1106-1124).
gaccggattctttgaatga

SEQ ID NO: 677380 - DNA, 19 bp, Mus musculus
  siRNA target sequence for Rb1cc1 (NM_009826.3,1110-1128).
ggattctttgaatgaacat

SEQ ID NO: 677381 - DNA, 19 bp, Mus musculus
  siRNA target sequence for Rb1cc1 (NM_009826.3,1371-1389).
gttagactggataaatgtt

SEQ ID NO: 677382 - DNA, 19 bp, Mus musculus
  siRNA target sequence for Rb1cc1 (NM_009826.3,1377-1395).
ctggataaatgttcaagat

SEQ ID NO: 677383 - DNA, 19 bp, Mus musculus
  siRNA target sequence for Rb1cc1 (NM_009826.3,1380-1398).
gataaatgttcaagataga

SEQ ID NO: 677384 - DNA, 19 bp, Mus musculus
  siRNA target sequence for Rb1cc1 (NM_009826.3,1419-1437).
ggtcaggaagtgctttgat

SEQ ID NO: 677385 - DNA, 19 bp, Mus musculus
  siRNA target sequence for Rb1cc1 (NM_009826.3,1424-1442).
ggaagtgctttgattctat

SEQ ID NO: 677386 - DNA, 19 bp, Mus musculus
  siRNA target sequence for Rb1cc1 (NM_009826.3,1445-1463).
gcaggcttgacccaaagat

SEQ ID NO: 677387 - DNA, 19 bp, Mus musculus
  siRNA target sequence for Rb1cc1 (NM_009826.3,1457-1475).
caaagattattcaaccatt

SEQ ID NO: 677388 - DNA, 19 bp, Mus musculus
  siRNA target sequence for Rb1cc1 (NM_009826.3,1479-1497).
gttagaatgccatcaaact

SEQ ID NO: 677389 - DNA, 19 bp, Mus musculus
  siRNA target sequence for Rb1cc1 (NM_009826.3,1502-1520).
ccaaacttgataatcagaa

SEQ ID NO: 677390 - DNA, 19 bp, Mus musculus
  siRNA target sequence for Rb1cc1 (NM_009826.3,1503-1521).
caaacttgataatcagaat

SEQ ID NO: 677391 - DNA, 19 bp, Mus musculus
  siRNA target sequence for Rb1cc1 (NM_009826.3,1580-1598).
gctgtagccggctggtaaa

SEQ ID NO: 677392 - DNA, 19 bp, Mus musculus
  siRNA target sequence for Rb1cc1 (NM_009826.3,1581-1599).
ctgtagccggctggtaaat

SEQ ID NO: 677393 - DNA, 19 bp, Mus musculus
  siRNA target sequence for Rb1cc1 (NM_009826.3,1586-1604).
gccggctggtaaatgaaca

SEQ ID NO: 677394 - DNA, 19 bp, Mus musculus
  siRNA target sequence for Rb1cc1 (NM_009826.3,1615-1633).
gctcagggatttttagcta

SEQ ID NO: 677395 - DNA, 19 bp, Mus musculus
  siRNA target sequence for Rb1cc1 (NM_009826.3,1616-1634).
ctcagggatttttagctaa

SEQ ID NO: 677396 - DNA, 19 bp, Mus musculus
  siRNA target sequence for Rb1cc1 (NM_009826.3,1621-1639).
ggatttttagctaatcaga

SEQ ID NO: 677397 - DNA, 19 bp, Mus musculus
  siRNA target sequence for Rb1cc1 (NM_009826.3,1689-1707).
gagtcatgcaaatcaacta

SEQ ID NO: 677398 - DNA, 19 bp, Mus musculus
  siRNA target sequence for Rb1cc1 (NM_009826.3,1693-1711).
catgcaaatcaactaatga

SEQ ID NO: 677399 - DNA, 19 bp, Mus musculus
  siRNA target sequence for Rb1cc1 (NM_009826.3,1696-1714).
gcaaatcaactaatgatta

SEQ ID NO: 677400 - DNA, 19 bp, Mus musculus
  siRNA target sequence for Rb1cc1 (NM_009826.3,1730-1748).
gaaaactgttggatattaa

SEQ ID NO: 677401 - DNA, 19 bp, Mus musculus
  siRNA target sequence for Rb1cc1 (NM_009826.3,1735-1753).
ctgttggatattaaacaga

SEQ ID NO: 677402 - DNA, 19 bp, Mus musculus
  siRNA target sequence for Rb1cc1 (NM_009826.3,1755-1773).
gtgcaccactgccaaacaa

SEQ ID NO: 677403 - DNA, 19 bp, Mus musculus
  siRNA target sequence for Rb1cc1 (NM_009826.3,1799-1817).
gactgaagtggtgttgttt

SEQ ID NO: 677404 - DNA, 19 bp, Mus musculus
  siRNA target sequence for Rb1cc1 (NM_009826.3,1859-1877).
cactgctccgccttgtaat

SEQ ID NO: 677405 - DNA, 19 bp, Mus musculus
  siRNA target sequence for Rb1cc1 (NM_009826.3,1873-1891).
gtaatagagctgttagaaa

SEQ ID NO: 677406 - DNA, 19 bp, Mus musculus
  siRNA target sequence for Rb1cc1 (NM_009826.3,1916-1934).
gtacagttcctcagatgta

SEQ ID NO: 677407 - DNA, 19 bp, Mus musculus
  siRNA target sequence for Rb1cc1 (NM_009826.3,2016-2034).
cggaaaacaactatatgaa

SEQ ID NO: 677408 - DNA, 19 bp, Mus musculus
  siRNA target sequence for Rb1cc1 (NM_009826.3,2138-2156).
ctcagaagcctcgaaaatt

SEQ ID NO: 677409 - DNA, 19 bp, Mus musculus
  siRNA target sequence for Rb1cc1 (NM_009826.3,2164-2182).
gaacttccagatatatcat

SEQ ID NO: 677410 - DNA, 19 bp, Mus musculus
  siRNA target sequence for Rb1cc1 (NM_009826.3,2267-2285).
ctctacaccagcatgtact

SEQ ID NO: 677411 - DNA, 19 bp, Mus musculus
  siRNA target sequence for Rb1cc1 (NM_009826.3,2281-2299).
gtacttgccctacataatt

SEQ ID NO: 677412 - DNA, 19 bp, Mus musculus
  siRNA target sequence for Rb1cc1 (NM_009826.3,2287-2305).
gccctacataatttggtaa

SEQ ID NO: 677413 - DNA, 19 bp, Mus musculus
  siRNA target sequence for Rb1cc1 (NM_009826.3,2288-2306).
ccctacataatttggtaaa

SEQ ID NO: 677414 - DNA, 19 bp, Mus musculus
  siRNA target sequence for Rb1cc1 (NM_009826.3,2302-2320).
gtaaaagcagcacaaagtt

SEQ ID NO: 677415 - DNA, 19 bp, Mus musculus
  siRNA target sequence for Rb1cc1 (NM_009826.3,2339-2357).
ctattacagatctcctaaa

SEQ ID NO: 677416 - DNA, 19 bp, Mus musculus
  siRNA target sequence for Rb1cc1 (NM_009826.3,2347-2365).
gatctcctaaatgaacaaa

SEQ ID NO: 677417 - DNA, 19 bp, Mus musculus
  siRNA target sequence for Rb1cc1 (NM_009826.3,2399-2417).
ctgcttctccaagaataga

SEQ ID NO: 677418 - DNA, 19 bp, Mus musculus
  siRNA target sequence for Rb1cc1 (NM_009826.3,2493-2511).
ggcagtgtgtcccttagaa

SEQ ID NO: 677419 - DNA, 19 bp, Mus musculus
  siRNA target sequence for Rb1cc1 (NM_009826.3,2495-2513).
cagtgtgtcccttagaaga

SEQ ID NO: 677420 - DNA, 19 bp, Mus musculus
  siRNA target sequence for Rb1cc1 (NM_009826.3,2499-2517).
gtgtcccttagaagaatta

SEQ ID NO: 677421 - DNA, 19 bp, Mus musculus
  siRNA target sequence for Rb1cc1 (NM_009826.3,2528-2546).
gtatcgatgctcatacatt

SEQ ID NO: 677422 - DNA, 19 bp, Mus musculus
  siRNA target sequence for Rb1cc1 (NM_009826.3,2532-2550).
cgatgctcatacatttgat

SEQ ID NO: 677423 - DNA, 19 bp, Mus musculus
  siRNA target sequence for Rb1cc1 (NM_009826.3,2537-2555).
ctcatacatttgatttcga

SEQ ID NO: 677424 - DNA, 19 bp, Mus musculus
  siRNA target sequence for Rb1cc1 (NM_009826.3,2596-2614).
gcttctatagacttggatt

SEQ ID NO: 677425 - DNA, 19 bp, Mus musculus
  siRNA target sequence for Rb1cc1 (NM_009826.3,2600-2618).
ctatagacttggattcatt

SEQ ID NO: 677426 - DNA, 19 bp, Mus musculus
  siRNA target sequence for Rb1cc1 (NM_009826.3,2627-2645).
gccctgagtctgactttat

SEQ ID NO: 677427 - DNA, 19 bp, Mus musculus
  siRNA target sequence for Rb1cc1 (NM_009826.3,2685-2703).
gtctccaaaccctataagt

SEQ ID NO: 677428 - DNA, 19 bp, Mus musculus
  siRNA target sequence for Rb1cc1 (NM_009826.3,2687-2705).
ctccaaaccctataagtga

SEQ ID NO: 677429 - DNA, 19 bp, Mus musculus
  siRNA target sequence for Rb1cc1 (NM_009826.3,2727-2745).
ggtggagtcactttactct

SEQ ID NO: 677430 - DNA, 19 bp, Mus musculus
  siRNA target sequence for Rb1cc1 (NM_009826.3,2747-2765).
cagtcatcaatgcaataga

SEQ ID NO: 677431 - DNA, 19 bp, Mus musculus
  siRNA target sequence for Rb1cc1 (NM_009826.3,2773-2791).
cgtatgcaagacacaagta

SEQ ID NO: 677432 - DNA, 19 bp, Mus musculus
  siRNA target sequence for Rb1cc1 (NM_009826.3,2814-2832).
ggatcgggctgctctacat

SEQ ID NO: 677433 - DNA, 19 bp, Mus musculus
  siRNA target sequence for Rb1cc1 (NM_009826.3,2896-2914).
gacgatctgtgccatttca

SEQ ID NO: 677434 - DNA, 19 bp, Mus musculus
  siRNA target sequence for Rb1cc1 (NM_009826.3,2898-2916).
cgatctgtgccatttcaga

SEQ ID NO: 677435 - DNA, 19 bp, Mus musculus
  siRNA target sequence for Rb1cc1 (NM_009826.3,2899-2917).
gatctgtgccatttcagaa

SEQ ID NO: 677436 - DNA, 19 bp, Mus musculus
  siRNA target sequence for Rb1cc1 (NM_009826.3,2939-2957).
gtgacttagcaaattattt

SEQ ID NO: 677437 - DNA, 19 bp, Mus musculus
  siRNA target sequence for Rb1cc1 (NM_009826.3,2941-2959).
gacttagcaaattatttaa

SEQ ID NO: 677438 - DNA, 19 bp, Mus musculus
  siRNA target sequence for Rb1cc1 (NM_009826.3,3082-3100).
gatgctctagtaaaagaca

SEQ ID NO: 677439 - DNA, 19 bp, Mus musculus
  siRNA target sequence for Rb1cc1 (NM_009826.3,3149-3167).
cccttgaagaggctttaca

SEQ ID NO: 677440 - DNA, 19 bp, Mus musculus
  siRNA target sequence for Rb1cc1 (NM_009826.3,3151-3169).
cttgaagaggctttacaaa

SEQ ID NO: 677441 - DNA, 19 bp, Mus musculus
  siRNA target sequence for Rb1cc1 (NM_009826.3,3186-3204).
cacttcgattaaacatgaa

SEQ ID NO: 677442 - DNA, 19 bp, Mus musculus
  siRNA target sequence for Rb1cc1 (NM_009826.3,3188-3206).
cttcgattaaacatgaaaa

SEQ ID NO: 677443 - DNA, 19 bp, Mus musculus
  siRNA target sequence for Rb1cc1 (NM_009826.3,3192-3210).
gattaaacatgaaaaggat

SEQ ID NO: 677444 - DNA, 19 bp, Mus musculus
  siRNA target sequence for Rb1cc1 (NM_009826.3,3349-3367).
gaaaaaatcgagtcattga

SEQ ID NO: 677445 - DNA, 19 bp, Mus musculus
  siRNA target sequence for Rb1cc1 (NM_009826.3,3360-3378).
gtcattgagagctgaattt

SEQ ID NO: 677446 - DNA, 19 bp, Mus musculus
  siRNA target sequence for Rb1cc1 (NM_009826.3,3362-3380).
cattgagagctgaatttca

SEQ ID NO: 677447 - DNA, 19 bp, Mus musculus
  siRNA target sequence for Rb1cc1 (NM_009826.3,3431-3449).
ggcacacacaggagtttga

SEQ ID NO: 677448 - DNA, 19 bp, Mus musculus
  siRNA target sequence for Rb1cc1 (NM_009826.3,3433-3451).
cacacacaggagtttgaga

SEQ ID NO: 677449 - DNA, 19 bp, Mus musculus
  siRNA target sequence for Rb1cc1 (NM_009826.3,3439-3457).
caggagtttgagaaagtta

SEQ ID NO: 677450 - DNA, 19 bp, Mus musculus
  siRNA target sequence for Rb1cc1 (NM_009826.3,3454-3472).
gttatgacagaccacaata

SEQ ID NO: 677451 - DNA, 19 bp, Mus musculus
  siRNA target sequence for Rb1cc1 (NM_009826.3,3459-3477).
gacagaccacaatatgtct

SEQ ID NO: 677452 - DNA, 19 bp, Mus musculus
  siRNA target sequence for Rb1cc1 (NM_009826.3,3516-3534).
ccagatgctagaatctcat

SEQ ID NO: 677453 - DNA, 19 bp, Mus musculus
  siRNA target sequence for Rb1cc1 (NM_009826.3,3526-3544).
gaatctcatgcctcaacta

SEQ ID NO: 677454 - DNA, 19 bp, Mus musculus
  siRNA target sequence for Rb1cc1 (NM_009826.3,3570-3588).
ggagttgaaactcaaagtt

SEQ ID NO: 677455 - DNA, 19 bp, Mus musculus
  siRNA target sequence for Rb1cc1 (NM_009826.3,3571-3589).
gagttgaaactcaaagttt

SEQ ID NO: 677456 - DNA, 19 bp, Mus musculus
  siRNA target sequence for Rb1cc1 (NM_009826.3,3702-3720).
gctgaagtctttacttgaa

SEQ ID NO: 677457 - DNA, 19 bp, Mus musculus
  siRNA target sequence for Rb1cc1 (NM_009826.3,3705-3723).
gaagtctttacttgaacaa

SEQ ID NO: 677458 - DNA, 19 bp, Mus musculus
  siRNA target sequence for Rb1cc1 (NM_009826.3,3718-3736).
gaacaagagaccgaaaact

SEQ ID NO: 677459 - DNA, 19 bp, Mus musculus
  siRNA target sequence for Rb1cc1 (NM_009826.3,3721-3739).
caagagaccgaaaacttaa

SEQ ID NO: 677460 - DNA, 19 bp, Mus musculus
  siRNA target sequence for Rb1cc1 (NM_009826.3,3752-3770).
gtaaactaaaccaaaaaat

SEQ ID NO: 677461 - DNA, 19 bp, Mus musculus
  siRNA target sequence for Rb1cc1 (NM_009826.3,3796-3814).
gtgggtttgtcagagttaa

SEQ ID NO: 677462 - DNA, 19 bp, Mus musculus
  siRNA target sequence for Rb1cc1 (NM_009826.3,3806-3824).
cagagttaagagctttaat

SEQ ID NO: 677463 - DNA, 19 bp, Mus musculus
  siRNA target sequence for Rb1cc1 (NM_009826.3,3855-3873).
gttaatcagtagacatgaa

SEQ ID NO: 677464 - DNA, 19 bp, Mus musculus
  siRNA target sequence for Rb1cc1 (NM_009826.3,3866-3884).
gacatgaagaagaatctaa

SEQ ID NO: 677465 - DNA, 19 bp, Mus musculus
  siRNA target sequence for Rb1cc1 (NM_009826.3,3868-3886).
catgaagaagaatctaata

SEQ ID NO: 677466 - DNA, 19 bp, Mus musculus
  siRNA target sequence for Rb1cc1 (NM_009826.3,3889-3907).
cttaaggctgaattagaca

SEQ ID NO: 677467 - DNA, 19 bp, Mus musculus
  siRNA target sequence for Rb1cc1 (NM_009826.3,3894-3912).
ggctgaattagacaatgtt

SEQ ID NO: 677468 - DNA, 19 bp, Mus musculus
  siRNA target sequence for Rb1cc1 (NM_009826.3,3917-3935).
ctttgcatcgccaagcata

SEQ ID NO: 677469 - DNA, 19 bp, Mus musculus
  siRNA target sequence for Rb1cc1 (NM_009826.3,3926-3944).
gccaagcatatgaaataga

SEQ ID NO: 677470 - DNA, 19 bp, Mus musculus
  siRNA target sequence for Rb1cc1 (NM_009826.3,3994-4012).
gaattgagtgctcttgaaa

SEQ ID NO: 677471 - DNA, 19 bp, Mus musculus
  siRNA target sequence for Rb1cc1 (NM_009826.3,4034-4052).
cccaacaagaagagaagta

SEQ ID NO: 677472 - DNA, 19 bp, Mus musculus
  siRNA target sequence for Rb1cc1 (NM_009826.3,4110-4128).
gcaagacaaagaacactta

SEQ ID NO: 677473 - DNA, 19 bp, Mus musculus
  siRNA target sequence for Rb1cc1 (NM_009826.3,4125-4143).
cttaattcaggagcttaat

SEQ ID NO: 677474 - DNA, 19 bp, Mus musculus
  siRNA target sequence for Rb1cc1 (NM_009826.3,4132-4150).
caggagcttaattttgaaa

SEQ ID NO: 677475 - DNA, 19 bp, Mus musculus
  siRNA target sequence for Rb1cc1 (NM_009826.3,4172-4190).
cactagatgaatttaaggt

SEQ ID NO: 677476 - DNA, 19 bp, Mus musculus
  siRNA target sequence for Rb1cc1 (NM_009826.3,4201-4219).
cttgttgagaaagagttat

SEQ ID NO: 677477 - DNA, 19 bp, Mus musculus
  siRNA target sequence for Rb1cc1 (NM_009826.3,4295-4313).
gcttagttgcggaacttca

SEQ ID NO: 677478 - DNA, 19 bp, Mus musculus
  siRNA target sequence for Rb1cc1 (NM_009826.3,4296-4314).
cttagttgcggaacttcaa

SEQ ID NO: 677479 - DNA, 19 bp, Mus musculus
  siRNA target sequence for Rb1cc1 (NM_009826.3,4441-4459).
gtcttaacaagagagaaaa

SEQ ID NO: 677480 - DNA, 19 bp, Mus musculus
  siRNA target sequence for Rb1cc1 (NM_009826.3,4483-4501).
gatcttagtgataagctaa

SEQ ID NO: 677481 - DNA, 19 bp, Mus musculus
  siRNA target sequence for Rb1cc1 (NM_009826.3,4518-4536).
gcaagagcgggataaagat

SEQ ID NO: 677482 - DNA, 19 bp, Mus musculus
  siRNA target sequence for Rb1cc1 (NM_009826.3,4519-4537).
caagagcgggataaagatt

SEQ ID NO: 677483 - DNA, 19 bp, Mus musculus
  siRNA target sequence for Rb1cc1 (NM_009826.3,4528-4546).
gataaagatttgatagagt

SEQ ID NO: 677484 - DNA, 19 bp, Mus musculus
  siRNA target sequence for Rb1cc1 (NM_009826.3,4769-4787).
ctgtccaagaaaacatgtt

SEQ ID NO: 677485 - DNA, 19 bp, Mus musculus
  siRNA target sequence for Rb1cc1 (NM_009826.3,4851-4869).
caagcggttaaatcaaaga

SEQ ID NO: 677486 - DNA, 19 bp, Mus musculus
  siRNA target sequence for Rb1cc1 (NM_009826.3,4898-4916).
cttcaaggcattctgaaaa

SEQ ID NO: 677487 - DNA, 19 bp, Mus musculus
  siRNA target sequence for Rb1cc1 (NM_009826.3,4966-4984).
gatgagcggcacgacaatt

SEQ ID NO: 677488 - DNA, 19 bp, Mus musculus
  siRNA target sequence for Rb1cc1 (NM_009826.3,4972-4990).
cggcacgacaattatgtat

SEQ ID NO: 677489 - DNA, 19 bp, Mus musculus
  siRNA target sequence for Rb1cc1 (NM_009826.3,4977-4995).
cgacaattatgtattgttt

SEQ ID NO: 677490 - DNA, 19 bp, Mus musculus
  siRNA target sequence for Rb1cc1 (NM_009826.3,4997-5015).
ctgttagtcctactttata

SEQ ID NO: 677491 - DNA, 19 bp, Mus musculus
  siRNA target sequence for Rb1cc1 (NM_009826.3,5091-5109).
ctgggtccttgggaaagta

SEQ ID NO: 677492 - DNA, 19 bp, Mus musculus
  siRNA target sequence for Rb1cc1 (NM_009826.3,5097-5115).
ccttgggaaagtaatggaa

SEQ ID NO: 677493 - DNA, 19 bp, Mus musculus
  siRNA target sequence for Rb1cc1 (NM_009826.3,5139-5157).
ggcacaaaacagatttaaa

SEQ ID NO: 677494 - DNA, 19 bp, Mus musculus
  siRNA target sequence for Traf1 (NM_009421.2,502-520).
ctgatgaaaacgagtttca

SEQ ID NO: 677495 - DNA, 19 bp, Mus musculus
  siRNA target sequence for Traf1 (NM_009421.2,614-632).
ggatcggatctgtcctaaa

SEQ ID NO: 677496 - DNA, 19 bp, Mus musculus
  siRNA target sequence for Traf1 (NM_009421.2,615-633).
gatcggatctgtcctaaat

SEQ ID NO: 677497 - DNA, 19 bp, Mus musculus
  siRNA target sequence for Traf1 (NM_009421.2,618-636).
cggatctgtcctaaatgca

SEQ ID NO: 677498 - DNA, 19 bp, Mus musculus
  siRNA target sequence for Traf1 (NM_009421.2,686-704).
gaaggttcactctgatgta

SEQ ID NO: 677499 - DNA, 19 bp, Mus musculus
  siRNA target sequence for Traf1 (NM_009421.2,702-720).
gtagctgaggctgaaatca

SEQ ID NO: 677500 - DNA, 19 bp, Mus musculus
  siRNA target sequence for Traf1 (NM_009421.2,1034-1052).
ggagaagctgcgtgtgttt

SEQ ID NO: 677501 - DNA, 19 bp, Mus musculus
  siRNA target sequence for Traf1 (NM_009421.2,1238-1256).
catggaggaggcatccttt

SEQ ID NO: 677502 - DNA, 19 bp, Mus musculus
  siRNA target sequence for Traf1 (NM_009421.2,1241-1259).
ggaggaggcatcctttgat

SEQ ID NO: 677503 - DNA, 19 bp, Mus musculus
  siRNA target sequence for Traf1 (NM_009421.2,1357-1375).
ccaagtatggttacaagtt

SEQ ID NO: 677504 - DNA, 19 bp, Mus musculus
  siRNA target sequence for Traf1 (NM_009421.2,1445-1463).
catgagaggagaatacgat

SEQ ID NO: 677505 - DNA, 19 bp, Mus musculus
  siRNA target sequence for Traf1 (NM_009421.2,1490-1508).
caaggtcacctttatgcta

SEQ ID NO: 677506 - DNA, 19 bp, Mus musculus
  siRNA target sequence for Traf1 (NM_009421.2,1520-1538).
caaccgagagcatgctatt

SEQ ID NO: 677507 - DNA, 19 bp, Mus musculus
  siRNA target sequence for Traf1 (NM_009421.2,1523-1541).
ccgagagcatgctattgat

SEQ ID NO: 677508 - DNA, 19 bp, Mus musculus
  siRNA target sequence for Traf1 (NM_009421.2,1652-1670).
gcacgcctacgtcaaagat

SEQ ID NO: 677509 - DNA, 19 bp, Mus musculus
  siRNA target sequence for Traf1 (NM_009421.2,1662-1680).
gtcaaagatgacacaatgt

SEQ ID NO: 677510 - DNA, 19 bp, Mus musculus
  siRNA target sequence for Traf1 (NM_009421.2,1671-1689).
gacacaatgttcctcaaat

SEQ ID NO: 677511 - DNA, 19 bp, Mus musculus
  siRNA target sequence for C9 (NM_013485.1,180-198).
ccgatagactgcagaatga

SEQ ID NO: 677512 - DNA, 19 bp, Mus musculus
  siRNA target sequence for C9 (NM_013485.1,245-263).
gtttcgctcaagaagcatt

SEQ ID NO: 677513 - DNA, 19 bp, Mus musculus
  siRNA target sequence for C9 (NM_013485.1,404-422).
gaggagacttctgtgtaat

SEQ ID NO: 677514 - DNA, 19 bp, Mus musculus
  siRNA target sequence for C9 (NM_013485.1,407-425).
gagacttctgtgtaatggt

SEQ ID NO: 677515 - DNA, 19 bp, Mus musculus
  siRNA target sequence for C9 (NM_013485.1,492-510).
gaccgagtagcggaagaat

SEQ ID NO: 677516 - DNA, 19 bp, Mus musculus
  siRNA target sequence for C9 (NM_013485.1,494-512).
ccgagtagcggaagaatca

SEQ ID NO: 677517 - DNA, 19 bp, Mus musculus
  siRNA target sequence for C9 (NM_013485.1,496-514).
gagtagcggaagaatcaga

SEQ ID NO: 677518 - DNA, 19 bp, Mus musculus
  siRNA target sequence for C9 (NM_013485.1,531-549).
ggctatgggatcaacatct

SEQ ID NO: 677519 - DNA, 19 bp, Mus musculus
  siRNA target sequence for C9 (NM_013485.1,532-550).
gctatgggatcaacatctt

SEQ ID NO: 677520 - DNA, 19 bp, Mus musculus
  siRNA target sequence for C9 (NM_013485.1,533-551).
ctatgggatcaacatctta

SEQ ID NO: 677521 - DNA, 19 bp, Mus musculus
  siRNA target sequence for C9 (NM_013485.1,566-584).
gagaacaccttttgacaat

SEQ ID NO: 677522 - DNA, 19 bp, Mus musculus
  siRNA target sequence for C9 (NM_013485.1,609-627).
cgggtacgagacgaaaaga

SEQ ID NO: 677523 - DNA, 19 bp, Mus musculus
  siRNA target sequence for C9 (NM_013485.1,638-656).
caaaccttggaatgtagtt

SEQ ID NO: 677524 - DNA, 19 bp, Mus musculus
  siRNA target sequence for C9 (NM_013485.1,673-691).
ccaaggctgataaaagttt

SEQ ID NO: 677525 - DNA, 19 bp, Mus musculus
  siRNA target sequence for C9 (NM_013485.1,677-695).
ggctgataaaagtttcaga

SEQ ID NO: 677526 - DNA, 19 bp, Mus musculus
  siRNA target sequence for C9 (NM_013485.1,678-696).
gctgataaaagtttcagaa

SEQ ID NO: 677527 - DNA, 19 bp, Mus musculus
  siRNA target sequence for C9 (NM_013485.1,741-759).
cgagagaagacctcgaatt

SEQ ID NO: 677528 - DNA, 19 bp, Mus musculus
  siRNA target sequence for C9 (NM_013485.1,744-762).
gagaagacctcgaatttta

SEQ ID NO: 677529 - DNA, 19 bp, Mus musculus
  siRNA target sequence for C9 (NM_013485.1,746-764).
gaagacctcgaattttaat

SEQ ID NO: 677530 - DNA, 19 bp, Mus musculus
  siRNA target sequence for C9 (NM_013485.1,749-767).
gacctcgaattttaatgca

SEQ ID NO: 677531 - DNA, 19 bp, Mus musculus
  siRNA target sequence for C9 (NM_013485.1,765-783).
gcagattttgccctaaaat

SEQ ID NO: 677532 - DNA, 19 bp, Mus musculus
  siRNA target sequence for C9 (NM_013485.1,853-871).
caaacatttcagctaaatt

SEQ ID NO: 677533 - DNA, 19 bp, Mus musculus
  siRNA target sequence for C9 (NM_013485.1,857-875).
catttcagctaaatttaaa

SEQ ID NO: 677534 - DNA, 19 bp, Mus musculus
  siRNA target sequence for C9 (NM_013485.1,904-922).
gaagactatcatcttattt

SEQ ID NO: 677535 - DNA, 19 bp, Mus musculus
  siRNA target sequence for C9 (NM_013485.1,965-983).
ccaactggggagatttgta

SEQ ID NO: 677536 - DNA, 19 bp, Mus musculus
  siRNA target sequence for C9 (NM_013485.1,966-984).
caactggggagatttgtaa

SEQ ID NO: 677537 - DNA, 19 bp, Mus musculus
  siRNA target sequence for C9 (NM_013485.1,1058-1076).
gggagaatattttggattt

SEQ ID NO: 677538 - DNA, 19 bp, Mus musculus
  siRNA target sequence for C9 (NM_013485.1,1111-1129).
ggtccctgggaggacaata

SEQ ID NO: 677539 - DNA, 19 bp, Mus musculus
  siRNA target sequence for C9 (NM_013485.1,1122-1140).
ggacaatatgaaattgtct

SEQ ID NO: 677540 - DNA, 19 bp, Mus musculus
  siRNA target sequence for C9 (NM_013485.1,1139-1157).
ctatgtcttggataaagct

SEQ ID NO: 677541 - DNA, 19 bp, Mus musculus
  siRNA target sequence for C9 (NM_013485.1,1203-1221).
cttggatttaatatggatt

SEQ ID NO: 677542 - DNA, 19 bp, Mus musculus
  siRNA target sequence for C9 (NM_013485.1,1278-1296).
gcggatggttgcataaaga

SEQ ID NO: 677543 - DNA, 19 bp, Mus musculus
  siRNA target sequence for C9 (NM_013485.1,1285-1303).
gttgcataaagacagataa

SEQ ID NO: 677544 - DNA, 19 bp, Mus musculus
  siRNA target sequence for C9 (NM_013485.1,1299-1317).
gataatgggaaaactgtaa

SEQ ID NO: 677545 - DNA, 19 bp, Mus musculus
  siRNA target sequence for C9 (NM_013485.1,1322-1340).
cacccgcgataacatcata

SEQ ID NO: 677546 - DNA, 19 bp, Mus musculus
  siRNA target sequence for C9 (NM_013485.1,1324-1342).
cccgcgataacatcataga

SEQ ID NO: 677547 - DNA, 19 bp, Mus musculus
  siRNA target sequence for C9 (NM_013485.1,1325-1343).
ccgcgataacatcatagat

SEQ ID NO: 677548 - DNA, 19 bp, Mus musculus
  siRNA target sequence for C9 (NM_013485.1,1327-1345).
gcgataacatcatagatga

SEQ ID NO: 677549 - DNA, 19 bp, Mus musculus
  siRNA target sequence for C9 (NM_013485.1,1337-1355).
catagatgatgtcatttca

SEQ ID NO: 677550 - DNA, 19 bp, Mus musculus
  siRNA target sequence for C9 (NM_013485.1,1369-1387).
ggactagggagcaagcaat

SEQ ID NO: 677551 - DNA, 19 bp, Mus musculus
  siRNA target sequence for C9 (NM_013485.1,1370-1388).
gactagggagcaagcaatt

SEQ ID NO: 677552 - DNA, 19 bp, Mus musculus
  siRNA target sequence for C9 (NM_013485.1,1383-1401).
gcaattctcctgaaagaga

SEQ ID NO: 677553 - DNA, 19 bp, Mus musculus
  siRNA target sequence for C9 (NM_013485.1,1473-1491).
ccagctctcatcagtcaaa

SEQ ID NO: 677554 - DNA, 19 bp, Mus musculus
  siRNA target sequence for C9 (NM_013485.1,1476-1494).
gctctcatcagtcaaagaa

SEQ ID NO: 677555 - DNA, 19 bp, Mus musculus
  siRNA target sequence for C9 (NM_013485.1,1477-1495).
ctctcatcagtcaaagaat

SEQ ID NO: 677556 - DNA, 19 bp, Mus musculus
  siRNA target sequence for C9 (NM_013485.1,1488-1506).
caaagaatgtcccctatat

SEQ ID NO: 677557 - DNA, 19 bp, Mus musculus
  siRNA target sequence for C9 (NM_013485.1,1492-1510).
gaatgtcccctatatataa

SEQ ID NO: 677558 - DNA, 19 bp, Mus musculus
  siRNA target sequence for C9 (NM_013485.1,1498-1516).
cccctatatataatctcat

SEQ ID NO: 677559 - DNA, 19 bp, Mus musculus
  siRNA target sequence for C9 (NM_013485.1,1499-1517).
ccctatatataatctcatt

SEQ ID NO: 677560 - DNA, 19 bp, Mus musculus
  siRNA target sequence for C9 (NM_013485.1,1567-1585).
ctgttgaagactatataga

SEQ ID NO: 677561 - DNA, 19 bp, Mus musculus
  siRNA target sequence for C9 (NM_013485.1,1572-1590).
gaagactatatagatgaat

SEQ ID NO: 677562 - DNA, 19 bp, Mus musculus
  siRNA target sequence for C9 (NM_013485.1,1575-1593).
gactatatagatgaattca

SEQ ID NO: 677563 - DNA, 19 bp, Mus musculus
  siRNA target sequence for C9 (NM_013485.1,1587-1605).
gaattcagtactaaaaggt

SEQ ID NO: 677564 - DNA, 19 bp, Mus musculus
  siRNA target sequence for C9 (NM_013485.1,1603-1621).
ggtgctacccatgtctaaa

SEQ ID NO: 677565 - DNA, 19 bp, Mus musculus
  siRNA target sequence for C9 (NM_013485.1,1604-1622).
gtgctacccatgtctaaat

SEQ ID NO: 677566 - DNA, 19 bp, Mus musculus
  siRNA target sequence for C9 (NM_013485.1,1607-1625).
ctacccatgtctaaatgga

SEQ ID NO: 677567 - DNA, 19 bp, Mus musculus
  siRNA target sequence for C9 (NM_013485.1,1615-1633).
gtctaaatggaggtactat

SEQ ID NO: 677568 - DNA, 19 bp, Mus musculus
  siRNA target sequence for C9 (NM_013485.1,1624-1642).
gaggtactataattcttct

SEQ ID NO: 677569 - DNA, 19 bp, Mus musculus
  siRNA target sequence for C9 (NM_013485.1,1691-1709).
ctgcgaaatccatcaaaaa

SEQ ID NO: 677570 - DNA, 19 bp, Mus musculus
  siRNA target sequence for Fgl2 (NM_008013.2,471-489).
gacgctccatctggtaaat

SEQ ID NO: 677571 - DNA, 19 bp, Mus musculus
  siRNA target sequence for Fgl2 (NM_008013.2,473-491).
cgctccatctggtaaatat

SEQ ID NO: 677572 - DNA, 19 bp, Mus musculus
  siRNA target sequence for Fgl2 (NM_008013.2,475-493).
ctccatctggtaaatatga

SEQ ID NO: 677573 - DNA, 19 bp, Mus musculus
  siRNA target sequence for Fgl2 (NM_008013.2,478-496).
catctggtaaatatgaaca

SEQ ID NO: 677574 - DNA, 19 bp, Mus musculus
  siRNA target sequence for Fgl2 (NM_008013.2,504-522).
gaactacgtggacaacaaa

SEQ ID NO: 677575 - DNA, 19 bp, Mus musculus
  siRNA target sequence for Fgl2 (NM_008013.2,516-534).
caacaaagtggcaaatcta

SEQ ID NO: 677576 - DNA, 19 bp, Mus musculus
  siRNA target sequence for Fgl2 (NM_008013.2,536-554).
ccgttgtggtcaacagttt

SEQ ID NO: 677577 - DNA, 19 bp, Mus musculus
  siRNA target sequence for Fgl2 (NM_008013.2,597-615).
gtcacagccggttcaacat

SEQ ID NO: 677578 - DNA, 19 bp, Mus musculus
  siRNA target sequence for Fgl2 (NM_008013.2,603-621).
gccggttcaacatctaata

SEQ ID NO: 677579 - DNA, 19 bp, Mus musculus
  siRNA target sequence for Fgl2 (NM_008013.2,605-623).
cggttcaacatctaatata

SEQ ID NO: 677580 - DNA, 19 bp, Mus musculus
  siRNA target sequence for Fgl2 (NM_008013.2,616-634).
ctaatatacaaagattgtt

SEQ ID NO: 677581 - DNA, 19 bp, Mus musculus
  siRNA target sequence for Fgl2 (NM_008013.2,769-787).
gatggcagcaccaacttca

SEQ ID NO: 677582 - DNA, 19 bp, Mus musculus
  siRNA target sequence for Fgl2 (NM_008013.2,826-844).
cttgaacgagaattttggt

SEQ ID NO: 677583 - DNA, 19 bp, Mus musculus
  siRNA target sequence for Fgl2 (NM_008013.2,842-860).
ggttgggcaacgataaaat

SEQ ID NO: 677584 - DNA, 19 bp, Mus musculus
  siRNA target sequence for Fgl2 (NM_008013.2,843-861).
gttgggcaacgataaaatt

SEQ ID NO: 677585 - DNA, 19 bp, Mus musculus
  siRNA target sequence for Fgl2 (NM_008013.2,846-864).
gggcaacgataaaattcat

SEQ ID NO: 677586 - DNA, 19 bp, Mus musculus
  siRNA target sequence for Fgl2 (NM_008013.2,848-866).
gcaacgataaaattcatct

SEQ ID NO: 677587 - DNA, 19 bp, Mus musculus
  siRNA target sequence for Fgl2 (NM_008013.2,862-880).
catcttctgaccaagagta

SEQ ID NO: 677588 - DNA, 19 bp, Mus musculus
  siRNA target sequence for Fgl2 (NM_008013.2,872-890).
ccaagagtaaggaaatgat

SEQ ID NO: 677589 - DNA, 19 bp, Mus musculus
  siRNA target sequence for Fgl2 (NM_008013.2,873-891).
caagagtaaggaaatgatt

SEQ ID NO: 677590 - DNA, 19 bp, Mus musculus
  siRNA target sequence for Fgl2 (NM_008013.2,896-914).
gaatagatcttgaagactt

SEQ ID NO: 677591 - DNA, 19 bp, Mus musculus
  siRNA target sequence for Fgl2 (NM_008013.2,924-942).
cacactttatgccttgtat

SEQ ID NO: 677592 - DNA, 19 bp, Mus musculus
  siRNA target sequence for Fgl2 (NM_008013.2,934-952).
gccttgtatgatcagtttt

SEQ ID NO: 677593 - DNA, 19 bp, Mus musculus
  siRNA target sequence for Fgl2 (NM_008013.2,935-953).
ccttgtatgatcagtttta

SEQ ID NO: 677594 - DNA, 19 bp, Mus musculus
  siRNA target sequence for Fgl2 (NM_008013.2,970-988).
ctcaaataccgattacaca

SEQ ID NO: 677595 - DNA, 19 bp, Mus musculus
  siRNA target sequence for Fgl2 (NM_008013.2,980-998).
gattacacatcggtaacta

SEQ ID NO: 677596 - DNA, 19 bp, Mus musculus
  siRNA target sequence for Fgl2 (NM_008013.2,1048-1066).
gacctgaggtttttcacaa

SEQ ID NO: 677597 - DNA, 19 bp, Mus musculus
  siRNA target sequence for Fgl2 (NM_008013.2,1100-1118).
ggaactgtgggctctatta

SEQ ID NO: 677598 - DNA, 19 bp, Mus musculus
  siRNA target sequence for Fgl2 (NM_008013.2,1154-1172).
ccaacttaaatggcaaata

SEQ ID NO: 677599 - DNA, 19 bp, Mus musculus
  siRNA target sequence for Fgl2 (NM_008013.2,1155-1173).
caacttaaatggcaaatat

SEQ ID NO: 677600 - DNA, 19 bp, Mus musculus
  siRNA target sequence for Fgl2 (NM_008013.2,1193-1211).
gtgtccgtaatgggatttt

SEQ ID NO: 677601 - DNA, 19 bp, Mus musculus
  siRNA target sequence for Fgl2 (NM_008013.2,1195-1213).
gtccgtaatgggattttct

SEQ ID NO: 677602 - DNA, 19 bp, Mus musculus
  siRNA target sequence for Fgl2 (NM_008013.2,1215-1233).
gggcacctggcctggtata

SEQ ID NO: 677603 - DNA, 19 bp, Mus musculus
  siRNA target sequence for Fgl2 (NM_008013.2,1273-1291).
caggccaagatgatgatta

SEQ ID NO: 677604 - DNA, 19 bp, Mus musculus
  siRNA target sequence for Fgl2 (NM_008013.2,1284-1302).
gatgattaggcccaagaat

SEQ ID NO: 677605 - DNA, 19 bp, Mus musculus
  siRNA target sequence for Mmd (NM_026178.2,335-353).
cacacgcattcctcattgt

SEQ ID NO: 677606 - DNA, 19 bp, Mus musculus
  siRNA target sequence for Mmd (NM_026178.2,397-415).
gactgctgggagaagataa

SEQ ID NO: 677607 - DNA, 19 bp, Mus musculus
  siRNA target sequence for Mmd (NM_026178.2,437-455).
gcctttgcgccctcttcat

SEQ ID NO: 677608 - DNA, 19 bp, Mus musculus
  siRNA target sequence for Mmd (NM_026178.2,461-479).
ccacagtgtttcacatagt

SEQ ID NO: 677609 - DNA, 19 bp, Mus musculus
  siRNA target sequence for Mmd (NM_026178.2,530-548).
gcgatcggatggtcatcta

SEQ ID NO: 677610 - DNA, 19 bp, Mus musculus
  siRNA target sequence for Mmd (NM_026178.2,532-550).
gatcggatggtcatctact

SEQ ID NO: 677611 - DNA, 19 bp, Mus musculus
  siRNA target sequence for Mmd (NM_026178.2,566-584).
cctacgccccatggttaaa

SEQ ID NO: 677612 - DNA, 19 bp, Mus musculus
  siRNA target sequence for Mmd (NM_026178.2,567-585).
ctacgccccatggttaaat

SEQ ID NO: 677613 - DNA, 19 bp, Mus musculus
  siRNA target sequence for Mmd (NM_026178.2,579-597).
gttaaatctccgtgaactt

SEQ ID NO: 677614 - DNA, 19 bp, Mus musculus
  siRNA target sequence for Mmd (NM_026178.2,611-629).
ctcatatgcgttggtttat

SEQ ID NO: 677615 - DNA, 19 bp, Mus musculus
  siRNA target sequence for Mmd (NM_026178.2,613-631).
catatgcgttggtttatct

SEQ ID NO: 677616 - DNA, 19 bp, Mus musculus
  siRNA target sequence for Mmd (NM_026178.2,644-662).
ctggaggaaccatttatgt

SEQ ID NO: 677617 - DNA, 19 bp, Mus musculus
  siRNA target sequence for Mmd (NM_026178.2,735-753).
ggtggtgacatcaatgaat

SEQ ID NO: 677618 - DNA, 19 bp, Mus musculus
  siRNA target sequence for Mmd (NM_026178.2,739-757).
gtgacatcaatgaataaca

SEQ ID NO: 677619 - DNA, 19 bp, Mus musculus
  siRNA target sequence for Mmd (NM_026178.2,741-759).
gacatcaatgaataacact

SEQ ID NO: 677620 - DNA, 19 bp, Mus musculus
  siRNA target sequence for Mmd (NM_026178.2,777-795).
cgcctgtgggggattgatt

SEQ ID NO: 677621 - DNA, 19 bp, Mus musculus
  siRNA target sequence for Mmd (NM_026178.2,779-797).
cctgtgggggattgattta

SEQ ID NO: 677622 - DNA, 19 bp, Mus musculus
  siRNA target sequence for Mmd (NM_026178.2,875-893).
cggcagctgccgtacacta

SEQ ID NO: 677623 - DNA, 19 bp, Mus musculus
  siRNA target sequence for Mmd (NM_026178.2,878-896).
cagctgccgtacactacta

SEQ ID NO: 677624 - DNA, 19 bp, Mus musculus
  siRNA target sequence for Mmd2 (NM_175217.3,271-289).
ccatgctttctggatcatt

SEQ ID NO: 677625 - DNA, 19 bp, Mus musculus
  siRNA target sequence for Mmd2 (NM_175217.3,332-350).
gacgactgggagaccatat

SEQ ID NO: 677626 - DNA, 19 bp, Mus musculus
  siRNA target sequence for Mmd2 (NM_175217.3,334-352).
cgactgggagaccatatct

SEQ ID NO: 677627 - DNA, 19 bp, Mus musculus
  siRNA target sequence for Mmd2 (NM_175217.3,467-485).
gacaggatggtgatctact

SEQ ID NO: 677628 - DNA, 19 bp, Mus musculus
  siRNA target sequence for Mmd2 (NM_175217.3,577-595).
ctccatcggtaccatctat

SEQ ID NO: 677629 - DNA, 19 bp, Mus musculus
  siRNA target sequence for Mmd2 (NM_175217.3,585-603).
gtaccatctatgtcttttt

SEQ ID NO: 677630 - DNA, 19 bp, Mus musculus
  siRNA target sequence for Mmd2 (NM_175217.3,796-814).
cctctttgtggcatttggt

SEQ ID NO: 677631 - DNA, 19 bp, Mus musculus
  siRNA target sequence for Mmd2 (NM_175217.3,813-831).
gtgctggtacccactacta

SEQ ID NO: 677632 - DNA, 19 bp, Mus musculus
  siRNA target sequence for Clu (NM_013492.1,157-175).
gcaggaggtctctgacaat

SEQ ID NO: 677633 - DNA, 19 bp, Mus musculus
  siRNA target sequence for Clu (NM_013492.1,193-211).
cactcaagggagtaggtat

SEQ ID NO: 677634 - DNA, 19 bp, Mus musculus
  siRNA target sequence for Clu (NM_013492.1,195-213).
ctcaagggagtaggtatat

SEQ ID NO: 677635 - DNA, 19 bp, Mus musculus
  siRNA target sequence for Clu (NM_013492.1,197-215).
caagggagtaggtatatta

SEQ ID NO: 677636 - DNA, 19 bp, Mus musculus
  siRNA target sequence for Clu (NM_013492.1,204-222).
gtaggtatattaataagga

SEQ ID NO: 677637 - DNA, 19 bp, Mus musculus
  siRNA target sequence for Clu (NM_013492.1,239-257).
cagggagtgaagcacataa

SEQ ID NO: 677638 - DNA, 19 bp, Mus musculus
  siRNA target sequence for Clu (NM_013492.1,250-268).
gcacataaaaactctcata

SEQ ID NO: 677639 - DNA, 19 bp, Mus musculus
  siRNA target sequence for Clu (NM_013492.1,261-279).
ctctcatagaaaaaaccaa

SEQ ID NO: 677640 - DNA, 19 bp, Mus musculus
  siRNA target sequence for Clu (NM_013492.1,292-310).
gtccttgctcaacagttta

SEQ ID NO: 677641 - DNA, 19 bp, Mus musculus
  siRNA target sequence for Clu (NM_013492.1,294-312).
ccttgctcaacagtttaga

SEQ ID NO: 677642 - DNA, 19 bp, Mus musculus
  siRNA target sequence for Clu (NM_013492.1,378-396).
cattcccggaagtgtgtaa

SEQ ID NO: 677643 - DNA, 19 bp, Mus musculus
  siRNA target sequence for Clu (NM_013492.1,503-521).
cagctagaggagtttctaa

SEQ ID NO: 677644 - DNA, 19 bp, Mus musculus
  siRNA target sequence for Clu (NM_013492.1,524-542).
cagagctcacccttctact

SEQ ID NO: 677645 - DNA, 19 bp, Mus musculus
  siRNA target sequence for Clu (NM_013492.1,689-707).
catgacccccactacttct

SEQ ID NO: 677646 - DNA, 19 bp, Mus musculus
  siRNA target sequence for Clu (NM_013492.1,801-819).
cgagcttccacaacatgtt

SEQ ID NO: 677647 - DNA, 19 bp, Mus musculus
  siRNA target sequence for Clu (NM_013492.1,1021-1039).
ggactgttcaaccaacaat

SEQ ID NO: 677648 - DNA, 19 bp, Mus musculus
  siRNA target sequence for Clu (NM_013492.1,1172-1190).
ctgaacgaccagttcaact

SEQ ID NO: 677649 - DNA, 19 bp, Mus musculus
  siRNA target sequence for Clu (NM_013492.1,1406-1424).
caggaataccgcaggaaaa

SEQ ID NO: 677650 - DNA, 19 bp, Mus musculus
  siRNA target sequence for Artn (NM_009711.2,1286-1304).
catttgtgcagcgaaagaa

SEQ ID NO: 677651 - DNA, 19 bp, Mus musculus
  siRNA target sequence for Artn (NM_009711.2,1506-1524).
ccgacgagctgatacgttt

SEQ ID NO: 677652 - DNA, 19 bp, Mus musculus
  siRNA target sequence for Chl1 (NM_007697.1,298-316).
gatggaattgccattatgt

SEQ ID NO: 677653 - DNA, 19 bp, Mus musculus
  siRNA target sequence for Chl1 (NM_007697.1,323-341).
ggactgatcctaagtctaa

SEQ ID NO: 677654 - DNA, 19 bp, Mus musculus
  siRNA target sequence for Chl1 (NM_007697.1,324-342).
gactgatcctaagtctaat

SEQ ID NO: 677655 - DNA, 19 bp, Mus musculus
  siRNA target sequence for Chl1 (NM_007697.1,326-344).
ctgatcctaagtctaattt

SEQ ID NO: 677656 - DNA, 19 bp, Mus musculus
  siRNA target sequence for Chl1 (NM_007697.1,338-356).
ctaattttcctcctgttaa

SEQ ID NO: 677657 - DNA, 19 bp, Mus musculus
  siRNA target sequence for Chl1 (NM_007697.1,402-420).
caattgtaaagcagtcata

SEQ ID NO: 677658 - DNA, 19 bp, Mus musculus
  siRNA target sequence for Chl1 (NM_007697.1,476-494).
ggaaaccctgaaccaatat

SEQ ID NO: 677659 - DNA, 19 bp, Mus musculus
  siRNA target sequence for Chl1 (NM_007697.1,477-495).
gaaaccctgaaccaatatt

SEQ ID NO: 677660 - DNA, 19 bp, Mus musculus
  siRNA target sequence for Chl1 (NM_007697.1,508-526).
ggacgataagccttttgat

SEQ ID NO: 677661 - DNA, 19 bp, Mus musculus
  siRNA target sequence for Chl1 (NM_007697.1,511-529).
cgataagccttttgatctt

SEQ ID NO: 677662 - DNA, 19 bp, Mus musculus
  siRNA target sequence for Chl1 (NM_007697.1,540-558).
ggataattgcggctaacaa

SEQ ID NO: 677663 - DNA, 19 bp, Mus musculus
  siRNA target sequence for Chl1 (NM_007697.1,541-559).
gataattgcggctaacaat

SEQ ID NO: 677664 - DNA, 19 bp, Mus musculus
  siRNA target sequence for Chl1 (NM_007697.1,589-607).
ccacatctctcactttcaa

SEQ ID NO: 677665 - DNA, 19 bp, Mus musculus
  siRNA target sequence for Chl1 (NM_007697.1,616-634).
ccgctgtttcgcatccaat

SEQ ID NO: 677666 - DNA, 19 bp, Mus musculus
  siRNA target sequence for Chl1 (NM_007697.1,617-635).
cgctgtttcgcatccaata

SEQ ID NO: 677667 - DNA, 19 bp, Mus musculus
  siRNA target sequence for Chl1 (NM_007697.1,619-637).
ctgtttcgcatccaataga

SEQ ID NO: 677668 - DNA, 19 bp, Mus musculus
  siRNA target sequence for Chl1 (NM_007697.1,621-639).
gtttcgcatccaatagact

SEQ ID NO: 677669 - DNA, 19 bp, Mus musculus
  siRNA target sequence for Chl1 (NM_007697.1,674-692).
gtaccaggggttccaaaat

SEQ ID NO: 677670 - DNA, 19 bp, Mus musculus
  siRNA target sequence for Chl1 (NM_007697.1,781-799).
gcacatctattggatgaat

SEQ ID NO: 677671 - DNA, 19 bp, Mus musculus
  siRNA target sequence for Chl1 (NM_007697.1,792-810).
ggatgaatattgagttaga

SEQ ID NO: 677672 - DNA, 19 bp, Mus musculus
  siRNA target sequence for Chl1 (NM_007697.1,824-842).
gatgagagagtatacatga

SEQ ID NO: 677673 - DNA, 19 bp, Mus musculus
  siRNA target sequence for Chl1 (NM_007697.1,884-902).
gacagtcggaatgattact

SEQ ID NO: 677674 - DNA, 19 bp, Mus musculus
  siRNA target sequence for Chl1 (NM_007697.1,886-904).
cagtcggaatgattactgt

SEQ ID NO: 677675 - DNA, 19 bp, Mus musculus
  siRNA target sequence for Chl1 (NM_007697.1,901-919).
ctgttgcttcgctgcattt

SEQ ID NO: 677676 - DNA, 19 bp, Mus musculus
  siRNA target sequence for Chl1 (NM_007697.1,906-924).
gcttcgctgcatttccaaa

SEQ ID NO: 677677 - DNA, 19 bp, Mus musculus
  siRNA target sequence for Chl1 (NM_007697.1,910-928).
cgctgcatttccaaaatta

SEQ ID NO: 677678 - DNA, 19 bp, Mus musculus
  siRNA target sequence for Chl1 (NM_007697.1,1052-1070).
ctcaaaggggatacactat

SEQ ID NO: 677679 - DNA, 19 bp, Mus musculus
  siRNA target sequence for Chl1 (NM_007697.1,1065-1083).
cactattgctcgagtgttt

SEQ ID NO: 677680 - DNA, 19 bp, Mus musculus
  siRNA target sequence for Chl1 (NM_007697.1,1120-1138).
caaaccaggtagtgaatta

SEQ ID NO: 677681 - DNA, 19 bp, Mus musculus
  siRNA target sequence for Chl1 (NM_007697.1,1144-1162).
gggaagagcaacaattgaa

SEQ ID NO: 677682 - DNA, 19 bp, Mus musculus
  siRNA target sequence for Chl1 (NM_007697.1,1160-1178).
gaagttcatgaaaagacat

SEQ ID NO: 677683 - DNA, 19 bp, Mus musculus
  siRNA target sequence for Chl1 (NM_007697.1,1220-1238).
cgctgtacagccaacaatt

SEQ ID NO: 677684 - DNA, 19 bp, Mus musculus
  siRNA target sequence for Chl1 (NM_007697.1,1221-1239).
gctgtacagccaacaattt

SEQ ID NO: 677685 - DNA, 19 bp, Mus musculus
  siRNA target sequence for Chl1 (NM_007697.1,1224-1242).
gtacagccaacaatttgtt

SEQ ID NO: 677686 - DNA, 19 bp, Mus musculus
  siRNA target sequence for Chl1 (NM_007697.1,1246-1264).
gaaagccagtcatgatttt

SEQ ID NO: 677687 - DNA, 19 bp, Mus musculus
  siRNA target sequence for Chl1 (NM_007697.1,1328-1346).
gggagcagtggcatcttgt

SEQ ID NO: 677688 - DNA, 19 bp, Mus musculus
  siRNA target sequence for Chl1 (NM_007697.1,1329-1347).
ggagcagtggcatcttgtt

SEQ ID NO: 677689 - DNA, 19 bp, Mus musculus
  siRNA target sequence for Chl1 (NM_007697.1,1364-1382).
gaacctcaacccacaatca

SEQ ID NO: 677690 - DNA, 19 bp, Mus musculus
  siRNA target sequence for Chl1 (NM_007697.1,1398-1416).
gcttgccgattgaaaaaca

SEQ ID NO: 677691 - DNA, 19 bp, Mus musculus
  siRNA target sequence for Chl1 (NM_007697.1,1399-1417).
cttgccgattgaaaaacat

SEQ ID NO: 677692 - DNA, 19 bp, Mus musculus
  siRNA target sequence for Chl1 (NM_007697.1,1404-1422).
cgattgaaaaacatccatt

SEQ ID NO: 677693 - DNA, 19 bp, Mus musculus
  siRNA target sequence for Chl1 (NM_007697.1,1448-1466).
gaaatcagttttacaaact

SEQ ID NO: 677694 - DNA, 19 bp, Mus musculus
  siRNA target sequence for Chl1 (NM_007697.1,1473-1491).
caaatcatactggtgtata

SEQ ID NO: 677695 - DNA, 19 bp, Mus musculus
  siRNA target sequence for Chl1 (NM_007697.1,1536-1554).
ccaatattgacgttataga

SEQ ID NO: 677696 - DNA, 19 bp, Mus musculus
  siRNA target sequence for Chl1 (NM_007697.1,1537-1555).
caatattgacgttatagat

SEQ ID NO: 677697 - DNA, 19 bp, Mus musculus
  siRNA target sequence for Chl1 (NM_007697.1,1608-1626).
gctacagcgctttcttaca

SEQ ID NO: 677698 - DNA, 19 bp, Mus musculus
  siRNA target sequence for Chl1 (NM_007697.1,1625-1643).
cactgcgagtactttgctt

SEQ ID NO: 677699 - DNA, 19 bp, Mus musculus
  siRNA target sequence for Chl1 (NM_007697.1,1694-1712).
gaaggtgatcggtaccata

SEQ ID NO: 677700 - DNA, 19 bp, Mus musculus
  siRNA target sequence for Chl1 (NM_007697.1,1703-1721).
cggtaccatacgcatgaaa

SEQ ID NO: 677701 - DNA, 19 bp, Mus musculus
  siRNA target sequence for Chl1 (NM_007697.1,1704-1722).
ggtaccatacgcatgaaaa

SEQ ID NO: 677702 - DNA, 19 bp, Mus musculus
  siRNA target sequence for Chl1 (NM_007697.1,1757-1775).
gatgcggggtcctactctt

SEQ ID NO: 677703 - DNA, 19 bp, Mus musculus
  siRNA target sequence for Chl1 (NM_007697.1,1760-1778).
gcggggtcctactcttgtt

SEQ ID NO: 677704 - DNA, 19 bp, Mus musculus
  siRNA target sequence for Chl1 (NM_007697.1,1810-1828).
cacagcgaacttggatatt

SEQ ID NO: 677705 - DNA, 19 bp, Mus musculus
  siRNA target sequence for Chl1 (NM_007697.1,1814-1832).
gcgaacttggatattagaa

SEQ ID NO: 677706 - DNA, 19 bp, Mus musculus
  siRNA target sequence for Chl1 (NM_007697.1,1815-1833).
cgaacttggatattagaaa

SEQ ID NO: 677707 - DNA, 19 bp, Mus musculus
  siRNA target sequence for Chl1 (NM_007697.1,1819-1837).
cttggatattagaaatgct

SEQ ID NO: 677708 - DNA, 19 bp, Mus musculus
  siRNA target sequence for Chl1 (NM_007697.1,1866-1884).
ctcgaatccctaaatcaca

SEQ ID NO: 677709 - DNA, 19 bp, Mus musculus
  siRNA target sequence for Chl1 (NM_007697.1,1908-1926).
gccagtgtgactcacattt

SEQ ID NO: 677710 - DNA, 19 bp, Mus musculus
  siRNA target sequence for Chl1 (NM_007697.1,1910-1928).
cagtgtgactcacatttga

SEQ ID NO: 677711 - DNA, 19 bp, Mus musculus
  siRNA target sequence for Chl1 (NM_007697.1,1914-1932).
gtgactcacatttgaaaca

SEQ ID NO: 677712 - DNA, 19 bp, Mus musculus
  siRNA target sequence for Chl1 (NM_007697.1,2012-2030).
ggagcttacctgaccatat

SEQ ID NO: 677713 - DNA, 19 bp, Mus musculus
  siRNA target sequence for Chl1 (NM_007697.1,2015-2033).
gcttacctgaccatatcta

SEQ ID NO: 677714 - DNA, 19 bp, Mus musculus
  siRNA target sequence for Chl1 (NM_007697.1,2016-2034).
cttacctgaccatatctaa

SEQ ID NO: 677715 - DNA, 19 bp, Mus musculus
  siRNA target sequence for Chl1 (NM_007697.1,2021-2039).
ctgaccatatctaacatca

SEQ ID NO: 677716 - DNA, 19 bp, Mus musculus
  siRNA target sequence for Chl1 (NM_007697.1,2072-2090).
gctcaaacttctcttgata

SEQ ID NO: 677717 - DNA, 19 bp, Mus musculus
  siRNA target sequence for Chl1 (NM_007697.1,2201-2219).
gatgaccacaacagcaaat

SEQ ID NO: 677718 - DNA, 19 bp, Mus musculus
  siRNA target sequence for Chl1 (NM_007697.1,2269-2287).
gtgggaggagctaactaga

SEQ ID NO: 677719 - DNA, 19 bp, Mus musculus
  siRNA target sequence for Chl1 (NM_007697.1,2300-2318).
gaaacagatgtcgtgttat

SEQ ID NO: 677720 - DNA, 19 bp, Mus musculus
  siRNA target sequence for Chl1 (NM_007697.1,2304-2322).
cagatgtcgtgttatcttt

SEQ ID NO: 677721 - DNA, 19 bp, Mus musculus
  siRNA target sequence for Chl1 (NM_007697.1,2323-2341).
ggctccttatgtgagatat

SEQ ID NO: 677722 - DNA, 19 bp, Mus musculus
  siRNA target sequence for Chl1 (NM_007697.1,2349-2367).
gggtcacagctgtaaacga

SEQ ID NO: 677723 - DNA, 19 bp, Mus musculus
  siRNA target sequence for Chl1 (NM_007697.1,2350-2368).
ggtcacagctgtaaacgaa

SEQ ID NO: 677724 - DNA, 19 bp, Mus musculus
  siRNA target sequence for Chl1 (NM_007697.1,2459-2477).
gcatctcaacccaaggaaa

SEQ ID NO: 677725 - DNA, 19 bp, Mus musculus
  siRNA target sequence for Chl1 (NM_007697.1,2465-2483).
caacccaaggaaatgatta

SEQ ID NO: 677726 - DNA, 19 bp, Mus musculus
  siRNA target sequence for Chl1 (NM_007697.1,2468-2486).
cccaaggaaatgattataa

SEQ ID NO: 677727 - DNA, 19 bp, Mus musculus
  siRNA target sequence for Chl1 (NM_007697.1,2523-2541).
caggactggagtacaaagt

SEQ ID NO: 677728 - DNA, 19 bp, Mus musculus
  siRNA target sequence for Chl1 (NM_007697.1,2611-2629).
gatgacacctactgtctat

SEQ ID NO: 677729 - DNA, 19 bp, Mus musculus
  siRNA target sequence for Chl1 (NM_007697.1,2644-2662).
caaggtccaagccatcaat

SEQ ID NO: 677730 - DNA, 19 bp, Mus musculus
  siRNA target sequence for Chl1 (NM_007697.1,2689-2707).
gccagtgacactctattca

SEQ ID NO: 677731 - DNA, 19 bp, Mus musculus
  siRNA target sequence for Chl1 (NM_007697.1,2710-2728).
ggaagactatcctagtaca

SEQ ID NO: 677732 - DNA, 19 bp, Mus musculus
  siRNA target sequence for Chl1 (NM_007697.1,2741-2759).
cagcgtgtggatgttatga

SEQ ID NO: 677733 - DNA, 19 bp, Mus musculus
  siRNA target sequence for Chl1 (NM_007697.1,2744-2762).
cgtgtggatgttatgaaca

SEQ ID NO: 677734 - DNA, 19 bp, Mus musculus
  siRNA target sequence for Chl1 (NM_007697.1,2750-2768).
gatgttatgaacagtacat

SEQ ID NO: 677735 - DNA, 19 bp, Mus musculus
  siRNA target sequence for Chl1 (NM_007697.1,2785-2803).
gtcatccattcctaaggaa

SEQ ID NO: 677736 - DNA, 19 bp, Mus musculus
  siRNA target sequence for Chl1 (NM_007697.1,2825-2843).
gggtaccagataaattggt

SEQ ID NO: 677737 - DNA, 19 bp, Mus musculus
  siRNA target sequence for Chl1 (NM_007697.1,2876-2894).
catcccaaagaagtaaaca

SEQ ID NO: 677738 - DNA, 19 bp, Mus musculus
  siRNA target sequence for Chl1 (NM_007697.1,2914-2932).
gcgaaactctggaatggtt

SEQ ID NO: 677739 - DNA, 19 bp, Mus musculus
  siRNA target sequence for Chl1 (NM_007697.1,2937-2955).
ccctagacccctttagtga

SEQ ID NO: 677740 - DNA, 19 bp, Mus musculus
  siRNA target sequence for Chl1 (NM_007697.1,2938-2956).
cctagacccctttagtgaa

SEQ ID NO: 677741 - DNA, 19 bp, Mus musculus
  siRNA target sequence for Chl1 (NM_007697.1,2939-2957).
ctagacccctttagtgaat

SEQ ID NO: 677742 - DNA, 19 bp, Mus musculus
  siRNA target sequence for Chl1 (NM_007697.1,2945-2963).
ccctttagtgaatttcact

SEQ ID NO: 677743 - DNA, 19 bp, Mus musculus
  siRNA target sequence for Chl1 (NM_007697.1,2946-2964).
cctttagtgaatttcactt

SEQ ID NO: 677744 - DNA, 19 bp, Mus musculus
  siRNA target sequence for Chl1 (NM_007697.1,2947-2965).
ctttagtgaatttcactta

SEQ ID NO: 677745 - DNA, 19 bp, Mus musculus
  siRNA target sequence for Chl1 (NM_007697.1,2999-3017).
ccagagagcgagccttata

SEQ ID NO: 677746 - DNA, 19 bp, Mus musculus
  siRNA target sequence for Chl1 (NM_007697.1,3006-3024).
gcgagccttatatatttca

SEQ ID NO: 677747 - DNA, 19 bp, Mus musculus
  siRNA target sequence for Chl1 (NM_007697.1,3061-3079).
caaggtcatcaaagttgat

SEQ ID NO: 677748 - DNA, 19 bp, Mus musculus
  siRNA target sequence for Chl1 (NM_007697.1,3064-3082).
ggtcatcaaagttgataaa

SEQ ID NO: 677749 - DNA, 19 bp, Mus musculus
  siRNA target sequence for Chl1 (NM_007697.1,3103-3121).
gggccttcctaagaaacta

SEQ ID NO: 677750 - DNA, 19 bp, Mus musculus
  siRNA target sequence for Chl1 (NM_007697.1,3126-3144).
gaaatttaactggttatct

SEQ ID NO: 677751 - DNA, 19 bp, Mus musculus
  siRNA target sequence for Chl1 (NM_007697.1,3135-3153).
ctggttatctcttacaata

SEQ ID NO: 677752 - DNA, 19 bp, Mus musculus
  siRNA target sequence for Chl1 (NM_007697.1,3138-3156).
gttatctcttacaatacca

SEQ ID NO: 677753 - DNA, 19 bp, Mus musculus
  siRNA target sequence for Chl1 (NM_007697.1,3172-3190).
ctacgagcttggagagtta

SEQ ID NO: 677754 - DNA, 19 bp, Mus musculus
  siRNA target sequence for Chl1 (NM_007697.1,3175-3193).
cgagcttggagagttaaat

SEQ ID NO: 677755 - DNA, 19 bp, Mus musculus
  siRNA target sequence for Chl1 (NM_007697.1,3182-3200).
ggagagttaaatgaaatca

SEQ ID NO: 677756 - DNA, 19 bp, Mus musculus
  siRNA target sequence for Chl1 (NM_007697.1,3202-3220).
cgttactactccatctaaa

SEQ ID NO: 677757 - DNA, 19 bp, Mus musculus
  siRNA target sequence for Chl1 (NM_007697.1,3203-3221).
gttactactccatctaaat

SEQ ID NO: 677758 - DNA, 19 bp, Mus musculus
  siRNA target sequence for Chl1 (NM_007697.1,3410-3428).
gtgccgggagcggaacata

SEQ ID NO: 677759 - DNA, 19 bp, Mus musculus
  siRNA target sequence for Chl1 (NM_007697.1,3412-3430).
gccgggagcggaacatatt

SEQ ID NO: 677760 - DNA, 19 bp, Mus musculus
  siRNA target sequence for Chl1 (NM_007697.1,3414-3432).
cgggagcggaacatattgt

SEQ ID NO: 677761 - DNA, 19 bp, Mus musculus
  siRNA target sequence for Chl1 (NM_007697.1,3415-3433).
gggagcggaacatattgtt

SEQ ID NO: 677762 - DNA, 19 bp, Mus musculus
  siRNA target sequence for Chl1 (NM_007697.1,3417-3435).
gagcggaacatattgttca

SEQ ID NO: 677763 - DNA, 19 bp, Mus musculus
  siRNA target sequence for Chl1 (NM_007697.1,3434-3452).
cacctaatgactaagaatt

SEQ ID NO: 677764 - DNA, 19 bp, Mus musculus
  siRNA target sequence for Chl1 (NM_007697.1,3444-3462).
ctaagaattggggtgataa

SEQ ID NO: 677765 - DNA, 19 bp, Mus musculus
  siRNA target sequence for Chl1 (NM_007697.1,3448-3466).
gaattggggtgataacgat

SEQ ID NO: 677766 - DNA, 19 bp, Mus musculus
  siRNA target sequence for Chl1 (NM_007697.1,3453-3471).
ggggtgataacgatagcat

SEQ ID NO: 677767 - DNA, 19 bp, Mus musculus
  siRNA target sequence for Chl1 (NM_007697.1,3454-3472).
gggtgataacgatagcatt

SEQ ID NO: 677768 - DNA, 19 bp, Mus musculus
  siRNA target sequence for Chl1 (NM_007697.1,3455-3473).
ggtgataacgatagcattt

SEQ ID NO: 677769 - DNA, 19 bp, Mus musculus
  siRNA target sequence for Chl1 (NM_007697.1,3490-3508).
gacaagagggagagaatat

SEQ ID NO: 677770 - DNA, 19 bp, Mus musculus
  siRNA target sequence for Chl1 (NM_007697.1,3564-3582).
caattgctcttcttacact

SEQ ID NO: 677771 - DNA, 19 bp, Mus musculus
  siRNA target sequence for Chl1 (NM_007697.1,3612-3630).
ggaacagaggtggaaagta

SEQ ID NO: 677772 - DNA, 19 bp, Mus musculus
  siRNA target sequence for Chl1 (NM_007697.1,3616-3634).
cagaggtggaaagtattca

SEQ ID NO: 677773 - DNA, 19 bp, Mus musculus
  siRNA target sequence for Chl1 (NM_007697.1,3624-3642).
gaaagtattcagtaaaaga

SEQ ID NO: 677774 - DNA, 19 bp, Mus musculus
  siRNA target sequence for Chl1 (NM_007697.1,3678-3696).
cagcaaaagatgaaacttt

SEQ ID NO: 677775 - DNA, 19 bp, Mus musculus
  siRNA target sequence for Chl1 (NM_007697.1,3709-3727).
cgacagtgatgaaaaacct

SEQ ID NO: 677776 - DNA, 19 bp, Mus musculus
  siRNA target sequence for Chl1 (NM_007697.1,3780-3798).
ctgacagtttagtggaata

SEQ ID NO: 677777 - DNA, 19 bp, Mus musculus
  siRNA target sequence for Chl1 (NM_007697.1,3803-3821).
gagggagaccagtccatat

SEQ ID NO: 677778 - DNA, 19 bp, Mus musculus
  siRNA target sequence for Chl1 (NM_007697.1,3826-3844).
cgaagatggatcgtttatt

SEQ ID NO: 677779 - DNA, 19 bp, Mus musculus
  siRNA target sequence for Chl1 (NM_007697.1,3838-3856).
gtttattggcgcatacact

SEQ ID NO: 677780 - DNA, 19 bp, Mus musculus
  siRNA target sequence for Chl1 (NM_007697.1,3871-3889).
gggatccgttgaaagcaat

SEQ ID NO: 677781 - DNA, 19 bp, Mus musculus
  siRNA target sequence for Efnb1 (NM_010110.2,870-888).
gctctcttaaccctaagtt

SEQ ID NO: 677782 - DNA, 19 bp, Mus musculus
  siRNA target sequence for Efnb1 (NM_010110.2,907-925).
ggtgatctacccgaagatt

SEQ ID NO: 677783 - DNA, 19 bp, Mus musculus
  siRNA target sequence for Efnb1 (NM_010110.2,1141-1159).
gtaccacgattactacatt

SEQ ID NO: 677784 - DNA, 19 bp, Mus musculus
  siRNA target sequence for Efnb1 (NM_010110.2,1144-1162).
ccacgattactacattaca

SEQ ID NO: 677785 - DNA, 19 bp, Mus musculus
  siRNA target sequence for Efnb1 (NM_010110.2,1145-1163).
cacgattactacattacat

SEQ ID NO: 677786 - DNA, 19 bp, Mus musculus
  siRNA target sequence for Efnb1 (NM_010110.2,1147-1165).
cgattactacattacatca

SEQ ID NO: 677787 - DNA, 19 bp, Mus musculus
  siRNA target sequence for Efnb1 (NM_010110.2,1215-1233).
gtcgcacccgcactatgaa

SEQ ID NO: 677788 - DNA, 19 bp, Mus musculus
  siRNA target sequence for Efnb1 (NM_010110.2,1223-1241).
cgcactatgaagatcgtta

SEQ ID NO: 677789 - DNA, 19 bp, Mus musculus
  siRNA target sequence for Efnb1 (NM_010110.2,1246-1264).
ggttgggcaagatccaaat

SEQ ID NO: 677790 - DNA, 19 bp, Mus musculus
  siRNA target sequence for Efnb1 (NM_010110.2,1644-1662).
ccgagcccagcgacatcat

SEQ ID NO: 677791 - DNA, 19 bp, Mus musculus
  siRNA target sequence for Efnb3 (NM_007911.3,503-521).
gggcggttacgtgctttat

SEQ ID NO: 677792 - DNA, 19 bp, Mus musculus
  siRNA target sequence for Efnb3 (NM_007911.3,506-524).
cggttacgtgctttatcct

SEQ ID NO: 677793 - DNA, 19 bp, Mus musculus
  siRNA target sequence for Efnb3 (NM_007911.3,530-548).
cggggaccggctagatcta

SEQ ID NO: 677794 - DNA, 19 bp, Mus musculus
  siRNA target sequence for Efnb3 (NM_007911.3,532-550).
gggaccggctagatctact

SEQ ID NO: 677795 - DNA, 19 bp, Mus musculus
  siRNA target sequence for Efnb3 (NM_007911.3,533-551).
ggaccggctagatctactt

SEQ ID NO: 677796 - DNA, 19 bp, Mus musculus
  siRNA target sequence for Efnb3 (NM_007911.3,536-554).
ccggctagatctactttgt

SEQ ID NO: 677797 - DNA, 19 bp, Mus musculus
  siRNA target sequence for Efnb3 (NM_007911.3,583-601).
cctctcctagttatgagtt

SEQ ID NO: 677798 - DNA, 19 bp, Mus musculus
  siRNA target sequence for Efnb3 (NM_007911.3,588-606).
cctagttatgagttctaca

SEQ ID NO: 677799 - DNA, 19 bp, Mus musculus
  siRNA target sequence for Efnb3 (NM_007911.3,589-607).
ctagttatgagttctacaa

SEQ ID NO: 677800 - DNA, 19 bp, Mus musculus
  siRNA target sequence for Efnb3 (NM_007911.3,756-774).
cgatcccaccacgattact

SEQ ID NO: 677801 - DNA, 19 bp, Mus musculus
  siRNA target sequence for Efnb3 (NM_007911.3,757-775).
gatcccaccacgattacta

SEQ ID NO: 677802 - DNA, 19 bp, Mus musculus
  siRNA target sequence for Efnb3 (NM_007911.3,761-779).
ccaccacgattactacata

SEQ ID NO: 677803 - DNA, 19 bp, Mus musculus
  siRNA target sequence for Efnb3 (NM_007911.3,1361-1379).
gagccctccgaacatctat

SEQ ID NO: 677804 - DNA, 19 bp, Mus musculus
  siRNA target sequence for Efnb3 (NM_007911.3,1365-1383).
cctccgaacatctattaca

SEQ ID NO: 677805 - DNA, 19 bp, Mus musculus
  siRNA target sequence for Efnb3 (NM_007911.3,1366-1384).
ctccgaacatctattacaa

SEQ ID NO: 677806 - DNA, 19 bp, Mus musculus
  siRNA target sequence for L1cam (NM_008478.2,135-153).
ggttgtcttcccaacagat

SEQ ID NO: 677807 - DNA, 19 bp, Mus musculus
  siRNA target sequence for L1cam (NM_008478.2,141-159).
cttcccaacagatgacata

SEQ ID NO: 677808 - DNA, 19 bp, Mus musculus
  siRNA target sequence for L1cam (NM_008478.2,258-276).
gcatgaggcaccctattct

SEQ ID NO: 677809 - DNA, 19 bp, Mus musculus
  siRNA target sequence for L1cam (NM_008478.2,335-353).
gctgctatgccagcaataa

SEQ ID NO: 677810 - DNA, 19 bp, Mus musculus
  siRNA target sequence for L1cam (NM_008478.2,339-357).
ctatgccagcaataagcta

SEQ ID NO: 677811 - DNA, 19 bp, Mus musculus
  siRNA target sequence for L1cam (NM_008478.2,362-380).
ctgccatgtcgcatgagat

SEQ ID NO: 677812 - DNA, 19 bp, Mus musculus
  siRNA target sequence for L1cam (NM_008478.2,411-429).
gccgaaggagactgtaaaa

SEQ ID NO: 677813 - DNA, 19 bp, Mus musculus
  siRNA target sequence for L1cam (NM_008478.2,560-578).
gccagaatggagacctata

SEQ ID NO: 677814 - DNA, 19 bp, Mus musculus
  siRNA target sequence for L1cam (NM_008478.2,561-579).
ccagaatggagacctatat

SEQ ID NO: 677815 - DNA, 19 bp, Mus musculus
  siRNA target sequence for L1cam (NM_008478.2,562-580).
cagaatggagacctatatt

SEQ ID NO: 677816 - DNA, 19 bp, Mus musculus
  siRNA target sequence for L1cam (NM_008478.2,641-659).
gtacccggaccatcattca

SEQ ID NO: 677817 - DNA, 19 bp, Mus musculus
  siRNA target sequence for L1cam (NM_008478.2,648-666).
gaccatcattcaaaaggaa

SEQ ID NO: 677818 - DNA, 19 bp, Mus musculus
  siRNA target sequence for L1cam (NM_008478.2,848-866).
caacagaccgtgttatcta

SEQ ID NO: 677819 - DNA, 19 bp, Mus musculus
  siRNA target sequence for L1cam (NM_008478.2,853-871).
gaccgtgttatctaccaaa

SEQ ID NO: 677820 - DNA, 19 bp, Mus musculus
  siRNA target sequence for L1cam (NM_008478.2,857-875).
gtgttatctaccaaaacca

SEQ ID NO: 677821 - DNA, 19 bp, Mus musculus
  siRNA target sequence for L1cam (NM_008478.2,882-900).
gaccctgcaactactcaat

SEQ ID NO: 677822 - DNA, 19 bp, Mus musculus
  siRNA target sequence for L1cam (NM_008478.2,910-928).
gaggacgatggcgagtata

SEQ ID NO: 677823 - DNA, 19 bp, Mus musculus
  siRNA target sequence for L1cam (NM_008478.2,913-931).
gacgatggcgagtatacct

SEQ ID NO: 677824 - DNA, 19 bp, Mus musculus
  siRNA target sequence for L1cam (NM_008478.2,1097-1115).
gaatcaacggaatgtctat

SEQ ID NO: 677825 - DNA, 19 bp, Mus musculus
  siRNA target sequence for L1cam (NM_008478.2,1156-1174).
gggtctctgatcttgagta

SEQ ID NO: 677826 - DNA, 19 bp, Mus musculus
  siRNA target sequence for L1cam (NM_008478.2,1157-1175).
ggtctctgatcttgagtaa

SEQ ID NO: 677827 - DNA, 19 bp, Mus musculus
  siRNA target sequence for L1cam (NM_008478.2,1277-1295).
ggatcctaacaaaagacaa

SEQ ID NO: 677828 - DNA, 19 bp, Mus musculus
  siRNA target sequence for L1cam (NM_008478.2,1278-1296).
gatcctaacaaaagacaat

SEQ ID NO: 677829 - DNA, 19 bp, Mus musculus
  siRNA target sequence for L1cam (NM_008478.2,1401-1419).
gcttcaggatgaacgattt

SEQ ID NO: 677830 - DNA, 19 bp, Mus musculus
  siRNA target sequence for L1cam (NM_008478.2,1468-1486).
gacactggacgctatttct

SEQ ID NO: 677831 - DNA, 19 bp, Mus musculus
  siRNA target sequence for L1cam (NM_008478.2,1515-1533).
gaccattttggctaaccta

SEQ ID NO: 677832 - DNA, 19 bp, Mus musculus
  siRNA target sequence for L1cam (NM_008478.2,1526-1544).
ctaacctacaggttaaaga

SEQ ID NO: 677833 - DNA, 19 bp, Mus musculus
  siRNA target sequence for L1cam (NM_008478.2,1571-1589).
ggagcgcaattgagaagaa

SEQ ID NO: 677834 - DNA, 19 bp, Mus musculus
  siRNA target sequence for L1cam (NM_008478.2,1690-1708).
gacagtgacaagtatttca

SEQ ID NO: 677835 - DNA, 19 bp, Mus musculus
  siRNA target sequence for L1cam (NM_008478.2,1707-1725).
catagaagatgggaaacta

SEQ ID NO: 677836 - DNA, 19 bp, Mus musculus
  siRNA target sequence for L1cam (NM_008478.2,1750-1768).
gaccagggcaactacagtt

SEQ ID NO: 677837 - DNA, 19 bp, Mus musculus
  siRNA target sequence for L1cam (NM_008478.2,1923-1941).
ctctcccattgagaagtat

SEQ ID NO: 677838 - DNA, 19 bp, Mus musculus
  siRNA target sequence for L1cam (NM_008478.2,1935-1953).
gaagtatgacattgaattt

SEQ ID NO: 677839 - DNA, 19 bp, Mus musculus
  siRNA target sequence for L1cam (NM_008478.2,1992-2010).
gggcaaggtgccaggaaat

SEQ ID NO: 677840 - DNA, 19 bp, Mus musculus
  siRNA target sequence for L1cam (NM_008478.2,1994-2012).
gcaaggtgccaggaaatca

SEQ ID NO: 677841 - DNA, 19 bp, Mus musculus
  siRNA target sequence for L1cam (NM_008478.2,2005-2023).
ggaaatcagacctctacta

SEQ ID NO: 677842 - DNA, 19 bp, Mus musculus
  siRNA target sequence for L1cam (NM_008478.2,2059-2077).
cgggtcactgccattaaca

SEQ ID NO: 677843 - DNA, 19 bp, Mus musculus
  siRNA target sequence for L1cam (NM_008478.2,2060-2078).
gggtcactgccattaacaa

SEQ ID NO: 677844 - DNA, 19 bp, Mus musculus
  siRNA target sequence for L1cam (NM_008478.2,2206-2224).
ccccttcggtggatggatt

SEQ ID NO: 677845 - DNA, 19 bp, Mus musculus
  siRNA target sequence for L1cam (NM_008478.2,2309-2327).
ctttcctggtggtgtctaa

SEQ ID NO: 677846 - DNA, 19 bp, Mus musculus
  siRNA target sequence for L1cam (NM_008478.2,2313-2331).
cctggtggtgtctaacact

SEQ ID NO: 677847 - DNA, 19 bp, Mus musculus
  siRNA target sequence for L1cam (NM_008478.2,2314-2332).
ctggtggtgtctaacactt

SEQ ID NO: 677848 - DNA, 19 bp, Mus musculus
  siRNA target sequence for L1cam (NM_008478.2,2336-2354).
catttgtgccttatgagat

SEQ ID NO: 677849 - DNA, 19 bp, Mus musculus
  siRNA target sequence for L1cam (NM_008478.2,2400-2418).
ggtcaccattggctattca

SEQ ID NO: 677850 - DNA, 19 bp, Mus musculus
  siRNA target sequence for L1cam (NM_008478.2,2525-2543).
gccacctcaagggatacaa

SEQ ID NO: 677851 - DNA, 19 bp, Mus musculus
  siRNA target sequence for L1cam (NM_008478.2,2526-2544).
ccacctcaagggatacaat

SEQ ID NO: 677852 - DNA, 19 bp, Mus musculus
  siRNA target sequence for L1cam (NM_008478.2,2530-2548).
ctcaagggatacaatgtaa

SEQ ID NO: 677853 - DNA, 19 bp, Mus musculus
  siRNA target sequence for L1cam (NM_008478.2,2607-2625).
catagtggtacctgcaaat

SEQ ID NO: 677854 - DNA, 19 bp, Mus musculus
  siRNA target sequence for L1cam (NM_008478.2,2611-2629).
gtggtacctgcaaatacca

SEQ ID NO: 677855 - DNA, 19 bp, Mus musculus
  siRNA target sequence for L1cam (NM_008478.2,2655-2673).
cccttacagctcttaccat

SEQ ID NO: 677856 - DNA, 19 bp, Mus musculus
  siRNA target sequence for L1cam (NM_008478.2,2753-2771).
gccaccctgaggcattaca

SEQ ID NO: 677857 - DNA, 19 bp, Mus musculus
  siRNA target sequence for L1cam (NM_008478.2,2843-2861).
ctggctacctgctctctta

SEQ ID NO: 677858 - DNA, 19 bp, Mus musculus
  siRNA target sequence for L1cam (NM_008478.2,2914-2932).
ccagaactccggactcata

SEQ ID NO: 677859 - DNA, 19 bp, Mus musculus
  siRNA target sequence for L1cam (NM_008478.2,2915-2933).
cagaactccggactcataa

SEQ ID NO: 677860 - DNA, 19 bp, Mus musculus
  siRNA target sequence for L1cam (NM_008478.2,3116-3134).
ggaagggccagtgcaattt

SEQ ID NO: 677861 - DNA, 19 bp, Mus musculus
  siRNA target sequence for L1cam (NM_008478.2,3137-3155).
ggttccatatcttgttcaa

SEQ ID NO: 677862 - DNA, 19 bp, Mus musculus
  siRNA target sequence for L1cam (NM_008478.2,3251-3269).
ctgacaccaaatatgagat

SEQ ID NO: 677863 - DNA, 19 bp, Mus musculus
  siRNA target sequence for L1cam (NM_008478.2,3331-3349).
cctgtgcgagtttctacta

SEQ ID NO: 677864 - DNA, 19 bp, Mus musculus
  siRNA target sequence for L1cam (NM_008478.2,3383-3401).
cctttgtcagcgctatcat

SEQ ID NO: 677865 - DNA, 19 bp, Mus musculus
  siRNA target sequence for L1cam (NM_008478.2,3384-3402).
ctttgtcagcgctatcatt

SEQ ID NO: 677866 - DNA, 19 bp, Mus musculus
  siRNA target sequence for L1cam (NM_008478.2,3388-3406).
gtcagcgctatcattctct

SEQ ID NO: 677867 - DNA, 19 bp, Mus musculus
  siRNA target sequence for L1cam (NM_008478.2,3447-3465).
caagggtggcaaatactca

SEQ ID NO: 677868 - DNA, 19 bp, Mus musculus
  siRNA target sequence for L1cam (NM_008478.2,3478-3496).
gaggacactcaggtagatt

SEQ ID NO: 677869 - DNA, 19 bp, Mus musculus
  siRNA target sequence for L1cam (NM_008478.2,3650-3668).
gtgtggacgtccagttcaa

SEQ ID NO: 677870 - DNA, 19 bp, Mus musculus
  siRNA target sequence for L1cam (NM_008478.2,3744-3762).
ggctacctctcctatcaat

SEQ ID NO: 677871 - DNA, 19 bp, Mus musculus
  siRNA target sequence for L1cam (NM_008478.2,3763-3781).
cctgcagtagccctagaat

SEQ ID NO: 677872 - DNA, 19 bp, Mus musculus
  siRNA target sequence for Hcfc1r1 (NM_181821.1,448-466).
ggcctaaacgccagtcttt

SEQ ID NO: 677873 - DNA, 19 bp, Mus musculus
  siRNA target sequence for Hcfc1r1 (NM_181821.1,527-545).
cccgactcagcctacataa

SEQ ID NO: 677874 - DNA, 19 bp, Mus musculus
  siRNA target sequence for Hcfc1r1 (NM_181821.1,528-546).
ccgactcagcctacataat

SEQ ID NO: 677875 - DNA, 19 bp, Mus musculus
  siRNA target sequence for Mybph (NM_016749.1,370-388).
ggcttcaaggctatgtgtt

SEQ ID NO: 677876 - DNA, 19 bp, Mus musculus
  siRNA target sequence for Mybph (NM_016749.1,399-417).
cgagagggagcctcagaat

SEQ ID NO: 677877 - DNA, 19 bp, Mus musculus
  siRNA target sequence for Mybph (NM_016749.1,749-767).
ggactccatcctcttcatt

SEQ ID NO: 677878 - DNA, 19 bp, Mus musculus
  siRNA target sequence for Mybph (NM_016749.1,896-914).
ggatgtctggggttgcaat

SEQ ID NO: 677879 - DNA, 19 bp, Mus musculus
  siRNA target sequence for Mybph (NM_016749.1,1084-1102).
gggtcttctcagaaaacct

SEQ ID NO: 677880 - DNA, 19 bp, Mus musculus
  siRNA target sequence for Mybph (NM_016749.1,1171-1189).
ccaaacctagagagtttat

SEQ ID NO: 677881 - DNA, 19 bp, Mus musculus
  siRNA target sequence for Mybph (NM_016749.1,1291-1309).
cacctaagcccaagatcat

SEQ ID NO: 677882 - DNA, 19 bp, Mus musculus
  siRNA target sequence for Mybph (NM_016749.1,1397-1415).
gcccagcccctttgattct

SEQ ID NO: 677883 - DNA, 19 bp, Mus musculus
  siRNA target sequence for Mybph (NM_016749.1,1470-1488).
cggctggaggttaaagctt

SEQ ID NO: 677884 - DNA, 19 bp, Mus musculus
  siRNA target sequence for Nmu (NM_019515.1,134-152).
ggctgtccgcaggacaatt

SEQ ID NO: 677885 - DNA, 19 bp, Mus musculus
  siRNA target sequence for Nmu (NM_019515.1,219-237).
caaaggtgtgccaatatca

SEQ ID NO: 677886 - DNA, 19 bp, Mus musculus
  siRNA target sequence for Nmu (NM_019515.1,229-247).
ccaatatcacctcaaagat

SEQ ID NO: 677887 - DNA, 19 bp, Mus musculus
  siRNA target sequence for Nmu (NM_019515.1,256-274).
gaacaagaactacaattgt

SEQ ID NO: 677888 - DNA, 19 bp, Mus musculus
  siRNA target sequence for Nmu (NM_019515.1,265-283).
ctacaattgtggaatgaga

SEQ ID NO: 677889 - DNA, 19 bp, Mus musculus
  siRNA target sequence for Nmu (NM_019515.1,292-310).
gcttgtgcgtcctttctgt

SEQ ID NO: 677890 - DNA, 19 bp, Mus musculus
  siRNA target sequence for Nmu (NM_019515.1,347-365).
gggagctttgccgtatagt

SEQ ID NO: 677891 - DNA, 19 bp, Mus musculus
  siRNA target sequence for Nmu (NM_019515.1,349-367).
gagctttgccgtatagtga

SEQ ID NO: 677892 - DNA, 19 bp, Mus musculus
  siRNA target sequence for Nmu (NM_019515.1,398-416).
gtgagaaagataatactaa

SEQ ID NO: 677893 - DNA, 19 bp, Mus musculus
  siRNA target sequence for Nmu (NM_019515.1,413-431).
ctaagaggttcttatttca

SEQ ID NO: 677894 - DNA, 19 bp, Mus musculus
  siRNA target sequence for Nmu (NM_019515.1,417-435).
gaggttcttatttcactat

SEQ ID NO: 677895 - DNA, 19 bp, Mus musculus
  siRNA target sequence for Nmu (NM_019515.1,556-574).
ccttccgtgggtcaaagta

SEQ ID NO: 677896 - DNA, 19 bp, Mus musculus
  siRNA target sequence for Nmu (NM_019515.1,557-575).
cttccgtgggtcaaagtaa

SEQ ID NO: 677897 - DNA, 19 bp, Mus musculus
  siRNA target sequence for Nmu (NM_019515.1,566-584).
gtcaaagtaagggatactt

SEQ ID NO: 677898 - DNA, 19 bp, Mus musculus
  siRNA target sequence for Nmu (NM_019515.1,568-586).
caaagtaagggatactttt

SEQ ID NO: 677899 - DNA, 19 bp, Mus musculus
  siRNA target sequence for Nmu (NM_019515.1,572-590).
gtaagggatactttttatt

SEQ ID NO: 677900 - DNA, 19 bp, Mus musculus
  siRNA target sequence for Nmu (NM_019515.1,603-621).
cgggaagaggtcaacaagt

SEQ ID NO: 677901 - DNA, 19 bp, Mus musculus
  siRNA target sequence for Nmu (NM_019515.1,604-622).
gggaagaggtcaacaagtt

SEQ ID NO: 677902 - DNA, 19 bp, Mus musculus
  siRNA target sequence for Nmu (NM_019515.1,609-627).
gaggtcaacaagtttcatt

SEQ ID NO: 677903 - DNA, 19 bp, Mus musculus
  siRNA target sequence for Myom2 (NM_008664.1,114-132).
gtgcctttctaccagaaaa

SEQ ID NO: 677904 - DNA, 19 bp, Mus musculus
  siRNA target sequence for Myom2 (NM_008664.1,116-134).
gcctttctaccagaaaaga

SEQ ID NO: 677905 - DNA, 19 bp, Mus musculus
  siRNA target sequence for Myom2 (NM_008664.1,140-158).
gcactttgaccagtcatat

SEQ ID NO: 677906 - DNA, 19 bp, Mus musculus
  siRNA target sequence for Myom2 (NM_008664.1,143-161).
ctttgaccagtcatatcga

SEQ ID NO: 677907 - DNA, 19 bp, Mus musculus
  siRNA target sequence for Myom2 (NM_008664.1,317-335).
gcgggtgagcgcatcagaa

SEQ ID NO: 677908 - DNA, 19 bp, Mus musculus
  siRNA target sequence for Myom2 (NM_008664.1,367-385).
ggtctcaagcggcttctta

SEQ ID NO: 677909 - DNA, 19 bp, Mus musculus
  siRNA target sequence for Myom2 (NM_008664.1,518-536).
gtgggagagacactcattt

SEQ ID NO: 677910 - DNA, 19 bp, Mus musculus
  siRNA target sequence for Myom2 (NM_008664.1,561-579).
gagatcctggtgaggttaa

SEQ ID NO: 677911 - DNA, 19 bp, Mus musculus
  siRNA target sequence for Myom2 (NM_008664.1,643-661).
cgcctgtggtgcaatggta

SEQ ID NO: 677912 - DNA, 19 bp, Mus musculus
  siRNA target sequence for Myom2 (NM_008664.1,743-761).
gatcaacagggccaacttt

SEQ ID NO: 677913 - DNA, 19 bp, Mus musculus
  siRNA target sequence for Myom2 (NM_008664.1,764-782).
ggacaccgccacctattca

SEQ ID NO: 677914 - DNA, 19 bp, Mus musculus
  siRNA target sequence for Myom2 (NM_008664.1,873-891).
gtaggactcccaattggat

SEQ ID NO: 677915 - DNA, 19 bp, Mus musculus
  siRNA target sequence for Myom2 (NM_008664.1,906-924).
gtgatcccgtacacacatt

SEQ ID NO: 677916 - DNA, 19 bp, Mus musculus
  siRNA target sequence for Myom2 (NM_008664.1,908-926).
gatcccgtacacacatttt

SEQ ID NO: 677917 - DNA, 19 bp, Mus musculus
  siRNA target sequence for Myom2 (NM_008664.1,911-929).
cccgtacacacattttgat

SEQ ID NO: 677918 - DNA, 19 bp, Mus musculus
  siRNA target sequence for Myom2 (NM_008664.1,913-931).
cgtacacacattttgatgt

SEQ ID NO: 677919 - DNA, 19 bp, Mus musculus
  siRNA target sequence for Myom2 (NM_008664.1,1079-1097).
gtggaccaagatgttcttt

SEQ ID NO: 677920 - DNA, 19 bp, Mus musculus
  siRNA target sequence for Myom2 (NM_008664.1,1146-1164).
gaggggctgtacactttga

SEQ ID NO: 677921 - DNA, 19 bp, Mus musculus
  siRNA target sequence for Myom2 (NM_008664.1,1189-1207).
gcgaccacagcgctttcat

SEQ ID NO: 677922 - DNA, 19 bp, Mus musculus
  siRNA target sequence for Myom2 (NM_008664.1,1193-1211).
ccacagcgctttcatgttt

SEQ ID NO: 677923 - DNA, 19 bp, Mus musculus
  siRNA target sequence for Myom2 (NM_008664.1,1344-1362).
ggctacttcattgacaaat

SEQ ID NO: 677924 - DNA, 19 bp, Mus musculus
  siRNA target sequence for Myom2 (NM_008664.1,1363-1381).
gtgaggtgggaactaacaa

SEQ ID NO: 677925 - DNA, 19 bp, Mus musculus
  siRNA target sequence for Myom2 (NM_008664.1,1365-1383).
gaggtgggaactaacaact

SEQ ID NO: 677926 - DNA, 19 bp, Mus musculus
  siRNA target sequence for Myom2 (NM_008664.1,1393-1411).
gtaacgatgcaccagtaaa

SEQ ID NO: 677927 - DNA, 19 bp, Mus musculus
  siRNA target sequence for Myom2 (NM_008664.1,1398-1416).
gatgcaccagtaaagatct

SEQ ID NO: 677928 - DNA, 19 bp, Mus musculus
  siRNA target sequence for Myom2 (NM_008664.1,1443-1461).
gaaggaagatcgtatgtgt

SEQ ID NO: 677929 - DNA, 19 bp, Mus musculus
  siRNA target sequence for Myom2 (NM_008664.1,1463-1481).
ccgcgtgagggctgtcaat

SEQ ID NO: 677930 - DNA, 19 bp, Mus musculus
  siRNA target sequence for Myom2 (NM_008664.1,1464-1482).
cgcgtgagggctgtcaata

SEQ ID NO: 677931 - DNA, 19 bp, Mus musculus
  siRNA target sequence for Myom2 (NM_008664.1,1552-1570).
gattgcaagcgattcattt

SEQ ID NO: 677932 - DNA, 19 bp, Mus musculus
  siRNA target sequence for Myom2 (NM_008664.1,1556-1574).
gcaagcgattcatttggaa

SEQ ID NO: 677933 - DNA, 19 bp, Mus musculus
  siRNA target sequence for Myom2 (NM_008664.1,1710-1728).
ggcaaggatcccttaatgt

SEQ ID NO: 677934 - DNA, 19 bp, Mus musculus
  siRNA target sequence for Myom2 (NM_008664.1,1711-1729).
gcaaggatcccttaatgta

SEQ ID NO: 677935 - DNA, 19 bp, Mus musculus
  siRNA target sequence for Myom2 (NM_008664.1,1716-1734).
gatcccttaatgtacttca

SEQ ID NO: 677936 - DNA, 19 bp, Mus musculus
  siRNA target sequence for Myom2 (NM_008664.1,1841-1859).
cgtgttccgggttttgtca

SEQ ID NO: 677937 - DNA, 19 bp, Mus musculus
  siRNA target sequence for Myom2 (NM_008664.1,1849-1867).
gggttttgtcagccaataa

SEQ ID NO: 677938 - DNA, 19 bp, Mus musculus
  siRNA target sequence for Myom2 (NM_008664.1,1953-1971).
cttgcctccaggaatacaa

SEQ ID NO: 677939 - DNA, 19 bp, Mus musculus
  siRNA target sequence for Myom2 (NM_008664.1,2078-2096).
ccacaaacccattggatat

SEQ ID NO: 677940 - DNA, 19 bp, Mus musculus
  siRNA target sequence for Myom2 (NM_008664.1,2079-2097).
cacaaacccattggatata

SEQ ID NO: 677941 - DNA, 19 bp, Mus musculus
  siRNA target sequence for Myom2 (NM_008664.1,2106-2124).
gtggtacacggcttaacca

SEQ ID NO: 677942 - DNA, 19 bp, Mus musculus
  siRNA target sequence for Myom2 (NM_008664.1,2125-2143).
ccggtgagcagtacatctt

SEQ ID NO: 677943 - DNA, 19 bp, Mus musculus
  siRNA target sequence for Myom2 (NM_008664.1,2287-2305).
gctggaaagtgcctaagtt

SEQ ID NO: 677944 - DNA, 19 bp, Mus musculus
  siRNA target sequence for Myom2 (NM_008664.1,2313-2331).
ggctcggccatcataggtt

SEQ ID NO: 677945 - DNA, 19 bp, Mus musculus
  siRNA target sequence for Myom2 (NM_008664.1,2320-2338).
ccatcataggttactatct

SEQ ID NO: 677946 - DNA, 19 bp, Mus musculus
  siRNA target sequence for Myom2 (NM_008664.1,2349-2367).
gaagtgcatcacaagaact

SEQ ID NO: 677947 - DNA, 19 bp, Mus musculus
  siRNA target sequence for Myom2 (NM_008664.1,2378-2396).
caactcttcacctgtcaaa

SEQ ID NO: 677948 - DNA, 19 bp, Mus musculus
  siRNA target sequence for Myom2 (NM_008664.1,2423-2441).
gactgaaggctccttgtat

SEQ ID NO: 677949 - DNA, 19 bp, Mus musculus
  siRNA target sequence for Myom2 (NM_008664.1,2432-2450).
ctccttgtatgagttcaaa

SEQ ID NO: 677950 - DNA, 19 bp, Mus musculus
  siRNA target sequence for Myom2 (NM_008664.1,2621-2639).
cagtcctgtttctggatat

SEQ ID NO: 677951 - DNA, 19 bp, Mus musculus
  siRNA target sequence for Myom2 (NM_008664.1,2698-2716).
ctccaaatcgctacttaaa

SEQ ID NO: 677952 - DNA, 19 bp, Mus musculus
  siRNA target sequence for Myom2 (NM_008664.1,2701-2719).
caaatcgctacttaaaggt

SEQ ID NO: 677953 - DNA, 19 bp, Mus musculus
  siRNA target sequence for Myom2 (NM_008664.1,2732-2750).
gcagggtaagacctatgta

SEQ ID NO: 677954 - DNA, 19 bp, Mus musculus
  siRNA target sequence for Myom2 (NM_008664.1,2733-2751).
cagggtaagacctatgtat

SEQ ID NO: 677955 - DNA, 19 bp, Mus musculus
  siRNA target sequence for Myom2 (NM_008664.1,2744-2762).
ctatgtattcagaattcga

SEQ ID NO: 677956 - DNA, 19 bp, Mus musculus
  siRNA target sequence for Myom2 (NM_008664.1,2987-3005).
ccactcaaagctgtacttt

SEQ ID NO: 677957 - DNA, 19 bp, Mus musculus
  siRNA target sequence for Myom2 (NM_008664.1,2988-3006).
cactcaaagctgtacttta

SEQ ID NO: 677958 - DNA, 19 bp, Mus musculus
  siRNA target sequence for Myom2 (NM_008664.1,3032-3050).
gacatattctgtatctgta

SEQ ID NO: 677959 - DNA, 19 bp, Mus musculus
  siRNA target sequence for Myom2 (NM_008664.1,3113-3131).
ggcactgagcaatgagata

SEQ ID NO: 677960 - DNA, 19 bp, Mus musculus
  siRNA target sequence for Myom2 (NM_008664.1,3114-3132).
gcactgagcaatgagataa

SEQ ID NO: 677961 - DNA, 19 bp, Mus musculus
  siRNA target sequence for Myom2 (NM_008664.1,3152-3170).
gaagtcagaattagcttat

SEQ ID NO: 677962 - DNA, 19 bp, Mus musculus
  siRNA target sequence for Myom2 (NM_008664.1,3165-3183).
gcttatgagattttcgata

SEQ ID NO: 677963 - DNA, 19 bp, Mus musculus
  siRNA target sequence for Myom2 (NM_008664.1,3166-3184).
cttatgagattttcgataa

SEQ ID NO: 677964 - DNA, 19 bp, Mus musculus
  siRNA target sequence for Myom2 (NM_008664.1,3233-3251).
cagcttccggttcatcatt

SEQ ID NO: 677965 - DNA, 19 bp, Mus musculus
  siRNA target sequence for Myom2 (NM_008664.1,3235-3253).
gcttccggttcatcattaa

SEQ ID NO: 677966 - DNA, 19 bp, Mus musculus
  siRNA target sequence for Myom2 (NM_008664.1,3236-3254).
cttccggttcatcattaat

SEQ ID NO: 677967 - DNA, 19 bp, Mus musculus
  siRNA target sequence for Myom2 (NM_008664.1,3240-3258).
cggttcatcattaatgaca

SEQ ID NO: 677968 - DNA, 19 bp, Mus musculus
  siRNA target sequence for Myom2 (NM_008664.1,3272-3290).
cagtgacacgcacagaatt

SEQ ID NO: 677969 - DNA, 19 bp, Mus musculus
  siRNA target sequence for Myom2 (NM_008664.1,3301-3319).
gatcgacaggcatgattga

SEQ ID NO: 677970 - DNA, 19 bp, Mus musculus
  siRNA target sequence for Myom2 (NM_008664.1,3324-3342).
gtcatggatcggttcacta

SEQ ID NO: 677971 - DNA, 19 bp, Mus musculus
  siRNA target sequence for Myom2 (NM_008664.1,3326-3344).
catggatcggttcactatt

SEQ ID NO: 677972 - DNA, 19 bp, Mus musculus
  siRNA target sequence for Myom2 (NM_008664.1,3329-3347).
ggatcggttcactattgaa

SEQ ID NO: 677973 - DNA, 19 bp, Mus musculus
  siRNA target sequence for Myom2 (NM_008664.1,3330-3348).
gatcggttcactattgaaa

SEQ ID NO: 677974 - DNA, 19 bp, Mus musculus
  siRNA target sequence for Myom2 (NM_008664.1,3362-3380).
cactgtgcagattcaagat

SEQ ID NO: 677975 - DNA, 19 bp, Mus musculus
  siRNA target sequence for Myom2 (NM_008664.1,3594-3612).
gacgatgttctttacgaaa

SEQ ID NO: 677976 - DNA, 19 bp, Mus musculus
  siRNA target sequence for Myom2 (NM_008664.1,3641-3659).
ggtctgtgagctgcttata

SEQ ID NO: 677977 - DNA, 19 bp, Mus musculus
  siRNA target sequence for Myom2 (NM_008664.1,3654-3672).
cttatacccaagttgtcta

SEQ ID NO: 677978 - DNA, 19 bp, Mus musculus
  siRNA target sequence for Myom2 (NM_008664.1,3677-3695).
ggaccatggtgaatacaaa

SEQ ID NO: 677979 - DNA, 19 bp, Mus musculus
  siRNA target sequence for Myom2 (NM_008664.1,3755-3773).
gtacgaggacatgatctta

SEQ ID NO: 677980 - DNA, 19 bp, Mus musculus
  siRNA target sequence for Myom2 (NM_008664.1,3846-3864).
cagtgcttcatgaagtact

SEQ ID NO: 677981 - DNA, 19 bp, Mus musculus
  siRNA target sequence for Myom2 (NM_008664.1,3881-3899).
ggtcagctggtatcacaaa

SEQ ID NO: 677982 - DNA, 19 bp, Mus musculus
  siRNA target sequence for Myom2 (NM_008664.1,4154-4172).
cgtggtgaccataatggaa

SEQ ID NO: 677983 - DNA, 19 bp, Mus musculus
  siRNA target sequence for Myom2 (NM_008664.1,4349-4367).
catcaacgtgaagaataaa

SEQ ID NO: 677984 - DNA, 19 bp, Mus musculus
  siRNA target sequence for Myom2 (NM_008664.1,4470-4488).
gcttccacctcatctgatt

SEQ ID NO: 677985 - DNA, 19 bp, Mus musculus
  siRNA target sequence for Spag6 (NM_015773.1,163-181).
gcgacaagaccccaaaaca

SEQ ID NO: 677986 - DNA, 19 bp, Mus musculus
  siRNA target sequence for Spag6 (NM_015773.1,279-297).
gagactggccaattacaat

SEQ ID NO: 677987 - DNA, 19 bp, Mus musculus
  siRNA target sequence for Spag6 (NM_015773.1,358-376).
gcagaacaaaatcgttttt

SEQ ID NO: 677988 - DNA, 19 bp, Mus musculus
  siRNA target sequence for Spag6 (NM_015773.1,359-377).
cagaacaaaatcgttttta

SEQ ID NO: 677989 - DNA, 19 bp, Mus musculus
  siRNA target sequence for Spag6 (NM_015773.1,364-382).
caaaatcgtttttacaaga

SEQ ID NO: 677990 - DNA, 19 bp, Mus musculus
  siRNA target sequence for Spag6 (NM_015773.1,452-470).
gcggagctctggatacact

SEQ ID NO: 677991 - DNA, 19 bp, Mus musculus
  siRNA target sequence for Spag6 (NM_015773.1,519-537).
ctgggcactcggatacatt

SEQ ID NO: 677992 - DNA, 19 bp, Mus musculus
  siRNA target sequence for Spag6 (NM_015773.1,523-541).
gcactcggatacattgcaa

SEQ ID NO: 677993 - DNA, 19 bp, Mus musculus
  siRNA target sequence for Spag6 (NM_015773.1,538-556).
gcaagacacaacacagaat

SEQ ID NO: 677994 - DNA, 19 bp, Mus musculus
  siRNA target sequence for Spag6 (NM_015773.1,776-794).
ctctcagtcagattgcaaa

SEQ ID NO: 677995 - DNA, 19 bp, Mus musculus
  siRNA target sequence for Spag6 (NM_015773.1,780-798).
cagtcagattgcaaagcat

SEQ ID NO: 677996 - DNA, 19 bp, Mus musculus
  siRNA target sequence for Spag6 (NM_015773.1,834-852).
gattttccctgttgtacta

SEQ ID NO: 677997 - DNA, 19 bp, Mus musculus
  siRNA target sequence for Spag6 (NM_015773.1,897-915).
caccttaatcagagagatt

SEQ ID NO: 677998 - DNA, 19 bp, Mus musculus
  siRNA target sequence for Spag6 (NM_015773.1,1263-1281).
ggacctacagctcaaaagt

SEQ ID NO: 677999 - DNA, 19 bp, Mus musculus
  siRNA target sequence for Spag6 (NM_015773.1,1264-1282).
gacctacagctcaaaagta

SEQ ID NO: 678000 - DNA, 19 bp, Mus musculus
  siRNA target sequence for Spag6 (NM_015773.1,1266-1284).
cctacagctcaaaagtaaa

SEQ ID NO: 678001 - DNA, 19 bp, Mus musculus
  siRNA target sequence for Spag6 (NM_015773.1,1375-1393).
gttgttgggcagttcagta

SEQ ID NO: 678002 - DNA, 19 bp, Mus musculus
  siRNA target sequence for Spag6 (NM_015773.1,1481-1499).
gctctctcctgcaggaata

SEQ ID NO: 678003 - DNA, 19 bp, Mus musculus
  siRNA target sequence for Spag6 (NM_015773.1,1484-1502).
ctctcctgcaggaatacat

SEQ ID NO: 678004 - DNA, 19 bp, Mus musculus
  siRNA target sequence for Spag6 (NM_015773.1,1553-1571).
ctggatactccgatacact

SEQ ID NO: 678005 - DNA, 19 bp, Mus musculus
  siRNA target sequence for Tnr (NM_022312.1,615-633).
ggatcgatggggaaacagt

SEQ ID NO: 678006 - DNA, 19 bp, Mus musculus
  siRNA target sequence for Tnr (NM_022312.1,616-634).
gatcgatggggaaacagta

SEQ ID NO: 678007 - DNA, 19 bp, Mus musculus
  siRNA target sequence for Tnr (NM_022312.1,624-642).
gggaaacagtagtcttgaa

SEQ ID NO: 678008 - DNA, 19 bp, Mus musculus
  siRNA target sequence for Tnr (NM_022312.1,799-817).
ggtcttcaaccatgtgtat

SEQ ID NO: 678009 - DNA, 19 bp, Mus musculus
  siRNA target sequence for Tnr (NM_022312.1,800-818).
gtcttcaaccatgtgtata

SEQ ID NO: 678010 - DNA, 19 bp, Mus musculus
  siRNA target sequence for Tnr (NM_022312.1,820-838).
catcaacgtgccacttgaa

SEQ ID NO: 678011 - DNA, 19 bp, Mus musculus
  siRNA target sequence for Tnr (NM_022312.1,896-914).
gatactctggccgaataca

SEQ ID NO: 678012 - DNA, 19 bp, Mus musculus
  siRNA target sequence for Tnr (NM_022312.1,961-979).
gatcaacctccccaaaaaa

SEQ ID NO: 678013 - DNA, 19 bp, Mus musculus
  siRNA target sequence for Tnr (NM_022312.1,1061-1079).
ctgcgagaccagtgcaata

SEQ ID NO: 678014 - DNA, 19 bp, Mus musculus
  siRNA target sequence for Tnr (NM_022312.1,1064-1082).
cgagaccagtgcaatacca

SEQ ID NO: 678015 - DNA, 19 bp, Mus musculus
  siRNA target sequence for Tnr (NM_022312.1,1065-1083).
gagaccagtgcaataccaa

SEQ ID NO: 678016 - DNA, 19 bp, Mus musculus
  siRNA target sequence for Tnr (NM_022312.1,1135-1153).
cagcggccatggcaacttt

SEQ ID NO: 678017 - DNA, 19 bp, Mus musculus
  siRNA target sequence for Tnr (NM_022312.1,1139-1157).
ggccatggcaactttagct

SEQ ID NO: 678018 - DNA, 19 bp, Mus musculus
  siRNA target sequence for Tnr (NM_022312.1,1255-1273).
cgatggccagtgcatttgt

SEQ ID NO: 678019 - DNA, 19 bp, Mus musculus
  siRNA target sequence for Tnr (NM_022312.1,1489-1507).
ccagcgacggtgtctgaat

SEQ ID NO: 678020 - DNA, 19 bp, Mus musculus
  siRNA target sequence for Tnr (NM_022312.1,1657-1675).
gatggcagtgacggaatat

SEQ ID NO: 678021 - DNA, 19 bp, Mus musculus
  siRNA target sequence for Tnr (NM_022312.1,1661-1679).
gcagtgacggaatatgtga

SEQ ID NO: 678022 - DNA, 19 bp, Mus musculus
  siRNA target sequence for Tnr (NM_022312.1,1662-1680).
cagtgacggaatatgtgat

SEQ ID NO: 678023 - DNA, 19 bp, Mus musculus
  siRNA target sequence for Tnr (NM_022312.1,1668-1686).
cggaatatgtgatctctta

SEQ ID NO: 678024 - DNA, 19 bp, Mus musculus
  siRNA target sequence for Tnr (NM_022312.1,1863-1881).
ctcaagggctacagttcaa

SEQ ID NO: 678025 - DNA, 19 bp, Mus musculus
  siRNA target sequence for Tnr (NM_022312.1,2001-2019).
gcgatgtgacgtcctttaa

SEQ ID NO: 678026 - DNA, 19 bp, Mus musculus
  siRNA target sequence for Tnr (NM_022312.1,2144-2162).
gttcgagatgtctctgata

SEQ ID NO: 678027 - DNA, 19 bp, Mus musculus
  siRNA target sequence for Tnr (NM_022312.1,2189-2207).
cctcgagccaaagttgatt

SEQ ID NO: 678028 - DNA, 19 bp, Mus musculus
  siRNA target sequence for Tnr (NM_022312.1,2192-2210).
cgagccaaagttgatttca

SEQ ID NO: 678029 - DNA, 19 bp, Mus musculus
  siRNA target sequence for Tnr (NM_022312.1,2363-2381).
gcctcaagcacccaattta

SEQ ID NO: 678030 - DNA, 19 bp, Mus musculus
  siRNA target sequence for Tnr (NM_022312.1,2499-2517).
ccttagctggtgaacagta

SEQ ID NO: 678031 - DNA, 19 bp, Mus musculus
  siRNA target sequence for Tnr (NM_022312.1,2546-2564).
ggcccaactaccaagacta

SEQ ID NO: 678032 - DNA, 19 bp, Mus musculus
  siRNA target sequence for Tnr (NM_022312.1,2589-2607).
cagagtatggagttggaat

SEQ ID NO: 678033 - DNA, 19 bp, Mus musculus
  siRNA target sequence for Tnr (NM_022312.1,2591-2609).
gagtatggagttggaatat

SEQ ID NO: 678034 - DNA, 19 bp, Mus musculus
  siRNA target sequence for Tnr (NM_022312.1,2593-2611).
gtatggagttggaatatct

SEQ ID NO: 678035 - DNA, 19 bp, Mus musculus
  siRNA target sequence for Tnr (NM_022312.1,2610-2628).
ctgcagtaatgaactcaaa

SEQ ID NO: 678036 - DNA, 19 bp, Mus musculus
  siRNA target sequence for Tnr (NM_022312.1,2613-2631).
cagtaatgaactcaaaaca

SEQ ID NO: 678037 - DNA, 19 bp, Mus musculus
  siRNA target sequence for Tnr (NM_022312.1,2675-2693).
ccccgagacctcatggtaa

SEQ ID NO: 678038 - DNA, 19 bp, Mus musculus
  siRNA target sequence for Tnr (NM_022312.1,2739-2757).
gtggtcccattgatcacta

SEQ ID NO: 678039 - DNA, 19 bp, Mus musculus
  siRNA target sequence for Tnr (NM_022312.1,2750-2768).
gatcactacagaattactt

SEQ ID NO: 678040 - DNA, 19 bp, Mus musculus
  siRNA target sequence for Tnr (NM_022312.1,2753-2771).
cactacagaattactttta

SEQ ID NO: 678041 - DNA, 19 bp, Mus musculus
  siRNA target sequence for Tnr (NM_022312.1,2808-2826).
ccagggataggacttcata

SEQ ID NO: 678042 - DNA, 19 bp, Mus musculus
  siRNA target sequence for Tnr (NM_022312.1,2812-2830).
ggataggacttcatacaca

SEQ ID NO: 678043 - DNA, 19 bp, Mus musculus
  siRNA target sequence for Tnr (NM_022312.1,2846-2864).
cctggagcagaatacatta

SEQ ID NO: 678044 - DNA, 19 bp, Mus musculus
  siRNA target sequence for Tnr (NM_022312.1,2934-2952).
gccctatctcccatttgca

SEQ ID NO: 678045 - DNA, 19 bp, Mus musculus
  siRNA target sequence for Tnr (NM_022312.1,2941-2959).
ctcccatttgcacttttct

SEQ ID NO: 678046 - DNA, 19 bp, Mus musculus
  siRNA target sequence for Tnr (NM_022312.1,2944-2962).
ccatttgcacttttctcat

SEQ ID NO: 678047 - DNA, 19 bp, Mus musculus
  siRNA target sequence for Tnr (NM_022312.1,3110-3128).
ctacagccagccactgaat

SEQ ID NO: 678048 - DNA, 19 bp, Mus musculus
  siRNA target sequence for Tnr (NM_022312.1,3120-3138).
ccactgaatatatagtgaa

SEQ ID NO: 678049 - DNA, 19 bp, Mus musculus
  siRNA target sequence for Tnr (NM_022312.1,3173-3191).
cccatagtgggttctatca

SEQ ID NO: 678050 - DNA, 19 bp, Mus musculus
  siRNA target sequence for Tnr (NM_022312.1,3207-3225).
ctcccaaaaacatcacaat

SEQ ID NO: 678051 - DNA, 19 bp, Mus musculus
  siRNA target sequence for Tnr (NM_022312.1,3209-3227).
cccaaaaacatcacaatta

SEQ ID NO: 678052 - DNA, 19 bp, Mus musculus
  siRNA target sequence for Tnr (NM_022312.1,3222-3240).
caattagcaacgtgactaa

SEQ ID NO: 678053 - DNA, 19 bp, Mus musculus
  siRNA target sequence for Tnr (NM_022312.1,3267-3285).
ctcctgttgcgccttttga

SEQ ID NO: 678054 - DNA, 19 bp, Mus musculus
  siRNA target sequence for Tnr (NM_022312.1,3270-3288).
ctgttgcgccttttgatta

SEQ ID NO: 678055 - DNA, 19 bp, Mus musculus
  siRNA target sequence for Tnr (NM_022312.1,3272-3290).
gttgcgccttttgattact

SEQ ID NO: 678056 - DNA, 19 bp, Mus musculus
  siRNA target sequence for Tnr (NM_022312.1,3377-3395).
ctgtatccagctactgaat

SEQ ID NO: 678057 - DNA, 19 bp, Mus musculus
  siRNA target sequence for Tnr (NM_022312.1,3541-3559).
gggtgaagtggaaaattat

SEQ ID NO: 678058 - DNA, 19 bp, Mus musculus
  siRNA target sequence for Tnr (NM_022312.1,3543-3561).
gtgaagtggaaaattatgt

SEQ ID NO: 678059 - DNA, 19 bp, Mus musculus
  siRNA target sequence for Tnr (NM_022312.1,3566-3584).
gtcctcacacactttgcaa

SEQ ID NO: 678060 - DNA, 19 bp, Mus musculus
  siRNA target sequence for Tnr (NM_022312.1,3608-3626).
gacggggtcagcgaagaat

SEQ ID NO: 678061 - DNA, 19 bp, Mus musculus
  siRNA target sequence for Tnr (NM_022312.1,3612-3630).
gggtcagcgaagaattcca

SEQ ID NO: 678062 - DNA, 19 bp, Mus musculus
  siRNA target sequence for Tnr (NM_022312.1,3658-3676).
ctacactgtcactatgtat

SEQ ID NO: 678063 - DNA, 19 bp, Mus musculus
  siRNA target sequence for Tnr (NM_022312.1,3799-3817).
gcccagagctgcgattgaa

SEQ ID NO: 678064 - DNA, 19 bp, Mus musculus
  siRNA target sequence for Tnr (NM_022312.1,3800-3818).
cccagagctgcgattgaaa

SEQ ID NO: 678065 - DNA, 19 bp, Mus musculus
  siRNA target sequence for Tnr (NM_022312.1,3804-3822).
gagctgcgattgaaaacta

SEQ ID NO: 678066 - DNA, 19 bp, Mus musculus
  siRNA target sequence for Tnr (NM_022312.1,3807-3825).
ctgcgattgaaaactatgt

SEQ ID NO: 678067 - DNA, 19 bp, Mus musculus
  siRNA target sequence for Tnr (NM_022312.1,3809-3827).
gcgattgaaaactatgtct

SEQ ID NO: 678068 - DNA, 19 bp, Mus musculus
  siRNA target sequence for Tnr (NM_022312.1,3810-3828).
cgattgaaaactatgtctt

SEQ ID NO: 678069 - DNA, 19 bp, Mus musculus
  siRNA target sequence for Tnr (NM_022312.1,3815-3833).
gaaaactatgtcttgacat

SEQ ID NO: 678070 - DNA, 19 bp, Mus musculus
  siRNA target sequence for Tnr (NM_022312.1,3852-3870).
gccgcaaagagctgatagt

SEQ ID NO: 678071 - DNA, 19 bp, Mus musculus
  siRNA target sequence for Tnr (NM_022312.1,4150-4168).
ccagaggcggcaaaatgga

SEQ ID NO: 678072 - DNA, 19 bp, Mus musculus
  siRNA target sequence for Tnr (NM_022312.1,4156-4174).
gcggcaaaatggacaaact

SEQ ID NO: 678073 - DNA, 19 bp, Mus musculus
  siRNA target sequence for Tnr (NM_022312.1,4183-4201).
ccggaaatgggcagattat

SEQ ID NO: 678074 - DNA, 19 bp, Mus musculus
  siRNA target sequence for Tnr (NM_022312.1,4186-4204).
gaaatgggcagattatcgt

SEQ ID NO: 678075 - DNA, 19 bp, Mus musculus
  siRNA target sequence for Tnr (NM_022312.1,4236-4254).
ggctagggctagacaacat

SEQ ID NO: 678076 - DNA, 19 bp, Mus musculus
  siRNA target sequence for Tnr (NM_022312.1,4375-4393).
ccgcataggaagttacaat

SEQ ID NO: 678077 - DNA, 19 bp, Mus musculus
  siRNA target sequence for Tnr (NM_022312.1,4568-4586).
gggatcaactggtaccatt

SEQ ID NO: 678078 - DNA, 19 bp, Mus musculus
  siRNA target sequence for Tnr (NM_022312.1,4663-4681).
gaaacggcgagccttgaaa

SEQ ID NO: 678079 - DNA, 19 bp, Mus musculus
  siRNA target sequence for Tnr (NM_022312.1,4667-4685).
cggcgagccttgaaattct

SEQ ID NO: 678080 - DNA, 19 bp, Mus musculus
  siRNA target sequence for AA408868 (NM_030612.1,615-633).
ctcaacctggcttacttct

SEQ ID NO: 678081 - DNA, 19 bp, Mus musculus
  siRNA target sequence for AA408868 (NM_030612.1,799-817).
ccgagcgccctcaagttga

SEQ ID NO: 678082 - DNA, 19 bp, Mus musculus
  siRNA target sequence for AA408868 (NM_030612.1,861-879).
ggtgttcgcgtgaagaact

SEQ ID NO: 678083 - DNA, 19 bp, Mus musculus
  siRNA target sequence for AA408868 (NM_030612.1,931-949).
gccagcccgtggatgagtt

SEQ ID NO: 678084 - DNA, 19 bp, Mus musculus
  siRNA target sequence for AA408868 (NM_030612.1,932-950).
ccagcccgtggatgagttt

SEQ ID NO: 678085 - DNA, 19 bp, Mus musculus
  siRNA target sequence for AA408868 (NM_030612.1,933-951).
cagcccgtggatgagttta

SEQ ID NO: 678086 - DNA, 19 bp, Mus musculus
  siRNA target sequence for AA408868 (NM_030612.1,1001-1019).
gtccgcagtggggaaaaga

SEQ ID NO: 678087 - DNA, 19 bp, Mus musculus
  siRNA target sequence for AA408868 (NM_030612.1,1163-1181).
cgctgccctgcttcagaat

SEQ ID NO: 678088 - DNA, 19 bp, Mus musculus
  siRNA target sequence for AA408868 (NM_030612.1,1165-1183).
ctgccctgcttcagaatat

SEQ ID NO: 678089 - DNA, 19 bp, Mus musculus
  siRNA target sequence for AA408868 (NM_030612.1,1202-1220).
gtgcaacccagtttcacta

SEQ ID NO: 678090 - DNA, 19 bp, Mus musculus
  siRNA target sequence for AA408868 (NM_030612.1,1208-1226).
cccagtttcactaaacact

SEQ ID NO: 678091 - DNA, 19 bp, Mus musculus
  siRNA target sequence for AA408868 (NM_030612.1,1371-1389).
gcgtcaatgtaccagtatt

SEQ ID NO: 678092 - DNA, 19 bp, Mus musculus
  siRNA target sequence for AA408868 (NM_030612.1,1518-1536).
gattccaacctctttgata

SEQ ID NO: 678093 - DNA, 19 bp, Mus musculus
  siRNA target sequence for AA408868 (NM_030612.1,1555-1573).
gcacgggccaaagttttgt

SEQ ID NO: 678094 - DNA, 19 bp, Mus musculus
  siRNA target sequence for AA408868 (NM_030612.1,1770-1788).
ggaagcccgatgaatacca

SEQ ID NO: 678095 - DNA, 19 bp, Mus musculus
  siRNA target sequence for AA408868 (NM_030612.1,1936-1954).
cgtatgtccttgcaagaaa

SEQ ID NO: 678096 - DNA, 19 bp, Mus musculus
  siRNA target sequence for AA408868 (NM_030612.1,2163-2181).
gctgtgaggagcaatcagt

SEQ ID NO: 678097 - DNA, 19 bp, Mus musculus
  siRNA target sequence for AA408868 (NM_030612.1,2231-2249).
cgcggtcgtggctcacaat

SEQ ID NO: 678098 - DNA, 19 bp, Mus musculus
  siRNA target sequence for AA408868 (NM_030612.1,2303-2321).
ggacctcttactaaggaat

SEQ ID NO: 678099 - DNA, 19 bp, Mus musculus
  siRNA target sequence for AA408868 (NM_030612.1,2304-2322).
gacctcttactaaggaata

SEQ ID NO: 678100 - DNA, 19 bp, Mus musculus
  siRNA target sequence for AA408868 (NM_030612.1,2375-2393).
ggcaaaggatcgtaagagt

SEQ ID NO: 678101 - DNA, 19 bp, Mus musculus
  siRNA target sequence for AA408868 (NM_030612.1,2436-2454).
gaactcattcgcctctttt

SEQ ID NO: 678102 - DNA, 19 bp, Mus musculus
  siRNA target sequence for AA408868 (NM_030612.1,2559-2577).
gcagtccgcctgttgatga

SEQ ID NO: 678103 - DNA, 19 bp, Mus musculus
  siRNA target sequence for Cd14 (NM_009841.1,102-120).
gagctagacgaggaaagtt

SEQ ID NO: 678104 - DNA, 19 bp, Mus musculus
  siRNA target sequence for Cd14 (NM_009841.1,105-123).
ctagacgaggaaagttgtt

SEQ ID NO: 678105 - DNA, 19 bp, Mus musculus
  siRNA target sequence for Cd14 (NM_009841.1,209-227).
ccgcagcctggaatacctt

SEQ ID NO: 678106 - DNA, 19 bp, Mus musculus
  siRNA target sequence for Cd14 (NM_009841.1,257-275).
ggggcagttcactgatatt

SEQ ID NO: 678107 - DNA, 19 bp, Mus musculus
  siRNA target sequence for Cd14 (NM_009841.1,258-276).
gggcagttcactgatatta

SEQ ID NO: 678108 - DNA, 19 bp, Mus musculus
  siRNA target sequence for Cd14 (NM_009841.1,259-277).
ggcagttcactgatattat

SEQ ID NO: 678109 - DNA, 19 bp, Mus musculus
  siRNA target sequence for Cd14 (NM_009841.1,320-338).
gattcctagtcggattcta

SEQ ID NO: 678110 - DNA, 19 bp, Mus musculus
  siRNA target sequence for Cd14 (NM_009841.1,436-454).
ccaccggacccgatctcaa

SEQ ID NO: 678111 - DNA, 19 bp, Mus musculus
  siRNA target sequence for Cd14 (NM_009841.1,439-457).
ccggacccgatctcaacat

SEQ ID NO: 678112 - DNA, 19 bp, Mus musculus
  siRNA target sequence for Cd14 (NM_009841.1,441-459).
ggacccgatctcaacatct

SEQ ID NO: 678113 - DNA, 19 bp, Mus musculus
  siRNA target sequence for Cd14 (NM_009841.1,442-460).
gacccgatctcaacatctt

SEQ ID NO: 678114 - DNA, 19 bp, Mus musculus
  siRNA target sequence for Cd14 (NM_009841.1,444-462).
cccgatctcaacatcttga

SEQ ID NO: 678115 - DNA, 19 bp, Mus musculus
  siRNA target sequence for Cd14 (NM_009841.1,445-463).
ccgatctcaacatcttgaa

SEQ ID NO: 678116 - DNA, 19 bp, Mus musculus
  siRNA target sequence for Cd14 (NM_009841.1,683-701).
cccgaccctccaagtttta

SEQ ID NO: 678117 - DNA, 19 bp, Mus musculus
  siRNA target sequence for Cd14 (NM_009841.1,780-798).
ctagaccttagtcacaatt

SEQ ID NO: 678118 - DNA, 19 bp, Mus musculus
  siRNA target sequence for Cd14 (NM_009841.1,854-872).
gctcaatctgtctttcact

SEQ ID NO: 678119 - DNA, 19 bp, Mus musculus
  siRNA target sequence for Cd14 (NM_009841.1,874-892).
ggctgaagcaggtacctaa

SEQ ID NO: 678120 - DNA, 19 bp, Mus musculus
  siRNA target sequence for Cd14 (NM_009841.1,913-931).
gcgtgctggatctcagtta

SEQ ID NO: 678121 - DNA, 19 bp, Mus musculus
  siRNA target sequence for Cd14 (NM_009841.1,975-993).
gtggggaacctgtcactta

SEQ ID NO: 678122 - DNA, 19 bp, Mus musculus
  siRNA target sequence for Cd14 (NM_009841.1,1021-1039).
cccactcggagaagtttaa

SEQ ID NO: 678123 - DNA, 19 bp, Mus musculus
  siRNA target sequence for Cd14 (NM_009841.1,1023-1041).
cactcggagaagtttaact

SEQ ID NO: 678124 - DNA, 19 bp, Mus musculus
  siRNA target sequence for Cd14 (NM_009841.1,1025-1043).
ctcggagaagtttaactct

SEQ ID NO: 678125 - DNA, 19 bp, Mus musculus
  siRNA target sequence for Ly86 (NM_010745.1,198-216).
gtgggggcttggaagtagt

SEQ ID NO: 678126 - DNA, 19 bp, Mus musculus
  siRNA target sequence for Ly86 (NM_010745.1,201-219).
ggggcttggaagtagtcta

SEQ ID NO: 678127 - DNA, 19 bp, Mus musculus
  siRNA target sequence for Ly86 (NM_010745.1,228-246).
gtgatcccttacaggattt

SEQ ID NO: 678128 - DNA, 19 bp, Mus musculus
  siRNA target sequence for Ly86 (NM_010745.1,271-289).
caagcagatccaatcaaat

SEQ ID NO: 678129 - DNA, 19 bp, Mus musculus
  siRNA target sequence for Ly86 (NM_010745.1,275-293).
cagatccaatcaaatctca

SEQ ID NO: 678130 - DNA, 19 bp, Mus musculus
  siRNA target sequence for Ly86 (NM_010745.1,280-298).
ccaatcaaatctcaacatt

SEQ ID NO: 678131 - DNA, 19 bp, Mus musculus
  siRNA target sequence for Ly86 (NM_010745.1,281-299).
caatcaaatctcaacatta

SEQ ID NO: 678132 - DNA, 19 bp, Mus musculus
  siRNA target sequence for Ly86 (NM_010745.1,295-313).
cattagatttggcatcatt

SEQ ID NO: 678133 - DNA, 19 bp, Mus musculus
  siRNA target sequence for Ly86 (NM_010745.1,334-352).
gctgtttctggacataact

SEQ ID NO: 678134 - DNA, 19 bp, Mus musculus
  siRNA target sequence for Ly96 (NM_016923.1,90-108).
ccatattgactgaatctga

SEQ ID NO: 678135 - DNA, 19 bp, Mus musculus
  siRNA target sequence for Ly96 (NM_016923.1,126-144).
gcaactcctccgatgcaat

SEQ ID NO: 678136 - DNA, 19 bp, Mus musculus
  siRNA target sequence for Ly96 (NM_016923.1,127-145).
caactcctccgatgcaatt

SEQ ID NO: 678137 - DNA, 19 bp, Mus musculus
  siRNA target sequence for Ly96 (NM_016923.1,130-148).
ctcctccgatgcaattatt

SEQ ID NO: 678138 - DNA, 19 bp, Mus musculus
  siRNA target sequence for Ly96 (NM_016923.1,141-159).
caattatttcctacagtta

SEQ ID NO: 678139 - DNA, 19 bp, Mus musculus
  siRNA target sequence for Ly96 (NM_016923.1,195-213).
ctgaaccctgcataagact

SEQ ID NO: 678140 - DNA, 19 bp, Mus musculus
  siRNA target sequence for Ly96 (NM_016923.1,212-230).
ctgaggggaaccaatggat

SEQ ID NO: 678141 - DNA, 19 bp, Mus musculus
  siRNA target sequence for Ly96 (NM_016923.1,216-234).
ggggaaccaatggatttgt

SEQ ID NO: 678142 - DNA, 19 bp, Mus musculus
  siRNA target sequence for Ly96 (NM_016923.1,310-328).
gttgccgaagcgtaaggaa

SEQ ID NO: 678143 - DNA, 19 bp, Mus musculus
  siRNA target sequence for Ly96 (NM_016923.1,315-333).
cgaagcgtaaggaagttct

SEQ ID NO: 678144 - DNA, 19 bp, Mus musculus
  siRNA target sequence for Ly96 (NM_016923.1,350-368).
gatgactattctttttgca

SEQ ID NO: 678145 - DNA, 19 bp, Mus musculus
  siRNA target sequence for Ly96 (NM_016923.1,396-414).
catcaataccattctcttt

SEQ ID NO: 678146 - DNA, 19 bp, Mus musculus
  siRNA target sequence for Ly96 (NM_016923.1,415-433).
cgagggaatactatttcct

SEQ ID NO: 678147 - DNA, 19 bp, Mus musculus
  siRNA target sequence for Ly96 (NM_016923.1,431-449).
cctaagggccattacagat

SEQ ID NO: 678148 - DNA, 19 bp, Mus musculus
  siRNA target sequence for Ly96 (NM_016923.1,515-533).
caccgccgtgatgtcaatt

SEQ ID NO: 678149 - DNA, 19 bp, Mus musculus
  siRNA target sequence for C1qa (NM_007572.1,125-143).
ggatggggctccaggaaat

SEQ ID NO: 678150 - DNA, 19 bp, Mus musculus
  siRNA target sequence for C1qa (NM_007572.1,209-227).
gactggtatccgaggtttt

SEQ ID NO: 678151 - DNA, 19 bp, Mus musculus
  siRNA target sequence for C1qa (NM_007572.1,406-424).
cgcttggcaacgtggttat

SEQ ID NO: 678152 - DNA, 19 bp, Mus musculus
  siRNA target sequence for C1qa (NM_007572.1,408-426).
cttggcaacgtggttatct

SEQ ID NO: 678153 - DNA, 19 bp, Mus musculus
  siRNA target sequence for C1qa (NM_007572.1,498-516).
ggcttctattacttcaact

SEQ ID NO: 678154 - DNA, 19 bp, Mus musculus
  siRNA target sequence for C1qa (NM_007572.1,529-547).
ccaagtgggacctttgtct

SEQ ID NO: 678155 - DNA, 19 bp, Mus musculus
  siRNA target sequence for C1qa (NM_007572.1,691-709).
ccgcaaagggtcgcattta

SEQ ID NO: 678156 - DNA, 19 bp, Mus musculus
  siRNA target sequence for C1qb (NM_009777.1,562-580).
caggtcattcgcttcgaaa

SEQ ID NO: 678157 - DNA, 19 bp, Mus musculus
  siRNA target sequence for C1qb (NM_009777.1,590-608).
ccaacgcgaacgagaacta

SEQ ID NO: 678158 - DNA, 19 bp, Mus musculus
  siRNA target sequence for C1qb (NM_009777.1,591-609).
caacgcgaacgagaactat

SEQ ID NO: 678159 - DNA, 19 bp, Mus musculus
  siRNA target sequence for C1qb (NM_009777.1,613-631).
ccacgcaacggcaagttca

SEQ ID NO: 678160 - DNA, 19 bp, Mus musculus
  siRNA target sequence for C1qb (NM_009777.1,683-701).
gcaacctgtgtgtgaatct

SEQ ID NO: 678161 - DNA, 19 bp, Mus musculus
  siRNA target sequence for C1qb (NM_009777.1,719-737).
gggacagcatgcagaaagt

SEQ ID NO: 678162 - DNA, 19 bp, Mus musculus
  siRNA target sequence for C1qb (NM_009777.1,782-800).
caggtggggtagtcttgaa

SEQ ID NO: 678163 - DNA, 19 bp, Mus musculus
  siRNA target sequence for C1qg (NM_007574.1,283-301).
ctggccaccgtgggaaaaa

SEQ ID NO: 678164 - DNA, 19 bp, Mus musculus
  siRNA target sequence for C1qg (NM_007574.1,392-410).
gcaccagtcggtattcaca

SEQ ID NO: 678165 - DNA, 19 bp, Mus musculus
  siRNA target sequence for C1qg (NM_007574.1,447-465).
gccctcgtcaggttcaact

SEQ ID NO: 678166 - DNA, 19 bp, Mus musculus
  siRNA target sequence for C1qg (NM_007574.1,613-631).
gcttctgcgaccacatgtt

SEQ ID NO: 678167 - DNA, 19 bp, Mus musculus
  siRNA target sequence for C1qg (NM_007574.1,689-707).
ggtgtggctatcagtcaat

SEQ ID NO: 678168 - DNA, 19 bp, Mus musculus
  siRNA target sequence for C1qg (NM_007574.1,694-712).
ggctatcagtcaatgacta

SEQ ID NO: 678169 - DNA, 19 bp, Mus musculus
  siRNA target sequence for C4bp (NM_007576.2,408-426).
gtcacaccaccctgaaata

SEQ ID NO: 678170 - DNA, 19 bp, Mus musculus
  siRNA target sequence for C4bp (NM_007576.2,412-430).
caccaccctgaaatacgaa

SEQ ID NO: 678171 - DNA, 19 bp, Mus musculus
  siRNA target sequence for C4bp (NM_007576.2,606-624).
gccaggaaggatttatctt

SEQ ID NO: 678172 - DNA, 19 bp, Mus musculus
  siRNA target sequence for C4bp (NM_007576.2,747-765).
gtggtacagaagacttcta

SEQ ID NO: 678173 - DNA, 19 bp, Mus musculus
  siRNA target sequence for C4bp (NM_007576.2,879-897).
ctcctacctgtgaaaagat

SEQ ID NO: 678174 - DNA, 19 bp, Mus musculus
  siRNA target sequence for C4bp (NM_007576.2,881-899).
cctacctgtgaaaagatca

SEQ ID NO: 678175 - DNA, 19 bp, Mus musculus
  siRNA target sequence for C4bp (NM_007576.2,882-900).
ctacctgtgaaaagatcat

SEQ ID NO: 678176 - DNA, 19 bp, Mus musculus
  siRNA target sequence for C4bp (NM_007576.2,935-953).
gtttctggatataaagcta

SEQ ID NO: 678177 - DNA, 19 bp, Mus musculus
  siRNA target sequence for C4bp (NM_007576.2,941-959).
ggatataaagctacctata

SEQ ID NO: 678178 - DNA, 19 bp, Mus musculus
  siRNA target sequence for C4bp (NM_007576.2,962-980).
cacagagactctgttagat

SEQ ID NO: 678179 - DNA, 19 bp, Mus musculus
  siRNA target sequence for C4bp (NM_007576.2,1021-1039).
catcgagtgtcaaggtaat

SEQ ID NO: 678180 - DNA, 19 bp, Mus musculus
  siRNA target sequence for C4bp (NM_007576.2,1097-1115).
gtcaatggatattatacta

SEQ ID NO: 678181 - DNA, 19 bp, Mus musculus
  siRNA target sequence for C4bp (NM_007576.2,1099-1117).
caatggatattatactagt

SEQ ID NO: 678182 - DNA, 19 bp, Mus musculus
  siRNA target sequence for C4bp (NM_007576.2,1116-1134).
gtatggtctactctaagat

SEQ ID NO: 678183 - DNA, 19 bp, Mus musculus
  siRNA target sequence for C4bp (NM_007576.2,1141-1159).
ggttacatatgaatgtgat

SEQ ID NO: 678184 - DNA, 19 bp, Mus musculus
  siRNA target sequence for C4bp (NM_007576.2,1142-1160).
gttacatatgaatgtgata

SEQ ID NO: 678185 - DNA, 19 bp, Mus musculus
  siRNA target sequence for C4bp (NM_007576.2,1175-1193).
gttggaaaggcaatcatct

SEQ ID NO: 678186 - DNA, 19 bp, Mus musculus
  siRNA target sequence for C4bp (NM_007576.2,1269-1287).
gaacgctgtctgatgagaa

SEQ ID NO: 678187 - DNA, 19 bp, Mus musculus
  siRNA target sequence for C4bp (NM_007576.2,1439-1457).
gcgcttacaggcaacaaga

SEQ ID NO: 678188 - DNA, 19 bp, Mus musculus
  siRNA target sequence for C4bp (NM_007576.2,1462-1480).
gcagtatgtgccaaattca

SEQ ID NO: 678189 - DNA, 19 bp, Mus musculus
  siRNA target sequence for Daf1 (NM_010016.1,730-748).
gaaagtgactcttatacgt

SEQ ID NO: 678190 - DNA, 19 bp, Mus musculus
  siRNA target sequence for Daf1 (NM_010016.1,793-811).
gttggaaatgctagcattt

SEQ ID NO: 678191 - DNA, 19 bp, Mus musculus
  siRNA target sequence for Daf1 (NM_010016.1,856-874).
ccaccccggtgcatagaga

SEQ ID NO: 678192 - DNA, 19 bp, Mus musculus
  siRNA target sequence for Daf1 (NM_010016.1,857-875).
caccccggtgcatagagaa

SEQ ID NO: 678193 - DNA, 19 bp, Mus musculus
  siRNA target sequence for Daf1 (NM_010016.1,859-877).
ccccggtgcatagagaaat

SEQ ID NO: 678194 - DNA, 19 bp, Mus musculus
  siRNA target sequence for Daf1 (NM_010016.1,879-897).
caaggtcccaacgaagaaa

SEQ ID NO: 678195 - DNA, 19 bp, Mus musculus
  siRNA target sequence for Daf1 (NM_010016.1,883-901).
gtcccaacgaagaaaccaa

SEQ ID NO: 678196 - DNA, 19 bp, Mus musculus
  siRNA target sequence for Daf1 (NM_010016.1,887-905).
caacgaagaaaccaacaat

SEQ ID NO: 678197 - DNA, 19 bp, Mus musculus
  siRNA target sequence for Daf1 (NM_010016.1,894-912).
gaaaccaacaattaatgtt

SEQ ID NO: 678198 - DNA, 19 bp, Mus musculus
  siRNA target sequence for Daf1 (NM_010016.1,1046-1064).
caacagtacgtcatccaat

SEQ ID NO: 678199 - DNA, 19 bp, Mus musculus
  siRNA target sequence for Daf1 (NM_010016.1,1051-1069).
gtacgtcatccaataagaa

SEQ ID NO: 678200 - DNA, 19 bp, Mus musculus
  siRNA target sequence for Daf1 (NM_010016.1,1054-1072).
cgtcatccaataagaacat

SEQ ID NO: 678201 - DNA, 19 bp, Mus musculus
  siRNA target sequence for Daf1 (NM_010016.1,1120-1138).
ggacatacatgtttaataa

SEQ ID NO: 678202 - DNA, 19 bp, Mus musculus
  siRNA target sequence for Daf2 (NM_007827.1,453-471).
ccttcactctcaggaaaat

SEQ ID NO: 678203 - DNA, 19 bp, Mus musculus
  siRNA target sequence for Daf2 (NM_007827.1,633-651).
gtcggtatcacctctattt

SEQ ID NO: 678204 - DNA, 19 bp, Mus musculus
  siRNA target sequence for Daf2 (NM_007827.1,635-653).
cggtatcacctctatttta

SEQ ID NO: 678205 - DNA, 19 bp, Mus musculus
  siRNA target sequence for Daf2 (NM_007827.1,643-661).
cctctattttatgtactat

SEQ ID NO: 678206 - DNA, 19 bp, Mus musculus
  siRNA target sequence for Daf2 (NM_007827.1,758-776).
ggaaagcgattcttataaa

SEQ ID NO: 678207 - DNA, 19 bp, Mus musculus
  siRNA target sequence for Daf2 (NM_007827.1,821-839).
gtttggaaattctaccata

SEQ ID NO: 678208 - DNA, 19 bp, Mus musculus
  siRNA target sequence for Daf2 (NM_007827.1,825-843).
ggaaattctaccatatatt

SEQ ID NO: 678209 - DNA, 19 bp, Mus musculus
  siRNA target sequence for Daf2 (NM_007827.1,891-909).
cagtgtatagaggaatcta

SEQ ID NO: 678210 - DNA, 19 bp, Mus musculus
  siRNA target sequence for Daf2 (NM_007827.1,907-925).
ctaaggtcccaattaagaa

SEQ ID NO: 678211 - DNA, 19 bp, Mus musculus
  siRNA target sequence for Daf2 (NM_007827.1,923-941).
gaaaccagtagttaatgtt

SEQ ID NO: 678212 - DNA, 19 bp, Mus musculus
  siRNA target sequence for Daf2 (NM_007827.1,1062-1080).
cctgataccacgacaagaa

SEQ ID NO: 678213 - DNA, 19 bp, Mus musculus
  siRNA target sequence for Daf2 (NM_007827.1,1065-1083).
gataccacgacaagaacat

SEQ ID NO: 678214 - DNA, 19 bp, Mus musculus
  siRNA target sequence for Cfh (NM_009888.2,105-123).
gactgtcagcaagaattat

SEQ ID NO: 678215 - DNA, 19 bp, Mus musculus
  siRNA target sequence for Cfh (NM_009888.2,170-188).
cctcctccaagagaaaatt

SEQ ID NO: 678216 - DNA, 19 bp, Mus musculus
  siRNA target sequence for Cfh (NM_009888.2,205-223).
ctcgtggtcagaacaacta

SEQ ID NO: 678217 - DNA, 19 bp, Mus musculus
  siRNA target sequence for Cfh (NM_009888.2,211-229).
gtcagaacaactatatcca

SEQ ID NO: 678218 - DNA, 19 bp, Mus musculus
  siRNA target sequence for Cfh (NM_009888.2,268-286).
ccgaacacttggcactatt

SEQ ID NO: 678219 - DNA, 19 bp, Mus musculus
  siRNA target sequence for Cfh (NM_009888.2,270-288).
gaacacttggcactattgt

SEQ ID NO: 678220 - DNA, 19 bp, Mus musculus
  siRNA target sequence for Cfh (NM_009888.2,278-296).
ggcactattgtaaaagtat

SEQ ID NO: 678221 - DNA, 19 bp, Mus musculus
  siRNA target sequence for Cfh (NM_009888.2,330-348).
ccaggatatgtcggaaaaa

SEQ ID NO: 678222 - DNA, 19 bp, Mus musculus
  siRNA target sequence for Cfh (NM_009888.2,394-412).
ggcagttggatctcaattt

SEQ ID NO: 678223 - DNA, 19 bp, Mus musculus
  siRNA target sequence for Cfh (NM_009888.2,396-414).
cagttggatctcaatttga

SEQ ID NO: 678224 - DNA, 19 bp, Mus musculus
  siRNA target sequence for Cfh (NM_009888.2,419-437).
ggtgcaaaggttgtttata

SEQ ID NO: 678225 - DNA, 19 bp, Mus musculus
  siRNA target sequence for Cfh (NM_009888.2,706-724).
gccacgatgtgtggaaatt

SEQ ID NO: 678226 - DNA, 19 bp, Mus musculus
  siRNA target sequence for Cfh (NM_009888.2,708-726).
cacgatgtgtggaaattct

SEQ ID NO: 678227 - DNA, 19 bp, Mus musculus
  siRNA target sequence for Cfh (NM_009888.2,710-728).
cgatgtgtggaaattctct

SEQ ID NO: 678228 - DNA, 19 bp, Mus musculus
  siRNA target sequence for Cfh (NM_009888.2,1991-2009).
ccacctcttgaaattctta

SEQ ID NO: 678229 - DNA, 19 bp, Mus musculus
  siRNA target sequence for Cfh (NM_009888.2,1992-2010).
cacctcttgaaattcttaa

SEQ ID NO: 678230 - DNA, 19 bp, Mus musculus
  siRNA target sequence for Cfh (NM_009888.2,2048-2066).
catggtgaagtggtgaaat

SEQ ID NO: 678231 - DNA, 19 bp, Mus musculus
  siRNA target sequence for Cfh (NM_009888.2,2052-2070).
gtgaagtggtgaaatatga

SEQ ID NO: 678232 - DNA, 19 bp, Mus musculus
  siRNA target sequence for Cfh (NM_009888.2,2393-2411).
ccaaaattgactgaattta

SEQ ID NO: 678233 - DNA, 19 bp, Mus musculus
  siRNA target sequence for Cfh (NM_009888.2,2455-2473).
gtacgaacgctcaatctgt

SEQ ID NO: 678234 - DNA, 19 bp, Mus musculus
  siRNA target sequence for Cfh (NM_009888.2,2840-2858).
gaagaaaataggataacct

SEQ ID NO: 678235 - DNA, 19 bp, Mus musculus
  siRNA target sequence for Cfh (NM_009888.2,3083-3101).
gacgttttacccacagtta

SEQ ID NO: 678236 - DNA, 19 bp, Mus musculus
  siRNA target sequence for Cfh (NM_009888.2,3085-3103).
cgttttacccacagttaaa

SEQ ID NO: 678237 - DNA, 19 bp, Mus musculus
  siRNA target sequence for Cfh (NM_009888.2,3086-3104).
gttttacccacagttaaaa

SEQ ID NO: 678238 - DNA, 19 bp, Mus musculus
  siRNA target sequence for Cfh (NM_009888.2,3303-3321).
ccaagaataaatatctaca

SEQ ID NO: 678239 - DNA, 19 bp, Mus musculus
  siRNA target sequence for Cfh (NM_009888.2,3326-3344).
gacagagtacgttatgaat

SEQ ID NO: 678240 - DNA, 19 bp, Mus musculus
  siRNA target sequence for Cfh (NM_009888.2,3328-3346).
cagagtacgttatgaatgt

SEQ ID NO: 678241 - DNA, 19 bp, Mus musculus
  siRNA target sequence for Cfh (NM_009888.2,3330-3348).
gagtacgttatgaatgtaa

SEQ ID NO: 678242 - DNA, 19 bp, Mus musculus
  siRNA target sequence for Tapbp (NM_009318.1,112-130).
gggggtggcctgtctaaga

SEQ ID NO: 678243 - DNA, 19 bp, Mus musculus
  siRNA target sequence for Tapbp (NM_009318.1,113-131).
ggggtggcctgtctaagaa

SEQ ID NO: 678244 - DNA, 19 bp, Mus musculus
  siRNA target sequence for Tapbp (NM_009318.1,114-132).
gggtggcctgtctaagaaa

SEQ ID NO: 678245 - DNA, 19 bp, Mus musculus
  siRNA target sequence for Tapbp (NM_009318.1,184-202).
gatcttgacccaaagctat

SEQ ID NO: 678246 - DNA, 19 bp, Mus musculus
  siRNA target sequence for Tapbp (NM_009318.1,315-333).
ggcgaagtgggctagaagt

SEQ ID NO: 678247 - DNA, 19 bp, Mus musculus
  siRNA target sequence for Tapbp (NM_009318.1,882-900).
ccccagagtgtctctaaca

SEQ ID NO: 678248 - DNA, 19 bp, Mus musculus
  siRNA target sequence for Tapbp (NM_009318.1,953-971).
gtcttgcatcccacttctt

SEQ ID NO: 678249 - DNA, 19 bp, Mus musculus
  siRNA target sequence for Tapbp (NM_009318.1,1014-1032).
cccaggaggaagttctaga

SEQ ID NO: 678250 - DNA, 19 bp, Mus musculus
  siRNA target sequence for Tapbp (NM_009318.1,1131-1149).
gcagcatggagttcactat

SEQ ID NO: 678251 - DNA, 19 bp, Mus musculus
  siRNA target sequence for Tapbp (NM_009318.1,1367-1385).
ccattcccaggaactcaaa

SEQ ID NO: 678252 - DNA, 19 bp, Mus musculus
  siRNA target sequence for Ifi30 (NM_023065.2,26-44).
ggtctccgatcctaccatt

SEQ ID NO: 678253 - DNA, 19 bp, Mus musculus
  siRNA target sequence for Ifi30 (NM_023065.2,27-45).
gtctccgatcctaccattt

SEQ ID NO: 678254 - DNA, 19 bp, Mus musculus
  siRNA target sequence for Ifi30 (NM_023065.2,29-47).
ctccgatcctaccattttt

SEQ ID NO: 678255 - DNA, 19 bp, Mus musculus
  siRNA target sequence for Ifi30 (NM_023065.2,31-49).
ccgatcctaccatttttgt

SEQ ID NO: 678256 - DNA, 19 bp, Mus musculus
  siRNA target sequence for Ifi30 (NM_023065.2,193-211).
gtcagagtcagcctgtatt

SEQ ID NO: 678257 - DNA, 19 bp, Mus musculus
  siRNA target sequence for Ifi30 (NM_023065.2,195-213).
cagagtcagcctgtattat

SEQ ID NO: 678258 - DNA, 19 bp, Mus musculus
  siRNA target sequence for Ifi30 (NM_023065.2,197-215).
gagtcagcctgtattatga

SEQ ID NO: 678259 - DNA, 19 bp, Mus musculus
  siRNA target sequence for Ifi30 (NM_023065.2,199-217).
gtcagcctgtattatgagt

SEQ ID NO: 678260 - DNA, 19 bp, Mus musculus
  siRNA target sequence for Ifi30 (NM_023065.2,537-555).
ggagtgcgccacaggaaaa

SEQ ID NO: 678261 - DNA, 19 bp, Mus musculus
  siRNA target sequence for Ifi30 (NM_023065.2,630-648).
ggtgctggtcaatgagaaa

SEQ ID NO: 678262 - DNA, 19 bp, Mus musculus
  siRNA target sequence for Ifi30 (NM_023065.2,667-685).
gagctcctgagcatagtct

SEQ ID NO: 678263 - DNA, 19 bp, Mus musculus
  siRNA target sequence for Crp (NM_007768.2,212-230).
gccactgaacacctttact

SEQ ID NO: 678264 - DNA, 19 bp, Mus musculus
  siRNA target sequence for Crp (NM_007768.2,305-323).
ctctaacgacattctcata

SEQ ID NO: 678265 - DNA, 19 bp, Mus musculus
  siRNA target sequence for Crp (NM_007768.2,328-346).
ggaataaggataaacagta

SEQ ID NO: 678266 - DNA, 19 bp, Mus musculus
  siRNA target sequence for Crp (NM_007768.2,361-379).
gtggtgctgaagtacgatt

SEQ ID NO: 678267 - DNA, 19 bp, Mus musculus
  siRNA target sequence for Crp (NM_007768.2,364-382).
gtgctgaagtacgattcat

SEQ ID NO: 678268 - DNA, 19 bp, Mus musculus
  siRNA target sequence for Crp (NM_007768.2,369-387).
gaagtacgattcatggttt

SEQ ID NO: 678269 - DNA, 19 bp, Mus musculus
  siRNA target sequence for Crp (NM_007768.2,431-449).
gtctgctacggggattgta

SEQ ID NO: 678270 - DNA, 19 bp, Mus musculus
  siRNA target sequence for Crp (NM_007768.2,433-451).
ctgctacggggattgtaga

SEQ ID NO: 678271 - DNA, 19 bp, Mus musculus
  siRNA target sequence for Crp (NM_007768.2,709-727).
cacagggtgatgtgtttat

SEQ ID NO: 678272 - DNA, 19 bp, Mus musculus
  siRNA target sequence for Crp (NM_007768.2,711-729).
cagggtgatgtgtttatta

SEQ ID NO: 678273 - DNA, 19 bp, Mus musculus
  siRNA target sequence for Azgp1 (NM_013478.1,349-367).
ggttgcgagatcacaaata

SEQ ID NO: 678274 - DNA, 19 bp, Mus musculus
  siRNA target sequence for Azgp1 (NM_013478.1,350-368).
gttgcgagatcacaaataa

SEQ ID NO: 678275 - DNA, 19 bp, Mus musculus
  siRNA target sequence for Azgp1 (NM_013478.1,398-416).
cctacgacggagaggattt

SEQ ID NO: 678276 - DNA, 19 bp, Mus musculus
  siRNA target sequence for Azgp1 (NM_013478.1,407-425).
gagaggatttcatcgaatt

SEQ ID NO: 678277 - DNA, 19 bp, Mus musculus
  siRNA target sequence for Azgp1 (NM_013478.1,412-430).
gatttcatcgaattcaaca

SEQ ID NO: 678278 - DNA, 19 bp, Mus musculus
  siRNA target sequence for Azgp1 (NM_013478.1,466-484).
gctgcaaacaccaagctaa

SEQ ID NO: 678279 - DNA, 19 bp, Mus musculus
  siRNA target sequence for Azgp1 (NM_013478.1,467-485).
ctgcaaacaccaagctaaa

SEQ ID NO: 678280 - DNA, 19 bp, Mus musculus
  siRNA target sequence for Azgp1 (NM_013478.1,469-487).
gcaaacaccaagctaaagt

SEQ ID NO: 678281 - DNA, 19 bp, Mus musculus
  siRNA target sequence for Azgp1 (NM_013478.1,513-531).
gcgagccaaggcataccta

SEQ ID NO: 678282 - DNA, 19 bp, Mus musculus
  siRNA target sequence for Azgp1 (NM_013478.1,581-599).
ctcacctggaccgaataga

SEQ ID NO: 678283 - DNA, 19 bp, Mus musculus
  siRNA target sequence for Azgp1 (NM_013478.1,640-658).
ggaaacagaatattcaaat

SEQ ID NO: 678284 - DNA, 19 bp, Mus musculus
  siRNA target sequence for Azgp1 (NM_013478.1,865-883).
cagtgggataggacaagaa

SEQ ID NO: 678285 - DNA, 19 bp, Mus musculus
  siRNA target sequence for Azgp1 (NM_013478.1,867-885).
gtgggataggacaagaaaa

SEQ ID NO: 678286 - DNA, 19 bp, Mus musculus
  siRNA target sequence for Azgp1 (NM_013478.1,869-887).
gggataggacaagaaaagt

SEQ ID NO: 678287 - DNA, 19 bp, Mus musculus
  siRNA target sequence for Azgp1 (NM_013478.1,870-888).
ggataggacaagaaaagta

SEQ ID NO: 678288 - DNA, 19 bp, Mus musculus
  siRNA target sequence for Ctla4 (NM_009843.2,196-214).
ctaggacttggccttttgt

SEQ ID NO: 678289 - DNA, 19 bp, Mus musculus
  siRNA target sequence for Ctla4 (NM_009843.2,305-323).
cgccagctttccatgtgaa

SEQ ID NO: 678290 - DNA, 19 bp, Mus musculus
  siRNA target sequence for Ctla4 (NM_009843.2,406-424).
cgacattcacagagaagaa

SEQ ID NO: 678291 - DNA, 19 bp, Mus musculus
  siRNA target sequence for Ctla4 (NM_009843.2,427-445).
cagtgggcttcctagatta

SEQ ID NO: 678292 - DNA, 19 bp, Mus musculus
  siRNA target sequence for Ctla4 (NM_009843.2,449-467).
cttctgcagtggtaccttt

SEQ ID NO: 678293 - DNA, 19 bp, Mus musculus
  siRNA target sequence for Ctla4 (NM_009843.2,532-550).
gcaaggtggaactcatgta

SEQ ID NO: 678294 - DNA, 19 bp, Mus musculus
  siRNA target sequence for Ctla4 (NM_009843.2,548-566).
gtacccaccgccatacttt

SEQ ID NO: 678295 - DNA, 19 bp, Mus musculus
  siRNA target sequence for Ctla4 (NM_009843.2,576-594).
ggcaacgggacgcagattt

SEQ ID NO: 678296 - DNA, 19 bp, Mus musculus
  siRNA target sequence for Ctla4 (NM_009843.2,577-595).
gcaacgggacgcagattta

SEQ ID NO: 678297 - DNA, 19 bp, Mus musculus
  siRNA target sequence for Ctla4 (NM_009843.2,578-596).
caacgggacgcagatttat

SEQ ID NO: 678298 - DNA, 19 bp, Mus musculus
  siRNA target sequence for Ctla4 (NM_009843.2,582-600).
gggacgcagatttatgtca

SEQ ID NO: 678299 - DNA, 19 bp, Mus musculus
  siRNA target sequence for Ctla4 (NM_009843.2,583-601).
ggacgcagatttatgtcat

SEQ ID NO: 678300 - DNA, 19 bp, Mus musculus
  siRNA target sequence for Ctla4 (NM_009843.2,584-602).
gacgcagatttatgtcatt

SEQ ID NO: 678301 - DNA, 19 bp, Mus musculus
  siRNA target sequence for Ctla4 (NM_009843.2,586-604).
cgcagatttatgtcattga

SEQ ID NO: 678302 - DNA, 19 bp, Mus musculus
  siRNA target sequence for Ctla4 (NM_009843.2,587-605).
gcagatttatgtcattgat

SEQ ID NO: 678303 - DNA, 19 bp, Mus musculus
  siRNA target sequence for Ctla4 (NM_009843.2,736-754).
caacaggggtctatgtgaa

SEQ ID NO: 678304 - DNA, 19 bp, Mus musculus
  siRNA target sequence for H2-Bl (NM_008199.1,1138-1156).
ccggctccaacatggtaaa

SEQ ID NO: 678305 - DNA, 19 bp, Mus musculus
  siRNA target sequence for H2-M1 (NM_177636.1,145-163).
ctcggctatgtggatgata

SEQ ID NO: 678306 - DNA, 19 bp, Mus musculus
  siRNA target sequence for H2-M1 (NM_177636.1,215-233).
gggcaccatggatgtatga

SEQ ID NO: 678307 - DNA, 19 bp, Mus musculus
  siRNA target sequence for H2-M1 (NM_177636.1,217-235).
gcaccatggatgtatgaga

SEQ ID NO: 678308 - DNA, 19 bp, Mus musculus
  siRNA target sequence for H2-M1 (NM_177636.1,268-286).
gtcgtgagagaacactata

SEQ ID NO: 678309 - DNA, 19 bp, Mus musculus
  siRNA target sequence for H2-M1 (NM_177636.1,271-289).
gtgagagaacactatatct

SEQ ID NO: 678310 - DNA, 19 bp, Mus musculus
  siRNA target sequence for H2-M1 (NM_177636.1,275-293).
gagaacactatatcttgaa

SEQ ID NO: 678311 - DNA, 19 bp, Mus musculus
  siRNA target sequence for H2-M1 (NM_177636.1,310-328).
gtgctacacatctacaatt

SEQ ID NO: 678312 - DNA, 19 bp, Mus musculus
  siRNA target sequence for H2-M1 (NM_177636.1,312-330).
gctacacatctacaattat

SEQ ID NO: 678313 - DNA, 19 bp, Mus musculus
  siRNA target sequence for H2-M1 (NM_177636.1,313-331).
ctacacatctacaattata

SEQ ID NO: 678314 - DNA, 19 bp, Mus musculus
  siRNA target sequence for H2-M1 (NM_177636.1,398-416).
gtcatggcttctttaaatt

SEQ ID NO: 678315 - DNA, 19 bp, Mus musculus
  siRNA target sequence for H2-M1 (NM_177636.1,403-421).
ggcttctttaaattagcat

SEQ ID NO: 678316 - DNA, 19 bp, Mus musculus
  siRNA target sequence for H2-M1 (NM_177636.1,418-436).
gcattcaatctccatgatt

SEQ ID NO: 678317 - DNA, 19 bp, Mus musculus
  siRNA target sequence for H2-M1 (NM_177636.1,419-437).
cattcaatctccatgatta

SEQ ID NO: 678318 - DNA, 19 bp, Mus musculus
  siRNA target sequence for H2-M10.1 (NM_013544.2,307-325).
cggttaatggtgaaaaaaa

SEQ ID NO: 678319 - DNA, 19 bp, Mus musculus
  siRNA target sequence for H2-M10.1 (NM_013544.2,329-347).
gacacaaaatggatggtta

SEQ ID NO: 678320 - DNA, 19 bp, Mus musculus
  siRNA target sequence for H2-M10.2 (NM_177923.1,278-296).
cactgacaaacgaaagact

SEQ ID NO: 678321 - DNA, 19 bp, Mus musculus
  siRNA target sequence for H2-M10.2 (NM_177923.1,282-300).
gacaaacgaaagacttctt

SEQ ID NO: 678322 - DNA, 19 bp, Mus musculus
  siRNA target sequence for H2-M10.2 (NM_177923.1,416-434).
cctactacggctatgagtt

SEQ ID NO: 678323 - DNA, 19 bp, Mus musculus
  siRNA target sequence for H2-M10.4 (NM_177634.1,293-311).
caagacgaactcttatata

SEQ ID NO: 678324 - DNA, 19 bp, Mus musculus
  siRNA target sequence for H2-M10.4 (NM_177634.1,296-314).
gacgaactcttatatacat

SEQ ID NO: 678325 - DNA, 19 bp, Mus musculus
  siRNA target sequence for H2-M10.4 (NM_177634.1,312-330).
catggtgactgaaaataat

SEQ ID NO: 678326 - DNA, 19 bp, Mus musculus
  siRNA target sequence for H2-M10.5 (NM_177637.2,167-185).
ctatagagtatcagagata

SEQ ID NO: 678327 - DNA, 19 bp, Mus musculus
  siRNA target sequence for H2-M10.5 (NM_177637.2,172-190).
gagtatcagagatatgaca

SEQ ID NO: 678328 - DNA, 19 bp, Mus musculus
  siRNA target sequence for H2-M10.5 (NM_177637.2,271-289).
gcaagcgttgcggaattgt

SEQ ID NO: 678329 - DNA, 19 bp, Mus musculus
  siRNA target sequence for H2-M10.5 (NM_177637.2,313-331).
cacttcatggtgaacaaaa

SEQ ID NO: 678330 - DNA, 19 bp, Mus musculus
  siRNA target sequence for H2-M10.5 (NM_177637.2,315-333).
cttcatggtgaacaaaaat

SEQ ID NO: 678331 - DNA, 19 bp, Mus musculus
  siRNA target sequence for H2-M10.5 (NM_177637.2,437-455).
gctatgatgacttatacct

SEQ ID NO: 678332 - DNA, 19 bp, Mus musculus
  siRNA target sequence for H2-M10.5 (NM_177637.2,445-463).
gacttatacctgaatgaga

SEQ ID NO: 678333 - DNA, 19 bp, Mus musculus
  siRNA target sequence for H2-M10.5 (NM_177637.2,473-491).
cctggattgcacatggaaa

SEQ ID NO: 678334 - DNA, 19 bp, Mus musculus
  siRNA target sequence for H2-M11 (NM_177635.1,166-184).
cagtttgagagattcaaca

SEQ ID NO: 678335 - DNA, 19 bp, Mus musculus
  siRNA target sequence for H2-M11 (NM_177635.1,215-233).
gtgcaccatggaaagatca

SEQ ID NO: 678336 - DNA, 19 bp, Mus musculus
  siRNA target sequence for H2-M11 (NM_177635.1,217-235).
gcaccatggaaagatcaaa

SEQ ID NO: 678337 - DNA, 19 bp, Mus musculus
  siRNA target sequence for H2-M11 (NM_177635.1,241-259).
ccagagtattggaaggata

SEQ ID NO: 678338 - DNA, 19 bp, Mus musculus
  siRNA target sequence for H2-M11 (NM_177635.1,244-262).
gagtattggaaggataaca

SEQ ID NO: 678339 - DNA, 19 bp, Mus musculus
  siRNA target sequence for H2-M11 (NM_177635.1,246-264).
gtattggaaggataacaca

SEQ ID NO: 678340 - DNA, 19 bp, Mus musculus
  siRNA target sequence for H2-M11 (NM_177635.1,265-283).
gacctcgttctgagctatt

SEQ ID NO: 678341 - DNA, 19 bp, Mus musculus
  siRNA target sequence for H2-M11 (NM_177635.1,307-325).
caaaggatgctcaaaatct

SEQ ID NO: 678342 - DNA, 19 bp, Mus musculus
  siRNA target sequence for H2-M11 (NM_177635.1,351-369).
cacaatccagagaaggtat

SEQ ID NO: 678343 - DNA, 19 bp, Mus musculus
  siRNA target sequence for H2-M11 (NM_177635.1,362-380).
gaaggtatggctgctatat

SEQ ID NO: 678344 - DNA, 19 bp, Mus musculus
  siRNA target sequence for H2-M11 (NM_177635.1,365-383).
ggtatggctgctatatcct

SEQ ID NO: 678345 - DNA, 19 bp, Mus musculus
  siRNA target sequence for H2-M11 (NM_177635.1,384-402).
gcctcgagggtatttcaga

SEQ ID NO: 678346 - DNA, 19 bp, Mus musculus
  siRNA target sequence for H2-M11 (NM_177635.1,386-404).
ctcgagggtatttcagaaa

SEQ ID NO: 678347 - DNA, 19 bp, Mus musculus
  siRNA target sequence for H2-M11 (NM_177635.1,401-419).
gaaacggattctttgaagt

SEQ ID NO: 678348 - DNA, 19 bp, Mus musculus
  siRNA target sequence for H2-M11 (NM_177635.1,407-425).
gattctttgaagtagtctt

SEQ ID NO: 678349 - DNA, 19 bp, Mus musculus
  siRNA target sequence for H2-M11 (NM_177635.1,421-439).
gtcttcaatgaccatgatt

SEQ ID NO: 678350 - DNA, 19 bp, Mus musculus
  siRNA target sequence for H2-M11 (NM_177635.1,510-528).
gtgggactcatcaggtttt

SEQ ID NO: 678351 - DNA, 19 bp, Mus musculus
  siRNA target sequence for H2-M11 (NM_177635.1,513-531).
ggactcatcaggttttaca

SEQ ID NO: 678352 - DNA, 19 bp, Mus musculus
  siRNA target sequence for H2-M11 (NM_177635.1,518-536).
catcaggttttacacaaaa

SEQ ID NO: 678353 - DNA, 19 bp, Mus musculus
  siRNA target sequence for H2-M11 (NM_177635.1,524-542).
gttttacacaaaatgtgaa

SEQ ID NO: 678354 - DNA, 19 bp, Mus musculus
  siRNA target sequence for H2-M11 (NM_177635.1,644-662).
gtaaggtcagacctgataa

SEQ ID NO: 678355 - DNA, 19 bp, Mus musculus
  siRNA target sequence for H2-M11 (NM_177635.1,678-696).
gtgctgggccttgaaattt

SEQ ID NO: 678356 - DNA, 19 bp, Mus musculus
  siRNA target sequence for H2-M11 (NM_177635.1,680-698).
gctgggccttgaaatttta

SEQ ID NO: 678357 - DNA, 19 bp, Mus musculus
  siRNA target sequence for H2-M11 (NM_177635.1,805-823).
gcagctgttgtggtacttt

SEQ ID NO: 678358 - DNA, 19 bp, Mus musculus
  siRNA target sequence for H2-M11 (NM_177635.1,839-857).
gatataaatgtcatgtgaa

SEQ ID NO: 678359 - DNA, 19 bp, Mus musculus
  siRNA target sequence for H2-M11 (NM_177635.1,911-929).
ccatttcctttatgcatat

SEQ ID NO: 678360 - DNA, 19 bp, Mus musculus
  siRNA target sequence for H2-M3 (NM_013819.1,77-95).
cacattcactgcgctattt

SEQ ID NO: 678361 - DNA, 19 bp, Mus musculus
  siRNA target sequence for H2-M3 (NM_013819.1,122-140).
gtggggagccccagtatat

SEQ ID NO: 678362 - DNA, 19 bp, Mus musculus
  siRNA target sequence for H2-M3 (NM_013819.1,267-285).
caaggtcaagaatattgca

SEQ ID NO: 678363 - DNA, 19 bp, Mus musculus
  siRNA target sequence for H2-M3 (NM_013819.1,411-429).
ctatcaggctgcgtatgat

SEQ ID NO: 678364 - DNA, 19 bp, Mus musculus
  siRNA target sequence for H2-M3 (NM_013819.1,591-609).
gaatggcaaggagattctt

SEQ ID NO: 678365 - DNA, 19 bp, Mus musculus
  siRNA target sequence for H2-M3 (NM_013819.1,656-674).
ccaaaggtgatgttacctt

SEQ ID NO: 678366 - DNA, 19 bp, Mus musculus
  siRNA target sequence for H2-M3 (NM_013819.1,894-912).
gggaagatcgtctcaatca

SEQ ID NO: 678367 - DNA, 19 bp, Mus musculus
  siRNA target sequence for H2-M3 (NM_013819.1,895-913).
ggaagatcgtctcaatcat

SEQ ID NO: 678368 - DNA, 19 bp, Mus musculus
  siRNA target sequence for H2-T24 (NM_008207.2,59-77).
ggtcgcactctctgcatta

SEQ ID NO: 678369 - DNA, 19 bp, Mus musculus
  siRNA target sequence for H2-T24 (NM_008207.2,126-144).
gaccagtggcttcttagat

SEQ ID NO: 678370 - DNA, 19 bp, Mus musculus
  siRNA target sequence for H2-T24 (NM_008207.2,131-149).
gtggcttcttagataacca

SEQ ID NO: 678371 - DNA, 19 bp, Mus musculus
  siRNA target sequence for H2-T24 (NM_008207.2,284-302).
gaaacattcggcaatacta

SEQ ID NO: 678372 - DNA, 19 bp, Mus musculus
  siRNA target sequence for H2-T24 (NM_008207.2,358-376).
cacaccctccagttcacat

SEQ ID NO: 678373 - DNA, 19 bp, Mus musculus
  siRNA target sequence for H2-T24 (NM_008207.2,424-442).
ggctacgatggcagtgatt

SEQ ID NO: 678374 - DNA, 19 bp, Mus musculus
  siRNA target sequence for H2-T24 (NM_008207.2,425-443).
gctacgatggcagtgatta

SEQ ID NO: 678375 - DNA, 19 bp, Mus musculus
  siRNA target sequence for H2-T24 (NM_008207.2,453-471).
ggacttgggctctatgcaa

SEQ ID NO: 678376 - DNA, 19 bp, Mus musculus
  siRNA target sequence for H2-T24 (NM_008207.2,459-477).
gggctctatgcaatatata

SEQ ID NO: 678377 - DNA, 19 bp, Mus musculus
  siRNA target sequence for H2-T24 (NM_008207.2,638-656).
caacagtgactcatcagtt

SEQ ID NO: 678378 - DNA, 19 bp, Mus musculus
  siRNA target sequence for H2-T24 (NM_008207.2,641-659).
cagtgactcatcagttcaa

SEQ ID NO: 678379 - DNA, 19 bp, Mus musculus
  siRNA target sequence for H2-T24 (NM_008207.2,920-938).
cgcccacgacaggagtata

SEQ ID NO: 678380 - DNA, 19 bp, Mus musculus
  siRNA target sequence for H2-T24 (NM_008207.2,921-939).
gcccacgacaggagtatat

SEQ ID NO: 678381 - DNA, 19 bp, Mus musculus
  siRNA target sequence for H2-T24 (NM_008207.2,924-942).
cacgacaggagtatatgct

SEQ ID NO: 678382 - DNA, 19 bp, Mus musculus
  siRNA target sequence for H2-T24 (NM_008207.2,992-1010).
ctttatttggcatagtact

SEQ ID NO: 678383 - DNA, 19 bp, Mus musculus
  siRNA target sequence for H2-T24 (NM_008207.2,1019-1037).
gacttacccgctacaaact

SEQ ID NO: 678384 - DNA, 19 bp, Mus musculus
  siRNA target sequence for H2-T24 (NM_008207.2,1021-1039).
cttacccgctacaaactca

SEQ ID NO: 678385 - DNA, 19 bp, Mus musculus
  siRNA target sequence for H28 (NM_031367.1,139-157).
cttgggaacgcatcattga

SEQ ID NO: 678386 - DNA, 19 bp, Mus musculus
  siRNA target sequence for H28 (NM_031367.1,147-165).
cgcatcattgactcttctt

SEQ ID NO: 678387 - DNA, 19 bp, Mus musculus
  siRNA target sequence for H28 (NM_031367.1,149-167).
catcattgactcttcttta

SEQ ID NO: 678388 - DNA, 19 bp, Mus musculus
  siRNA target sequence for H28 (NM_031367.1,152-170).
cattgactcttctttatca

SEQ ID NO: 678389 - DNA, 19 bp, Mus musculus
  siRNA target sequence for H28 (NM_031367.1,171-189).
gtccagtgctcataaaaat

SEQ ID NO: 678390 - DNA, 19 bp, Mus musculus
  siRNA target sequence for H28 (NM_031367.1,227-245).
gatccacaatgacagtatt

SEQ ID NO: 678391 - DNA, 19 bp, Mus musculus
  siRNA target sequence for H28 (NM_031367.1,295-313).
cctaggttagtctctgaaa

SEQ ID NO: 678392 - DNA, 19 bp, Mus musculus
  siRNA target sequence for H28 (NM_031367.1,296-314).
ctaggttagtctctgaaaa

SEQ ID NO: 678393 - DNA, 19 bp, Mus musculus
  siRNA target sequence for H28 (NM_031367.1,328-346).
gcgtggttttcattaaaaa

SEQ ID NO: 678394 - DNA, 19 bp, Mus musculus
  siRNA target sequence for H28 (NM_031367.1,423-441).
ctcactcgatggtttgtca

SEQ ID NO: 678395 - DNA, 19 bp, Mus musculus
  siRNA target sequence for H28 (NM_031367.1,468-486).
cacacttgctctaaatgat

SEQ ID NO: 678396 - DNA, 19 bp, Mus musculus
  siRNA target sequence for H28 (NM_031367.1,553-571).
cgagttgatggcattaaga

SEQ ID NO: 678397 - DNA, 19 bp, Mus musculus
  siRNA target sequence for H28 (NM_031367.1,556-574).
gttgatggcattaagaaaa

SEQ ID NO: 678398 - DNA, 19 bp, Mus musculus
  siRNA target sequence for H28 (NM_031367.1,606-624).
cgaacagcaccgaggaaaa

SEQ ID NO: 678399 - DNA, 19 bp, Mus musculus
  siRNA target sequence for H28 (NM_031367.1,607-625).
gaacagcaccgaggaaaat

SEQ ID NO: 678400 - DNA, 19 bp, Mus musculus
  siRNA target sequence for H28 (NM_031367.1,641-659).
gagcctacaagccttataa

SEQ ID NO: 678401 - DNA, 19 bp, Mus musculus
  siRNA target sequence for H28 (NM_031367.1,644-662).
cctacaagccttataagga

SEQ ID NO: 678402 - DNA, 19 bp, Mus musculus
  siRNA target sequence for H28 (NM_031367.1,666-684).
ggtttcagaaggttcgtat

SEQ ID NO: 678403 - DNA, 19 bp, Mus musculus
  siRNA target sequence for H28 (NM_031367.1,712-730).
gaaagtcgagctttttcaa

SEQ ID NO: 678404 - DNA, 19 bp, Mus musculus
  siRNA target sequence for H28 (NM_031367.1,806-824).
ccaagcagtacagagttta

SEQ ID NO: 678405 - DNA, 19 bp, Mus musculus
  siRNA target sequence for H28 (NM_031367.1,807-825).
caagcagtacagagtttat

SEQ ID NO: 678406 - DNA, 19 bp, Mus musculus
  siRNA target sequence for H28 (NM_031367.1,811-829).
cagtacagagtttattcta

SEQ ID NO: 678407 - DNA, 19 bp, Mus musculus
  siRNA target sequence for H28 (NM_031367.1,847-865).
ggggaaacactcccattta

SEQ ID NO: 678408 - DNA, 19 bp, Mus musculus
  siRNA target sequence for H28 (NM_031367.1,848-866).
gggaaacactcccatttat

SEQ ID NO: 678409 - DNA, 19 bp, Mus musculus
  siRNA target sequence for H28 (NM_031367.1,924-942).
cattcctcatatcttacaa

SEQ ID NO: 678410 - DNA, 19 bp, Mus musculus
  siRNA target sequence for H28 (NM_031367.1,953-971).
cagacaggtatcagttcaa

SEQ ID NO: 678411 - DNA, 19 bp, Mus musculus
  siRNA target sequence for H28 (NM_031367.1,1049-1067).
cttttgtcctacacatcaa

SEQ ID NO: 678412 - DNA, 19 bp, Mus musculus
  siRNA target sequence for H28 (NM_031367.1,1057-1075).
ctacacatcaactctgtta

SEQ ID NO: 678413 - DNA, 19 bp, Mus musculus
  siRNA target sequence for H28 (NM_031367.1,1070-1088).
ctgttaatacactatctga

SEQ ID NO: 678414 - DNA, 19 bp, Mus musculus
  siRNA target sequence for H28 (NM_031367.1,1072-1090).
gttaatacactatctgata

SEQ ID NO: 678415 - DNA, 19 bp, Mus musculus
  siRNA target sequence for H28 (NM_031367.1,1079-1097).
cactatctgataaaatggt

SEQ ID NO: 678416 - DNA, 19 bp, Mus musculus
  siRNA target sequence for H28 (NM_031367.1,1129-1147).
gtagactgtggtataggat

SEQ ID NO: 678417 - DNA, 19 bp, Mus musculus
  siRNA target sequence for H28 (NM_031367.1,1134-1152).
ctgtggtataggatatgta

SEQ ID NO: 678418 - DNA, 19 bp, Mus musculus
  siRNA target sequence for H28 (NM_031367.1,1144-1162).
ggatatgtagccttgctta

SEQ ID NO: 678419 - DNA, 19 bp, Mus musculus
  siRNA target sequence for H28 (NM_031367.1,1173-1191).
ggagtatgatgaagttctt

SEQ ID NO: 678420 - DNA, 19 bp, Mus musculus
  siRNA target sequence for H28 (NM_031367.1,1239-1257).
ggttcagaatgtccaaaaa

SEQ ID NO: 678421 - DNA, 19 bp, Mus musculus
  siRNA target sequence for H28 (NM_031367.1,1249-1267).
gtccaaaaatggctaaata

SEQ ID NO: 678422 - DNA, 19 bp, Mus musculus
  siRNA target sequence for H28 (NM_031367.1,1251-1269).
ccaaaaatggctaaatatt

SEQ ID NO: 678423 - DNA, 19 bp, Mus musculus
  siRNA target sequence for H28 (NM_031367.1,1270-1288).
cctatagccaatatcttga

SEQ ID NO: 678424 - DNA, 19 bp, Mus musculus
  siRNA target sequence for H28 (NM_031367.1,1320-1338).
ggagcctatgaaggatatt

SEQ ID NO: 678425 - DNA, 19 bp, Mus musculus
  siRNA target sequence for H28 (NM_031367.1,1349-1367).
ctgctctcaggcagatgtt

SEQ ID NO: 678426 - DNA, 19 bp, Mus musculus
  siRNA target sequence for Ifi202b (NM_008327.1,303-321).
cgtaacttaaggtcatcta

SEQ ID NO: 678427 - DNA, 19 bp, Mus musculus
  siRNA target sequence for Ifi202b (NM_008327.1,351-369).
cagaccccttccagtgatt

SEQ ID NO: 678428 - DNA, 19 bp, Mus musculus
  siRNA target sequence for Ifi202b (NM_008327.1,353-371).
gaccccttccagtgattca

SEQ ID NO: 678429 - DNA, 19 bp, Mus musculus
  siRNA target sequence for Ifi202b (NM_008327.1,356-374).
cccttccagtgattcatct

SEQ ID NO: 678430 - DNA, 19 bp, Mus musculus
  siRNA target sequence for Ifi202b (NM_008327.1,400-418).
cctctcctggacctaacaa

SEQ ID NO: 678431 - DNA, 19 bp, Mus musculus
  siRNA target sequence for Ifi202b (NM_008327.1,401-419).
ctctcctggacctaacaaa

SEQ ID NO: 678432 - DNA, 19 bp, Mus musculus
  siRNA target sequence for Ifi202b (NM_008327.1,432-450).
ccaaaaaagaacattagca

SEQ ID NO: 678433 - DNA, 19 bp, Mus musculus
  siRNA target sequence for Ifi202b (NM_008327.1,556-574).
ctacagagagccaatatta

SEQ ID NO: 678434 - DNA, 19 bp, Mus musculus
  siRNA target sequence for Ifi202b (NM_008327.1,566-584).
ccaatattaccgtgtgaaa

SEQ ID NO: 678435 - DNA, 19 bp, Mus musculus
  siRNA target sequence for Ifi202b (NM_008327.1,970-988).
gaaatgggaaaccaatatt

SEQ ID NO: 678436 - DNA, 19 bp, Mus musculus
  siRNA target sequence for Ifi202b (NM_008327.1,975-993).
gggaaaccaatattacact

SEQ ID NO: 678437 - DNA, 19 bp, Mus musculus
  siRNA target sequence for Ifi202b (NM_008327.1,1025-1043).
gctactaaaagaatctttt

SEQ ID NO: 678438 - DNA, 19 bp, Mus musculus
  siRNA target sequence for Ifi202b (NM_008327.1,1077-1095).
gtggtggcattgaaagcaa

SEQ ID NO: 678439 - DNA, 19 bp, Mus musculus
  siRNA target sequence for Ifi202b (NM_008327.1,1084-1102).
cattgaaagcaacaaaact

SEQ ID NO: 678440 - DNA, 19 bp, Mus musculus
  siRNA target sequence for Ifi202b (NM_008327.1,1092-1110).
gcaacaaaactatttactt

SEQ ID NO: 678441 - DNA, 19 bp, Mus musculus
  siRNA target sequence for Ifi202b (NM_008327.1,1101-1119).
ctatttacttatgatagta

SEQ ID NO: 678442 - DNA, 19 bp, Mus musculus
  siRNA target sequence for Ifi202b (NM_008327.1,1145-1163).
cacagtggctactgataca

SEQ ID NO: 678443 - DNA, 19 bp, Mus musculus
  siRNA target sequence for Ifi202b (NM_008327.1,1217-1235).
gggaaacaccattgcttta

SEQ ID NO: 678444 - DNA, 19 bp, Mus musculus
  siRNA target sequence for Ifi202b (NM_008327.1,1261-1279).
ctctggcaatacatgaata

SEQ ID NO: 678445 - DNA, 19 bp, Mus musculus
  siRNA target sequence for Ifi202b (NM_008327.1,1263-1281).
ctggcaatacatgaatatt

SEQ ID NO: 678446 - DNA, 19 bp, Mus musculus
  siRNA target sequence for Ifi202b (NM_008327.1,1266-1284).
gcaatacatgaatattcca

SEQ ID NO: 678447 - DNA, 19 bp, Mus musculus
  siRNA target sequence for Ifi202b (NM_008327.1,1514-1532).
ctgtgagattggtaataca

SEQ ID NO: 678448 - DNA, 19 bp, Mus musculus
  siRNA target sequence for Ifi202b (NM_008327.1,1588-1606).
ctacgaggtacagttacat

SEQ ID NO: 678449 - DNA, 19 bp, Mus musculus
  siRNA target sequence for Ifi202b (NM_008327.1,1610-1628).
ggtcatcatgcctgaaaaa

SEQ ID NO: 678450 - DNA, 19 bp, Mus musculus
  siRNA target sequence for Ifi202b (NM_008327.1,1611-1629).
gtcatcatgcctgaaaaat

SEQ ID NO: 678451 - DNA, 19 bp, Mus musculus
  siRNA target sequence for Ifi202b (NM_011940.1,1193-1211).
ctggttgatggagagttta

SEQ ID NO: 678452 - DNA, 19 bp, Mus musculus
  siRNA target sequence for Ifi203 (NM_008328.1,555-573).
gtgtaccgtcttcaaagaa

SEQ ID NO: 678453 - DNA, 19 bp, Mus musculus
  siRNA target sequence for Ifi203 (NM_008328.1,1167-1185).
ggcatgagtgcatttgcta

SEQ ID NO: 678454 - DNA, 19 bp, Mus musculus
  siRNA target sequence for Ifi203 (NM_008328.1,1168-1186).
gcatgagtgcatttgctat

SEQ ID NO: 678455 - DNA, 19 bp, Mus musculus
  siRNA target sequence for Ifi205 (NM_172648.2,230-248).
gtcattgatggtcaaagat

SEQ ID NO: 678456 - DNA, 19 bp, Mus musculus
  siRNA target sequence for Ifi205 (NM_172648.2,232-250).
cattgatggtcaaagattt

SEQ ID NO: 678457 - DNA, 19 bp, Mus musculus
  siRNA target sequence for Ifi205 (NM_172648.2,360-378).
gaacgtgtaccaactctta

SEQ ID NO: 678458 - DNA, 19 bp, Mus musculus
  siRNA target sequence for Ifi205 (NM_172648.2,561-579).
ggtatgagtgaagaaaaga

SEQ ID NO: 678459 - DNA, 19 bp, Mus musculus
  siRNA target sequence for Ifit1 (NM_008331.1,610-628).
gtagcctatcgccaagatt

SEQ ID NO: 678460 - DNA, 19 bp, Mus musculus
  siRNA target sequence for Ifit1 (NM_008331.1,614-632).
cctatcgccaagatttaga

SEQ ID NO: 678461 - DNA, 19 bp, Mus musculus
  siRNA target sequence for Ifit1 (NM_008331.1,615-633).
ctatcgccaagatttagat

SEQ ID NO: 678462 - DNA, 19 bp, Mus musculus
  siRNA target sequence for Ifit1 (NM_008331.1,625-643).
gatttagatgacaacttta

SEQ ID NO: 678463 - DNA, 19 bp, Mus musculus
  siRNA target sequence for Ifit1 (NM_008331.1,662-680).
ggaaggctgtccggttaaa

SEQ ID NO: 678464 - DNA, 19 bp, Mus musculus
  siRNA target sequence for Ifit1 (NM_008331.1,663-681).
gaaggctgtccggttaaat

SEQ ID NO: 678465 - DNA, 19 bp, Mus musculus
  siRNA target sequence for Ifit1 (NM_008331.1,666-684).
ggctgtccggttaaatcca

SEQ ID NO: 678466 - DNA, 19 bp, Mus musculus
  siRNA target sequence for Ifit1 (NM_008331.1,672-690).
ccggttaaatccagaagat

SEQ ID NO: 678467 - DNA, 19 bp, Mus musculus
  siRNA target sequence for Ifit1 (NM_008331.1,785-803).
cttgccaaagctatgtcat

SEQ ID NO: 678468 - DNA, 19 bp, Mus musculus
  siRNA target sequence for Ifit1 (NM_008331.1,830-848).
ggaaacatcgcgtagacaa

SEQ ID NO: 678469 - DNA, 19 bp, Mus musculus
  siRNA target sequence for Ifit1 (NM_008331.1,831-849).
gaaacatcgcgtagacaaa

SEQ ID NO: 678470 - DNA, 19 bp, Mus musculus
  siRNA target sequence for Ifit1 (NM_008331.1,840-858).
cgtagacaaagctcttcat

SEQ ID NO: 678471 - DNA, 19 bp, Mus musculus
  siRNA target sequence for Ifit1 (NM_008331.1,895-913).
ggctacttacattatcaaa

SEQ ID NO: 678472 - DNA, 19 bp, Mus musculus
  siRNA target sequence for Ifit1 (NM_008331.1,896-914).
gctacttacattatcaaaa

SEQ ID NO: 678473 - DNA, 19 bp, Mus musculus
  siRNA target sequence for Ifit1 (NM_008331.1,979-997).
caggacaatgtgcaagaat

SEQ ID NO: 678474 - DNA, 19 bp, Mus musculus
  siRNA target sequence for Ifit1 (NM_008331.1,999-1017).
ggcacaacaggccattcat

SEQ ID NO: 678475 - DNA, 19 bp, Mus musculus
  siRNA target sequence for Ifit1 (NM_008331.1,1008-1026).
ggccattcatgaatttcaa

SEQ ID NO: 678476 - DNA, 19 bp, Mus musculus
  siRNA target sequence for Ifit1 (NM_008331.1,1146-1164).
gaccctcgtggctcacata

SEQ ID NO: 678477 - DNA, 19 bp, Mus musculus
  siRNA target sequence for Ifit1 (NM_008331.1,1157-1175).
ctcacatagagcaggatat

SEQ ID NO: 678478 - DNA, 19 bp, Mus musculus
  siRNA target sequence for Ifit1 (NM_008331.1,1190-1208).
gccgtttcctacagtttca

SEQ ID NO: 678479 - DNA, 19 bp, Mus musculus
  siRNA target sequence for Ifit1 (NM_008331.1,1191-1209).
ccgtttcctacagtttcat

SEQ ID NO: 678480 - DNA, 19 bp, Mus musculus
  siRNA target sequence for Ifit1 (NM_008331.1,1192-1210).
cgtttcctacagtttcata

SEQ ID NO: 678481 - DNA, 19 bp, Mus musculus
  siRNA target sequence for Ifit1 (NM_008331.1,1227-1245).
ggcaatcaccctctactta

SEQ ID NO: 678482 - DNA, 19 bp, Mus musculus
  siRNA target sequence for Ifit1 (NM_008331.1,1228-1246).
gcaatcaccctctacttaa

SEQ ID NO: 678483 - DNA, 19 bp, Mus musculus
  siRNA target sequence for Ifit1 (NM_008331.1,1229-1247).
caatcaccctctacttaaa

SEQ ID NO: 678484 - DNA, 19 bp, Mus musculus
  siRNA target sequence for Ifit1 (NM_008331.1,1233-1251).
caccctctacttaaaaggt

SEQ ID NO: 678485 - DNA, 19 bp, Mus musculus
  siRNA target sequence for Ifit1 (NM_008331.1,1311-1329).
ggctgaaagacgtgtttgt

SEQ ID NO: 678486 - DNA, 19 bp, Mus musculus
  siRNA target sequence for Ifit1 (NM_008331.1,1313-1331).
ctgaaagacgtgtttgtca

SEQ ID NO: 678487 - DNA, 19 bp, Mus musculus
  siRNA target sequence for Ifit1 (NM_008331.1,1319-1337).
gacgtgtttgtcagaatgt

SEQ ID NO: 678488 - DNA, 19 bp, Mus musculus
  siRNA target sequence for Ifit1 (NM_008331.1,1322-1340).
gtgtttgtcagaatgttca

SEQ ID NO: 678489 - DNA, 19 bp, Mus musculus
  siRNA target sequence for Ifit1 (NM_008331.1,1402-1420).
gctctgttttactatgaga

SEQ ID NO: 678490 - DNA, 19 bp, Mus musculus
  siRNA target sequence for Ifit1 (NM_008331.1,1430-1448).
ggctcactggggaaatgaa

SEQ ID NO: 678491 - DNA, 19 bp, Mus musculus
  siRNA target sequence for Ifit2 (NM_008332.2,256-274).
gcaatctgcgacagctaaa

SEQ ID NO: 678492 - DNA, 19 bp, Mus musculus
  siRNA target sequence for Ifit2 (NM_008332.2,290-308).
gaacctgatagcagaagat

SEQ ID NO: 678493 - DNA, 19 bp, Mus musculus
  siRNA target sequence for Ifit2 (NM_008332.2,327-345).
gaggacagggtgtttaaca

SEQ ID NO: 678494 - DNA, 19 bp, Mus musculus
  siRNA target sequence for Ifit2 (NM_008332.2,376-394).
ccaccatgtgcaacatact

SEQ ID NO: 678495 - DNA, 19 bp, Mus musculus
  siRNA target sequence for Ifit2 (NM_008332.2,386-404).
caacatactggcctatgta

SEQ ID NO: 678496 - DNA, 19 bp, Mus musculus
  siRNA target sequence for Ifit2 (NM_008332.2,591-609).
gtctgcaagaagttttcca

SEQ ID NO: 678497 - DNA, 19 bp, Mus musculus
  siRNA target sequence for Ifit2 (NM_008332.2,610-628).
gcccctacaggattgagaa

SEQ ID NO: 678498 - DNA, 19 bp, Mus musculus
  siRNA target sequence for Ifit2 (NM_008332.2,670-688).
gtaccaagaaccaaaacga

SEQ ID NO: 678499 - DNA, 19 bp, Mus musculus
  siRNA target sequence for Ifit2 (NM_008332.2,836-854).
gtctcctgacaacacttat

SEQ ID NO: 678500 - DNA, 19 bp, Mus musculus
  siRNA target sequence for Ifit2 (NM_008332.2,838-856).
ctcctgacaacacttatgt

SEQ ID NO: 678501 - DNA, 19 bp, Mus musculus
  siRNA target sequence for Ifit2 (NM_008332.2,840-858).
cctgacaacacttatgtta

SEQ ID NO: 678502 - DNA, 19 bp, Mus musculus
  siRNA target sequence for Ifit2 (NM_008332.2,841-859).
ctgacaacacttatgttaa

SEQ ID NO: 678503 - DNA, 19 bp, Mus musculus
  siRNA target sequence for Ifit2 (NM_008332.2,878-896).
gcttgacgcggtacataaa

SEQ ID NO: 678504 - DNA, 19 bp, Mus musculus
  siRNA target sequence for Ifit2 (NM_008332.2,879-897).
cttgacgcggtacataaaa

SEQ ID NO: 678505 - DNA, 19 bp, Mus musculus
  siRNA target sequence for Ifit2 (NM_008332.2,884-902).
cgcggtacataaaaaccaa

SEQ ID NO: 678506 - DNA, 19 bp, Mus musculus
  siRNA target sequence for Ifit2 (NM_008332.2,904-922).
caatggcgctggttgaaga

SEQ ID NO: 678507 - DNA, 19 bp, Mus musculus
  siRNA target sequence for Ifit2 (NM_008332.2,962-980).
cagggcagccaggttttat

SEQ ID NO: 678508 - DNA, 19 bp, Mus musculus
  siRNA target sequence for Ifit2 (NM_008332.2,966-984).
gcagccaggttttattgca

SEQ ID NO: 678509 - DNA, 19 bp, Mus musculus
  siRNA target sequence for Ifit2 (NM_008332.2,967-985).
cagccaggttttattgcaa

SEQ ID NO: 678510 - DNA, 19 bp, Mus musculus
  siRNA target sequence for Ifit2 (NM_008332.2,973-991).
ggttttattgcaaggtata

SEQ ID NO: 678511 - DNA, 19 bp, Mus musculus
  siRNA target sequence for Ifit2 (NM_008332.2,974-992).
gttttattgcaaggtatat

SEQ ID NO: 678512 - DNA, 19 bp, Mus musculus
  siRNA target sequence for Ifit2 (NM_008332.2,1006-1024).
ctatacagttgcttagaaa

SEQ ID NO: 678513 - DNA, 19 bp, Mus musculus
  siRNA target sequence for Ifit2 (NM_008332.2,1049-1067).
cgcctatgtgcattactat

SEQ ID NO: 678514 - DNA, 19 bp, Mus musculus
  siRNA target sequence for Ifit2 (NM_008332.2,1050-1068).
gcctatgtgcattactata

SEQ ID NO: 678515 - DNA, 19 bp, Mus musculus
  siRNA target sequence for Ifit2 (NM_008332.2,1064-1082).
ctatatggggtgctgttat

SEQ ID NO: 678516 - DNA, 19 bp, Mus musculus
  siRNA target sequence for Ifit2 (NM_008332.2,1075-1093).
gctgttataggtcaaaagt

SEQ ID NO: 678517 - DNA, 19 bp, Mus musculus
  siRNA target sequence for Ifit2 (NM_008332.2,1084-1102).
ggtcaaaagtccatcatat

SEQ ID NO: 678518 - DNA, 19 bp, Mus musculus
  siRNA target sequence for Ifit2 (NM_008332.2,1129-1147).
gtggggataggaagaagtt

SEQ ID NO: 678519 - DNA, 19 bp, Mus musculus
  siRNA target sequence for Ifit2 (NM_008332.2,1142-1160).
gaagttagaggaactaata

SEQ ID NO: 678520 - DNA, 19 bp, Mus musculus
  siRNA target sequence for Ifit2 (NM_008332.2,1161-1179).
caactggcagtgaatcact

SEQ ID NO: 678521 - DNA, 19 bp, Mus musculus
  siRNA target sequence for Ifit2 (NM_008332.2,1263-1281).
gacgaagccgattactact

SEQ ID NO: 678522 - DNA, 19 bp, Mus musculus
  siRNA target sequence for Ifit2 (NM_008332.2,1309-1327).
ctcctggccctaaacagtt

SEQ ID NO: 678523 - DNA, 19 bp, Mus musculus
  siRNA target sequence for Ifit2 (NM_008332.2,1334-1352).
ccttcggtatggcaacttt

SEQ ID NO: 678524 - DNA, 19 bp, Mus musculus
  siRNA target sequence for Ifit2 (NM_008332.2,1338-1356).
cggtatggcaactttcagt

SEQ ID NO: 678525 - DNA, 19 bp, Mus musculus
  siRNA target sequence for Ifit2 (NM_008332.2,1339-1357).
ggtatggcaactttcagtt

SEQ ID NO: 678526 - DNA, 19 bp, Mus musculus
  siRNA target sequence for Ifit2 (NM_008332.2,1372-1390).
gtcaagacaaggctatcta

SEQ ID NO: 678527 - DNA, 19 bp, Mus musculus
  siRNA target sequence for Ifit2 (NM_008332.2,1377-1395).
gacaaggctatctaccatt

SEQ ID NO: 678528 - DNA, 19 bp, Mus musculus
  siRNA target sequence for Ifit2 (NM_008332.2,1379-1397).
caaggctatctaccattat

SEQ ID NO: 678529 - DNA, 19 bp, Mus musculus
  siRNA target sequence for Ifit2 (NM_008332.2,1468-1486).
ccctaaggcggcttcatga

SEQ ID NO: 678530 - DNA, 19 bp, Mus musculus
  siRNA target sequence for Ifit2 (NM_008332.2,1469-1487).
cctaaggcggcttcatgaa

SEQ ID NO: 678531 - DNA, 19 bp, Mus musculus
  siRNA target sequence for Ifit2 (NM_008332.2,1497-1515).
gattctgaggccttgcata

SEQ ID NO: 678532 - DNA, 19 bp, Mus musculus
  siRNA target sequence for Ifit2 (NM_008332.2,1617-1635).
gaagcaggtgctgaatact

SEQ ID NO: 678533 - DNA, 19 bp, Mus musculus
  siRNA target sequence for Mill1 (NM_153749.2,386-404).
ctccctaccaagatattga

SEQ ID NO: 678534 - DNA, 19 bp, Mus musculus
  siRNA target sequence for Mill1 (NM_153749.2,552-570).
gaaaaacagcagcataaca

SEQ ID NO: 678535 - DNA, 19 bp, Mus musculus
  siRNA target sequence for Mill1 (NM_153749.2,623-641).
gagagactgacgatcttca

SEQ ID NO: 678536 - DNA, 19 bp, Mus musculus
  siRNA target sequence for Mill1 (NM_153749.2,732-750).
cggctgtgagcttcaaaga

SEQ ID NO: 678537 - DNA, 19 bp, Mus musculus
  siRNA target sequence for Mill1 (NM_153749.2,1076-1094).
ccctgacctggcttcagta

SEQ ID NO: 678538 - DNA, 19 bp, Mus musculus
  siRNA target sequence for Mill1 (NM_153749.2,1078-1096).
ctgacctggcttcagtata

SEQ ID NO: 678539 - DNA, 19 bp, Mus musculus
  siRNA target sequence for Mill1 (NM_153749.2,1118-1136).
cctttggatctgaaactat

SEQ ID NO: 678540 - DNA, 19 bp, Mus musculus
  siRNA target sequence for Mill1 (NM_153749.2,1225-1243).
cacggcaaccacaatatca

SEQ ID NO: 678541 - DNA, 19 bp, Mus musculus
  siRNA target sequence for Mill1 (NM_153749.2,1229-1247).
gcaaccacaatatcaatga

SEQ ID NO: 678542 - DNA, 19 bp, Mus musculus
  siRNA target sequence for Mill1 (NM_153749.2,1272-1290).
ctatggtgcgagaagagaa

SEQ ID NO: 678543 - DNA, 19 bp, Mus musculus
  siRNA target sequence for Mill1 (NM_153749.2,1333-1351).
ctgtggagtgcaatgacta

SEQ ID NO: 678544 - DNA, 19 bp, Mus musculus
  siRNA target sequence for Mill1 (NM_153749.2,1362-1380).
ggtgatctcctggacatta

SEQ ID NO: 678545 - DNA, 19 bp, Mus musculus
  siRNA target sequence for Mill1 (NM_153749.2,1363-1381).
gtgatctcctggacattaa

SEQ ID NO: 678546 - DNA, 19 bp, Mus musculus
  siRNA target sequence for Mr1 (NM_008209.2,178-196).
ggacccactcgctgagata

SEQ ID NO: 678547 - DNA, 19 bp, Mus musculus
  siRNA target sequence for Mr1 (NM_008209.2,179-197).
gacccactcgctgagatat

SEQ ID NO: 678548 - DNA, 19 bp, Mus musculus
  siRNA target sequence for Mr1 (NM_008209.2,182-200).
ccactcgctgagatatttt

SEQ ID NO: 678549 - DNA, 19 bp, Mus musculus
  siRNA target sequence for Mr1 (NM_008209.2,185-203).
ctcgctgagatattttcgt

SEQ ID NO: 678550 - DNA, 19 bp, Mus musculus
  siRNA target sequence for Mr1 (NM_008209.2,223-241).
gtcccgtcgtccctgaatt

SEQ ID NO: 678551 - DNA, 19 bp, Mus musculus
  siRNA target sequence for Mr1 (NM_008209.2,225-243).
cccgtcgtccctgaattta

SEQ ID NO: 678552 - DNA, 19 bp, Mus musculus
  siRNA target sequence for Mr1 (NM_008209.2,226-244).
ccgtcgtccctgaatttat

SEQ ID NO: 678553 - DNA, 19 bp, Mus musculus
  siRNA target sequence for Mr1 (NM_008209.2,228-246).
gtcgtccctgaatttatct

SEQ ID NO: 678554 - DNA, 19 bp, Mus musculus
  siRNA target sequence for Mr1 (NM_008209.2,444-462).
cacacctaccagagaatga

SEQ ID NO: 678555 - DNA, 19 bp, Mus musculus
  siRNA target sequence for Mr1 (NM_008209.2,446-464).
cacctaccagagaatgatt

SEQ ID NO: 678556 - DNA, 19 bp, Mus musculus
  siRNA target sequence for Mr1 (NM_008209.2,466-484).
gctgtgagttgctagaaga

SEQ ID NO: 678557 - DNA, 19 bp, Mus musculus
  siRNA target sequence for Mr1 (NM_008209.2,498-516).
gggtttctccagtatgcat

SEQ ID NO: 678558 - DNA, 19 bp, Mus musculus
  siRNA target sequence for Mr1 (NM_008209.2,514-532).
catatgatggacaagattt

SEQ ID NO: 678559 - DNA, 19 bp, Mus musculus
  siRNA target sequence for Mr1 (NM_008209.2,559-577).
cctggttggccatggatta

SEQ ID NO: 678560 - DNA, 19 bp, Mus musculus
  siRNA target sequence for Mr1 (NM_008209.2,560-578).
ctggttggccatggattat

SEQ ID NO: 678561 - DNA, 19 bp, Mus musculus
  siRNA target sequence for Mr1 (NM_008209.2,562-580).
ggttggccatggattatgt

SEQ ID NO: 678562 - DNA, 19 bp, Mus musculus
  siRNA target sequence for Mr1 (NM_008209.2,617-635).
gcatgagttgcaataccaa

SEQ ID NO: 678563 - DNA, 19 bp, Mus musculus
  siRNA target sequence for Mr1 (NM_008209.2,618-636).
catgagttgcaataccaaa

SEQ ID NO: 678564 - DNA, 19 bp, Mus musculus
  siRNA target sequence for Mr1 (NM_008209.2,674-692).
gaggttcttggaatatgga

SEQ ID NO: 678565 - DNA, 19 bp, Mus musculus
  siRNA target sequence for Mr1 (NM_008209.2,733-751).
caactcgaaaggaaacttt

SEQ ID NO: 678566 - DNA, 19 bp, Mus musculus
  siRNA target sequence for Mr1 (NM_008209.2,756-774).
gggattacaactttcttct

SEQ ID NO: 678567 - DNA, 19 bp, Mus musculus
  siRNA target sequence for Mr1 (NM_008209.2,891-909).
caaacgtggctgtcagtta

SEQ ID NO: 678568 - DNA, 19 bp, Mus musculus
  siRNA target sequence for Mr1 (NM_008209.2,914-932).
ggatcctcagagcaatgat

SEQ ID NO: 678569 - DNA, 19 bp, Mus musculus
  siRNA target sequence for Mr1 (NM_008209.2,956-974).
ctgtggtcgccaaatggtt

SEQ ID NO: 678570 - DNA, 19 bp, Mus musculus
  siRNA target sequence for Mr1 (NM_008209.2,1024-1042).
ctggaaccacaattctcat

SEQ ID NO: 678571 - DNA, 19 bp, Mus musculus
  siRNA target sequence for Mr1 (NM_008209.2,1027-1045).
gaaccacaattctcatcat

SEQ ID NO: 678572 - DNA, 19 bp, Mus musculus
  siRNA target sequence for Mr1 (NM_008209.2,1084-1102).
cacaagaactaaaagaagt

SEQ ID NO: 678573 - DNA, 19 bp, Mus musculus
  siRNA target sequence for Mr1 (NM_008209.2,1109-1127).
ccaacccacccaagtgaat

SEQ ID NO: 678574 - DNA, 19 bp, Mus musculus
  siRNA target sequence for Defb10 (NM_139225.1,148-166).
ggagggttctgtcactata

SEQ ID NO: 678575 - DNA, 19 bp, Mus musculus
  siRNA target sequence for Defb10 (NM_139225.1,149-167).
gagggttctgtcactataa

SEQ ID NO: 678576 - DNA, 19 bp, Mus musculus
  siRNA target sequence for Defb10 (NM_139225.1,178-196).
ggtaatagcaggtttatga

SEQ ID NO: 678577 - DNA, 19 bp, Mus musculus
  siRNA target sequence for Defb10 (NM_139225.1,227-245).
gcaagaacataaaacaatt

SEQ ID NO: 678578 - DNA, 19 bp, Mus musculus
  siRNA target sequence for Defb11 (NM_139221.1,153-171).
ggagggttctgttacaatt

SEQ ID NO: 678579 - DNA, 19 bp, Mus musculus
  siRNA target sequence for Defb11 (NM_139221.1,157-175).
ggttctgttacaattccat

SEQ ID NO: 678580 - DNA, 19 bp, Mus musculus
  siRNA target sequence for Defb11 (NM_139221.1,186-204).
cataccaagtttataggta

SEQ ID NO: 678581 - DNA, 19 bp, Mus musculus
  siRNA target sequence for Defb11 (NM_139221.1,218-236).
ccacctccactgttgcata

SEQ ID NO: 678582 - DNA, 19 bp, Mus musculus
  siRNA target sequence for Defb11 (NM_139221.1,229-247).
gttgcataaacatgaaaga

SEQ ID NO: 678583 - DNA, 19 bp, Mus musculus
  siRNA target sequence for Defb8 (NM_153108.3,146-164).
cttaggcataagattggaa

SEQ ID NO: 678584 - DNA, 19 bp, Mus musculus
  siRNA target sequence for Defb8 (NM_153108.3,165-183).
cttgtggatctcctttcaa

SEQ ID NO: 678585 - DNA, 19 bp, Mus musculus
  siRNA target sequence for Defb8 (NM_153108.3,170-188).
ggatctcctttcaaatgct

SEQ ID NO: 678586 - DNA, 19 bp, Mus musculus
  siRNA target sequence for E330007A02 (NM_177690.2,91-109).
cccctgggtttcaacctaa

SEQ ID NO: 678587 - DNA, 19 bp, Mus musculus
  siRNA target sequence for E330007A02 (NM_177690.2,92-110).
ccctgggtttcaacctaaa

SEQ ID NO: 678588 - DNA, 19 bp, Mus musculus
  siRNA target sequence for E330007A02 (NM_177690.2,130-148).
gacaagactgagttgaaca

SEQ ID NO: 678589 - DNA, 19 bp, Mus musculus
  siRNA target sequence for E330007A02 (NM_177690.2,173-191).
gttctctgccagatacaat

SEQ ID NO: 678590 - DNA, 19 bp, Mus musculus
  siRNA target sequence for E330007A02 (NM_177690.2,233-251).
ctcagctagcagaaattct

SEQ ID NO: 678591 - DNA, 19 bp, Mus musculus
  siRNA target sequence for E330007A02 (NM_177690.2,235-253).
cagctagcagaaattctca

SEQ ID NO: 678592 - DNA, 19 bp, Mus musculus
  siRNA target sequence for E330007A02 (NM_177690.2,284-302).
gagtcaccgtccagatctt

SEQ ID NO: 678593 - DNA, 19 bp, Mus musculus
  siRNA target sequence for E330007A02 (NM_177690.2,306-324).
ggaaataaaccgtgtagat

SEQ ID NO: 678594 - DNA, 19 bp, Mus musculus
  siRNA target sequence for E330007A02 (NM_177690.2,325-343).
ctagctgagttagtagtaa

SEQ ID NO: 678595 - DNA, 19 bp, Mus musculus
  siRNA target sequence for E330007A02 (NM_177690.2,329-347).
ctgagttagtagtaaagca

SEQ ID NO: 678596 - DNA, 19 bp, Mus musculus
  siRNA target sequence for E330007A02 (NM_177690.2,403-421).
gaaccctcggggacactaa

SEQ ID NO: 678597 - DNA, 19 bp, Mus musculus
  siRNA target sequence for E330007A02 (NM_177690.2,407-425).
cctcggggacactaacttt

SEQ ID NO: 678598 - DNA, 19 bp, Mus musculus
  siRNA target sequence for E330007A02 (NM_177690.2,550-568).
gttaccgagagctacaaga

SEQ ID NO: 678599 - DNA, 19 bp, Mus musculus
  siRNA target sequence for E330007A02 (NM_177690.2,603-621).
cccatttgctcatgcaatt

SEQ ID NO: 678600 - DNA, 19 bp, Mus musculus
  siRNA target sequence for E330007A02 (NM_177690.2,807-825).
ctgtgtgattcgagatcta

SEQ ID NO: 678601 - DNA, 19 bp, Mus musculus
  siRNA target sequence for E330007A02 (NM_177690.2,1009-1027).
cagtctttgcaccaaatct

SEQ ID NO: 678602 - DNA, 19 bp, Mus musculus
  siRNA target sequence for E330007A02 (NM_177690.2,1011-1029).
gtctttgcaccaaatcttt

SEQ ID NO: 678603 - DNA, 19 bp, Mus musculus
  siRNA target sequence for E330007A02 (NM_177690.2,1013-1031).
ctttgcaccaaatctttgt

SEQ ID NO: 678604 - DNA, 19 bp, Mus musculus
  siRNA target sequence for E330007A02 (NM_177690.2,1035-1053).
gatggatcagccactacta

SEQ ID NO: 678605 - DNA, 19 bp, Mus musculus
  siRNA target sequence for E330007A02 (NM_177690.2,1044-1062).
gccactactagtagaaact

SEQ ID NO: 678606 - DNA, 19 bp, Mus musculus
  siRNA target sequence for E330007A02 (NM_177690.2,1279-1297).
ctgacatgtcagacataca

SEQ ID NO: 678607 - DNA, 19 bp, Mus musculus
  siRNA target sequence for E330007A02 (NM_177690.2,1298-1316).
cctctatgttcctgaactt

SEQ ID NO: 678608 - DNA, 19 bp, Mus musculus
  siRNA target sequence for E330007A02 (NM_177690.2,1318-1336).
ctgtgcgaagtcttctcat

SEQ ID NO: 678609 - DNA, 19 bp, Mus musculus
  siRNA target sequence for E330007A02 (NM_177690.2,1366-1384).
gaattccaaatcttattca

SEQ ID NO: 678610 - DNA, 19 bp, Mus musculus
  siRNA target sequence for E330007A02 (NM_177690.2,1420-1438).
gaacaggtgcccatactct

SEQ ID NO: 678611 - DNA, 19 bp, Mus musculus
  siRNA target sequence for E330007A02 (NM_177690.2,1447-1465).
gacttcttgacattaaaat

SEQ ID NO: 678612 - DNA, 19 bp, Mus musculus
  siRNA target sequence for E330007A02 (NM_177690.2,1467-1485).
gaacctaaacaatttgcat

SEQ ID NO: 678613 - DNA, 19 bp, Mus musculus
  siRNA target sequence for E330007A02 (NM_177690.2,1526-1544).
gtacacactgtctctcttt

SEQ ID NO: 678614 - DNA, 19 bp, Mus musculus
  siRNA target sequence for E330007A02 (NM_177690.2,1564-1582).
caactcctggctgcaataa

SEQ ID NO: 678615 - DNA, 19 bp, Mus musculus
  siRNA target sequence for E330007A02 (NM_177690.2,1574-1592).
ctgcaataatatttgttca

SEQ ID NO: 678616 - DNA, 19 bp, Mus musculus
  siRNA target sequence for E330007A02 (NM_177690.2,1611-1629).
caagggtgtctctaaatat

SEQ ID NO: 678617 - DNA, 19 bp, Mus musculus
  siRNA target sequence for E330007A02 (NM_177690.2,1614-1632).
gggtgtctctaaatatagt

SEQ ID NO: 678618 - DNA, 19 bp, Mus musculus
  siRNA target sequence for E330007A02 (NM_177690.2,1684-1702).
gggctgctgccatttgtat

SEQ ID NO: 678619 - DNA, 19 bp, Mus musculus
  siRNA target sequence for E330007A02 (NM_177690.2,1710-1728).
cctgaatgagactcgtatt

SEQ ID NO: 678620 - DNA, 19 bp, Mus musculus
  siRNA target sequence for E330007A02 (NM_177690.2,1713-1731).
gaatgagactcgtattcaa

SEQ ID NO: 678621 - DNA, 19 bp, Mus musculus
  siRNA target sequence for E330007A02 (NM_177690.2,1721-1739).
ctcgtattcaagagttgaa

SEQ ID NO: 678622 - DNA, 19 bp, Mus musculus
  siRNA target sequence for E330007A02 (NM_177690.2,1729-1747).
caagagttgaagactactt

SEQ ID NO: 678623 - DNA, 19 bp, Mus musculus
  siRNA target sequence for E330007A02 (NM_177690.2,1815-1833).
cttactattactgatgaat

SEQ ID NO: 678624 - DNA, 19 bp, Mus musculus
  siRNA target sequence for E330007A02 (NM_177690.2,1906-1924).
gaggacatctccttgcatt

SEQ ID NO: 678625 - DNA, 19 bp, Mus musculus
  siRNA target sequence for E330007A02 (NM_177690.2,1942-1960).
ctcattcatgcttcattct

SEQ ID NO: 678626 - DNA, 19 bp, Mus musculus
  siRNA target sequence for E330007A02 (NM_177690.2,1975-1993).
cagaacttgcagacaatgt

SEQ ID NO: 678627 - DNA, 19 bp, Mus musculus
  siRNA target sequence for E330007A02 (NM_177690.2,1986-2004).
gacaatgtccctgaaagta

SEQ ID NO: 678628 - DNA, 19 bp, Mus musculus
  siRNA target sequence for E330007A02 (NM_177690.2,2012-2030).
cggtctttccagagaatgt

SEQ ID NO: 678629 - DNA, 19 bp, Mus musculus
  siRNA target sequence for E330007A02 (NM_177690.2,2226-2244).
gaaagtggtcctcaaaaat

SEQ ID NO: 678630 - DNA, 19 bp, Mus musculus
  siRNA target sequence for E330007A02 (NM_177690.2,2230-2248).
gtggtcctcaaaaatattt

SEQ ID NO: 678631 - DNA, 19 bp, Mus musculus
  siRNA target sequence for E330007A02 (NM_177690.2,2257-2275).
gatgcctacgagaaattgt

SEQ ID NO: 678632 - DNA, 19 bp, Mus musculus
  siRNA target sequence for E330007A02 (NM_177690.2,2274-2292).
gtgcctcatttttaatggt

SEQ ID NO: 678633 - DNA, 19 bp, Mus musculus
  siRNA target sequence for E330007A02 (NM_177690.2,2351-2369).
cactgtgtgaggttctgaa

SEQ ID NO: 678634 - DNA, 19 bp, Mus musculus
  siRNA target sequence for E330007A02 (NM_177690.2,2395-2413).
ctcagcctgggatcttgtt

SEQ ID NO: 678635 - DNA, 19 bp, Mus musculus
  siRNA target sequence for E330007A02 (NM_177690.2,2458-2476).
gtcaatcaatccctgatat

SEQ ID NO: 678636 - DNA, 19 bp, Mus musculus
  siRNA target sequence for E330007A02 (NM_177690.2,2460-2478).
caatcaatccctgatattt

SEQ ID NO: 678637 - DNA, 19 bp, Mus musculus
  siRNA target sequence for E330007A02 (NM_177690.2,2515-2533).
gctaagctcctatgtaata

SEQ ID NO: 678638 - DNA, 19 bp, Mus musculus
  siRNA target sequence for E330007A02 (NM_177690.2,2521-2539).
ctcctatgtaatatttgga

SEQ ID NO: 678639 - DNA, 19 bp, Mus musculus
  siRNA target sequence for Herpud1 (NM_022331.1,293-311).
gtgtctccaagatttgctt

SEQ ID NO: 678640 - DNA, 19 bp, Mus musculus
  siRNA target sequence for Herpud1 (NM_022331.1,414-432).
ccggacaactctaatcaga

SEQ ID NO: 678641 - DNA, 19 bp, Mus musculus
  siRNA target sequence for Herpud1 (NM_022331.1,449-467).
ctcctcaagtgatggttta

SEQ ID NO: 678642 - DNA, 19 bp, Mus musculus
  siRNA target sequence for Herpud1 (NM_022331.1,499-517).
cctccggatgggagaacat

SEQ ID NO: 678643 - DNA, 19 bp, Mus musculus
  siRNA target sequence for Herpud1 (NM_022331.1,569-587).
ctctggctacacaacgtat

SEQ ID NO: 678644 - DNA, 19 bp, Mus musculus
  siRNA target sequence for Herpud1 (NM_022331.1,628-646).
ggcagtactacatgcaata

SEQ ID NO: 678645 - DNA, 19 bp, Mus musculus
  siRNA target sequence for Herpud1 (NM_022331.1,632-650).
gtactacatgcaatactta

SEQ ID NO: 678646 - DNA, 19 bp, Mus musculus
  siRNA target sequence for Herpud1 (NM_022331.1,685-703).
caccaagtgcacaagagat

SEQ ID NO: 678647 - DNA, 19 bp, Mus musculus
  siRNA target sequence for Herpud1 (NM_022331.1,721-739).
ctgctccggctcctataca

SEQ ID NO: 678648 - DNA, 19 bp, Mus musculus
  siRNA target sequence for Herpud1 (NM_022331.1,723-741).
gctccggctcctatacaca

SEQ ID NO: 678649 - DNA, 19 bp, Mus musculus
  siRNA target sequence for Herpud1 (NM_022331.1,724-742).
ctccggctcctatacacaa

SEQ ID NO: 678650 - DNA, 19 bp, Mus musculus
  siRNA target sequence for Herpud1 (NM_022331.1,784-802).
ctgctcaagcggttgtcaa

SEQ ID NO: 678651 - DNA, 19 bp, Mus musculus
  siRNA target sequence for Herpud1 (NM_022331.1,901-919).
ccgcagcgacgttttctgt

SEQ ID NO: 678652 - DNA, 19 bp, Mus musculus
  siRNA target sequence for Herpud1 (NM_022331.1,904-922).
cagcgacgttttctgtttt

SEQ ID NO: 678653 - DNA, 19 bp, Mus musculus
  siRNA target sequence for Herpud1 (NM_022331.1,944-962).
ctcctcgctgagcagattt

SEQ ID NO: 678654 - DNA, 19 bp, Mus musculus
  siRNA target sequence for Herpud1 (NM_022331.1,976-994).
gtgccactgtagtcatgta

SEQ ID NO: 678655 - DNA, 19 bp, Mus musculus
  siRNA target sequence for Herpud1 (NM_022331.1,1105-1123).
gaggtatggacccagaaat

SEQ ID NO: 678656 - DNA, 19 bp, Mus musculus
  siRNA target sequence for Herpud1 (NM_022331.1,1195-1213).
gcacagcatggctagtctt

SEQ ID NO: 678657 - DNA, 19 bp, Mus musculus
  siRNA target sequence for Herpud1 (NM_022331.1,1200-1218).
gcatggctagtcttcaaga

SEQ ID NO: 678658 - DNA, 19 bp, Mus musculus
  siRNA target sequence for Lect2 (NM_010702.1,147-165).
cacaacaatcctcatttca

SEQ ID NO: 678659 - DNA, 19 bp, Mus musculus
  siRNA target sequence for Lect2 (NM_010702.1,191-209).
caggaccatgggctaacat

SEQ ID NO: 678660 - DNA, 19 bp, Mus musculus
  siRNA target sequence for Lect2 (NM_010702.1,193-211).
ggaccatgggctaacatat

SEQ ID NO: 678661 - DNA, 19 bp, Mus musculus
  siRNA target sequence for Lect2 (NM_010702.1,333-351).
ggtgtatgcaccattcact

SEQ ID NO: 678662 - DNA, 19 bp, Mus musculus
  siRNA target sequence for Lect2 (NM_010702.1,367-385).
caggagaaaccctatagaa

SEQ ID NO: 678663 - DNA, 19 bp, Mus musculus
  siRNA target sequence for Lect2 (NM_010702.1,434-452).
gtgtcaaaattttctacat

SEQ ID NO: 678664 - DNA, 19 bp, Mus musculus
  siRNA target sequence for Lect2 (NM_010702.1,456-474).
gccaattaagtataaaggt

SEQ ID NO: 678665 - DNA, 19 bp, Mus musculus
  siRNA target sequence for Lect2 (NM_010702.1,465-483).
gtataaaggttctatcaaa

SEQ ID NO: 678666 - DNA, 19 bp, Mus musculus
  siRNA target sequence for Lect2 (NM_010702.1,533-551).
gcatccagtcgcatgtaca

SEQ ID NO: 678667 - DNA, 19 bp, Mus musculus
  siRNA target sequence for Lect2 (NM_010702.1,542-560).
cgcatgtacacgttgaaaa

SEQ ID NO: 678668 - DNA, 19 bp, Mus musculus
  siRNA target sequence for Tmc1 (NM_028953.1,313-331).
gccggaggatgaagaaaca

SEQ ID NO: 678669 - DNA, 19 bp, Mus musculus
  siRNA target sequence for Tmc1 (NM_028953.1,406-424).
ggaattagaacggttaaaa

SEQ ID NO: 678670 - DNA, 19 bp, Mus musculus
  siRNA target sequence for Tmc1 (NM_028953.1,425-443).
gcactgctcgatgagaata

SEQ ID NO: 678671 - DNA, 19 bp, Mus musculus
  siRNA target sequence for Tmc1 (NM_028953.1,430-448).
gctcgatgagaatagacaa

SEQ ID NO: 678672 - DNA, 19 bp, Mus musculus
  siRNA target sequence for Tmc1 (NM_028953.1,434-452).
gatgagaatagacaaatga

SEQ ID NO: 678673 - DNA, 19 bp, Mus musculus
  siRNA target sequence for Tmc1 (NM_028953.1,451-469).
gatcgctactgtcaaatgt

SEQ ID NO: 678674 - DNA, 19 bp, Mus musculus
  siRNA target sequence for Tmc1 (NM_028953.1,454-472).
cgctactgtcaaatgtaaa

SEQ ID NO: 678675 - DNA, 19 bp, Mus musculus
  siRNA target sequence for Tmc1 (NM_028953.1,468-486).
gtaaaccttggaaaatgga

SEQ ID NO: 678676 - DNA, 19 bp, Mus musculus
  siRNA target sequence for Tmc1 (NM_028953.1,509-527).
gaagcaaagaaatttgtga

SEQ ID NO: 678677 - DNA, 19 bp, Mus musculus
  siRNA target sequence for Tmc1 (NM_028953.1,539-557).
ggcgctcttgggaaaggaa

SEQ ID NO: 678678 - DNA, 19 bp, Mus musculus
  siRNA target sequence for Tmc1 (NM_028953.1,593-611).
gccaagaaatgggcaaaat

SEQ ID NO: 678679 - DNA, 19 bp, Mus musculus
  siRNA target sequence for Tmc1 (NM_028953.1,594-612).
ccaagaaatgggcaaaatt

SEQ ID NO: 678680 - DNA, 19 bp, Mus musculus
  siRNA target sequence for Tmc1 (NM_028953.1,606-624).
caaaattcctccgagattt

SEQ ID NO: 678681 - DNA, 19 bp, Mus musculus
  siRNA target sequence for Tmc1 (NM_028953.1,645-663).
gcgtcccatgggaaaacaa

SEQ ID NO: 678682 - DNA, 19 bp, Mus musculus
  siRNA target sequence for Tmc1 (NM_028953.1,646-664).
cgtcccatgggaaaacaaa

SEQ ID NO: 678683 - DNA, 19 bp, Mus musculus
  siRNA target sequence for Tmc1 (NM_028953.1,661-679).
caaaatcaaggcaattgaa

SEQ ID NO: 678684 - DNA, 19 bp, Mus musculus
  siRNA target sequence for Tmc1 (NM_028953.1,670-688).
ggcaattgaaagtcagttt

SEQ ID NO: 678685 - DNA, 19 bp, Mus musculus
  siRNA target sequence for Tmc1 (NM_028953.1,726-744).
ggatgtacggcgtcaacat

SEQ ID NO: 678686 - DNA, 19 bp, Mus musculus
  siRNA target sequence for Tmc1 (NM_028953.1,803-821).
ccgtacggcagcttaccta

SEQ ID NO: 678687 - DNA, 19 bp, Mus musculus
  siRNA target sequence for Tmc1 (NM_028953.1,808-826).
cggcagcttacctaggaaa

SEQ ID NO: 678688 - DNA, 19 bp, Mus musculus
  siRNA target sequence for Tmc1 (NM_028953.1,811-829).
cagcttacctaggaaaaca

SEQ ID NO: 678689 - DNA, 19 bp, Mus musculus
  siRNA target sequence for Tmc1 (NM_028953.1,898-916).
gtactctgtcctcttttat

SEQ ID NO: 678690 - DNA, 19 bp, Mus musculus
  siRNA target sequence for Tmc1 (NM_028953.1,939-957).
cgatcggatggctgaattt

SEQ ID NO: 678691 - DNA, 19 bp, Mus musculus
  siRNA target sequence for Tmc1 (NM_028953.1,987-1005).
ggattatgtgcattggata

SEQ ID NO: 678692 - DNA, 19 bp, Mus musculus
  siRNA target sequence for Tmc1 (NM_028953.1,1022-1040).
ctcaaagcgatgaccaaaa

SEQ ID NO: 678693 - DNA, 19 bp, Mus musculus
  siRNA target sequence for Tmc1 (NM_028953.1,1059-1077).
gtggcgatgacaacacttt

SEQ ID NO: 678694 - DNA, 19 bp, Mus musculus
  siRNA target sequence for Tmc1 (NM_028953.1,1061-1079).
ggcgatgacaacactttca

SEQ ID NO: 678695 - DNA, 19 bp, Mus musculus
  siRNA target sequence for Tmc1 (NM_028953.1,1062-1080).
gcgatgacaacactttcaa

SEQ ID NO: 678696 - DNA, 19 bp, Mus musculus
  siRNA target sequence for Tmc1 (NM_028953.1,1101-1119).
gtagctgggactatctgat

SEQ ID NO: 678697 - DNA, 19 bp, Mus musculus
  siRNA target sequence for Tmc1 (NM_028953.1,1107-1125).
gggactatctgattggtaa

SEQ ID NO: 678698 - DNA, 19 bp, Mus musculus
  siRNA target sequence for Tmc1 (NM_028953.1,1130-1148).
gaaacagccgacaacaagt

SEQ ID NO: 678699 - DNA, 19 bp, Mus musculus
  siRNA target sequence for Tmc1 (NM_028953.1,1136-1154).
gccgacaacaagtttaact

SEQ ID NO: 678700 - DNA, 19 bp, Mus musculus
  siRNA target sequence for Tmc1 (NM_028953.1,1138-1156).
cgacaacaagtttaactct

SEQ ID NO: 678701 - DNA, 19 bp, Mus musculus
  siRNA target sequence for Tmc1 (NM_028953.1,1139-1157).
gacaacaagtttaactcta

SEQ ID NO: 678702 - DNA, 19 bp, Mus musculus
  siRNA target sequence for Tmc1 (NM_028953.1,1155-1173).
ctatcacgatgaactttaa

SEQ ID NO: 678703 - DNA, 19 bp, Mus musculus
  siRNA target sequence for Tmc1 (NM_028953.1,1159-1177).
cacgatgaactttaaggaa

SEQ ID NO: 678704 - DNA, 19 bp, Mus musculus
  siRNA target sequence for Tmc1 (NM_028953.1,1239-1257).
ggtttctcgctaacttctt

SEQ ID NO: 678705 - DNA, 19 bp, Mus musculus
  siRNA target sequence for Tmc1 (NM_028953.1,1406-1424).
cccaccctgtttgacttat

SEQ ID NO: 678706 - DNA, 19 bp, Mus musculus
  siRNA target sequence for Tmc1 (NM_028953.1,1407-1425).
ccaccctgtttgacttatt

SEQ ID NO: 678707 - DNA, 19 bp, Mus musculus
  siRNA target sequence for Tmc1 (NM_028953.1,1411-1429).
cctgtttgacttatttgct

SEQ ID NO: 678708 - DNA, 19 bp, Mus musculus
  siRNA target sequence for Tmc1 (NM_028953.1,1477-1495).
gcgcatttttgctcttctt

SEQ ID NO: 678709 - DNA, 19 bp, Mus musculus
  siRNA target sequence for Tmc1 (NM_028953.1,1490-1508).
cttcttctaggcaacttgt

SEQ ID NO: 678710 - DNA, 19 bp, Mus musculus
  siRNA target sequence for Tmc1 (NM_028953.1,1496-1514).
ctaggcaacttgtatgtat

SEQ ID NO: 678711 - DNA, 19 bp, Mus musculus
  siRNA target sequence for Tmc1 (NM_028953.1,1499-1517).
ggcaacttgtatgtattca

SEQ ID NO: 678712 - DNA, 19 bp, Mus musculus
  siRNA target sequence for Tmc1 (NM_028953.1,1522-1540).
cgccttgatggatgagatt

SEQ ID NO: 678713 - DNA, 19 bp, Mus musculus
  siRNA target sequence for Tmc1 (NM_028953.1,1524-1542).
ccttgatggatgagattaa

SEQ ID NO: 678714 - DNA, 19 bp, Mus musculus
  siRNA target sequence for Tmc1 (NM_028953.1,1590-1608).
gggaagccaacatgattaa

SEQ ID NO: 678715 - DNA, 19 bp, Mus musculus
  siRNA target sequence for Tmc1 (NM_028953.1,1600-1618).
catgattaaggcttacaat

SEQ ID NO: 678716 - DNA, 19 bp, Mus musculus
  siRNA target sequence for Tmc1 (NM_028953.1,1650-1668).
caggagcaccctttttcgt

SEQ ID NO: 678717 - DNA, 19 bp, Mus musculus
  siRNA target sequence for Tmc1 (NM_028953.1,1692-1710).
gtccctgctgggaaacaat

SEQ ID NO: 678718 - DNA, 19 bp, Mus musculus
  siRNA target sequence for Tmc1 (NM_028953.1,1824-1842).
ggtgctgggacttagaata

SEQ ID NO: 678719 - DNA, 19 bp, Mus musculus
  siRNA target sequence for Tmc1 (NM_028953.1,1825-1843).
gtgctgggacttagaatat

SEQ ID NO: 678720 - DNA, 19 bp, Mus musculus
  siRNA target sequence for Tmc1 (NM_028953.1,1828-1846).
ctgggacttagaatatgga

SEQ ID NO: 678721 - DNA, 19 bp, Mus musculus
  siRNA target sequence for Tmc1 (NM_028953.1,1834-1852).
cttagaatatggatatcct

SEQ ID NO: 678722 - DNA, 19 bp, Mus musculus
  siRNA target sequence for Tmc1 (NM_028953.1,1883-1901).
gtcctcgctctgatcttca

SEQ ID NO: 678723 - DNA, 19 bp, Mus musculus
  siRNA target sequence for Tmc1 (NM_028953.1,2126-2144).
ctcccgccatcttttgatt

SEQ ID NO: 678724 - DNA, 19 bp, Mus musculus
  siRNA target sequence for Tmc1 (NM_028953.1,2128-2146).
cccgccatcttttgattgt

SEQ ID NO: 678725 - DNA, 19 bp, Mus musculus
  siRNA target sequence for Tmc1 (NM_028953.1,2285-2303).
ctgaccatctattatctca

SEQ ID NO: 678726 - DNA, 19 bp, Mus musculus
  siRNA target sequence for Tmie (NM_146260.1,1382-1400).
cgctatgctgtgtcttcaa

SEQ ID NO: 678727 - DNA, 19 bp, Mus musculus
  siRNA target sequence for Tmie (NM_146260.1,1428-1446).
gatcgaggctcggtatcta

SEQ ID NO: 678728 - DNA, 19 bp, Mus musculus
  siRNA target sequence for Tmie (NM_146260.1,1485-1503).
gactgtgcctccccttaat

SEQ ID NO: 678729 - DNA, 19 bp, Mus musculus
  siRNA target sequence for 1110061A19Rik (NM_026850.2,285-303).
caactcagctgaagaacaa

SEQ ID NO: 678730 - DNA, 19 bp, Mus musculus
  siRNA target sequence for 1110061A19Rik (NM_026850.2,327-345).
caggaaaggactatgttca

SEQ ID NO: 678731 - DNA, 19 bp, Mus musculus
  siRNA target sequence for 1110061A19Rik (NM_026850.2,367-385).
gggcctgtgggtgatctta

SEQ ID NO: 678732 - DNA, 19 bp, Mus musculus
  siRNA target sequence for 1110061A19Rik (NM_026850.2,407-425).
cccctctgttccttgataa

SEQ ID NO: 678733 - DNA, 19 bp, Mus musculus
  siRNA target sequence for 1110061A19Rik (NM_026850.2,417-435).
ccttgataaaccatcactt

SEQ ID NO: 678734 - DNA, 19 bp, Mus musculus
  siRNA target sequence for 1110061A19Rik (NM_026850.2,458-476).
cccgatgtgaaatttatca

SEQ ID NO: 678735 - DNA, 19 bp, Mus musculus
  siRNA target sequence for 1110061A19Rik (NM_026850.2,459-477).
ccgatgtgaaatttatcaa

SEQ ID NO: 678736 - DNA, 19 bp, Mus musculus
  siRNA target sequence for 1110061A19Rik (NM_026850.2,460-478).
cgatgtgaaatttatcaaa

SEQ ID NO: 678737 - DNA, 19 bp, Mus musculus
  siRNA target sequence for Pdcl2 (NM_023508.3,97-115).
caggatccaaacgaagata

SEQ ID NO: 678738 - DNA, 19 bp, Mus musculus
  siRNA target sequence for Pdcl2 (NM_023508.3,99-117).
ggatccaaacgaagataca

SEQ ID NO: 678739 - DNA, 19 bp, Mus musculus
  siRNA target sequence for Pdcl2 (NM_023508.3,211-229).
gaggccatggttaaaccat

SEQ ID NO: 678740 - DNA, 19 bp, Mus musculus
  siRNA target sequence for Pdcl2 (NM_023508.3,215-233).
ccatggttaaaccatatga

SEQ ID NO: 678741 - DNA, 19 bp, Mus musculus
  siRNA target sequence for Pdcl2 (NM_023508.3,352-370).
caaaaatttggggaattga

SEQ ID NO: 678742 - DNA, 19 bp, Mus musculus
  siRNA target sequence for Pdcl2 (NM_023508.3,363-381).
ggaattgagagaaatttct

SEQ ID NO: 678743 - DNA, 19 bp, Mus musculus
  siRNA target sequence for Pdcl2 (NM_023508.3,373-391).
gaaatttctggaaatcagt

SEQ ID NO: 678744 - DNA, 19 bp, Mus musculus
  siRNA target sequence for Pdcl2 (NM_023508.3,537-555).
cgtgaatagctgcattgaa

SEQ ID NO: 678745 - DNA, 19 bp, Mus musculus
  siRNA target sequence for Pdcl2 (NM_023508.3,577-595).
ccaacaatttttgtttata

SEQ ID NO: 678746 - DNA, 19 bp, Mus musculus
  siRNA target sequence for Pdcl2 (NM_023508.3,602-620).
gtcagatagaaggcaaatt

SEQ ID NO: 678747 - DNA, 19 bp, Mus musculus
  siRNA target sequence for Pdcl2 (NM_023508.3,613-631).
ggcaaattcattggaatta

SEQ ID NO: 678748 - DNA, 19 bp, Mus musculus
  siRNA target sequence for Pdcl2 (NM_023508.3,614-632).
gcaaattcattggaattat

SEQ ID NO: 678749 - DNA, 19 bp, Mus musculus
  siRNA target sequence for Pdcl2 (NM_023508.3,615-633).
caaattcattggaattata

SEQ ID NO: 678750 - DNA, 19 bp, Mus musculus
  siRNA target sequence for Pdcl2 (NM_023508.3,685-703).
gaagttggagcgatacaga

SEQ ID NO: 678751 - DNA, 19 bp, Mus musculus
  siRNA target sequence for Pdcl2 (NM_023508.3,739-757).
gatatgatggtgtcttcaa

SEQ ID NO: 678752 - DNA, 19 bp, Mus musculus
  siRNA target sequence for Fancg (NM_053081.1,241-259).
gactgtcctctgtaattgt

SEQ ID NO: 678753 - DNA, 19 bp, Mus musculus
  siRNA target sequence for Fancg (NM_053081.1,467-485).
gctgtcttctggatgagta

SEQ ID NO: 678754 - DNA, 19 bp, Mus musculus
  siRNA target sequence for Fancg (NM_053081.1,560-578).
ctactactgctaaaatcct

SEQ ID NO: 678755 - DNA, 19 bp, Mus musculus
  siRNA target sequence for Fancg (NM_053081.1,620-638).
caggatgccgagagtttga

SEQ ID NO: 678756 - DNA, 19 bp, Mus musculus
  siRNA target sequence for Fancg (NM_053081.1,747-765).
gtccgccgtccgtgttagt

SEQ ID NO: 678757 - DNA, 19 bp, Mus musculus
  siRNA target sequence for Fancg (NM_053081.1,796-814).
ccgtaagatgggaaatcca

SEQ ID NO: 678758 - DNA, 19 bp, Mus musculus
  siRNA target sequence for Fancg (NM_053081.1,968-986).
catagttctgaaacattca

SEQ ID NO: 678759 - DNA, 19 bp, Mus musculus
  siRNA target sequence for Fancg (NM_053081.1,994-1012).
cattgaagtagaattgcta

SEQ ID NO: 678760 - DNA, 19 bp, Mus musculus
  siRNA target sequence for Fancg (NM_053081.1,1189-1207).
ctctctaggtccctgtata

SEQ ID NO: 678761 - DNA, 19 bp, Mus musculus
  siRNA target sequence for Fancg (NM_053081.1,1199-1217).
ccctgtataccagagttat

SEQ ID NO: 678762 - DNA, 19 bp, Mus musculus
  siRNA target sequence for Fancg (NM_053081.1,1203-1221).
gtataccagagttatgtct

SEQ ID NO: 678763 - DNA, 19 bp, Mus musculus
  siRNA target sequence for Fancg (NM_053081.1,1439-1457).
gaggcacttagtgaattta

SEQ ID NO: 678764 - DNA, 19 bp, Mus musculus
  siRNA target sequence for Fancg (NM_053081.1,1534-1552).
gtctgacgtggcactgaaa

SEQ ID NO: 678765 - DNA, 19 bp, Mus musculus
  siRNA target sequence for Fancg (NM_053081.1,1536-1554).
ctgacgtggcactgaaaca

SEQ ID NO: 678766 - DNA, 19 bp, Mus musculus
  siRNA target sequence for Fancg (NM_053081.1,1774-1792).
cgggtctcttccactgtat

SEQ ID NO: 678767 - DNA, 19 bp, Mus musculus
  siRNA target sequence for Fancg (NM_053081.1,1775-1793).
gggtctcttccactgtatt

SEQ ID NO: 678768 - DNA, 19 bp, Mus musculus
  siRNA target sequence for Fancg (NM_053081.1,1776-1794).
ggtctcttccactgtattt

SEQ ID NO: 678769 - DNA, 19 bp, Mus musculus
  siRNA target sequence for Arr3 (NM_133205.1,184-202).
ggtcgaaagttgtttgtca

SEQ ID NO: 678770 - DNA, 19 bp, Mus musculus
  siRNA target sequence for Arr3 (NM_133205.1,221-239).
gctatggccgtgatgactt

SEQ ID NO: 678771 - DNA, 19 bp, Mus musculus
  siRNA target sequence for Arr3 (NM_133205.1,257-275).
catttcgcaaagatctcta

SEQ ID NO: 678772 - DNA, 19 bp, Mus musculus
  siRNA target sequence for Arr3 (NM_133205.1,365-383).
gggtcaatgcctatccttt

SEQ ID NO: 678773 - DNA, 19 bp, Mus musculus
  siRNA target sequence for Arr3 (NM_133205.1,366-384).
ggtcaatgcctatcctttt

SEQ ID NO: 678774 - DNA, 19 bp, Mus musculus
  siRNA target sequence for Arr3 (NM_133205.1,367-385).
gtcaatgcctatcctttta

SEQ ID NO: 678775 - DNA, 19 bp, Mus musculus
  siRNA target sequence for Arr3 (NM_133205.1,369-387).
caatgcctatccttttaca

SEQ ID NO: 678776 - DNA, 19 bp, Mus musculus
  siRNA target sequence for Arr3 (NM_133205.1,386-404).
cacttcagatggttgctaa

SEQ ID NO: 678777 - DNA, 19 bp, Mus musculus
  siRNA target sequence for Arr3 (NM_133205.1,601-619).
cgaagcttctttttgtcat

SEQ ID NO: 678778 - DNA, 19 bp, Mus musculus
  siRNA target sequence for Arr3 (NM_133205.1,688-706).
catgtttctatcaacaact

SEQ ID NO: 678779 - DNA, 19 bp, Mus musculus
  siRNA target sequence for Arr3 (NM_133205.1,691-709).
gtttctatcaacaactata

SEQ ID NO: 678780 - DNA, 19 bp, Mus musculus
  siRNA target sequence for Arr3 (NM_133205.1,783-801).
gtacacgaagactgtgttt

SEQ ID NO: 678781 - DNA, 19 bp, Mus musculus
  siRNA target sequence for Arr3 (NM_133205.1,788-806).
cgaagactgtgtttgttca

SEQ ID NO: 678782 - DNA, 19 bp, Mus musculus
  siRNA target sequence for Arr3 (NM_133205.1,939-957).
ggcctctagcacaattctt

SEQ ID NO: 678783 - DNA, 19 bp, Mus musculus
  siRNA target sequence for Arr3 (NM_133205.1,955-973).
cttcgacctggaatgaaca

SEQ ID NO: 678784 - DNA, 19 bp, Mus musculus
  siRNA target sequence for Arr3 (NM_133205.1,987-1005).
gatcctggtgtcctacaaa

SEQ ID NO: 678785 - DNA, 19 bp, Mus musculus
  siRNA target sequence for Arr3 (NM_133205.1,991-1009).
ctggtgtcctacaaagtta

SEQ ID NO: 678786 - DNA, 19 bp, Mus musculus
  siRNA target sequence for Arr3 (NM_133205.1,1136-1154).
gctcggaggacatagtcat

SEQ ID NO: 678787 - DNA, 19 bp, Mus musculus
  siRNA target sequence for Nyx (NM_173415.2,2172-2190).
ctgtcgctgcgccacaata

SEQ ID NO: 678788 - DNA, 19 bp, Mus musculus
  siRNA target sequence for Nyx (NM_173415.2,2176-2194).
cgctgcgccacaataacct

SEQ ID NO: 678789 - DNA, 19 bp, Mus musculus
  siRNA target sequence for Nyx (NM_173415.2,2734-2752).
cagagctcgagctgcttta

SEQ ID NO: 678790 - DNA, 19 bp, Mus musculus
  siRNA target sequence for Nyx (NM_173415.2,3183-3201).
gaggaggtagccaatacca

SEQ ID NO: 678791 - DNA, 19 bp, Mus musculus
  siRNA target sequence for Nyx (NM_173415.2,3212-3230).
ggtcaacgtctcgttgaat

SEQ ID NO: 678792 - DNA, 19 bp, Mus musculus
  siRNA target sequence for Unc119 (NM_011676.2,273-291).
gtgctcccctgaggaaaat

SEQ ID NO: 678793 - DNA, 19 bp, Mus musculus
  siRNA target sequence for Unc119 (NM_011676.2,304-322).
gacttcgtcaggttcaaga

SEQ ID NO: 678794 - DNA, 19 bp, Mus musculus
  siRNA target sequence for Unc119 (NM_011676.2,414-432).
caatgcagggcgctttgtt

SEQ ID NO: 678795 - DNA, 19 bp, Mus musculus
  siRNA target sequence for Unc119 (NM_011676.2,532-550).
gagaggcactactttcgaa

SEQ ID NO: 678796 - DNA, 19 bp, Mus musculus
  siRNA target sequence for Unc119 (NM_011676.2,609-627).
cacctgtgagcacatctat

SEQ ID NO: 678797 - DNA, 19 bp, Mus musculus
  siRNA target sequence for Unc119 (NM_011676.2,638-656).
ctctctccgaggagctaat

SEQ ID NO: 678798 - DNA, 19 bp, Mus musculus
  siRNA target sequence for Unc119 (NM_011676.2,642-660).
ctccgaggagctaatcagt

SEQ ID NO: 678799 - DNA, 19 bp, Mus musculus
  siRNA target sequence for Unc119 (NM_011676.2,688-706).
cagtctgacagcttctact

SEQ ID NO: 678800 - DNA, 19 bp, Mus musculus
  siRNA target sequence for Unc119 (NM_011676.2,715-733).
gaccggctggtgatgcata

SEQ ID NO: 678801 - DNA, 19 bp, Mus musculus
  siRNA target sequence for Unc119 (NM_011676.2,718-736).
cggctggtgatgcataaca

SEQ ID NO: 678802 - DNA, 19 bp, Mus musculus
  siRNA target sequence for 2410003C09Rik (NM_025549.1,380-398).
cctcctcagaagtggaata

SEQ ID NO: 678803 - DNA, 19 bp, Mus musculus
  siRNA target sequence for 2410003C09Rik (NM_025549.1,505-523).
cctttggcaacatcgttta

SEQ ID NO: 678804 - DNA, 19 bp, Mus musculus
  siRNA target sequence for 2410003C09Rik (NM_025549.1,636-654).
cacaccgcccttattgact

SEQ ID NO: 678805 - DNA, 19 bp, Mus musculus
  siRNA target sequence for 2410003C09Rik (NM_025549.1,666-684).
gacgcaggagaaaatggtt

SEQ ID NO: 678806 - DNA, 19 bp, Mus musculus
  siRNA target sequence for 2410003C09Rik (NM_025549.1,722-740).
gcgtcaagatcgagagaaa

SEQ ID NO: 678807 - DNA, 19 bp, Mus musculus
  siRNA target sequence for 2410003C09Rik (NM_025549.1,755-773).
gagaagctatccctatcta

SEQ ID NO: 678808 - DNA, 19 bp, Mus musculus
  siRNA target sequence for 2410003C09Rik (NM_025549.1,843-861).
cttggctagtggaaagaca

SEQ ID NO: 678809 - DNA, 19 bp, Mus musculus
  siRNA target sequence for 2410003C09Rik (NM_025549.1,892-910).
cgaggaaaccacattggtt

SEQ ID NO: 678810 - DNA, 19 bp, Mus musculus
  siRNA target sequence for 2410003C09Rik (NM_025549.1,1002-1020).
ctccttagctgtaatccaa

SEQ ID NO: 678811 - DNA, 19 bp, Mus musculus
  siRNA target sequence for Arrb2 (NM_145429.1,49-67).
gggaccagggtcttcaaga

SEQ ID NO: 678812 - DNA, 19 bp, Mus musculus
  siRNA target sequence for Arrb2 (NM_145429.1,83-101).
gcaagctcaccgtgtactt

SEQ ID NO: 678813 - DNA, 19 bp, Mus musculus
  siRNA target sequence for Arrb2 (NM_145429.1,102-120).
gggcaagcgcgactttgta

SEQ ID NO: 678814 - DNA, 19 bp, Mus musculus
  siRNA target sequence for Arrb2 (NM_145429.1,104-122).
gcaagcgcgactttgtaga

SEQ ID NO: 678815 - DNA, 19 bp, Mus musculus
  siRNA target sequence for Arrb2 (NM_145429.1,105-123).
caagcgcgactttgtagat

SEQ ID NO: 678816 - DNA, 19 bp, Mus musculus
  siRNA target sequence for Arrb2 (NM_145429.1,257-275).
ctttccgcaaagatctgtt

SEQ ID NO: 678817 - DNA, 19 bp, Mus musculus
  siRNA target sequence for Arrb2 (NM_145429.1,479-497).
ctttctgtgccaaatcaat

SEQ ID NO: 678818 - DNA, 19 bp, Mus musculus
  siRNA target sequence for Arrb2 (NM_145429.1,485-503).
gtgccaaatcaatagaaga

SEQ ID NO: 678819 - DNA, 19 bp, Mus musculus
  siRNA target sequence for Arrb2 (NM_145429.1,487-505).
gccaaatcaatagaagaaa

SEQ ID NO: 678820 - DNA, 19 bp, Mus musculus
  siRNA target sequence for Arrb2 (NM_145429.1,526-544).
gtgcggcttatcatcagaa

SEQ ID NO: 678821 - DNA, 19 bp, Mus musculus
  siRNA target sequence for Arrb2 (NM_145429.1,666-684).
ccacggggagccccttaat

SEQ ID NO: 678822 - DNA, 19 bp, Mus musculus
  siRNA target sequence for Arrb2 (NM_145429.1,693-711).
ccatgtcaccaacaattct

SEQ ID NO: 678823 - DNA, 19 bp, Mus musculus
  siRNA target sequence for Arrb2 (NM_145429.1,713-731).
ccaagaccgtcaagaagat

SEQ ID NO: 678824 - DNA, 19 bp, Mus musculus
  siRNA target sequence for Arrb2 (NM_145429.1,794-812).
ccgtggctcagctagaaca

SEQ ID NO: 678825 - DNA, 19 bp, Mus musculus
  siRNA target sequence for Arrb2 (NM_145429.1,906-924).
ggatgggcagctcaaacat

SEQ ID NO: 678826 - DNA, 19 bp, Mus musculus
  siRNA target sequence for Arrb2 (NM_145429.1,1148-1166).
ccaacctcatcgaattcga

SEQ ID NO: 678827 - DNA, 19 bp, Mus musculus
  siRNA target sequence for Arrb2 (NM_145429.1,1149-1167).
caacctcatcgaattcgat

SEQ ID NO: 678828 - DNA, 19 bp, Mus musculus
  siRNA target sequence for Arrb2 (NM_145429.1,1158-1176).
cgaattcgataccaactat

SEQ ID NO: 678829 - DNA, 19 bp, Mus musculus
  siRNA target sequence for BC004091 (NM_178408.2,257-275).
cggctggagagcacaactt

SEQ ID NO: 678830 - DNA, 19 bp, Mus musculus
  siRNA target sequence for BC004091 (NM_178408.2,321-339).
gggaccctttgggaagatt

SEQ ID NO: 678831 - DNA, 19 bp, Mus musculus
  siRNA target sequence for BC004091 (NM_178408.2,374-392).
gtttttccaaggatcacaa

SEQ ID NO: 678832 - DNA, 19 bp, Mus musculus
  siRNA target sequence for BC004091 (NM_178408.2,395-413).
gtagcctcgtgttctacat

SEQ ID NO: 678833 - DNA, 19 bp, Mus musculus
  siRNA target sequence for BC004091 (NM_178408.2,626-644).
gcttgctacaggtatccta

SEQ ID NO: 678834 - DNA, 19 bp, Mus musculus
  siRNA target sequence for BC004091 (NM_178408.2,627-645).
cttgctacaggtatcctat

SEQ ID NO: 678835 - DNA, 19 bp, Mus musculus
  siRNA target sequence for BC004091 (NM_178408.2,650-668).
ccaagcgctggatctatga

SEQ ID NO: 678836 - DNA, 19 bp, Mus musculus
  siRNA target sequence for BC004091 (NM_178408.2,776-794).
gctgcagccttatccatat

SEQ ID NO: 678837 - DNA, 19 bp, Mus musculus
  siRNA target sequence for BC004091 (NM_178408.2,779-797).
gcagccttatccatatcga

SEQ ID NO: 678838 - DNA, 19 bp, Mus musculus
  siRNA target sequence for BC004091 (NM_178408.2,784-802).
cttatccatatcgactatt

SEQ ID NO: 678839 - DNA, 19 bp, Mus musculus
  siRNA target sequence for BC004091 (NM_178408.2,789-807).
ccatatcgactattacctt

SEQ ID NO: 678840 - DNA, 19 bp, Mus musculus
  siRNA target sequence for BC004091 (NM_178408.2,836-854).
ccgtgactctcccactatt

SEQ ID NO: 678841 - DNA, 19 bp, Mus musculus
  siRNA target sequence for BC004091 (NM_178408.2,837-855).
cgtgactctcccactattt

SEQ ID NO: 678842 - DNA, 19 bp, Mus musculus
  siRNA target sequence for BC004091 (NM_178408.2,840-858).
gactctcccactatttgtt

SEQ ID NO: 678843 - DNA, 19 bp, Mus musculus
  siRNA target sequence for BC004091 (NM_178408.2,848-866).
cactatttgttggcaatat

SEQ ID NO: 678844 - DNA, 19 bp, Mus musculus
  siRNA target sequence for BC004091 (NM_178408.2,1131-1149).
cttgtgcatctctataggt

SEQ ID NO: 678845 - DNA, 19 bp, Mus musculus
  siRNA target sequence for Syn2 (NM_013681.1,612-630).
ggaacaggcagaattctca

SEQ ID NO: 678846 - DNA, 19 bp, Mus musculus
  siRNA target sequence for Syn2 (NM_013681.1,735-753).
catccgacagcatgcattt

SEQ ID NO: 678847 - DNA, 19 bp, Mus musculus
  siRNA target sequence for Syn2 (NM_013681.1,1068-1086).
ggccctcacccaaacttat

SEQ ID NO: 678848 - DNA, 19 bp, Mus musculus
  siRNA target sequence for Syn2 (NM_013681.1,1101-1119).
cttcatcgacgccaagtat

SEQ ID NO: 678849 - DNA, 19 bp, Mus musculus
  siRNA target sequence for Syn2 (NM_013681.1,1205-1223).
cggcgatgctggagcaaat

SEQ ID NO: 678850 - DNA, 19 bp, Mus musculus
  siRNA target sequence for Syn2 (NM_013681.1,1252-1270).
gtagatgcctgctctgaaa

SEQ ID NO: 678851 - DNA, 19 bp, Mus musculus
  siRNA target sequence for Syn2 (NM_013681.1,1313-1331).
gcaaagatggcaaagacta

SEQ ID NO: 678852 - DNA, 19 bp, Mus musculus
  siRNA target sequence for Syn2 (NM_013681.1,1408-1426).
ctagtcatcagcaagatga

SEQ ID NO: 678853 - DNA, 19 bp, Mus musculus
  siRNA target sequence for Syn2 (NM_013681.1,1418-1436).
gcaagatgaaccagctatt

SEQ ID NO: 678854 - DNA, 19 bp, Mus musculus
  siRNA target sequence for Syn2 (NM_013681.1,1541-1559).
cacctccccaaggttgttt

SEQ ID NO: 678855 - DNA, 19 bp, Mus musculus
  siRNA target sequence for Syn2 (NM_013681.1,1544-1562).
ctccccaaggttgtttaca

SEQ ID NO: 678856 - DNA, 19 bp, Mus musculus
  siRNA target sequence for Syn2 (NM_013681.1,1547-1565).
cccaaggttgtttacagta

SEQ ID NO: 678857 - DNA, 19 bp, Mus musculus
  siRNA target sequence for Syn2 (NM_013681.1,1548-1566).
ccaaggttgtttacagtat

SEQ ID NO: 678858 - DNA, 19 bp, Mus musculus
  siRNA target sequence for Syn2 (NM_013681.1,1563-1581).
gtatattctcgactgtaat

SEQ ID NO: 678859 - DNA, 19 bp, Mus musculus
  siRNA target sequence for Syn2 (NM_013681.1,1584-1602).
cattgcagtaggtccaaaa

SEQ ID NO: 678860 - DNA, 19 bp, Mus musculus
  siRNA target sequence for Syn3 (NM_013722.1,473-491).
ggatcttgttggttatcga

SEQ ID NO: 678861 - DNA, 19 bp, Mus musculus
  siRNA target sequence for Syn3 (NM_013722.1,474-492).
gatcttgttggttatcgat

SEQ ID NO: 678862 - DNA, 19 bp, Mus musculus
  siRNA target sequence for Syn3 (NM_013722.1,503-521).
cagactggtcaaagtattt

SEQ ID NO: 678863 - DNA, 19 bp, Mus musculus
  siRNA target sequence for Syn3 (NM_013722.1,624-642).
catgcaagttgtgagaaat

SEQ ID NO: 678864 - DNA, 19 bp, Mus musculus
  siRNA target sequence for Syn3 (NM_013722.1,776-794).
ctctctactccgtatacaa

SEQ ID NO: 678865 - DNA, 19 bp, Mus musculus
  siRNA target sequence for Syn3 (NM_013722.1,778-796).
ctctactccgtatacaact

SEQ ID NO: 678866 - DNA, 19 bp, Mus musculus
  siRNA target sequence for Syn3 (NM_013722.1,814-832).
gtgttttctcagctcatta

SEQ ID NO: 678867 - DNA, 19 bp, Mus musculus
  siRNA target sequence for Syn3 (NM_013722.1,826-844).
ctcattaagatcttccatt

SEQ ID NO: 678868 - DNA, 19 bp, Mus musculus
  siRNA target sequence for Syn3 (NM_013722.1,865-883).
ccactagtggagcaaacat

SEQ ID NO: 678869 - DNA, 19 bp, Mus musculus
  siRNA target sequence for Syn3 (NM_013722.1,866-884).
cactagtggagcaaacatt

SEQ ID NO: 678870 - DNA, 19 bp, Mus musculus
  siRNA target sequence for Syn3 (NM_013722.1,868-886).
ctagtggagcaaacatttt

SEQ ID NO: 678871 - DNA, 19 bp, Mus musculus
  siRNA target sequence for Syn3 (NM_013722.1,955-973).
gctggcatgggaaagatca

SEQ ID NO: 678872 - DNA, 19 bp, Mus musculus
  siRNA target sequence for Syn3 (NM_013722.1,956-974).
ctggcatgggaaagatcaa

SEQ ID NO: 678873 - DNA, 19 bp, Mus musculus
  siRNA target sequence for Syn3 (NM_013722.1,1037-1055).
ccaccacggaggcctttat

SEQ ID NO: 678874 - DNA, 19 bp, Mus musculus
  siRNA target sequence for Syn3 (NM_013722.1,1038-1056).
caccacggaggcctttatt

SEQ ID NO: 678875 - DNA, 19 bp, Mus musculus
  siRNA target sequence for Syn3 (NM_013722.1,1040-1058).
ccacggaggcctttattga

SEQ ID NO: 678876 - DNA, 19 bp, Mus musculus
  siRNA target sequence for Syn3 (NM_013722.1,1050-1068).
ctttattgactccaagtat

SEQ ID NO: 678877 - DNA, 19 bp, Mus musculus
  siRNA target sequence for Syn3 (NM_013722.1,1075-1093).
cgcatacagaagattggat

SEQ ID NO: 678878 - DNA, 19 bp, Mus musculus
  siRNA target sequence for Syn3 (NM_013722.1,1263-1281).
caaggacggcagagattat

SEQ ID NO: 678879 - DNA, 19 bp, Mus musculus
  siRNA target sequence for Syn3 (NM_013722.1,1267-1285).
gacggcagagattatatca

SEQ ID NO: 678880 - DNA, 19 bp, Mus musculus
  siRNA target sequence for Syn3 (NM_013722.1,1357-1375).
cttgtcgtttccaagatga

SEQ ID NO: 678881 - DNA, 19 bp, Mus musculus
  siRNA target sequence for Syn3 (NM_013722.1,1432-1450).
cagactaaacctgcaaaat

SEQ ID NO: 678882 - DNA, 19 bp, Mus musculus
  siRNA target sequence for Syn3 (NM_013722.1,1859-1877).
ggaccccaagtgaagatga

SEQ ID NO: 678883 - DNA, 19 bp, Mus musculus
  siRNA target sequence for Cart (NM_013732.2,123-141).
cccgagccctggacatcta

SEQ ID NO: 678884 - DNA, 19 bp, Mus musculus
  siRNA target sequence for Cart (NM_013732.2,125-143).
cgagccctggacatctact

SEQ ID NO: 678885 - DNA, 19 bp, Mus musculus
  siRNA target sequence for Cart (NM_013732.2,266-284).
ccgatctacgagaagaagt

SEQ ID NO: 678886 - DNA, 19 bp, Mus musculus
  siRNA target sequence for Cart (NM_013732.2,267-285).
cgatctacgagaagaagta

SEQ ID NO: 678887 - DNA, 19 bp, Mus musculus
  siRNA target sequence for Cart (NM_013732.2,368-386).
cgaggaacttcctgcaatt

SEQ ID NO: 678888 - DNA, 19 bp, Mus musculus
  siRNA target sequence for Cart (NM_013732.2,371-389).
ggaacttcctgcaattctt

SEQ ID NO: 678889 - DNA, 19 bp, Mus musculus
  siRNA target sequence for Cart (NM_013732.2,381-399).
gcaattctttcctcttgaa

SEQ ID NO: 678890 - DNA, 19 bp, Mus musculus
  siRNA target sequence for Rapsn (NM_009023.1,355-373).
gccgtggtccagattgata

SEQ ID NO: 678891 - DNA, 19 bp, Mus musculus
  siRNA target sequence for Rapsn (NM_009023.1,357-375).
cgtggtccagattgatact

SEQ ID NO: 678892 - DNA, 19 bp, Mus musculus
  siRNA target sequence for Rapsn (NM_009023.1,430-448).
cgcagcaatgagaagctat

SEQ ID NO: 678893 - DNA, 19 bp, Mus musculus
  siRNA target sequence for Rapsn (NM_009023.1,445-463).
ctatgtgagttccacaaaa

SEQ ID NO: 678894 - DNA, 19 bp, Mus musculus
  siRNA target sequence for Rapsn (NM_009023.1,538-556).
ctgagcatgggcaatgctt

SEQ ID NO: 678895 - DNA, 19 bp, Mus musculus
  siRNA target sequence for Rapsn (NM_009023.1,909-927).
ctgctttgccgatatccat

SEQ ID NO: 678896 - DNA, 19 bp, Mus musculus
  siRNA target sequence for Rapsn (NM_009023.1,1062-1080).
gcaagacaaggctttggat

SEQ ID NO: 678897 - DNA, 19 bp, Mus musculus
  siRNA target sequence for F13b (NM_031164.1,29-47).
ctgagacacttgccattta

SEQ ID NO: 678898 - DNA, 19 bp, Mus musculus
  siRNA target sequence for F13b (NM_031164.1,31-49).
gagacacttgccatttatt

SEQ ID NO: 678899 - DNA, 19 bp, Mus musculus
  siRNA target sequence for F13b (NM_031164.1,40-58).
gccatttattcttttatta

SEQ ID NO: 678900 - DNA, 19 bp, Mus musculus
  siRNA target sequence for F13b (NM_031164.1,119-137).
ggaaggattgcccaatatt

SEQ ID NO: 678901 - DNA, 19 bp, Mus musculus
  siRNA target sequence for F13b (NM_031164.1,123-141).
ggattgcccaatattatta

SEQ ID NO: 678902 - DNA, 19 bp, Mus musculus
  siRNA target sequence for F13b (NM_031164.1,124-142).
gattgcccaatattattat

SEQ ID NO: 678903 - DNA, 19 bp, Mus musculus
  siRNA target sequence for F13b (NM_031164.1,129-147).
cccaatattattatacgtt

SEQ ID NO: 678904 - DNA, 19 bp, Mus musculus
  siRNA target sequence for F13b (NM_031164.1,130-148).
ccaatattattatacgttt

SEQ ID NO: 678905 - DNA, 19 bp, Mus musculus
  siRNA target sequence for F13b (NM_031164.1,131-149).
caatattattatacgttta

SEQ ID NO: 678906 - DNA, 19 bp, Mus musculus
  siRNA target sequence for F13b (NM_031164.1,163-181).
ccccatgagcgtagacaaa

SEQ ID NO: 678907 - DNA, 19 bp, Mus musculus
  siRNA target sequence for F13b (NM_031164.1,164-182).
cccatgagcgtagacaaaa

SEQ ID NO: 678908 - DNA, 19 bp, Mus musculus
  siRNA target sequence for F13b (NM_031164.1,166-184).
catgagcgtagacaaaaaa

SEQ ID NO: 678909 - DNA, 19 bp, Mus musculus
  siRNA target sequence for F13b (NM_031164.1,322-340).
cgtctccaatgacaaagta

SEQ ID NO: 678910 - DNA, 19 bp, Mus musculus
  siRNA target sequence for F13b (NM_031164.1,513-531).
ccacgacgcagagaacatt

SEQ ID NO: 678911 - DNA, 19 bp, Mus musculus
  siRNA target sequence for F13b (NM_031164.1,516-534).
cgacgcagagaacattcaa

SEQ ID NO: 678912 - DNA, 19 bp, Mus musculus
  siRNA target sequence for F13b (NM_031164.1,517-535).
gacgcagagaacattcaaa

SEQ ID NO: 678913 - DNA, 19 bp, Mus musculus
  siRNA target sequence for F13b (NM_031164.1,519-537).
cgcagagaacattcaaagt

SEQ ID NO: 678914 - DNA, 19 bp, Mus musculus
  siRNA target sequence for F13b (NM_031164.1,542-560).
gacatagtggcttacacat

SEQ ID NO: 678915 - DNA, 19 bp, Mus musculus
  siRNA target sequence for F13b (NM_031164.1,687-705).
gctattttcatcctgtaaa

SEQ ID NO: 678916 - DNA, 19 bp, Mus musculus
  siRNA target sequence for F13b (NM_031164.1,695-713).
catcctgtaaagcaaacat

SEQ ID NO: 678917 - DNA, 19 bp, Mus musculus
  siRNA target sequence for F13b (NM_031164.1,761-779).
ctaagtggatctgatttaa

SEQ ID NO: 678918 - DNA, 19 bp, Mus musculus
  siRNA target sequence for F13b (NM_031164.1,878-896).
caaccacattcaacaactt

SEQ ID NO: 678919 - DNA, 19 bp, Mus musculus
  siRNA target sequence for F13b (NM_031164.1,904-922).
cggagaaagagtgcatata

SEQ ID NO: 678920 - DNA, 19 bp, Mus musculus
  siRNA target sequence for F13b (NM_031164.1,906-924).
gagaaagagtgcatataga

SEQ ID NO: 678921 - DNA, 19 bp, Mus musculus
  siRNA target sequence for F13b (NM_031164.1,927-945).
gtgaacttaattttgtgat

SEQ ID NO: 678922 - DNA, 19 bp, Mus musculus
  siRNA target sequence for F13b (NM_031164.1,1068-1086).
cacactctgagatttacta

SEQ ID NO: 678923 - DNA, 19 bp, Mus musculus
  siRNA target sequence for F13b (NM_031164.1,1070-1088).
cactctgagatttactaca

SEQ ID NO: 678924 - DNA, 19 bp, Mus musculus
  siRNA target sequence for F13b (NM_031164.1,1089-1107).
gtggggataaagtgacata

SEQ ID NO: 678925 - DNA, 19 bp, Mus musculus
  siRNA target sequence for F13b (NM_031164.1,1091-1109).
ggggataaagtgacataca

SEQ ID NO: 678926 - DNA, 19 bp, Mus musculus
  siRNA target sequence for F13b (NM_031164.1,1126-1144).
cagtctcagaggatcaagt

SEQ ID NO: 678927 - DNA, 19 bp, Mus musculus
  siRNA target sequence for F13b (NM_031164.1,1286-1304).
gagtaccgatgcaatgagt

SEQ ID NO: 678928 - DNA, 19 bp, Mus musculus
  siRNA target sequence for F13b (NM_031164.1,1288-1306).
gtaccgatgcaatgagtat

SEQ ID NO: 678929 - DNA, 19 bp, Mus musculus
  siRNA target sequence for F13b (NM_031164.1,1292-1310).
cgatgcaatgagtattact

SEQ ID NO: 678930 - DNA, 19 bp, Mus musculus
  siRNA target sequence for F13b (NM_031164.1,1372-1390).
cttggagccctgcactatt

SEQ ID NO: 678931 - DNA, 19 bp, Mus musculus
  siRNA target sequence for F13b (NM_031164.1,1386-1404).
ctattgatgtggatcacat

SEQ ID NO: 678932 - DNA, 19 bp, Mus musculus
  siRNA target sequence for F13b (NM_031164.1,1397-1415).
gatcacatgaacaggaata

SEQ ID NO: 678933 - DNA, 19 bp, Mus musculus
  siRNA target sequence for F13b (NM_031164.1,1400-1418).
cacatgaacaggaataaca

SEQ ID NO: 678934 - DNA, 19 bp, Mus musculus
  siRNA target sequence for F13b (NM_031164.1,1460-1478).
gacctaatagattttgtgt

SEQ ID NO: 678935 - DNA, 19 bp, Mus musculus
  siRNA target sequence for F13b (NM_031164.1,1475-1493).
gtgtgtaagcagggatata

SEQ ID NO: 678936 - DNA, 19 bp, Mus musculus
  siRNA target sequence for F13b (NM_031164.1,1510-1528).
cccactgtcggagatatct

SEQ ID NO: 678937 - DNA, 19 bp, Mus musculus
  siRNA target sequence for F13b (NM_031164.1,1555-1573).
gtaccccatgtgcattaga

SEQ ID NO: 678938 - DNA, 19 bp, Mus musculus
  siRNA target sequence for F13b (NM_031164.1,1558-1576).
ccccatgtgcattagaaaa

SEQ ID NO: 678939 - DNA, 19 bp, Mus musculus
  siRNA target sequence for F13b (NM_031164.1,1560-1578).
ccatgtgcattagaaaaga

SEQ ID NO: 678940 - DNA, 19 bp, Mus musculus
  siRNA target sequence for F13b (NM_031164.1,1637-1655).
gcagcccgcacctatgaaa

SEQ ID NO: 678941 - DNA, 19 bp, Mus musculus
  siRNA target sequence for F13b (NM_031164.1,1638-1656).
cagcccgcacctatgaaaa

SEQ ID NO: 678942 - DNA, 19 bp, Mus musculus
  siRNA target sequence for F13b (NM_031164.1,1670-1688).
gaataccggtgttttgata

SEQ ID NO: 678943 - DNA, 19 bp, Mus musculus
  siRNA target sequence for F13b (NM_031164.1,1675-1693).
ccggtgttttgataatcat

SEQ ID NO: 678944 - DNA, 19 bp, Mus musculus
  siRNA target sequence for F13b (NM_031164.1,1676-1694).
cggtgttttgataatcatt

SEQ ID NO: 678945 - DNA, 19 bp, Mus musculus
  siRNA target sequence for F13b (NM_031164.1,1677-1695).
ggtgttttgataatcattt

SEQ ID NO: 678946 - DNA, 19 bp, Mus musculus
  siRNA target sequence for F13b (NM_031164.1,1700-1718).
caagggtcccagaatgtct

SEQ ID NO: 678947 - DNA, 19 bp, Mus musculus
  siRNA target sequence for F13b (NM_031164.1,1703-1721).
gggtcccagaatgtctatt

SEQ ID NO: 678948 - DNA, 19 bp, Mus musculus
  siRNA target sequence for F13b (NM_031164.1,1760-1778).
gagccttgcacattatcat

SEQ ID NO: 678949 - DNA, 19 bp, Mus musculus
  siRNA target sequence for F13b (NM_031164.1,1764-1782).
cttgcacattatcatttgt

SEQ ID NO: 678950 - DNA, 19 bp, Mus musculus
  siRNA target sequence for F13b (NM_031164.1,1770-1788).
cattatcatttgttgaaat

SEQ ID NO: 678951 - DNA, 19 bp, Mus musculus
  siRNA target sequence for F13b (NM_031164.1,1837-1855).
cattttacatggagagtat

SEQ ID NO: 678952 - DNA, 19 bp, Mus musculus
  siRNA target sequence for F13b (NM_031164.1,1844-1862).
catggagagtatattgagt

SEQ ID NO: 678953 - DNA, 19 bp, Mus musculus
  siRNA target sequence for F13b (NM_031164.1,1942-1960).
gctgaaataccctaagtgt

SEQ ID NO: 678954 - DNA, 19 bp, Mus musculus
  siRNA target sequence for F13b (NM_031164.1,1943-1961).
ctgaaataccctaagtgta

SEQ ID NO: 678955 - DNA, 19 bp, Mus musculus
  siRNA target sequence for Gp1bb (NM_010327.1,164-182).
ccgacaccaccgaattggt

SEQ ID NO: 678956 - DNA, 19 bp, Mus musculus
  siRNA target sequence for Gp1bb (NM_010327.1,495-513).
gctgctattggcacttcta

SEQ ID NO: 678957 - DNA, 19 bp, Mus musculus
  siRNA target sequence for Gp1bb (NM_010327.1,498-516).
gctattggcacttctacta

SEQ ID NO: 678958 - DNA, 19 bp, Mus musculus
  siRNA target sequence for Gp1bb (NM_010327.1,551-569).
cacgctccatccaagagtt

SEQ ID NO: 678959 - DNA, 19 bp, Mus musculus
  siRNA target sequence for Mepe (NM_053172.1,62-80).
ggactgctcctcttcagta

SEQ ID NO: 678960 - DNA, 19 bp, Mus musculus
  siRNA target sequence for Mepe (NM_053172.1,63-81).
gactgctcctcttcagtat

SEQ ID NO: 678961 - DNA, 19 bp, Mus musculus
  siRNA target sequence for Mepe (NM_053172.1,91-109).
ggcaccaatgccgaatgaa

SEQ ID NO: 678962 - DNA, 19 bp, Mus musculus
  siRNA target sequence for Mepe (NM_053172.1,93-111).
caccaatgccgaatgaaga

SEQ ID NO: 678963 - DNA, 19 bp, Mus musculus
  siRNA target sequence for Mepe (NM_053172.1,340-358).
gagtgttctaagcgtaatt

SEQ ID NO: 678964 - DNA, 19 bp, Mus musculus
  siRNA target sequence for Mepe (NM_053172.1,428-446).
cagagcagcccggtcaaaa

SEQ ID NO: 678965 - DNA, 19 bp, Mus musculus
  siRNA target sequence for Mepe (NM_053172.1,433-451).
cagcccggtcaaaagcaaa

SEQ ID NO: 678966 - DNA, 19 bp, Mus musculus
  siRNA target sequence for Mepe (NM_053172.1,500-518).
catctcccacagatcaaga

SEQ ID NO: 678967 - DNA, 19 bp, Mus musculus
  siRNA target sequence for Mepe (NM_053172.1,546-564).
gctccccagatcttctagt

SEQ ID NO: 678968 - DNA, 19 bp, Mus musculus
  siRNA target sequence for Mepe (NM_053172.1,596-614).
ggagatgggcaacatttta

SEQ ID NO: 678969 - DNA, 19 bp, Mus musculus
  siRNA target sequence for Mepe (NM_053172.1,647-665).
ggtcctgaaagctcaacta

SEQ ID NO: 678970 - DNA, 19 bp, Mus musculus
  siRNA target sequence for Mepe (NM_053172.1,685-703).
cagcaaagctgaagttatt

SEQ ID NO: 678971 - DNA, 19 bp, Mus musculus
  siRNA target sequence for Mepe (NM_053172.1,687-705).
gcaaagctgaagttattga

SEQ ID NO: 678972 - DNA, 19 bp, Mus musculus
  siRNA target sequence for Mepe (NM_053172.1,715-733).
gagtggactaggctctaat

SEQ ID NO: 678973 - DNA, 19 bp, Mus musculus
  siRNA target sequence for Mepe (NM_053172.1,917-935).
catcaagggaaagtagaat

SEQ ID NO: 678974 - DNA, 19 bp, Mus musculus
  siRNA target sequence for Mepe (NM_053172.1,954-972).
cctcgagagaaaaggtaaa

SEQ ID NO: 678975 - DNA, 19 bp, Mus musculus
  siRNA target sequence for Mepe (NM_053172.1,1027-1045).
caaaggtagctctagcaaa

SEQ ID NO: 678976 - DNA, 19 bp, Mus musculus
  siRNA target sequence for Mepe (NM_053172.1,1057-1075).
gtccaaagggaaccaatta

SEQ ID NO: 678977 - DNA, 19 bp, Mus musculus
  siRNA target sequence for Mepe (NM_053172.1,1132-1150).
gccctctcacagtcttagt

SEQ ID NO: 678978 - DNA, 19 bp, Mus musculus
  siRNA target sequence for Mepe (NM_053172.1,1133-1151).
ccctctcacagtcttagta

SEQ ID NO: 678979 - DNA, 19 bp, Mus musculus
  siRNA target sequence for Mepe (NM_053172.1,1134-1152).
cctctcacagtcttagtaa

SEQ ID NO: 678980 - DNA, 19 bp, Mus musculus
  siRNA target sequence for Mepe (NM_053172.1,1143-1161).
gtcttagtaatgaggttaa

SEQ ID NO: 678981 - DNA, 19 bp, Mus musculus
  siRNA target sequence for Mepe (NM_053172.1,1145-1163).
cttagtaatgaggttaaaa

SEQ ID NO: 678982 - DNA, 19 bp, Mus musculus
  siRNA target sequence for Mepe (NM_053172.1,1186-1204).
ccatggacaaaataatctt

SEQ ID NO: 678983 - DNA, 19 bp, Mus musculus
  siRNA target sequence for Mepe (NM_053172.1,1187-1205).
catggacaaaataatctta

SEQ ID NO: 678984 - DNA, 19 bp, Mus musculus
  siRNA target sequence for Mepe (NM_053172.1,1275-1293).
ctagcacccgccaaagaga

SEQ ID NO: 678985 - DNA, 19 bp, Mus musculus
  siRNA target sequence for Ibsp (NM_008318.1,124-142).
ctgtgctttctcgatgaaa

SEQ ID NO: 678986 - DNA, 19 bp, Mus musculus
  siRNA target sequence for Ibsp (NM_008318.1,133-151).
ctcgatgaaaaatttccat

SEQ ID NO: 678987 - DNA, 19 bp, Mus musculus
  siRNA target sequence for Ibsp (NM_008318.1,176-194).
gaagaaaacggggtcttta

SEQ ID NO: 678988 - DNA, 19 bp, Mus musculus
  siRNA target sequence for Ibsp (NM_008318.1,196-214).
gtaccggccacgctacttt

SEQ ID NO: 678989 - DNA, 19 bp, Mus musculus
  siRNA target sequence for Ibsp (NM_008318.1,200-218).
cggccacgctactttcttt

SEQ ID NO: 678990 - DNA, 19 bp, Mus musculus
  siRNA target sequence for Ibsp (NM_008318.1,201-219).
ggccacgctactttcttta

SEQ ID NO: 678991 - DNA, 19 bp, Mus musculus
  siRNA target sequence for Ibsp (NM_008318.1,202-220).
gccacgctactttctttat

SEQ ID NO: 678992 - DNA, 19 bp, Mus musculus
  siRNA target sequence for Ibsp (NM_008318.1,415-433).
cacactctcgggtgtaaca

SEQ ID NO: 678993 - DNA, 19 bp, Mus musculus
  siRNA target sequence for Ibsp (NM_008318.1,880-898).
gtatgggggagaatacgaa

SEQ ID NO: 678994 - DNA, 19 bp, Mus musculus
  siRNA target sequence for Ibsp (NM_008318.1,884-902).
gggggagaatacgaacaaa

SEQ ID NO: 678995 - DNA, 19 bp, Mus musculus
  siRNA target sequence for Ibsp (NM_008318.1,896-914).
gaacaaacaggcaacgaat

SEQ ID NO: 678996 - DNA, 19 bp, Mus musculus
  siRNA target sequence for Ibsp (NM_008318.1,906-924).
gcaacgaatacaacaatga

SEQ ID NO: 678997 - DNA, 19 bp, Mus musculus
  siRNA target sequence for Ibsp (NM_008318.1,910-928).
cgaatacaacaatgagtat

SEQ ID NO: 678998 - DNA, 19 bp, Mus musculus
  siRNA target sequence for Ibsp (NM_008318.1,964-982).
cgacacttaccgagcttat

SEQ ID NO: 678999 - DNA, 19 bp, Mus musculus
  siRNA target sequence for Ibsp (NM_008318.1,1022-1040).
ggctacgagggtcagaatt

SEQ ID NO: 679000 - DNA, 19 bp, Mus musculus
  siRNA target sequence for Ibsp (NM_008318.1,1023-1041).
gctacgagggtcagaatta

SEQ ID NO: 679001 - DNA, 19 bp, Mus musculus
  siRNA target sequence for Ibsp (NM_008318.1,1024-1042).
ctacgagggtcagaattat

SEQ ID NO: 679002 - DNA, 19 bp, Mus musculus
  siRNA target sequence for Ncdn (NM_011986.2,517-535).
gcagccctgctgctagtaa

SEQ ID NO: 679003 - DNA, 19 bp, Mus musculus
  siRNA target sequence for Ncdn (NM_011986.2,521-539).
ccctgctgctagtaacgaa

SEQ ID NO: 679004 - DNA, 19 bp, Mus musculus
  siRNA target sequence for Ncdn (NM_011986.2,572-590).
cccgacgtaggatctttga

SEQ ID NO: 679005 - DNA, 19 bp, Mus musculus
  siRNA target sequence for Ncdn (NM_011986.2,573-591).
ccgacgtaggatctttgat

SEQ ID NO: 679006 - DNA, 19 bp, Mus musculus
  siRNA target sequence for Ncdn (NM_011986.2,699-717).
ctgcagcgaccctgaacta

SEQ ID NO: 679007 - DNA, 19 bp, Mus musculus
  siRNA target sequence for Ncdn (NM_011986.2,1053-1071).
cgaagatgccagcaagttt

SEQ ID NO: 679008 - DNA, 19 bp, Mus musculus
  siRNA target sequence for Ncdn (NM_011986.2,1409-1427).
gtgagcagtccctgcttaa

SEQ ID NO: 679009 - DNA, 19 bp, Mus musculus
  siRNA target sequence for Ncdn (NM_011986.2,1444-1462).
cagctcgtgagcattatga

SEQ ID NO: 679010 - DNA, 19 bp, Mus musculus
  siRNA target sequence for Ncdn (NM_011986.2,1446-1464).
gctcgtgagcattatgaaa

SEQ ID NO: 679011 - DNA, 19 bp, Mus musculus
  siRNA target sequence for Ncdn (NM_011986.2,1516-1534).
cagaaagagccctttgtgt

SEQ ID NO: 679012 - DNA, 19 bp, Mus musculus
  siRNA target sequence for Ncdn (NM_011986.2,1820-1838).
cacttctgtgcaagtactt

SEQ ID NO: 679013 - DNA, 19 bp, Mus musculus
  siRNA target sequence for Ncdn (NM_011986.2,1949-1967).
ccgctccagggctgatcaa

SEQ ID NO: 679014 - DNA, 19 bp, Mus musculus
  siRNA target sequence for Ncdn (NM_011986.2,1950-1968).
cgctccagggctgatcaaa

SEQ ID NO: 679015 - DNA, 19 bp, Mus musculus
  siRNA target sequence for Ncdn (NM_011986.2,1969-1987).
cgcgatgcctgcttcacat

SEQ ID NO: 679016 - DNA, 19 bp, Mus musculus
  siRNA target sequence for Ncdn (NM_011986.2,1975-1993).
gcctgcttcacatctctta

SEQ ID NO: 679017 - DNA, 19 bp, Mus musculus
  siRNA target sequence for Ncdn (NM_011986.2,1976-1994).
cctgcttcacatctcttat

SEQ ID NO: 679018 - DNA, 19 bp, Mus musculus
  siRNA target sequence for Ncdn (NM_011986.2,2066-2084).
ccactttggggctcctaat

SEQ ID NO: 679019 - DNA, 19 bp, Mus musculus
  siRNA target sequence for Ncdn (NM_011986.2,2475-2493).
gctgcaggcgggtgaagaa

SEQ ID NO: 679020 - DNA, 19 bp, Mus musculus
  siRNA target sequence for Ncdn (NM_011986.2,2476-2494).
ctgcaggcgggtgaagaaa

SEQ ID NO: 679021 - DNA, 19 bp, Mus musculus
  siRNA target sequence for Edn3 (NM_007903.2,352-370).
cctggtgagaggattgtgt

SEQ ID NO: 679022 - DNA, 19 bp, Mus musculus
  siRNA target sequence for Edn3 (NM_007903.2,481-499).
cgctgcacgtgcttcactt

SEQ ID NO: 679023 - DNA, 19 bp, Mus musculus
  siRNA target sequence for Edn3 (NM_007903.2,482-500).
gctgcacgtgcttcactta

SEQ ID NO: 679024 - DNA, 19 bp, Mus musculus
  siRNA target sequence for Edn3 (NM_007903.2,485-503).
gcacgtgcttcacttacaa

SEQ ID NO: 679025 - DNA, 19 bp, Mus musculus
  siRNA target sequence for Edn3 (NM_007903.2,661-679).
cgcttgcgttgtacttgta

SEQ ID NO: 679026 - DNA, 19 bp, Mus musculus
  siRNA target sequence for Edn3 (NM_007903.2,662-680).
gcttgcgttgtacttgtat

SEQ ID NO: 679027 - DNA, 19 bp, Mus musculus
  siRNA target sequence for Edn3 (NM_007903.2,793-811).
ccacgtcaaaggttgatgt

SEQ ID NO: 679028 - DNA, 19 bp, Mus musculus
  siRNA target sequence for Edn3 (NM_007903.2,796-814).
cgtcaaaggttgatgtcaa

SEQ ID NO: 679029 - DNA, 19 bp, Mus musculus
  siRNA target sequence for Edn3 (NM_007903.2,807-825).
gatgtcaaggacagataaa

SEQ ID NO: 679030 - DNA, 19 bp, Mus musculus
  siRNA target sequence for Ceacam9 (NM_011927.1,181-199).
gcggaaactccgttctgtt

SEQ ID NO: 679031 - DNA, 19 bp, Mus musculus
  siRNA target sequence for Ceacam9 (NM_011927.1,182-200).
cggaaactccgttctgttt

SEQ ID NO: 679032 - DNA, 19 bp, Mus musculus
  siRNA target sequence for Ceacam9 (NM_011927.1,227-245).
ggcgttttactggtacaaa

SEQ ID NO: 679033 - DNA, 19 bp, Mus musculus
  siRNA target sequence for Ceacam9 (NM_011927.1,229-247).
cgttttactggtacaaaca

SEQ ID NO: 679034 - DNA, 19 bp, Mus musculus
  siRNA target sequence for Ceacam9 (NM_011927.1,269-287).
cgaagtcgcacggtactta

SEQ ID NO: 679035 - DNA, 19 bp, Mus musculus
  siRNA target sequence for Ceacam9 (NM_011927.1,270-288).
gaagtcgcacggtacttaa

SEQ ID NO: 679036 - DNA, 19 bp, Mus musculus
  siRNA target sequence for Ceacam9 (NM_011927.1,390-408).
ggagtctataccttactaa

SEQ ID NO: 679037 - DNA, 19 bp, Mus musculus
  siRNA target sequence for Ceacam9 (NM_011927.1,393-411).
gtctataccttactaacat

SEQ ID NO: 679038 - DNA, 19 bp, Mus musculus
  siRNA target sequence for Ceacam9 (NM_011927.1,419-437).
ggaaatggaaagcgaatta

SEQ ID NO: 679039 - DNA, 19 bp, Mus musculus
  siRNA target sequence for Ceacam9 (NM_011927.1,494-512).
cagcaccgcggtaacagaa

SEQ ID NO: 679040 - DNA, 19 bp, Mus musculus
  siRNA target sequence for Ceacam9 (NM_011927.1,579-597).
caccagggcctgtatttca

SEQ ID NO: 679041 - DNA, 19 bp, Mus musculus
  siRNA target sequence for Ceacam9 (NM_011927.1,585-603).
ggcctgtatttcaatgaca

SEQ ID NO: 679042 - DNA, 19 bp, Mus musculus
  siRNA target sequence for Psg19 (NM_011964.1,397-415).
cagaggggtaataaaattt

SEQ ID NO: 679043 - DNA, 19 bp, Mus musculus
  siRNA target sequence for Psg19 (NM_011964.1,805-823).
cgccaagaattcaattgaa

SEQ ID NO: 679044 - DNA, 19 bp, Mus musculus
  siRNA target sequence for Sftpc (NM_011359.1,58-76).
gagagtccaccggattact

SEQ ID NO: 679045 - DNA, 19 bp, Mus musculus
  siRNA target sequence for Sftpc (NM_011359.1,196-214).
ggcctccacatgagtcaaa

SEQ ID NO: 679046 - DNA, 19 bp, Mus musculus
  siRNA target sequence for Sftpc (NM_011359.1,197-215).
gcctccacatgagtcaaaa

SEQ ID NO: 679047 - DNA, 19 bp, Mus musculus
  siRNA target sequence for Sftpc (NM_011359.1,201-219).
ccacatgagtcaaaaacat

SEQ ID NO: 679048 - DNA, 19 bp, Mus musculus
  siRNA target sequence for Sftpc (NM_011359.1,320-338).
ccactggcatcgttgtgta

SEQ ID NO: 679049 - DNA, 19 bp, Mus musculus
  siRNA target sequence for Sftpc (NM_011359.1,321-339).
cactggcatcgttgtgtat

SEQ ID NO: 679050 - DNA, 19 bp, Mus musculus
  siRNA target sequence for Sftpc (NM_011359.1,325-343).
ggcatcgttgtgtatgact

SEQ ID NO: 679051 - DNA, 19 bp, Mus musculus
  siRNA target sequence for Sftpc (NM_011359.1,326-344).
gcatcgttgtgtatgacta

SEQ ID NO: 679052 - DNA, 19 bp, Mus musculus
  siRNA target sequence for Sftpc (NM_011359.1,383-401).
cctactgctacatcatgaa

SEQ ID NO: 679053 - DNA, 19 bp, Mus musculus
  siRNA target sequence for Sftpc (NM_011359.1,584-602).
gagagctaccactctacta

SEQ ID NO: 679054 - DNA, 19 bp, Mus musculus
  siRNA target sequence for Kirrel1 (NM_130867.1,95-113).
cacacttagtcgttgctta

SEQ ID NO: 679055 - DNA, 19 bp, Mus musculus
  siRNA target sequence for Kirrel1 (NM_130867.1,103-121).
gtcgttgcttatcttatct

SEQ ID NO: 679056 - DNA, 19 bp, Mus musculus
  siRNA target sequence for Kirrel1 (NM_130867.1,105-123).
cgttgcttatcttatcttt

SEQ ID NO: 679057 - DNA, 19 bp, Mus musculus
  siRNA target sequence for Kirrel1 (NM_130867.1,217-235).
ccgtgtgtgctccttaact

SEQ ID NO: 679058 - DNA, 19 bp, Mus musculus
  siRNA target sequence for Kirrel1 (NM_130867.1,218-236).
cgtgtgtgctccttaacta

SEQ ID NO: 679059 - DNA, 19 bp, Mus musculus
  siRNA target sequence for Kirrel1 (NM_130867.1,328-346).
gcggatgctgggcaataca

SEQ ID NO: 679060 - DNA, 19 bp, Mus musculus
  siRNA target sequence for Kirrel1 (NM_130867.1,329-347).
cggatgctgggcaatacaa

SEQ ID NO: 679061 - DNA, 19 bp, Mus musculus
  siRNA target sequence for Kirrel1 (NM_130867.1,376-394).
gatgacgcttcctatgagt

SEQ ID NO: 679062 - DNA, 19 bp, Mus musculus
  siRNA target sequence for Kirrel1 (NM_130867.1,516-534).
cctcacgtgcagagcattt

SEQ ID NO: 679063 - DNA, 19 bp, Mus musculus
  siRNA target sequence for Kirrel1 (NM_130867.1,517-535).
ctcacgtgcagagcattta

SEQ ID NO: 679064 - DNA, 19 bp, Mus musculus
  siRNA target sequence for Kirrel1 (NM_130867.1,547-565).
gctgccaccatcatttggt

SEQ ID NO: 679065 - DNA, 19 bp, Mus musculus
  siRNA target sequence for Kirrel1 (NM_130867.1,548-566).
ctgccaccatcatttggtt

SEQ ID NO: 679066 - DNA, 19 bp, Mus musculus
  siRNA target sequence for Kirrel1 (NM_130867.1,690-708).
cacctgtcgcagtatgaat

SEQ ID NO: 679067 - DNA, 19 bp, Mus musculus
  siRNA target sequence for Kirrel1 (NM_130867.1,692-710).
cctgtcgcagtatgaatga

SEQ ID NO: 679068 - DNA, 19 bp, Mus musculus
  siRNA target sequence for Kirrel1 (NM_130867.1,801-819).
ggaaggcgagcgtgtcatt

SEQ ID NO: 679069 - DNA, 19 bp, Mus musculus
  siRNA target sequence for Kirrel1 (NM_130867.1,802-820).
gaaggcgagcgtgtcattt

SEQ ID NO: 679070 - DNA, 19 bp, Mus musculus
  siRNA target sequence for Kirrel1 (NM_130867.1,805-823).
ggcgagcgtgtcattttta

SEQ ID NO: 679071 - DNA, 19 bp, Mus musculus
  siRNA target sequence for Kirrel1 (NM_130867.1,807-825).
cgagcgtgtcatttttaca

SEQ ID NO: 679072 - DNA, 19 bp, Mus musculus
  siRNA target sequence for Kirrel1 (NM_130867.1,808-826).
gagcgtgtcatttttacat

SEQ ID NO: 679073 - DNA, 19 bp, Mus musculus
  siRNA target sequence for Kirrel1 (NM_130867.1,898-916).
catgagagtcgctatgaga

SEQ ID NO: 679074 - DNA, 19 bp, Mus musculus
  siRNA target sequence for Kirrel1 (NM_130867.1,913-931).
gagacaaacgttgactatt

SEQ ID NO: 679075 - DNA, 19 bp, Mus musculus
  siRNA target sequence for Kirrel1 (NM_130867.1,917-935).
caaacgttgactattcctt

SEQ ID NO: 679076 - DNA, 19 bp, Mus musculus
  siRNA target sequence for Kirrel1 (NM_130867.1,956-974).
gtgaggtttataacaaagt

SEQ ID NO: 679077 - DNA, 19 bp, Mus musculus
  siRNA target sequence for Kirrel1 (NM_130867.1,981-999).
caccaatgtcagcacttta

SEQ ID NO: 679078 - DNA, 19 bp, Mus musculus
  siRNA target sequence for Kirrel1 (NM_130867.1,992-1010).
gcactttagtgaatgttca

SEQ ID NO: 679079 - DNA, 19 bp, Mus musculus
  siRNA target sequence for Kirrel1 (NM_130867.1,1050-1068).
cacagacattggatctgat

SEQ ID NO: 679080 - DNA, 19 bp, Mus musculus
  siRNA target sequence for Kirrel1 (NM_130867.1,1133-1151).
caaacatggtcctgagtaa

SEQ ID NO: 679081 - DNA, 19 bp, Mus musculus
  siRNA target sequence for Kirrel1 (NM_130867.1,1241-1259).
gcgagaggtaccgctttat

SEQ ID NO: 679082 - DNA, 19 bp, Mus musculus
  siRNA target sequence for Kirrel1 (NM_130867.1,1243-1261).
gagaggtaccgctttatgt

SEQ ID NO: 679083 - DNA, 19 bp, Mus musculus
  siRNA target sequence for D430015B01Rik (NM_153574.1,184-202).
ggaagatgaaagaccttta

SEQ ID NO: 679084 - DNA, 19 bp, Mus musculus
  siRNA target sequence for D430015B01Rik (NM_153574.1,195-213).
gacctttatcacctttcta

SEQ ID NO: 679085 - DNA, 19 bp, Mus musculus
  siRNA target sequence for D430015B01Rik (NM_153574.1,236-254).
gtcagcaatgtttcaacaa

SEQ ID NO: 679086 - DNA, 19 bp, Mus musculus
  siRNA target sequence for D430015B01Rik (NM_153574.1,252-270).
caactggagaactcttaga

SEQ ID NO: 679087 - DNA, 19 bp, Mus musculus
  siRNA target sequence for D430015B01Rik (NM_153574.1,384-402).
ggcagcgagggcatcaatt

SEQ ID NO: 679088 - DNA, 19 bp, Mus musculus
  siRNA target sequence for D430015B01Rik (NM_153574.1,385-403).
gcagcgagggcatcaattt

SEQ ID NO: 679089 - DNA, 19 bp, Mus musculus
  siRNA target sequence for D430015B01Rik (NM_153574.1,386-404).
cagcgagggcatcaattta

SEQ ID NO: 679090 - DNA, 19 bp, Mus musculus
  siRNA target sequence for D430015B01Rik (NM_153574.1,389-407).
cgagggcatcaatttaaga

SEQ ID NO: 679091 - DNA, 19 bp, Mus musculus
  siRNA target sequence for D430015B01Rik (NM_153574.1,429-447).
gttgcgacaaggagcttat

SEQ ID NO: 679092 - DNA, 19 bp, Mus musculus
  siRNA target sequence for D430015B01Rik (NM_153574.1,443-461).
cttatcaacaaggagaata

SEQ ID NO: 679093 - DNA, 19 bp, Mus musculus
  siRNA target sequence for D430015B01Rik (NM_153574.1,483-501).
gtgctgagtgcatcttgaa

SEQ ID NO: 679094 - DNA, 19 bp, Mus musculus
  siRNA target sequence for D430015B01Rik (NM_153574.1,485-503).
gctgagtgcatcttgaaca

SEQ ID NO: 679095 - DNA, 19 bp, Mus musculus
  siRNA target sequence for D430015B01Rik (NM_153574.1,539-557).
gactacgttggggaaagaa

SEQ ID NO: 679096 - DNA, 19 bp, Mus musculus
  siRNA target sequence for D430015B01Rik (NM_153574.1,640-658).
cagttccatgcaatctcaa

SEQ ID NO: 679097 - DNA, 19 bp, Mus musculus
  siRNA target sequence for D430015B01Rik (NM_153574.1,745-763).
gaaccccacgatgaagatt

SEQ ID NO: 679098 - DNA, 19 bp, Mus musculus
  siRNA target sequence for D430015B01Rik (NM_153574.1,864-882).
cagcattgtgcgatgagaa

SEQ ID NO: 679099 - DNA, 19 bp, Mus musculus
  siRNA target sequence for D430015B01Rik (NM_153574.1,1003-1021).
gctgtcccccaggttctat

SEQ ID NO: 679100 - DNA, 19 bp, Mus musculus
  siRNA target sequence for D430015B01Rik (NM_153574.1,1042-1060).
gtatctggatgatacagaa

SEQ ID NO: 679101 - DNA, 19 bp, Mus musculus
  siRNA target sequence for D430015B01Rik (NM_153574.1,1201-1219).
gttcgaggacaggtttgaa

SEQ ID NO: 679102 - DNA, 19 bp, Mus musculus
  siRNA target sequence for D430015B01Rik (NM_153574.1,1246-1264).
cagtgataaggcagctaat

SEQ ID NO: 679103 - DNA, 19 bp, Mus musculus
  siRNA target sequence for D430015B01Rik (NM_153574.1,1255-1273).
ggcagctaatccagaagtt

SEQ ID NO: 679104 - DNA, 19 bp, Mus musculus
  siRNA target sequence for D430015B01Rik (NM_153574.1,1257-1275).
cagctaatccagaagttct

SEQ ID NO: 679105 - DNA, 19 bp, Mus musculus
  siRNA target sequence for D430015B01Rik (NM_153574.1,1304-1322).
cggaaacagctgaaagaat

SEQ ID NO: 679106 - DNA, 19 bp, Mus musculus
  siRNA target sequence for D430015B01Rik (NM_153574.1,1359-1377).
ggacacggcaacgaagtaa

SEQ ID NO: 679107 - DNA, 19 bp, Mus musculus
  siRNA target sequence for D430015B01Rik (NM_153574.1,1429-1447).
gcaagaactgctggataaa

SEQ ID NO: 679108 - DNA, 19 bp, Mus musculus
  siRNA target sequence for D430015B01Rik (NM_153574.1,1521-1539).
gccgtcctgaggacattaa

SEQ ID NO: 679109 - DNA, 19 bp, Mus musculus
  siRNA target sequence for D430015B01Rik (NM_153574.1,1526-1544).
cctgaggacattaaggata

SEQ ID NO: 679110 - DNA, 19 bp, Mus musculus
  siRNA target sequence for D430015B01Rik (NM_153574.1,1553-1571).
gaccagattgctaatgaga

SEQ ID NO: 679111 - DNA, 19 bp, Mus musculus
  siRNA target sequence for D430015B01Rik (NM_153574.1,1583-1601).
cagaaagccctgctatact

SEQ ID NO: 679112 - DNA, 19 bp, Mus musculus
  siRNA target sequence for D430015B01Rik (NM_153574.1,1589-1607).
gccctgctatactacgaaa

SEQ ID NO: 679113 - DNA, 19 bp, Mus musculus
  siRNA target sequence for D430015B01Rik (NM_153574.1,1592-1610).
ctgctatactacgaaagta

SEQ ID NO: 679114 - DNA, 19 bp, Mus musculus
  siRNA target sequence for D430015B01Rik (NM_153574.1,1635-1653).
ctgagcgtcagataatgaa

SEQ ID NO: 679115 - DNA, 19 bp, Mus musculus
  siRNA target sequence for D430015B01Rik (NM_153574.1,1668-1686).
ggtaccgactagtcaaaca

SEQ ID NO: 679116 - DNA, 19 bp, Mus musculus
  siRNA target sequence for D430015B01Rik (NM_153574.1,1752-1770).
cgctgcagccgattatcga

SEQ ID NO: 679117 - DNA, 19 bp, Mus musculus
  siRNA target sequence for D430015B01Rik (NM_153574.1,1762-1780).
gattatcgagggtgaaact

SEQ ID NO: 679118 - DNA, 19 bp, Mus musculus
  siRNA target sequence for D430015B01Rik (NM_153574.1,1929-1947).
caccaatggatgacaaaat

SEQ ID NO: 679119 - DNA, 19 bp, Mus musculus
  siRNA target sequence for D430015B01Rik (NM_153574.1,1940-1958).
gacaaaatgccatcgaaat

SEQ ID NO: 679120 - DNA, 19 bp, Mus musculus
  siRNA target sequence for D430015B01Rik (NM_153574.1,1984-2002).
cctccactctgcttcaata

SEQ ID NO: 679121 - DNA, 19 bp, Mus musculus
  siRNA target sequence for D430015B01Rik (NM_153574.1,2130-2148).
caatggctgaagagtacaa

SEQ ID NO: 679122 - DNA, 19 bp, Mus musculus
  siRNA target sequence for D430015B01Rik (NM_153574.1,2135-2153).
gctgaagagtacaatgaat

SEQ ID NO: 679123 - DNA, 19 bp, Mus musculus
  siRNA target sequence for D430015B01Rik (NM_153574.1,2188-2206).
ggtgctcatcagcaaaaga

SEQ ID NO: 679124 - DNA, 19 bp, Mus musculus
  siRNA target sequence for 2400009B11Rik (NM_025886.2,153-171).
gccagacaggtcgatttgt

SEQ ID NO: 679125 - DNA, 19 bp, Mus musculus
  siRNA target sequence for 2400009B11Rik (NM_025886.2,407-425).
gcactgaccttcaacctta

SEQ ID NO: 679126 - DNA, 19 bp, Mus musculus
  siRNA target sequence for 2400009B11Rik (NM_025886.2,410-428).
ctgaccttcaaccttagat

SEQ ID NO: 679127 - DNA, 19 bp, Mus musculus
  siRNA target sequence for 2400009B11Rik (NM_025886.2,412-430).
gaccttcaaccttagatgt

SEQ ID NO: 679128 - DNA, 19 bp, Mus musculus
  siRNA target sequence for 2400009B11Rik (NM_025886.2,439-457).
ggtccccagcccatctatt

SEQ ID NO: 679129 - DNA, 19 bp, Mus musculus
  siRNA target sequence for 2400009B11Rik (NM_025886.2,783-801).
cccaggagcggcatagtct

SEQ ID NO: 679130 - DNA, 19 bp, Mus musculus
  siRNA target sequence for 5133400D11Rik (NM_027760.1,126-144).
gtcacggaagtcacaactt

SEQ ID NO: 679131 - DNA, 19 bp, Mus musculus
  siRNA target sequence for 5133400D11Rik (NM_027760.1,142-160).
cttgccaggaggttgtaat

SEQ ID NO: 679132 - DNA, 19 bp, Mus musculus
  siRNA target sequence for 5133400D11Rik (NM_027760.1,164-182).
cttagcccaagctataggt

SEQ ID NO: 679133 - DNA, 19 bp, Mus musculus
  siRNA target sequence for 5133400D11Rik (NM_027760.1,190-208).
gaaggtacaccctgataga

SEQ ID NO: 679134 - DNA, 19 bp, Mus musculus
  siRNA target sequence for 5133400D11Rik (NM_027760.1,193-211).
ggtacaccctgatagagaa

SEQ ID NO: 679135 - DNA, 19 bp, Mus musculus
  siRNA target sequence for 5133400D11Rik (NM_027760.1,231-249).
cacttggcaccgcatgaaa

SEQ ID NO: 679136 - DNA, 19 bp, Mus musculus
  siRNA target sequence for 5133400D11Rik (NM_027760.1,252-270).
cccatcgtgtctttgaaca

SEQ ID NO: 679137 - DNA, 19 bp, Mus musculus
  siRNA target sequence for 5133400D11Rik (NM_027760.1,356-374).
ggcccgaattcctgaaaga

SEQ ID NO: 679138 - DNA, 19 bp, Mus musculus
  siRNA target sequence for 5133400D11Rik (NM_027760.1,357-375).
gcccgaattcctgaaagaa

SEQ ID NO: 679139 - DNA, 19 bp, Mus musculus
  siRNA target sequence for 5133400D11Rik (NM_027760.1,360-378).
cgaattcctgaaagaactt

SEQ ID NO: 679140 - DNA, 19 bp, Mus musculus
  siRNA target sequence for 5133400D11Rik (NM_027760.1,361-379).
gaattcctgaaagaacttt

SEQ ID NO: 679141 - DNA, 19 bp, Mus musculus
  siRNA target sequence for 5133400D11Rik (NM_027760.1,491-509).
gctgacggacatttttgga

SEQ ID NO: 679142 - DNA, 19 bp, Mus musculus
  siRNA target sequence for 5133400D11Rik (NM_027760.1,886-904).
gcggtctccaggcagaaaa

SEQ ID NO: 679143 - DNA, 19 bp, Mus musculus
  siRNA target sequence for 5133400D11Rik (NM_027760.1,1010-1028).
gctggagaacggcattaga

SEQ ID NO: 679144 - DNA, 19 bp, Mus musculus
  siRNA target sequence for 5133400D11Rik (NM_027760.1,1190-1208).
ggcctcgcaggcagacata

SEQ ID NO: 679145 - DNA, 19 bp, Mus musculus
  siRNA target sequence for 5133400D11Rik (NM_027760.1,1192-1210).
cctcgcaggcagacataga

SEQ ID NO: 679146 - DNA, 19 bp, Mus musculus
  siRNA target sequence for 5133400D11Rik (NM_027760.1,1268-1286).
ccccagtaatcttcgtatt

SEQ ID NO: 679147 - DNA, 19 bp, Mus musculus
  siRNA target sequence for 5133400D11Rik (NM_027760.1,1270-1288).
ccagtaatcttcgtattct

SEQ ID NO: 679148 - DNA, 19 bp, Mus musculus
  siRNA target sequence for 5133400D11Rik (NM_027760.1,1271-1289).
cagtaatcttcgtattcta

SEQ ID NO: 679149 - DNA, 19 bp, Mus musculus
  siRNA target sequence for 5133400D11Rik (NM_027760.1,1273-1291).
gtaatcttcgtattctaca

SEQ ID NO: 679150 - DNA, 19 bp, Mus musculus
  siRNA target sequence for 5133400D11Rik (NM_027760.1,1301-1319).
ctcctcgggttttaatcct

SEQ ID NO: 679151 - DNA, 19 bp, Mus musculus
  siRNA target sequence for Apbb1ip (NM_019456.1,117-135).
ccagatgttcagcacttta

SEQ ID NO: 679152 - DNA, 19 bp, Mus musculus
  siRNA target sequence for Apbb1ip (NM_019456.1,202-220).
ccaccccgagaagagttta

SEQ ID NO: 679153 - DNA, 19 bp, Mus musculus
  siRNA target sequence for Apbb1ip (NM_019456.1,203-221).
caccccgagaagagtttaa

SEQ ID NO: 679154 - DNA, 19 bp, Mus musculus
  siRNA target sequence for Apbb1ip (NM_019456.1,205-223).
ccccgagaagagtttaact

SEQ ID NO: 679155 - DNA, 19 bp, Mus musculus
  siRNA target sequence for Apbb1ip (NM_019456.1,206-224).
cccgagaagagtttaacta

SEQ ID NO: 679156 - DNA, 19 bp, Mus musculus
  siRNA target sequence for Apbb1ip (NM_019456.1,208-226).
cgagaagagtttaactaca

SEQ ID NO: 679157 - DNA, 19 bp, Mus musculus
  siRNA target sequence for Apbb1ip (NM_019456.1,262-280).
gcactggaagaccaagatt

SEQ ID NO: 679158 - DNA, 19 bp, Mus musculus
  siRNA target sequence for Apbb1ip (NM_019456.1,263-281).
cactggaagaccaagattt

SEQ ID NO: 679159 - DNA, 19 bp, Mus musculus
  siRNA target sequence for Apbb1ip (NM_019456.1,303-321).
ggtagcagatataagtgaa

SEQ ID NO: 679160 - DNA, 19 bp, Mus musculus
  siRNA target sequence for Apbb1ip (NM_019456.1,359-377).
ctcagaatcaagatcgttt

SEQ ID NO: 679161 - DNA, 19 bp, Mus musculus
  siRNA target sequence for Apbb1ip (NM_019456.1,527-545).
ctcctgaacttctctctaa

SEQ ID NO: 679162 - DNA, 19 bp, Mus musculus
  siRNA target sequence for Apbb1ip (NM_019456.1,615-633).
ggttaagaagcttgtagtt

SEQ ID NO: 679163 - DNA, 19 bp, Mus musculus
  siRNA target sequence for Apbb1ip (NM_019456.1,769-787).
cccgaactgcaaattgaga

SEQ ID NO: 679164 - DNA, 19 bp, Mus musculus
  siRNA target sequence for Apbb1ip (NM_019456.1,775-793).
ctgcaaattgagagagttt

SEQ ID NO: 679165 - DNA, 19 bp, Mus musculus
  siRNA target sequence for Apbb1ip (NM_019456.1,904-922).
cagaatttctacttggata

SEQ ID NO: 679166 - DNA, 19 bp, Mus musculus
  siRNA target sequence for Apbb1ip (NM_019456.1,906-924).
gaatttctacttggataat

SEQ ID NO: 679167 - DNA, 19 bp, Mus musculus
  siRNA target sequence for Apbb1ip (NM_019456.1,1002-1020).
ctgcggcacatccatcatt

SEQ ID NO: 679168 - DNA, 19 bp, Mus musculus
  siRNA target sequence for Apbb1ip (NM_019456.1,1004-1022).
gcggcacatccatcattgt

SEQ ID NO: 679169 - DNA, 19 bp, Mus musculus
  siRNA target sequence for Apbb1ip (NM_019456.1,1005-1023).
cggcacatccatcattgta

SEQ ID NO: 679170 - DNA, 19 bp, Mus musculus
  siRNA target sequence for Apbb1ip (NM_019456.1,1030-1048).
cttgaaggagctctttatt

SEQ ID NO: 679171 - DNA, 19 bp, Mus musculus
  siRNA target sequence for Apbb1ip (NM_019456.1,1071-1089).
ctggaaacggcgctacttt

SEQ ID NO: 679172 - DNA, 19 bp, Mus musculus
  siRNA target sequence for Apbb1ip (NM_019456.1,1074-1092).
gaaacggcgctactttctt

SEQ ID NO: 679173 - DNA, 19 bp, Mus musculus
  siRNA target sequence for Apbb1ip (NM_019456.1,1142-1160).
cccgcgatctggcatgttt

SEQ ID NO: 679174 - DNA, 19 bp, Mus musculus
  siRNA target sequence for Apbb1ip (NM_019456.1,1143-1161).
ccgcgatctggcatgtttt

SEQ ID NO: 679175 - DNA, 19 bp, Mus musculus
  siRNA target sequence for Apbb1ip (NM_019456.1,1144-1162).
cgcgatctggcatgtttta

SEQ ID NO: 679176 - DNA, 19 bp, Mus musculus
  siRNA target sequence for Apbb1ip (NM_019456.1,1145-1163).
gcgatctggcatgttttat

SEQ ID NO: 679177 - DNA, 19 bp, Mus musculus
  siRNA target sequence for Apbb1ip (NM_019456.1,1146-1164).
cgatctggcatgttttata

SEQ ID NO: 679178 - DNA, 19 bp, Mus musculus
  siRNA target sequence for Apbb1ip (NM_019456.1,1192-1210).
gggattcagtgtaaaatga

SEQ ID NO: 679179 - DNA, 19 bp, Mus musculus
  siRNA target sequence for Apbb1ip (NM_019456.1,1193-1211).
ggattcagtgtaaaatgaa

SEQ ID NO: 679180 - DNA, 19 bp, Mus musculus
  siRNA target sequence for Apbb1ip (NM_019456.1,1228-1246).
gaccactgctttgttttaa

SEQ ID NO: 679181 - DNA, 19 bp, Mus musculus
  siRNA target sequence for Apbb1ip (NM_019456.1,1267-1285).
gaatctcaatatatcaagt

SEQ ID NO: 679182 - DNA, 19 bp, Mus musculus
  siRNA target sequence for Apbb1ip (NM_019456.1,1273-1291).
caatatatcaagtatctct

SEQ ID NO: 679183 - DNA, 19 bp, Mus musculus
  siRNA target sequence for Apbb1ip (NM_019456.1,1303-1321).
gcaagaactctcagtcaat

SEQ ID NO: 679184 - DNA, 19 bp, Mus musculus
  siRNA target sequence for Apbb1ip (NM_019456.1,1322-1340).
gggtaatgggaataaggat

SEQ ID NO: 679185 - DNA, 19 bp, Mus musculus
  siRNA target sequence for Apbb1ip (NM_019456.1,1351-1369).
gggaagactctctatgata

SEQ ID NO: 679186 - DNA, 19 bp, Mus musculus
  siRNA target sequence for Apbb1ip (NM_019456.1,1447-1465).
gctcagccttctacagttt

SEQ ID NO: 679187 - DNA, 19 bp, Mus musculus
  siRNA target sequence for Apbb1ip (NM_019456.1,1548-1566).
ggcccagacacaaattgaa

SEQ ID NO: 679188 - DNA, 19 bp, Mus musculus
  siRNA target sequence for Apbb1ip (NM_019456.1,1549-1567).
gcccagacacaaattgaaa

SEQ ID NO: 679189 - DNA, 19 bp, Mus musculus
  siRNA target sequence for Apbb1ip (NM_019456.1,1584-1602).
gcaaggcttgggtaaccat

SEQ ID NO: 679190 - DNA, 19 bp, Mus musculus
  siRNA target sequence for Apbb1ip (NM_019456.1,2026-2044).
gggaacagtgagcaagatt

SEQ ID NO: 679191 - DNA, 19 bp, Mus musculus
  siRNA target sequence for Apbb1ip (NM_019456.1,2027-2045).
ggaacagtgagcaagattt

SEQ ID NO: 679192 - DNA, 19 bp, Mus musculus
  siRNA target sequence for Apbb1ip (NM_019456.1,2028-2046).
gaacagtgagcaagatttt

SEQ ID NO: 679193 - DNA, 19 bp, Mus musculus
  siRNA target sequence for D930005D10Rik (NM_178702.2,192-210).
cgcacccaccatgttttat

SEQ ID NO: 679194 - DNA, 19 bp, Mus musculus
  siRNA target sequence for D930005D10Rik (NM_178702.2,211-229).
gggactcagttgatcatgt

SEQ ID NO: 679195 - DNA, 19 bp, Mus musculus
  siRNA target sequence for D930005D10Rik (NM_178702.2,289-307).
cggacactgagctacaagt

SEQ ID NO: 679196 - DNA, 19 bp, Mus musculus
  siRNA target sequence for D930005D10Rik (NM_178702.2,290-308).
ggacactgagctacaagta

SEQ ID NO: 679197 - DNA, 19 bp, Mus musculus
  siRNA target sequence for D930005D10Rik (NM_178702.2,291-309).
gacactgagctacaagtat

SEQ ID NO: 679198 - DNA, 19 bp, Mus musculus
  siRNA target sequence for D930005D10Rik (NM_178702.2,524-542).
gccagtacgtgctatgtga

SEQ ID NO: 679199 - DNA, 19 bp, Mus musculus
  siRNA target sequence for D930005D10Rik (NM_178702.2,525-543).
ccagtacgtgctatgtgat

SEQ ID NO: 679200 - DNA, 19 bp, Mus musculus
  siRNA target sequence for D930005D10Rik (NM_178702.2,528-546).
gtacgtgctatgtgatgtt

SEQ ID NO: 679201 - DNA, 19 bp, Mus musculus
  siRNA target sequence for D930005D10Rik (NM_178702.2,584-602).
cccagtgcttccgagtatt

SEQ ID NO: 679202 - DNA, 19 bp, Mus musculus
  siRNA target sequence for D930005D10Rik (NM_178702.2,596-614).
gagtatttggcgacaatga

SEQ ID NO: 679203 - DNA, 19 bp, Mus musculus
  siRNA target sequence for D930005D10Rik (NM_178702.2,598-616).
gtatttggcgacaatgaga

SEQ ID NO: 679204 - DNA, 19 bp, Mus musculus
  siRNA target sequence for D930005D10Rik (NM_178702.2,725-743).
ccaccaccgcagggataaa

SEQ ID NO: 679205 - DNA, 19 bp, Mus musculus
  siRNA target sequence for D930005D10Rik (NM_178702.2,1032-1050).
gcgcacaccgtctagcaaa

SEQ ID NO: 679206 - DNA, 19 bp, Mus musculus
  siRNA target sequence for D930005D10Rik (NM_178702.2,1206-1224).
ccctgtggtgctacaacat

SEQ ID NO: 679207 - DNA, 19 bp, Mus musculus
  siRNA target sequence for D930005D10Rik (NM_178702.2,1324-1342).
gcaccacagagctgtagaa

SEQ ID NO: 679208 - DNA, 19 bp, Mus musculus
  siRNA target sequence for D930005D10Rik (NM_178702.2,1325-1343).
caccacagagctgtagaat

SEQ ID NO: 679209 - DNA, 19 bp, Mus musculus
  siRNA target sequence for D930005D10Rik (NM_178702.2,1455-1473).
gaggatcatgacactgatt

SEQ ID NO: 679210 - DNA, 19 bp, Mus musculus
  siRNA target sequence for D930005D10Rik (NM_178702.2,1576-1594).
ctgctcaagatctccaaaa

SEQ ID NO: 679211 - DNA, 19 bp, Mus musculus
  siRNA target sequence for D930005D10Rik (NM_178702.2,1717-1735).
ctgttttggatgtcaaact

SEQ ID NO: 679212 - DNA, 19 bp, Mus musculus
  siRNA target sequence for D930005D10Rik (NM_178702.2,1736-1754).
ccatcgagctcctgtactt

SEQ ID NO: 679213 - DNA, 19 bp, Mus musculus
  siRNA target sequence for D930005D10Rik (NM_178702.2,1879-1897).
gaggtggtgctctatgctt

SEQ ID NO: 679214 - DNA, 19 bp, Mus musculus
  siRNA target sequence for D930005D10Rik (NM_178702.2,2272-2290).
cgcttcttccggaagcttt

SEQ ID NO: 679215 - DNA, 19 bp, Mus musculus
  siRNA target sequence for D930005D10Rik (NM_178702.2,2679-2697).
gggcctgtaccacacaatt

SEQ ID NO: 679216 - DNA, 19 bp, Mus musculus
  siRNA target sequence for D930005D10Rik (NM_178702.2,2682-2700).
cctgtaccacacaattcct

SEQ ID NO: 679217 - DNA, 19 bp, Mus musculus
  siRNA target sequence for Grb7 (NM_010346.1,544-562).
ctccgccaggggatgtgaa

SEQ ID NO: 679218 - DNA, 19 bp, Mus musculus
  siRNA target sequence for Grb7 (NM_010346.1,992-1010).
cttcgccaagtatgaacta

SEQ ID NO: 679219 - DNA, 19 bp, Mus musculus
  siRNA target sequence for Grb7 (NM_010346.1,996-1014).
gccaagtatgaactattca

SEQ ID NO: 679220 - DNA, 19 bp, Mus musculus
  siRNA target sequence for Grb7 (NM_010346.1,997-1015).
ccaagtatgaactattcaa

SEQ ID NO: 679221 - DNA, 19 bp, Mus musculus
  siRNA target sequence for Grb7 (NM_010346.1,1075-1093).
caggcatatcccatgaaga

SEQ ID NO: 679222 - DNA, 19 bp, Mus musculus
  siRNA target sequence for Grb7 (NM_010346.1,1169-1187).
ggggtcaggtcgaaagctt

SEQ ID NO: 679223 - DNA, 19 bp, Mus musculus
  siRNA target sequence for Grb7 (NM_010346.1,1170-1188).
gggtcaggtcgaaagcttt

SEQ ID NO: 679224 - DNA, 19 bp, Mus musculus
  siRNA target sequence for Grb7 (NM_010346.1,1174-1192).
caggtcgaaagctttggaa

SEQ ID NO: 679225 - DNA, 19 bp, Mus musculus
  siRNA target sequence for Grb7 (NM_010346.1,1213-1231).
gtcgatctggcctctacta

SEQ ID NO: 679226 - DNA, 19 bp, Mus musculus
  siRNA target sequence for Grb7 (NM_010346.1,1256-1274).
ccccagacacctacagtat

SEQ ID NO: 679227 - DNA, 19 bp, Mus musculus
  siRNA target sequence for Grb7 (NM_010346.1,1444-1462).
ctgccttccggctcttcaa

SEQ ID NO: 679228 - DNA, 19 bp, Mus musculus
  siRNA target sequence for Grb7 (NM_010346.1,1446-1464).
gccttccggctcttcaagt

SEQ ID NO: 679229 - DNA, 19 bp, Mus musculus
  siRNA target sequence for Grb7 (NM_010346.1,1447-1465).
ccttccggctcttcaagta

SEQ ID NO: 679230 - DNA, 19 bp, Mus musculus
  siRNA target sequence for Grb7 (NM_010346.1,1463-1481).
gtacggggtacagctatat

SEQ ID NO: 679231 - DNA, 19 bp, Mus musculus
  siRNA target sequence for Grb7 (NM_010346.1,1467-1485).
ggggtacagctatataaga

SEQ ID NO: 679232 - DNA, 19 bp, Mus musculus
  siRNA target sequence for Grb7 (NM_010346.1,1468-1486).
gggtacagctatataagaa

SEQ ID NO: 679233 - DNA, 19 bp, Mus musculus
  siRNA target sequence for Grb7 (NM_010346.1,1507-1525).
gtcacctgcgcctatccta

SEQ ID NO: 679234 - DNA, 19 bp, Mus musculus
  siRNA target sequence for Grb7 (NM_010346.1,1509-1527).
cacctgcgcctatcctatt

SEQ ID NO: 679235 - DNA, 19 bp, Mus musculus
  siRNA target sequence for Grb7 (NM_010346.1,1769-1787).
ggagagccagcggctaatt

SEQ ID NO: 679236 - DNA, 19 bp, Mus musculus
  siRNA target sequence for Grb7 (NM_010346.1,1772-1790).
gagccagcggctaattgga

SEQ ID NO: 679237 - DNA, 19 bp, Mus musculus
  siRNA target sequence for Grb7 (NM_010346.1,1874-1892).
gcagaaagtcaagcattat

SEQ ID NO: 679238 - DNA, 19 bp, Mus musculus
  siRNA target sequence for Grb7 (NM_010346.1,1911-1929).
gatgaaggttgcctttact

SEQ ID NO: 679239 - DNA, 19 bp, Mus musculus
  siRNA target sequence for Grb7 (NM_010346.1,1914-1932).
gaaggttgcctttacttca

SEQ ID NO: 679240 - DNA, 19 bp, Mus musculus
  siRNA target sequence for Grb7 (NM_010346.1,1943-1961).
gggccagacccgtttcaca

SEQ ID NO: 679241 - DNA, 19 bp, Mus musculus
  siRNA target sequence for Hcrt (NM_010410.1,228-246).
gccgtctctacgaactgtt

SEQ ID NO: 679242 - DNA, 19 bp, Mus musculus
  siRNA target sequence for Hcrt (NM_010410.1,428-446).
ggctgtccgaccgtaacta

SEQ ID NO: 679243 - DNA, 19 bp, Mus musculus
  siRNA target sequence for Nmb (NM_026523.1,131-149).
ggcgtcgctcccttcaact

SEQ ID NO: 679244 - DNA, 19 bp, Mus musculus
  siRNA target sequence for Nmb (NM_026523.1,334-352).
gatcctcctgcgaaagaaa

SEQ ID NO: 679245 - DNA, 19 bp, Mus musculus
  siRNA target sequence for Nmb (NM_026523.1,353-371).
gctctaggcatgaacttca

SEQ ID NO: 679246 - DNA, 19 bp, Mus musculus
  siRNA target sequence for Npb (NM_153288.1,185-203).
ccggacctctgcgcaattt

SEQ ID NO: 679247 - DNA, 19 bp, Mus musculus
  siRNA target sequence for Npb (NM_153288.1,186-204).
cggacctctgcgcaattta

SEQ ID NO: 679248 - DNA, 19 bp, Mus musculus
  siRNA target sequence for Npb (NM_153288.1,190-208).
cctctgcgcaatttagaga

SEQ ID NO: 679249 - DNA, 19 bp, Mus musculus
  siRNA target sequence for Npb (NM_153288.1,191-209).
ctctgcgcaatttagagat

SEQ ID NO: 679250 - DNA, 19 bp, Mus musculus
  siRNA target sequence for Npb (NM_153288.1,228-246).
ccttgccctgtgtgtcaaa

SEQ ID NO: 679251 - DNA, 19 bp, Mus musculus
  siRNA target sequence for Npb (NM_153288.1,269-287).
gctgccagcggcaactcaa

SEQ ID NO: 679252 - DNA, 19 bp, Mus musculus
  siRNA target sequence for Npb (NM_153288.1,293-311).
gagggactttccagtgtaa

SEQ ID NO: 679253 - DNA, 19 bp, Mus musculus
  siRNA target sequence for Pamci (NM_146240.2,321-339).
gctccctttggaagaaact

SEQ ID NO: 679254 - DNA, 19 bp, Mus musculus
  siRNA target sequence for Pamci (NM_146240.2,322-340).
ctccctttggaagaaactt

SEQ ID NO: 679255 - DNA, 19 bp, Mus musculus
  siRNA target sequence for Pamci (NM_146240.2,342-360).
ctgaagacacgacataaaa

SEQ ID NO: 679256 - DNA, 19 bp, Mus musculus
  siRNA target sequence for Pamci (NM_146240.2,347-365).
gacacgacataaaaacaga

SEQ ID NO: 679257 - DNA, 19 bp, Mus musculus
  siRNA target sequence for Pamci (NM_146240.2,418-436).
gccaggacgagaagattgt

SEQ ID NO: 679258 - DNA, 19 bp, Mus musculus
  siRNA target sequence for Pamci (NM_146240.2,431-449).
gattgtctgcggattaact

SEQ ID NO: 679259 - DNA, 19 bp, Mus musculus
  siRNA target sequence for Pamci (NM_146240.2,457-475).
ccacctccatcgatgttat

SEQ ID NO: 679260 - DNA, 19 bp, Mus musculus
  siRNA target sequence for Pamci (NM_146240.2,460-478).
cctccatcgatgttatcca

SEQ ID NO: 679261 - DNA, 19 bp, Mus musculus
  siRNA target sequence for Pamci (NM_146240.2,491-509).
ggaacacgaagccacattt

SEQ ID NO: 679262 - DNA, 19 bp, Mus musculus
  siRNA target sequence for Pamci (NM_146240.2,510-528).
ggagaaaagcgatttctgt

SEQ ID NO: 679263 - DNA, 19 bp, Mus musculus
  siRNA target sequence for Pamci (NM_146240.2,543-561).
gactactgcatcgtagaaa

SEQ ID NO: 679264 - DNA, 19 bp, Mus musculus
  siRNA target sequence for Pamci (NM_146240.2,592-610).
ctctgaccaggatccttaa

SEQ ID NO: 679265 - DNA, 19 bp, Mus musculus
  siRNA target sequence for Pamci (NM_146240.2,638-656).
gcccaacatgcagtttgtt

SEQ ID NO: 679266 - DNA, 19 bp, Mus musculus
  siRNA target sequence for Pamci (NM_146240.2,694-712).
ggcggaccgctgaaaccaa

SEQ ID NO: 679267 - DNA, 19 bp, Mus musculus
  siRNA target sequence for Pamci (NM_146240.2,695-713).
gcggaccgctgaaaccaaa

SEQ ID NO: 679268 - DNA, 19 bp, Mus musculus
  siRNA target sequence for Pamci (NM_146240.2,698-716).
gaccgctgaaaccaaacta

SEQ ID NO: 679269 - DNA, 19 bp, Mus musculus
  siRNA target sequence for Pamci (NM_146240.2,700-718).
ccgctgaaaccaaactagt

SEQ ID NO: 679270 - DNA, 19 bp, Mus musculus
  siRNA target sequence for Pamci (NM_146240.2,709-727).
ccaaactagtgcaaaataa

SEQ ID NO: 679271 - DNA, 19 bp, Mus musculus
  siRNA target sequence for Pamci (NM_146240.2,744-762).
ctcagcccagcgaattaca

SEQ ID NO: 679272 - DNA, 19 bp, Mus musculus
  siRNA target sequence for Pamci (NM_146240.2,748-766).
gcccagcgaattacatgaa

SEQ ID NO: 679273 - DNA, 19 bp, Mus musculus
  siRNA target sequence for Pamci (NM_146240.2,749-767).
cccagcgaattacatgaaa

SEQ ID NO: 679274 - DNA, 19 bp, Mus musculus
  siRNA target sequence for Pamci (NM_146240.2,750-768).
ccagcgaattacatgaaaa

SEQ ID NO: 679275 - DNA, 19 bp, Mus musculus
  siRNA target sequence for Pamci (NM_146240.2,753-771).
gcgaattacatgaaaacat

SEQ ID NO: 679276 - DNA, 19 bp, Mus musculus
  siRNA target sequence for Pamci (NM_146240.2,792-810).
cgaatcgtcaggaaaacct

SEQ ID NO: 679277 - DNA, 19 bp, Mus musculus
  siRNA target sequence for Pamci (NM_146240.2,812-830).
ccggaaactggccaaaatt

SEQ ID NO: 679278 - DNA, 19 bp, Mus musculus
  siRNA target sequence for Pamci (NM_146240.2,847-865).
cccatgatcgagacaatat

SEQ ID NO: 679279 - DNA, 19 bp, Mus musculus
  siRNA target sequence for Pamci (NM_146240.2,860-878).
caatatggagtgtttagtt

SEQ ID NO: 679280 - DNA, 19 bp, Mus musculus
  siRNA target sequence for Pamci (NM_146240.2,939-957).
gatatggaaattgaaaaat

SEQ ID NO: 679281 - DNA, 19 bp, Mus musculus
  siRNA target sequence for Pamci (NM_146240.2,988-1006).
ggaatgatggggctaatta

SEQ ID NO: 679282 - DNA, 19 bp, Mus musculus
  siRNA target sequence for Pamci (NM_146240.2,1028-1046).
gcctaggttaagtgatgaa

SEQ ID NO: 679283 - DNA, 19 bp, Mus musculus
  siRNA target sequence for Pamci (NM_146240.2,1044-1062).
gaagagcagaagttagaca

SEQ ID NO: 679284 - DNA, 19 bp, Mus musculus
  siRNA target sequence for Pamci (NM_146240.2,1049-1067).
gcagaagttagacattcaa

SEQ ID NO: 679285 - DNA, 19 bp, Mus musculus
  siRNA target sequence for Pamci (NM_146240.2,1125-1143).
gaggaacagctgcaatact

SEQ ID NO: 679286 - DNA, 19 bp, Mus musculus
  siRNA target sequence for Pamci (NM_146240.2,1128-1146).
gaacagctgcaatactaca

SEQ ID NO: 679287 - DNA, 19 bp, Mus musculus
  siRNA target sequence for Pamci (NM_146240.2,1147-1165).
gagccctcatcgataagct

SEQ ID NO: 679288 - DNA, 19 bp, Mus musculus
  siRNA target sequence for Pamci (NM_146240.2,1190-1208).
gaagggcgcaggcattgat

SEQ ID NO: 679289 - DNA, 19 bp, Mus musculus
  siRNA target sequence for Pamci (NM_146240.2,1201-1219).
gcattgatgggattgaaga

SEQ ID NO: 679290 - DNA, 19 bp, Mus musculus
  siRNA target sequence for Pamci (NM_146240.2,1248-1266).
gaaaactcggatttggaaa

SEQ ID NO: 679291 - DNA, 19 bp, Mus musculus
  siRNA target sequence for Pamci (NM_146240.2,1257-1275).
gatttggaaagcgttaagt

SEQ ID NO: 679292 - DNA, 19 bp, Mus musculus
  siRNA target sequence for Pamci (NM_146240.2,1267-1285).
gcgttaagtgcgatttgga

SEQ ID NO: 679293 - DNA, 19 bp, Mus musculus
  siRNA target sequence for Pamci (NM_146240.2,1278-1296).
gatttggagacaagtatga

SEQ ID NO: 679294 - DNA, 19 bp, Mus musculus
  siRNA target sequence for Pamci (NM_146240.2,1354-1372).
gtgactcactgcttcagat

SEQ ID NO: 679295 - DNA, 19 bp, Mus musculus
  siRNA target sequence for Pamci (NM_146240.2,1496-1514).
gacccctccattaactcaa

SEQ ID NO: 679296 - DNA, 19 bp, Mus musculus
  siRNA target sequence for Pamci (NM_146240.2,1551-1569).
gacactggcatcagttcaa

SEQ ID NO: 679297 - DNA, 19 bp, Mus musculus
  siRNA target sequence for Prok2 (NM_015768.1,211-229).
gtcagtatctgggttaaga

SEQ ID NO: 679298 - DNA, 19 bp, Mus musculus
  siRNA target sequence for Prok2 (NM_015768.1,221-239).
gggttaagagcataaggat

SEQ ID NO: 679299 - DNA, 19 bp, Mus musculus
  siRNA target sequence for Prok2 (NM_015768.1,276-294).
ccccctgactcggaaaagt

SEQ ID NO: 679300 - DNA, 19 bp, Mus musculus
  siRNA target sequence for Prok2 (NM_015768.1,279-297).
cctgactcggaaaagtcat

SEQ ID NO: 679301 - DNA, 19 bp, Mus musculus
  siRNA target sequence for Prok2 (NM_015768.1,282-300).
gactcggaaaagtcatgtt

SEQ ID NO: 679302 - DNA, 19 bp, Mus musculus
  siRNA target sequence for Prok2 (NM_015768.1,399-417).
gccaggcttggcgtgttta

SEQ ID NO: 679303 - DNA, 19 bp, Mus musculus
  siRNA target sequence for Rassf1 (NM_019713.2,209-227).
cggagctcgagcagtactt

SEQ ID NO: 679304 - DNA, 19 bp, Mus musculus
  siRNA target sequence for Rassf1 (NM_019713.2,211-229).
gagctcgagcagtacttca

SEQ ID NO: 679305 - DNA, 19 bp, Mus musculus
  siRNA target sequence for Rassf1 (NM_019713.2,286-304).
cgggagacacccgatcttt

SEQ ID NO: 679306 - DNA, 19 bp, Mus musculus
  siRNA target sequence for Rassf1 (NM_019713.2,288-306).
ggagacacccgatctttct

SEQ ID NO: 679307 - DNA, 19 bp, Mus musculus
  siRNA target sequence for Rassf1 (NM_019713.2,291-309).
gacacccgatctttctcaa

SEQ ID NO: 679308 - DNA, 19 bp, Mus musculus
  siRNA target sequence for Rassf1 (NM_019713.2,361-379).
ctcttcatgagcctgaata

SEQ ID NO: 679309 - DNA, 19 bp, Mus musculus
  siRNA target sequence for Rassf1 (NM_019713.2,450-468).
caagaaaccaccttcctta

SEQ ID NO: 679310 - DNA, 19 bp, Mus musculus
  siRNA target sequence for Rassf1 (NM_019713.2,549-567).
gcatctgcatgttctatca

SEQ ID NO: 679311 - DNA, 19 bp, Mus musculus
  siRNA target sequence for Rassf1 (NM_019713.2,575-593).
gggcacgtgaggtcattga

SEQ ID NO: 679312 - DNA, 19 bp, Mus musculus
  siRNA target sequence for Rassf1 (NM_019713.2,596-614).
ccctgcttcgaaaattcat

SEQ ID NO: 679313 - DNA, 19 bp, Mus musculus
  siRNA target sequence for Rassf1 (NM_019713.2,658-676).
gaacggcatggccaagtat

SEQ ID NO: 679314 - DNA, 19 bp, Mus musculus
  siRNA target sequence for Rassf1 (NM_019713.2,864-882).
ccagatcctgcagaagtat

SEQ ID NO: 679315 - DNA, 19 bp, Mus musculus
  siRNA target sequence for Rassf1 (NM_019713.2,884-902).
ctcgttgtcgccagaagat

SEQ ID NO: 679316 - DNA, 19 bp, Mus musculus
  siRNA target sequence for Rassf2 (NM_175445.3,127-145).
gcggacaagacaagtatat

SEQ ID NO: 679317 - DNA, 19 bp, Mus musculus
  siRNA target sequence for Rassf2 (NM_175445.3,903-921).
gacgtggcccagtatataa

SEQ ID NO: 679318 - DNA, 19 bp, Mus musculus
  siRNA target sequence for Rassf2 (NM_175445.3,906-924).
gtggcccagtatataaagt

SEQ ID NO: 679319 - DNA, 19 bp, Mus musculus
  siRNA target sequence for Rassf2 (NM_175445.3,926-944).
cgagatgccagtccttaaa

SEQ ID NO: 679320 - DNA, 19 bp, Mus musculus
  siRNA target sequence for Rassf2 (NM_175445.3,927-945).
gagatgccagtccttaaaa

SEQ ID NO: 679321 - DNA, 19 bp, Mus musculus
  siRNA target sequence for Rassf2 (NM_175445.3,1053-1071).
gagacccccgagactatct

SEQ ID NO: 679322 - DNA, 19 bp, Mus musculus
  siRNA target sequence for Rassf3 (NM_138956.2,168-186).
gaggacgaggactttttct

SEQ ID NO: 679323 - DNA, 19 bp, Mus musculus
  siRNA target sequence for Rassf3 (NM_138956.2,527-545).
cgagagtcccaccaagttt

SEQ ID NO: 679324 - DNA, 19 bp, Mus musculus
  siRNA target sequence for Rassf3 (NM_138956.2,536-554).
caccaagtttgcgctttat

SEQ ID NO: 679325 - DNA, 19 bp, Mus musculus
  siRNA target sequence for Rassf3 (NM_138956.2,538-556).
ccaagtttgcgctttataa

SEQ ID NO: 679326 - DNA, 19 bp, Mus musculus
  siRNA target sequence for Rassf3 (NM_138956.2,614-632).
gctgtacctacgtttggta

SEQ ID NO: 679327 - DNA, 19 bp, Mus musculus
  siRNA target sequence for Rassf3 (NM_138956.2,643-661).
gaaccgacacccttagttt

SEQ ID NO: 679328 - DNA, 19 bp, Mus musculus
  siRNA target sequence for Rassf3 (NM_138956.2,646-664).
ccgacacccttagttttgt

SEQ ID NO: 679329 - DNA, 19 bp, Mus musculus
  siRNA target sequence for Rassf4 (NM_178045.3,141-159).
gcgacagcaagtacattct

SEQ ID NO: 679330 - DNA, 19 bp, Mus musculus
  siRNA target sequence for Rassf4 (NM_178045.3,170-188).
ctcttaagcctgctcaaaa

SEQ ID NO: 679331 - DNA, 19 bp, Mus musculus
  siRNA target sequence for Rassf4 (NM_178045.3,213-231).
ggagctttcagctaagaca

SEQ ID NO: 679332 - DNA, 19 bp, Mus musculus
  siRNA target sequence for Rassf4 (NM_178045.3,259-277).
cgaaggactcctcaacatt

SEQ ID NO: 679333 - DNA, 19 bp, Mus musculus
  siRNA target sequence for Rassf4 (NM_178045.3,429-447).
gcactcaacctgcaaacaa

SEQ ID NO: 679334 - DNA, 19 bp, Mus musculus
  siRNA target sequence for Rassf4 (NM_178045.3,506-524).
cagcttatgcggacaaaga

SEQ ID NO: 679335 - DNA, 19 bp, Mus musculus
  siRNA target sequence for Rassf4 (NM_178045.3,525-543).
gcgatgccagctgcataat

SEQ ID NO: 679336 - DNA, 19 bp, Mus musculus
  siRNA target sequence for Rassf4 (NM_178045.3,595-613).
gcaccggttctccatcaat

SEQ ID NO: 679337 - DNA, 19 bp, Mus musculus
  siRNA target sequence for Rassf4 (NM_178045.3,710-728).
ctcaccctgctactaaaca

SEQ ID NO: 679338 - DNA, 19 bp, Mus musculus
  siRNA target sequence for Rassf4 (NM_178045.3,714-732).
ccctgctactaaacaagtt

SEQ ID NO: 679339 - DNA, 19 bp, Mus musculus
  siRNA target sequence for Rassf4 (NM_178045.3,727-745).
caagttccgggtagaagat

SEQ ID NO: 679340 - DNA, 19 bp, Mus musculus
  siRNA target sequence for Rassf4 (NM_178045.3,838-856).
gcatgggccctgtgagaaa

SEQ ID NO: 679341 - DNA, 19 bp, Mus musculus
  siRNA target sequence for Rassf4 (NM_178045.3,895-913).
ggaggtgccccatgatgtt

SEQ ID NO: 679342 - DNA, 19 bp, Mus musculus
  siRNA target sequence for Rassf4 (NM_178045.3,908-926).
gatgttgcccagtacatta

SEQ ID NO: 679343 - DNA, 19 bp, Mus musculus
  siRNA target sequence for Rassf4 (NM_178045.3,917-935).
cagtacattaagttcgaaa

SEQ ID NO: 679344 - DNA, 19 bp, Mus musculus
  siRNA target sequence for Rassf4 (NM_178045.3,937-955).
gccggtgctggacagtttt

SEQ ID NO: 679345 - DNA, 19 bp, Mus musculus
  siRNA target sequence for Rassf4 (NM_178045.3,943-961).
gctggacagttttgttgaa

SEQ ID NO: 679346 - DNA, 19 bp, Mus musculus
  siRNA target sequence for Rassf4 (NM_178045.3,1012-1030).
ccaagccttgcgtctaaca

SEQ ID NO: 679347 - DNA, 19 bp, Mus musculus
  siRNA target sequence for Rassf4 (NM_178045.3,1013-1031).
caagccttgcgtctaacaa

SEQ ID NO: 679348 - DNA, 19 bp, Mus musculus
  siRNA target sequence for Rfrp (NM_021892.1,87-105).
gttcatgatgcctcatttt

SEQ ID NO: 679349 - DNA, 19 bp, Mus musculus
  siRNA target sequence for Rfrp (NM_021892.1,115-133).
gaaggtgacggaaaatact

SEQ ID NO: 679350 - DNA, 19 bp, Mus musculus
  siRNA target sequence for Rfrp (NM_021892.1,175-193).
gtcagttttcaagaactaa

SEQ ID NO: 679351 - DNA, 19 bp, Mus musculus
  siRNA target sequence for Rfrp (NM_021892.1,205-223).
gcaaagaatgttattaaga

SEQ ID NO: 679352 - DNA, 19 bp, Mus musculus
  siRNA target sequence for Rfrp (NM_021892.1,264-282).
caacctgcccctgagattt

SEQ ID NO: 679353 - DNA, 19 bp, Mus musculus
  siRNA target sequence for Rfrp (NM_021892.1,267-285).
cctgcccctgagatttgga

SEQ ID NO: 679354 - DNA, 19 bp, Mus musculus
  siRNA target sequence for Rfrp (NM_021892.1,284-302).
gaaggaccatagatgagaa

SEQ ID NO: 679355 - DNA, 19 bp, Mus musculus
  siRNA target sequence for Rfrp (NM_021892.1,311-329).
ccgcagcacgggtcaacat

SEQ ID NO: 679356 - DNA, 19 bp, Mus musculus
  siRNA target sequence for Rfrp (NM_021892.1,398-416).
ccaagacacccgctgattt

SEQ ID NO: 679357 - DNA, 19 bp, Mus musculus
  siRNA target sequence for Rfrp (NM_021892.1,471-489).
ctgccagcaccaagaaatt

SEQ ID NO: 679358 - DNA, 19 bp, Mus musculus
  siRNA target sequence for Sgne1 (NM_009162.2,165-183).
gctggtctctgctatgcta

SEQ ID NO: 679359 - DNA, 19 bp, Mus musculus
  siRNA target sequence for Sgne1 (NM_009162.2,419-437).
gcaacatccccaacatagt

SEQ ID NO: 679360 - DNA, 19 bp, Mus musculus
  siRNA target sequence for Sgne1 (NM_009162.2,444-462).
gttgactggtgacaacatt

SEQ ID NO: 679361 - DNA, 19 bp, Mus musculus
  siRNA target sequence for Sgne1 (NM_009162.2,566-584).
cagagttcagccgagaatt

SEQ ID NO: 679362 - DNA, 19 bp, Mus musculus
  siRNA target sequence for Sgne1 (NM_009162.2,696-714).
gagtgtcaatccctatcta

SEQ ID NO: 679363 - DNA, 19 bp, Mus musculus
  siRNA target sequence for Sgne1 (NM_009162.2,698-716).
gtgtcaatccctatctaca

SEQ ID NO: 679364 - DNA, 19 bp, Mus musculus
  siRNA target sequence for Jph2 (NM_021566.1,538-556).
ctcgggctcctggaatttt

SEQ ID NO: 679365 - DNA, 19 bp, Mus musculus
  siRNA target sequence for Jph2 (NM_021566.1,547-565).
ctggaattttggctttgaa

SEQ ID NO: 679366 - DNA, 19 bp, Mus musculus
  siRNA target sequence for Jph2 (NM_021566.1,563-581).
gaagtggcaggcgtctata

SEQ ID NO: 679367 - DNA, 19 bp, Mus musculus
  siRNA target sequence for Jph2 (NM_021566.1,566-584).
gtggcaggcgtctatacct

SEQ ID NO: 679368 - DNA, 19 bp, Mus musculus
  siRNA target sequence for Jph2 (NM_021566.1,712-730).
ccggcagagcacaaacagt

SEQ ID NO: 679369 - DNA, 19 bp, Mus musculus
  siRNA target sequence for Jph2 (NM_021566.1,739-757).
gtacgagggcacttggaat

SEQ ID NO: 679370 - DNA, 19 bp, Mus musculus
  siRNA target sequence for Jph2 (NM_021566.1,793-811).
cgcagacggaggaacctat

SEQ ID NO: 679371 - DNA, 19 bp, Mus musculus
  siRNA target sequence for Jph2 (NM_021566.1,1088-1106).
cggctgcgacgctcagaat

SEQ ID NO: 679372 - DNA, 19 bp, Mus musculus
  siRNA target sequence for Jph2 (NM_021566.1,1134-1152).
gccgcttgagctttctcaa

SEQ ID NO: 679373 - DNA, 19 bp, Mus musculus
  siRNA target sequence for Jph2 (NM_021566.1,1422-1440).
gcaagtaccgccacaatgt

SEQ ID NO: 679374 - DNA, 19 bp, Mus musculus
  siRNA target sequence for Jph2 (NM_021566.1,1641-1659).
ccaacatcgcccgtacatt

SEQ ID NO: 679375 - DNA, 19 bp, Mus musculus
  siRNA target sequence for Jph2 (NM_021566.1,1691-1709).
ccaggtccggagtatcaga

SEQ ID NO: 679376 - DNA, 19 bp, Mus musculus
  siRNA target sequence for Jph2 (NM_021566.1,1692-1710).
caggtccggagtatcagaa

SEQ ID NO: 679377 - DNA, 19 bp, Mus musculus
  siRNA target sequence for Jph2 (NM_021566.1,2479-2497).
cggcctggctatcctattt

SEQ ID NO: 679378 - DNA, 19 bp, Mus musculus
  siRNA target sequence for Jph2 (NM_021566.1,2481-2499).
gcctggctatcctatttgt

SEQ ID NO: 679379 - DNA, 19 bp, Mus musculus
  siRNA target sequence for Jph2 (NM_021566.1,2482-2500).
cctggctatcctatttgtt

SEQ ID NO: 679380 - DNA, 19 bp, Mus musculus
  siRNA target sequence for Agpt (NM_009640.1,366-384).
caaccagcgccgaaatcca

SEQ ID NO: 679381 - DNA, 19 bp, Mus musculus
  siRNA target sequence for Agpt (NM_009640.1,401-419).
gatataaccggattcaaca

SEQ ID NO: 679382 - DNA, 19 bp, Mus musculus
  siRNA target sequence for Agpt (NM_009640.1,421-439).
gggcaatgtgcctacactt

SEQ ID NO: 679383 - DNA, 19 bp, Mus musculus
  siRNA target sequence for Agpt (NM_009640.1,422-440).
ggcaatgtgcctacacttt

SEQ ID NO: 679384 - DNA, 19 bp, Mus musculus
  siRNA target sequence for Agpt (NM_009640.1,476-494).
gtgcgacagagcagtacaa

SEQ ID NO: 679385 - DNA, 19 bp, Mus musculus
  siRNA target sequence for Agpt (NM_009640.1,523-541).
cacgtggagccggatttct

SEQ ID NO: 679386 - DNA, 19 bp, Mus musculus
  siRNA target sequence for Agpt (NM_009640.1,526-544).
gtggagccggatttctctt

SEQ ID NO: 679387 - DNA, 19 bp, Mus musculus
  siRNA target sequence for Agpt (NM_009640.1,595-613).
ctgcaaaaacttgagaatt

SEQ ID NO: 679388 - DNA, 19 bp, Mus musculus
  siRNA target sequence for Agpt (NM_009640.1,598-616).
caaaaacttgagaattaca

SEQ ID NO: 679389 - DNA, 19 bp, Mus musculus
  siRNA target sequence for Agpt (NM_009640.1,642-660).
ggcccagatacaacagaat

SEQ ID NO: 679390 - DNA, 19 bp, Mus musculus
  siRNA target sequence for Agpt (NM_009640.1,677-695).
cggccaccatgcttgagat

SEQ ID NO: 679391 - DNA, 19 bp, Mus musculus
  siRNA target sequence for Agpt (NM_009640.1,693-711).
gataggaaccagtctctta

SEQ ID NO: 679392 - DNA, 19 bp, Mus musculus
  siRNA target sequence for Agpt (NM_009640.1,698-716).
gaaccagtctcttatctca

SEQ ID NO: 679393 - DNA, 19 bp, Mus musculus
  siRNA target sequence for Agpt (NM_009640.1,748-766).
gttgagacccaggtactaa

SEQ ID NO: 679394 - DNA, 19 bp, Mus musculus
  siRNA target sequence for Agpt (NM_009640.1,753-771).
gacccaggtactaaatcaa

SEQ ID NO: 679395 - DNA, 19 bp, Mus musculus
  siRNA target sequence for Agpt (NM_009640.1,756-774).
ccaggtactaaatcaaaca

SEQ ID NO: 679396 - DNA, 19 bp, Mus musculus
  siRNA target sequence for Agpt (NM_009640.1,977-995).
ctcgtcagacattcatcat

SEQ ID NO: 679397 - DNA, 19 bp, Mus musculus
  siRNA target sequence for Agpt (NM_009640.1,1071-1089).
ggacacagttcataacctt

SEQ ID NO: 679398 - DNA, 19 bp, Mus musculus
  siRNA target sequence for Agpt (NM_009640.1,1103-1121).
ctaaagaaggtgttttgct

SEQ ID NO: 679399 - DNA, 19 bp, Mus musculus
  siRNA target sequence for Agpt (NM_009640.1,1156-1174).
cgagactgtgcagatgtat

SEQ ID NO: 679400 - DNA, 19 bp, Mus musculus
  siRNA target sequence for Agpt (NM_009640.1,1161-1179).
ctgtgcagatgtatatcaa

SEQ ID NO: 679401 - DNA, 19 bp, Mus musculus
  siRNA target sequence for Agpt (NM_009640.1,1234-1252).
cccaaaaaggtattttgca

SEQ ID NO: 679402 - DNA, 19 bp, Mus musculus
  siRNA target sequence for Agpt (NM_009640.1,1235-1253).
ccaaaaaggtattttgcaa

SEQ ID NO: 679403 - DNA, 19 bp, Mus musculus
  siRNA target sequence for Agpt (NM_009640.1,1242-1260).
ggtattttgcaatatggat

SEQ ID NO: 679404 - DNA, 19 bp, Mus musculus
  siRNA target sequence for Agpt (NM_009640.1,1267-1285).
gggggaggttggacagtaa

SEQ ID NO: 679405 - DNA, 19 bp, Mus musculus
  siRNA target sequence for Agpt (NM_009640.1,1323-1341).
gggctggaaggagtataaa

SEQ ID NO: 679406 - DNA, 19 bp, Mus musculus
  siRNA target sequence for Agpt (NM_009640.1,1324-1342).
ggctggaaggagtataaaa

SEQ ID NO: 679407 - DNA, 19 bp, Mus musculus
  siRNA target sequence for Agpt (NM_009640.1,1352-1370).
ggaatccctctggtgaata

SEQ ID NO: 679408 - DNA, 19 bp, Mus musculus
  siRNA target sequence for Agpt (NM_009640.1,1383-1401).
cgagttcatttttgcaata

SEQ ID NO: 679409 - DNA, 19 bp, Mus musculus
  siRNA target sequence for Agpt (NM_009640.1,1384-1402).
gagttcatttttgcaataa

SEQ ID NO: 679410 - DNA, 19 bp, Mus musculus
  siRNA target sequence for Agpt (NM_009640.1,1478-1496).
gattccacataggaaatga

SEQ ID NO: 679411 - DNA, 19 bp, Mus musculus
  siRNA target sequence for Agpt (NM_009640.1,1495-1513).
gaaaagcagaactataggt

SEQ ID NO: 679412 - DNA, 19 bp, Mus musculus
  siRNA target sequence for Agpt (NM_009640.1,1501-1519).
cagaactataggttatatt

SEQ ID NO: 679413 - DNA, 19 bp, Mus musculus
  siRNA target sequence for Agpt (NM_009640.1,1583-1601).
gcacgaaggatgctgataa

SEQ ID NO: 679414 - DNA, 19 bp, Mus musculus
  siRNA target sequence for Agpt (NM_009640.1,1594-1612).
gctgataacgacaactgta

SEQ ID NO: 679415 - DNA, 19 bp, Mus musculus
  siRNA target sequence for Agpt (NM_009640.1,1595-1613).
ctgataacgacaactgtat

SEQ ID NO: 679416 - DNA, 19 bp, Mus musculus
  siRNA target sequence for Agpt (NM_009640.1,1666-1684).
ccttccaatctaaatggaa

SEQ ID NO: 679417 - DNA, 19 bp, Mus musculus
  siRNA target sequence for Agpt (NM_009640.1,1667-1685).
cttccaatctaaatggaat

SEQ ID NO: 679418 - DNA, 19 bp, Mus musculus
  siRNA target sequence for Agpt (NM_009640.1,1689-1707).
ctacactgcgggacaaaat

SEQ ID NO: 679419 - DNA, 19 bp, Mus musculus
  siRNA target sequence for Agpt (NM_009640.1,1692-1710).
cactgcgggacaaaatcat

SEQ ID NO: 679420 - DNA, 19 bp, Mus musculus
  siRNA target sequence for Agpt (NM_009640.1,1724-1742).
ggataaagtggcactactt

SEQ ID NO: 679421 - DNA, 19 bp, Mus musculus
  siRNA target sequence for Agpt (NM_009640.1,1750-1768).
cccagttactccttacgtt

SEQ ID NO: 679422 - DNA, 19 bp, Mus musculus
  siRNA target sequence for Agpt (NM_009640.1,1766-1784).
gttccaccaccatgatgat

SEQ ID NO: 679423 - DNA, 19 bp, Mus musculus
  siRNA target sequence for Cd47 (NM_010581.3,175-193).
ctgcggttcagctcaacta

SEQ ID NO: 679424 - DNA, 19 bp, Mus musculus
  siRNA target sequence for Cd47 (NM_010581.3,180-198).
gttcagctcaactactgtt

SEQ ID NO: 679425 - DNA, 19 bp, Mus musculus
  siRNA target sequence for Cd47 (NM_010581.3,185-203).
gctcaactactgtttagta

SEQ ID NO: 679426 - DNA, 19 bp, Mus musculus
  siRNA target sequence for Cd47 (NM_010581.3,223-241).
cacttcatgcaatgaaact

SEQ ID NO: 679427 - DNA, 19 bp, Mus musculus
  siRNA target sequence for Cd47 (NM_010581.3,225-243).
cttcatgcaatgaaactgt

SEQ ID NO: 679428 - DNA, 19 bp, Mus musculus
  siRNA target sequence for Cd47 (NM_010581.3,252-270).
cttgcatcgtccgtaatgt

SEQ ID NO: 679429 - DNA, 19 bp, Mus musculus
  siRNA target sequence for Cd47 (NM_010581.3,282-300).
gcaccgaagaaatgtttgt

SEQ ID NO: 679430 - DNA, 19 bp, Mus musculus
  siRNA target sequence for Cd47 (NM_010581.3,285-303).
ccgaagaaatgtttgtgaa

SEQ ID NO: 679431 - DNA, 19 bp, Mus musculus
  siRNA target sequence for Cd47 (NM_010581.3,307-325).
gaagttgaacaaatcgtat

SEQ ID NO: 679432 - DNA, 19 bp, Mus musculus
  siRNA target sequence for Cd47 (NM_010581.3,310-328).
gttgaacaaatcgtatatt

SEQ ID NO: 679433 - DNA, 19 bp, Mus musculus
  siRNA target sequence for Cd47 (NM_010581.3,321-339).
cgtatattttcatctatga

SEQ ID NO: 679434 - DNA, 19 bp, Mus musculus
  siRNA target sequence for Cd47 (NM_010581.3,354-372).
gcactactacagatcaaaa

SEQ ID NO: 679435 - DNA, 19 bp, Mus musculus
  siRNA target sequence for Cd47 (NM_010581.3,357-375).
ctactacagatcaaaactt

SEQ ID NO: 679436 - DNA, 19 bp, Mus musculus
  siRNA target sequence for Cd47 (NM_010581.3,413-431).
ggcattgcctctttgaaaa

SEQ ID NO: 679437 - DNA, 19 bp, Mus musculus
  siRNA target sequence for Cd47 (NM_010581.3,419-437).
gcctctttgaaaatggata

SEQ ID NO: 679438 - DNA, 19 bp, Mus musculus
  siRNA target sequence for Cd47 (NM_010581.3,420-438).
cctctttgaaaatggataa

SEQ ID NO: 679439 - DNA, 19 bp, Mus musculus
  siRNA target sequence for Cd47 (NM_010581.3,568-586).
ggagaaaggaggttgcaaa

SEQ ID NO: 679440 - DNA, 19 bp, Mus musculus
  siRNA target sequence for Cd47 (NM_010581.3,569-587).
gagaaaggaggttgcaaat

SEQ ID NO: 679441 - DNA, 19 bp, Mus musculus
  siRNA target sequence for Cd47 (NM_010581.3,575-593).
ggaggttgcaaattagttt

SEQ ID NO: 679442 - DNA, 19 bp, Mus musculus
  siRNA target sequence for Cd47 (NM_010581.3,595-613).
gtggttttctccaaatgaa

SEQ ID NO: 679443 - DNA, 19 bp, Mus musculus
  siRNA target sequence for Cd47 (NM_010581.3,611-629).
gaaaagatcctcattgtta

SEQ ID NO: 679444 - DNA, 19 bp, Mus musculus
  siRNA target sequence for Cd47 (NM_010581.3,697-715).
cagccatacgaataagaga

SEQ ID NO: 679445 - DNA, 19 bp, Mus musculus
  siRNA target sequence for Cd47 (NM_010581.3,699-717).
gccatacgaataagagaat

SEQ ID NO: 679446 - DNA, 19 bp, Mus musculus
  siRNA target sequence for Cd47 (NM_010581.3,705-723).
cgaataagagaatcattct

SEQ ID NO: 679447 - DNA, 19 bp, Mus musculus
  siRNA target sequence for Cd47 (NM_010581.3,813-831).
ctggacttggcctcattgt

SEQ ID NO: 679448 - DNA, 19 bp, Mus musculus
  siRNA target sequence for Cd47 (NM_010581.3,815-833).
ggacttggcctcattgtaa

SEQ ID NO: 679449 - DNA, 19 bp, Mus musculus
  siRNA target sequence for Cd47 (NM_010581.3,818-836).
cttggcctcattgtaatct

SEQ ID NO: 679450 - DNA, 19 bp, Mus musculus
  siRNA target sequence for Cd47 (NM_010581.3,821-839).
ggcctcattgtaatctcta

SEQ ID NO: 679451 - DNA, 19 bp, Mus musculus
  siRNA target sequence for Cd47 (NM_010581.3,835-853).
ctctacggggatattaata

SEQ ID NO: 679452 - DNA, 19 bp, Mus musculus
  siRNA target sequence for Cd47 (NM_010581.3,840-858).
cggggatattaatactact

SEQ ID NO: 679453 - DNA, 19 bp, Mus musculus
  siRNA target sequence for Cd47 (NM_010581.3,841-859).
ggggatattaatactactt

SEQ ID NO: 679454 - DNA, 19 bp, Mus musculus
  siRNA target sequence for Cd47 (NM_010581.3,862-880).
gtacaatgtgtttatgaca

SEQ ID NO: 679455 - DNA, 19 bp, Mus musculus
  siRNA target sequence for Cd47 (NM_010581.3,1021-1039).
catagctctagcagaacta

SEQ ID NO: 679456 - DNA, 19 bp, Mus musculus
  siRNA target sequence for Cd47 (NM_010581.3,1034-1052).
gaactacttggattagttt

SEQ ID NO: 679457 - DNA, 19 bp, Mus musculus
  siRNA target sequence for Cd47 (NM_010581.3,1043-1061).
ggattagtttatatgaagt

SEQ ID NO: 679458 - DNA, 19 bp, Mus musculus
  siRNA target sequence for Cd47 (NM_010581.3,1044-1062).
gattagtttatatgaagtt

SEQ ID NO: 679459 - DNA, 19 bp, Mus musculus
  siRNA target sequence for Cd47 (NM_010581.3,1072-1090).
caaccagaggactatccaa

SEQ ID NO: 679460 - DNA, 19 bp, Mus musculus
  siRNA target sequence for Itga3 (NM_013565.2,612-630).
cgctgtgggtgatgactat

SEQ ID NO: 679461 - DNA, 19 bp, Mus musculus
  siRNA target sequence for Itga3 (NM_013565.2,613-631).
gctgtgggtgatgactata

SEQ ID NO: 679462 - DNA, 19 bp, Mus musculus
  siRNA target sequence for Itga3 (NM_013565.2,719-737).
ctgaccatcacattattga

SEQ ID NO: 679463 - DNA, 19 bp, Mus musculus
  siRNA target sequence for Itga3 (NM_013565.2,919-937).
cacaacgagatgtgtaaca

SEQ ID NO: 679464 - DNA, 19 bp, Mus musculus
  siRNA target sequence for Itga3 (NM_013565.2,1018-1036).
gcccctggtgcctacaact

SEQ ID NO: 679465 - DNA, 19 bp, Mus musculus
  siRNA target sequence for Itga3 (NM_013565.2,1062-1080).
gcggaaggactgggattta

SEQ ID NO: 679466 - DNA, 19 bp, Mus musculus
  siRNA target sequence for Itga3 (NM_013565.2,1075-1093).
gatttatctgaatatagct

SEQ ID NO: 679467 - DNA, 19 bp, Mus musculus
  siRNA target sequence for Itga3 (NM_013565.2,1195-1213).
gccccacggcaccaacata

SEQ ID NO: 679468 - DNA, 19 bp, Mus musculus
  siRNA target sequence for Itga3 (NM_013565.2,1283-1301).
cgcaggtgggcgcttattt

SEQ ID NO: 679469 - DNA, 19 bp, Mus musculus
  siRNA target sequence for Itga3 (NM_013565.2,1284-1302).
gcaggtgggcgcttatttt

SEQ ID NO: 679470 - DNA, 19 bp, Mus musculus
  siRNA target sequence for Itga3 (NM_013565.2,1316-1334).
ccctggcagacctgaacaa

SEQ ID NO: 679471 - DNA, 19 bp, Mus musculus
  siRNA target sequence for Itga3 (NM_013565.2,1317-1335).
cctggcagacctgaacaat

SEQ ID NO: 679472 - DNA, 19 bp, Mus musculus
  siRNA target sequence for Itga3 (NM_013565.2,1320-1338).
ggcagacctgaacaatgat

SEQ ID NO: 679473 - DNA, 19 bp, Mus musculus
  siRNA target sequence for Itga3 (NM_013565.2,1396-1414).
gggggtgccgtctatgtct

SEQ ID NO: 679474 - DNA, 19 bp, Mus musculus
  siRNA target sequence for Itga3 (NM_013565.2,1397-1415).
ggggtgccgtctatgtctt

SEQ ID NO: 679475 - DNA, 19 bp, Mus musculus
  siRNA target sequence for Itga3 (NM_013565.2,1400-1418).
gtgccgtctatgtcttcat

SEQ ID NO: 679476 - DNA, 19 bp, Mus musculus
  siRNA target sequence for Itga3 (NM_013565.2,1403-1421).
ccgtctatgtcttcatgaa

SEQ ID NO: 679477 - DNA, 19 bp, Mus musculus
  siRNA target sequence for Itga3 (NM_013565.2,1431-1449).
cgcatccttccctgatcaa

SEQ ID NO: 679478 - DNA, 19 bp, Mus musculus
  siRNA target sequence for Itga3 (NM_013565.2,1613-1631).
ggcagccccagcagataat

SEQ ID NO: 679479 - DNA, 19 bp, Mus musculus
  siRNA target sequence for Itga3 (NM_013565.2,1769-1787).
ggcctgtcatcaatatcct

SEQ ID NO: 679480 - DNA, 19 bp, Mus musculus
  siRNA target sequence for Itga3 (NM_013565.2,1821-1839).
ggaccctgcgctttgtaca

SEQ ID NO: 679481 - DNA, 19 bp, Mus musculus
  siRNA target sequence for Itga3 (NM_013565.2,2055-2073).
ggacaatgttcgcgataaa

SEQ ID NO: 679482 - DNA, 19 bp, Mus musculus
  siRNA target sequence for Itga3 (NM_013565.2,2086-2104).
gtcattgccatgaactact

SEQ ID NO: 679483 - DNA, 19 bp, Mus musculus
  siRNA target sequence for Itga3 (NM_013565.2,2182-2200).
caggctatggagaatcaca

SEQ ID NO: 679484 - DNA, 19 bp, Mus musculus
  siRNA target sequence for Itga3 (NM_013565.2,2343-2361).
catcaatgtgaccaattca

SEQ ID NO: 679485 - DNA, 19 bp, Mus musculus
  siRNA target sequence for Itga3 (NM_013565.2,2456-2474).
ggacctgccaagctaataa

SEQ ID NO: 679486 - DNA, 19 bp, Mus musculus
  siRNA target sequence for Itga3 (NM_013565.2,2459-2477).
cctgccaagctaataacga

SEQ ID NO: 679487 - DNA, 19 bp, Mus musculus
  siRNA target sequence for Itga3 (NM_013565.2,2493-2511).
gctaggaaaccccttcaaa

SEQ ID NO: 679488 - DNA, 19 bp, Mus musculus
  siRNA target sequence for Itga3 (NM_013565.2,2574-2592).
ggacctcccagtacttctt

SEQ ID NO: 679489 - DNA, 19 bp, Mus musculus
  siRNA target sequence for Itga3 (NM_013565.2,2668-2686).
gcctcgctcagcttaatga

SEQ ID NO: 679490 - DNA, 19 bp, Mus musculus
  siRNA target sequence for Itga3 (NM_013565.2,2669-2687).
cctcgctcagcttaatgaa

SEQ ID NO: 679491 - DNA, 19 bp, Mus musculus
  siRNA target sequence for Itga3 (NM_013565.2,2672-2690).
cgctcagcttaatgaatca

SEQ ID NO: 679492 - DNA, 19 bp, Mus musculus
  siRNA target sequence for Itga3 (NM_013565.2,2673-2691).
gctcagcttaatgaatcat

SEQ ID NO: 679493 - DNA, 19 bp, Mus musculus
  siRNA target sequence for Itga3 (NM_013565.2,2757-2775).
gggaagtcccctgaaatat

SEQ ID NO: 679494 - DNA, 19 bp, Mus musculus
  siRNA target sequence for Itga3 (NM_013565.2,2759-2777).
gaagtcccctgaaatatga

SEQ ID NO: 679495 - DNA, 19 bp, Mus musculus
  siRNA target sequence for Itga3 (NM_013565.2,2838-2856).
ggagtggccctatgaagtt

SEQ ID NO: 679496 - DNA, 19 bp, Mus musculus
  siRNA target sequence for Itga3 (NM_013565.2,2843-2861).
ggccctatgaagttaccaa

SEQ ID NO: 679497 - DNA, 19 bp, Mus musculus
  siRNA target sequence for Itga3 (NM_013565.2,2889-2907).
gatcaccatccatagcaat

SEQ ID NO: 679498 - DNA, 19 bp, Mus musculus
  siRNA target sequence for Itga3 (NM_013565.2,2941-2959).
gtcaaccctctcaacctta

SEQ ID NO: 679499 - DNA, 19 bp, Mus musculus
  siRNA target sequence for Itga3 (NM_013565.2,3205-3223).
gactacaaagactttgaca

SEQ ID NO: 679500 - DNA, 19 bp, Mus musculus
  siRNA target sequence for Itga3 (NM_013565.2,3266-3284).
gcatccctaccatcaacat

SEQ ID NO: 679501 - DNA, 19 bp, Mus musculus
  siRNA target sequence for Itga3 (NM_013565.2,3452-3470).
gcactcgtgccctgtatga

SEQ ID NO: 679502 - DNA, 19 bp, Mus musculus
  siRNA target sequence for Itga3 (NM_013565.2,3458-3476).
gtgccctgtatgaagctaa

SEQ ID NO: 679503 - DNA, 19 bp, Mus musculus
  siRNA target sequence for Itgax (NM_021334.1,169-187).
cagtgtgctccagtatgat

SEQ ID NO: 679504 - DNA, 19 bp, Mus musculus
  siRNA target sequence for Itgax (NM_021334.1,206-224).
ggagcaccaaaggaaataa

SEQ ID NO: 679505 - DNA, 19 bp, Mus musculus
  siRNA target sequence for Itgax (NM_021334.1,304-322).
cccagaggctgtgaacata

SEQ ID NO: 679506 - DNA, 19 bp, Mus musculus
  siRNA target sequence for Itgax (NM_021334.1,391-409).
ccacacatgcagagagaat

SEQ ID NO: 679507 - DNA, 19 bp, Mus musculus
  siRNA target sequence for Itgax (NM_021334.1,543-561).
gttccacagattttgaaaa

SEQ ID NO: 679508 - DNA, 19 bp, Mus musculus
  siRNA target sequence for Itgax (NM_021334.1,565-583).
gctggactttgttaaagct

SEQ ID NO: 679509 - DNA, 19 bp, Mus musculus
  siRNA target sequence for Itgax (NM_021334.1,643-661).
cttccgagtacattttact

SEQ ID NO: 679510 - DNA, 19 bp, Mus musculus
  siRNA target sequence for Itgax (NM_021334.1,679-697).
cacgtcaagccctttaagt

SEQ ID NO: 679511 - DNA, 19 bp, Mus musculus
  siRNA target sequence for Itgax (NM_021334.1,681-699).
cgtcaagccctttaagtct

SEQ ID NO: 679512 - DNA, 19 bp, Mus musculus
  siRNA target sequence for Itgax (NM_021334.1,744-762).
cggctatcaagcatgtcat

SEQ ID NO: 679513 - DNA, 19 bp, Mus musculus
  siRNA target sequence for Itgax (NM_021334.1,745-763).
ggctatcaagcatgtcata

SEQ ID NO: 679514 - DNA, 19 bp, Mus musculus
  siRNA target sequence for Itgax (NM_021334.1,746-764).
gctatcaagcatgtcataa

SEQ ID NO: 679515 - DNA, 19 bp, Mus musculus
  siRNA target sequence for Itgax (NM_021334.1,842-860).
caaggggacaacttgagtt

SEQ ID NO: 679516 - DNA, 19 bp, Mus musculus
  siRNA target sequence for Itgax (NM_021334.1,846-864).
gggacaacttgagttatga

SEQ ID NO: 679517 - DNA, 19 bp, Mus musculus
  siRNA target sequence for Itgax (NM_021334.1,850-868).
caacttgagttatgatagt

SEQ ID NO: 679518 - DNA, 19 bp, Mus musculus
  siRNA target sequence for Itgax (NM_021334.1,887-905).
gctgcaagcatcattcgtt

SEQ ID NO: 679519 - DNA, 19 bp, Mus musculus
  siRNA target sequence for Itgax (NM_021334.1,894-912).
gcatcattcgttatgcaat

SEQ ID NO: 679520 - DNA, 19 bp, Mus musculus
  siRNA target sequence for Itgax (NM_021334.1,895-913).
catcattcgttatgcaatt

SEQ ID NO: 679521 - DNA, 19 bp, Mus musculus
  siRNA target sequence for Itgax (NM_021334.1,915-933).
gggtaggaaaggcctttta

SEQ ID NO: 679522 - DNA, 19 bp, Mus musculus
  siRNA target sequence for Itgax (NM_021334.1,925-943).
ggccttttacaatgaacat

SEQ ID NO: 679523 - DNA, 19 bp, Mus musculus
  siRNA target sequence for Itgax (NM_021334.1,926-944).
gccttttacaatgaacatt

SEQ ID NO: 679524 - DNA, 19 bp, Mus musculus
  siRNA target sequence for Itgax (NM_021334.1,941-959).
cattccaagcaagaattaa

SEQ ID NO: 679525 - DNA, 19 bp, Mus musculus
  siRNA target sequence for Itgax (NM_021334.1,953-971).
gaattaaaggccattgcat

SEQ ID NO: 679526 - DNA, 19 bp, Mus musculus
  siRNA target sequence for Itgax (NM_021334.1,976-994).
gccttcccatgaatacgta

SEQ ID NO: 679527 - DNA, 19 bp, Mus musculus
  siRNA target sequence for Itgax (NM_021334.1,977-995).
ccttcccatgaatacgtat

SEQ ID NO: 679528 - DNA, 19 bp, Mus musculus
  siRNA target sequence for Itgax (NM_021334.1,1891-1909).
gctcaggaccagaccaatt

SEQ ID NO: 679529 - DNA, 19 bp, Mus musculus
  siRNA target sequence for Itgax (NM_021334.1,2011-2029).
cactgtctgccttcatatt

SEQ ID NO: 679530 - DNA, 19 bp, Mus musculus
  siRNA target sequence for Itgax (NM_021334.1,2142-2160).
gggctctgactcgagttaa

SEQ ID NO: 679531 - DNA, 19 bp, Mus musculus
  siRNA target sequence for Itgax (NM_021334.1,2143-2161).
ggctctgactcgagttaaa

SEQ ID NO: 679532 - DNA, 19 bp, Mus musculus
  siRNA target sequence for Itgax (NM_021334.1,2144-2162).
gctctgactcgagttaaaa

SEQ ID NO: 679533 - DNA, 19 bp, Mus musculus
  siRNA target sequence for Itgax (NM_021334.1,2239-2257).
cactcttcgcctcaacttt

SEQ ID NO: 679534 - DNA, 19 bp, Mus musculus
  siRNA target sequence for Itgax (NM_021334.1,2264-2282).
gttggtgtgcccatcagtt

SEQ ID NO: 679535 - DNA, 19 bp, Mus musculus
  siRNA target sequence for Itgax (NM_021334.1,2272-2290).
gcccatcagttccttacaa

SEQ ID NO: 679536 - DNA, 19 bp, Mus musculus
  siRNA target sequence for Itgax (NM_021334.1,2275-2293).
catcagttccttacaaaat

SEQ ID NO: 679537 - DNA, 19 bp, Mus musculus
  siRNA target sequence for Itgax (NM_021334.1,2315-2333).
gatgaccaaacgtacttca

SEQ ID NO: 679538 - DNA, 19 bp, Mus musculus
  siRNA target sequence for Itgax (NM_021334.1,2342-2360).
cttccctttgagaagaact

SEQ ID NO: 679539 - DNA, 19 bp, Mus musculus
  siRNA target sequence for Itgax (NM_021334.1,2379-2397).
gccaggatgaccttagtgt

SEQ ID NO: 679540 - DNA, 19 bp, Mus musculus
  siRNA target sequence for Itgax (NM_021334.1,2519-2537).
cccgtgggtctgtccttta

SEQ ID NO: 679541 - DNA, 19 bp, Mus musculus
  siRNA target sequence for Itgax (NM_021334.1,2696-2714).
ggaggctcacagatgactt

SEQ ID NO: 679542 - DNA, 19 bp, Mus musculus
  siRNA target sequence for Itgax (NM_021334.1,2705-2723).
cagatgacttttttggtaa

SEQ ID NO: 679543 - DNA, 19 bp, Mus musculus
  siRNA target sequence for Itgax (NM_021334.1,2753-2771).
ggggaccggctgcttctaa

SEQ ID NO: 679544 - DNA, 19 bp, Mus musculus
  siRNA target sequence for Itgax (NM_021334.1,2755-2773).
ggaccggctgcttctaaga

SEQ ID NO: 679545 - DNA, 19 bp, Mus musculus
  siRNA target sequence for Itgax (NM_021334.1,2776-2794).
cagagtgggaagtgagaat

SEQ ID NO: 679546 - DNA, 19 bp, Mus musculus
  siRNA target sequence for Itgax (NM_021334.1,2778-2796).
gagtgggaagtgagaataa

SEQ ID NO: 679547 - DNA, 19 bp, Mus musculus
  siRNA target sequence for Itgax (NM_021334.1,2827-2845).
gttggagcttccagtaaaa

SEQ ID NO: 679548 - DNA, 19 bp, Mus musculus
  siRNA target sequence for Itgax (NM_021334.1,2849-2867).
gcggtgtacaccatgatca

SEQ ID NO: 679549 - DNA, 19 bp, Mus musculus
  siRNA target sequence for Itgax (NM_021334.1,2926-2944).
cagtgtggtcgaacataga

SEQ ID NO: 679550 - DNA, 19 bp, Mus musculus
  siRNA target sequence for Itgax (NM_021334.1,2939-2957).
catagattccaggtgaata

SEQ ID NO: 679551 - DNA, 19 bp, Mus musculus
  siRNA target sequence for Itgax (NM_021334.1,3067-3085).
ccaatgctatcggaataga

SEQ ID NO: 679552 - DNA, 19 bp, Mus musculus
  siRNA target sequence for Itgax (NM_021334.1,3439-3457).
ggctatcatcacagctata

SEQ ID NO: 679553 - DNA, 19 bp, Mus musculus
  siRNA target sequence for Itgax (NM_021334.1,3441-3459).
ctatcatcacagctatact

SEQ ID NO: 679554 - DNA, 19 bp, Mus musculus
  siRNA target sequence for Itgax (NM_021334.1,3509-3527).
gcaaatggacagtttgtct

SEQ ID NO: 679555 - DNA, 19 bp, Mus musculus
  siRNA target sequence for Itgb2l (NM_008405.1,235-253).
gactcagttcgctgtgata

SEQ ID NO: 679556 - DNA, 19 bp, Mus musculus
  siRNA target sequence for Itgb2l (NM_008405.1,237-255).
ctcagttcgctgtgataca

SEQ ID NO: 679557 - DNA, 19 bp, Mus musculus
  siRNA target sequence for Itgb2l (NM_008405.1,351-369).
gcagctgtctccacgaaat

SEQ ID NO: 679558 - DNA, 19 bp, Mus musculus
  siRNA target sequence for Itgb2l (NM_008405.1,361-379).
ccacgaaatgtgacagttt

SEQ ID NO: 679559 - DNA, 19 bp, Mus musculus
  siRNA target sequence for Itgb2l (NM_008405.1,389-407).
cgggtcaagcggcaacatt

SEQ ID NO: 679560 - DNA, 19 bp, Mus musculus
  siRNA target sequence for Itgb2l (NM_008405.1,391-409).
ggtcaagcggcaacattca

SEQ ID NO: 679561 - DNA, 19 bp, Mus musculus
  siRNA target sequence for Itgb2l (NM_008405.1,392-410).
gtcaagcggcaacattcaa

SEQ ID NO: 679562 - DNA, 19 bp, Mus musculus
  siRNA target sequence for Itgb2l (NM_008405.1,614-632).
cggactccagccaatttca

SEQ ID NO: 679563 - DNA, 19 bp, Mus musculus
  siRNA target sequence for Itgb2l (NM_008405.1,737-755).
gcaatgggacccgatttct

SEQ ID NO: 679564 - DNA, 19 bp, Mus musculus
  siRNA target sequence for Itgb2l (NM_008405.1,748-766).
cgatttctggtgcttgtta

SEQ ID NO: 679565 - DNA, 19 bp, Mus musculus
  siRNA target sequence for Itgb2l (NM_008405.1,841-859).
ctggacgacggcatgtaca

SEQ ID NO: 679566 - DNA, 19 bp, Mus musculus
  siRNA target sequence for Itgb2l (NM_008405.1,950-968).
caaggatggtgaaaaccta

SEQ ID NO: 679567 - DNA, 19 bp, Mus musculus
  siRNA target sequence for Itgb2l (NM_008405.1,1047-1065).
caggaacgcctacagtaaa

SEQ ID NO: 679568 - DNA, 19 bp, Mus musculus
  siRNA target sequence for Itgb2l (NM_008405.1,1049-1067).
ggaacgcctacagtaaact

SEQ ID NO: 679569 - DNA, 19 bp, Mus musculus
  siRNA target sequence for Itgb2l (NM_008405.1,1178-1196).
gcagtggtgtacagatcaa

SEQ ID NO: 679570 - DNA, 19 bp, Mus musculus
  siRNA target sequence for Itgb2l (NM_008405.1,1179-1197).
cagtggtgtacagatcaat

SEQ ID NO: 679571 - DNA, 19 bp, Mus musculus
  siRNA target sequence for Itgb2l (NM_008405.1,1204-1222).
gtcaccttccaggttaaca

SEQ ID NO: 679572 - DNA, 19 bp, Mus musculus
  siRNA target sequence for Itgb2l (NM_008405.1,1499-1517).
cggggctgggagactgtat

SEQ ID NO: 679573 - DNA, 19 bp, Mus musculus
  siRNA target sequence for Itgb2l (NM_008405.1,1759-1777).
ggtcgatgctactgtaaca

SEQ ID NO: 679574 - DNA, 19 bp, Mus musculus
  siRNA target sequence for Itgb2l (NM_008405.1,1762-1780).
cgatgctactgtaacagat

SEQ ID NO: 679575 - DNA, 19 bp, Mus musculus
  siRNA target sequence for Itgb2l (NM_008405.1,1821-1839).
gcgtcctggctatttccat

SEQ ID NO: 679576 - DNA, 19 bp, Mus musculus
  siRNA target sequence for Itgb2l (NM_008405.1,1840-1858).
cgctgctccgagtactact

SEQ ID NO: 679577 - DNA, 19 bp, Mus musculus
  siRNA target sequence for Itgb2l (NM_008405.1,1875-1893).
gaaagacaacagtgcaata

SEQ ID NO: 679578 - DNA, 19 bp, Mus musculus
  siRNA target sequence for Itgb2l (NM_008405.1,1982-2000).
ggacaacctacactctata

SEQ ID NO: 679579 - DNA, 19 bp, Mus musculus
  siRNA target sequence for Itgb2l (NM_008405.1,1983-2001).
gacaacctacactctatat

SEQ ID NO: 679580 - DNA, 19 bp, Mus musculus
  siRNA target sequence for Itgb2l (NM_008405.1,1985-2003).
caacctacactctatatca

SEQ ID NO: 679581 - DNA, 19 bp, Mus musculus
  siRNA target sequence for Itgb2l (NM_008405.1,2008-2026).
gaccagagtgacatcaatt

SEQ ID NO: 679582 - DNA, 19 bp, Mus musculus
  siRNA target sequence for Itgb2l (NM_008405.1,2017-2035).
gacatcaattccatctaca

SEQ ID NO: 679583 - DNA, 19 bp, Mus musculus
  siRNA target sequence for Itgb2l (NM_008405.1,2056-2074).
gcagaaatctccaatacca

SEQ ID NO: 679584 - DNA, 19 bp, Mus musculus
  siRNA target sequence for Rqcd1 (NM_021383.3,717-735).
gcacacatcccactctttt

SEQ ID NO: 679585 - DNA, 19 bp, Mus musculus
  siRNA target sequence for Rqcd1 (NM_021383.3,831-849).
gagcaagaagtaatcaact

SEQ ID NO: 679586 - DNA, 19 bp, Mus musculus
  siRNA target sequence for Rqcd1 (NM_021383.3,833-851).
gcaagaagtaatcaacttt

SEQ ID NO: 679587 - DNA, 19 bp, Mus musculus
  siRNA target sequence for Rqcd1 (NM_021383.3,834-852).
caagaagtaatcaactttt

SEQ ID NO: 679588 - DNA, 19 bp, Mus musculus
  siRNA target sequence for Rqcd1 (NM_021383.3,837-855).
gaagtaatcaactttttat

SEQ ID NO: 679589 - DNA, 19 bp, Mus musculus
  siRNA target sequence for Rqcd1 (NM_021383.3,898-916).
ctggaagtgaactctctaa

SEQ ID NO: 679590 - DNA, 19 bp, Mus musculus
  siRNA target sequence for Rqcd1 (NM_021383.3,900-918).
ggaagtgaactctctaaaa

SEQ ID NO: 679591 - DNA, 19 bp, Mus musculus
  siRNA target sequence for Rqcd1 (NM_021383.3,919-937).
cggttgccacattcatact

SEQ ID NO: 679592 - DNA, 19 bp, Mus musculus
  siRNA target sequence for Rqcd1 (NM_021383.3,950-968).
cttggatgacactggttta

SEQ ID NO: 679593 - DNA, 19 bp, Mus musculus
  siRNA target sequence for Rqcd1 (NM_021383.3,953-971).
ggatgacactggtttagct

SEQ ID NO: 679594 - DNA, 19 bp, Mus musculus
  siRNA target sequence for Rqcd1 (NM_021383.3,954-972).
gatgacactggtttagctt

SEQ ID NO: 679595 - DNA, 19 bp, Mus musculus
  siRNA target sequence for Rqcd1 (NM_021383.3,964-982).
gtttagcttatatatgtca

SEQ ID NO: 679596 - DNA, 19 bp, Mus musculus
  siRNA target sequence for Rqcd1 (NM_021383.3,981-999).
cagacatatgagcgttttt

SEQ ID NO: 679597 - DNA, 19 bp, Mus musculus
  siRNA target sequence for Rqcd1 (NM_021383.3,1000-1018).
cccatgttgccatgatctt

SEQ ID NO: 679598 - DNA, 19 bp, Mus musculus
  siRNA target sequence for Rqcd1 (NM_021383.3,1008-1026).
gccatgatcttgggtaaaa

SEQ ID NO: 679599 - DNA, 19 bp, Mus musculus
  siRNA target sequence for Rqcd1 (NM_021383.3,1028-1046).
ggtcctgcagctatccaaa

SEQ ID NO: 679600 - DNA, 19 bp, Mus musculus
  siRNA target sequence for Rqcd1 (NM_021383.3,1064-1082).
gctgaagcacgtagtaaga

SEQ ID NO: 679601 - DNA, 19 bp, Mus musculus
  siRNA target sequence for Rqcd1 (NM_021383.3,1065-1083).
ctgaagcacgtagtaagat

SEQ ID NO: 679602 - DNA, 19 bp, Mus musculus
  siRNA target sequence for Rqcd1 (NM_021383.3,1067-1085).
gaagcacgtagtaagatgt

SEQ ID NO: 679603 - DNA, 19 bp, Mus musculus
  siRNA target sequence for Rqcd1 (NM_021383.3,1073-1091).
cgtagtaagatgttacctt

SEQ ID NO: 679604 - DNA, 19 bp, Mus musculus
  siRNA target sequence for Rqcd1 (NM_021383.3,1088-1106).
ccttcgactctcagataat

SEQ ID NO: 679605 - DNA, 19 bp, Mus musculus
  siRNA target sequence for Rqcd1 (NM_021383.3,1162-1180).
cctttgcccaggtgctaaa

SEQ ID NO: 679606 - DNA, 19 bp, Mus musculus
  siRNA target sequence for Rqcd1 (NM_021383.3,1163-1181).
ctttgcccaggtgctaaaa

SEQ ID NO: 679607 - DNA, 19 bp, Mus musculus
  siRNA target sequence for Rsu1 (NM_009105.2,156-174).
ggggtatctccagtatgtt

SEQ ID NO: 679608 - DNA, 19 bp, Mus musculus
  siRNA target sequence for Rsu1 (NM_009105.2,226-244).
ccacaacaagctaacaact

SEQ ID NO: 679609 - DNA, 19 bp, Mus musculus
  siRNA target sequence for Rsu1 (NM_009105.2,252-270).
caaatgtagcggaactgaa

SEQ ID NO: 679610 - DNA, 19 bp, Mus musculus
  siRNA target sequence for Rsu1 (NM_009105.2,281-299).
gtactaaacttcttcaaca

SEQ ID NO: 679611 - DNA, 19 bp, Mus musculus
  siRNA target sequence for Rsu1 (NM_009105.2,362-380).
ggcatgaataggttgaaca

SEQ ID NO: 679612 - DNA, 19 bp, Mus musculus
  siRNA target sequence for Rsu1 (NM_009105.2,413-431).
ctggaggtcctggacttaa

SEQ ID NO: 679613 - DNA, 19 bp, Mus musculus
  siRNA target sequence for Rsu1 (NM_009105.2,416-434).
gaggtcctggacttaactt

SEQ ID NO: 679614 - DNA, 19 bp, Mus musculus
  siRNA target sequence for Rsu1 (NM_009105.2,419-437).
gtcctggacttaacttaca

SEQ ID NO: 679615 - DNA, 19 bp, Mus musculus
  siRNA target sequence for Rsu1 (NM_009105.2,456-474).
ctcttccgggaaacttctt

SEQ ID NO: 679616 - DNA, 19 bp, Mus musculus
  siRNA target sequence for Rsu1 (NM_009105.2,458-476).
cttccgggaaacttcttct

SEQ ID NO: 679617 - DNA, 19 bp, Mus musculus
  siRNA target sequence for Rsu1 (NM_009105.2,484-502).
caccctgcgtgcactctat

SEQ ID NO: 679618 - DNA, 19 bp, Mus musculus
  siRNA target sequence for Rsu1 (NM_009105.2,486-504).
ccctgcgtgcactctatct

SEQ ID NO: 679619 - DNA, 19 bp, Mus musculus
  siRNA target sequence for Rsu1 (NM_009105.2,487-505).
cctgcgtgcactctatcta

SEQ ID NO: 679620 - DNA, 19 bp, Mus musculus
  siRNA target sequence for Rsu1 (NM_009105.2,488-506).
ctgcgtgcactctatctaa

SEQ ID NO: 679621 - DNA, 19 bp, Mus musculus
  siRNA target sequence for Rsu1 (NM_009105.2,507-525).
gcgacaacgattttgaaat

SEQ ID NO: 679622 - DNA, 19 bp, Mus musculus
  siRNA target sequence for Rsu1 (NM_009105.2,779-797).
gttttcgaatatattcgtt

SEQ ID NO: 679623 - DNA, 19 bp, Mus musculus
  siRNA target sequence for Rsu1 (NM_009105.2,849-867).
ctccaaagaagaataacga

SEQ ID NO: 679624 - DNA, 19 bp, Mus musculus
  siRNA target sequence for Rsu1 (NM_009105.2,856-874).
gaagaataacgacaaatca

SEQ ID NO: 679625 - DNA, 19 bp, Mus musculus
  siRNA target sequence for Rsu1 (NM_009105.2,894-912).
ccctagcagccaagaacaa

SEQ ID NO: 679626 - DNA, 19 bp, Mus musculus
  siRNA target sequence for Azi2 (NM_013727.2,277-295).
ggacacgctagtagaagat

SEQ ID NO: 679627 - DNA, 19 bp, Mus musculus
  siRNA target sequence for Azi2 (NM_013727.2,282-300).
cgctagtagaagatgacat

SEQ ID NO: 679628 - DNA, 19 bp, Mus musculus
  siRNA target sequence for Azi2 (NM_013727.2,391-409).
cgcactggtcactgcttat

SEQ ID NO: 679629 - DNA, 19 bp, Mus musculus
  siRNA target sequence for Azi2 (NM_013727.2,525-543).
ctgtgggccgagaacaagt

SEQ ID NO: 679630 - DNA, 19 bp, Mus musculus
  siRNA target sequence for Azi2 (NM_013727.2,529-547).
gggccgagaacaagtgaat

SEQ ID NO: 679631 - DNA, 19 bp, Mus musculus
  siRNA target sequence for Azi2 (NM_013727.2,530-548).
ggccgagaacaagtgaata

SEQ ID NO: 679632 - DNA, 19 bp, Mus musculus
  siRNA target sequence for Azi2 (NM_013727.2,550-568).
ggcctatcatgcatatcgt

SEQ ID NO: 679633 - DNA, 19 bp, Mus musculus
  siRNA target sequence for Azi2 (NM_013727.2,561-579).
catatcgtgaggtttgcat

SEQ ID NO: 679634 - DNA, 19 bp, Mus musculus
  siRNA target sequence for Azi2 (NM_013727.2,566-584).
cgtgaggtttgcattgata

SEQ ID NO: 679635 - DNA, 19 bp, Mus musculus
  siRNA target sequence for Azi2 (NM_013727.2,576-594).
gcattgatagagacaatct

SEQ ID NO: 679636 - DNA, 19 bp, Mus musculus
  siRNA target sequence for Azi2 (NM_013727.2,623-641).
gacaactctgaatctttga

SEQ ID NO: 679637 - DNA, 19 bp, Mus musculus
  siRNA target sequence for Azi2 (NM_013727.2,713-731).
caggtgatgaggaatttaa

SEQ ID NO: 679638 - DNA, 19 bp, Mus musculus
  siRNA target sequence for Azi2 (NM_013727.2,955-973).
ccacagtgataatatgcaa

SEQ ID NO: 679639 - DNA, 19 bp, Mus musculus
  siRNA target sequence for Azi2 (NM_013727.2,994-1012).
gagggagatgtctaactta

SEQ ID NO: 679640 - DNA, 19 bp, Mus musculus
  siRNA target sequence for Azi2 (NM_013727.2,996-1014).
gggagatgtctaacttaca

SEQ ID NO: 679641 - DNA, 19 bp, Mus musculus
  siRNA target sequence for Azi2 (NM_013727.2,1028-1046).
gtgcaagcagaactactaa

SEQ ID NO: 679642 - DNA, 19 bp, Mus musculus
  siRNA target sequence for Azi2 (NM_013727.2,1113-1131).
ggagagacagcacgaaatt

SEQ ID NO: 679643 - DNA, 19 bp, Mus musculus
  siRNA target sequence for Azi2 (NM_013727.2,1116-1134).
gagacagcacgaaattgca

SEQ ID NO: 679644 - DNA, 19 bp, Mus musculus
  siRNA target sequence for Azi2 (NM_013727.2,1140-1158).
caaattttactgcaactta

SEQ ID NO: 679645 - DNA, 19 bp, Mus musculus
  siRNA target sequence for Azi2 (NM_013727.2,1321-1339).
cagctcctatgggagaaat

SEQ ID NO: 679646 - DNA, 19 bp, Mus musculus
  siRNA target sequence for Azi2 (NM_013727.2,1366-1384).
cccaagccctcctaaatca

SEQ ID NO: 679647 - DNA, 19 bp, Mus musculus
  siRNA target sequence for Azi2 (NM_013727.2,1471-1489).
gaactgcctttacaaaagt

SEQ ID NO: 679648 - DNA, 19 bp, Mus musculus
  siRNA target sequence for Dscr1 (NM_019466.2,87-105).
gggactttagctacaattt

SEQ ID NO: 679649 - DNA, 19 bp, Mus musculus
  siRNA target sequence for Dscr1 (NM_019466.2,88-106).
ggactttagctacaatttt

SEQ ID NO: 679650 - DNA, 19 bp, Mus musculus
  siRNA target sequence for Dscr1 (NM_019466.2,89-107).
gactttagctacaatttta

SEQ ID NO: 679651 - DNA, 19 bp, Mus musculus
  siRNA target sequence for Dscr1 (NM_019466.2,123-141).
gtgtggcaaacgatgatgt

SEQ ID NO: 679652 - DNA, 19 bp, Mus musculus
  siRNA target sequence for Dscr1 (NM_019466.2,233-251).
cgtgtccggataaacttca

SEQ ID NO: 679653 - DNA, 19 bp, Mus musculus
  siRNA target sequence for Dscr1 (NM_019466.2,369-387).
cgcccaatcccgacaaaca

SEQ ID NO: 679654 - DNA, 19 bp, Mus musculus
  siRNA target sequence for Dscr1 (NM_019466.2,372-390).
ccaatcccgacaaacagtt

SEQ ID NO: 679655 - DNA, 19 bp, Mus musculus
  siRNA target sequence for Dscr1 (NM_019466.2,417-435).
ccgttggctggaaacaagt

SEQ ID NO: 679656 - DNA, 19 bp, Mus musculus
  siRNA target sequence for Dscr1 (NM_019466.2,418-436).
cgttggctggaaacaagta

SEQ ID NO: 679657 - DNA, 19 bp, Mus musculus
  siRNA target sequence for Dscr1 (NM_019466.2,424-442).
ctggaaacaagtagaagat

SEQ ID NO: 679658 - DNA, 19 bp, Mus musculus
  siRNA target sequence for Dscr1 (NM_019466.2,440-458).
gatgccacccccgtcataa

SEQ ID NO: 679659 - DNA, 19 bp, Mus musculus
  siRNA target sequence for Dscr1 (NM_019466.2,447-465).
cccccgtcataaattacga

SEQ ID NO: 679660 - DNA, 19 bp, Mus musculus
  siRNA target sequence for Dscr1 (NM_019466.2,448-466).
ccccgtcataaattacgat

SEQ ID NO: 679661 - DNA, 19 bp, Mus musculus
  siRNA target sequence for Dscr1 (NM_019466.2,452-470).
gtcataaattacgatcttt

SEQ ID NO: 679662 - DNA, 19 bp, Mus musculus
  siRNA target sequence for Dscr1 (NM_019466.2,612-630).
gacccaagcccaaaatcat

SEQ ID NO: 679663 - DNA, 19 bp, Mus musculus
  siRNA target sequence for Dscr1l1 (NM_030598.1,117-135).
ccaatcaggaggttaagga

SEQ ID NO: 679664 - DNA, 19 bp, Mus musculus
  siRNA target sequence for Dscr1l1 (NM_030598.1,151-169).
gttccggacctatgatgaa

SEQ ID NO: 679665 - DNA, 19 bp, Mus musculus
  siRNA target sequence for Dscr1l1 (NM_030598.1,178-196).
gttccagctgtttaagagt

SEQ ID NO: 679666 - DNA, 19 bp, Mus musculus
  siRNA target sequence for Dscr1l1 (NM_030598.1,195-213).
gtttccgacgggttcgaat

SEQ ID NO: 679667 - DNA, 19 bp, Mus musculus
  siRNA target sequence for Dscr1l1 (NM_030598.1,199-217).
ccgacgggttcgaataaat

SEQ ID NO: 679668 - DNA, 19 bp, Mus musculus
  siRNA target sequence for Dscr1l1 (NM_030598.1,200-218).
cgacgggttcgaataaatt

SEQ ID NO: 679669 - DNA, 19 bp, Mus musculus
  siRNA target sequence for Dscr1l1 (NM_030598.1,201-219).
gacgggttcgaataaattt

SEQ ID NO: 679670 - DNA, 19 bp, Mus musculus
  siRNA target sequence for Dscr1l1 (NM_030598.1,203-221).
cgggttcgaataaatttca

SEQ ID NO: 679671 - DNA, 19 bp, Mus musculus
  siRNA target sequence for Dscr1l1 (NM_030598.1,246-264).
cccggatagagcttcatga

SEQ ID NO: 679672 - DNA, 19 bp, Mus musculus
  siRNA target sequence for Dscr1l1 (NM_030598.1,376-394).
catctcacccccttcatct

SEQ ID NO: 679673 - DNA, 19 bp, Mus musculus
  siRNA target sequence for Dscr1l1 (NM_030598.1,437-455).
ctcaactatgaccttcttt

SEQ ID NO: 679674 - DNA, 19 bp, Mus musculus
  siRNA target sequence for Dscr1l2 (NM_022980.2,17-35).
ctccgagacagcctgaaat

SEQ ID NO: 679675 - DNA, 19 bp, Mus musculus
  siRNA target sequence for Dscr1l2 (NM_022980.2,20-38).
cgagacagcctgaaatctt

SEQ ID NO: 679676 - DNA, 19 bp, Mus musculus
  siRNA target sequence for Dscr1l2 (NM_022980.2,91-109).
gatggtcttcggtgaaaat

SEQ ID NO: 679677 - DNA, 19 bp, Mus musculus
  siRNA target sequence for Dscr1l2 (NM_022980.2,354-372).
gacggaagctgaagcttta

SEQ ID NO: 679678 - DNA, 19 bp, Mus musculus
  siRNA target sequence for Dscr1l2 (NM_022980.2,405-423).
gggacaagtcctacttact

SEQ ID NO: 679679 - DNA, 19 bp, Mus musculus
  siRNA target sequence for Dscr1l2 (NM_022980.2,500-518).
gcgatgccagtgatcaact

SEQ ID NO: 679680 - DNA, 19 bp, Mus musculus
  siRNA target sequence for Dscr1l2 (NM_022980.2,501-519).
cgatgccagtgatcaacta

SEQ ID NO: 679681 - DNA, 19 bp, Mus musculus
  siRNA target sequence for Dscr1l2 (NM_022980.2,549-567).
gcccaggggagaaatacga

SEQ ID NO: 679682 - DNA, 19 bp, Mus musculus
  siRNA target sequence for Dscr1l2 (NM_022980.2,550-568).
cccaggggagaaatacgaa

SEQ ID NO: 679683 - DNA, 19 bp, Mus musculus
  siRNA target sequence for Dscr1l2 (NM_022980.2,613-631).
ctgtgagagcgaaactgaa

SEQ ID NO: 679684 - DNA, 19 bp, Mus musculus
  siRNA target sequence for 1110003B01Rik (NM_026131.1,220-238).
gggagactgggtactgaat

SEQ ID NO: 679685 - DNA, 19 bp, Mus musculus
  siRNA target sequence for 1110003B01Rik (NM_026131.1,222-240).
gagactgggtactgaatat

SEQ ID NO: 679686 - DNA, 19 bp, Mus musculus
  siRNA target sequence for 1110003B01Rik (NM_026131.1,521-539).
gacccggatgaggaattca

SEQ ID NO: 679687 - DNA, 19 bp, Mus musculus
  siRNA target sequence for 1110003B01Rik (NM_026131.1,544-562).
gaagtcaagggaaaagtat

SEQ ID NO: 679688 - DNA, 19 bp, Mus musculus
  siRNA target sequence for 1110054M18Rik (NM_175132.2,185-203).
ccgaacagaggaaaccttt

SEQ ID NO: 679689 - DNA, 19 bp, Mus musculus
  siRNA target sequence for 1110054M18Rik (NM_175132.2,186-204).
cgaacagaggaaaccttta

SEQ ID NO: 679690 - DNA, 19 bp, Mus musculus
  siRNA target sequence for 1110054M18Rik (NM_175132.2,265-283).
gcgatcaacggggtttctt

SEQ ID NO: 679691 - DNA, 19 bp, Mus musculus
  siRNA target sequence for 1110054M18Rik (NM_175132.2,324-342).
cgcctcagggcgtcaactt

SEQ ID NO: 679692 - DNA, 19 bp, Mus musculus
  siRNA target sequence for 1110054M18Rik (NM_175132.2,494-512).
cccctgacagcgaagctta

SEQ ID NO: 679693 - DNA, 19 bp, Mus musculus
  siRNA target sequence for 1110054M18Rik (NM_175132.2,497-515).
ctgacagcgaagcttacta

SEQ ID NO: 679694 - DNA, 19 bp, Mus musculus
  siRNA target sequence for 1110054M18Rik (NM_175132.2,522-540).
gacagatagtgatgttgat

SEQ ID NO: 679695 - DNA, 19 bp, Mus musculus
  siRNA target sequence for 1110054M18Rik (NM_175132.2,743-761).
cagcagaggcacttctgtt

SEQ ID NO: 679696 - DNA, 19 bp, Mus musculus
  siRNA target sequence for 1110054M18Rik (NM_175132.2,1006-1024).
cggcagagagccaagaagt

SEQ ID NO: 679697 - DNA, 19 bp, Mus musculus
  siRNA target sequence for 1110054M18Rik (NM_175132.2,1023-1041).
gtacaccctagtgagtttt

SEQ ID NO: 679698 - DNA, 19 bp, Mus musculus
  siRNA target sequence for 1110054M18Rik (NM_175132.2,1131-1149).
ccgcagccttactaatcaa

SEQ ID NO: 679699 - DNA, 19 bp, Mus musculus
  siRNA target sequence for 1110054M18Rik (NM_175132.2,1132-1150).
cgcagccttactaatcaat

SEQ ID NO: 679700 - DNA, 19 bp, Mus musculus
  siRNA target sequence for 1110054M18Rik (NM_175132.2,1155-1173).
ctgggacagcccctatcta

SEQ ID NO: 679701 - DNA, 19 bp, Mus musculus
  siRNA target sequence for 1110054M18Rik (NM_175132.2,1157-1175).
gggacagcccctatctaga

SEQ ID NO: 679702 - DNA, 19 bp, Mus musculus
  siRNA target sequence for 1110054M18Rik (NM_175132.2,1262-1280).
gggtccagctctttgaaca

SEQ ID NO: 679703 - DNA, 19 bp, Mus musculus
  siRNA target sequence for 1110054M18Rik (NM_175132.2,1328-1346).
gcccagcagctatgcttaa

SEQ ID NO: 679704 - DNA, 19 bp, Mus musculus
  siRNA target sequence for 1110054M18Rik (NM_175132.2,1472-1490).
ccatccctgcaccaagtat

SEQ ID NO: 679705 - DNA, 19 bp, Mus musculus
  siRNA target sequence for 1110054M18Rik (NM_175132.2,1480-1498).
gcaccaagtatctttaaca

SEQ ID NO: 679706 - DNA, 19 bp, Mus musculus
  siRNA target sequence for 1110054M18Rik (NM_175132.2,1509-1527).
gccttttaccccaggttta

SEQ ID NO: 679707 - DNA, 19 bp, Mus musculus
  siRNA target sequence for 1110054M18Rik (NM_175132.2,1744-1762).
gctaccagttccttgtaca

SEQ ID NO: 679708 - DNA, 19 bp, Mus musculus
  siRNA target sequence for 1110054M18Rik (NM_175132.2,1857-1875).
cttgtccactccactaaga

SEQ ID NO: 679709 - DNA, 19 bp, Mus musculus
  siRNA target sequence for 1110054M18Rik (NM_175132.2,1863-1881).
cactccactaagaaactct

SEQ ID NO: 679710 - DNA, 19 bp, Mus musculus
  siRNA target sequence for 1110054M18Rik (NM_175132.2,2143-2161).
gctgaagcctgtaacttca

SEQ ID NO: 679711 - DNA, 19 bp, Mus musculus
  siRNA target sequence for 1110054M18Rik (NM_175132.2,2170-2188).
ctagggggcaggagttaca

SEQ ID NO: 679712 - DNA, 19 bp, Mus musculus
  siRNA target sequence for 1110054M18Rik (NM_175132.2,2190-2208).
gaccttgcctcaagtatca

SEQ ID NO: 679713 - DNA, 19 bp, Mus musculus
  siRNA target sequence for 1110054M18Rik (NM_175132.2,2247-2265).
ccctacaacgcctaagact

SEQ ID NO: 679714 - DNA, 19 bp, Mus musculus
  siRNA target sequence for 1110054M18Rik (NM_175132.2,2304-2322).
ccttgatgggctagtgaat

SEQ ID NO: 679715 - DNA, 19 bp, Mus musculus
  siRNA target sequence for 1110054M18Rik (NM_175132.2,2418-2436).
cgtggtggaagctacatct

SEQ ID NO: 679716 - DNA, 19 bp, Mus musculus
  siRNA target sequence for 1110054M18Rik (NM_175132.2,2531-2549).
cacctcctattgcttacaa

SEQ ID NO: 679717 - DNA, 19 bp, Mus musculus
  siRNA target sequence for 1110054M18Rik (NM_175132.2,2582-2600).
cccgaactctccccaataa

SEQ ID NO: 679718 - DNA, 19 bp, Mus musculus
  siRNA target sequence for 1110054M18Rik (NM_175132.2,2627-2645).
cccctaagcagggtatcaa

SEQ ID NO: 679719 - DNA, 19 bp, Mus musculus
  siRNA target sequence for 1110054M18Rik (NM_175132.2,2661-2679).
gcgacatcagccataccaa

SEQ ID NO: 679720 - DNA, 19 bp, Mus musculus
  siRNA target sequence for 1110054M18Rik (NM_175132.2,2680-2698).
cttaaaacggccatgtttt

SEQ ID NO: 679721 - DNA, 19 bp, Mus musculus
  siRNA target sequence for 1300011C24Rik (NM_029564.1,549-567).
gactcggcagtctctacaa

SEQ ID NO: 679722 - DNA, 19 bp, Mus musculus
  siRNA target sequence for 1300011C24Rik (NM_029564.1,551-569).
ctcggcagtctctacaaaa

SEQ ID NO: 679723 - DNA, 19 bp, Mus musculus
  siRNA target sequence for 1300014I06Rik (NM_025831.2,268-286).
gcacgtcgctcgtgaacat

SEQ ID NO: 679724 - DNA, 19 bp, Mus musculus
  siRNA target sequence for 1300014I06Rik (NM_025831.2,271-289).
cgtcgctcgtgaacatgtt

SEQ ID NO: 679725 - DNA, 19 bp, Mus musculus
  siRNA target sequence for 1300014I06Rik (NM_025831.2,515-533).
caagggtgcacatgacata

SEQ ID NO: 679726 - DNA, 19 bp, Mus musculus
  siRNA target sequence for 1300014I06Rik (NM_025831.2,519-537).
ggtgcacatgacatagaga

SEQ ID NO: 679727 - DNA, 19 bp, Mus musculus
  siRNA target sequence for 1300014I06Rik (NM_025831.2,645-663).
caggtgttaaaaaatgata

SEQ ID NO: 679728 - DNA, 19 bp, Mus musculus
  siRNA target sequence for 1300014I06Rik (NM_025831.2,677-695).
ccaacccagctttcaaagt

SEQ ID NO: 679729 - DNA, 19 bp, Mus musculus
  siRNA target sequence for 1700026N20Rik (NM_023543.1,244-262).
gcctgttcacagatctctt

SEQ ID NO: 679730 - DNA, 19 bp, Mus musculus
  siRNA target sequence for 1700026N20Rik (NM_023543.1,425-443).
ggttaaacgtacacaaaca

SEQ ID NO: 679731 - DNA, 19 bp, Mus musculus
  siRNA target sequence for 1700026N20Rik (NM_023543.1,550-568).
cccatggtggtggacatat

SEQ ID NO: 679732 - DNA, 19 bp, Mus musculus
  siRNA target sequence for 1700026N20Rik (NM_023543.1,600-618).
gtcagaagggctttacaga

SEQ ID NO: 679733 - DNA, 19 bp, Mus musculus
  siRNA target sequence for 1700026N20Rik (NM_023543.1,696-714).
caacatctacccagacata

SEQ ID NO: 679734 - DNA, 19 bp, Mus musculus
  siRNA target sequence for 1700026N20Rik (NM_023543.1,728-746).
gagccctgaaactgtactt

SEQ ID NO: 679735 - DNA, 19 bp, Mus musculus
  siRNA target sequence for 1700026N20Rik (NM_023543.1,757-775).
cccatccctatcatcacat

SEQ ID NO: 679736 - DNA, 19 bp, Mus musculus
  siRNA target sequence for 1700026N20Rik (NM_023543.1,759-777).
catccctatcatcacatat

SEQ ID NO: 679737 - DNA, 19 bp, Mus musculus
  siRNA target sequence for 1700026N20Rik (NM_023543.1,780-798).
cacctactccaaatttata

SEQ ID NO: 679738 - DNA, 19 bp, Mus musculus
  siRNA target sequence for 1700026N20Rik (NM_023543.1,782-800).
cctactccaaatttataga

SEQ ID NO: 679739 - DNA, 19 bp, Mus musculus
  siRNA target sequence for 1700026N20Rik (NM_023543.1,895-913).
ctgatgatccacctgaaaa

SEQ ID NO: 679740 - DNA, 19 bp, Mus musculus
  siRNA target sequence for 1700026N20Rik (NM_023543.1,909-927).
gaaaaaggttaccatgaat

SEQ ID NO: 679741 - DNA, 19 bp, Mus musculus
  siRNA target sequence for 1700026N20Rik (NM_023543.1,1021-1039).
catgacatgcggtaccaaa

SEQ ID NO: 679742 - DNA, 19 bp, Mus musculus
  siRNA target sequence for 1700026N20Rik (NM_023543.1,1042-1060).
ctgatcgtgcagattttaa

SEQ ID NO: 679743 - DNA, 19 bp, Mus musculus
  siRNA target sequence for 1700026N20Rik (NM_023543.1,1044-1062).
gatcgtgcagattttaata

SEQ ID NO: 679744 - DNA, 19 bp, Mus musculus
  siRNA target sequence for 2200002N01Rik (NM_016867.1,241-259).
cgcgccatccgagatctta

SEQ ID NO: 679745 - DNA, 19 bp, Mus musculus
  siRNA target sequence for 2200002N01Rik (NM_016867.1,242-260).
gcgccatccgagatcttat

SEQ ID NO: 679746 - DNA, 19 bp, Mus musculus
  siRNA target sequence for 2200002N01Rik (NM_016867.1,243-261).
cgccatccgagatcttatt

SEQ ID NO: 679747 - DNA, 19 bp, Mus musculus
  siRNA target sequence for 2200002N01Rik (NM_016867.1,416-434).
ggcgtgggctatgctttta

SEQ ID NO: 679748 - DNA, 19 bp, Mus musculus
  siRNA target sequence for 2200002N01Rik (NM_016867.1,417-435).
gcgtgggctatgcttttat

SEQ ID NO: 679749 - DNA, 19 bp, Mus musculus
  siRNA target sequence for 2200002N01Rik (NM_016867.1,419-437).
gtgggctatgcttttatca

SEQ ID NO: 679750 - DNA, 19 bp, Mus musculus
  siRNA target sequence for 2200002N01Rik (NM_016867.1,422-440).
ggctatgcttttatcaaga

SEQ ID NO: 679751 - DNA, 19 bp, Mus musculus
  siRNA target sequence for 2200002N01Rik (NM_016867.1,483-501).
gtgtgggggatcatatcga

SEQ ID NO: 679752 - DNA, 19 bp, Mus musculus
  siRNA target sequence for 2200002N01Rik (NM_016867.1,485-503).
gtgggggatcatatcgaat

SEQ ID NO: 679753 - DNA, 19 bp, Mus musculus
  siRNA target sequence for 2200002N01Rik (NM_016867.1,488-506).
ggggatcatatcgaatgta

SEQ ID NO: 679754 - DNA, 19 bp, Mus musculus
  siRNA target sequence for 2200002N01Rik (NM_016867.1,489-507).
gggatcatatcgaatgtat

SEQ ID NO: 679755 - DNA, 19 bp, Mus musculus
  siRNA target sequence for 2200002N01Rik (NM_016867.1,490-508).
ggatcatatcgaatgtata

SEQ ID NO: 679756 - DNA, 19 bp, Mus musculus
  siRNA target sequence for 2200002N01Rik (NM_016867.1,491-509).
gatcatatcgaatgtataa

SEQ ID NO: 679757 - DNA, 19 bp, Mus musculus
  siRNA target sequence for 2200002N01Rik (NM_016867.1,504-522).
gtataaacggagaaaatat

SEQ ID NO: 679758 - DNA, 19 bp, Mus musculus
  siRNA target sequence for 2200002N01Rik (NM_016867.1,528-546).
ggtggcgtcactttgaagt

SEQ ID NO: 679759 - DNA, 19 bp, Mus musculus
  siRNA target sequence for 2200002N01Rik (NM_016867.1,542-560).
gaagtcgctaagaagttaa

SEQ ID NO: 679760 - DNA, 19 bp, Mus musculus
  siRNA target sequence for 2200002N01Rik (NM_016867.1,610-628).
gaaggcttttgaaatagga

SEQ ID NO: 679761 - DNA, 19 bp, Mus musculus
  siRNA target sequence for 2200002N01Rik (NM_016867.1,634-652).
gtcgaaagccggaaagaca

SEQ ID NO: 679762 - DNA, 19 bp, Mus musculus
  siRNA target sequence for 2200002N01Rik (NM_016867.1,685-703).
cctccgtctgagatcgaaa

SEQ ID NO: 679763 - DNA, 19 bp, Mus musculus
  siRNA target sequence for 2200002N01Rik (NM_016867.1,750-768).
caatcggaaaggttgatga

SEQ ID NO: 679764 - DNA, 19 bp, Mus musculus
  siRNA target sequence for 2200002N01Rik (NM_016867.1,794-812).
cgagatattgacttagcta

SEQ ID NO: 679765 - DNA, 19 bp, Mus musculus
  siRNA target sequence for 2310047C17Rik (NM_175108.2,449-467).
gtgggtgccaccatctact

SEQ ID NO: 679766 - DNA, 19 bp, Mus musculus
  siRNA target sequence for 2310047C17Rik (NM_175108.2,451-469).
gggtgccaccatctacttt

SEQ ID NO: 679767 - DNA, 19 bp, Mus musculus
  siRNA target sequence for 2310047C17Rik (NM_175108.2,491-509).
gtgacccagttgctgaata

SEQ ID NO: 679768 - DNA, 19 bp, Mus musculus
  siRNA target sequence for 2310047C17Rik (NM_175108.2,495-513).
cccagttgctgaataccat

SEQ ID NO: 679769 - DNA, 19 bp, Mus musculus
  siRNA target sequence for 2310047C17Rik (NM_175108.2,579-597).
cctggacccatgaagtctt

SEQ ID NO: 679770 - DNA, 19 bp, Mus musculus
  siRNA target sequence for 2310047C17Rik (NM_175108.2,652-670).
ctgcaatgaccagaataaa

SEQ ID NO: 679771 - DNA, 19 bp, Mus musculus
  siRNA target sequence for 2310047C17Rik (NM_175108.2,673-691).
caaggaagctatcaacaaa

SEQ ID NO: 679772 - DNA, 19 bp, Mus musculus
  siRNA target sequence for 2310047C17Rik (NM_175108.2,746-764).
gggtctccagggctacaaa

SEQ ID NO: 679773 - DNA, 19 bp, Mus musculus
  siRNA target sequence for 2310047C17Rik (NM_175108.2,747-765).
ggtctccagggctacaaat

SEQ ID NO: 679774 - DNA, 19 bp, Mus musculus
  siRNA target sequence for 2700099C19Rik (NM_028303.1,117-135).
ggattccctatgatgacta

SEQ ID NO: 679775 - DNA, 19 bp, Mus musculus
  siRNA target sequence for 2700099C19Rik (NM_028303.1,232-250).
gtttctgccccgaattgtt

SEQ ID NO: 679776 - DNA, 19 bp, Mus musculus
  siRNA target sequence for 2700099C19Rik (NM_028303.1,269-287).
ggtgctcagttgggattta

SEQ ID NO: 679777 - DNA, 19 bp, Mus musculus
  siRNA target sequence for 2700099C19Rik (NM_028303.1,272-290).
gctcagttgggatttaaca

SEQ ID NO: 679778 - DNA, 19 bp, Mus musculus
  siRNA target sequence for 2700099C19Rik (NM_028303.1,273-291).
ctcagttgggatttaacat

SEQ ID NO: 679779 - DNA, 19 bp, Mus musculus
  siRNA target sequence for 2700099C19Rik (NM_028303.1,309-327).
cgcagctaggcatcttcat

SEQ ID NO: 679780 - DNA, 19 bp, Mus musculus
  siRNA target sequence for 2700099C19Rik (NM_028303.1,382-400).
ccaagttctagctgtgaat

SEQ ID NO: 679781 - DNA, 19 bp, Mus musculus
  siRNA target sequence for 2700099C19Rik (NM_028303.1,397-415).
gaatgatgtggatttccaa

SEQ ID NO: 679782 - DNA, 19 bp, Mus musculus
  siRNA target sequence for 2700099C19Rik (NM_028303.1,479-497).
cgcttctttccctacaatt

SEQ ID NO: 679783 - DNA, 19 bp, Mus musculus
  siRNA target sequence for 2700099C19Rik (NM_028303.1,484-502).
ctttccctacaattatcat

SEQ ID NO: 679784 - DNA, 19 bp, Mus musculus
  siRNA target sequence for 2900075G08Rik (NM_028408.1,845-863).
gcgctgcgctcatcttttt

SEQ ID NO: 679785 - DNA, 19 bp, Mus musculus
  siRNA target sequence for 2900075G08Rik (NM_028408.1,883-901).
gcctttgacgagctaagaa

SEQ ID NO: 679786 - DNA, 19 bp, Mus musculus
  siRNA target sequence for 2900075G08Rik (NM_028408.1,1054-1072).
gtgctgcccgagtactcta

SEQ ID NO: 679787 - DNA, 19 bp, Mus musculus
  siRNA target sequence for 2900075G08Rik (NM_028408.1,1206-1224).
cccaccagttgtcatgaat

SEQ ID NO: 679788 - DNA, 19 bp, Mus musculus
  siRNA target sequence for 4631426E05Rik (NM_025712.2,303-321).
ctacctgcaaaatgtaact

SEQ ID NO: 679789 - DNA, 19 bp, Mus musculus
  siRNA target sequence for 4631426E05Rik (NM_025712.2,376-394).
cagctgcacacattgaata

SEQ ID NO: 679790 - DNA, 19 bp, Mus musculus
  siRNA target sequence for 4631426E05Rik (NM_025712.2,454-472).
gaaggtctaacatcagata

SEQ ID NO: 679791 - DNA, 19 bp, Mus musculus
  siRNA target sequence for 4631426E05Rik (NM_025712.2,748-766).
caggacattgaaaaagaat

SEQ ID NO: 679792 - DNA, 19 bp, Mus musculus
  siRNA target sequence for 4631426E05Rik (NM_025712.2,820-838).
gagaatcaaacaaagtttt

SEQ ID NO: 679793 - DNA, 19 bp, Mus musculus
  siRNA target sequence for 4631426E05Rik (NM_025712.2,860-878).
ggcactatgggtatgttca

SEQ ID NO: 679794 - DNA, 19 bp, Mus musculus
  siRNA target sequence for 4631426E05Rik (NM_025712.2,927-945).
gctttccatcggcaataat

SEQ ID NO: 679795 - DNA, 19 bp, Mus musculus
  siRNA target sequence for 4631426E05Rik (NM_025712.2,946-964).
gagatcagctgctgtataa

SEQ ID NO: 679796 - DNA, 19 bp, Mus musculus
  siRNA target sequence for 4631426E05Rik (NM_025712.2,948-966).
gatcagctgctgtataact

SEQ ID NO: 679797 - DNA, 19 bp, Mus musculus
  siRNA target sequence for 4631426E05Rik (NM_025712.2,1092-1110).
gctgagatttcagtatagt

SEQ ID NO: 679798 - DNA, 19 bp, Mus musculus
  siRNA target sequence for 4631426E05Rik (NM_025712.2,1121-1139).
gccagcagtggtttgttat

SEQ ID NO: 679799 - DNA, 19 bp, Mus musculus
  siRNA target sequence for 4631426E05Rik (NM_025712.2,1122-1140).
ccagcagtggtttgttatt

SEQ ID NO: 679800 - DNA, 19 bp, Mus musculus
  siRNA target sequence for 4631426E05Rik (NM_025712.2,1123-1141).
cagcagtggtttgttattt

SEQ ID NO: 679801 - DNA, 19 bp, Mus musculus
  siRNA target sequence for 4631426E05Rik (NM_025712.2,1233-1251).
gatcgaggttccagaacaa

SEQ ID NO: 679802 - DNA, 19 bp, Mus musculus
  siRNA target sequence for 4631426E05Rik (NM_025712.2,1284-1302).
ccagaaagtctattttaat

SEQ ID NO: 679803 - DNA, 19 bp, Mus musculus
  siRNA target sequence for 4631426E05Rik (NM_025712.2,1328-1346).
gatccgaaggtgactatgt

SEQ ID NO: 679804 - DNA, 19 bp, Mus musculus
  siRNA target sequence for 4732421G10 (NM_177844.1,605-623).
gatcggagctctatgtaaa

SEQ ID NO: 679805 - DNA, 19 bp, Mus musculus
  siRNA target sequence for 4732421G10 (NM_177844.1,647-665).
cgtggctccccgagtgaaa

SEQ ID NO: 679806 - DNA, 19 bp, Mus musculus
  siRNA target sequence for 4732421G10 (NM_177844.1,751-769).
gcactgtgcgtctgaaaat

SEQ ID NO: 679807 - DNA, 19 bp, Mus musculus
  siRNA target sequence for 4732421G10 (NM_177844.1,770-788).
gtcccacccagccaaaaca

SEQ ID NO: 679808 - DNA, 19 bp, Mus musculus
  siRNA target sequence for 4732421G10 (NM_177844.1,774-792).
cacccagccaaaacacttt

SEQ ID NO: 679809 - DNA, 19 bp, Mus musculus
  siRNA target sequence for 4732421G10 (NM_177844.1,776-794).
cccagccaaaacactttat

SEQ ID NO: 679810 - DNA, 19 bp, Mus musculus
  siRNA target sequence for 4732421G10 (NM_177844.1,799-817).
caaatggggagctcattca

SEQ ID NO: 679811 - DNA, 19 bp, Mus musculus
  siRNA target sequence for 4732465J09Rik (NM_173018.1,43-61).
gcaagtgccagtgatttaa

SEQ ID NO: 679812 - DNA, 19 bp, Mus musculus
  siRNA target sequence for 4732465J09Rik (NM_173018.1,163-181).
gaatttcggcagaatatct

SEQ ID NO: 679813 - DNA, 19 bp, Mus musculus
  siRNA target sequence for 4732465J09Rik (NM_173018.1,174-192).
gaatatcttcagctcttat

SEQ ID NO: 679814 - DNA, 19 bp, Mus musculus
  siRNA target sequence for 4732465J09Rik (NM_173018.1,218-236).
ggaaaagcatccgctataa

SEQ ID NO: 679815 - DNA, 19 bp, Mus musculus
  siRNA target sequence for 4732465J09Rik (NM_173018.1,219-237).
gaaaagcatccgctataaa

SEQ ID NO: 679816 - DNA, 19 bp, Mus musculus
  siRNA target sequence for 4732465J09Rik (NM_173018.1,228-246).
ccgctataaagacctatat

SEQ ID NO: 679817 - DNA, 19 bp, Mus musculus
  siRNA target sequence for 4732465J09Rik (NM_173018.1,240-258).
cctatatgcgctatttgaa

SEQ ID NO: 679818 - DNA, 19 bp, Mus musculus
  siRNA target sequence for 4732465J09Rik (NM_173018.1,265-283).
ctggaaaaaaccatgagat

SEQ ID NO: 679819 - DNA, 19 bp, Mus musculus
  siRNA target sequence for 4732465J09Rik (NM_173018.1,304-322).
gaatctccagtgagagttt

SEQ ID NO: 679820 - DNA, 19 bp, Mus musculus
  siRNA target sequence for 4732465J09Rik (NM_173018.1,313-331).
gtgagagtttgggttaaca

SEQ ID NO: 679821 - DNA, 19 bp, Mus musculus
  siRNA target sequence for 4732465J09Rik (NM_173018.1,315-333).
gagagtttgggttaacact

SEQ ID NO: 679822 - DNA, 19 bp, Mus musculus
  siRNA target sequence for 4732465J09Rik (NM_173018.1,317-335).
gagtttgggttaacacttt

SEQ ID NO: 679823 - DNA, 19 bp, Mus musculus
  siRNA target sequence for 4732465J09Rik (NM_173018.1,323-341).
gggttaacacttttaaggt

SEQ ID NO: 679824 - DNA, 19 bp, Mus musculus
  siRNA target sequence for 4732465J09Rik (NM_173018.1,340-358).
gtgtttttagatgaataca

SEQ ID NO: 679825 - DNA, 19 bp, Mus musculus
  siRNA target sequence for 4732465J09Rik (NM_173018.1,386-404).
cagccccaaaggtgcttaa

SEQ ID NO: 679826 - DNA, 19 bp, Mus musculus
  siRNA target sequence for 4732465J09Rik (NM_173018.1,388-406).
gccccaaaggtgcttaaaa

SEQ ID NO: 679827 - DNA, 19 bp, Mus musculus
  siRNA target sequence for 4732465J09Rik (NM_173018.1,390-408).
cccaaaggtgcttaaaaca

SEQ ID NO: 679828 - DNA, 19 bp, Mus musculus
  siRNA target sequence for 4732465J09Rik (NM_173018.1,512-530).
gttcttccttgatatggat

SEQ ID NO: 679829 - DNA, 19 bp, Mus musculus
  siRNA target sequence for 4732465J09Rik (NM_173018.1,518-536).
ccttgatatggataatgga

SEQ ID NO: 679830 - DNA, 19 bp, Mus musculus
  siRNA target sequence for 4732465J09Rik (NM_173018.1,545-563).
ctgtttgcaaattgtgtaa

SEQ ID NO: 679831 - DNA, 19 bp, Mus musculus
  siRNA target sequence for 4732465J09Rik (NM_173018.1,547-565).
gtttgcaaattgtgtaagt

SEQ ID NO: 679832 - DNA, 19 bp, Mus musculus
  siRNA target sequence for 4732465J09Rik (NM_173018.1,599-617).
cagccaagtgttctaagaa

SEQ ID NO: 679833 - DNA, 19 bp, Mus musculus
  siRNA target sequence for 4732465J09Rik (NM_173018.1,601-619).
gccaagtgttctaagaagt

SEQ ID NO: 679834 - DNA, 19 bp, Mus musculus
  siRNA target sequence for 4732465J09Rik (NM_173018.1,655-673).
gagctgtcccgtttgacta

SEQ ID NO: 679835 - DNA, 19 bp, Mus musculus
  siRNA target sequence for 4732465J09Rik (NM_173018.1,660-678).
gtcccgtttgactagtgaa

SEQ ID NO: 679836 - DNA, 19 bp, Mus musculus
  siRNA target sequence for 4732465J09Rik (NM_173018.1,705-723).
gaagctcataaactatatt

SEQ ID NO: 679837 - DNA, 19 bp, Mus musculus
  siRNA target sequence for 4732465J09Rik (NM_173018.1,724-742).
gaaatgcatggactttata

SEQ ID NO: 679838 - DNA, 19 bp, Mus musculus
  siRNA target sequence for 4732465J09Rik (NM_173018.1,729-747).
gcatggactttatactgaa

SEQ ID NO: 679839 - DNA, 19 bp, Mus musculus
  siRNA target sequence for 4732465J09Rik (NM_173018.1,757-775).
cgaaagtctggttcaacta

SEQ ID NO: 679840 - DNA, 19 bp, Mus musculus
  siRNA target sequence for 4732465J09Rik (NM_173018.1,789-807).
gcttcgacaaggtctagat

SEQ ID NO: 679841 - DNA, 19 bp, Mus musculus
  siRNA target sequence for 4732465J09Rik (NM_173018.1,790-808).
cttcgacaaggtctagata

SEQ ID NO: 679842 - DNA, 19 bp, Mus musculus
  siRNA target sequence for 4732465J09Rik (NM_173018.1,821-839).
gtgtaaacctagatgacta

SEQ ID NO: 679843 - DNA, 19 bp, Mus musculus
  siRNA target sequence for 4732465J09Rik (NM_173018.1,823-841).
gtaaacctagatgactata

SEQ ID NO: 679844 - DNA, 19 bp, Mus musculus
  siRNA target sequence for 4732465J09Rik (NM_173018.1,828-846).
cctagatgactataacata

SEQ ID NO: 679845 - DNA, 19 bp, Mus musculus
  siRNA target sequence for 4732465J09Rik (NM_173018.1,852-870).
cattgcaagtgtattcaaa

SEQ ID NO: 679846 - DNA, 19 bp, Mus musculus
  siRNA target sequence for 4732465J09Rik (NM_173018.1,856-874).
gcaagtgtattcaaacaat

SEQ ID NO: 679847 - DNA, 19 bp, Mus musculus
  siRNA target sequence for 4732465J09Rik (NM_173018.1,889-907).
cccaatccactcatgactt

SEQ ID NO: 679848 - DNA, 19 bp, Mus musculus
  siRNA target sequence for 4732465J09Rik (NM_173018.1,890-908).
ccaatccactcatgacttt

SEQ ID NO: 679849 - DNA, 19 bp, Mus musculus
  siRNA target sequence for 4732465J09Rik (NM_173018.1,891-909).
caatccactcatgactttt

SEQ ID NO: 679850 - DNA, 19 bp, Mus musculus
  siRNA target sequence for 4732465J09Rik (NM_173018.1,896-914).
cactcatgacttttgaact

SEQ ID NO: 679851 - DNA, 19 bp, Mus musculus
  siRNA target sequence for 4732465J09Rik (NM_173018.1,968-986).
gtggtgtgtactctgtaat

SEQ ID NO: 679852 - DNA, 19 bp, Mus musculus
  siRNA target sequence for 4732465J09Rik (NM_173018.1,971-989).
gtgtgtactctgtaattga

SEQ ID NO: 679853 - DNA, 19 bp, Mus musculus
  siRNA target sequence for 4732465J09Rik (NM_173018.1,996-1014).
ctcccgaactcatctcaat

SEQ ID NO: 679854 - DNA, 19 bp, Mus musculus
  siRNA target sequence for 4732465J09Rik (NM_173018.1,999-1017).
ccgaactcatctcaataca

SEQ ID NO: 679855 - DNA, 19 bp, Mus musculus
  siRNA target sequence for 4732465J09Rik (NM_173018.1,1001-1019).
gaactcatctcaatacact

SEQ ID NO: 679856 - DNA, 19 bp, Mus musculus
  siRNA target sequence for 4732465J09Rik (NM_173018.1,1020-1038).
ggaacgccttatctttcat

SEQ ID NO: 679857 - DNA, 19 bp, Mus musculus
  siRNA target sequence for 4732465J09Rik (NM_173018.1,1057-1075).
caggaagacactaatcgaa

SEQ ID NO: 679858 - DNA, 19 bp, Mus musculus
  siRNA target sequence for 4732465J09Rik (NM_173018.1,1072-1090).
cgaatgtctgctaatgctt

SEQ ID NO: 679859 - DNA, 19 bp, Mus musculus
  siRNA target sequence for 4732465J09Rik (NM_173018.1,1073-1091).
gaatgtctgctaatgcttt

SEQ ID NO: 679860 - DNA, 19 bp, Mus musculus
  siRNA target sequence for 4732465J09Rik (NM_173018.1,1131-1149).
cactactgacccactacaa

SEQ ID NO: 679861 - DNA, 19 bp, Mus musculus
  siRNA target sequence for 4732465J09Rik (NM_173018.1,1140-1158).
cccactacaaagtgtacaa

SEQ ID NO: 679862 - DNA, 19 bp, Mus musculus
  siRNA target sequence for 4732465J09Rik (NM_173018.1,1144-1162).
ctacaaagtgtacaagata

SEQ ID NO: 679863 - DNA, 19 bp, Mus musculus
  siRNA target sequence for 4732465J09Rik (NM_173018.1,1151-1169).
gtgtacaagatatcagtaa

SEQ ID NO: 679864 - DNA, 19 bp, Mus musculus
  siRNA target sequence for 4732465J09Rik (NM_173018.1,1153-1171).
gtacaagatatcagtaaga

SEQ ID NO: 679865 - DNA, 19 bp, Mus musculus
  siRNA target sequence for 4732465J09Rik (NM_173018.1,1178-1196).
catgtgtggagctgatagt

SEQ ID NO: 679866 - DNA, 19 bp, Mus musculus
  siRNA target sequence for 4732465J09Rik (NM_173018.1,1188-1206).
gctgatagtggtagaacaa

SEQ ID NO: 679867 - DNA, 19 bp, Mus musculus
  siRNA target sequence for 4732465J09Rik (NM_173018.1,1189-1207).
ctgatagtggtagaacaaa

SEQ ID NO: 679868 - DNA, 19 bp, Mus musculus
  siRNA target sequence for 4732465J09Rik (NM_173018.1,1225-1243).
cgtctcaaagacatcagta

SEQ ID NO: 679869 - DNA, 19 bp, Mus musculus
  siRNA target sequence for 4732465J09Rik (NM_173018.1,1272-1290).
gaccagactgtcactgatt

SEQ ID NO: 679870 - DNA, 19 bp, Mus musculus
  siRNA target sequence for 4732465J09Rik (NM_173018.1,1283-1301).
cactgattcgtagatcaat

SEQ ID NO: 679871 - DNA, 19 bp, Mus musculus
  siRNA target sequence for 4732465J09Rik (NM_173018.1,1313-1331).
gtatacaccgaggaaacta

SEQ ID NO: 679872 - DNA, 19 bp, Mus musculus
  siRNA target sequence for 4732465J09Rik (NM_173018.1,1337-1355).
gtccatcttcccctgttat

SEQ ID NO: 679873 - DNA, 19 bp, Mus musculus
  siRNA target sequence for 4732465J09Rik (NM_173018.1,1340-1358).
catcttcccctgttatagt

SEQ ID NO: 679874 - DNA, 19 bp, Mus musculus
  siRNA target sequence for 4732465J09Rik (NM_173018.1,1591-1609).
gctgatagttcggaaaatt

SEQ ID NO: 679875 - DNA, 19 bp, Mus musculus
  siRNA target sequence for 4732465J09Rik (NM_173018.1,1592-1610).
ctgatagttcggaaaattt

SEQ ID NO: 679876 - DNA, 19 bp, Mus musculus
  siRNA target sequence for 4732465J09Rik (NM_173018.1,1594-1612).
gatagttcggaaaatttga

SEQ ID NO: 679877 - DNA, 19 bp, Mus musculus
  siRNA target sequence for 4732465J09Rik (NM_173018.1,1598-1616).
gttcggaaaatttgaatat

SEQ ID NO: 679878 - DNA, 19 bp, Mus musculus
  siRNA target sequence for 4732465J09Rik (NM_173018.1,1688-1706).
cgcggaagcagctaagaaa

SEQ ID NO: 679879 - DNA, 19 bp, Mus musculus
  siRNA target sequence for 4732465J09Rik (NM_173018.1,1753-1771).
ctatcaaacactacatcat

SEQ ID NO: 679880 - DNA, 19 bp, Mus musculus
  siRNA target sequence for 4732465J09Rik (NM_173018.1,1778-1796).
gcactagaaagcgatttca

SEQ ID NO: 679881 - DNA, 19 bp, Mus musculus
  siRNA target sequence for 4732465J09Rik (NM_173018.1,1781-1799).
ctagaaagcgatttcagat

SEQ ID NO: 679882 - DNA, 19 bp, Mus musculus
  siRNA target sequence for 4732465J09Rik (NM_173018.1,1789-1807).
cgatttcagatttattcca

SEQ ID NO: 679883 - DNA, 19 bp, Mus musculus
  siRNA target sequence for 4732465J09Rik (NM_173018.1,1888-1906).
gacaggcctcagttcatca

SEQ ID NO: 679884 - DNA, 19 bp, Mus musculus
  siRNA target sequence for 4732465J09Rik (NM_173018.1,2001-2019).
cacatctggccgaaagaaa

SEQ ID NO: 679885 - DNA, 19 bp, Mus musculus
  siRNA target sequence for 4732465J09Rik (NM_173018.1,2050-2068).
caactaccactgtttggaa

SEQ ID NO: 679886 - DNA, 19 bp, Mus musculus
  siRNA target sequence for 4732465J09Rik (NM_173018.1,2053-2071).
ctaccactgtttggaaata

SEQ ID NO: 679887 - DNA, 19 bp, Mus musculus
  siRNA target sequence for 4732481H14Rik (NM_172468.1,572-590).
gcacacgggtggagtttga

SEQ ID NO: 679888 - DNA, 19 bp, Mus musculus
  siRNA target sequence for 4732481H14Rik (NM_172468.1,611-629).
gtcggcgataccaggattt

SEQ ID NO: 679889 - DNA, 19 bp, Mus musculus
  siRNA target sequence for 4732481H14Rik (NM_172468.1,659-677).
cgcagcccactcatctcat

SEQ ID NO: 679890 - DNA, 19 bp, Mus musculus
  siRNA target sequence for 4732481H14Rik (NM_172468.1,660-678).
gcagcccactcatctcatt

SEQ ID NO: 679891 - DNA, 19 bp, Mus musculus
  siRNA target sequence for 4732481H14Rik (NM_172468.1,763-781).
gacaaattcctaaaaagga

SEQ ID NO: 679892 - DNA, 19 bp, Mus musculus
  siRNA target sequence for 4732481H14Rik (NM_172468.1,765-783).
caaattcctaaaaaggatt

SEQ ID NO: 679893 - DNA, 19 bp, Mus musculus
  siRNA target sequence for 4732481H14Rik (NM_172468.1,771-789).
cctaaaaaggattacagat

SEQ ID NO: 679894 - DNA, 19 bp, Mus musculus
  siRNA target sequence for 4732481H14Rik (NM_172468.1,794-812).
ccgtgctctctttcaatga

SEQ ID NO: 679895 - DNA, 19 bp, Mus musculus
  siRNA target sequence for 4732481H14Rik (NM_172468.1,841-859).
gacctgaatgcctacaaga

SEQ ID NO: 679896 - DNA, 19 bp, Mus musculus
  siRNA target sequence for 4732481H14Rik (NM_172468.1,951-969).
ggccatcagcgactactta

SEQ ID NO: 679897 - DNA, 19 bp, Mus musculus
  siRNA target sequence for 4732481H14Rik (NM_172468.1,953-971).
ccatcagcgactacttaga

SEQ ID NO: 679898 - DNA, 19 bp, Mus musculus
  siRNA target sequence for 4732481H14Rik (NM_172468.1,959-977).
gcgactacttagacacttt

SEQ ID NO: 679899 - DNA, 19 bp, Mus musculus
  siRNA target sequence for 4732481H14Rik (NM_172468.1,960-978).
cgactacttagacactttt

SEQ ID NO: 679900 - DNA, 19 bp, Mus musculus
  siRNA target sequence for 4732481H14Rik (NM_172468.1,963-981).
ctacttagacacttttgca

SEQ ID NO: 679901 - DNA, 19 bp, Mus musculus
  siRNA target sequence for 4732481H14Rik (NM_172468.1,1056-1074).
ggagtacgggcctgtgtat

SEQ ID NO: 679902 - DNA, 19 bp, Mus musculus
  siRNA target sequence for 4732481H14Rik (NM_172468.1,1057-1075).
gagtacgggcctgtgtatt

SEQ ID NO: 679903 - DNA, 19 bp, Mus musculus
  siRNA target sequence for 4732481H14Rik (NM_172468.1,1162-1180).
gagctgacagatgacataa

SEQ ID NO: 679904 - DNA, 19 bp, Mus musculus
  siRNA target sequence for 4732481H14Rik (NM_172468.1,1373-1391).
ctgacctgaaggctgatat

SEQ ID NO: 679905 - DNA, 19 bp, Mus musculus
  siRNA target sequence for 4732481H14Rik (NM_172468.1,1485-1503).
ggcgtgggagtccattatt

SEQ ID NO: 679906 - DNA, 19 bp, Mus musculus
  siRNA target sequence for 4732481H14Rik (NM_172468.1,1488-1506).
gtgggagtccattattcca

SEQ ID NO: 679907 - DNA, 19 bp, Mus musculus
  siRNA target sequence for 4930422J18Rik (NM_029035.2,315-333).
gtcacaggagggatcaaga

SEQ ID NO: 679908 - DNA, 19 bp, Mus musculus
  siRNA target sequence for 4930422J18Rik (NM_029035.2,459-477).
ctccactcctggaacaata

SEQ ID NO: 679909 - DNA, 19 bp, Mus musculus
  siRNA target sequence for 4930422J18Rik (NM_029035.2,675-693).
cactccgttgggtacacaa

SEQ ID NO: 679910 - DNA, 19 bp, Mus musculus
  siRNA target sequence for 4930422J18Rik (NM_029035.2,694-712).
cccttgtaggaaataacca

SEQ ID NO: 679911 - DNA, 19 bp, Mus musculus
  siRNA target sequence for 4930422J18Rik (NM_029035.2,695-713).
ccttgtaggaaataaccat

SEQ ID NO: 679912 - DNA, 19 bp, Mus musculus
  siRNA target sequence for 4930422J18Rik (NM_029035.2,760-778).
gcaagaaccagccaagtaa

SEQ ID NO: 679913 - DNA, 19 bp, Mus musculus
  siRNA target sequence for 4930422J18Rik (NM_029035.2,802-820).
cggacgagacattcattgt

SEQ ID NO: 679914 - DNA, 19 bp, Mus musculus
  siRNA target sequence for 4930422J18Rik (NM_029035.2,852-870).
gatgatgggaccttaagtt

SEQ ID NO: 679915 - DNA, 19 bp, Mus musculus
  siRNA target sequence for 4930422J18Rik (NM_029035.2,910-928).
gactcaagggtaaaaagct

SEQ ID NO: 679916 - DNA, 19 bp, Mus musculus
  siRNA target sequence for 4931426N11Rik (NM_172579.1,605-623).
gaaggccctcaccatatca

SEQ ID NO: 679917 - DNA, 19 bp, Mus musculus
  siRNA target sequence for 4931426N11Rik (NM_172579.1,680-698).
ccgagaaaggaaaatgtaa

SEQ ID NO: 679918 - DNA, 19 bp, Mus musculus
  siRNA target sequence for 4931426N11Rik (NM_172579.1,708-726).
gccgttcaagccaggaaat

SEQ ID NO: 679919 - DNA, 19 bp, Mus musculus
  siRNA target sequence for 4931426N11Rik (NM_172579.1,709-727).
ccgttcaagccaggaaata

SEQ ID NO: 679920 - DNA, 19 bp, Mus musculus
  siRNA target sequence for 4931426N11Rik (NM_172579.1,711-729).
gttcaagccaggaaataga

SEQ ID NO: 679921 - DNA, 19 bp, Mus musculus
  siRNA target sequence for 4931426N11Rik (NM_172579.1,789-807).
ctgttagcctcaattccaa

SEQ ID NO: 679922 - DNA, 19 bp, Mus musculus
  siRNA target sequence for 4931426N11Rik (NM_172579.1,919-937).
gaaagcccttcgcagaatt

SEQ ID NO: 679923 - DNA, 19 bp, Mus musculus
  siRNA target sequence for 4931426N11Rik (NM_172579.1,963-981).
ccataagtgagcttgatgt

SEQ ID NO: 679924 - DNA, 19 bp, Mus musculus
  siRNA target sequence for 4931426N11Rik (NM_172579.1,980-998).
gtggatagcttcgatgaat

SEQ ID NO: 679925 - DNA, 19 bp, Mus musculus
  siRNA target sequence for 4931426N11Rik (NM_172579.1,982-1000).
ggatagcttcgatgaatgt

SEQ ID NO: 679926 - DNA, 19 bp, Mus musculus
  siRNA target sequence for 4931426N11Rik (NM_172579.1,1087-1105).
cagcttcttcgatttgtta

SEQ ID NO: 679927 - DNA, 19 bp, Mus musculus
  siRNA target sequence for 4931426N11Rik (NM_172579.1,1139-1157).
ccaactccaaccaaactca

SEQ ID NO: 679928 - DNA, 19 bp, Mus musculus
  siRNA target sequence for 4931426N11Rik (NM_172579.1,1271-1289).
ctcaagcgacgctctaagt

SEQ ID NO: 679929 - DNA, 19 bp, Mus musculus
  siRNA target sequence for 4931426N11Rik (NM_172579.1,1301-1319).
gactcgtccatttttcgta

SEQ ID NO: 679930 - DNA, 19 bp, Mus musculus
  siRNA target sequence for 4931426N11Rik (NM_172579.1,1303-1321).
ctcgtccatttttcgtaaa

SEQ ID NO: 679931 - DNA, 19 bp, Mus musculus
  siRNA target sequence for 4931426N11Rik (NM_172579.1,1305-1323).
cgtccatttttcgtaaatt

SEQ ID NO: 679932 - DNA, 19 bp, Mus musculus
  siRNA target sequence for 4931426N11Rik (NM_172579.1,1340-1358).
gaagaactcgggaaatcat

SEQ ID NO: 679933 - DNA, 19 bp, Mus musculus
  siRNA target sequence for 4931426N11Rik (NM_172579.1,1430-1448).
gatgtccagagcatattgt

SEQ ID NO: 679934 - DNA, 19 bp, Mus musculus
  siRNA target sequence for 4931426N11Rik (NM_172579.1,1441-1459).
catattgtttgacttgaat

SEQ ID NO: 679935 - DNA, 19 bp, Mus musculus
  siRNA target sequence for 4931426N11Rik (NM_172579.1,1660-1678).
catgagctgtccgtatttt

SEQ ID NO: 679936 - DNA, 19 bp, Mus musculus
  siRNA target sequence for 4931426N11Rik (NM_172579.1,1671-1689).
cgtattttcggaatgagat

SEQ ID NO: 679937 - DNA, 19 bp, Mus musculus
  siRNA target sequence for 4931426N11Rik (NM_172579.1,1726-1744).
gtcgaattctggctcattt

SEQ ID NO: 679938 - DNA, 19 bp, Mus musculus
  siRNA target sequence for 4931426N11Rik (NM_172579.1,1729-1747).
gaattctggctcatttagt

SEQ ID NO: 679939 - DNA, 19 bp, Mus musculus
  siRNA target sequence for 4931426N11Rik (NM_172579.1,1814-1832).
ctcgaagtgcccaaggaaa

SEQ ID NO: 679940 - DNA, 19 bp, Mus musculus
  siRNA target sequence for 4931426N11Rik (NM_172579.1,1844-1862).
catctggacagggtgaaaa

SEQ ID NO: 679941 - DNA, 19 bp, Mus musculus
  siRNA target sequence for 4931426N11Rik (NM_172579.1,1882-1900).
ggatcttggcgcatactat

SEQ ID NO: 679942 - DNA, 19 bp, Mus musculus
  siRNA target sequence for 4931426N11Rik (NM_172579.1,1883-1901).
gatcttggcgcatactatt

SEQ ID NO: 679943 - DNA, 19 bp, Mus musculus
  siRNA target sequence for 4931426N11Rik (NM_172579.1,1886-1904).
cttggcgcatactattaca

SEQ ID NO: 679944 - DNA, 19 bp, Mus musculus
  siRNA target sequence for 4931426N11Rik (NM_172579.1,1967-1985).
gtggctgtgagcattcgaa

SEQ ID NO: 679945 - DNA, 19 bp, Mus musculus
  siRNA target sequence for 4931426N11Rik (NM_172579.1,1978-1996).
cattcgaagggaaaaacca

SEQ ID NO: 679946 - DNA, 19 bp, Mus musculus
  siRNA target sequence for 4931426N11Rik (NM_172579.1,1986-2004).
gggaaaaaccagaagacat

SEQ ID NO: 679947 - DNA, 19 bp, Mus musculus
  siRNA target sequence for 4931426N11Rik (NM_172579.1,2124-2142).
ggggattgcctctgaaaga

SEQ ID NO: 679948 - DNA, 19 bp, Mus musculus
  siRNA target sequence for 4931426N11Rik (NM_172579.1,2365-2383).
ggaacgagtccggctaaaa

SEQ ID NO: 679949 - DNA, 19 bp, Mus musculus
  siRNA target sequence for 4931426N11Rik (NM_172579.1,2369-2387).
cgagtccggctaaaaggat

SEQ ID NO: 679950 - DNA, 19 bp, Mus musculus
  siRNA target sequence for 4931426N11Rik (NM_172579.1,2370-2388).
gagtccggctaaaaggatt

SEQ ID NO: 679951 - DNA, 19 bp, Mus musculus
  siRNA target sequence for 4931426N11Rik (NM_172579.1,2539-2557).
gcacattgggaatgacatt

SEQ ID NO: 679952 - DNA, 19 bp, Mus musculus
  siRNA target sequence for 4931426N11Rik (NM_172579.1,2552-2570).
gacattgtgacaatagttt

SEQ ID NO: 679953 - DNA, 19 bp, Mus musculus
  siRNA target sequence for 4931426N11Rik (NM_172579.1,2592-2610).
cattcagcccgaaaaacat

SEQ ID NO: 679954 - DNA, 19 bp, Mus musculus
  siRNA target sequence for 4931426N11Rik (NM_172579.1,2700-2718).
ccagagatgtaccttcttt

SEQ ID NO: 679955 - DNA, 19 bp, Mus musculus
  siRNA target sequence for 4931426N11Rik (NM_172579.1,2743-2761).
caccttccccaagtcaaat

SEQ ID NO: 679956 - DNA, 19 bp, Mus musculus
  siRNA target sequence for 4931426N11Rik (NM_172579.1,2745-2763).
ccttccccaagtcaaatgt

SEQ ID NO: 679957 - DNA, 19 bp, Mus musculus
  siRNA target sequence for 4931426N11Rik (NM_172579.1,2847-2865).
ggacccgccaggaatacct

SEQ ID NO: 679958 - DNA, 19 bp, Mus musculus
  siRNA target sequence for 4931426N11Rik (NM_172579.1,2910-2928).
cttctggcaagtttccatt

SEQ ID NO: 679959 - DNA, 19 bp, Mus musculus
  siRNA target sequence for 4931426N11Rik (NM_172579.1,3156-3174).
gcgacaccagcctcaaaat

SEQ ID NO: 679960 - DNA, 19 bp, Mus musculus
  siRNA target sequence for 4931426N11Rik (NM_172579.1,3162-3180).
ccagcctcaaaatcttcta

SEQ ID NO: 679961 - DNA, 19 bp, Mus musculus
  siRNA target sequence for 4931426N11Rik (NM_172579.1,3178-3196).
ctatgagcggggagaatgt

SEQ ID NO: 679962 - DNA, 19 bp, Mus musculus
  siRNA target sequence for 4931426N11Rik (NM_172579.1,3199-3217).
gtcggtggagagcttcatt

SEQ ID NO: 679963 - DNA, 19 bp, Mus musculus
  siRNA target sequence for 4931426N11Rik (NM_172579.1,3211-3229).
cttcattagcggtgaagat

SEQ ID NO: 679964 - DNA, 19 bp, Mus musculus
  siRNA target sequence for 4931426N11Rik (NM_172579.1,3219-3237).
gcggtgaagatatcaaaga

SEQ ID NO: 679965 - DNA, 19 bp, Mus musculus
  siRNA target sequence for 4931426N11Rik (NM_172579.1,3342-3360).
gcattgtggcggatgtaga

SEQ ID NO: 679966 - DNA, 19 bp, Mus musculus
  siRNA target sequence for 4931426N11Rik (NM_172579.1,3343-3361).
cattgtggcggatgtagaa

SEQ ID NO: 679967 - DNA, 19 bp, Mus musculus
  siRNA target sequence for 4931426N11Rik (NM_172579.1,3460-3478).
cgatctcttgagaacatca

SEQ ID NO: 679968 - DNA, 19 bp, Mus musculus
  siRNA target sequence for 4931426N11Rik (NM_172579.1,3527-3545).
cggaggagttgctcagaaa

SEQ ID NO: 679969 - DNA, 19 bp, Mus musculus
  siRNA target sequence for 4931426N11Rik (NM_172579.1,3565-3583).
ggagtaccagatgaatgaa

SEQ ID NO: 679970 - DNA, 19 bp, Mus musculus
  siRNA target sequence for 4931426N11Rik (NM_172579.1,3604-3622).
gtttcccttccggaataat

SEQ ID NO: 679971 - DNA, 19 bp, Mus musculus
  siRNA target sequence for 4931426N11Rik (NM_172579.1,3608-3626).
cccttccggaataataaca

SEQ ID NO: 679972 - DNA, 19 bp, Mus musculus
  siRNA target sequence for 4931426N11Rik (NM_172579.1,3691-3709).
catgacctcacgactgaat

SEQ ID NO: 679973 - DNA, 19 bp, Mus musculus
  siRNA target sequence for 4931426N11Rik (NM_172579.1,3810-3828).
ctggttcggacatctatgt

SEQ ID NO: 679974 - DNA, 19 bp, Mus musculus
  siRNA target sequence for 4931426N11Rik (NM_172579.1,3994-4012).
cacccagtcggatataagt

SEQ ID NO: 679975 - DNA, 19 bp, Mus musculus
  siRNA target sequence for 4931426N11Rik (NM_172579.1,4334-4352).
gccgacagcgggattgaca

SEQ ID NO: 679976 - DNA, 19 bp, Mus musculus
  siRNA target sequence for 4931426N11Rik (NM_172579.1,4481-4499).
gcagatcggaccttagaga

SEQ ID NO: 679977 - DNA, 19 bp, Mus musculus
  siRNA target sequence for 4931426N11Rik (NM_172579.1,4597-4615).
cagcaccttcagcataaat

SEQ ID NO: 679978 - DNA, 19 bp, Mus musculus
  siRNA target sequence for 4931426N11Rik (NM_172579.1,4599-4617).
gcaccttcagcataaatga

SEQ ID NO: 679979 - DNA, 19 bp, Mus musculus
  siRNA target sequence for 4931426N11Rik (NM_172579.1,4658-4676).
gccagcccagtggtattct

SEQ ID NO: 679980 - DNA, 19 bp, Mus musculus
  siRNA target sequence for 4931426N11Rik (NM_172579.1,4727-4745).
cagctcgcaccgtcctttt

SEQ ID NO: 679981 - DNA, 19 bp, Mus musculus
  siRNA target sequence for 4931426N11Rik (NM_172579.1,4799-4817).
gccactagcaaatatctga

SEQ ID NO: 679982 - DNA, 19 bp, Mus musculus
  siRNA target sequence for 4931426N11Rik (NM_172579.1,4800-4818).
ccactagcaaatatctgat

SEQ ID NO: 679983 - DNA, 19 bp, Mus musculus
  siRNA target sequence for 4931426N11Rik (NM_172579.1,4801-4819).
cactagcaaatatctgatt

SEQ ID NO: 679984 - DNA, 19 bp, Mus musculus
  siRNA target sequence for 4931426N11Rik (NM_172579.1,5018-5036).
cccgaatcccagaagaatt

SEQ ID NO: 679985 - DNA, 19 bp, Mus musculus
  siRNA target sequence for 4931426N11Rik (NM_172579.1,5139-5157).
gccagagggagcatttctt

SEQ ID NO: 679986 - DNA, 19 bp, Mus musculus
  siRNA target sequence for 4931426N11Rik (NM_172579.1,5163-5181).
ccagggcttcgcttctaga

SEQ ID NO: 679987 - DNA, 19 bp, Mus musculus
  siRNA target sequence for 4931426N11Rik (NM_172579.1,5259-5277).
cttacacgttgggaatgaa

SEQ ID NO: 679988 - DNA, 19 bp, Mus musculus
  siRNA target sequence for 4931426N11Rik (NM_172579.1,5265-5283).
cgttgggaatgaagtcatt

SEQ ID NO: 679989 - DNA, 19 bp, Mus musculus
  siRNA target sequence for 4931426N11Rik (NM_172579.1,5269-5287).
gggaatgaagtcattgcat

SEQ ID NO: 679990 - DNA, 19 bp, Mus musculus
  siRNA target sequence for 4931426N11Rik (NM_172579.1,5398-5416).
ctggtccaacctagtagat

SEQ ID NO: 679991 - DNA, 19 bp, Mus musculus
  siRNA target sequence for 4931426N11Rik (NM_172579.1,5434-5452).
ggtccagagagcctcattt

SEQ ID NO: 679992 - DNA, 19 bp, Mus musculus
  siRNA target sequence for 4931426N11Rik (NM_172579.1,5457-5475).
ctgctagtgatgaaaacca

SEQ ID NO: 679993 - DNA, 19 bp, Mus musculus
  siRNA target sequence for 4931426N11Rik (NM_172579.1,5522-5540).
gccctggtccagatgaagt

SEQ ID NO: 679994 - DNA, 19 bp, Mus musculus
  siRNA target sequence for 4931426N11Rik (NM_172579.1,5750-5768).
gtcttcaacaccatagaca

SEQ ID NO: 679995 - DNA, 19 bp, Mus musculus
  siRNA target sequence for 4933437K13Rik (NM_028964.1,72-90).
gcggcatcatgattgaaga

SEQ ID NO: 679996 - DNA, 19 bp, Mus musculus
  siRNA target sequence for 4933437K13Rik (NM_028964.1,123-141).
gtgatgaatggcttactga

SEQ ID NO: 679997 - DNA, 19 bp, Mus musculus
  siRNA target sequence for 4933437K13Rik (NM_028964.1,612-630).
cactggccagagaaaacga

SEQ ID NO: 679998 - DNA, 19 bp, Mus musculus
  siRNA target sequence for 4933437K13Rik (NM_028964.1,924-942).
gaccggtgcctggagattt

SEQ ID NO: 679999 - DNA, 19 bp, Mus musculus
  siRNA target sequence for 4933437K13Rik (NM_028964.1,935-953).
ggagatttgagccaaacat

SEQ ID NO: 680000 - DNA, 19 bp, Mus musculus
  siRNA target sequence for 4933437K13Rik (NM_028964.1,964-982).
gagtttgtcggattttgaa

SEQ ID NO: 680001 - DNA, 19 bp, Mus musculus
  siRNA target sequence for 4933437K13Rik (NM_028964.1,987-1005).
caaatcgggcactgatcaa

SEQ ID NO: 680002 - DNA, 19 bp, Mus musculus
  siRNA target sequence for 4933437K13Rik (NM_028964.1,1044-1062).
ccaatgcgttccatgtgta

SEQ ID NO: 680003 - DNA, 19 bp, Mus musculus
  siRNA target sequence for 4933437K13Rik (NM_028964.1,1045-1063).
caatgcgttccatgtgtat

SEQ ID NO: 680004 - DNA, 19 bp, Mus musculus
  siRNA target sequence for 4933437K13Rik (NM_028964.1,1087-1105).
cgatgagtggaatgtgtat

SEQ ID NO: 680005 - DNA, 19 bp, Mus musculus
  siRNA target sequence for 4933437K13Rik (NM_028964.1,1160-1178).
caagtgagggcctacagtt

SEQ ID NO: 680006 - DNA, 19 bp, Mus musculus
  siRNA target sequence for 4933437K13Rik (NM_028964.1,1222-1240).
ggaagagcggcgaaagcaa

SEQ ID NO: 680007 - DNA, 19 bp, Mus musculus
  siRNA target sequence for 4933437K13Rik (NM_028964.1,1253-1271).
ctacgcagcgtcatgaaca

SEQ ID NO: 680008 - DNA, 19 bp, Mus musculus
  siRNA target sequence for 4933437K13Rik (NM_028964.1,1279-1297).
ccagatggtgcctgagttt

SEQ ID NO: 680009 - DNA, 19 bp, Mus musculus
  siRNA target sequence for 4933437K13Rik (NM_028964.1,1362-1380).
ctggagaaccgctgaacaa

SEQ ID NO: 680010 - DNA, 19 bp, Mus musculus
  siRNA target sequence for 4933437K13Rik (NM_028964.1,1447-1465).
caacgtggaacctcaaagt

SEQ ID NO: 680011 - DNA, 19 bp, Mus musculus
  siRNA target sequence for 5830484J08Rik (NM_029523.2,152-170).
cgagtaggaatgcctttaa

SEQ ID NO: 680012 - DNA, 19 bp, Mus musculus
  siRNA target sequence for 5830484J08Rik (NM_029523.2,165-183).
ctttaagaaaacatagaca

SEQ ID NO: 680013 - DNA, 19 bp, Mus musculus
  siRNA target sequence for 5830484J08Rik (NM_029523.2,211-229).
cactgcagttgaagctata

SEQ ID NO: 680014 - DNA, 19 bp, Mus musculus
  siRNA target sequence for 5830484J08Rik (NM_029523.2,215-233).
gcagttgaagctatagatt

SEQ ID NO: 680015 - DNA, 19 bp, Mus musculus
  siRNA target sequence for 5830484J08Rik (NM_029523.2,225-243).
ctatagattggctttatga

SEQ ID NO: 680016 - DNA, 19 bp, Mus musculus
  siRNA target sequence for 5830484J08Rik (NM_029523.2,242-260).
gatctgttaagaagtaata

SEQ ID NO: 680017 - DNA, 19 bp, Mus musculus
  siRNA target sequence for 5830484J08Rik (NM_029523.2,285-303).
gacaacagactattcaact

SEQ ID NO: 680018 - DNA, 19 bp, Mus musculus
  siRNA target sequence for 5830484J08Rik (NM_029523.2,287-305).
caacagactattcaactat

SEQ ID NO: 680019 - DNA, 19 bp, Mus musculus
  siRNA target sequence for 5830484J08Rik (NM_029523.2,290-308).
cagactattcaactattga

SEQ ID NO: 680020 - DNA, 19 bp, Mus musculus
  siRNA target sequence for 5830484J08Rik (NM_029523.2,292-310).
gactattcaactattgaga

SEQ ID NO: 680021 - DNA, 19 bp, Mus musculus
  siRNA target sequence for 5830484J08Rik (NM_029523.2,322-340).
gaatcatgtgattgaagat

SEQ ID NO: 680022 - DNA, 19 bp, Mus musculus
  siRNA target sequence for 5830484J08Rik (NM_029523.2,360-378).
cggaaagccttgatgacaa

SEQ ID NO: 680023 - DNA, 19 bp, Mus musculus
  siRNA target sequence for 5830484J08Rik (NM_029523.2,366-384).
gccttgatgacaacaatca

SEQ ID NO: 680024 - DNA, 19 bp, Mus musculus
  siRNA target sequence for 5830484J08Rik (NM_029523.2,374-392).
gacaacaatcaactattca

SEQ ID NO: 680025 - DNA, 19 bp, Mus musculus
  siRNA target sequence for 5830484J08Rik (NM_029523.2,379-397).
caatcaactattcagattt

SEQ ID NO: 680026 - DNA, 19 bp, Mus musculus
  siRNA target sequence for 5830484J08Rik (NM_029523.2,401-419).
gcaacttctccacttaaaa

SEQ ID NO: 680027 - DNA, 19 bp, Mus musculus
  siRNA target sequence for 5830484J08Rik (NM_029523.2,457-475).
cacagagtacttttccaaa

SEQ ID NO: 680028 - DNA, 19 bp, Mus musculus
  siRNA target sequence for 5830484J08Rik (NM_029523.2,500-518).
cgaaacttatctcaaaaaa

SEQ ID NO: 680029 - DNA, 19 bp, Mus musculus
  siRNA target sequence for 5830484J08Rik (NM_029523.2,522-540).
ctaagaagcgtggattaca

SEQ ID NO: 680030 - DNA, 19 bp, Mus musculus
  siRNA target sequence for 5830484J08Rik (NM_029523.2,529-547).
gcgtggattacatttctct

SEQ ID NO: 680031 - DNA, 19 bp, Mus musculus
  siRNA target sequence for 5830484J08Rik (NM_029523.2,544-562).
ctctcaggaaaatacagaa

SEQ ID NO: 680032 - DNA, 19 bp, Mus musculus
  siRNA target sequence for 5830484J08Rik (NM_029523.2,651-669).
ggagatacgttattatgat

SEQ ID NO: 680033 - DNA, 19 bp, Mus musculus
  siRNA target sequence for 5830484J08Rik (NM_029523.2,652-670).
gagatacgttattatgata

SEQ ID NO: 680034 - DNA, 19 bp, Mus musculus
  siRNA target sequence for 5830484J08Rik (NM_029523.2,667-685).
gatatacctgcaaaccatt

SEQ ID NO: 680035 - DNA, 19 bp, Mus musculus
  siRNA target sequence for 5830484J08Rik (NM_029523.2,718-736).
cccaaaccaagtaattcct

SEQ ID NO: 680036 - DNA, 19 bp, Mus musculus
  siRNA target sequence for 5830484J08Rik (NM_029523.2,725-743).
caagtaattcctcaatata

SEQ ID NO: 680037 - DNA, 19 bp, Mus musculus
  siRNA target sequence for 5830484J08Rik (NM_029523.2,728-746).
gtaattcctcaatatataa

SEQ ID NO: 680038 - DNA, 19 bp, Mus musculus
  siRNA target sequence for 5830484J08Rik (NM_029523.2,757-775).
ggccaacacaagtaagcat

SEQ ID NO: 680039 - DNA, 19 bp, Mus musculus
  siRNA target sequence for 5830484J08Rik (NM_029523.2,772-790).
gcatggagtggtcatacta

SEQ ID NO: 680040 - DNA, 19 bp, Mus musculus
  siRNA target sequence for 5830484J08Rik (NM_029523.2,777-795).
gagtggtcatactacaaga

SEQ ID NO: 680041 - DNA, 19 bp, Mus musculus
  siRNA target sequence for 5830484J08Rik (NM_029523.2,781-799).
ggtcatactacaagacaaa

SEQ ID NO: 680042 - DNA, 19 bp, Mus musculus
  siRNA target sequence for 5830484J08Rik (NM_029523.2,831-849).
caatgaagtgcctagcaaa

SEQ ID NO: 680043 - DNA, 19 bp, Mus musculus
  siRNA target sequence for 5830484J08Rik (NM_029523.2,868-886).
caccaataatctaacttat

SEQ ID NO: 680044 - DNA, 19 bp, Mus musculus
  siRNA target sequence for 5830484J08Rik (NM_029523.2,870-888).
ccaataatctaacttatgt

SEQ ID NO: 680045 - DNA, 19 bp, Mus musculus
  siRNA target sequence for 5830484J08Rik (NM_029523.2,899-917).
cgtgatgtattcaaaacaa

SEQ ID NO: 680046 - DNA, 19 bp, Mus musculus
  siRNA target sequence for 5830484J08Rik (NM_029523.2,910-928).
caaaacaattgcagattat

SEQ ID NO: 680047 - DNA, 19 bp, Mus musculus
  siRNA target sequence for 5830484J08Rik (NM_029523.2,941-959).
cctgaacctctacttacat

SEQ ID NO: 680048 - DNA, 19 bp, Mus musculus
  siRNA target sequence for 5830484J08Rik (NM_029523.2,942-960).
ctgaacctctacttacatt

SEQ ID NO: 680049 - DNA, 19 bp, Mus musculus
  siRNA target sequence for 5830484J08Rik (NM_029523.2,947-965).
cctctacttacatttgaat

SEQ ID NO: 680050 - DNA, 19 bp, Mus musculus
  siRNA target sequence for 5830484J08Rik (NM_029523.2,948-966).
ctctacttacatttgaata

SEQ ID NO: 680051 - DNA, 19 bp, Mus musculus
  siRNA target sequence for 5830484J08Rik (NM_029523.2,992-1010).
gttgtttgtggctacatca

SEQ ID NO: 680052 - DNA, 19 bp, Mus musculus
  siRNA target sequence for 5830484J08Rik (NM_029523.2,1049-1067).
gatgatccacgatcttcaa

SEQ ID NO: 680053 - DNA, 19 bp, Mus musculus
  siRNA target sequence for 5830484J08Rik (NM_029523.2,1056-1074).
cacgatcttcaaaaatcca

SEQ ID NO: 680054 - DNA, 19 bp, Mus musculus
  siRNA target sequence for 5830484J08Rik (NM_029523.2,1084-1102).
caatttgaattccttcaaa

SEQ ID NO: 680055 - DNA, 19 bp, Mus musculus
  siRNA target sequence for 5830484J08Rik (NM_029523.2,1159-1177).
ggattctactaaaagacta

SEQ ID NO: 680056 - DNA, 19 bp, Mus musculus
  siRNA target sequence for 5830484J08Rik (NM_029523.2,1222-1240).
gcagctagataatttaaga

SEQ ID NO: 680057 - DNA, 19 bp, Mus musculus
  siRNA target sequence for 5830484J08Rik (NM_029523.2,1243-1261).
cagaagagctagtgctaat

SEQ ID NO: 680058 - DNA, 19 bp, Mus musculus
  siRNA target sequence for 5830484J08Rik (NM_029523.2,1245-1263).
gaagagctagtgctaatga

SEQ ID NO: 680059 - DNA, 19 bp, Mus musculus
  siRNA target sequence for 5830484J08Rik (NM_029523.2,1248-1266).
gagctagtgctaatgacat

SEQ ID NO: 680060 - DNA, 19 bp, Mus musculus
  siRNA target sequence for 5830484J08Rik (NM_029523.2,1272-1290).
gaggaagctgtcataattt

SEQ ID NO: 680061 - DNA, 19 bp, Mus musculus
  siRNA target sequence for 5830484J08Rik (NM_029523.2,1274-1292).
ggaagctgtcataatttaa

SEQ ID NO: 680062 - DNA, 19 bp, Mus musculus
  siRNA target sequence for 5830484J08Rik (NM_029523.2,1347-1365).
ctttggaaggaattgtaga

SEQ ID NO: 680063 - DNA, 19 bp, Mus musculus
  siRNA target sequence for 5830484J08Rik (NM_029523.2,1373-1391).
gtgaattcaagtgaaaaga

SEQ ID NO: 680064 - DNA, 19 bp, Mus musculus
  siRNA target sequence for 5830484J08Rik (NM_029523.2,1471-1489).
gacacccctatttaatctt

SEQ ID NO: 680065 - DNA, 19 bp, Mus musculus
  siRNA target sequence for 5830484J08Rik (NM_029523.2,1473-1491).
cacccctatttaatcttca

SEQ ID NO: 680066 - DNA, 19 bp, Mus musculus
  siRNA target sequence for 5830484J08Rik (NM_029523.2,1514-1532).
ccacactgtgttggtttta

SEQ ID NO: 680067 - DNA, 19 bp, Mus musculus
  siRNA target sequence for 5830484J08Rik (NM_029523.2,1561-1579).
ccaagaagagttatgtaat

SEQ ID NO: 680068 - DNA, 19 bp, Mus musculus
  siRNA target sequence for 5830484J08Rik (NM_029523.2,1568-1586).
gagttatgtaatgaaaagt

SEQ ID NO: 680069 - DNA, 19 bp, Mus musculus
  siRNA target sequence for 5830484J08Rik (NM_029523.2,1641-1659).
gacagaatagttgtatcaa

SEQ ID NO: 680070 - DNA, 19 bp, Mus musculus
  siRNA target sequence for 5830484J08Rik (NM_029523.2,1643-1661).
cagaatagttgtatcaata

SEQ ID NO: 680071 - DNA, 19 bp, Mus musculus
  siRNA target sequence for 5830484J08Rik (NM_029523.2,1664-1682).
ccagtggctgaaattataa

SEQ ID NO: 680072 - DNA, 19 bp, Mus musculus
  siRNA target sequence for 5830484J08Rik (NM_029523.2,1667-1685).
gtggctgaaattataatga

SEQ ID NO: 680073 - DNA, 19 bp, Mus musculus
  siRNA target sequence for 5830484J08Rik (NM_029523.2,1669-1687).
ggctgaaattataatgaaa

SEQ ID NO: 680074 - DNA, 19 bp, Mus musculus
  siRNA target sequence for 5830484J08Rik (NM_029523.2,1694-1712).
gttggacaagggagtacaa

SEQ ID NO: 680075 - DNA, 19 bp, Mus musculus
  siRNA target sequence for 5830484J08Rik (NM_029523.2,1724-1742).
gagtctagtaccacaatca

SEQ ID NO: 680076 - DNA, 19 bp, Mus musculus
  siRNA target sequence for 5830484J08Rik (NM_029523.2,1726-1744).
gtctagtaccacaatcaat

SEQ ID NO: 680077 - DNA, 19 bp, Mus musculus
  siRNA target sequence for 5830484J08Rik (NM_029523.2,1753-1771).
gtgcaaaagcaccatagaa

SEQ ID NO: 680078 - DNA, 19 bp, Mus musculus
  siRNA target sequence for 5830484J08Rik (NM_029523.2,1761-1779).
gcaccatagaactttcaga

SEQ ID NO: 680079 - DNA, 19 bp, Mus musculus
  siRNA target sequence for 5830484J08Rik (NM_029523.2,1769-1787).
gaactttcagagaaatctt

SEQ ID NO: 680080 - DNA, 19 bp, Mus musculus
  siRNA target sequence for 5830484J08Rik (NM_029523.2,1854-1872).
ccatcaatgctctacagtt

SEQ ID NO: 680081 - DNA, 19 bp, Mus musculus
  siRNA target sequence for 5830484J08Rik (NM_029523.2,1882-1900).
gttacttcccccaccaaat

SEQ ID NO: 680082 - DNA, 19 bp, Mus musculus
  siRNA target sequence for 5830484J08Rik (NM_029523.2,1886-1904).
cttcccccaccaaatcgta

SEQ ID NO: 680083 - DNA, 19 bp, Mus musculus
  siRNA target sequence for 5830484J08Rik (NM_029523.2,1890-1908).
ccccaccaaatcgtagaaa

SEQ ID NO: 680084 - DNA, 19 bp, Mus musculus
  siRNA target sequence for 5830484J08Rik (NM_029523.2,1925-1943).
cgcatgatttctagaatga

SEQ ID NO: 680085 - DNA, 19 bp, Mus musculus
  siRNA target sequence for 5830484J08Rik (NM_029523.2,1935-1953).
ctagaatgagtcaaaatgt

SEQ ID NO: 680086 - DNA, 19 bp, Mus musculus
  siRNA target sequence for 5830484J08Rik (NM_029523.2,1938-1956).
gaatgagtcaaaatgttga

SEQ ID NO: 680087 - DNA, 19 bp, Mus musculus
  siRNA target sequence for 5830484J08Rik (NM_029523.2,1967-1985).
cttcatgaacaaataggta

SEQ ID NO: 680088 - DNA, 19 bp, Mus musculus
  siRNA target sequence for 5830484J08Rik (NM_029523.2,1973-1991).
gaacaaataggtacaagat

SEQ ID NO: 680089 - DNA, 19 bp, Mus musculus
  siRNA target sequence for 5830484J08Rik (NM_029523.2,1992-2010).
cattgatgataaatacttt

SEQ ID NO: 680090 - DNA, 19 bp, Mus musculus
  siRNA target sequence for 5830484J08Rik (NM_029523.2,2062-2080).
ggcttcaagattagtttct

SEQ ID NO: 680091 - DNA, 19 bp, Mus musculus
  siRNA target sequence for 5830484J08Rik (NM_029523.2,2089-2107).
ggatcatcatcaggaaatt

SEQ ID NO: 680092 - DNA, 19 bp, Mus musculus
  siRNA target sequence for 5830484J08Rik (NM_029523.2,2167-2185).
gggcaatgttaaaaatcat

SEQ ID NO: 680093 - DNA, 19 bp, Mus musculus
  siRNA target sequence for 5830484J08Rik (NM_029523.2,2209-2227).
gccaacatattcttactgt

SEQ ID NO: 680094 - DNA, 19 bp, Mus musculus
  siRNA target sequence for 5830484J08Rik (NM_029523.2,2280-2298).
ctgcaattgcagaactttt

SEQ ID NO: 680095 - DNA, 19 bp, Mus musculus
  siRNA target sequence for 5830484J08Rik (NM_029523.2,2289-2307).
cagaacttttggagaatat

SEQ ID NO: 680096 - DNA, 19 bp, Mus musculus
  siRNA target sequence for 5830484J08Rik (NM_029523.2,2294-2312).
cttttggagaatattgtca

SEQ ID NO: 680097 - DNA, 19 bp, Mus musculus
  siRNA target sequence for 5830484J08Rik (NM_029523.2,2302-2320).
gaatattgtcagaagtaaa

SEQ ID NO: 680098 - DNA, 19 bp, Mus musculus
  siRNA target sequence for 5830484J08Rik (NM_029523.2,2406-2424).
gtgaagcagcactttttga

SEQ ID NO: 680099 - DNA, 19 bp, Mus musculus
  siRNA target sequence for 5830484J08Rik (NM_029523.2,2411-2429).
gcagcactttttgatgata

SEQ ID NO: 680100 - DNA, 19 bp, Mus musculus
  siRNA target sequence for 5830484J08Rik (NM_029523.2,2412-2430).
cagcactttttgatgataa

SEQ ID NO: 680101 - DNA, 19 bp, Mus musculus
  siRNA target sequence for 5830484J08Rik (NM_029523.2,2443-2461).
gcaaccgatgctgaattta

SEQ ID NO: 680102 - DNA, 19 bp, Mus musculus
  siRNA target sequence for 6430513E09Rik (NM_177034.2,239-257).
gtaccagtttgaaagtcat

SEQ ID NO: 680103 - DNA, 19 bp, Mus musculus
  siRNA target sequence for 6430513E09Rik (NM_177034.2,338-356).
cacggaagcctccacaaat

SEQ ID NO: 680104 - DNA, 19 bp, Mus musculus
  siRNA target sequence for 6430513E09Rik (NM_177034.2,340-358).
cggaagcctccacaaataa

SEQ ID NO: 680105 - DNA, 19 bp, Mus musculus
  siRNA target sequence for 6430513E09Rik (NM_177034.2,345-363).
gcctccacaaataaagagt

SEQ ID NO: 680106 - DNA, 19 bp, Mus musculus
  siRNA target sequence for 6430513E09Rik (NM_177034.2,386-404).
cccaacctacgttgaagtt

SEQ ID NO: 680107 - DNA, 19 bp, Mus musculus
  siRNA target sequence for 6430513E09Rik (NM_177034.2,415-433).
gcgaccctgaagacttgat

SEQ ID NO: 680108 - DNA, 19 bp, Mus musculus
  siRNA target sequence for 6430513E09Rik (NM_177034.2,426-444).
gacttgatcgatggaatta

SEQ ID NO: 680109 - DNA, 19 bp, Mus musculus
  siRNA target sequence for 6430513E09Rik (NM_177034.2,428-446).
cttgatcgatggaattatt

SEQ ID NO: 680110 - DNA, 19 bp, Mus musculus
  siRNA target sequence for 6430513E09Rik (NM_177034.2,431-449).
gatcgatggaattattttt

SEQ ID NO: 680111 - DNA, 19 bp, Mus musculus
  siRNA target sequence for 6430513E09Rik (NM_177034.2,476-494).
gctactctcagacaaaact

SEQ ID NO: 680112 - DNA, 19 bp, Mus musculus
  siRNA target sequence for 6430513E09Rik (NM_177034.2,531-549).
gcagtaagccggatcaaga

SEQ ID NO: 680113 - DNA, 19 bp, Mus musculus
  siRNA target sequence for 6430513E09Rik (NM_177034.2,545-563).
caagacggcccagaaatta

SEQ ID NO: 680114 - DNA, 19 bp, Mus musculus
  siRNA target sequence for 6430513E09Rik (NM_177034.2,658-676).
cggatacacaggaacctat

SEQ ID NO: 680115 - DNA, 19 bp, Mus musculus
  siRNA target sequence for 6430513E09Rik (NM_177034.2,748-766).
ggcggatgccccgttctaa

SEQ ID NO: 680116 - DNA, 19 bp, Mus musculus
  siRNA target sequence for 6430513E09Rik (NM_177034.2,750-768).
cggatgccccgttctaact

SEQ ID NO: 680117 - DNA, 19 bp, Mus musculus
  siRNA target sequence for 6430513E09Rik (NM_177034.2,760-778).
gttctaactcccaggaaaa

SEQ ID NO: 680118 - DNA, 19 bp, Mus musculus
  siRNA target sequence for 6430513E09Rik (NM_177034.2,763-781).
ctaactcccaggaaaatgt

SEQ ID NO: 680119 - DNA, 19 bp, Mus musculus
  siRNA target sequence for 6430513E09Rik (NM_177034.2,808-826).
gaaaaagacagtacaagat

SEQ ID NO: 680120 - DNA, 19 bp, Mus musculus
  siRNA target sequence for 6430513E09Rik (NM_177034.2,824-842).
gatgatctgccatgtcttt

SEQ ID NO: 680121 - DNA, 19 bp, Mus musculus
  siRNA target sequence for 6430513E09Rik (NM_177034.2,892-910).
gtgttgcgtaccaggaatt

SEQ ID NO: 680122 - DNA, 19 bp, Mus musculus
  siRNA target sequence for 6430513E09Rik (NM_177034.2,1018-1036).
cggaaaactgcaaagatgt

SEQ ID NO: 680123 - DNA, 19 bp, Mus musculus
  siRNA target sequence for 6430513E09Rik (NM_177034.2,1113-1131).
gtgatcattgccaacatga

SEQ ID NO: 680124 - DNA, 19 bp, Mus musculus
  siRNA target sequence for 6430513E09Rik (NM_177034.2,1237-1255).
gcatcattaagggcttaaa

SEQ ID NO: 680125 - DNA, 19 bp, Mus musculus
  siRNA target sequence for 6430513E09Rik (NM_177034.2,1267-1285).
gagtgaagctgaatatcgt

SEQ ID NO: 680126 - DNA, 19 bp, Mus musculus
  siRNA target sequence for 6430513E09Rik (NM_177034.2,1419-1437).
ggacatcggatcatcgaaa

SEQ ID NO: 680127 - DNA, 19 bp, Mus musculus
  siRNA target sequence for 6430513E09Rik (NM_177034.2,1422-1440).
catcggatcatcgaaatca

SEQ ID NO: 680128 - DNA, 19 bp, Mus musculus
  siRNA target sequence for 9130207N01 (NM_177605.2,807-825).
gcagggcttaccgaaacaa

SEQ ID NO: 680129 - DNA, 19 bp, Mus musculus
  siRNA target sequence for 9130207N01 (NM_177605.2,826-844).
ggctcgggaacctatggaa

SEQ ID NO: 680130 - DNA, 19 bp, Mus musculus
  siRNA target sequence for 9130207N01 (NM_177605.2,886-904).
ctctgacctacgagttgtt

SEQ ID NO: 680131 - DNA, 19 bp, Mus musculus
  siRNA target sequence for 9130207N01 (NM_177605.2,888-906).
ctgacctacgagttgttaa

SEQ ID NO: 680132 - DNA, 19 bp, Mus musculus
  siRNA target sequence for 9130207N01 (NM_177605.2,937-955).
cgcccttggacctgttgat

SEQ ID NO: 680133 - DNA, 19 bp, Mus musculus
  siRNA target sequence for 9130207N01 (NM_177605.2,1035-1053).
ctcaaagtatccctaaact

SEQ ID NO: 680134 - DNA, 19 bp, Mus musculus
  siRNA target sequence for 9130207N01 (NM_177605.2,1047-1065).
ctaaactctcccctatact

SEQ ID NO: 680135 - DNA, 19 bp, Mus musculus
  siRNA target sequence for 9130207N01 (NM_177605.2,1054-1072).
ctcccctatacttaaggat

SEQ ID NO: 680136 - DNA, 19 bp, Mus musculus
  siRNA target sequence for 9430022A14 (NM_172530.1,480-498).
ctggcaaaggccgtaagaa

SEQ ID NO: 680137 - DNA, 19 bp, Mus musculus
  siRNA target sequence for 9430022A14 (NM_172530.1,736-754).
gcaagacacggtcatcatt

SEQ ID NO: 680138 - DNA, 19 bp, Mus musculus
  siRNA target sequence for 9430022A14 (NM_172530.1,737-755).
caagacacggtcatcattt

SEQ ID NO: 680139 - DNA, 19 bp, Mus musculus
  siRNA target sequence for 9430022A14 (NM_172530.1,763-781).
ctacgctgacccgtatgat

SEQ ID NO: 680140 - DNA, 19 bp, Mus musculus
  siRNA target sequence for 9430022A14 (NM_172530.1,846-864).
cgtacgatgcacaacagat

SEQ ID NO: 680141 - DNA, 19 bp, Mus musculus
  siRNA target sequence for 9430022A14 (NM_172530.1,850-868).
cgatgcacaacagatgata

SEQ ID NO: 680142 - DNA, 19 bp, Mus musculus
  siRNA target sequence for 9430022A14 (NM_172530.1,877-895).
cagacgccgtggttccaaa

SEQ ID NO: 680143 - DNA, 19 bp, Mus musculus
  siRNA target sequence for 9430022A14 (NM_172530.1,1003-1021).
gaagccgccacaactctat

SEQ ID NO: 680144 - DNA, 19 bp, Mus musculus
  siRNA target sequence for 9430022A14 (NM_172530.1,1007-1025).
ccgccacaactctatgaca

SEQ ID NO: 680145 - DNA, 19 bp, Mus musculus
  siRNA target sequence for 9430022A14 (NM_172530.1,1116-1134).
ccgctgctgagtatgaaca

SEQ ID NO: 680146 - DNA, 19 bp, Mus musculus
  siRNA target sequence for 9430022A14 (NM_172530.1,1408-1426).
gtcagggaacagcaagtat

SEQ ID NO: 680147 - DNA, 19 bp, Mus musculus
  siRNA target sequence for 9430022A14 (NM_172530.1,1452-1470).
ggtgtgtccacatcatagt

SEQ ID NO: 680148 - DNA, 19 bp, Mus musculus
  siRNA target sequence for 9430022A14 (NM_172530.1,1531-1549).
ccctgaagtggtacactat

SEQ ID NO: 680149 - DNA, 19 bp, Mus musculus
  siRNA target sequence for 9430022A14 (NM_172530.1,1532-1550).
cctgaagtggtacactatt

SEQ ID NO: 680150 - DNA, 19 bp, Mus musculus
  siRNA target sequence for 9430022A14 (NM_172530.1,1533-1551).
ctgaagtggtacactatta

SEQ ID NO: 680151 - DNA, 19 bp, Mus musculus
  siRNA target sequence for 9430022A14 (NM_172530.1,1535-1553).
gaagtggtacactattact

SEQ ID NO: 680152 - DNA, 19 bp, Mus musculus
  siRNA target sequence for 9830125E18 (NM_177707.2,444-462).
cgactgaagcagttattca

SEQ ID NO: 680153 - DNA, 19 bp, Mus musculus
  siRNA target sequence for 9830125E18 (NM_177707.2,543-561).
gggcccatctactatatct

SEQ ID NO: 680154 - DNA, 19 bp, Mus musculus
  siRNA target sequence for 9830125E18 (NM_177707.2,544-562).
ggcccatctactatatcta

SEQ ID NO: 680155 - DNA, 19 bp, Mus musculus
  siRNA target sequence for 9830125E18 (NM_177707.2,547-565).
ccatctactatatctatga

SEQ ID NO: 680156 - DNA, 19 bp, Mus musculus
  siRNA target sequence for 9830125E18 (NM_177707.2,634-652).
cccacaagttcaaagatca

SEQ ID NO: 680157 - DNA, 19 bp, Mus musculus
  siRNA target sequence for 9830125E18 (NM_177707.2,690-708).
cggatgattgtgctcaata

SEQ ID NO: 680158 - DNA, 19 bp, Mus musculus
  siRNA target sequence for 9830125E18 (NM_177707.2,691-709).
ggatgattgtgctcaataa

SEQ ID NO: 680159 - DNA, 19 bp, Mus musculus
  siRNA target sequence for 9830125E18 (NM_177707.2,717-735).
ggactccgctgcaagaact

SEQ ID NO: 680160 - DNA, 19 bp, Mus musculus
  siRNA target sequence for 9830125E18 (NM_177707.2,874-892).
gcaatgaccccgtgtttga

SEQ ID NO: 680161 - DNA, 19 bp, Mus musculus
  siRNA target sequence for 9830125E18 (NM_177707.2,875-893).
caatgaccccgtgtttgaa

SEQ ID NO: 680162 - DNA, 19 bp, Mus musculus
  siRNA target sequence for 9830125E18 (NM_177707.2,907-925).
gggtgatcatggcaaacaa

SEQ ID NO: 680163 - DNA, 19 bp, Mus musculus
  siRNA target sequence for 9830125E18 (NM_177707.2,941-959).
gcaggcagataagaaaaat

SEQ ID NO: 680164 - DNA, 19 bp, Mus musculus
  siRNA target sequence for 9830125E18 (NM_177707.2,1093-1111).
gcttccagcagtctcatta

SEQ ID NO: 680165 - DNA, 19 bp, Mus musculus
  siRNA target sequence for 9830125E18 (NM_177707.2,1118-1136).
ggctctctatcggttcaaa

SEQ ID NO: 680166 - DNA, 19 bp, Mus musculus
  siRNA target sequence for 9830125E18 (NM_177707.2,1228-1246).
gagagaaagtcggattctt

SEQ ID NO: 680167 - DNA, 19 bp, Mus musculus
  siRNA target sequence for 9830125E18 (NM_177707.2,1292-1310).
ccgcgtgaccagatcgttt

SEQ ID NO: 680168 - DNA, 19 bp, Mus musculus
  siRNA target sequence for AA673511 (NM_021539.3,214-232).
cagttcgactggaagtcaa

SEQ ID NO: 680169 - DNA, 19 bp, Mus musculus
  siRNA target sequence for AA673511 (NM_021539.3,320-338).
ggcccttagaggaacagtt

SEQ ID NO: 680170 - DNA, 19 bp, Mus musculus
  siRNA target sequence for AA673511 (NM_021539.3,339-357).
catccctaaaggattcgaa

SEQ ID NO: 680171 - DNA, 19 bp, Mus musculus
  siRNA target sequence for AA673511 (NM_021539.3,843-861).
cacactaatccggaaacta

SEQ ID NO: 680172 - DNA, 19 bp, Mus musculus
  siRNA target sequence for AA673511 (NM_021539.3,845-863).
cactaatccggaaactaga

SEQ ID NO: 680173 - DNA, 19 bp, Mus musculus
  siRNA target sequence for AA673511 (NM_021539.3,915-933).
gcttgtcacagcttcgtat

SEQ ID NO: 680174 - DNA, 19 bp, Mus musculus
  siRNA target sequence for AA673511 (NM_021539.3,930-948).
gtatgacaccagtgtgatt

SEQ ID NO: 680175 - DNA, 19 bp, Mus musculus
  siRNA target sequence for AA673511 (NM_021539.3,1182-1200).
cccacacggtggaattatt

SEQ ID NO: 680176 - DNA, 19 bp, Mus musculus
  siRNA target sequence for AA673511 (NM_021539.3,1351-1369).
ctcacatacaggactttct

SEQ ID NO: 680177 - DNA, 19 bp, Mus musculus
  siRNA target sequence for AI118201 (NM_134089.1,504-522).
ccttcttccgactgttgaa

SEQ ID NO: 680178 - DNA, 19 bp, Mus musculus
  siRNA target sequence for AI118201 (NM_134089.1,616-634).
gaacgatattcctgagata

SEQ ID NO: 680179 - DNA, 19 bp, Mus musculus
  siRNA target sequence for AI118201 (NM_134089.1,629-647).
gagatacctgagagcataa

SEQ ID NO: 680180 - DNA, 19 bp, Mus musculus
  siRNA target sequence for AI118201 (NM_134089.1,635-653).
cctgagagcataaagttct

SEQ ID NO: 680181 - DNA, 19 bp, Mus musculus
  siRNA target sequence for AI118201 (NM_134089.1,685-703).
gaaccccctgtctagactt

SEQ ID NO: 680182 - DNA, 19 bp, Mus musculus
  siRNA target sequence for AI118201 (NM_134089.1,818-836).
cgggagaacctgcttaaat

SEQ ID NO: 680183 - DNA, 19 bp, Mus musculus
  siRNA target sequence for AI118201 (NM_134089.1,820-838).
ggagaacctgcttaaatct

SEQ ID NO: 680184 - DNA, 19 bp, Mus musculus
  siRNA target sequence for AI118201 (NM_134089.1,937-955).
ccttcgggagctatggtta

SEQ ID NO: 680185 - DNA, 19 bp, Mus musculus
  siRNA target sequence for AI118201 (NM_134089.1,1229-1247).
ctcacggagaacctgttaa

SEQ ID NO: 680186 - DNA, 19 bp, Mus musculus
  siRNA target sequence for AI118201 (NM_134089.1,1554-1572).
cccagacgggtgaaaaggt

SEQ ID NO: 680187 - DNA, 19 bp, Mus musculus
  siRNA target sequence for AI118201 (NM_134089.1,2019-2037).
cagaagacgactataacga

SEQ ID NO: 680188 - DNA, 19 bp, Mus musculus
  siRNA target sequence for AI118201 (NM_134089.1,2156-2174).
gacacgccccactacaaga

SEQ ID NO: 680189 - DNA, 19 bp, Mus musculus
  siRNA target sequence for AI118201 (NM_134089.1,2436-2454).
ccaataacctgctgataga

SEQ ID NO: 680190 - DNA, 19 bp, Mus musculus
  siRNA target sequence for AI118201 (NM_134089.1,2625-2643).
gagttggtgacaaacttct

SEQ ID NO: 680191 - DNA, 19 bp, Mus musculus
  siRNA target sequence for AI118201 (NM_134089.1,2757-2775).
cggagaacgcagtcactat

SEQ ID NO: 680192 - DNA, 19 bp, Mus musculus
  siRNA target sequence for AI118201 (NM_134089.1,2758-2776).
ggagaacgcagtcactatt

SEQ ID NO: 680193 - DNA, 19 bp, Mus musculus
  siRNA target sequence for AI118201 (NM_134089.1,2779-2797).
ccccttacgccctgaagat

SEQ ID NO: 680194 - DNA, 19 bp, Mus musculus
  siRNA target sequence for AI118201 (NM_134089.1,2786-2804).
cgccctgaagatgactata

SEQ ID NO: 680195 - DNA, 19 bp, Mus musculus
  siRNA target sequence for AI118201 (NM_134089.1,2892-2910).
gtctcgtgcgcagtgaaaa

SEQ ID NO: 680196 - DNA, 19 bp, Mus musculus
  siRNA target sequence for AI118201 (NM_134089.1,3336-3354).
gcccattggggcttagcat

SEQ ID NO: 680197 - DNA, 19 bp, Mus musculus
  siRNA target sequence for AI118201 (NM_134089.1,3337-3355).
cccattggggcttagcatt

SEQ ID NO: 680198 - DNA, 19 bp, Mus musculus
  siRNA target sequence for AI118201 (NM_134089.1,3352-3370).
cattgtaggaggttctgat

SEQ ID NO: 680199 - DNA, 19 bp, Mus musculus
  siRNA target sequence for AI118201 (NM_134089.1,3469-3487).
ccgcatcctagcagtgaat

SEQ ID NO: 680200 - DNA, 19 bp, Mus musculus
  siRNA target sequence for AI118201 (NM_134089.1,3501-3519).
gggaggccacacatcaaga

SEQ ID NO: 680201 - DNA, 19 bp, Mus musculus
  siRNA target sequence for AI118201 (NM_134089.1,3954-3972).
ggaacagtctggaaagcat

SEQ ID NO: 680202 - DNA, 19 bp, Mus musculus
  siRNA target sequence for AI118201 (NM_134089.1,3955-3973).
gaacagtctggaaagcatt

SEQ ID NO: 680203 - DNA, 19 bp, Mus musculus
  siRNA target sequence for AI118201 (NM_134089.1,4066-4084).
gaccacgggtcggaatcta

SEQ ID NO: 680204 - DNA, 19 bp, Mus musculus
  siRNA target sequence for AI118201 (NM_134089.1,4434-4452).
ccttccgtgaacgacaaaa

SEQ ID NO: 680205 - DNA, 19 bp, Mus musculus
  siRNA target sequence for AI118201 (NM_134089.1,4439-4457).
cgtgaacgacaaaagtact

SEQ ID NO: 680206 - DNA, 19 bp, Mus musculus
  siRNA target sequence for AI118201 (NM_134089.1,4875-4893).
ggagggcagccagaatgaa

SEQ ID NO: 680207 - DNA, 19 bp, Mus musculus
  siRNA target sequence for AI118201 (NM_134089.1,4920-4938).
cacagatggtccttagcaa

SEQ ID NO: 680208 - DNA, 19 bp, Mus musculus
  siRNA target sequence for AI118201 (NM_134089.1,5016-5034).
ccacaccattggaagactt

SEQ ID NO: 680209 - DNA, 19 bp, Mus musculus
  siRNA target sequence for AI118201 (NM_134089.1,5069-5087).
cctttgtctggaaagaagt

SEQ ID NO: 680210 - DNA, 19 bp, Mus musculus
  siRNA target sequence for AI118201 (NM_134089.1,5121-5139).
ccagacctgtgtatgacat

SEQ ID NO: 680211 - DNA, 19 bp, Mus musculus
  siRNA target sequence for Asb10 (NM_080444.2,338-356).
gtctggctcccgattccat

SEQ ID NO: 680212 - DNA, 19 bp, Mus musculus
  siRNA target sequence for Asb10 (NM_080444.2,346-364).
cccgattccatctttgata

SEQ ID NO: 680213 - DNA, 19 bp, Mus musculus
  siRNA target sequence for Asb10 (NM_080444.2,373-391).
ccagagcgatggagagatt

SEQ ID NO: 680214 - DNA, 19 bp, Mus musculus
  siRNA target sequence for Asb10 (NM_080444.2,386-404).
gagattaccgcttcaacat

SEQ ID NO: 680215 - DNA, 19 bp, Mus musculus
  siRNA target sequence for Asb10 (NM_080444.2,821-839).
ctgatgtccgcaattctga

SEQ ID NO: 680216 - DNA, 19 bp, Mus musculus
  siRNA target sequence for Asb10 (NM_080444.2,903-921).
caccaccaaccgctgtttt

SEQ ID NO: 680217 - DNA, 19 bp, Mus musculus
  siRNA target sequence for Asb10 (NM_080444.2,906-924).
caccaaccgctgttttcaa

SEQ ID NO: 680218 - DNA, 19 bp, Mus musculus
  siRNA target sequence for Asb10 (NM_080444.2,908-926).
ccaaccgctgttttcaact

SEQ ID NO: 680219 - DNA, 19 bp, Mus musculus
  siRNA target sequence for Asb10 (NM_080444.2,1236-1254).
catcgaggtcctgatgaat

SEQ ID NO: 680220 - DNA, 19 bp, Mus musculus
  siRNA target sequence for Asb10 (NM_080444.2,1251-1269).
gaatacataccgtgtagtt

SEQ ID NO: 680221 - DNA, 19 bp, Mus musculus
  siRNA target sequence for Asb10 (NM_080444.2,1296-1314).
ggtgccaccagagattcta

SEQ ID NO: 680222 - DNA, 19 bp, Mus musculus
  siRNA target sequence for Asb10 (NM_080444.2,1301-1319).
caccagagattctacagaa

SEQ ID NO: 680223 - DNA, 19 bp, Mus musculus
  siRNA target sequence for Asb11 (NM_026853.1,165-183).
gacgcttactggctcttaa

SEQ ID NO: 680224 - DNA, 19 bp, Mus musculus
  siRNA target sequence for Asb11 (NM_026853.1,202-220).
catcaacgtcaatcttgta

SEQ ID NO: 680225 - DNA, 19 bp, Mus musculus
  siRNA target sequence for Asb11 (NM_026853.1,205-223).
caacgtcaatcttgtaaca

SEQ ID NO: 680226 - DNA, 19 bp, Mus musculus
  siRNA target sequence for Asb11 (NM_026853.1,208-226).
cgtcaatcttgtaacaata

SEQ ID NO: 680227 - DNA, 19 bp, Mus musculus
  siRNA target sequence for Asb11 (NM_026853.1,278-296).
gctaaggccttgctagaaa

SEQ ID NO: 680228 - DNA, 19 bp, Mus musculus
  siRNA target sequence for Asb11 (NM_026853.1,364-382).
cagtgctgcgtgtgtcaat

SEQ ID NO: 680229 - DNA, 19 bp, Mus musculus
  siRNA target sequence for Asb11 (NM_026853.1,523-541).
gctgggaacgcctctgtat

SEQ ID NO: 680230 - DNA, 19 bp, Mus musculus
  siRNA target sequence for Asb11 (NM_026853.1,561-579).
gagttgattgtgtgaagaa

SEQ ID NO: 680231 - DNA, 19 bp, Mus musculus
  siRNA target sequence for Asb11 (NM_026853.1,655-673).
cagtgtggaggtcatcaat

SEQ ID NO: 680232 - DNA, 19 bp, Mus musculus
  siRNA target sequence for Asb11 (NM_026853.1,657-675).
gtgtggaggtcatcaatct

SEQ ID NO: 680233 - DNA, 19 bp, Mus musculus
  siRNA target sequence for Asb11 (NM_026853.1,736-754).
ccttgcagtgcccaaaagt

SEQ ID NO: 680234 - DNA, 19 bp, Mus musculus
  siRNA target sequence for Asb11 (NM_026853.1,737-755).
cttgcagtgcccaaaagta

SEQ ID NO: 680235 - DNA, 19 bp, Mus musculus
  siRNA target sequence for Asb11 (NM_026853.1,875-893).
ccagaatccctggaaaaat

SEQ ID NO: 680236 - DNA, 19 bp, Mus musculus
  siRNA target sequence for Asb14 (NM_080856.1,115-133).
gactggacatggtaaaact

SEQ ID NO: 680237 - DNA, 19 bp, Mus musculus
  siRNA target sequence for Asb14 (NM_080856.1,217-235).
ctgggatcatgcaactact

SEQ ID NO: 680238 - DNA, 19 bp, Mus musculus
  siRNA target sequence for Asb14 (NM_080856.1,252-270).
gcttacctgatggttgatt

SEQ ID NO: 680239 - DNA, 19 bp, Mus musculus
  siRNA target sequence for Asb14 (NM_080856.1,253-271).
cttacctgatggttgatta

SEQ ID NO: 680240 - DNA, 19 bp, Mus musculus
  siRNA target sequence for Asb14 (NM_080856.1,308-326).
gtcctctgtgttacttgaa

SEQ ID NO: 680241 - DNA, 19 bp, Mus musculus
  siRNA target sequence for Asb14 (NM_080856.1,384-402).
gccaacattcctaagagtt

SEQ ID NO: 680242 - DNA, 19 bp, Mus musculus
  siRNA target sequence for Asb14 (NM_080856.1,560-578).
cattcaggctggatttgat

SEQ ID NO: 680243 - DNA, 19 bp, Mus musculus
  siRNA target sequence for Asb14 (NM_080856.1,566-584).
ggctggatttgatgtgaat

SEQ ID NO: 680244 - DNA, 19 bp, Mus musculus
  siRNA target sequence for Asb14 (NM_080856.1,567-585).
gctggatttgatgtgaatt

SEQ ID NO: 680245 - DNA, 19 bp, Mus musculus
  siRNA target sequence for Asb14 (NM_080856.1,599-617).
gagaatccgtaaacattat

SEQ ID NO: 680246 - DNA, 19 bp, Mus musculus
  siRNA target sequence for Asb14 (NM_080856.1,601-619).
gaatccgtaaacattatga

SEQ ID NO: 680247 - DNA, 19 bp, Mus musculus
  siRNA target sequence for Asb14 (NM_080856.1,607-625).
gtaaacattatgatgatca

SEQ ID NO: 680248 - DNA, 19 bp, Mus musculus
  siRNA target sequence for Asb14 (NM_080856.1,627-645).
cggaagtcagccttgtatt

SEQ ID NO: 680249 - DNA, 19 bp, Mus musculus
  siRNA target sequence for Asb14 (NM_080856.1,632-650).
gtcagccttgtattttgct

SEQ ID NO: 680250 - DNA, 19 bp, Mus musculus
  siRNA target sequence for Asb14 (NM_080856.1,638-656).
cttgtattttgctgtttca

SEQ ID NO: 680251 - DNA, 19 bp, Mus musculus
  siRNA target sequence for Asb14 (NM_080856.1,659-677).
cggtgacctcccttcagtt

SEQ ID NO: 680252 - DNA, 19 bp, Mus musculus
  siRNA target sequence for Asb14 (NM_080856.1,697-715).
gagctctacccaatcaaga

SEQ ID NO: 680253 - DNA, 19 bp, Mus musculus
  siRNA target sequence for Asb14 (NM_080856.1,750-768).
ggcaactatgagctcataa

SEQ ID NO: 680254 - DNA, 19 bp, Mus musculus
  siRNA target sequence for Asb14 (NM_080856.1,809-827).
ccgcgttaaccctttgcat

SEQ ID NO: 680255 - DNA, 19 bp, Mus musculus
  siRNA target sequence for Asb14 (NM_080856.1,810-828).
cgcgttaaccctttgcatt

SEQ ID NO: 680256 - DNA, 19 bp, Mus musculus
  siRNA target sequence for Asb14 (NM_080856.1,811-829).
gcgttaaccctttgcattt

SEQ ID NO: 680257 - DNA, 19 bp, Mus musculus
  siRNA target sequence for Asb14 (NM_080856.1,831-849).
ccatcagcgctacaataca

SEQ ID NO: 680258 - DNA, 19 bp, Mus musculus
  siRNA target sequence for Asb14 (NM_080856.1,835-853).
cagcgctacaatacacatt

SEQ ID NO: 680259 - DNA, 19 bp, Mus musculus
  siRNA target sequence for Asb14 (NM_080856.1,837-855).
gcgctacaatacacattga

SEQ ID NO: 680260 - DNA, 19 bp, Mus musculus
  siRNA target sequence for Asb14 (NM_080856.1,838-856).
cgctacaatacacattgaa

SEQ ID NO: 680261 - DNA, 19 bp, Mus musculus
  siRNA target sequence for Asb14 (NM_080856.1,872-890).
caggatgctgttgaattat

SEQ ID NO: 680262 - DNA, 19 bp, Mus musculus
  siRNA target sequence for Asb14 (NM_080856.1,935-953).
ggttcatcggttttgtact

SEQ ID NO: 680263 - DNA, 19 bp, Mus musculus
  siRNA target sequence for Asb14 (NM_080856.1,967-985).
catctacagttattaaaga

SEQ ID NO: 680264 - DNA, 19 bp, Mus musculus
  siRNA target sequence for Asb14 (NM_080856.1,992-1010).
gttttgtgaagtcataact

SEQ ID NO: 680265 - DNA, 19 bp, Mus musculus
  siRNA target sequence for Asb14 (NM_080856.1,1044-1062).
gttcgtgtgatgcttgatt

SEQ ID NO: 680266 - DNA, 19 bp, Mus musculus
  siRNA target sequence for Asb14 (NM_080856.1,1052-1070).
gatgcttgattatgttgat

SEQ ID NO: 680267 - DNA, 19 bp, Mus musculus
  siRNA target sequence for Asb14 (NM_080856.1,1055-1073).
gcttgattatgttgatcaa

SEQ ID NO: 680268 - DNA, 19 bp, Mus musculus
  siRNA target sequence for Asb14 (NM_080856.1,1071-1089).
caagttcaaatctgttcaa

SEQ ID NO: 680269 - DNA, 19 bp, Mus musculus
  siRNA target sequence for Asb14 (NM_080856.1,1077-1095).
caaatctgttcaaaattga

SEQ ID NO: 680270 - DNA, 19 bp, Mus musculus
  siRNA target sequence for Asb14 (NM_080856.1,1118-1136).
gctctggccagaaatacat

SEQ ID NO: 680271 - DNA, 19 bp, Mus musculus
  siRNA target sequence for Asb14 (NM_080856.1,1145-1163).
gaccaacccccgttctcta

SEQ ID NO: 680272 - DNA, 19 bp, Mus musculus
  siRNA target sequence for Asb14 (NM_080856.1,1148-1166).
caacccccgttctctacaa

SEQ ID NO: 680273 - DNA, 19 bp, Mus musculus
  siRNA target sequence for Asb14 (NM_080856.1,1153-1171).
cccgttctctacaacattt

SEQ ID NO: 680274 - DNA, 19 bp, Mus musculus
  siRNA target sequence for Asb14 (NM_080856.1,1167-1185).
catttgtgccgccttaaga

SEQ ID NO: 680275 - DNA, 19 bp, Mus musculus
  siRNA target sequence for Asb14 (NM_080856.1,1179-1197).
cttaagatccggaagtgta

SEQ ID NO: 680276 - DNA, 19 bp, Mus musculus
  siRNA target sequence for Asb14 (NM_080856.1,1195-1213).
gtatgggacggttacgttt

SEQ ID NO: 680277 - DNA, 19 bp, Mus musculus
  siRNA target sequence for Asb14 (NM_080856.1,1215-1233).
cgctgccccgtcttcatgt

SEQ ID NO: 680278 - DNA, 19 bp, Mus musculus
  siRNA target sequence for Asb14 (NM_080856.1,1242-1260).
ccgctgcccaatctcttaa

SEQ ID NO: 680279 - DNA, 19 bp, Mus musculus
  siRNA target sequence for Asb14 (NM_080856.1,1243-1261).
cgctgcccaatctcttaaa

SEQ ID NO: 680280 - DNA, 19 bp, Mus musculus
  siRNA target sequence for Asb14 (NM_080856.1,1244-1262).
gctgcccaatctcttaaaa

SEQ ID NO: 680281 - DNA, 19 bp, Mus musculus
  siRNA target sequence for Asb14 (NM_080856.1,1264-1282).
cgtacgtcctttacaaaga

SEQ ID NO: 680282 - DNA, 19 bp, Mus musculus
  siRNA target sequence for Asb16 (NM_148953.1,5-23).
caggggagagctttccttt

SEQ ID NO: 680283 - DNA, 19 bp, Mus musculus
  siRNA target sequence for Asb16 (NM_148953.1,238-256).
gaagacgctgccaatatga

SEQ ID NO: 680284 - DNA, 19 bp, Mus musculus
  siRNA target sequence for Asb16 (NM_148953.1,408-426).
gcttgacgcccgaattgga

SEQ ID NO: 680285 - DNA, 19 bp, Mus musculus
  siRNA target sequence for Asb16 (NM_148953.1,480-498).
gctcctgctcacatttggt

SEQ ID NO: 680286 - DNA, 19 bp, Mus musculus
  siRNA target sequence for Asb16 (NM_148953.1,496-514).
ggtgccaaggctaatgtat

SEQ ID NO: 680287 - DNA, 19 bp, Mus musculus
  siRNA target sequence for Asb16 (NM_148953.1,656-674).
ctcgtggcctggaacaaca

SEQ ID NO: 680288 - DNA, 19 bp, Mus musculus
  siRNA target sequence for Asb17 (NM_025758.2,110-128).
ccggaagacgtcttttcca

SEQ ID NO: 680289 - DNA, 19 bp, Mus musculus
  siRNA target sequence for Asb17 (NM_025758.2,111-129).
cggaagacgtcttttccaa

SEQ ID NO: 680290 - DNA, 19 bp, Mus musculus
  siRNA target sequence for Asb17 (NM_025758.2,145-163).
gtaaccttgttgacaagat

SEQ ID NO: 680291 - DNA, 19 bp, Mus musculus
  siRNA target sequence for Asb17 (NM_025758.2,149-167).
ccttgttgacaagatagtt

SEQ ID NO: 680292 - DNA, 19 bp, Mus musculus
  siRNA target sequence for Asb17 (NM_025758.2,150-168).
cttgttgacaagatagtta

SEQ ID NO: 680293 - DNA, 19 bp, Mus musculus
  siRNA target sequence for Asb17 (NM_025758.2,200-218).
gggataccactgctatgaa

SEQ ID NO: 680294 - DNA, 19 bp, Mus musculus
  siRNA target sequence for Asb17 (NM_025758.2,211-229).
gctatgaacccaggattta

SEQ ID NO: 680295 - DNA, 19 bp, Mus musculus
  siRNA target sequence for Asb17 (NM_025758.2,216-234).
gaacccaggatttacagaa

SEQ ID NO: 680296 - DNA, 19 bp, Mus musculus
  siRNA target sequence for Asb17 (NM_025758.2,261-279).
gacttggacggctttgaca

SEQ ID NO: 680297 - DNA, 19 bp, Mus musculus
  siRNA target sequence for Asb17 (NM_025758.2,285-303).
ctcacggactatattgctt

SEQ ID NO: 680298 - DNA, 19 bp, Mus musculus
  siRNA target sequence for Asb17 (NM_025758.2,287-305).
cacggactatattgctttt

SEQ ID NO: 680299 - DNA, 19 bp, Mus musculus
  siRNA target sequence for Asb17 (NM_025758.2,314-332).
gtcaggacaccgttttgaa

SEQ ID NO: 680300 - DNA, 19 bp, Mus musculus
  siRNA target sequence for Asb17 (NM_025758.2,316-334).
caggacaccgttttgaact

SEQ ID NO: 680301 - DNA, 19 bp, Mus musculus
  siRNA target sequence for Asb17 (NM_025758.2,323-341).
ccgttttgaactcaacttt

SEQ ID NO: 680302 - DNA, 19 bp, Mus musculus
  siRNA target sequence for Asb17 (NM_025758.2,324-342).
cgttttgaactcaacttta

SEQ ID NO: 680303 - DNA, 19 bp, Mus musculus
  siRNA target sequence for Asb17 (NM_025758.2,325-343).
gttttgaactcaactttaa

SEQ ID NO: 680304 - DNA, 19 bp, Mus musculus
  siRNA target sequence for Asb17 (NM_025758.2,357-375).
gaaatatgcgtgaatacca

SEQ ID NO: 680305 - DNA, 19 bp, Mus musculus
  siRNA target sequence for Asb17 (NM_025758.2,364-382).
gcgtgaataccattctgta

SEQ ID NO: 680306 - DNA, 19 bp, Mus musculus
  siRNA target sequence for Asb17 (NM_025758.2,387-405).
gttttcgccaggaaaggta

SEQ ID NO: 680307 - DNA, 19 bp, Mus musculus
  siRNA target sequence for Asb17 (NM_025758.2,526-544).
gcatcacacctctactcta

SEQ ID NO: 680308 - DNA, 19 bp, Mus musculus
  siRNA target sequence for Asb17 (NM_025758.2,626-644).
cattgttctgacaatacta

SEQ ID NO: 680309 - DNA, 19 bp, Mus musculus
  siRNA target sequence for Asb17 (NM_025758.2,630-648).
gttctgacaatactacttt

SEQ ID NO: 680310 - DNA, 19 bp, Mus musculus
  siRNA target sequence for Asb17 (NM_025758.2,650-668).
cccttcgagagtgagaata

SEQ ID NO: 680311 - DNA, 19 bp, Mus musculus
  siRNA target sequence for Asb17 (NM_025758.2,655-673).
cgagagtgagaataatggt

SEQ ID NO: 680312 - DNA, 19 bp, Mus musculus
  siRNA target sequence for Asb17 (NM_025758.2,671-689).
ggttgaccacgagttgatt

SEQ ID NO: 680313 - DNA, 19 bp, Mus musculus
  siRNA target sequence for Asb17 (NM_025758.2,677-695).
ccacgagttgattgacatt

SEQ ID NO: 680314 - DNA, 19 bp, Mus musculus
  siRNA target sequence for Asb17 (NM_025758.2,686-704).
gattgacattcaagaagat

SEQ ID NO: 680315 - DNA, 19 bp, Mus musculus
  siRNA target sequence for Asb17 (NM_025758.2,707-725).
caagacatgtttaatgcta

SEQ ID NO: 680316 - DNA, 19 bp, Mus musculus
  siRNA target sequence for Asb17 (NM_025758.2,784-802).
gacgacgcccaattattca

SEQ ID NO: 680317 - DNA, 19 bp, Mus musculus
  siRNA target sequence for Asb17 (NM_025758.2,786-804).
cgacgcccaattattcaaa

SEQ ID NO: 680318 - DNA, 19 bp, Mus musculus
  siRNA target sequence for Asb17 (NM_025758.2,787-805).
gacgcccaattattcaaaa

SEQ ID NO: 680319 - DNA, 19 bp, Mus musculus
  siRNA target sequence for Asb17 (NM_025758.2,789-807).
cgcccaattattcaaaatt

SEQ ID NO: 680320 - DNA, 19 bp, Mus musculus
  siRNA target sequence for Asb17 (NM_025758.2,884-902).
ccaactgctggccaacaat

SEQ ID NO: 680321 - DNA, 19 bp, Mus musculus
  siRNA target sequence for Asb17 (NM_025758.2,899-917).
caatatgctcccaaatgga

SEQ ID NO: 680322 - DNA, 19 bp, Mus musculus
  siRNA target sequence for Asb17 (NM_025758.2,936-954).
cctactcgtttacaaaact

SEQ ID NO: 680323 - DNA, 19 bp, Mus musculus
  siRNA target sequence for Asb17 (NM_025758.2,937-955).
ctactcgtttacaaaactt

SEQ ID NO: 680324 - DNA, 19 bp, Mus musculus
  siRNA target sequence for Asb18 (NM_139152.1,34-52).
ctcagctcagacatagtga

SEQ ID NO: 680325 - DNA, 19 bp, Mus musculus
  siRNA target sequence for Asb18 (NM_139152.1,123-141).
gcctgtggacgccgtaata

SEQ ID NO: 680326 - DNA, 19 bp, Mus musculus
  siRNA target sequence for Asb18 (NM_139152.1,125-143).
ctgtggacgccgtaataga

SEQ ID NO: 680327 - DNA, 19 bp, Mus musculus
  siRNA target sequence for Asb18 (NM_139152.1,129-147).
ggacgccgtaatagaactt

SEQ ID NO: 680328 - DNA, 19 bp, Mus musculus
  siRNA target sequence for Asb18 (NM_139152.1,135-153).
cgtaatagaacttgctaat

SEQ ID NO: 680329 - DNA, 19 bp, Mus musculus
  siRNA target sequence for Asb18 (NM_139152.1,253-271).
gccaacgcggtgtttgaga

SEQ ID NO: 680330 - DNA, 19 bp, Mus musculus
  siRNA target sequence for Asb18 (NM_139152.1,259-277).
gcggtgtttgagatcagta

SEQ ID NO: 680331 - DNA, 19 bp, Mus musculus
  siRNA target sequence for Asb18 (NM_139152.1,260-278).
cggtgtttgagatcagtaa

SEQ ID NO: 680332 - DNA, 19 bp, Mus musculus
  siRNA target sequence for Asb18 (NM_139152.1,475-493).
gcctgtctcgggaaccata

SEQ ID NO: 680333 - DNA, 19 bp, Mus musculus
  siRNA target sequence for Asb18 (NM_139152.1,1046-1064).
cggtccaggtgctactaaa

SEQ ID NO: 680334 - DNA, 19 bp, Mus musculus
  siRNA target sequence for Asb18 (NM_139152.1,1047-1065).
ggtccaggtgctactaaat

SEQ ID NO: 680335 - DNA, 19 bp, Mus musculus
  siRNA target sequence for Asb18 (NM_139152.1,1121-1139).
cacaggtgcctgaagtcat

SEQ ID NO: 680336 - DNA, 19 bp, Mus musculus
  siRNA target sequence for Asb18 (NM_139152.1,1289-1307).
gctgtactatccgaaaact

SEQ ID NO: 680337 - DNA, 19 bp, Mus musculus
  siRNA target sequence for Asb18 (NM_139152.1,1352-1370).
ctgagactctgcaaaatta

SEQ ID NO: 680338 - DNA, 19 bp, Mus musculus
  siRNA target sequence for Asb18 (NM_139152.1,1381-1399).
gagccagagggtgttttgt

SEQ ID NO: 680339 - DNA, 19 bp, Mus musculus
  siRNA target sequence for Asb3 (NM_023906.2,188-206).
gttaaaattctaaggaaat

SEQ ID NO: 680340 - DNA, 19 bp, Mus musculus
  siRNA target sequence for Asb3 (NM_023906.2,294-312).
gtttgcagatgctaattca

SEQ ID NO: 680341 - DNA, 19 bp, Mus musculus
  siRNA target sequence for Asb3 (NM_023906.2,298-316).
gcagatgctaattcataca

SEQ ID NO: 680342 - DNA, 19 bp, Mus musculus
  siRNA target sequence for Asb3 (NM_023906.2,304-322).
gctaattcatacagattca

SEQ ID NO: 680343 - DNA, 19 bp, Mus musculus
  siRNA target sequence for Asb3 (NM_023906.2,311-329).
catacagattcatctgaaa

SEQ ID NO: 680344 - DNA, 19 bp, Mus musculus
  siRNA target sequence for Asb3 (NM_023906.2,355-373).
gggcttctgtgcattgcat

SEQ ID NO: 680345 - DNA, 19 bp, Mus musculus
  siRNA target sequence for Asb3 (NM_023906.2,425-443).
ggagctgatcctaatgaaa

SEQ ID NO: 680346 - DNA, 19 bp, Mus musculus
  siRNA target sequence for Asb3 (NM_023906.2,486-504).
gtggacggatagatgtatt

SEQ ID NO: 680347 - DNA, 19 bp, Mus musculus
  siRNA target sequence for Asb3 (NM_023906.2,492-510).
ggatagatgtattaaagct

SEQ ID NO: 680348 - DNA, 19 bp, Mus musculus
  siRNA target sequence for Asb3 (NM_023906.2,533-551).
gtcaatggatcccattcta

SEQ ID NO: 680349 - DNA, 19 bp, Mus musculus
  siRNA target sequence for Asb3 (NM_023906.2,567-585).
ccttgcaccaggcttcttt

SEQ ID NO: 680350 - DNA, 19 bp, Mus musculus
  siRNA target sequence for Asb3 (NM_023906.2,589-607).
gggaaatgctgagactata

SEQ ID NO: 680351 - DNA, 19 bp, Mus musculus
  siRNA target sequence for Asb3 (NM_023906.2,700-718).
gagcatgagcatacttatt

SEQ ID NO: 680352 - DNA, 19 bp, Mus musculus
  siRNA target sequence for Asb3 (NM_023906.2,720-738).
catctggtgcaaatgtcaa

SEQ ID NO: 680353 - DNA, 19 bp, Mus musculus
  siRNA target sequence for Asb3 (NM_023906.2,742-760).
ccaagccttggataaagct

SEQ ID NO: 680354 - DNA, 19 bp, Mus musculus
  siRNA target sequence for Asb3 (NM_023906.2,779-797).
gcacaagagggtcatacaa

SEQ ID NO: 680355 - DNA, 19 bp, Mus musculus
  siRNA target sequence for Asb3 (NM_023906.2,780-798).
cacaagagggtcatacaaa

SEQ ID NO: 680356 - DNA, 19 bp, Mus musculus
  siRNA target sequence for Asb3 (NM_023906.2,827-845).
gcggatcctgacctttatt

SEQ ID NO: 680357 - DNA, 19 bp, Mus musculus
  siRNA target sequence for Asb3 (NM_023906.2,834-852).
ctgacctttattgtaatga

SEQ ID NO: 680358 - DNA, 19 bp, Mus musculus
  siRNA target sequence for Asb3 (NM_023906.2,856-874).
caattggcaattacctatt

SEQ ID NO: 680359 - DNA, 19 bp, Mus musculus
  siRNA target sequence for Asb3 (NM_023906.2,907-925).
cttggacttgttaatacca

SEQ ID NO: 680360 - DNA, 19 bp, Mus musculus
  siRNA target sequence for Asb3 (NM_023906.2,958-976).
caaagtgagccctgtttat

SEQ ID NO: 680361 - DNA, 19 bp, Mus musculus
  siRNA target sequence for Asb3 (NM_023906.2,996-1014).
gggaagagtgcctggaaat

SEQ ID NO: 680362 - DNA, 19 bp, Mus musculus
  siRNA target sequence for Asb3 (NM_023906.2,1043-1061).
gcacaaatgtgcttggtat

SEQ ID NO: 680363 - DNA, 19 bp, Mus musculus
  siRNA target sequence for Asb3 (NM_023906.2,1044-1062).
cacaaatgtgcttggtatt

SEQ ID NO: 680364 - DNA, 19 bp, Mus musculus
  siRNA target sequence for Asb3 (NM_023906.2,1106-1124).
gatttttctggaattgtga

SEQ ID NO: 680365 - DNA, 19 bp, Mus musculus
  siRNA target sequence for Asb3 (NM_023906.2,1121-1139).
gtgaatattcttttgaagt

SEQ ID NO: 680366 - DNA, 19 bp, Mus musculus
  siRNA target sequence for Asb3 (NM_023906.2,1138-1156).
gtatggagcccagttaaat

SEQ ID NO: 680367 - DNA, 19 bp, Mus musculus
  siRNA target sequence for Asb3 (NM_023906.2,1146-1164).
cccagttaaatgaacttca

SEQ ID NO: 680368 - DNA, 19 bp, Mus musculus
  siRNA target sequence for Asb3 (NM_023906.2,1168-1186).
ggcatactgcctcaagtat

SEQ ID NO: 680369 - DNA, 19 bp, Mus musculus
  siRNA target sequence for Asb3 (NM_023906.2,1176-1194).
gcctcaagtatgagaagtt

SEQ ID NO: 680370 - DNA, 19 bp, Mus musculus
  siRNA target sequence for Asb3 (NM_023906.2,1228-1246).
cctgatggtaccttggaat

SEQ ID NO: 680371 - DNA, 19 bp, Mus musculus
  siRNA target sequence for Asb3 (NM_023906.2,1231-1249).
gatggtaccttggaatcat

SEQ ID NO: 680372 - DNA, 19 bp, Mus musculus
  siRNA target sequence for Asb3 (NM_023906.2,1234-1252).
ggtaccttggaatcataca

SEQ ID NO: 680373 - DNA, 19 bp, Mus musculus
  siRNA target sequence for Asb3 (NM_023906.2,1247-1265).
catacatctgaattcataa

SEQ ID NO: 680374 - DNA, 19 bp, Mus musculus
  siRNA target sequence for Asb3 (NM_023906.2,1271-1289).
gcagttaaagcacaaacaa

SEQ ID NO: 680375 - DNA, 19 bp, Mus musculus
  siRNA target sequence for Asb3 (NM_023906.2,1354-1372).
cagctcttgggttgattca

SEQ ID NO: 680376 - DNA, 19 bp, Mus musculus
  siRNA target sequence for Asb3 (NM_023906.2,1473-1491).
gggctcttcaacaacattt

SEQ ID NO: 680377 - DNA, 19 bp, Mus musculus
  siRNA target sequence for Asb3 (NM_023906.2,1529-1547).
gaaattcgggccagtctaa

SEQ ID NO: 680378 - DNA, 19 bp, Mus musculus
  siRNA target sequence for Asb3 (NM_023906.2,1555-1573).
gcaccttcactctgacatt

SEQ ID NO: 680379 - DNA, 19 bp, Mus musculus
  siRNA target sequence for Asb3 (NM_023906.2,1619-1637).
ctctatgaagaggttttaa

SEQ ID NO: 680380 - DNA, 19 bp, Mus musculus
  siRNA target sequence for Asb4 (NM_023048.4,64-82).
ggagctgccaaattagtta

SEQ ID NO: 680381 - DNA, 19 bp, Mus musculus
  siRNA target sequence for Asb4 (NM_023048.4,65-83).
gagctgccaaattagttaa

SEQ ID NO: 680382 - DNA, 19 bp, Mus musculus
  siRNA target sequence for Asb4 (NM_023048.4,100-118).
gctctaaaaacaaatgact

SEQ ID NO: 680383 - DNA, 19 bp, Mus musculus
  siRNA target sequence for Asb4 (NM_023048.4,162-180).
ggacacagtgtttgaagtt

SEQ ID NO: 680384 - DNA, 19 bp, Mus musculus
  siRNA target sequence for Asb4 (NM_023048.4,224-242).
ggttgcccagttataagct

SEQ ID NO: 680385 - DNA, 19 bp, Mus musculus
  siRNA target sequence for Asb4 (NM_023048.4,267-285).
gcatctgtcagttttgctt

SEQ ID NO: 680386 - DNA, 19 bp, Mus musculus
  siRNA target sequence for Asb4 (NM_023048.4,387-405).
cctcgagtgcgtgaagatt

SEQ ID NO: 680387 - DNA, 19 bp, Mus musculus
  siRNA target sequence for Asb4 (NM_023048.4,510-528).
gttgagaggtgcaaacgta

SEQ ID NO: 680388 - DNA, 19 bp, Mus musculus
  siRNA target sequence for Asb4 (NM_023048.4,515-533).
gaggtgcaaacgtaaacat

SEQ ID NO: 680389 - DNA, 19 bp, Mus musculus
  siRNA target sequence for Asb4 (NM_023048.4,517-535).
ggtgcaaacgtaaacatga

SEQ ID NO: 680390 - DNA, 19 bp, Mus musculus
  siRNA target sequence for Asb4 (NM_023048.4,520-538).
gcaaacgtaaacatgaaaa

SEQ ID NO: 680391 - DNA, 19 bp, Mus musculus
  siRNA target sequence for Asb4 (NM_023048.4,539-557).
ccaacaaccaggatgaaga

SEQ ID NO: 680392 - DNA, 19 bp, Mus musculus
  siRNA target sequence for Asb4 (NM_023048.4,762-780).
ggtcaacgctcgtgatgat

SEQ ID NO: 680393 - DNA, 19 bp, Mus musculus
  siRNA target sequence for Asb4 (NM_023048.4,769-787).
gctcgtgatgatgatttca

SEQ ID NO: 680394 - DNA, 19 bp, Mus musculus
  siRNA target sequence for Asb4 (NM_023048.4,770-788).
ctcgtgatgatgatttcaa

SEQ ID NO: 680395 - DNA, 19 bp, Mus musculus
  siRNA target sequence for Asb4 (NM_023048.4,772-790).
cgtgatgatgatttcaagt

SEQ ID NO: 680396 - DNA, 19 bp, Mus musculus
  siRNA target sequence for Asb4 (NM_023048.4,1031-1049).
gcccgaaagccattgaagt

SEQ ID NO: 680397 - DNA, 19 bp, Mus musculus
  siRNA target sequence for Asb4 (NM_023048.4,1060-1078).
gcctatgaacacattcgat

SEQ ID NO: 680398 - DNA, 19 bp, Mus musculus
  siRNA target sequence for Asb4 (NM_023048.4,1069-1087).
cacattcgatggaacataa

SEQ ID NO: 680399 - DNA, 19 bp, Mus musculus
  siRNA target sequence for Asb4 (NM_023048.4,1100-1118).
ccattcctgatgatgactt

SEQ ID NO: 680400 - DNA, 19 bp, Mus musculus
  siRNA target sequence for Asb4 (NM_023048.4,1180-1198).
ctcatgcacctgtcaagat

SEQ ID NO: 680401 - DNA, 19 bp, Mus musculus
  siRNA target sequence for Asb4 (NM_023048.4,1193-1211).
caagatgtgccattcgaaa

SEQ ID NO: 680402 - DNA, 19 bp, Mus musculus
  siRNA target sequence for Asb5 (NM_029569.1,149-167).
caacagctatctaatgtct

SEQ ID NO: 680403 - DNA, 19 bp, Mus musculus
  siRNA target sequence for Asb5 (NM_029569.1,152-170).
cagctatctaatgtctatt

SEQ ID NO: 680404 - DNA, 19 bp, Mus musculus
  siRNA target sequence for Asb5 (NM_029569.1,154-172).
gctatctaatgtctatttt

SEQ ID NO: 680405 - DNA, 19 bp, Mus musculus
  siRNA target sequence for Asb5 (NM_029569.1,337-355).
gcatgaagctgcaagtcaa

SEQ ID NO: 680406 - DNA, 19 bp, Mus musculus
  siRNA target sequence for Asb5 (NM_029569.1,373-391).
gaggacattgctatcacaa

SEQ ID NO: 680407 - DNA, 19 bp, Mus musculus
  siRNA target sequence for Asb5 (NM_029569.1,382-400).
gctatcacaaggatataat

SEQ ID NO: 680408 - DNA, 19 bp, Mus musculus
  siRNA target sequence for Asb5 (NM_029569.1,387-405).
cacaaggatataatgtaaa

SEQ ID NO: 680409 - DNA, 19 bp, Mus musculus
  siRNA target sequence for Asb5 (NM_029569.1,521-539).
ggcgtgactcccttgttca

SEQ ID NO: 680410 - DNA, 19 bp, Mus musculus
  siRNA target sequence for Asb5 (NM_029569.1,522-540).
gcgtgactcccttgttcaa

SEQ ID NO: 680411 - DNA, 19 bp, Mus musculus
  siRNA target sequence for Asb5 (NM_029569.1,564-582).
gttgtgcagaactcctttt

SEQ ID NO: 680412 - DNA, 19 bp, Mus musculus
  siRNA target sequence for Asb5 (NM_029569.1,570-588).
cagaactccttttggaata

SEQ ID NO: 680413 - DNA, 19 bp, Mus musculus
  siRNA target sequence for Asb5 (NM_029569.1,656-674).
catgaatgtctcgacattt

SEQ ID NO: 680414 - DNA, 19 bp, Mus musculus
  siRNA target sequence for Asb5 (NM_029569.1,726-744).
ctctttatgtagcttgtat

SEQ ID NO: 680415 - DNA, 19 bp, Mus musculus
  siRNA target sequence for Asb5 (NM_029569.1,747-765).
cacagcagttccattgcat

SEQ ID NO: 680416 - DNA, 19 bp, Mus musculus
  siRNA target sequence for Asb5 (NM_029569.1,794-812).
gtgcacaaaggcaagtact

SEQ ID NO: 680417 - DNA, 19 bp, Mus musculus
  siRNA target sequence for Asb5 (NM_029569.1,826-844).
gcatgctgccgctcaacaa

SEQ ID NO: 680418 - DNA, 19 bp, Mus musculus
  siRNA target sequence for Asb5 (NM_029569.1,849-867).
gtaccgaaatcgtgaactt

SEQ ID NO: 680419 - DNA, 19 bp, Mus musculus
  siRNA target sequence for Asb5 (NM_029569.1,852-870).
ccgaaatcgtgaacttact

SEQ ID NO: 680420 - DNA, 19 bp, Mus musculus
  siRNA target sequence for Asb5 (NM_029569.1,860-878).
gtgaacttactgctagaat

SEQ ID NO: 680421 - DNA, 19 bp, Mus musculus
  siRNA target sequence for Asb5 (NM_029569.1,862-880).
gaacttactgctagaattt

SEQ ID NO: 680422 - DNA, 19 bp, Mus musculus
  siRNA target sequence for Asb5 (NM_029569.1,928-946).
cttggctacatctaacagt

SEQ ID NO: 680423 - DNA, 19 bp, Mus musculus
  siRNA target sequence for Asb5 (NM_029569.1,957-975).
gaatacttcttcaacatga

SEQ ID NO: 680424 - DNA, 19 bp, Mus musculus
  siRNA target sequence for Asb5 (NM_029569.1,1035-1053).
gacaaaggttccatcttat

SEQ ID NO: 680425 - DNA, 19 bp, Mus musculus
  siRNA target sequence for Asb6 (NM_133346.1,2168-2186).
ggcttccgcaggatcatct

SEQ ID NO: 680426 - DNA, 19 bp, Mus musculus
  siRNA target sequence for Asb6 (NM_133346.1,2418-2436).
gtggggccaacctcaattt

SEQ ID NO: 680427 - DNA, 19 bp, Mus musculus
  siRNA target sequence for Asb6 (NM_133346.1,2421-2439).
gggccaacctcaatttcga

SEQ ID NO: 680428 - DNA, 19 bp, Mus musculus
  siRNA target sequence for Asb6 (NM_133346.1,2422-2440).
ggccaacctcaatttcgaa

SEQ ID NO: 680429 - DNA, 19 bp, Mus musculus
  siRNA target sequence for Asb6 (NM_133346.1,2441-2459).
gaccctgttacctactaca

SEQ ID NO: 680430 - DNA, 19 bp, Mus musculus
  siRNA target sequence for Asb6 (NM_133346.1,2702-2720).
cagatccacaacacagaaa

SEQ ID NO: 680431 - DNA, 19 bp, Mus musculus
  siRNA target sequence for Asb6 (NM_133346.1,3039-3057).
ctggcttcaacctcgtttt

SEQ ID NO: 680432 - DNA, 19 bp, Mus musculus
  siRNA target sequence for Asb6 (NM_133346.1,3256-3274).
ctacccgccacctctcaaa

SEQ ID NO: 680433 - DNA, 19 bp, Mus musculus
  siRNA target sequence for Asb6 (NM_133346.1,3374-3392).
ctcagtgcacacagtgata

SEQ ID NO: 680434 - DNA, 19 bp, Mus musculus
  siRNA target sequence for Asb7 (NM_080443.1,140-158).
gctggaccttgctccattt

SEQ ID NO: 680435 - DNA, 19 bp, Mus musculus
  siRNA target sequence for Asb7 (NM_080443.1,212-230).
ctgatcccacggttaagga

SEQ ID NO: 680436 - DNA, 19 bp, Mus musculus
  siRNA target sequence for Asb7 (NM_080443.1,214-232).
gatcccacggttaaggatt

SEQ ID NO: 680437 - DNA, 19 bp, Mus musculus
  siRNA target sequence for Asb7 (NM_080443.1,217-235).
cccacggttaaggatttaa

SEQ ID NO: 680438 - DNA, 19 bp, Mus musculus
  siRNA target sequence for Asb7 (NM_080443.1,284-302).
ggattgcacgcctgatgtt

SEQ ID NO: 680439 - DNA, 19 bp, Mus musculus
  siRNA target sequence for Asb7 (NM_080443.1,285-303).
gattgcacgcctgatgtta

SEQ ID NO: 680440 - DNA, 19 bp, Mus musculus
  siRNA target sequence for Asb7 (NM_080443.1,312-330).
gtacaggagtgacattatt

SEQ ID NO: 680441 - DNA, 19 bp, Mus musculus
  siRNA target sequence for Asb7 (NM_080443.1,315-333).
caggagtgacattattaat

SEQ ID NO: 680442 - DNA, 19 bp, Mus musculus
  siRNA target sequence for Asb7 (NM_080443.1,378-396).
ctacggtagggactcattt

SEQ ID NO: 680443 - DNA, 19 bp, Mus musculus
  siRNA target sequence for Asb7 (NM_080443.1,427-445).
gttgacccgctcagtgata

SEQ ID NO: 680444 - DNA, 19 bp, Mus musculus
  siRNA target sequence for Asb7 (NM_080443.1,433-451).
ccgctcagtgataaaggta

SEQ ID NO: 680445 - DNA, 19 bp, Mus musculus
  siRNA target sequence for Asb7 (NM_080443.1,552-570).
gcgctatgctgtgatcaaa

SEQ ID NO: 680446 - DNA, 19 bp, Mus musculus
  siRNA target sequence for Asb7 (NM_080443.1,553-571).
cgctatgctgtgatcaaaa

SEQ ID NO: 680447 - DNA, 19 bp, Mus musculus
  siRNA target sequence for Asb7 (NM_080443.1,579-597).
ctcttactgccgcatgttt

SEQ ID NO: 680448 - DNA, 19 bp, Mus musculus
  siRNA target sequence for Asb7 (NM_080443.1,689-707).
cacggatgctgtataacta

SEQ ID NO: 680449 - DNA, 19 bp, Mus musculus
  siRNA target sequence for Asb7 (NM_080443.1,709-727).
ggagcggacacgaacacaa

SEQ ID NO: 680450 - DNA, 19 bp, Mus musculus
  siRNA target sequence for Asb7 (NM_080443.1,717-735).
cacgaacacaaggaactat

SEQ ID NO: 680451 - DNA, 19 bp, Mus musculus
  siRNA target sequence for Asb7 (NM_080443.1,719-737).
cgaacacaaggaactatga

SEQ ID NO: 680452 - DNA, 19 bp, Mus musculus
  siRNA target sequence for Asb7 (NM_080443.1,751-769).
ctggccgtttccataagta

SEQ ID NO: 680453 - DNA, 19 bp, Mus musculus
  siRNA target sequence for Asb7 (NM_080443.1,753-771).
ggccgtttccataagtatt

SEQ ID NO: 680454 - DNA, 19 bp, Mus musculus
  siRNA target sequence for Asb7 (NM_080443.1,754-772).
gccgtttccataagtattt

SEQ ID NO: 680455 - DNA, 19 bp, Mus musculus
  siRNA target sequence for Asb7 (NM_080443.1,782-800).
gtcggccgtgtttggattt

SEQ ID NO: 680456 - DNA, 19 bp, Mus musculus
  siRNA target sequence for Asb7 (NM_080443.1,784-802).
cggccgtgtttggatttct

SEQ ID NO: 680457 - DNA, 19 bp, Mus musculus
  siRNA target sequence for Asb7 (NM_080443.1,785-803).
ggccgtgtttggatttctt

SEQ ID NO: 680458 - DNA, 19 bp, Mus musculus
  siRNA target sequence for Asb7 (NM_080443.1,838-856).
gacctgtgccgaattaaaa

SEQ ID NO: 680459 - DNA, 19 bp, Mus musculus
  siRNA target sequence for Asb7 (NM_080443.1,843-861).
gtgccgaattaaaattcga

SEQ ID NO: 680460 - DNA, 19 bp, Mus musculus
  siRNA target sequence for Asb7 (NM_080443.1,866-884).
gtataggccttcaaaacct

SEQ ID NO: 680461 - DNA, 19 bp, Mus musculus
  siRNA target sequence for Asb7 (NM_080443.1,891-909).
gcttgatgagctaccaatt

SEQ ID NO: 680462 - DNA, 19 bp, Mus musculus
  siRNA target sequence for Asb7 (NM_080443.1,911-929).
ccaaggtcatgaaagacta

SEQ ID NO: 680463 - DNA, 19 bp, Mus musculus
  siRNA target sequence for Asb8 (NM_030121.2,81-99).
gttccagcatgtggtatat

SEQ ID NO: 680464 - DNA, 19 bp, Mus musculus
  siRNA target sequence for Asb8 (NM_030121.2,87-105).
gcatgtggtatattatgca

SEQ ID NO: 680465 - DNA, 19 bp, Mus musculus
  siRNA target sequence for Asb8 (NM_030121.2,165-183).
gctccttcccacatgacaa

SEQ ID NO: 680466 - DNA, 19 bp, Mus musculus
  siRNA target sequence for Asb8 (NM_030121.2,346-364).
ccactatgcagcagagaaa

SEQ ID NO: 680467 - DNA, 19 bp, Mus musculus
  siRNA target sequence for Asb8 (NM_030121.2,443-461).
cattgggcagcctttaaga

SEQ ID NO: 680468 - DNA, 19 bp, Mus musculus
  siRNA target sequence for Asb8 (NM_030121.2,515-533).
ctggattacaacaacgata

SEQ ID NO: 680469 - DNA, 19 bp, Mus musculus
  siRNA target sequence for Asb8 (NM_030121.2,573-591).
gtgtcagcatccttcttga

SEQ ID NO: 680470 - DNA, 19 bp, Mus musculus
  siRNA target sequence for Asb8 (NM_030121.2,604-622).
ggtcagagtcatcaactta

SEQ ID NO: 680471 - DNA, 19 bp, Mus musculus
  siRNA target sequence for Asb8 (NM_030121.2,605-623).
gtcagagtcatcaacttaa

SEQ ID NO: 680472 - DNA, 19 bp, Mus musculus
  siRNA target sequence for Asb8 (NM_030121.2,607-625).
cagagtcatcaacttaaaa

SEQ ID NO: 680473 - DNA, 19 bp, Mus musculus
  siRNA target sequence for Asb8 (NM_030121.2,714-732).
gagctgttggacagtttga

SEQ ID NO: 680474 - DNA, 19 bp, Mus musculus
  siRNA target sequence for Asb8 (NM_030121.2,716-734).
gctgttggacagtttgaat

SEQ ID NO: 680475 - DNA, 19 bp, Mus musculus
  siRNA target sequence for Asb8 (NM_030121.2,717-735).
ctgttggacagtttgaatt

SEQ ID NO: 680476 - DNA, 19 bp, Mus musculus
  siRNA target sequence for Asb8 (NM_030121.2,812-830).
gcaccagggacgcttaaaa

SEQ ID NO: 680477 - DNA, 19 bp, Mus musculus
  siRNA target sequence for Asb9 (NM_027027.1,237-255).
cccgttgatgggagatgta

SEQ ID NO: 680478 - DNA, 19 bp, Mus musculus
  siRNA target sequence for Asb9 (NM_027027.1,239-257).
cgttgatgggagatgtagt

SEQ ID NO: 680479 - DNA, 19 bp, Mus musculus
  siRNA target sequence for Asb9 (NM_027027.1,331-349).
ggttggcctgtaaacatca

SEQ ID NO: 680480 - DNA, 19 bp, Mus musculus
  siRNA target sequence for Asb9 (NM_027027.1,332-350).
gttggcctgtaaacatcat

SEQ ID NO: 680481 - DNA, 19 bp, Mus musculus
  siRNA target sequence for Asb9 (NM_027027.1,459-477).
ctggcgaactcccttgttt

SEQ ID NO: 680482 - DNA, 19 bp, Mus musculus
  siRNA target sequence for Asb9 (NM_027027.1,461-479).
ggcgaactcccttgtttaa

SEQ ID NO: 680483 - DNA, 19 bp, Mus musculus
  siRNA target sequence for Asb9 (NM_027027.1,462-480).
gcgaactcccttgtttaat

SEQ ID NO: 680484 - DNA, 19 bp, Mus musculus
  siRNA target sequence for Asb9 (NM_027027.1,497-515).
gtcaggactgtgtgaatct

SEQ ID NO: 680485 - DNA, 19 bp, Mus musculus
  siRNA target sequence for Asb9 (NM_027027.1,576-594).
ggctgctaaaagaggatat

SEQ ID NO: 680486 - DNA, 19 bp, Mus musculus
  siRNA target sequence for Asb9 (NM_027027.1,578-596).
ctgctaaaagaggatatgt

SEQ ID NO: 680487 - DNA, 19 bp, Mus musculus
  siRNA target sequence for Asb9 (NM_027027.1,617-635).
cagctcatggggccaatat

SEQ ID NO: 680488 - DNA, 19 bp, Mus musculus
  siRNA target sequence for Asb9 (NM_027027.1,620-638).
ctcatggggccaatattga

SEQ ID NO: 680489 - DNA, 19 bp, Mus musculus
  siRNA target sequence for Asb9 (NM_027027.1,667-685).
ctgtatgtggcttgtaaaa

SEQ ID NO: 680490 - DNA, 19 bp, Mus musculus
  siRNA target sequence for Asb9 (NM_027027.1,714-732).
cctagaatcaggagtatct

SEQ ID NO: 680491 - DNA, 19 bp, Mus musculus
  siRNA target sequence for Asb9 (NM_027027.1,884-902).
gtcctttgatccagatctt

SEQ ID NO: 680492 - DNA, 19 bp, Mus musculus
  siRNA target sequence for Asb9 (NM_027027.1,967-985).
ggcattcggcagcatcata

SEQ ID NO: 680493 - DNA, 19 bp, Mus musculus
  siRNA target sequence for Asb9 (NM_027027.1,968-986).
gcattcggcagcatcataa

SEQ ID NO: 680494 - DNA, 19 bp, Mus musculus
  siRNA target sequence for Asb9 (NM_027027.1,973-991).
cggcagcatcataagattt

SEQ ID NO: 680495 - DNA, 19 bp, Mus musculus
  siRNA target sequence for AV216087 (NM_144804.1,158-176).
cgtgtggagcagcattata

SEQ ID NO: 680496 - DNA, 19 bp, Mus musculus
  siRNA target sequence for AV216087 (NM_144804.1,159-177).
gtgtggagcagcattataa

SEQ ID NO: 680497 - DNA, 19 bp, Mus musculus
  siRNA target sequence for AV216087 (NM_144804.1,209-227).
gcgaaggcaccacttaaaa

SEQ ID NO: 680498 - DNA, 19 bp, Mus musculus
  siRNA target sequence for AV216087 (NM_144804.1,258-276).
gccgtggatgtcatttact

SEQ ID NO: 680499 - DNA, 19 bp, Mus musculus
  siRNA target sequence for AV216087 (NM_144804.1,269-287).
catttactcccacttaact

SEQ ID NO: 680500 - DNA, 19 bp, Mus musculus
  siRNA target sequence for AV216087 (NM_144804.1,278-296).
ccacttaactcagaataaa

SEQ ID NO: 680501 - DNA, 19 bp, Mus musculus
  siRNA target sequence for AV216087 (NM_144804.1,347-365).
ggcacttatggactacaaa

SEQ ID NO: 680502 - DNA, 19 bp, Mus musculus
  siRNA target sequence for AV216087 (NM_144804.1,349-367).
cacttatggactacaaagt

SEQ ID NO: 680503 - DNA, 19 bp, Mus musculus
  siRNA target sequence for AV216087 (NM_144804.1,356-374).
ggactacaaagtatttgaa

SEQ ID NO: 680504 - DNA, 19 bp, Mus musculus
  siRNA target sequence for AV216087 (NM_144804.1,377-395).
cgttcaaactagagtcttt

SEQ ID NO: 680505 - DNA, 19 bp, Mus musculus
  siRNA target sequence for AV216087 (NM_144804.1,428-446).
cagttgcagcctttataga

SEQ ID NO: 680506 - DNA, 19 bp, Mus musculus
  siRNA target sequence for AV216087 (NM_144804.1,430-448).
gttgcagcctttatagatt

SEQ ID NO: 680507 - DNA, 19 bp, Mus musculus
  siRNA target sequence for AV216087 (NM_144804.1,434-452).
cagcctttatagattcaca

SEQ ID NO: 680508 - DNA, 19 bp, Mus musculus
  siRNA target sequence for AV216087 (NM_144804.1,476-494).
gttaggccatgagaacaaa

SEQ ID NO: 680509 - DNA, 19 bp, Mus musculus
  siRNA target sequence for AV216087 (NM_144804.1,512-530).
gtactcagatgcatcgttt

SEQ ID NO: 680510 - DNA, 19 bp, Mus musculus
  siRNA target sequence for AV216087 (NM_144804.1,519-537).
gatgcatcgtttatgtcat

SEQ ID NO: 680511 - DNA, 19 bp, Mus musculus
  siRNA target sequence for AV216087 (NM_144804.1,526-544).
cgtttatgtcatctgatat

SEQ ID NO: 680512 - DNA, 19 bp, Mus musculus
  siRNA target sequence for AV216087 (NM_144804.1,596-614).
cagctcccctcacatacat

SEQ ID NO: 680513 - DNA, 19 bp, Mus musculus
  siRNA target sequence for AV216087 (NM_144804.1,627-645).
ctctctcctcaagttatca

SEQ ID NO: 680514 - DNA, 19 bp, Mus musculus
  siRNA target sequence for AV216087 (NM_144804.1,636-654).
caagttatcaatgaagtat

SEQ ID NO: 680515 - DNA, 19 bp, Mus musculus
  siRNA target sequence for AV216087 (NM_144804.1,673-691).
gacggctgctacaacttgt

SEQ ID NO: 680516 - DNA, 19 bp, Mus musculus
  siRNA target sequence for AV216087 (NM_144804.1,725-743).
gcaagaggtcgtacctaaa

SEQ ID NO: 680517 - DNA, 19 bp, Mus musculus
  siRNA target sequence for AV216087 (NM_144804.1,788-806).
ctatctggatcgaggaatt

SEQ ID NO: 680518 - DNA, 19 bp, Mus musculus
  siRNA target sequence for AV216087 (NM_144804.1,852-870).
gccatcgactgcttggaat

SEQ ID NO: 680519 - DNA, 19 bp, Mus musculus
  siRNA target sequence for AV216087 (NM_144804.1,857-875).
cgactgcttggaatacctt

SEQ ID NO: 680520 - DNA, 19 bp, Mus musculus
  siRNA target sequence for AV216087 (NM_144804.1,881-899).
ccagatggttgtggatata

SEQ ID NO: 680521 - DNA, 19 bp, Mus musculus
  siRNA target sequence for AV216087 (NM_144804.1,957-975).
gacgctattggcagatatt

SEQ ID NO: 680522 - DNA, 19 bp, Mus musculus
  siRNA target sequence for AV216087 (NM_144804.1,959-977).
cgctattggcagatattat

SEQ ID NO: 680523 - DNA, 19 bp, Mus musculus
  siRNA target sequence for AV216087 (NM_144804.1,960-978).
gctattggcagatattata

SEQ ID NO: 680524 - DNA, 19 bp, Mus musculus
  siRNA target sequence for AV216087 (NM_144804.1,995-1013).
gttgaaccacctgtatgat

SEQ ID NO: 680525 - DNA, 19 bp, Mus musculus
  siRNA target sequence for AV216087 (NM_144804.1,1002-1020).
cacctgtatgatgttcata

SEQ ID NO: 680526 - DNA, 19 bp, Mus musculus
  siRNA target sequence for AV216087 (NM_144804.1,1052-1070).
gacggaaatggcgttagaa

SEQ ID NO: 680527 - DNA, 19 bp, Mus musculus
  siRNA target sequence for AV216087 (NM_144804.1,1153-1171).
cagatccttcggaatttaa

SEQ ID NO: 680528 - DNA, 19 bp, Mus musculus
  siRNA target sequence for AV216087 (NM_144804.1,1190-1208).
caatcggatggtagtgaaa

SEQ ID NO: 680529 - DNA, 19 bp, Mus musculus
  siRNA target sequence for AV216087 (NM_144804.1,1200-1218).
gtagtgaaaagggtattct

SEQ ID NO: 680530 - DNA, 19 bp, Mus musculus
  siRNA target sequence for AV216087 (NM_144804.1,1210-1228).
gggtattctcaaaagctat

SEQ ID NO: 680531 - DNA, 19 bp, Mus musculus
  siRNA target sequence for AV216087 (NM_144804.1,1219-1237).
caaaagctatcgtcaacaa

SEQ ID NO: 680532 - DNA, 19 bp, Mus musculus
  siRNA target sequence for AV216087 (NM_144804.1,1224-1242).
gctatcgtcaacaataaaa

SEQ ID NO: 680533 - DNA, 19 bp, Mus musculus
  siRNA target sequence for AV216087 (NM_144804.1,1225-1243).
ctatcgtcaacaataaaaa

SEQ ID NO: 680534 - DNA, 19 bp, Mus musculus
  siRNA target sequence for AV216087 (NM_144804.1,1229-1247).
cgtcaacaataaaaatgta

SEQ ID NO: 680535 - DNA, 19 bp, Mus musculus
  siRNA target sequence for AV216087 (NM_144804.1,1286-1304).
ggatcaccaaaaagatgtt

SEQ ID NO: 680536 - DNA, 19 bp, Mus musculus
  siRNA target sequence for AV216087 (NM_144804.1,1310-1328).
gattcctgcagctctacat

SEQ ID NO: 680537 - DNA, 19 bp, Mus musculus
  siRNA target sequence for AV216087 (NM_144804.1,1350-1368).
ctggccatacaaaaaggaa

SEQ ID NO: 680538 - DNA, 19 bp, Mus musculus
  siRNA target sequence for AV216087 (NM_144804.1,1466-1484).
gagcttactaaagactatt

SEQ ID NO: 680539 - DNA, 19 bp, Mus musculus
  siRNA target sequence for AV216087 (NM_144804.1,1468-1486).
gcttactaaagactattga

SEQ ID NO: 680540 - DNA, 19 bp, Mus musculus
  siRNA target sequence for AV216087 (NM_144804.1,1485-1503).
gatgaggattcaaaactct

SEQ ID NO: 680541 - DNA, 19 bp, Mus musculus
  siRNA target sequence for AV216087 (NM_144804.1,1520-1538).
gaaactgctaggccaattt

SEQ ID NO: 680542 - DNA, 19 bp, Mus musculus
  siRNA target sequence for AV216087 (NM_144804.1,1524-1542).
ctgctaggccaatttcgta

SEQ ID NO: 680543 - DNA, 19 bp, Mus musculus
  siRNA target sequence for AW260467 (NM_178683.2,183-201).
catcgttgccggttcaaga

SEQ ID NO: 680544 - DNA, 19 bp, Mus musculus
  siRNA target sequence for AW260467 (NM_178683.2,186-204).
cgttgccggttcaagagtt

SEQ ID NO: 680545 - DNA, 19 bp, Mus musculus
  siRNA target sequence for AW260467 (NM_178683.2,187-205).
gttgccggttcaagagtta

SEQ ID NO: 680546 - DNA, 19 bp, Mus musculus
  siRNA target sequence for AW260467 (NM_178683.2,255-273).
ctgcggaacagtcaaaact

SEQ ID NO: 680547 - DNA, 19 bp, Mus musculus
  siRNA target sequence for AW260467 (NM_178683.2,281-299).
cgaggtaactcgcaaacaa

SEQ ID NO: 680548 - DNA, 19 bp, Mus musculus
  siRNA target sequence for AW260467 (NM_178683.2,282-300).
gaggtaactcgcaaacaaa

SEQ ID NO: 680549 - DNA, 19 bp, Mus musculus
  siRNA target sequence for AW260467 (NM_178683.2,323-341).
cctgaagaatcatgttatt

SEQ ID NO: 680550 - DNA, 19 bp, Mus musculus
  siRNA target sequence for AW260467 (NM_178683.2,418-436).
ccctgaagccatatccaaa

SEQ ID NO: 680551 - DNA, 19 bp, Mus musculus
  siRNA target sequence for AW260467 (NM_178683.2,440-458).
gcccctgtatcaaagagat

SEQ ID NO: 680552 - DNA, 19 bp, Mus musculus
  siRNA target sequence for AW260467 (NM_178683.2,496-514).
gcacttcacaggagaacat

SEQ ID NO: 680553 - DNA, 19 bp, Mus musculus
  siRNA target sequence for AW260467 (NM_178683.2,516-534).
ccagtgaggccgattgtga

SEQ ID NO: 680554 - DNA, 19 bp, Mus musculus
  siRNA target sequence for AW260467 (NM_178683.2,521-539).
gaggccgattgtgatgaat

SEQ ID NO: 680555 - DNA, 19 bp, Mus musculus
  siRNA target sequence for AW260467 (NM_178683.2,524-542).
gccgattgtgatgaattct

SEQ ID NO: 680556 - DNA, 19 bp, Mus musculus
  siRNA target sequence for AW260467 (NM_178683.2,550-568).
ggttcaagcgccacagtat

SEQ ID NO: 680557 - DNA, 19 bp, Mus musculus
  siRNA target sequence for AW260467 (NM_178683.2,551-569).
gttcaagcgccacagtatt

SEQ ID NO: 680558 - DNA, 19 bp, Mus musculus
  siRNA target sequence for AW260467 (NM_178683.2,554-572).
caagcgccacagtattgct

SEQ ID NO: 680559 - DNA, 19 bp, Mus musculus
  siRNA target sequence for AW260467 (NM_178683.2,557-575).
gcgccacagtattgctatt

SEQ ID NO: 680560 - DNA, 19 bp, Mus musculus
  siRNA target sequence for AW260467 (NM_178683.2,560-578).
ccacagtattgctattgga

SEQ ID NO: 680561 - DNA, 19 bp, Mus musculus
  siRNA target sequence for AW260467 (NM_178683.2,647-665).
gtctacgacgttgtcatat

SEQ ID NO: 680562 - DNA, 19 bp, Mus musculus
  siRNA target sequence for AW260467 (NM_178683.2,649-667).
ctacgacgttgtcatattt

SEQ ID NO: 680563 - DNA, 19 bp, Mus musculus
  siRNA target sequence for AW260467 (NM_178683.2,782-800).
ggacgacaagtcgaaagaa

SEQ ID NO: 680564 - DNA, 19 bp, Mus musculus
  siRNA target sequence for AW260467 (NM_178683.2,785-803).
cgacaagtcgaaagaactt

SEQ ID NO: 680565 - DNA, 19 bp, Mus musculus
  siRNA target sequence for AW260467 (NM_178683.2,811-829).
gggtcctgtcagctatgaa

SEQ ID NO: 680566 - DNA, 19 bp, Mus musculus
  siRNA target sequence for AW260467 (NM_178683.2,813-831).
gtcctgtcagctatgaagt

SEQ ID NO: 680567 - DNA, 19 bp, Mus musculus
  siRNA target sequence for AW260467 (NM_178683.2,871-889).
ctatgtacttgggatttga

SEQ ID NO: 680568 - DNA, 19 bp, Mus musculus
  siRNA target sequence for AW260467 (NM_178683.2,893-911).
ggatgtctttaagactata

SEQ ID NO: 680569 - DNA, 19 bp, Mus musculus
  siRNA target sequence for AW260467 (NM_178683.2,905-923).
gactatagcagattactat

SEQ ID NO: 680570 - DNA, 19 bp, Mus musculus
  siRNA target sequence for AW260467 (NM_178683.2,938-956).
gccactgctcacatttcat

SEQ ID NO: 680571 - DNA, 19 bp, Mus musculus
  siRNA target sequence for AW260467 (NM_178683.2,1006-1024).
cggccattgaagcatttca

SEQ ID NO: 680572 - DNA, 19 bp, Mus musculus
  siRNA target sequence for AW260467 (NM_178683.2,1060-1078).
gaaagttacagctgttgat

SEQ ID NO: 680573 - DNA, 19 bp, Mus musculus
  siRNA target sequence for AW260467 (NM_178683.2,1089-1107).
gcgaggatctgcctaaaca

SEQ ID NO: 680574 - DNA, 19 bp, Mus musculus
  siRNA target sequence for AW260467 (NM_178683.2,1090-1108).
cgaggatctgcctaaacaa

SEQ ID NO: 680575 - DNA, 19 bp, Mus musculus
  siRNA target sequence for AW260467 (NM_178683.2,1149-1167).
ctgatggttcagacctttt

SEQ ID NO: 680576 - DNA, 19 bp, Mus musculus
  siRNA target sequence for AW260467 (NM_178683.2,1175-1193).
catcctgtgctctaaggat

SEQ ID NO: 680577 - DNA, 19 bp, Mus musculus
  siRNA target sequence for AW260467 (NM_178683.2,1234-1252).
cattcctgatggacaatta

SEQ ID NO: 680578 - DNA, 19 bp, Mus musculus
  siRNA target sequence for AW260467 (NM_178683.2,1280-1298).
cctgcagacctccatagaa

SEQ ID NO: 680579 - DNA, 19 bp, Mus musculus
  siRNA target sequence for AW260467 (NM_178683.2,1314-1332).
ctgcgaagagtccagataa

SEQ ID NO: 680580 - DNA, 19 bp, Mus musculus
  siRNA target sequence for AW260467 (NM_178683.2,1316-1334).
gcgaagagtccagataaaa

SEQ ID NO: 680581 - DNA, 19 bp, Mus musculus
  siRNA target sequence for AW260467 (NM_178683.2,1317-1335).
cgaagagtccagataaaat

SEQ ID NO: 680582 - DNA, 19 bp, Mus musculus
  siRNA target sequence for AW260467 (NM_178683.2,1318-1336).
gaagagtccagataaaata

SEQ ID NO: 680583 - DNA, 19 bp, Mus musculus
  siRNA target sequence for AW260467 (NM_178683.2,1338-1356).
ccaggagctgatatggata

SEQ ID NO: 680584 - DNA, 19 bp, Mus musculus
  siRNA target sequence for AW260467 (NM_178683.2,1362-1380).
ctgtctgcaccttcgtttt

SEQ ID NO: 680585 - DNA, 19 bp, Mus musculus
  siRNA target sequence for AW260467 (NM_178683.2,1372-1390).
cttcgttttgccgtcaaat

SEQ ID NO: 680586 - DNA, 19 bp, Mus musculus
  siRNA target sequence for AW260467 (NM_178683.2,1376-1394).
gttttgccgtcaaattagt

SEQ ID NO: 680587 - DNA, 19 bp, Mus musculus
  siRNA target sequence for AW260467 (NM_178683.2,1538-1556).
ctaccaggaacgatttcct

SEQ ID NO: 680588 - DNA, 19 bp, Mus musculus
  siRNA target sequence for AW260467 (NM_178683.2,1600-1618).
ccaagccgcagctgttcat

SEQ ID NO: 680589 - DNA, 19 bp, Mus musculus
  siRNA target sequence for AW260467 (NM_178683.2,1643-1661).
gccgtttcagagaactaga

SEQ ID NO: 680590 - DNA, 19 bp, Mus musculus
  siRNA target sequence for AW260467 (NM_178683.2,1644-1662).
ccgtttcagagaactagaa

SEQ ID NO: 680591 - DNA, 19 bp, Mus musculus
  siRNA target sequence for AW260467 (NM_178683.2,1646-1664).
gtttcagagaactagaagt

SEQ ID NO: 680592 - DNA, 19 bp, Mus musculus
  siRNA target sequence for B130017I01Rik (NM_172525.1,189-207).
ccaaccttctgctgctatt

SEQ ID NO: 680593 - DNA, 19 bp, Mus musculus
  siRNA target sequence for B130017I01Rik (NM_172525.1,190-208).
caaccttctgctgctatta

SEQ ID NO: 680594 - DNA, 19 bp, Mus musculus
  siRNA target sequence for B130017I01Rik (NM_172525.1,223-241).
gggctcaagtccgtaagtt

SEQ ID NO: 680595 - DNA, 19 bp, Mus musculus
  siRNA target sequence for B130017I01Rik (NM_172525.1,302-320).
cccatatgttgctatattt

SEQ ID NO: 680596 - DNA, 19 bp, Mus musculus
  siRNA target sequence for B130017I01Rik (NM_172525.1,385-403).
cgtgttttaaagtcgatat

SEQ ID NO: 680597 - DNA, 19 bp, Mus musculus
  siRNA target sequence for B130017I01Rik (NM_172525.1,456-474).
gctcactgcaaaagtgaaa

SEQ ID NO: 680598 - DNA, 19 bp, Mus musculus
  siRNA target sequence for B130017I01Rik (NM_172525.1,554-572).
catttacctttggaaacat

SEQ ID NO: 680599 - DNA, 19 bp, Mus musculus
  siRNA target sequence for B130017I01Rik (NM_172525.1,611-629).
cgatactacgtctacctat

SEQ ID NO: 680600 - DNA, 19 bp, Mus musculus
  siRNA target sequence for B130017I01Rik (NM_172525.1,612-630).
gatactacgtctacctatt

SEQ ID NO: 680601 - DNA, 19 bp, Mus musculus
  siRNA target sequence for B130017I01Rik (NM_172525.1,626-644).
ctatttctcgagaaagtaa

SEQ ID NO: 680602 - DNA, 19 bp, Mus musculus
  siRNA target sequence for B130017I01Rik (NM_172525.1,635-653).
gagaaagtaagtcttttga

SEQ ID NO: 680603 - DNA, 19 bp, Mus musculus
  siRNA target sequence for B130017I01Rik (NM_172525.1,675-693).
ggacttaccccatgaaaaa

SEQ ID NO: 680604 - DNA, 19 bp, Mus musculus
  siRNA target sequence for B130017I01Rik (NM_172525.1,704-722).
ctcctatagaactagacaa

SEQ ID NO: 680605 - DNA, 19 bp, Mus musculus
  siRNA target sequence for B130017I01Rik (NM_172525.1,715-733).
ctagacaacttgctgttaa

SEQ ID NO: 680606 - DNA, 19 bp, Mus musculus
  siRNA target sequence for B130017I01Rik (NM_172525.1,769-787).
gctaaaacatggtcaaaat

SEQ ID NO: 680607 - DNA, 19 bp, Mus musculus
  siRNA target sequence for B130017I01Rik (NM_172525.1,832-850).
gaattggagtccactagaa

SEQ ID NO: 680608 - DNA, 19 bp, Mus musculus
  siRNA target sequence for B130017I01Rik (NM_172525.1,840-858).
gtccactagaaatattgta

SEQ ID NO: 680609 - DNA, 19 bp, Mus musculus
  siRNA target sequence for B130017I01Rik (NM_172525.1,842-860).
ccactagaaatattgtaaa

SEQ ID NO: 680610 - DNA, 19 bp, Mus musculus
  siRNA target sequence for B130017I01Rik (NM_172525.1,870-888).
ggcaactagatctagcatt

SEQ ID NO: 680611 - DNA, 19 bp, Mus musculus
  siRNA target sequence for B130017I01Rik (NM_172525.1,875-893).
ctagatctagcattggtat

SEQ ID NO: 680612 - DNA, 19 bp, Mus musculus
  siRNA target sequence for B130017I01Rik (NM_172525.1,881-899).
ctagcattggtatacaaga

SEQ ID NO: 680613 - DNA, 19 bp, Mus musculus
  siRNA target sequence for B130017I01Rik (NM_172525.1,884-902).
gcattggtatacaagagtt

SEQ ID NO: 680614 - DNA, 19 bp, Mus musculus
  siRNA target sequence for B130017I01Rik (NM_172525.1,953-971).
gcagccaccttctacaaca

SEQ ID NO: 680615 - DNA, 19 bp, Mus musculus
  siRNA target sequence for B130017I01Rik (NM_172525.1,960-978).
ccttctacaacagacaatt

SEQ ID NO: 680616 - DNA, 19 bp, Mus musculus
  siRNA target sequence for B130017I01Rik (NM_172525.1,983-1001).
ccctccaagccaataaatt

SEQ ID NO: 680617 - DNA, 19 bp, Mus musculus
  siRNA target sequence for B130017I01Rik (NM_172525.1,984-1002).
cctccaagccaataaattt

SEQ ID NO: 680618 - DNA, 19 bp, Mus musculus
  siRNA target sequence for B130017I01Rik (NM_172525.1,1137-1155).
gcggcaagatgaatacgaa

SEQ ID NO: 680619 - DNA, 19 bp, Mus musculus
  siRNA target sequence for B130017I01Rik (NM_172525.1,1147-1165).
gaatacgaaaaggcaaaat

SEQ ID NO: 680620 - DNA, 19 bp, Mus musculus
  siRNA target sequence for B130017I01Rik (NM_172525.1,1289-1307).
caaacgaacactacaaagt

SEQ ID NO: 680621 - DNA, 19 bp, Mus musculus
  siRNA target sequence for B130017I01Rik (NM_172525.1,1310-1328).
gtgtaacaaatgttgaaga

SEQ ID NO: 680622 - DNA, 19 bp, Mus musculus
  siRNA target sequence for B130017I01Rik (NM_172525.1,1333-1351).
cggaatgatctagaaaata

SEQ ID NO: 680623 - DNA, 19 bp, Mus musculus
  siRNA target sequence for B130017I01Rik (NM_172525.1,1372-1390).
cagcttcggacacttgttt

SEQ ID NO: 680624 - DNA, 19 bp, Mus musculus
  siRNA target sequence for B130017I01Rik (NM_172525.1,1421-1439).
cagttaacctctttcatat

SEQ ID NO: 680625 - DNA, 19 bp, Mus musculus
  siRNA target sequence for B130017I01Rik (NM_172525.1,1513-1531).
ggtcaggagtacagtgaat

SEQ ID NO: 680626 - DNA, 19 bp, Mus musculus
  siRNA target sequence for B130017I01Rik (NM_172525.1,1540-1558).
gctacaagctcaagtgaat

SEQ ID NO: 680627 - DNA, 19 bp, Mus musculus
  siRNA target sequence for B130017I01Rik (NM_172525.1,1541-1559).
ctacaagctcaagtgaatt

SEQ ID NO: 680628 - DNA, 19 bp, Mus musculus
  siRNA target sequence for B130017I01Rik (NM_172525.1,1569-1587).
ggttgatgggaatgtaaat

SEQ ID NO: 680629 - DNA, 19 bp, Mus musculus
  siRNA target sequence for B130017I01Rik (NM_172525.1,1717-1735).
ggtccttctttcgtaagat

SEQ ID NO: 680630 - DNA, 19 bp, Mus musculus
  siRNA target sequence for B130017I01Rik (NM_172525.1,1720-1738).
ccttctttcgtaagatcat

SEQ ID NO: 680631 - DNA, 19 bp, Mus musculus
  siRNA target sequence for B130017I01Rik (NM_172525.1,1736-1754).
catggaagttcggaatgtt

SEQ ID NO: 680632 - DNA, 19 bp, Mus musculus
  siRNA target sequence for B130017I01Rik (NM_172525.1,1740-1758).
gaagttcggaatgtttagt

SEQ ID NO: 680633 - DNA, 19 bp, Mus musculus
  siRNA target sequence for B130017I01Rik (NM_172525.1,1777-1795).
ggaagcagtgagtctagat

SEQ ID NO: 680634 - DNA, 19 bp, Mus musculus
  siRNA target sequence for B130017I01Rik (NM_172525.1,1899-1917).
gccaccgtccccttcagaa

SEQ ID NO: 680635 - DNA, 19 bp, Mus musculus
  siRNA target sequence for B130017I01Rik (NM_172525.1,1931-1949).
ccctcggagcatttaagaa

SEQ ID NO: 680636 - DNA, 19 bp, Mus musculus
  siRNA target sequence for B130017I01Rik (NM_172525.1,1935-1953).
cggagcatttaagaaaact

SEQ ID NO: 680637 - DNA, 19 bp, Mus musculus
  siRNA target sequence for B130017I01Rik (NM_172525.1,1967-1985).
cagctctcactcacaagtt

SEQ ID NO: 680638 - DNA, 19 bp, Mus musculus
  siRNA target sequence for B130017I01Rik (NM_172525.1,2017-2035).
gattgtgacggcatcgtaa

SEQ ID NO: 680639 - DNA, 19 bp, Mus musculus
  siRNA target sequence for B130017I01Rik (NM_172525.1,2021-2039).
gtgacggcatcgtaatgtt

SEQ ID NO: 680640 - DNA, 19 bp, Mus musculus
  siRNA target sequence for B130017I01Rik (NM_172525.1,2056-2074).
gaagagtgtctccttgttt

SEQ ID NO: 680641 - DNA, 19 bp, Mus musculus
  siRNA target sequence for B130017I01Rik (NM_172525.1,2087-2105).
gtctggagaatttagtcat

SEQ ID NO: 680642 - DNA, 19 bp, Mus musculus
  siRNA target sequence for B130017I01Rik (NM_172525.1,2103-2121).
cattatttgtggtcatcaa

SEQ ID NO: 680643 - DNA, 19 bp, Mus musculus
  siRNA target sequence for B130017I01Rik (NM_172525.1,2111-2129).
gtggtcatcaaaaacttca

SEQ ID NO: 680644 - DNA, 19 bp, Mus musculus
  siRNA target sequence for B130017I01Rik (NM_172525.1,2189-2207).
gcatcccttttgtactgaa

SEQ ID NO: 680645 - DNA, 19 bp, Mus musculus
  siRNA target sequence for B130017I01Rik (NM_172525.1,2190-2208).
catcccttttgtactgaaa

SEQ ID NO: 680646 - DNA, 19 bp, Mus musculus
  siRNA target sequence for B130017I01Rik (NM_172525.1,2193-2211).
cccttttgtactgaaaata

SEQ ID NO: 680647 - DNA, 19 bp, Mus musculus
  siRNA target sequence for B130017I01Rik (NM_172525.1,2194-2212).
ccttttgtactgaaaatat

SEQ ID NO: 680648 - DNA, 19 bp, Mus musculus
  siRNA target sequence for B130017I01Rik (NM_172525.1,2241-2259).
gtgtctccagggaatttat

SEQ ID NO: 680649 - DNA, 19 bp, Mus musculus
  siRNA target sequence for B130017I01Rik (NM_172525.1,2315-2333).
ggatgcacttagtagacat

SEQ ID NO: 680650 - DNA, 19 bp, Mus musculus
  siRNA target sequence for B130017I01Rik (NM_172525.1,2316-2334).
gatgcacttagtagacatt

SEQ ID NO: 680651 - DNA, 19 bp, Mus musculus
  siRNA target sequence for B130017I01Rik (NM_172525.1,2414-2432).
gattgtacaaggaatttat

SEQ ID NO: 680652 - DNA, 19 bp, Mus musculus
  siRNA target sequence for B130017I01Rik (NM_172525.1,2436-2454).
ccttgcaaaagagatacaa

SEQ ID NO: 680653 - DNA, 19 bp, Mus musculus
  siRNA target sequence for B130017I01Rik (NM_172525.1,2572-2590).
ccagcgtcacatttcaaca

SEQ ID NO: 680654 - DNA, 19 bp, Mus musculus
  siRNA target sequence for B130017I01Rik (NM_172525.1,2727-2745).
ctcgtcccttgctgaatat

SEQ ID NO: 680655 - DNA, 19 bp, Mus musculus
  siRNA target sequence for B130017I01Rik (NM_172525.1,2732-2750).
cccttgctgaatattccaa

SEQ ID NO: 680656 - DNA, 19 bp, Mus musculus
  siRNA target sequence for B130017I01Rik (NM_172525.1,2748-2766).
caatcaggcacgattagta

SEQ ID NO: 680657 - DNA, 19 bp, Mus musculus
  siRNA target sequence for B130017I01Rik (NM_172525.1,2767-2785).
gagttccttattacttact

SEQ ID NO: 680658 - DNA, 19 bp, Mus musculus
  siRNA target sequence for B130017I01Rik (NM_172525.1,2769-2787).
gttccttattacttactca

SEQ ID NO: 680659 - DNA, 19 bp, Mus musculus
  siRNA target sequence for B130017I01Rik (NM_172525.1,2814-2832).
gcctcaagctgttgttata

SEQ ID NO: 680660 - DNA, 19 bp, Mus musculus
  siRNA target sequence for B130017I01Rik (NM_172525.1,2850-2868).
ggcacctcaggttgatcaa

SEQ ID NO: 680661 - DNA, 19 bp, Mus musculus
  siRNA target sequence for B130017I01Rik (NM_172525.1,2859-2877).
ggttgatcaaggctatctt

SEQ ID NO: 680662 - DNA, 19 bp, Mus musculus
  siRNA target sequence for B130017I01Rik (NM_172525.1,2908-2926).
gacacagatcattctatga

SEQ ID NO: 680663 - DNA, 19 bp, Mus musculus
  siRNA target sequence for B130017I01Rik (NM_172525.1,2949-2967).
ggaagatatccgtagttca

SEQ ID NO: 680664 - DNA, 19 bp, Mus musculus
  siRNA target sequence for B130017I01Rik (NM_172525.1,2953-2971).
gatatccgtagttcagatt

SEQ ID NO: 680665 - DNA, 19 bp, Mus musculus
  siRNA target sequence for B130017I01Rik (NM_172525.1,2972-2990).
gtgagagcaaaagttttga

SEQ ID NO: 680666 - DNA, 19 bp, Mus musculus
  siRNA target sequence for B130017I01Rik (NM_172525.1,3057-3075).
cctcgacaacaaagtacat

SEQ ID NO: 680667 - DNA, 19 bp, Mus musculus
  siRNA target sequence for B130017I01Rik (NM_172525.1,3058-3076).
ctcgacaacaaagtacatt

SEQ ID NO: 680668 - DNA, 19 bp, Mus musculus
  siRNA target sequence for B130017I01Rik (NM_172525.1,3097-3115).
gagtcagcgtcccaaaaga

SEQ ID NO: 680669 - DNA, 19 bp, Mus musculus
  siRNA target sequence for B130017I01Rik (NM_172525.1,3269-3287).
gcagcagggatgtaggaaa

SEQ ID NO: 680670 - DNA, 19 bp, Mus musculus
  siRNA target sequence for B130017I01Rik (NM_172525.1,3273-3291).
cagggatgtaggaaacgta

SEQ ID NO: 680671 - DNA, 19 bp, Mus musculus
  siRNA target sequence for B130017I01Rik (NM_172525.1,3309-3327).
caagaaccctgcctttgaa

SEQ ID NO: 680672 - DNA, 19 bp, Mus musculus
  siRNA target sequence for B130017I01Rik (NM_172525.1,3415-3433).
caatatgtacggaacaatt

SEQ ID NO: 680673 - DNA, 19 bp, Mus musculus
  siRNA target sequence for B130017I01Rik (NM_172525.1,3440-3458).
ccaagactacgatgattgt

SEQ ID NO: 680674 - DNA, 19 bp, Mus musculus
  siRNA target sequence for B130017I01Rik (NM_172525.1,3441-3459).
caagactacgatgattgtt

SEQ ID NO: 680675 - DNA, 19 bp, Mus musculus
  siRNA target sequence for B130017I01Rik (NM_172525.1,3480-3498).
gggattgacagtaaacact

SEQ ID NO: 680676 - DNA, 19 bp, Mus musculus
  siRNA target sequence for B130017I01Rik (NM_172525.1,3510-3528).
ggaccatcccggcagtaaa

SEQ ID NO: 680677 - DNA, 19 bp, Mus musculus
  siRNA target sequence for B130017I01Rik (NM_172525.1,3513-3531).
ccatcccggcagtaaagca

SEQ ID NO: 680678 - DNA, 19 bp, Mus musculus
  siRNA target sequence for B130017I01Rik (NM_172525.1,3629-3647).
cccaacactggacaacatt

SEQ ID NO: 680679 - DNA, 19 bp, Mus musculus
  siRNA target sequence for B130017I01Rik (NM_172525.1,3743-3761).
cccagatccatgtgacaaa

SEQ ID NO: 680680 - DNA, 19 bp, Mus musculus
  siRNA target sequence for B130017I01Rik (NM_172525.1,3806-3824).
caagtggtcaacctaaaga

SEQ ID NO: 680681 - DNA, 19 bp, Mus musculus
  siRNA target sequence for B130017I01Rik (NM_172525.1,3866-3884).
gccagagaccacgactaaa

SEQ ID NO: 680682 - DNA, 19 bp, Mus musculus
  siRNA target sequence for B130017I01Rik (NM_172525.1,3867-3885).
ccagagaccacgactaaaa

SEQ ID NO: 680683 - DNA, 19 bp, Mus musculus
  siRNA target sequence for B130017I01Rik (NM_172525.1,3872-3890).
gaccacgactaaaacgaat

SEQ ID NO: 680684 - DNA, 19 bp, Mus musculus
  siRNA target sequence for B130023O14Rik (NM_172277.1,764-782).
cgctgctgatcttctcata

SEQ ID NO: 680685 - DNA, 19 bp, Mus musculus
  siRNA target sequence for B130023O14Rik (NM_172277.1,765-783).
gctgctgatcttctcatat

SEQ ID NO: 680686 - DNA, 19 bp, Mus musculus
  siRNA target sequence for B130023O14Rik (NM_172277.1,766-784).
ctgctgatcttctcatatt

SEQ ID NO: 680687 - DNA, 19 bp, Mus musculus
  siRNA target sequence for BC024086 (NM_172546.1,642-660).
gtttgagcgggagaagata

SEQ ID NO: 680688 - DNA, 19 bp, Mus musculus
  siRNA target sequence for BC024086 (NM_172546.1,664-682).
ggggagcagttgctgaaaa

SEQ ID NO: 680689 - DNA, 19 bp, Mus musculus
  siRNA target sequence for BC024086 (NM_172546.1,665-683).
gggagcagttgctgaaaat

SEQ ID NO: 680690 - DNA, 19 bp, Mus musculus
  siRNA target sequence for BC024086 (NM_172546.1,874-892).
gcctacgatgggaatacgt

SEQ ID NO: 680691 - DNA, 19 bp, Mus musculus
  siRNA target sequence for BC024086 (NM_172546.1,969-987).
ggaccgggctccattcaca

SEQ ID NO: 680692 - DNA, 19 bp, Mus musculus
  siRNA target sequence for BC024086 (NM_172546.1,1083-1101).
ggaggataaagttttaaat

SEQ ID NO: 680693 - DNA, 19 bp, Mus musculus
  siRNA target sequence for BC024086 (NM_172546.1,1216-1234).
gaaggcctgggcatgtaca

SEQ ID NO: 680694 - DNA, 19 bp, Mus musculus
  siRNA target sequence for BC024086 (NM_172546.1,1222-1240).
ctgggcatgtacatcaagt

SEQ ID NO: 680695 - DNA, 19 bp, Mus musculus
  siRNA target sequence for BC024086 (NM_172546.1,1225-1243).
ggcatgtacatcaagtcaa

SEQ ID NO: 680696 - DNA, 19 bp, Mus musculus
  siRNA target sequence for BC024086 (NM_172546.1,1248-1266).
cgacggactgcatgtgatt

SEQ ID NO: 680697 - DNA, 19 bp, Mus musculus
  siRNA target sequence for BC024086 (NM_172546.1,1249-1267).
gacggactgcatgtgatta

SEQ ID NO: 680698 - DNA, 19 bp, Mus musculus
  siRNA target sequence for BC024086 (NM_172546.1,1251-1269).
cggactgcatgtgattact

SEQ ID NO: 680699 - DNA, 19 bp, Mus musculus
  siRNA target sequence for BC024086 (NM_172546.1,1316-1334).
ctggcgatgaggtcattca

SEQ ID NO: 680700 - DNA, 19 bp, Mus musculus
  siRNA target sequence for BC024086 (NM_172546.1,1319-1337).
gcgatgaggtcattcaagt

SEQ ID NO: 680701 - DNA, 19 bp, Mus musculus
  siRNA target sequence for BC024086 (NM_172546.1,1570-1588).
ccagccatcctggatctat

SEQ ID NO: 680702 - DNA, 19 bp, Mus musculus
  siRNA target sequence for BC024086 (NM_172546.1,1571-1589).
cagccatcctggatctata

SEQ ID NO: 680703 - DNA, 19 bp, Mus musculus
  siRNA target sequence for BC024086 (NM_172546.1,1574-1592).
ccatcctggatctatacat

SEQ ID NO: 680704 - DNA, 19 bp, Mus musculus
  siRNA target sequence for BC024086 (NM_172546.1,1625-1643).
gggatgagaatgtgagttt

SEQ ID NO: 680705 - DNA, 19 bp, Mus musculus
  siRNA target sequence for BC024086 (NM_172546.1,1646-1664).
gctacagaggacacagtaa

SEQ ID NO: 680706 - DNA, 19 bp, Mus musculus
  siRNA target sequence for BC024086 (NM_172546.1,1732-1750).
caaagacgcagatttacca

SEQ ID NO: 680707 - DNA, 19 bp, Mus musculus
  siRNA target sequence for BC024086 (NM_172546.1,1775-1793).
ggtattcggtggaaaccaa

SEQ ID NO: 680708 - DNA, 19 bp, Mus musculus
  siRNA target sequence for BC024086 (NM_172546.1,1776-1794).
gtattcggtggaaaccaat

SEQ ID NO: 680709 - DNA, 19 bp, Mus musculus
  siRNA target sequence for BC024086 (NM_172546.1,1781-1799).
cggtggaaaccaatgttct

SEQ ID NO: 680710 - DNA, 19 bp, Mus musculus
  siRNA target sequence for BC024086 (NM_172546.1,1795-1813).
gttctgcccacaaaaatga

SEQ ID NO: 680711 - DNA, 19 bp, Mus musculus
  siRNA target sequence for BC024086 (NM_172546.1,1881-1899).
gatcgtggacccttttgct

SEQ ID NO: 680712 - DNA, 19 bp, Mus musculus
  siRNA target sequence for BC024086 (NM_172546.1,1884-1902).
cgtggacccttttgctaaa

SEQ ID NO: 680713 - DNA, 19 bp, Mus musculus
  siRNA target sequence for BC024086 (NM_172546.1,1933-1951).
gccctctgccggtacttca

SEQ ID NO: 680714 - DNA, 19 bp, Mus musculus
  siRNA target sequence for BC024086 (NM_172546.1,1993-2011).
cctatgtaccggttctcta

SEQ ID NO: 680715 - DNA, 19 bp, Mus musculus
  siRNA target sequence for Blnk (NM_008528.3,543-561).
ccatgatattaagaacaat

SEQ ID NO: 680716 - DNA, 19 bp, Mus musculus
  siRNA target sequence for Blnk (NM_008528.3,568-586).
ggaataatggacaagataa

SEQ ID NO: 680717 - DNA, 19 bp, Mus musculus
  siRNA target sequence for Blnk (NM_008528.3,600-618).
caaaggccctccaagtgtt

SEQ ID NO: 680718 - DNA, 19 bp, Mus musculus
  siRNA target sequence for Blnk (NM_008528.3,713-731).
cggactccgagatgtatgt

SEQ ID NO: 680719 - DNA, 19 bp, Mus musculus
  siRNA target sequence for Blnk (NM_008528.3,715-733).
gactccgagatgtatgtga

SEQ ID NO: 680720 - DNA, 19 bp, Mus musculus
  siRNA target sequence for Blnk (NM_008528.3,747-765).
gacgggcgacgattcctat

SEQ ID NO: 680721 - DNA, 19 bp, Mus musculus
  siRNA target sequence for Blnk (NM_008528.3,750-768).
gggcgacgattcctatgaa

SEQ ID NO: 680722 - DNA, 19 bp, Mus musculus
  siRNA target sequence for Blnk (NM_008528.3,819-837).
cacgaggggcgagtatgta

SEQ ID NO: 680723 - DNA, 19 bp, Mus musculus
  siRNA target sequence for Blnk (NM_008528.3,821-839).
cgaggggcgagtatgtaga

SEQ ID NO: 680724 - DNA, 19 bp, Mus musculus
  siRNA target sequence for Blnk (NM_008528.3,824-842).
ggggcgagtatgtagataa

SEQ ID NO: 680725 - DNA, 19 bp, Mus musculus
  siRNA target sequence for Blnk (NM_008528.3,828-846).
cgagtatgtagataatcga

SEQ ID NO: 680726 - DNA, 19 bp, Mus musculus
  siRNA target sequence for Blnk (NM_008528.3,829-847).
gagtatgtagataatcgat

SEQ ID NO: 680727 - DNA, 19 bp, Mus musculus
  siRNA target sequence for Blnk (NM_008528.3,1021-1039).
gtggaagataacgatgaaa

SEQ ID NO: 680728 - DNA, 19 bp, Mus musculus
  siRNA target sequence for Blnk (NM_008528.3,1027-1045).
gataacgatgaaaactata

SEQ ID NO: 680729 - DNA, 19 bp, Mus musculus
  siRNA target sequence for Blnk (NM_008528.3,1032-1050).
cgatgaaaactatatccat

SEQ ID NO: 680730 - DNA, 19 bp, Mus musculus
  siRNA target sequence for Blnk (NM_008528.3,1083-1101).
ggctcccatggtgaataga

SEQ ID NO: 680731 - DNA, 19 bp, Mus musculus
  siRNA target sequence for Blnk (NM_008528.3,1084-1102).
gctcccatggtgaatagat

SEQ ID NO: 680732 - DNA, 19 bp, Mus musculus
  siRNA target sequence for Blnk (NM_008528.3,1234-1252).
ccagctacaccacttaaga

SEQ ID NO: 680733 - DNA, 19 bp, Mus musculus
  siRNA target sequence for Blnk (NM_008528.3,1264-1282).
cctcccctaccgaatgcat

SEQ ID NO: 680734 - DNA, 19 bp, Mus musculus
  siRNA target sequence for Blnk (NM_008528.3,1269-1287).
cctaccgaatgcatcaaat

SEQ ID NO: 680735 - DNA, 19 bp, Mus musculus
  siRNA target sequence for Blnk (NM_008528.3,1455-1473).
ccacagcttcccatttaat

SEQ ID NO: 680736 - DNA, 19 bp, Mus musculus
  siRNA target sequence for Blnk (NM_008528.3,1456-1474).
cacagcttcccatttaatt

SEQ ID NO: 680737 - DNA, 19 bp, Mus musculus
  siRNA target sequence for Blnk (NM_008528.3,1629-1647).
caccctagttgcgttcttt

SEQ ID NO: 680738 - DNA, 19 bp, Mus musculus
  siRNA target sequence for Blnk (NM_008528.3,1631-1649).
ccctagttgcgttctttaa

SEQ ID NO: 680739 - DNA, 19 bp, Mus musculus
  siRNA target sequence for Blnk (NM_008528.3,1633-1651).
ctagttgcgttctttaaca

SEQ ID NO: 680740 - DNA, 19 bp, Mus musculus
  siRNA target sequence for Blnk (NM_008528.3,1644-1662).
ctttaacaagcgagtgtat

SEQ ID NO: 680741 - DNA, 19 bp, Mus musculus
  siRNA target sequence for Blnk (NM_008528.3,1771-1789).
cacaaccccctggttctta

SEQ ID NO: 680742 - DNA, 19 bp, Mus musculus
  siRNA target sequence for Blnk (NM_008528.3,1813-1831).
gattccacgagactgaaat

SEQ ID NO: 680743 - DNA, 19 bp, Mus musculus
  siRNA target sequence for Blnk (NM_008528.3,1818-1836).
cacgagactgaaatatgct

SEQ ID NO: 680744 - DNA, 19 bp, Mus musculus
  siRNA target sequence for Cipp (NM_007704.1,276-294).
gatcaggcaaagatatgca

SEQ ID NO: 680745 - DNA, 19 bp, Mus musculus
  siRNA target sequence for Cipp (NM_007704.1,302-320).
cgggagaactacacattat

SEQ ID NO: 680746 - DNA, 19 bp, Mus musculus
  siRNA target sequence for Cipp (NM_007704.1,393-411).
cttcgtggtggggattaat

SEQ ID NO: 680747 - DNA, 19 bp, Mus musculus
  siRNA target sequence for Cipp (NM_007704.1,452-470).
gagacgagctgctagagat

SEQ ID NO: 680748 - DNA, 19 bp, Mus musculus
  siRNA target sequence for Cipp (NM_007704.1,454-472).
gacgagctgctagagataa

SEQ ID NO: 680749 - DNA, 19 bp, Mus musculus
  siRNA target sequence for Cipp (NM_007704.1,463-481).
ctagagataaacaatcaga

SEQ ID NO: 680750 - DNA, 19 bp, Mus musculus
  siRNA target sequence for Cipp (NM_007704.1,508-526).
gcatctgccattattaaga

SEQ ID NO: 680751 - DNA, 19 bp, Mus musculus
  siRNA target sequence for Cipp (NM_007704.1,536-554).
ccagggtcaaactggtttt

SEQ ID NO: 680752 - DNA, 19 bp, Mus musculus
  siRNA target sequence for Cipp (NM_007704.1,541-559).
gtcaaactggttttcatta

SEQ ID NO: 680753 - DNA, 19 bp, Mus musculus
  siRNA target sequence for Cipp (NM_007704.1,596-614).
ccttcccggagctatcaca

SEQ ID NO: 680754 - DNA, 19 bp, Mus musculus
  siRNA target sequence for Cipp (NM_007704.1,597-615).
cttcccggagctatcacat

SEQ ID NO: 680755 - DNA, 19 bp, Mus musculus
  siRNA target sequence for Cipp (NM_007704.1,600-618).
cccggagctatcacattct

SEQ ID NO: 680756 - DNA, 19 bp, Mus musculus
  siRNA target sequence for Cipp (NM_007704.1,731-749).
cccaggtggttgatgacaa

SEQ ID NO: 680757 - DNA, 19 bp, Mus musculus
  siRNA target sequence for Cipp (NM_007704.1,990-1008).
ggaaatgatcatagaaata

SEQ ID NO: 680758 - DNA, 19 bp, Mus musculus
  siRNA target sequence for Cipp (NM_007704.1,991-1009).
gaaatgatcatagaaatat

SEQ ID NO: 680759 - DNA, 19 bp, Mus musculus
  siRNA target sequence for Cipp (NM_007704.1,1026-1044).
gctcgggctcagcattgtt

SEQ ID NO: 680760 - DNA, 19 bp, Mus musculus
  siRNA target sequence for Cipp (NM_007704.1,1056-1074).
cacacctttggatgctata

SEQ ID NO: 680761 - DNA, 19 bp, Mus musculus
  siRNA target sequence for Cipp (NM_007704.1,1065-1083).
ggatgctatagttatccat

SEQ ID NO: 680762 - DNA, 19 bp, Mus musculus
  siRNA target sequence for Cipp (NM_007704.1,1106-1124).
ctgccagagatggaagatt

SEQ ID NO: 680763 - DNA, 19 bp, Mus musculus
  siRNA target sequence for Cipp (NM_007704.1,1222-1240).
gtgcggctggtggtataca

SEQ ID NO: 680764 - DNA, 19 bp, Mus musculus
  siRNA target sequence for Cipp (NM_007704.1,1224-1242).
gcggctggtggtatacaga

SEQ ID NO: 680765 - DNA, 19 bp, Mus musculus
  siRNA target sequence for Cipp (NM_007704.1,1344-1362).
gagtggaagtggagtgttt

SEQ ID NO: 680766 - DNA, 19 bp, Mus musculus
  siRNA target sequence for Cipp (NM_007704.1,1346-1364).
gtggaagtggagtgtttat

SEQ ID NO: 680767 - DNA, 19 bp, Mus musculus
  siRNA target sequence for Cipp (NM_007704.1,1393-1411).
gacctcgatgggaggttaa

SEQ ID NO: 680768 - DNA, 19 bp, Mus musculus
  siRNA target sequence for Cipp (NM_007704.1,1395-1413).
cctcgatgggaggttaatt

SEQ ID NO: 680769 - DNA, 19 bp, Mus musculus
  siRNA target sequence for Cipp (NM_007704.1,1398-1416).
cgatgggaggttaattcga

SEQ ID NO: 680770 - DNA, 19 bp, Mus musculus
  siRNA target sequence for Cipp (NM_007704.1,1414-1432).
cgaggagaccagatcttgt

SEQ ID NO: 680771 - DNA, 19 bp, Mus musculus
  siRNA target sequence for Cipp (NM_007704.1,1422-1440).
ccagatcttgtctgtgaat

SEQ ID NO: 680772 - DNA, 19 bp, Mus musculus
  siRNA target sequence for Cipp (NM_007704.1,1602-1620).
cagctgtcggccttccttt

SEQ ID NO: 680773 - DNA, 19 bp, Mus musculus
  siRNA target sequence for Cipp (NM_007704.1,1672-1690).
gatcctccacagaaatgca

SEQ ID NO: 680774 - DNA, 19 bp, Mus musculus
  siRNA target sequence for Cipp (NM_007704.1,1735-1753).
gatgcccttgggatcagta

SEQ ID NO: 680775 - DNA, 19 bp, Mus musculus
  siRNA target sequence for Cipp (NM_007704.1,1791-1809).
catatttattgccatgatt

SEQ ID NO: 680776 - DNA, 19 bp, Mus musculus
  siRNA target sequence for Cipp (NM_007704.1,1849-1867).
gttggagatcggattgtga

SEQ ID NO: 680777 - DNA, 19 bp, Mus musculus
  siRNA target sequence for Cipp (NM_007704.1,1855-1873).
gatcggattgtgagcatta

SEQ ID NO: 680778 - DNA, 19 bp, Mus musculus
  siRNA target sequence for Cipp (NM_007704.1,1860-1878).
gattgtgagcattaatgga

SEQ ID NO: 680779 - DNA, 19 bp, Mus musculus
  siRNA target sequence for Cipp (NM_007704.1,1902-1920).
cacagatgccgttaatcta

SEQ ID NO: 680780 - DNA, 19 bp, Mus musculus
  siRNA target sequence for Cipp (NM_007704.1,1904-1922).
cagatgccgttaatctact

SEQ ID NO: 680781 - DNA, 19 bp, Mus musculus
  siRNA target sequence for Cipp (NM_007704.1,1910-1928).
ccgttaatctactgaagaa

SEQ ID NO: 680782 - DNA, 19 bp, Mus musculus
  siRNA target sequence for Cipp (NM_007704.1,1911-1929).
cgttaatctactgaagaat

SEQ ID NO: 680783 - DNA, 19 bp, Mus musculus
  siRNA target sequence for Cipp (NM_172696.1,153-171).
gatgggcaccactatatct

SEQ ID NO: 680784 - DNA, 19 bp, Mus musculus
  siRNA target sequence for Cipp (NM_172696.1,242-260).
caacggcatgcagctttat

SEQ ID NO: 680785 - DNA, 19 bp, Mus musculus
  siRNA target sequence for Cipp (NM_172696.1,297-315).
gaagtgcccccaccattta

SEQ ID NO: 680786 - DNA, 19 bp, Mus musculus
  siRNA target sequence for Cipp (NM_172696.1,401-419).
ggttgaccacagtgtagat

SEQ ID NO: 680787 - DNA, 19 bp, Mus musculus
  siRNA target sequence for Cipp (NM_172696.1,511-529).
gattcagtattttggatta

SEQ ID NO: 680788 - DNA, 19 bp, Mus musculus
  siRNA target sequence for Cipp (NM_172696.1,547-565).
ccacgcggtcagtgattgt

SEQ ID NO: 680789 - DNA, 19 bp, Mus musculus
  siRNA target sequence for Cipp (NM_172696.1,550-568).
cgcggtcagtgattgtgat

SEQ ID NO: 680790 - DNA, 19 bp, Mus musculus
  siRNA target sequence for Cipp (NM_172696.1,585-603).
gatggtgtagcggaaagaa

SEQ ID NO: 680791 - DNA, 19 bp, Mus musculus
  siRNA target sequence for Cipp (NM_172696.1,752-770).
gaaggaagagcgttttagt

SEQ ID NO: 680792 - DNA, 19 bp, Mus musculus
  siRNA target sequence for Cipp (NM_172696.1,759-777).
gagcgttttagtttacatt

SEQ ID NO: 680793 - DNA, 19 bp, Mus musculus
  siRNA target sequence for Cipp (NM_172696.1,762-780).
cgttttagtttacattcaa

SEQ ID NO: 680794 - DNA, 19 bp, Mus musculus
  siRNA target sequence for Cipp (NM_172696.1,865-883).
gagatgagccatatcttga

SEQ ID NO: 680795 - DNA, 19 bp, Mus musculus
  siRNA target sequence for Cipp (NM_172696.1,890-908).
cgtggatgaaccttttcta

SEQ ID NO: 680796 - DNA, 19 bp, Mus musculus
  siRNA target sequence for Cipp (NM_172696.1,893-911).
ggatgaaccttttctagat

SEQ ID NO: 680797 - DNA, 19 bp, Mus musculus
  siRNA target sequence for Cipp (NM_172696.1,906-924).
ctagatttgggaaagtctt

SEQ ID NO: 680798 - DNA, 19 bp, Mus musculus
  siRNA target sequence for Cipp (NM_172696.1,959-977).
ggaagcttgggaaatgcat

SEQ ID NO: 680799 - DNA, 19 bp, Mus musculus
  siRNA target sequence for Cipp (NM_172696.1,1037-1055).
ggagtatgaactttatcaa

SEQ ID NO: 680800 - DNA, 19 bp, Mus musculus
  siRNA target sequence for Cipp (NM_172696.1,1324-1342).
gtcaacacggcagatttga

SEQ ID NO: 680801 - DNA, 19 bp, Mus musculus
  siRNA target sequence for Cipp (NM_172696.1,1538-1556).
gtcttcacggcatgcaaat

SEQ ID NO: 680802 - DNA, 19 bp, Mus musculus
  siRNA target sequence for Cipp (NM_172696.1,1619-1637).
ctggggtccaccaagaata

SEQ ID NO: 680803 - DNA, 19 bp, Mus musculus
  siRNA target sequence for Cipp (NM_172696.1,1621-1639).
ggggtccaccaagaatagt

SEQ ID NO: 680804 - DNA, 19 bp, Mus musculus
  siRNA target sequence for Cipp (NM_172696.1,1624-1642).
gtccaccaagaatagttga

SEQ ID NO: 680805 - DNA, 19 bp, Mus musculus
  siRNA target sequence for Cipp (NM_172696.1,1626-1644).
ccaccaagaatagttgaaa

SEQ ID NO: 680806 - DNA, 19 bp, Mus musculus
  siRNA target sequence for Cipp (NM_172696.1,1679-1697).
catcgttggtggacaaaca

SEQ ID NO: 680807 - DNA, 19 bp, Mus musculus
  siRNA target sequence for Cipp (NM_172696.1,1682-1700).
cgttggtggacaaacagtt

SEQ ID NO: 680808 - DNA, 19 bp, Mus musculus
  siRNA target sequence for Cipp (NM_172696.1,1683-1701).
gttggtggacaaacagtta

SEQ ID NO: 680809 - DNA, 19 bp, Mus musculus
  siRNA target sequence for Cipp (NM_172696.1,1686-1704).
ggtggacaaacagttataa

SEQ ID NO: 680810 - DNA, 19 bp, Mus musculus
  siRNA target sequence for Cipp (NM_172696.1,1687-1705).
gtggacaaacagttataaa

SEQ ID NO: 680811 - DNA, 19 bp, Mus musculus
  siRNA target sequence for Cipp (NM_172696.1,1725-1743).
gaactcaaggggatattca

SEQ ID NO: 680812 - DNA, 19 bp, Mus musculus
  siRNA target sequence for Cipp (NM_172696.1,1728-1746).
ctcaaggggatattcatca

SEQ ID NO: 680813 - DNA, 19 bp, Mus musculus
  siRNA target sequence for Cipp (NM_172696.1,1730-1748).
caaggggatattcatcaaa

SEQ ID NO: 680814 - DNA, 19 bp, Mus musculus
  siRNA target sequence for Cipp (NM_172696.1,1733-1751).
ggggatattcatcaaacaa

SEQ ID NO: 680815 - DNA, 19 bp, Mus musculus
  siRNA target sequence for Cipp (NM_172696.1,1786-1804).
cgctgaaaaccggagataa

SEQ ID NO: 680816 - DNA, 19 bp, Mus musculus
  siRNA target sequence for Cipp (NM_172696.1,1879-1897).
gaaaccctgtggtattcgt

SEQ ID NO: 680817 - DNA, 19 bp, Mus musculus
  siRNA target sequence for Cipp (NM_172696.1,1926-1944).
gtcatcccaactgtgaata

SEQ ID NO: 680818 - DNA, 19 bp, Mus musculus
  siRNA target sequence for Cipp (NM_172696.1,1931-1949).
cccaactgtgaataacaaa

SEQ ID NO: 680819 - DNA, 19 bp, Mus musculus
  siRNA target sequence for Cipp (NM_172696.1,1962-1980).
gccccgaaccaggatcaaa

SEQ ID NO: 680820 - DNA, 19 bp, Mus musculus
  siRNA target sequence for Cipp (NM_172696.1,1967-1985).
gaaccaggatcaaaacact

SEQ ID NO: 680821 - DNA, 19 bp, Mus musculus
  siRNA target sequence for Cipp (NM_172696.1,2089-2107).
gtgcgctgaccgacaaaaa

SEQ ID NO: 680822 - DNA, 19 bp, Mus musculus
  siRNA target sequence for Cipp (NM_172696.1,2091-2109).
gcgctgaccgacaaaaaga

SEQ ID NO: 680823 - DNA, 19 bp, Mus musculus
  siRNA target sequence for Cipp (NM_172696.1,2092-2110).
cgctgaccgacaaaaagat

SEQ ID NO: 680824 - DNA, 19 bp, Mus musculus
  siRNA target sequence for Cnih (NM_009919.1,322-340).
gccccttttggcataccat

SEQ ID NO: 680825 - DNA, 19 bp, Mus musculus
  siRNA target sequence for Cnih (NM_009919.1,323-341).
ccccttttggcataccata

SEQ ID NO: 680826 - DNA, 19 bp, Mus musculus
  siRNA target sequence for Cnih (NM_009919.1,389-407).
gacccgacgaccatcatga

SEQ ID NO: 680827 - DNA, 19 bp, Mus musculus
  siRNA target sequence for Cnih (NM_009919.1,391-409).
cccgacgaccatcatgaat

SEQ ID NO: 680828 - DNA, 19 bp, Mus musculus
  siRNA target sequence for Cnih (NM_009919.1,403-421).
catgaatgcagacattcta

SEQ ID NO: 680829 - DNA, 19 bp, Mus musculus
  siRNA target sequence for Cnih (NM_009919.1,448-466).
caaactcgctttttacctt

SEQ ID NO: 680830 - DNA, 19 bp, Mus musculus
  siRNA target sequence for Cnih (NM_009919.1,470-488).
gcgtttttttactacctat

SEQ ID NO: 680831 - DNA, 19 bp, Mus musculus
  siRNA target sequence for Cnih (NM_009919.1,471-489).
cgtttttttactacctata

SEQ ID NO: 680832 - DNA, 19 bp, Mus musculus
  siRNA target sequence for Cnih (NM_009919.1,484-502).
cctatacggcatgatctat

SEQ ID NO: 680833 - DNA, 19 bp, Mus musculus
  siRNA target sequence for Cnil (NM_009920.1,304-322).
gggcacgcgagcgtttgaa

SEQ ID NO: 680834 - DNA, 19 bp, Mus musculus
  siRNA target sequence for Cnil (NM_009920.1,305-323).
ggcacgcgagcgtttgaaa

SEQ ID NO: 680835 - DNA, 19 bp, Mus musculus
  siRNA target sequence for Cnil (NM_009920.1,307-325).
cacgcgagcgtttgaaaaa

SEQ ID NO: 680836 - DNA, 19 bp, Mus musculus
  siRNA target sequence for Cnil (NM_009920.1,309-327).
cgcgagcgtttgaaaaaca

SEQ ID NO: 680837 - DNA, 19 bp, Mus musculus
  siRNA target sequence for Cnil (NM_009920.1,310-328).
gcgagcgtttgaaaaacat

SEQ ID NO: 680838 - DNA, 19 bp, Mus musculus
  siRNA target sequence for Cnil (NM_009920.1,493-511).
gctctgaggtcatgtatga

SEQ ID NO: 680839 - DNA, 19 bp, Mus musculus
  siRNA target sequence for Cnil (NM_009920.1,510-528).
gatgcggtctctatcatga

SEQ ID NO: 680840 - DNA, 19 bp, Mus musculus
  siRNA target sequence for Cnil (NM_009920.1,606-624).
ctgtacagtatggtttata

SEQ ID NO: 680841 - DNA, 19 bp, Mus musculus
  siRNA target sequence for Crkl (NM_007764.2,768-786).
ctggacactaccaccttaa

SEQ ID NO: 680842 - DNA, 19 bp, Mus musculus
  siRNA target sequence for Crkl (NM_007764.2,773-791).
cactaccaccttaatcgaa

SEQ ID NO: 680843 - DNA, 19 bp, Mus musculus
  siRNA target sequence for Crkl (NM_007764.2,873-891).
gtacggaccctttatgatt

SEQ ID NO: 680844 - DNA, 19 bp, Mus musculus
  siRNA target sequence for Crkl (NM_007764.2,931-949).
gcgagcttctagtgataat

SEQ ID NO: 680845 - DNA, 19 bp, Mus musculus
  siRNA target sequence for Crkl (NM_007764.2,932-950).
cgagcttctagtgataata

SEQ ID NO: 680846 - DNA, 19 bp, Mus musculus
  siRNA target sequence for Crkl (NM_007764.2,1016-1034).
cccttacgttgaaaagctt

SEQ ID NO: 680847 - DNA, 19 bp, Mus musculus
  siRNA target sequence for Crkl (NM_007764.2,1039-1057).
ggtcttcgccacatggaaa

SEQ ID NO: 680848 - DNA, 19 bp, Mus musculus
  siRNA target sequence for Crkl (NM_007764.2,1050-1068).
catggaaagcatggaaata

SEQ ID NO: 680849 - DNA, 19 bp, Mus musculus
  siRNA target sequence for Crkl (NM_007764.2,1062-1080).
ggaaataggaattctaaca

SEQ ID NO: 680850 - DNA, 19 bp, Mus musculus
  siRNA target sequence for Crkl (NM_007764.2,1268-1286).
ggttggtgacattgtgaaa

SEQ ID NO: 680851 - DNA, 19 bp, Mus musculus
  siRNA target sequence for Crkl (NM_007764.2,1272-1290).
ggtgacattgtgaaagtca

SEQ ID NO: 680852 - DNA, 19 bp, Mus musculus
  siRNA target sequence for Crkl (NM_007764.2,1287-1305).
gtcacaaggatgaatatca

SEQ ID NO: 680853 - DNA, 19 bp, Mus musculus
  siRNA target sequence for Crkl (NM_007764.2,1357-1375).
cacatgttaaaatctttga

SEQ ID NO: 680854 - DNA, 19 bp, Mus musculus
  siRNA target sequence for Crkl (NM_007764.2,1378-1396).
ctcagaaccccgatgacaa

SEQ ID NO: 680855 - DNA, 19 bp, Mus musculus
  siRNA target sequence for D030001E08 (NM_177816.2,500-518).
cgagcaagaggcaagactt

SEQ ID NO: 680856 - DNA, 19 bp, Mus musculus
  siRNA target sequence for D030001E08 (NM_177816.2,503-521).
gcaagaggcaagactttat

SEQ ID NO: 680857 - DNA, 19 bp, Mus musculus
  siRNA target sequence for D030001E08 (NM_177816.2,674-692).
gtccatcgccccttggttt

SEQ ID NO: 680858 - DNA, 19 bp, Mus musculus
  siRNA target sequence for D030001E08 (NM_177816.2,677-695).
catcgccccttggtttcat

SEQ ID NO: 680859 - DNA, 19 bp, Mus musculus
  siRNA target sequence for D030001E08 (NM_177816.2,684-702).
ccttggtttcatggaatta

SEQ ID NO: 680860 - DNA, 19 bp, Mus musculus
  siRNA target sequence for D030001E08 (NM_177816.2,771-789).
gagaagatctggggttata

SEQ ID NO: 680861 - DNA, 19 bp, Mus musculus
  siRNA target sequence for D030001E08 (NM_177816.2,887-905).
caccctaacagatctcatt

SEQ ID NO: 680862 - DNA, 19 bp, Mus musculus
  siRNA target sequence for D030001E08 (NM_177816.2,974-992).
ggatagcccaccagactat

SEQ ID NO: 680863 - DNA, 19 bp, Mus musculus
  siRNA target sequence for D030001E08 (NM_177816.2,985-1003).
cagactatcacctgttgtt

SEQ ID NO: 680864 - DNA, 19 bp, Mus musculus
  siRNA target sequence for Dcdc2 (NM_177577.2,399-417).
cgatgtcttcctcaaagaa

SEQ ID NO: 680865 - DNA, 19 bp, Mus musculus
  siRNA target sequence for Dcdc2 (NM_177577.2,479-497).
gccaccgcatccgaaaact

SEQ ID NO: 680866 - DNA, 19 bp, Mus musculus
  siRNA target sequence for Dcdc2 (NM_177577.2,539-557).
cggaagcgttcaagaaact

SEQ ID NO: 680867 - DNA, 19 bp, Mus musculus
  siRNA target sequence for Dcdc2 (NM_177577.2,582-600).
caagaaaagaccaatggaa

SEQ ID NO: 680868 - DNA, 19 bp, Mus musculus
  siRNA target sequence for Dcdc2 (NM_177577.2,612-630).
cgaggtgaaacctgtcatt

SEQ ID NO: 680869 - DNA, 19 bp, Mus musculus
  siRNA target sequence for Dcdc2 (NM_177577.2,679-697).
ccctgcaccattttcttga

SEQ ID NO: 680870 - DNA, 19 bp, Mus musculus
  siRNA target sequence for Dcdc2 (NM_177577.2,736-754).
ctcatccctaaaaaagctt

SEQ ID NO: 680871 - DNA, 19 bp, Mus musculus
  siRNA target sequence for Dcdc2 (NM_177577.2,762-780).
gtgggatcatgtactacaa

SEQ ID NO: 680872 - DNA, 19 bp, Mus musculus
  siRNA target sequence for Dcdc2 (NM_177577.2,764-782).
gggatcatgtactacaaat

SEQ ID NO: 680873 - DNA, 19 bp, Mus musculus
  siRNA target sequence for Dcdc2 (NM_177577.2,775-793).
ctacaaatggtcacagaaa

SEQ ID NO: 680874 - DNA, 19 bp, Mus musculus
  siRNA target sequence for Dcdc2 (NM_177577.2,814-832).
gctgtccacaggctatata

SEQ ID NO: 680875 - DNA, 19 bp, Mus musculus
  siRNA target sequence for Dcdc2 (NM_177577.2,817-835).
gtccacaggctatatacgt

SEQ ID NO: 680876 - DNA, 19 bp, Mus musculus
  siRNA target sequence for Dcdc2 (NM_177577.2,819-837).
ccacaggctatatacgtta

SEQ ID NO: 680877 - DNA, 19 bp, Mus musculus
  siRNA target sequence for Dcdc2 (NM_177577.2,822-840).
caggctatatacgttagaa

SEQ ID NO: 680878 - DNA, 19 bp, Mus musculus
  siRNA target sequence for Dcdc2 (NM_177577.2,870-888).
ggagaatgggcagttctat

SEQ ID NO: 680879 - DNA, 19 bp, Mus musculus
  siRNA target sequence for Dcdc2 (NM_177577.2,889-907).
gtggccgtcggcagagata

SEQ ID NO: 680880 - DNA, 19 bp, Mus musculus
  siRNA target sequence for Dcdc2 (NM_177577.2,892-910).
gccgtcggcagagataagt

SEQ ID NO: 680881 - DNA, 19 bp, Mus musculus
  siRNA target sequence for Dcdc2 (NM_177577.2,893-911).
ccgtcggcagagataagtt

SEQ ID NO: 680882 - DNA, 19 bp, Mus musculus
  siRNA target sequence for Dcdc2 (NM_177577.2,922-940).
ccgtacagtgagttacttt

SEQ ID NO: 680883 - DNA, 19 bp, Mus musculus
  siRNA target sequence for Dcdc2 (NM_177577.2,923-941).
cgtacagtgagttactttt

SEQ ID NO: 680884 - DNA, 19 bp, Mus musculus
  siRNA target sequence for Dcdc2 (NM_177577.2,929-947).
gtgagttactttttgacaa

SEQ ID NO: 680885 - DNA, 19 bp, Mus musculus
  siRNA target sequence for Dcdc2 (NM_177577.2,1016-1034).
ctaaagggagcggaaatta

SEQ ID NO: 680886 - DNA, 19 bp, Mus musculus
  siRNA target sequence for Dcdc2 (NM_177577.2,1028-1046).
gaaattatcggcaatccaa

SEQ ID NO: 680887 - DNA, 19 bp, Mus musculus
  siRNA target sequence for Dcdc2 (NM_177577.2,1052-1070).
ccatcgggtctagtgataa

SEQ ID NO: 680888 - DNA, 19 bp, Mus musculus
  siRNA target sequence for Dcdc2 (NM_177577.2,1056-1074).
cgggtctagtgataactca

SEQ ID NO: 680889 - DNA, 19 bp, Mus musculus
  siRNA target sequence for Dcdc2 (NM_177577.2,1057-1075).
gggtctagtgataactcat

SEQ ID NO: 680890 - DNA, 19 bp, Mus musculus
  siRNA target sequence for Dcdc2 (NM_177577.2,1126-1144).
cccacgaaagtgaaacaga

SEQ ID NO: 680891 - DNA, 19 bp, Mus musculus
  siRNA target sequence for Dcdc2 (NM_177577.2,1180-1198).
gacaatggatggctcataa

SEQ ID NO: 680892 - DNA, 19 bp, Mus musculus
  siRNA target sequence for Dcdc2 (NM_177577.2,1182-1200).
caatggatggctcataaaa

SEQ ID NO: 680893 - DNA, 19 bp, Mus musculus
  siRNA target sequence for Dcdc2 (NM_177577.2,1230-1248).
gctggatggaaacagaaat

SEQ ID NO: 680894 - DNA, 19 bp, Mus musculus
  siRNA target sequence for Dcdc2 (NM_177577.2,1231-1249).
ctggatggaaacagaaata

SEQ ID NO: 680895 - DNA, 19 bp, Mus musculus
  siRNA target sequence for Dcx (NM_010025.1,78-96).
gacgaacgagacaaagcat

SEQ ID NO: 680896 - DNA, 19 bp, Mus musculus
  siRNA target sequence for Dcx (NM_010025.1,84-102).
cgagacaaagcatctagaa

SEQ ID NO: 680897 - DNA, 19 bp, Mus musculus
  siRNA target sequence for Dcx (NM_010025.1,85-103).
gagacaaagcatctagaaa

SEQ ID NO: 680898 - DNA, 19 bp, Mus musculus
  siRNA target sequence for Dcx (NM_010025.1,87-105).
gacaaagcatctagaaata

SEQ ID NO: 680899 - DNA, 19 bp, Mus musculus
  siRNA target sequence for Dcx (NM_010025.1,107-125).
gagagggtcacggatgaat

SEQ ID NO: 680900 - DNA, 19 bp, Mus musculus
  siRNA target sequence for Dcx (NM_010025.1,229-247).
gcaatggggaccgttactt

SEQ ID NO: 680901 - DNA, 19 bp, Mus musculus
  siRNA target sequence for Dcx (NM_010025.1,254-272).
gattgtgtacgctgtttct

SEQ ID NO: 680902 - DNA, 19 bp, Mus musculus
  siRNA target sequence for Dcx (NM_010025.1,274-292).
ctgaccgttttcgtagttt

SEQ ID NO: 680903 - DNA, 19 bp, Mus musculus
  siRNA target sequence for Dcx (NM_010025.1,278-296).
ccgttttcgtagttttgat

SEQ ID NO: 680904 - DNA, 19 bp, Mus musculus
  siRNA target sequence for Dcx (NM_010025.1,322-340).
ccttgtctgacaacattaa

SEQ ID NO: 680905 - DNA, 19 bp, Mus musculus
  siRNA target sequence for Dcx (NM_010025.1,350-368).
gggagtgcgctacatttat

SEQ ID NO: 680906 - DNA, 19 bp, Mus musculus
  siRNA target sequence for Dcx (NM_010025.1,351-369).
ggagtgcgctacatttata

SEQ ID NO: 680907 - DNA, 19 bp, Mus musculus
  siRNA target sequence for Dcx (NM_010025.1,354-372).
gtgcgctacatttatacca

SEQ ID NO: 680908 - DNA, 19 bp, Mus musculus
  siRNA target sequence for Dcx (NM_010025.1,356-374).
gcgctacatttataccatt

SEQ ID NO: 680909 - DNA, 19 bp, Mus musculus
  siRNA target sequence for Dcx (NM_010025.1,491-509).
gtctgtcaacgtaaagaca

SEQ ID NO: 680910 - DNA, 19 bp, Mus musculus
  siRNA target sequence for Dcx (NM_010025.1,634-652).
ctgtgcgcgtgcttctcaa

SEQ ID NO: 680911 - DNA, 19 bp, Mus musculus
  siRNA target sequence for Dcx (NM_010025.1,639-657).
cgcgtgcttctcaacaaga

SEQ ID NO: 680912 - DNA, 19 bp, Mus musculus
  siRNA target sequence for Dcx (NM_010025.1,640-658).
gcgtgcttctcaacaagaa

SEQ ID NO: 680913 - DNA, 19 bp, Mus musculus
  siRNA target sequence for Dcx (NM_010025.1,714-732).
gaaaccggagttgtcaaaa

SEQ ID NO: 680914 - DNA, 19 bp, Mus musculus
  siRNA target sequence for Dcx (NM_010025.1,721-739).
gagttgtcaaaaaactcta

SEQ ID NO: 680915 - DNA, 19 bp, Mus musculus
  siRNA target sequence for Dcx (NM_010025.1,759-777).
gtcacctgtctccatgatt

SEQ ID NO: 680916 - DNA, 19 bp, Mus musculus
  siRNA target sequence for Dcx (NM_010025.1,789-807).
gatgatgtgttcattgctt

SEQ ID NO: 680917 - DNA, 19 bp, Mus musculus
  siRNA target sequence for Dcx (NM_010025.1,805-823).
cttgtggtcctgaaaaatt

SEQ ID NO: 680918 - DNA, 19 bp, Mus musculus
  siRNA target sequence for Dcx (NM_010025.1,870-888).
gtcatgaaagggaatccat

SEQ ID NO: 680919 - DNA, 19 bp, Mus musculus
  siRNA target sequence for Dcx (NM_010025.1,989-1007).
cgaccaagacgcaaatgga

SEQ ID NO: 680920 - DNA, 19 bp, Mus musculus
  siRNA target sequence for Dcx (NM_010025.1,990-1008).
gaccaagacgcaaatggaa

SEQ ID NO: 680921 - DNA, 19 bp, Mus musculus
  siRNA target sequence for Dcx (NM_010025.1,1118-1136).
ggatgactctgattcactt

SEQ ID NO: 680922 - DNA, 19 bp, Mus musculus
  siRNA target sequence for Def8 (NM_054046.2,324-342).
cggcaggccatcgaagaat

SEQ ID NO: 680923 - DNA, 19 bp, Mus musculus
  siRNA target sequence for Def8 (NM_054046.2,500-518).
gaagagcaagagcgttaaa

SEQ ID NO: 680924 - DNA, 19 bp, Mus musculus
  siRNA target sequence for Def8 (NM_054046.2,650-668).
cagtcaccaggctgagtat

SEQ ID NO: 680925 - DNA, 19 bp, Mus musculus
  siRNA target sequence for Def8 (NM_054046.2,652-670).
gtcaccaggctgagtatga

SEQ ID NO: 680926 - DNA, 19 bp, Mus musculus
  siRNA target sequence for Def8 (NM_054046.2,777-795).
gactacacgggccaatact

SEQ ID NO: 680927 - DNA, 19 bp, Mus musculus
  siRNA target sequence for Def8 (NM_054046.2,1095-1113).
gagaacgatgagatgtact

SEQ ID NO: 680928 - DNA, 19 bp, Mus musculus
  siRNA target sequence for Dlgh2 (NM_011807.1,30-48).
gactaacgtaaagaagtat

SEQ ID NO: 680929 - DNA, 19 bp, Mus musculus
  siRNA target sequence for Dlgh2 (NM_011807.1,63-81).
ggacggtccacatgatcat

SEQ ID NO: 680930 - DNA, 19 bp, Mus musculus
  siRNA target sequence for Dlgh2 (NM_011807.1,64-82).
gacggtccacatgatcatt

SEQ ID NO: 680931 - DNA, 19 bp, Mus musculus
  siRNA target sequence for Dlgh2 (NM_011807.1,83-101).
ccttacctcggctaactca

SEQ ID NO: 680932 - DNA, 19 bp, Mus musculus
  siRNA target sequence for Dlgh2 (NM_011807.1,84-102).
cttacctcggctaactcat

SEQ ID NO: 680933 - DNA, 19 bp, Mus musculus
  siRNA target sequence for Dlgh2 (NM_011807.1,91-109).
cggctaactcatgaagtaa

SEQ ID NO: 680934 - DNA, 19 bp, Mus musculus
  siRNA target sequence for Dlgh2 (NM_011807.1,166-184).
cacggatatgtcttacagt

SEQ ID NO: 680935 - DNA, 19 bp, Mus musculus
  siRNA target sequence for Dlgh2 (NM_011807.1,1425-1443).
ccgaggagcatctcatgaa

SEQ ID NO: 680936 - DNA, 19 bp, Mus musculus
  siRNA target sequence for Dlgh2 (NM_011807.1,1427-1445).
gaggagcatctcatgaaca

SEQ ID NO: 680937 - DNA, 19 bp, Mus musculus
  siRNA target sequence for Dlgh2 (NM_011807.1,1482-1500).
gacaatcatagcacaatat

SEQ ID NO: 680938 - DNA, 19 bp, Mus musculus
  siRNA target sequence for Dlgh2 (NM_011807.1,1517-1535).
ctcgattcgaggccaaaat

SEQ ID NO: 680939 - DNA, 19 bp, Mus musculus
  siRNA target sequence for Dlgh2 (NM_011807.1,1590-1608).
ccttcgaaccaatcagaaa

SEQ ID NO: 680940 - DNA, 19 bp, Mus musculus
  siRNA target sequence for Dlgh2 (NM_011807.1,1665-1683).
gcctagccaaggacttagt

SEQ ID NO: 680941 - DNA, 19 bp, Mus musculus
  siRNA target sequence for Dlgh2 (NM_011807.1,1667-1685).
ctagccaaggacttagttt

SEQ ID NO: 680942 - DNA, 19 bp, Mus musculus
  siRNA target sequence for Dlgh2 (NM_011807.1,1742-1760).
ccagaagggtcatactaga

SEQ ID NO: 680943 - DNA, 19 bp, Mus musculus
  siRNA target sequence for Dlgh2 (NM_011807.1,1743-1761).
cagaagggtcatactagat

SEQ ID NO: 680944 - DNA, 19 bp, Mus musculus
  siRNA target sequence for Dlgh2 (NM_011807.1,1770-1788).
cgaggagatgggagtcatt

SEQ ID NO: 680945 - DNA, 19 bp, Mus musculus
  siRNA target sequence for Dlgh2 (NM_011807.1,1816-1834).
gagcgtgcccgattgaaga

SEQ ID NO: 680946 - DNA, 19 bp, Mus musculus
  siRNA target sequence for Dlgh2 (NM_011807.1,1850-1868).
caaaacctggtgtgattga

SEQ ID NO: 680947 - DNA, 19 bp, Mus musculus
  siRNA target sequence for Dlgh2 (NM_011807.1,1856-1874).
ctggtgtgattgattccaa

SEQ ID NO: 680948 - DNA, 19 bp, Mus musculus
  siRNA target sequence for Dlgh2 (NM_011807.1,1878-1896).
ggacatccccggattaggt

SEQ ID NO: 680949 - DNA, 19 bp, Mus musculus
  siRNA target sequence for Dlgh2 (NM_011807.1,1894-1912).
ggtgacgacggttatggaa

SEQ ID NO: 680950 - DNA, 19 bp, Mus musculus
  siRNA target sequence for Dlgh2 (NM_011807.1,1902-1920).
cggttatggaacaaagact

SEQ ID NO: 680951 - DNA, 19 bp, Mus musculus
  siRNA target sequence for Dlgh2 (NM_011807.1,1964-1982).
cgaggcaggaaataaacta

SEQ ID NO: 680952 - DNA, 19 bp, Mus musculus
  siRNA target sequence for Dlgh2 (NM_011807.1,1980-1998).
ctacacccgaccagtgatt

SEQ ID NO: 680953 - DNA, 19 bp, Mus musculus
  siRNA target sequence for Dlgh2 (NM_011807.1,1985-2003).
cccgaccagtgattatcct

SEQ ID NO: 680954 - DNA, 19 bp, Mus musculus
  siRNA target sequence for Dlgh2 (NM_011807.1,2009-2027).
ccatgaaggatcgaatcaa

SEQ ID NO: 680955 - DNA, 19 bp, Mus musculus
  siRNA target sequence for Dlgh2 (NM_011807.1,2010-2028).
catgaaggatcgaatcaat

SEQ ID NO: 680956 - DNA, 19 bp, Mus musculus
  siRNA target sequence for Dlgh2 (NM_011807.1,2013-2031).
gaaggatcgaatcaatgat

SEQ ID NO: 680957 - DNA, 19 bp, Mus musculus
  siRNA target sequence for Dlgh2 (NM_011807.1,2025-2043).
caatgatgacttgatatct

SEQ ID NO: 680958 - DNA, 19 bp, Mus musculus
  siRNA target sequence for Dlgh2 (NM_011807.1,2029-2047).
gatgacttgatatctgaat

SEQ ID NO: 680959 - DNA, 19 bp, Mus musculus
  siRNA target sequence for Dlgh2 (NM_011807.1,2117-2135).
gagactatcactttgtcat

SEQ ID NO: 680960 - DNA, 19 bp, Mus musculus
  siRNA target sequence for Dlgh2 (NM_011807.1,2158-2176).
gatatccaagagcacaaat

SEQ ID NO: 680961 - DNA, 19 bp, Mus musculus
  siRNA target sequence for Dlgh2 (NM_011807.1,2191-2209).
cagtacaatgacaatttat

SEQ ID NO: 680962 - DNA, 19 bp, Mus musculus
  siRNA target sequence for Dlgh2 (NM_011807.1,2249-2267).
ggggcaagcactgtatact

SEQ ID NO: 680963 - DNA, 19 bp, Mus musculus
  siRNA target sequence for Dlgh2 (NM_011807.1,2250-2268).
gggcaagcactgtatactt

SEQ ID NO: 680964 - DNA, 19 bp, Mus musculus
  siRNA target sequence for Dlgh2 (NM_011807.1,2252-2270).
gcaagcactgtatacttga

SEQ ID NO: 680965 - DNA, 19 bp, Mus musculus
  siRNA target sequence for Dlgh2 (NM_011807.1,2269-2287).
gatgtatcaggaaatgcta

SEQ ID NO: 680966 - DNA, 19 bp, Mus musculus
  siRNA target sequence for Dlgh2 (NM_011807.1,2272-2290).
gtatcaggaaatgctatta

SEQ ID NO: 680967 - DNA, 19 bp, Mus musculus
  siRNA target sequence for Dlgh2 (NM_011807.1,2285-2303).
ctattaagcggttacaagt

SEQ ID NO: 680968 - DNA, 19 bp, Mus musculus
  siRNA target sequence for Dlgh2 (NM_011807.1,2412-2430).
ggcgattaaactagaacaa

SEQ ID NO: 680969 - DNA, 19 bp, Mus musculus
  siRNA target sequence for Dlgh2 (NM_011807.1,2464-2482).
ggagataccttagaagata

SEQ ID NO: 680970 - DNA, 19 bp, Mus musculus
  siRNA target sequence for Dlgh2 (NM_011807.1,2465-2483).
gagataccttagaagatat

SEQ ID NO: 680971 - DNA, 19 bp, Mus musculus
  siRNA target sequence for Dlgh2 (NM_011807.1,2490-2508).
ccaatgcaagcttgttatt

SEQ ID NO: 680972 - DNA, 19 bp, Mus musculus
  siRNA target sequence for E130307J07Rik (NM_175483.2,193-211).
gacgaagagctggttatct

SEQ ID NO: 680973 - DNA, 19 bp, Mus musculus
  siRNA target sequence for E130307J07Rik (NM_175483.2,281-299).
cttcttacgtcgagattgt

SEQ ID NO: 680974 - DNA, 19 bp, Mus musculus
  siRNA target sequence for E130307J07Rik (NM_175483.2,360-378).
cacccaggggagtttgtat

SEQ ID NO: 680975 - DNA, 19 bp, Mus musculus
  siRNA target sequence for E130307J07Rik (NM_175483.2,364-382).
caggggagtttgtatagca

SEQ ID NO: 680976 - DNA, 19 bp, Mus musculus
  siRNA target sequence for E130307J07Rik (NM_175483.2,443-461).
gaagcttcgaggatgatga

SEQ ID NO: 680977 - DNA, 19 bp, Mus musculus
  siRNA target sequence for E130307J07Rik (NM_175483.2,661-679).
ggacggaacctcaatcgtt

SEQ ID NO: 680978 - DNA, 19 bp, Mus musculus
  siRNA target sequence for E130307J07Rik (NM_175483.2,662-680).
gacggaacctcaatcgttt

SEQ ID NO: 680979 - DNA, 19 bp, Mus musculus
  siRNA target sequence for E130307J07Rik (NM_175483.2,918-936).
gcgctacaaacactttgat

SEQ ID NO: 680980 - DNA, 19 bp, Mus musculus
  siRNA target sequence for E130307J07Rik (NM_175483.2,919-937).
cgctacaaacactttgatt

SEQ ID NO: 680981 - DNA, 19 bp, Mus musculus
  siRNA target sequence for E130307J07Rik (NM_175483.2,949-967).
cgccttctacacaagttca

SEQ ID NO: 680982 - DNA, 19 bp, Mus musculus
  siRNA target sequence for E130307J07Rik (NM_175483.2,1190-1208).
ccagttttctgctcacttt

SEQ ID NO: 680983 - DNA, 19 bp, Mus musculus
  siRNA target sequence for E130307J07Rik (NM_175483.2,1249-1267).
gaccgcgtggatacattca

SEQ ID NO: 680984 - DNA, 19 bp, Mus musculus
  siRNA target sequence for E130307J07Rik (NM_175483.2,1295-1313).
gcgtcctacagcttagcaa

SEQ ID NO: 680985 - DNA, 19 bp, Mus musculus
  siRNA target sequence for E130307J07Rik (NM_175483.2,1349-1367).
gcttccgcaaggaattcca

SEQ ID NO: 680986 - DNA, 19 bp, Mus musculus
  siRNA target sequence for E130307J07Rik (NM_175483.2,1474-1492).
gaaaccgttggcgaaatgt

SEQ ID NO: 680987 - DNA, 19 bp, Mus musculus
  siRNA target sequence for E130307J07Rik (NM_175483.2,1512-1530).
cgacctcttccaaatgctt

SEQ ID NO: 680988 - DNA, 19 bp, Mus musculus
  siRNA target sequence for E130307J07Rik (NM_175483.2,1731-1749).
gcgccgtgagctcgatttt

SEQ ID NO: 680989 - DNA, 19 bp, Mus musculus
  siRNA target sequence for E130307J07Rik (NM_175483.2,1732-1750).
cgccgtgagctcgatttta

SEQ ID NO: 680990 - DNA, 19 bp, Mus musculus
  siRNA target sequence for E130307J07Rik (NM_175483.2,1738-1756).
gagctcgattttaagcata

SEQ ID NO: 680991 - DNA, 19 bp, Mus musculus
  siRNA target sequence for E130307J07Rik (NM_175483.2,1741-1759).
ctcgattttaagcatatga

SEQ ID NO: 680992 - DNA, 19 bp, Mus musculus
  siRNA target sequence for E130307J07Rik (NM_175483.2,1771-1789).
ctgcgccagcagattcttt

SEQ ID NO: 680993 - DNA, 19 bp, Mus musculus
  siRNA target sequence for E130307J07Rik (NM_175483.2,1818-1836).
gaagactctccacatgtat

SEQ ID NO: 680994 - DNA, 19 bp, Mus musculus
  siRNA target sequence for Eat2 (NM_012009.2,125-143).
gtgtggatggcaactttct

SEQ ID NO: 680995 - DNA, 19 bp, Mus musculus
  siRNA target sequence for Eat2 (NM_012009.2,127-145).
gtggatggcaactttctga

SEQ ID NO: 680996 - DNA, 19 bp, Mus musculus
  siRNA target sequence for Eat2 (NM_012009.2,129-147).
ggatggcaactttctgata

SEQ ID NO: 680997 - DNA, 19 bp, Mus musculus
  siRNA target sequence for Eat2 (NM_012009.2,130-148).
gatggcaactttctgataa

SEQ ID NO: 680998 - DNA, 19 bp, Mus musculus
  siRNA target sequence for Eat2 (NM_012009.2,179-197).
gcctctgtgtctcgtttaa

SEQ ID NO: 680999 - DNA, 19 bp, Mus musculus
  siRNA target sequence for Eat2 (NM_012009.2,181-199).
ctctgtgtctcgtttaaaa

SEQ ID NO: 681000 - DNA, 19 bp, Mus musculus
  siRNA target sequence for Eat2 (NM_012009.2,185-203).
gtgtctcgtttaaaaagct

SEQ ID NO: 681001 - DNA, 19 bp, Mus musculus
  siRNA target sequence for Eat2 (NM_012009.2,216-234).
ccgaatcttcagagagaaa

SEQ ID NO: 681002 - DNA, 19 bp, Mus musculus
  siRNA target sequence for Eat2 (NM_012009.2,397-415).
gagttagagctgaatgttt

SEQ ID NO: 681003 - DNA, 19 bp, Mus musculus
  siRNA target sequence for Eat2 (NM_012009.2,399-417).
gttagagctgaatgtttat

SEQ ID NO: 681004 - DNA, 19 bp, Mus musculus
  siRNA target sequence for G431001E03Rik (NM_177364.2,110-128).
cgcgtgcccaacaagcatt

SEQ ID NO: 681005 - DNA, 19 bp, Mus musculus
  siRNA target sequence for G431001E03Rik (NM_177364.2,111-129).
gcgtgcccaacaagcatta

SEQ ID NO: 681006 - DNA, 19 bp, Mus musculus
  siRNA target sequence for G431001E03Rik (NM_177364.2,112-130).
cgtgcccaacaagcattat

SEQ ID NO: 681007 - DNA, 19 bp, Mus musculus
  siRNA target sequence for G431001E03Rik (NM_177364.2,116-134).
cccaacaagcattatgtct

SEQ ID NO: 681008 - DNA, 19 bp, Mus musculus
  siRNA target sequence for G431001E03Rik (NM_177364.2,184-202).
gcgctacagcaagttcttt

SEQ ID NO: 681009 - DNA, 19 bp, Mus musculus
  siRNA target sequence for G431001E03Rik (NM_177364.2,329-347).
gtcaaacgcctgataccaa

SEQ ID NO: 681010 - DNA, 19 bp, Mus musculus
  siRNA target sequence for G431001E03Rik (NM_177364.2,331-349).
caaacgcctgataccaatt

SEQ ID NO: 681011 - DNA, 19 bp, Mus musculus
  siRNA target sequence for G431001E03Rik (NM_177364.2,336-354).
gcctgataccaattgatga

SEQ ID NO: 681012 - DNA, 19 bp, Mus musculus
  siRNA target sequence for G431001E03Rik (NM_177364.2,340-358).
gataccaattgatgaatat

SEQ ID NO: 681013 - DNA, 19 bp, Mus musculus
  siRNA target sequence for G431001E03Rik (NM_177364.2,344-362).
ccaattgatgaatattgta

SEQ ID NO: 681014 - DNA, 19 bp, Mus musculus
  siRNA target sequence for G431001E03Rik (NM_177364.2,345-363).
caattgatgaatattgtaa

SEQ ID NO: 681015 - DNA, 19 bp, Mus musculus
  siRNA target sequence for G431001E03Rik (NM_177364.2,582-600).
gccaagtagtggacatcat

SEQ ID NO: 681016 - DNA, 19 bp, Mus musculus
  siRNA target sequence for G431001E03Rik (NM_177364.2,864-882).
cccctgcttcctacctaaa

SEQ ID NO: 681017 - DNA, 19 bp, Mus musculus
  siRNA target sequence for G431001E03Rik (NM_177364.2,960-978).
gtgtttcccggcatcagaa

SEQ ID NO: 681018 - DNA, 19 bp, Mus musculus
  siRNA target sequence for G431001E03Rik (NM_177364.2,966-984).
cccggcatcagaatgctat

SEQ ID NO: 681019 - DNA, 19 bp, Mus musculus
  siRNA target sequence for G431001E03Rik (NM_177364.2,1047-1065).
ccgatggtgacgttaagca

SEQ ID NO: 681020 - DNA, 19 bp, Mus musculus
  siRNA target sequence for G431001E03Rik (NM_177364.2,1160-1178).
gtggaggaagagtactaca

SEQ ID NO: 681021 - DNA, 19 bp, Mus musculus
  siRNA target sequence for G431001E03Rik (NM_177364.2,1305-1323).
ccccagcgaccttcattga

SEQ ID NO: 681022 - DNA, 19 bp, Mus musculus
  siRNA target sequence for G431001E03Rik (NM_177364.2,1307-1325).
ccagcgaccttcattgaca

SEQ ID NO: 681023 - DNA, 19 bp, Mus musculus
  siRNA target sequence for G431001E03Rik (NM_177364.2,1347-1365).
cctcgaggcccaactttct

SEQ ID NO: 681024 - DNA, 19 bp, Mus musculus
  siRNA target sequence for Gorasp2 (NM_027352.2,164-182).
ccgagggctaccacgtttt

SEQ ID NO: 681025 - DNA, 19 bp, Mus musculus
  siRNA target sequence for Gorasp2 (NM_027352.2,215-233).
ctggactggagcctttctt

SEQ ID NO: 681026 - DNA, 19 bp, Mus musculus
  siRNA target sequence for Gorasp2 (NM_027352.2,248-266).
ctattaacggttcaagatt

SEQ ID NO: 681027 - DNA, 19 bp, Mus musculus
  siRNA target sequence for Gorasp2 (NM_027352.2,309-327).
cgttgagaagcctgtaaaa

SEQ ID NO: 681028 - DNA, 19 bp, Mus musculus
  siRNA target sequence for Gorasp2 (NM_027352.2,320-338).
ctgtaaaaatgctcatcta

SEQ ID NO: 681029 - DNA, 19 bp, Mus musculus
  siRNA target sequence for Gorasp2 (NM_027352.2,373-391).
gtcacaccgagcaacttgt

SEQ ID NO: 681030 - DNA, 19 bp, Mus musculus
  siRNA target sequence for Gorasp2 (NM_027352.2,404-422).
gcttgttgggggttagcat

SEQ ID NO: 681031 - DNA, 19 bp, Mus musculus
  siRNA target sequence for Gorasp2 (NM_027352.2,405-423).
cttgttgggggttagcatt

SEQ ID NO: 681032 - DNA, 19 bp, Mus musculus
  siRNA target sequence for Gorasp2 (NM_027352.2,512-530).
gacctcacagtgattacat

SEQ ID NO: 681033 - DNA, 19 bp, Mus musculus
  siRNA target sequence for Gorasp2 (NM_027352.2,536-554).
gagctgataccgtcatgaa

SEQ ID NO: 681034 - DNA, 19 bp, Mus musculus
  siRNA target sequence for Gorasp2 (NM_027352.2,541-559).
gataccgtcatgaatgagt

SEQ ID NO: 681035 - DNA, 19 bp, Mus musculus
  siRNA target sequence for Gorasp2 (NM_027352.2,568-586).
ctgttcagccttattgaga

SEQ ID NO: 681036 - DNA, 19 bp, Mus musculus
  siRNA target sequence for Gorasp2 (NM_027352.2,651-669).
gatcatcacaccaaactct

SEQ ID NO: 681037 - DNA, 19 bp, Mus musculus
  siRNA target sequence for Gorasp2 (NM_027352.2,698-716).
gtggcattggctatggtta

SEQ ID NO: 681038 - DNA, 19 bp, Mus musculus
  siRNA target sequence for Gorasp2 (NM_027352.2,700-718).
ggcattggctatggttatt

SEQ ID NO: 681039 - DNA, 19 bp, Mus musculus
  siRNA target sequence for Gorasp2 (NM_027352.2,701-719).
gcattggctatggttattt

SEQ ID NO: 681040 - DNA, 19 bp, Mus musculus
  siRNA target sequence for Gorasp2 (NM_027352.2,780-798).
gactggtacccccattact

SEQ ID NO: 681041 - DNA, 19 bp, Mus musculus
  siRNA target sequence for Gorasp2 (NM_027352.2,788-806).
cccccattactcctcttaa

SEQ ID NO: 681042 - DNA, 19 bp, Mus musculus
  siRNA target sequence for Gorasp2 (NM_027352.2,792-810).
cattactcctcttaaggat

SEQ ID NO: 681043 - DNA, 19 bp, Mus musculus
  siRNA target sequence for Gorasp2 (NM_027352.2,836-854).
cagtcagtcctccatcttt

SEQ ID NO: 681044 - DNA, 19 bp, Mus musculus
  siRNA target sequence for Gorasp2 (NM_027352.2,889-907).
ctgtctggactctccatta

SEQ ID NO: 681045 - DNA, 19 bp, Mus musculus
  siRNA target sequence for Gorasp2 (NM_027352.2,947-965).
gcgtaccaactgtaccatt

SEQ ID NO: 681046 - DNA, 19 bp, Mus musculus
  siRNA target sequence for Grap (NM_027817.1,98-116).
cgcttaagatcctgaacat

SEQ ID NO: 681047 - DNA, 19 bp, Mus musculus
  siRNA target sequence for Grap (NM_027817.1,152-170).
gaggagcggagggttttgt

SEQ ID NO: 681048 - DNA, 19 bp, Mus musculus
  siRNA target sequence for Grap (NM_027817.1,312-330).
ctccgtctctgtgaattat

SEQ ID NO: 681049 - DNA, 19 bp, Mus musculus
  siRNA target sequence for Grap (NM_027817.1,315-333).
cgtctctgtgaattatggt

SEQ ID NO: 681050 - DNA, 19 bp, Mus musculus
  siRNA target sequence for Grap (NM_027817.1,449-467).
ccaagaggcggcagatctt

SEQ ID NO: 681051 - DNA, 19 bp, Mus musculus
  siRNA target sequence for Grasp (NM_019518.2,379-397).
cagcaacggaaggttctaa

SEQ ID NO: 681052 - DNA, 19 bp, Mus musculus
  siRNA target sequence for Grasp (NM_019518.2,381-399).
gcaacggaaggttctaact

SEQ ID NO: 681053 - DNA, 19 bp, Mus musculus
  siRNA target sequence for Grasp (NM_019518.2,382-400).
caacggaaggttctaactt

SEQ ID NO: 681054 - DNA, 19 bp, Mus musculus
  siRNA target sequence for Grasp (NM_019518.2,428-446).
gcttcgagatccagacata

SEQ ID NO: 681055 - DNA, 19 bp, Mus musculus
  siRNA target sequence for Grasp (NM_019518.2,429-447).
cttcgagatccagacatat

SEQ ID NO: 681056 - DNA, 19 bp, Mus musculus
  siRNA target sequence for Grasp (NM_019518.2,489-507).
cttcgtctgccgagttcat

SEQ ID NO: 681057 - DNA, 19 bp, Mus musculus
  siRNA target sequence for Grasp (NM_019518.2,492-510).
cgtctgccgagttcatgaa

SEQ ID NO: 681058 - DNA, 19 bp, Mus musculus
  siRNA target sequence for Grasp (NM_019518.2,537-555).
cacgccaggggacactatt

SEQ ID NO: 681059 - DNA, 19 bp, Mus musculus
  siRNA target sequence for Grasp (NM_019518.2,728-746).
gagaatacaggtcacttat

SEQ ID NO: 681060 - DNA, 19 bp, Mus musculus
  siRNA target sequence for Grasp (NM_019518.2,753-771).
ggagcagcggctagtacat

SEQ ID NO: 681061 - DNA, 19 bp, Mus musculus
  siRNA target sequence for Grasp (NM_019518.2,787-805).
gacccaagcatctatgaca

SEQ ID NO: 681062 - DNA, 19 bp, Mus musculus
  siRNA target sequence for Grasp (NM_019518.2,942-960).
gtaccacacgtgcttcttt

SEQ ID NO: 681063 - DNA, 19 bp, Mus musculus
  siRNA target sequence for Grasp (NM_019518.2,1205-1223).
gcagacggctgctcaagtt

SEQ ID NO: 681064 - DNA, 19 bp, Mus musculus
  siRNA target sequence for Grasp (NM_019518.2,1208-1226).
gacggctgctcaagttcat

SEQ ID NO: 681065 - DNA, 19 bp, Mus musculus
  siRNA target sequence for Grcc9 (NM_013539.1,556-574).
gtcctggggctgggatatt

SEQ ID NO: 681066 - DNA, 19 bp, Mus musculus
  siRNA target sequence for Grcc9 (NM_013539.1,763-781).
cctctatccctctgtaagt

SEQ ID NO: 681067 - DNA, 19 bp, Mus musculus
  siRNA target sequence for Grcc9 (NM_013539.1,812-830).
cgctacatgggcgaaagaa

SEQ ID NO: 681068 - DNA, 19 bp, Mus musculus
  siRNA target sequence for Grcc9 (NM_013539.1,814-832).
ctacatgggcgaaagaaga

SEQ ID NO: 681069 - DNA, 19 bp, Mus musculus
  siRNA target sequence for Grcc9 (NM_013539.1,899-917).
cggctgggtcaaatatcca

SEQ ID NO: 681070 - DNA, 19 bp, Mus musculus
  siRNA target sequence for Grcc9 (NM_013539.1,944-962).
cgctatctgctctacaaat

SEQ ID NO: 681071 - DNA, 19 bp, Mus musculus
  siRNA target sequence for Lcp2 (NM_010696.2,205-223).
gacaacctcgctgactatt

SEQ ID NO: 681072 - DNA, 19 bp, Mus musculus
  siRNA target sequence for Lcp2 (NM_010696.2,348-366).
cagtaagttgagtcaagat

SEQ ID NO: 681073 - DNA, 19 bp, Mus musculus
  siRNA target sequence for Lcp2 (NM_010696.2,350-368).
gtaagttgagtcaagatat

SEQ ID NO: 681074 - DNA, 19 bp, Mus musculus
  siRNA target sequence for Lcp2 (NM_010696.2,411-429).
ccagattccacggtttctt

SEQ ID NO: 681075 - DNA, 19 bp, Mus musculus
  siRNA target sequence for Lcp2 (NM_010696.2,465-483).
ctggtcatcctttgaagat

SEQ ID NO: 681076 - DNA, 19 bp, Mus musculus
  siRNA target sequence for Lcp2 (NM_010696.2,467-485).
ggtcatcctttgaagatga

SEQ ID NO: 681077 - DNA, 19 bp, Mus musculus
  siRNA target sequence for Lcp2 (NM_010696.2,519-537).
ggaggacgatggtgactat

SEQ ID NO: 681078 - DNA, 19 bp, Mus musculus
  siRNA target sequence for Lcp2 (NM_010696.2,523-541).
gacgatggtgactatgagt

SEQ ID NO: 681079 - DNA, 19 bp, Mus musculus
  siRNA target sequence for Lcp2 (NM_010696.2,570-588).
ggacgatgctgctgactat

SEQ ID NO: 681080 - DNA, 19 bp, Mus musculus
  siRNA target sequence for Lcp2 (NM_010696.2,961-979).
ccattggggagggaacatt

SEQ ID NO: 681081 - DNA, 19 bp, Mus musculus
  siRNA target sequence for Lcp2 (NM_010696.2,962-980).
cattggggagggaacattt

SEQ ID NO: 681082 - DNA, 19 bp, Mus musculus
  siRNA target sequence for Lcp2 (NM_010696.2,972-990).
ggaacatttacccaagata

SEQ ID NO: 681083 - DNA, 19 bp, Mus musculus
  siRNA target sequence for Lcp2 (NM_010696.2,976-994).
catttacccaagatacaaa

SEQ ID NO: 681084 - DNA, 19 bp, Mus musculus
  siRNA target sequence for Lcp2 (NM_010696.2,1277-1295).
cctccctgccgccatactt

SEQ ID NO: 681085 - DNA, 19 bp, Mus musculus
  siRNA target sequence for Lcp2 (NM_010696.2,1317-1335).
gccacctctcagaagtgaa

SEQ ID NO: 681086 - DNA, 19 bp, Mus musculus
  siRNA target sequence for Lcp2 (NM_010696.2,1408-1426).
gatgaagagtggtatgtct

SEQ ID NO: 681087 - DNA, 19 bp, Mus musculus
  siRNA target sequence for Lcp2 (NM_010696.2,1543-1561).
ctgtacaaagacaaagttt

SEQ ID NO: 681088 - DNA, 19 bp, Mus musculus
  siRNA target sequence for Lcp2 (NM_010696.2,1588-1606).
gaaagtcaagtctacttgt

SEQ ID NO: 681089 - DNA, 19 bp, Mus musculus
  siRNA target sequence for Lcp2 (NM_010696.2,1635-1653).
cttcctgtctgtatcagat

SEQ ID NO: 681090 - DNA, 19 bp, Mus musculus
  siRNA target sequence for Lin7b (NM_011698.1,153-171).
catccgcgaggtgtatgaa

SEQ ID NO: 681091 - DNA, 19 bp, Mus musculus
  siRNA target sequence for Lin7b (NM_011698.1,310-328).
ggtttgggcttcaacatca

SEQ ID NO: 681092 - DNA, 19 bp, Mus musculus
  siRNA target sequence for Lin7b (NM_011698.1,311-329).
gtttgggcttcaacatcat

SEQ ID NO: 681093 - DNA, 19 bp, Mus musculus
  siRNA target sequence for Lin7c (NM_011699.2,94-112).
ggtgccgccacagaaactt

SEQ ID NO: 681094 - DNA, 19 bp, Mus musculus
  siRNA target sequence for Lin7c (NM_011699.2,142-160).
gttctgcaatgctgtaaga

SEQ ID NO: 681095 - DNA, 19 bp, Mus musculus
  siRNA target sequence for Lin7c (NM_011699.2,153-171).
ctgtaagagaggtatacga

SEQ ID NO: 681096 - DNA, 19 bp, Mus musculus
  siRNA target sequence for Lin7c (NM_011699.2,159-177).
gagaggtatacgaacatgt

SEQ ID NO: 681097 - DNA, 19 bp, Mus musculus
  siRNA target sequence for Lin7c (NM_011699.2,161-179).
gaggtatacgaacatgttt

SEQ ID NO: 681098 - DNA, 19 bp, Mus musculus
  siRNA target sequence for Lin7c (NM_011699.2,273-291).
ctcatccccgagttgttga

SEQ ID NO: 681099 - DNA, 19 bp, Mus musculus
  siRNA target sequence for Lin7c (NM_011699.2,358-376).
ctatatatcgcggataatt

SEQ ID NO: 681100 - DNA, 19 bp, Mus musculus
  siRNA target sequence for Lin7c (NM_011699.2,370-388).
gataattccaggtggaatt

SEQ ID NO: 681101 - DNA, 19 bp, Mus musculus
  siRNA target sequence for Lin7c (NM_011699.2,413-431).
cgaggagatcagctacttt

SEQ ID NO: 681102 - DNA, 19 bp, Mus musculus
  siRNA target sequence for Lin7c (NM_011699.2,491-509).
gcagcccaagggaaggtta

SEQ ID NO: 681103 - DNA, 19 bp, Mus musculus
  siRNA target sequence for Lin7c (NM_011699.2,522-540).
ggtacacaccaaaagtctt

SEQ ID NO: 681104 - DNA, 19 bp, Mus musculus
  siRNA target sequence for Lnx1 (NM_010727.2,258-276).
ggctgagtccagctaacta

SEQ ID NO: 681105 - DNA, 19 bp, Mus musculus
  siRNA target sequence for Lnx1 (NM_010727.2,260-278).
ctgagtccagctaactaca

SEQ ID NO: 681106 - DNA, 19 bp, Mus musculus
  siRNA target sequence for Lnx1 (NM_010727.2,344-362).
ctgaccaaggacaggaaaa

SEQ ID NO: 681107 - DNA, 19 bp, Mus musculus
  siRNA target sequence for Lnx1 (NM_010727.2,358-376).
gaaaaggcgctctcaagat

SEQ ID NO: 681108 - DNA, 19 bp, Mus musculus
  siRNA target sequence for Lnx1 (NM_010727.2,572-590).
gagcgctccactatgagaa

SEQ ID NO: 681109 - DNA, 19 bp, Mus musculus
  siRNA target sequence for Lnx1 (NM_010727.2,588-606).
gaagccggtctttcaagaa

SEQ ID NO: 681110 - DNA, 19 bp, Mus musculus
  siRNA target sequence for Lnx1 (NM_010727.2,594-612).
ggtctttcaagaagatcaa

SEQ ID NO: 681111 - DNA, 19 bp, Mus musculus
  siRNA target sequence for Lnx1 (NM_010727.2,607-625).
gatcaaccgagctctaagt

SEQ ID NO: 681112 - DNA, 19 bp, Mus musculus
  siRNA target sequence for Lnx1 (NM_010727.2,828-846).
cgctggtccacatcatcat

SEQ ID NO: 681113 - DNA, 19 bp, Mus musculus
  siRNA target sequence for Lnx1 (NM_010727.2,936-954).
gcaatgtccctcataacta

SEQ ID NO: 681114 - DNA, 19 bp, Mus musculus
  siRNA target sequence for Lnx1 (NM_010727.2,937-955).
caatgtccctcataactat

SEQ ID NO: 681115 - DNA, 19 bp, Mus musculus
  siRNA target sequence for Lnx1 (NM_010727.2,1018-1036).
gttccgtagcagaagcaat

SEQ ID NO: 681116 - DNA, 19 bp, Mus musculus
  siRNA target sequence for Lnx1 (NM_010727.2,1078-1096).
ccatgtaatcctcaacaaa

SEQ ID NO: 681117 - DNA, 19 bp, Mus musculus
  siRNA target sequence for Lnx1 (NM_010727.2,1159-1177).
catcttcaacgtgctaaat

SEQ ID NO: 681118 - DNA, 19 bp, Mus musculus
  siRNA target sequence for Lnx1 (NM_010727.2,1237-1255).
cgggcatgaccttcgattt

SEQ ID NO: 681119 - DNA, 19 bp, Mus musculus
  siRNA target sequence for Lnx1 (NM_010727.2,1280-1298).
ctgattcaggccagtgaaa

SEQ ID NO: 681120 - DNA, 19 bp, Mus musculus
  siRNA target sequence for Lnx1 (NM_010727.2,1341-1359).
gcccagacatctttcaaga

SEQ ID NO: 681121 - DNA, 19 bp, Mus musculus
  siRNA target sequence for Lnx1 (NM_010727.2,1342-1360).
cccagacatctttcaagaa

SEQ ID NO: 681122 - DNA, 19 bp, Mus musculus
  siRNA target sequence for Lnx1 (NM_010727.2,1593-1611).
gtgacattttattgaatgt

SEQ ID NO: 681123 - DNA, 19 bp, Mus musculus
  siRNA target sequence for Lnx1 (NM_010727.2,1675-1693).
ctcctcagtggtactcaaa

SEQ ID NO: 681124 - DNA, 19 bp, Mus musculus
  siRNA target sequence for Lnx1 (NM_010727.2,1798-1816).
catgtggctggaattacca

SEQ ID NO: 681125 - DNA, 19 bp, Mus musculus
  siRNA target sequence for Lnx1 (NM_010727.2,1807-1825).
ggaattaccacagtactta

SEQ ID NO: 681126 - DNA, 19 bp, Mus musculus
  siRNA target sequence for Lnx1 (NM_010727.2,1808-1826).
gaattaccacagtacttat

SEQ ID NO: 681127 - DNA, 19 bp, Mus musculus
  siRNA target sequence for Lnx1 (NM_010727.2,1814-1832).
ccacagtacttatgtaact

SEQ ID NO: 681128 - DNA, 19 bp, Mus musculus
  siRNA target sequence for Lnx1 (NM_010727.2,1822-1840).
cttatgtaactgtaaagat

SEQ ID NO: 681129 - DNA, 19 bp, Mus musculus
  siRNA target sequence for Lnx1 (NM_010727.2,1947-1965).
gaacacctgcatacaatga

SEQ ID NO: 681130 - DNA, 19 bp, Mus musculus
  siRNA target sequence for Lnx1 (NM_010727.2,1960-1978).
caatgacggaagaatcaga

SEQ ID NO: 681131 - DNA, 19 bp, Mus musculus
  siRNA target sequence for Lnx1 (NM_010727.2,1996-2014).
cgctgtcaacggtagaagt

SEQ ID NO: 681132 - DNA, 19 bp, Mus musculus
  siRNA target sequence for Lnx1 (NM_010727.2,2000-2018).
gtcaacggtagaagtacat

SEQ ID NO: 681133 - DNA, 19 bp, Mus musculus
  siRNA target sequence for Lnx1 (NM_010727.2,2010-2028).
gaagtacatcgggtatgat

SEQ ID NO: 681134 - DNA, 19 bp, Mus musculus
  siRNA target sequence for Lnx1 (NM_010727.2,2013-2031).
gtacatcgggtatgataca

SEQ ID NO: 681135 - DNA, 19 bp, Mus musculus
  siRNA target sequence for Lnx1 (NM_010727.2,2056-2074).
ggaacttaaagggagaatt

SEQ ID NO: 681136 - DNA, 19 bp, Mus musculus
  siRNA target sequence for Lnx2 (NM_080795.3,312-330).
gacctcgtgtgccacattt

SEQ ID NO: 681137 - DNA, 19 bp, Mus musculus
  siRNA target sequence for Lnx2 (NM_080795.3,432-450).
gaccgcaagcggcttcatt

SEQ ID NO: 681138 - DNA, 19 bp, Mus musculus
  siRNA target sequence for Lnx2 (NM_080795.3,526-544).
ccgtgtgccaagatgtgat

SEQ ID NO: 681139 - DNA, 19 bp, Mus musculus
  siRNA target sequence for Lnx2 (NM_080795.3,608-626).
cgatctagagagaaggaaa

SEQ ID NO: 681140 - DNA, 19 bp, Mus musculus
  siRNA target sequence for Lnx2 (NM_080795.3,609-627).
gatctagagagaaggaaaa

SEQ ID NO: 681141 - DNA, 19 bp, Mus musculus
  siRNA target sequence for Lnx2 (NM_080795.3,623-641).
gaaaacgagtcaaactcaa

SEQ ID NO: 681142 - DNA, 19 bp, Mus musculus
  siRNA target sequence for Lnx2 (NM_080795.3,628-646).
cgagtcaaactcaaacaca

SEQ ID NO: 681143 - DNA, 19 bp, Mus musculus
  siRNA target sequence for Lnx2 (NM_080795.3,726-744).
cctggcgagaggaacttga

SEQ ID NO: 681144 - DNA, 19 bp, Mus musculus
  siRNA target sequence for Lnx2 (NM_080795.3,825-843).
gtacagcagccgcttagtt

SEQ ID NO: 681145 - DNA, 19 bp, Mus musculus
  siRNA target sequence for Lnx2 (NM_080795.3,830-848).
gcagccgcttagtttacca

SEQ ID NO: 681146 - DNA, 19 bp, Mus musculus
  siRNA target sequence for Lnx2 (NM_080795.3,888-906).
ccgtacatccagttaggaa

SEQ ID NO: 681147 - DNA, 19 bp, Mus musculus
  siRNA target sequence for Lnx2 (NM_080795.3,889-907).
cgtacatccagttaggaat

SEQ ID NO: 681148 - DNA, 19 bp, Mus musculus
  siRNA target sequence for Lnx2 (NM_080795.3,1214-1232).
gcagctcggcattaaacta

SEQ ID NO: 681149 - DNA, 19 bp, Mus musculus
  siRNA target sequence for Lnx2 (NM_080795.3,1368-1386).
gagctcgctgcccagatta

SEQ ID NO: 681150 - DNA, 19 bp, Mus musculus
  siRNA target sequence for Lnx2 (NM_080795.3,1686-1704).
cgagacggcaggatcaaga

SEQ ID NO: 681151 - DNA, 19 bp, Mus musculus
  siRNA target sequence for Lnx2 (NM_080795.3,2032-2050).
ccaatcagcccttcttcat

SEQ ID NO: 681152 - DNA, 19 bp, Mus musculus
  siRNA target sequence for Lnx2 (NM_080795.3,2068-2086).
gaacccctgcttactatga

SEQ ID NO: 681153 - DNA, 19 bp, Mus musculus
  siRNA target sequence for Lnx2 (NM_080795.3,2077-2095).
cttactatgacggaagatt

SEQ ID NO: 681154 - DNA, 19 bp, Mus musculus
  siRNA target sequence for Mona (NM_010815.1,312-330).
cgcactggagacattctga

SEQ ID NO: 681155 - DNA, 19 bp, Mus musculus
  siRNA target sequence for Mona (NM_010815.1,385-403).
gatatgtgcctaagaattt

SEQ ID NO: 681156 - DNA, 19 bp, Mus musculus
  siRNA target sequence for Mona (NM_010815.1,447-465).
cgacatcaagcagaaaact

SEQ ID NO: 681157 - DNA, 19 bp, Mus musculus
  siRNA target sequence for Mona (NM_010815.1,453-471).
caagcagaaaacttactca

SEQ ID NO: 681158 - DNA, 19 bp, Mus musculus
  siRNA target sequence for Mona (NM_010815.1,554-572).
cgacgttcagcacttcaaa

SEQ ID NO: 681159 - DNA, 19 bp, Mus musculus
  siRNA target sequence for Mona (NM_010815.1,611-629).
cgagaagttcccatcctta

SEQ ID NO: 681160 - DNA, 19 bp, Mus musculus
  siRNA target sequence for Mona (NM_010815.1,612-630).
gagaagttcccatccttaa

SEQ ID NO: 681161 - DNA, 19 bp, Mus musculus
  siRNA target sequence for Mona (NM_010815.1,892-910).
ctcaacagcagcgttatct

SEQ ID NO: 681162 - DNA, 19 bp, Mus musculus
  siRNA target sequence for Mona (NM_010815.1,904-922).
gttatctgcagcatttcca

SEQ ID NO: 681163 - DNA, 19 bp, Mus musculus
  siRNA target sequence for Mona (NM_010815.1,936-954).
gggggcagcctggacataa

SEQ ID NO: 681164 - DNA, 19 bp, Mus musculus
  siRNA target sequence for Mona (NM_010815.1,1054-1072).
gggccagggcactgtatga

SEQ ID NO: 681165 - DNA, 19 bp, Mus musculus
  siRNA target sequence for Mona (NM_010815.1,1057-1075).
ccagggcactgtatgactt

SEQ ID NO: 681166 - DNA, 19 bp, Mus musculus
  siRNA target sequence for Mona (NM_010815.1,1162-1180).
gccgtctgcacaacaaact

SEQ ID NO: 681167 - DNA, 19 bp, Mus musculus
  siRNA target sequence for Mpp1 (NM_008621.2,186-204).
ctacctggagcacttacta

SEQ ID NO: 681168 - DNA, 19 bp, Mus musculus
  siRNA target sequence for Mpp1 (NM_008621.2,217-235).
cgacctgagacttcattga

SEQ ID NO: 681169 - DNA, 19 bp, Mus musculus
  siRNA target sequence for Mpp1 (NM_008621.2,218-236).
gacctgagacttcattgaa

SEQ ID NO: 681170 - DNA, 19 bp, Mus musculus
  siRNA target sequence for Mpp1 (NM_008621.2,237-255).
ccagtcaaatgttactact

SEQ ID NO: 681171 - DNA, 19 bp, Mus musculus
  siRNA target sequence for Mpp1 (NM_008621.2,323-341).
ggagagttcgtctcataca

SEQ ID NO: 681172 - DNA, 19 bp, Mus musculus
  siRNA target sequence for Mpp1 (NM_008621.2,326-344).
gagttcgtctcatacaatt

SEQ ID NO: 681173 - DNA, 19 bp, Mus musculus
  siRNA target sequence for Mpp1 (NM_008621.2,331-349).
cgtctcatacaatttgaga

SEQ ID NO: 681174 - DNA, 19 bp, Mus musculus
  siRNA target sequence for Mpp1 (NM_008621.2,402-420).
gtgtaccgtggccagaatt

SEQ ID NO: 681175 - DNA, 19 bp, Mus musculus
  siRNA target sequence for Mpp1 (NM_008621.2,404-422).
gtaccgtggccagaattct

SEQ ID NO: 681176 - DNA, 19 bp, Mus musculus
  siRNA target sequence for Mpp1 (NM_008621.2,423-441).
ccatggcggcatgattcat

SEQ ID NO: 681177 - DNA, 19 bp, Mus musculus
  siRNA target sequence for Mpp1 (NM_008621.2,424-442).
catggcggcatgattcata

SEQ ID NO: 681178 - DNA, 19 bp, Mus musculus
  siRNA target sequence for Mpp1 (NM_008621.2,443-461).
gacaaggctcccttcatgt

SEQ ID NO: 681179 - DNA, 19 bp, Mus musculus
  siRNA target sequence for Mpp1 (NM_008621.2,463-481).
ggggatgagatcctagaaa

SEQ ID NO: 681180 - DNA, 19 bp, Mus musculus
  siRNA target sequence for Mpp1 (NM_008621.2,488-506).
gcacaaatgtgactaatca

SEQ ID NO: 681181 - DNA, 19 bp, Mus musculus
  siRNA target sequence for Mpp1 (NM_008621.2,500-518).
ctaatcactcagtagatca

SEQ ID NO: 681182 - DNA, 19 bp, Mus musculus
  siRNA target sequence for Mpp1 (NM_008621.2,612-630).
gagagcacagtttgactat

SEQ ID NO: 681183 - DNA, 19 bp, Mus musculus
  siRNA target sequence for Mpp1 (NM_008621.2,667-685).
gcaggactgaagtttgtta

SEQ ID NO: 681184 - DNA, 19 bp, Mus musculus
  siRNA target sequence for Mpp1 (NM_008621.2,688-706).
ggagacattatccagataa

SEQ ID NO: 681185 - DNA, 19 bp, Mus musculus
  siRNA target sequence for Mpp1 (NM_008621.2,691-709).
gacattatccagataatca

SEQ ID NO: 681186 - DNA, 19 bp, Mus musculus
  siRNA target sequence for Mpp1 (NM_008621.2,699-717).
ccagataatcaacaaagat

SEQ ID NO: 681187 - DNA, 19 bp, Mus musculus
  siRNA target sequence for Mpp1 (NM_008621.2,745-763).
gagggctcctccaaagagt

SEQ ID NO: 681188 - DNA, 19 bp, Mus musculus
  siRNA target sequence for Mpp1 (NM_008621.2,892-910).
gctaagcacagttccattt

SEQ ID NO: 681189 - DNA, 19 bp, Mus musculus
  siRNA target sequence for Mpp1 (NM_008621.2,949-967).
cggctccctgcattcaaga

SEQ ID NO: 681190 - DNA, 19 bp, Mus musculus
  siRNA target sequence for Mpp1 (NM_008621.2,968-986).
ggaagaccttggtgttgat

SEQ ID NO: 681191 - DNA, 19 bp, Mus musculus
  siRNA target sequence for Mpp1 (NM_008621.2,999-1017).
ggtgggtcgtagccatatt

SEQ ID NO: 681192 - DNA, 19 bp, Mus musculus
  siRNA target sequence for Mpp1 (NM_008621.2,1000-1018).
gtgggtcgtagccatatta

SEQ ID NO: 681193 - DNA, 19 bp, Mus musculus
  siRNA target sequence for Mpp1 (NM_008621.2,1003-1021).
ggtcgtagccatattaaga

SEQ ID NO: 681194 - DNA, 19 bp, Mus musculus
  siRNA target sequence for Mpp1 (NM_008621.2,1004-1022).
gtcgtagccatattaagaa

SEQ ID NO: 681195 - DNA, 19 bp, Mus musculus
  siRNA target sequence for Mpp1 (NM_008621.2,1054-1072).
gcgtaccctgccccatata

SEQ ID NO: 681196 - DNA, 19 bp, Mus musculus
  siRNA target sequence for Mpp1 (NM_008621.2,1102-1120).
gatgggaaggagtatcatt

SEQ ID NO: 681197 - DNA, 19 bp, Mus musculus
  siRNA target sequence for Mpp1 (NM_008621.2,1106-1124).
ggaaggagtatcatttcat

SEQ ID NO: 681198 - DNA, 19 bp, Mus musculus
  siRNA target sequence for Mpp1 (NM_008621.2,1202-1220).
gcaccaaatttgaaacagt

SEQ ID NO: 681199 - DNA, 19 bp, Mus musculus
  siRNA target sequence for Mpp1 (NM_008621.2,1217-1235).
cagtgcaccagattcataa

SEQ ID NO: 681200 - DNA, 19 bp, Mus musculus
  siRNA target sequence for Mpp1 (NM_008621.2,1245-1263).
gattgccatccttgacatt

SEQ ID NO: 681201 - DNA, 19 bp, Mus musculus
  siRNA target sequence for Mpp1 (NM_008621.2,1266-1284).
gccccagaccctaaagact

SEQ ID NO: 681202 - DNA, 19 bp, Mus musculus
  siRNA target sequence for Mpp1 (NM_008621.2,1295-1313).
ctgagctttcacctttcat

SEQ ID NO: 681203 - DNA, 19 bp, Mus musculus
  siRNA target sequence for Mpp1 (NM_008621.2,1383-1401).
ggccatccgtagtcagtat

SEQ ID NO: 681204 - DNA, 19 bp, Mus musculus
  siRNA target sequence for Mpp1 (NM_008621.2,1414-1432).
gacctctctttggtgaata

SEQ ID NO: 681205 - DNA, 19 bp, Mus musculus
  siRNA target sequence for Mpp1 (NM_008621.2,1416-1434).
cctctctttggtgaataat

SEQ ID NO: 681206 - DNA, 19 bp, Mus musculus
  siRNA target sequence for Mpp1 (NM_008621.2,1436-1454).
gtgttgatgaaactcttaa

SEQ ID NO: 681207 - DNA, 19 bp, Mus musculus
  siRNA target sequence for Mpp1 (NM_008621.2,1438-1456).
gttgatgaaactcttaaga

SEQ ID NO: 681208 - DNA, 19 bp, Mus musculus
  siRNA target sequence for Mpp3 (NM_007863.1,265-283).
gcctcagttatttaatgaa

SEQ ID NO: 681209 - DNA, 19 bp, Mus musculus
  siRNA target sequence for Mpp3 (NM_007863.1,466-484).
cggttgcccagaagaactt

SEQ ID NO: 681210 - DNA, 19 bp, Mus musculus
  siRNA target sequence for Mpp3 (NM_007863.1,556-574).
gcttggtgaagaataagga

SEQ ID NO: 681211 - DNA, 19 bp, Mus musculus
  siRNA target sequence for Mpp3 (NM_007863.1,1428-1446).
gacggggtggagtaccatt

SEQ ID NO: 681212 - DNA, 19 bp, Mus musculus
  siRNA target sequence for Mpp3 (NM_007863.1,1430-1448).
cggggtggagtaccatttt

SEQ ID NO: 681213 - DNA, 19 bp, Mus musculus
  siRNA target sequence for Mpp3 (NM_007863.1,1432-1450).
gggtggagtaccattttgt

SEQ ID NO: 681214 - DNA, 19 bp, Mus musculus
  siRNA target sequence for Mpp3 (NM_007863.1,1434-1452).
gtggagtaccattttgtct

SEQ ID NO: 681215 - DNA, 19 bp, Mus musculus
  siRNA target sequence for Mpp3 (NM_007863.1,1493-1511).
cctggagcatggagaatat

SEQ ID NO: 681216 - DNA, 19 bp, Mus musculus
  siRNA target sequence for Mpp3 (NM_007863.1,1623-1641).
gagtttaagccctatgtta

SEQ ID NO: 681217 - DNA, 19 bp, Mus musculus
  siRNA target sequence for Mpp3 (NM_007863.1,1703-1721).
ggacatagcatcttcactt

SEQ ID NO: 681218 - DNA, 19 bp, Mus musculus
  siRNA target sequence for Mpp3 (NM_007863.1,1706-1724).
catagcatcttcacttgat

SEQ ID NO: 681219 - DNA, 19 bp, Mus musculus
  siRNA target sequence for Mpp4 (NM_145143.1,508-526).
catcaagcgtcatgagata

SEQ ID NO: 681220 - DNA, 19 bp, Mus musculus
  siRNA target sequence for Mpp4 (NM_145143.1,645-663).
ctgagcaagtgatccatat

SEQ ID NO: 681221 - DNA, 19 bp, Mus musculus
  siRNA target sequence for Mpp4 (NM_145143.1,678-696).
gtggtacgatcatgttcaa

SEQ ID NO: 681222 - DNA, 19 bp, Mus musculus
  siRNA target sequence for Mpp4 (NM_145143.1,746-764).
gttcgcgccatgattgatt

SEQ ID NO: 681223 - DNA, 19 bp, Mus musculus
  siRNA target sequence for Mpp4 (NM_145143.1,817-835).
cctgaaaggggacattcta

SEQ ID NO: 681224 - DNA, 19 bp, Mus musculus
  siRNA target sequence for Mpp4 (NM_145143.1,838-856).
gattgtggaccagaatgat

SEQ ID NO: 681225 - DNA, 19 bp, Mus musculus
  siRNA target sequence for Mpp4 (NM_145143.1,974-992).
cctcacacctgcctcaaat

SEQ ID NO: 681226 - DNA, 19 bp, Mus musculus
  siRNA target sequence for Mpp4 (NM_145143.1,993-1011).
ccacccgagcactgtctat

SEQ ID NO: 681227 - DNA, 19 bp, Mus musculus
  siRNA target sequence for Mpp4 (NM_145143.1,1112-1130).
ggcgatgggcagaagttct

SEQ ID NO: 681228 - DNA, 19 bp, Mus musculus
  siRNA target sequence for Mpp4 (NM_145143.1,1113-1131).
gcgatgggcagaagttctt

SEQ ID NO: 681229 - DNA, 19 bp, Mus musculus
  siRNA target sequence for Mpp4 (NM_145143.1,1114-1132).
cgatgggcagaagttcttt

SEQ ID NO: 681230 - DNA, 19 bp, Mus musculus
  siRNA target sequence for Mpp4 (NM_145143.1,1115-1133).
gatgggcagaagttcttta

SEQ ID NO: 681231 - DNA, 19 bp, Mus musculus
  siRNA target sequence for Mpp4 (NM_145143.1,1317-1335).
gcgttggagtcaatgaact

SEQ ID NO: 681232 - DNA, 19 bp, Mus musculus
  siRNA target sequence for Mpp4 (NM_145143.1,1605-1623).
ctcgaacccgtgacttgaa

SEQ ID NO: 681233 - DNA, 19 bp, Mus musculus
  siRNA target sequence for Mpp4 (NM_145143.1,1674-1692).
ctcggaaaaacgctaagat

SEQ ID NO: 681234 - DNA, 19 bp, Mus musculus
  siRNA target sequence for Mpp4 (NM_145143.1,1676-1694).
cggaaaaacgctaagatca

SEQ ID NO: 681235 - DNA, 19 bp, Mus musculus
  siRNA target sequence for Mpp4 (NM_145143.1,1748-1766).
gaggagttagcccagaaaa

SEQ ID NO: 681236 - DNA, 19 bp, Mus musculus
  siRNA target sequence for Mpp5 (NM_019579.1,375-393).
gaatcagacagcggaataa

SEQ ID NO: 681237 - DNA, 19 bp, Mus musculus
  siRNA target sequence for Mpp5 (NM_019579.1,383-401).
cagcggaataaaaaatctt

SEQ ID NO: 681238 - DNA, 19 bp, Mus musculus
  siRNA target sequence for Mpp5 (NM_019579.1,385-403).
gcggaataaaaaatcttga

SEQ ID NO: 681239 - DNA, 19 bp, Mus musculus
  siRNA target sequence for Mpp5 (NM_019579.1,479-497).
gatgccagtgcgaagaagt

SEQ ID NO: 681240 - DNA, 19 bp, Mus musculus
  siRNA target sequence for Mpp5 (NM_019579.1,490-508).
gaagaagtgcacagttaga

SEQ ID NO: 681241 - DNA, 19 bp, Mus musculus
  siRNA target sequence for Mpp5 (NM_019579.1,586-604).
cttccatgagacttaagaa

SEQ ID NO: 681242 - DNA, 19 bp, Mus musculus
  siRNA target sequence for Mpp5 (NM_019579.1,590-608).
catgagacttaagaaacta

SEQ ID NO: 681243 - DNA, 19 bp, Mus musculus
  siRNA target sequence for Mpp5 (NM_019579.1,621-639).
ccaaagactggaatagata

SEQ ID NO: 681244 - DNA, 19 bp, Mus musculus
  siRNA target sequence for Mpp5 (NM_019579.1,622-640).
caaagactggaatagataa

SEQ ID NO: 681245 - DNA, 19 bp, Mus musculus
  siRNA target sequence for Mpp5 (NM_019579.1,630-648).
ggaatagataaccctatat

SEQ ID NO: 681246 - DNA, 19 bp, Mus musculus
  siRNA target sequence for Mpp5 (NM_019579.1,653-671).
cacggaagaaggaattgtt

SEQ ID NO: 681247 - DNA, 19 bp, Mus musculus
  siRNA target sequence for Mpp5 (NM_019579.1,655-673).
cggaagaaggaattgtttt

SEQ ID NO: 681248 - DNA, 19 bp, Mus musculus
  siRNA target sequence for Mpp5 (NM_019579.1,686-704).
ctatgctgtgaacatatta

SEQ ID NO: 681249 - DNA, 19 bp, Mus musculus
  siRNA target sequence for Mpp5 (NM_019579.1,737-755).
catccaacacactttggtt

SEQ ID NO: 681250 - DNA, 19 bp, Mus musculus
  siRNA target sequence for Mpp5 (NM_019579.1,741-759).
caacacactttggttgatt

SEQ ID NO: 681251 - DNA, 19 bp, Mus musculus
  siRNA target sequence for Mpp5 (NM_019579.1,773-791).
ggatatctcactgctttta

SEQ ID NO: 681252 - DNA, 19 bp, Mus musculus
  siRNA target sequence for Mpp5 (NM_019579.1,785-803).
gcttttacagcttgtacaa

SEQ ID NO: 681253 - DNA, 19 bp, Mus musculus
  siRNA target sequence for Mpp5 (NM_019579.1,971-989).
gttgaatgctccacatatt

SEQ ID NO: 681254 - DNA, 19 bp, Mus musculus
  siRNA target sequence for Mpp5 (NM_019579.1,982-1000).
cacatattcaggcactttt

SEQ ID NO: 681255 - DNA, 19 bp, Mus musculus
  siRNA target sequence for Mpp5 (NM_019579.1,996-1014).
cttttactggcccatgata

SEQ ID NO: 681256 - DNA, 19 bp, Mus musculus
  siRNA target sequence for Mpp5 (NM_019579.1,1034-1052).
gcagctagagcccattaca

SEQ ID NO: 681257 - DNA, 19 bp, Mus musculus
  siRNA target sequence for Mpp5 (NM_019579.1,1079-1097).
ccattacgggggagaaact

SEQ ID NO: 681258 - DNA, 19 bp, Mus musculus
  siRNA target sequence for Mpp5 (NM_019579.1,1085-1103).
cgggggagaaactgtaaaa

SEQ ID NO: 681259 - DNA, 19 bp, Mus musculus
  siRNA target sequence for Mpp5 (NM_019579.1,1175-1193).
cataagccggatagtgaaa

SEQ ID NO: 681260 - DNA, 19 bp, Mus musculus
  siRNA target sequence for Mpp5 (NM_019579.1,1244-1262).
ggagatcaacggcattgaa

SEQ ID NO: 681261 - DNA, 19 bp, Mus musculus
  siRNA target sequence for Mpp5 (NM_019579.1,1278-1296).
gtcaatgaggtttttgact

SEQ ID NO: 681262 - DNA, 19 bp, Mus musculus
  siRNA target sequence for Mpp5 (NM_019579.1,1305-1323).
gatatgcatggtactttga

SEQ ID NO: 681263 - DNA, 19 bp, Mus musculus
  siRNA target sequence for Mpp5 (NM_019579.1,1310-1328).
gcatggtactttgacattt

SEQ ID NO: 681264 - DNA, 19 bp, Mus musculus
  siRNA target sequence for Mpp5 (NM_019579.1,1318-1336).
ctttgacatttgttctgat

SEQ ID NO: 681265 - DNA, 19 bp, Mus musculus
  siRNA target sequence for Mpp5 (NM_019579.1,1360-1378).
ctcctgccaaagaaactgt

SEQ ID NO: 681266 - DNA, 19 bp, Mus musculus
  siRNA target sequence for Mpp5 (NM_019579.1,1411-1429).
cctcagatgacccttatgt

SEQ ID NO: 681267 - DNA, 19 bp, Mus musculus
  siRNA target sequence for Mpp5 (NM_019579.1,1412-1430).
ctcagatgacccttatgtt

SEQ ID NO: 681268 - DNA, 19 bp, Mus musculus
  siRNA target sequence for Mpp5 (NM_019579.1,1438-1456).
gagagttagggctgtcttt

SEQ ID NO: 681269 - DNA, 19 bp, Mus musculus
  siRNA target sequence for Mpp5 (NM_019579.1,1442-1460).
gttagggctgtcttttcaa

SEQ ID NO: 681270 - DNA, 19 bp, Mus musculus
  siRNA target sequence for Mpp5 (NM_019579.1,1488-1506).
caagaagatccaaattggt

SEQ ID NO: 681271 - DNA, 19 bp, Mus musculus
  siRNA target sequence for Mpp5 (NM_019579.1,1541-1559).
gcctctagctggacttgtt

SEQ ID NO: 681272 - DNA, 19 bp, Mus musculus
  siRNA target sequence for Mpp5 (NM_019579.1,1554-1572).
cttgttccaggcaaaagct

SEQ ID NO: 681273 - DNA, 19 bp, Mus musculus
  siRNA target sequence for Mpp5 (NM_019579.1,1595-1613).
gaagcaaactatagaagaa

SEQ ID NO: 681274 - DNA, 19 bp, Mus musculus
  siRNA target sequence for Mpp5 (NM_019579.1,1603-1621).
ctatagaagaagataagga

SEQ ID NO: 681275 - DNA, 19 bp, Mus musculus
  siRNA target sequence for Mpp5 (NM_019579.1,1818-1836).
gaactgcgccagagactaa

SEQ ID NO: 681276 - DNA, 19 bp, Mus musculus
  siRNA target sequence for Mpp5 (NM_019579.1,1821-1839).
ctgcgccagagactaatga

SEQ ID NO: 681277 - DNA, 19 bp, Mus musculus
  siRNA target sequence for Mpp5 (NM_019579.1,1823-1841).
gcgccagagactaatgaat

SEQ ID NO: 681278 - DNA, 19 bp, Mus musculus
  siRNA target sequence for Mpp5 (NM_019579.1,1824-1842).
cgccagagactaatgaata

SEQ ID NO: 681279 - DNA, 19 bp, Mus musculus
  siRNA target sequence for Mpp5 (NM_019579.1,1825-1843).
gccagagactaatgaataa

SEQ ID NO: 681280 - DNA, 19 bp, Mus musculus
  siRNA target sequence for Mpp5 (NM_019579.1,1912-1930).
ggagagattaccactttgt

SEQ ID NO: 681281 - DNA, 19 bp, Mus musculus
  siRNA target sequence for Mpp5 (NM_019579.1,2019-2037).
gactctgtacgacaagtaa

SEQ ID NO: 681282 - DNA, 19 bp, Mus musculus
  siRNA target sequence for Mpp5 (NM_019579.1,2023-2041).
ctgtacgacaagtaatcaa

SEQ ID NO: 681283 - DNA, 19 bp, Mus musculus
  siRNA target sequence for Mpp5 (NM_019579.1,2025-2043).
gtacgacaagtaatcaact

SEQ ID NO: 681284 - DNA, 19 bp, Mus musculus
  siRNA target sequence for Mpp5 (NM_019579.1,2039-2057).
caactctggcaagatatgt

SEQ ID NO: 681285 - DNA, 19 bp, Mus musculus
  siRNA target sequence for Mpp5 (NM_019579.1,2048-2066).
caagatatgtctcttaagt

SEQ ID NO: 681286 - DNA, 19 bp, Mus musculus
  siRNA target sequence for Mpp5 (NM_019579.1,2051-2069).
gatatgtctcttaagtctt

SEQ ID NO: 681287 - DNA, 19 bp, Mus musculus
  siRNA target sequence for Mpp5 (NM_019579.1,2070-2088).
cgcacacagtccttgaaga

SEQ ID NO: 681288 - DNA, 19 bp, Mus musculus
  siRNA target sequence for Mpp5 (NM_019579.1,2087-2105).
gaccctccggaattcagat

SEQ ID NO: 681289 - DNA, 19 bp, Mus musculus
  siRNA target sequence for Mpp5 (NM_019579.1,2093-2111).
ccggaattcagatttgaaa

SEQ ID NO: 681290 - DNA, 19 bp, Mus musculus
  siRNA target sequence for Mpp5 (NM_019579.1,2103-2121).
gatttgaaaccatatatca

SEQ ID NO: 681291 - DNA, 19 bp, Mus musculus
  siRNA target sequence for Mpp5 (NM_019579.1,2147-2165).
gagacttcgggcgttgtta

SEQ ID NO: 681292 - DNA, 19 bp, Mus musculus
  siRNA target sequence for Mpp5 (NM_019579.1,2255-2273).
cgacactgcaattgtgaat

SEQ ID NO: 681293 - DNA, 19 bp, Mus musculus
  siRNA target sequence for Mpp5 (NM_019579.1,2268-2286).
gtgaattcagatcttgata

SEQ ID NO: 681294 - DNA, 19 bp, Mus musculus
  siRNA target sequence for Mpp5 (NM_019579.1,2270-2288).
gaattcagatcttgataaa

SEQ ID NO: 681295 - DNA, 19 bp, Mus musculus
  siRNA target sequence for Mpp5 (NM_019579.1,2289-2307).
gcctatcaggaattgctta

SEQ ID NO: 681296 - DNA, 19 bp, Mus musculus
  siRNA target sequence for Mpp5 (NM_019579.1,2298-2316).
gaattgcttaggctcatta

SEQ ID NO: 681297 - DNA, 19 bp, Mus musculus
  siRNA target sequence for Mpp5 (NM_019579.1,2303-2321).
gcttaggctcattaacaaa

SEQ ID NO: 681298 - DNA, 19 bp, Mus musculus
  siRNA target sequence for Mpp6 (NM_019939.1,208-226).
gaggagatagacctaattt

SEQ ID NO: 681299 - DNA, 19 bp, Mus musculus
  siRNA target sequence for Mpp6 (NM_019939.1,236-254).
ggattatggagaatcctat

SEQ ID NO: 681300 - DNA, 19 bp, Mus musculus
  siRNA target sequence for Mpp6 (NM_019939.1,237-255).
gattatggagaatcctatt

SEQ ID NO: 681301 - DNA, 19 bp, Mus musculus
  siRNA target sequence for Mpp6 (NM_019939.1,284-302).
gacttgaagattcaaagtt

SEQ ID NO: 681302 - DNA, 19 bp, Mus musculus
  siRNA target sequence for Mpp6 (NM_019939.1,391-409).
gagctagttgggatactca

SEQ ID NO: 681303 - DNA, 19 bp, Mus musculus
  siRNA target sequence for Mpp6 (NM_019939.1,430-448).
ctcctggaggcccatgata

SEQ ID NO: 681304 - DNA, 19 bp, Mus musculus
  siRNA target sequence for Mpp6 (NM_019939.1,432-450).
cctggaggcccatgatatt

SEQ ID NO: 681305 - DNA, 19 bp, Mus musculus
  siRNA target sequence for Mpp6 (NM_019939.1,445-463).
gatattgtggcatcaaagt

SEQ ID NO: 681306 - DNA, 19 bp, Mus musculus
  siRNA target sequence for Mpp6 (NM_019939.1,538-556).
cgtattctcggtattcaca

SEQ ID NO: 681307 - DNA, 19 bp, Mus musculus
  siRNA target sequence for Mpp6 (NM_019939.1,546-564).
cggtattcacaaaaaagct

SEQ ID NO: 681308 - DNA, 19 bp, Mus musculus
  siRNA target sequence for Mpp6 (NM_019939.1,568-586).
gagccattgggtgtaacat

SEQ ID NO: 681309 - DNA, 19 bp, Mus musculus
  siRNA target sequence for Mpp6 (NM_019939.1,570-588).
gccattgggtgtaacattt

SEQ ID NO: 681310 - DNA, 19 bp, Mus musculus
  siRNA target sequence for Mpp6 (NM_019939.1,571-589).
ccattgggtgtaacattta

SEQ ID NO: 681311 - DNA, 19 bp, Mus musculus
  siRNA target sequence for Mpp6 (NM_019939.1,576-594).
gggtgtaacatttagagtt

SEQ ID NO: 681312 - DNA, 19 bp, Mus musculus
  siRNA target sequence for Mpp6 (NM_019939.1,580-598).
gtaacatttagagttgaaa

SEQ ID NO: 681313 - DNA, 19 bp, Mus musculus
  siRNA target sequence for Mpp6 (NM_019939.1,609-627).
ggtaatcgcccgaatcctt

SEQ ID NO: 681314 - DNA, 19 bp, Mus musculus
  siRNA target sequence for Mpp6 (NM_019939.1,624-642).
ccttcatggaggaatgata

SEQ ID NO: 681315 - DNA, 19 bp, Mus musculus
  siRNA target sequence for Mpp6 (NM_019939.1,661-679).
cacgtgggagatatcatta

SEQ ID NO: 681316 - DNA, 19 bp, Mus musculus
  siRNA target sequence for Mpp6 (NM_019939.1,692-710).
gtcatgaggttggaaacaa

SEQ ID NO: 681317 - DNA, 19 bp, Mus musculus
  siRNA target sequence for Mpp6 (NM_019939.1,748-766).
ggaagtgtcaccctaaaaa

SEQ ID NO: 681318 - DNA, 19 bp, Mus musculus
  siRNA target sequence for Mpp6 (NM_019939.1,772-790).
ccaagttacagagatacta

SEQ ID NO: 681319 - DNA, 19 bp, Mus musculus
  siRNA target sequence for Mpp6 (NM_019939.1,794-812).
ctcctcagcaggtatttgt

SEQ ID NO: 681320 - DNA, 19 bp, Mus musculus
  siRNA target sequence for Mpp6 (NM_019939.1,796-814).
cctcagcaggtatttgtca

SEQ ID NO: 681321 - DNA, 19 bp, Mus musculus
  siRNA target sequence for Mpp6 (NM_019939.1,797-815).
ctcagcaggtatttgtcaa

SEQ ID NO: 681322 - DNA, 19 bp, Mus musculus
  siRNA target sequence for Mpp6 (NM_019939.1,868-886).
gcaggactaaaattttcca

SEQ ID NO: 681323 - DNA, 19 bp, Mus musculus
  siRNA target sequence for Mpp6 (NM_019939.1,869-887).
caggactaaaattttccaa

SEQ ID NO: 681324 - DNA, 19 bp, Mus musculus
  siRNA target sequence for Mpp6 (NM_019939.1,890-908).
gagaaattcttcagattgt

SEQ ID NO: 681325 - DNA, 19 bp, Mus musculus
  siRNA target sequence for Mpp6 (NM_019939.1,892-910).
gaaattcttcagattgtaa

SEQ ID NO: 681326 - DNA, 19 bp, Mus musculus
  siRNA target sequence for Mpp6 (NM_019939.1,932-950).
ggcaggctagccatgtgaa

SEQ ID NO: 681327 - DNA, 19 bp, Mus musculus
  siRNA target sequence for Mpp6 (NM_019939.1,1015-1033).
cgccgagactgggacaatt

SEQ ID NO: 681328 - DNA, 19 bp, Mus musculus
  siRNA target sequence for Mpp6 (NM_019939.1,1017-1035).
ccgagactgggacaattca

SEQ ID NO: 681329 - DNA, 19 bp, Mus musculus
  siRNA target sequence for Mpp6 (NM_019939.1,1029-1047).
caattcaggacccttttgt

SEQ ID NO: 681330 - DNA, 19 bp, Mus musculus
  siRNA target sequence for Mpp6 (NM_019939.1,1037-1055).
gacccttttgtggaactat

SEQ ID NO: 681331 - DNA, 19 bp, Mus musculus
  siRNA target sequence for Mpp6 (NM_019939.1,1049-1067).
gaactataagcaacaagaa

SEQ ID NO: 681332 - DNA, 19 bp, Mus musculus
  siRNA target sequence for Mpp6 (NM_019939.1,1107-1125).
gtttgatcgtcatgaaatt

SEQ ID NO: 681333 - DNA, 19 bp, Mus musculus
  siRNA target sequence for Mpp6 (NM_019939.1,1111-1129).
gatcgtcatgaaattcaga

SEQ ID NO: 681334 - DNA, 19 bp, Mus musculus
  siRNA target sequence for Mpp6 (NM_019939.1,1156-1174).
cccttccaacggaaaacgt

SEQ ID NO: 681335 - DNA, 19 bp, Mus musculus
  siRNA target sequence for Mpp6 (NM_019939.1,1158-1176).
cttccaacggaaaacgtta

SEQ ID NO: 681336 - DNA, 19 bp, Mus musculus
  siRNA target sequence for Mpp6 (NM_019939.1,1161-1179).
ccaacggaaaacgttagtt

SEQ ID NO: 681337 - DNA, 19 bp, Mus musculus
  siRNA target sequence for Mpp6 (NM_019939.1,1165-1183).
cggaaaacgttagttttga

SEQ ID NO: 681338 - DNA, 19 bp, Mus musculus
  siRNA target sequence for Mpp6 (NM_019939.1,1252-1270).
ggaacaacggtgccattta

SEQ ID NO: 681339 - DNA, 19 bp, Mus musculus
  siRNA target sequence for Mpp6 (NM_019939.1,1300-1318).
gatggacaagcatataaat

SEQ ID NO: 681340 - DNA, 19 bp, Mus musculus
  siRNA target sequence for Mpp6 (NM_019939.1,1400-1418).
gaaccaagatcgactctat

SEQ ID NO: 681341 - DNA, 19 bp, Mus musculus
  siRNA target sequence for Mpp6 (NM_019939.1,1434-1452).
gactgggcggacttgcatt

SEQ ID NO: 681342 - DNA, 19 bp, Mus musculus
  siRNA target sequence for Mpp6 (NM_019939.1,1436-1454).
ctgggcggacttgcatttt

SEQ ID NO: 681343 - DNA, 19 bp, Mus musculus
  siRNA target sequence for Mpp6 (NM_019939.1,1439-1457).
ggcggacttgcattttgga

SEQ ID NO: 681344 - DNA, 19 bp, Mus musculus
  siRNA target sequence for Mpp6 (NM_019939.1,1471-1489).
gcactgaaagtgttaagga

SEQ ID NO: 681345 - DNA, 19 bp, Mus musculus
  siRNA target sequence for Mpp6 (NM_019939.1,1576-1594).
ggaatcaccaccaagcttt

SEQ ID NO: 681346 - DNA, 19 bp, Mus musculus
  siRNA target sequence for Mpp6 (NM_019939.1,1577-1595).
gaatcaccaccaagctttt

SEQ ID NO: 681347 - DNA, 19 bp, Mus musculus
  siRNA target sequence for Mpp6 (NM_019939.1,1627-1645).
gaaagtgcccgaattcaga

SEQ ID NO: 681348 - DNA, 19 bp, Mus musculus
  siRNA target sequence for Mpp6 (NM_019939.1,1657-1675).
cactactttgatttgatca

SEQ ID NO: 681349 - DNA, 19 bp, Mus musculus
  siRNA target sequence for Mpp6 (NM_019939.1,1671-1689).
gatcatcgtaaatgacaat

SEQ ID NO: 681350 - DNA, 19 bp, Mus musculus
  siRNA target sequence for Mpp6 (NM_019939.1,1674-1692).
catcgtaaatgacaatcta

SEQ ID NO: 681351 - DNA, 19 bp, Mus musculus
  siRNA target sequence for Mpp6 (NM_019939.1,1744-1762).
ccacagtgggtcccaatta

SEQ ID NO: 681352 - DNA, 19 bp, Mus musculus
  siRNA target sequence for Mpp6 (NM_019939.1,1747-1765).
cagtgggtcccaattagct

SEQ ID NO: 681353 - DNA, 19 bp, Mus musculus
  siRNA target sequence for Pard6g (NM_053117.2,124-142).
ccggagttttcataagtct

SEQ ID NO: 681354 - DNA, 19 bp, Mus musculus
  siRNA target sequence for Pard6g (NM_053117.2,501-519).
ggcgtccccacctcaacat

SEQ ID NO: 681355 - DNA, 19 bp, Mus musculus
  siRNA target sequence for Pard6g (NM_053117.2,669-687).
cccatgggctagaaaaggt

SEQ ID NO: 681356 - DNA, 19 bp, Mus musculus
  siRNA target sequence for Pard6g (NM_053117.2,962-980).
gcccatgtcctgcagaatt

SEQ ID NO: 681357 - DNA, 19 bp, Mus musculus
  siRNA target sequence for Pard6g (NM_053117.2,1001-1019).
gaggaagccgacattgtca

SEQ ID NO: 681358 - DNA, 19 bp, Mus musculus
  siRNA target sequence for Pard6g (NM_053117.2,1018-1036).
cattgaaggggctctagaa

SEQ ID NO: 681359 - DNA, 19 bp, Mus musculus
  siRNA target sequence for Pard6g (NM_053117.2,1029-1047).
ctctagaacctcaacacat

SEQ ID NO: 681360 - DNA, 19 bp, Mus musculus
  siRNA target sequence for Pard6g (NM_053117.2,1162-1180).
cggcagcatccacagattt

SEQ ID NO: 681361 - DNA, 19 bp, Mus musculus
  siRNA target sequence for Pdlim2 (NM_145978.1,100-118).
ccttggggcttccgaatta

SEQ ID NO: 681362 - DNA, 19 bp, Mus musculus
  siRNA target sequence for Pdlim2 (NM_145978.1,195-213).
ccggcctggcgacatcatt

SEQ ID NO: 681363 - DNA, 19 bp, Mus musculus
  siRNA target sequence for Pdlim2 (NM_145978.1,497-515).
cagttgccctttctaaaga

SEQ ID NO: 681364 - DNA, 19 bp, Mus musculus
  siRNA target sequence for Pdlim2 (NM_145978.1,776-794).
gctcttttcgactcttaca

SEQ ID NO: 681365 - DNA, 19 bp, Mus musculus
  siRNA target sequence for Pdlim2 (NM_145978.1,1037-1055).
gggtgggcaatgagttgta

SEQ ID NO: 681366 - DNA, 19 bp, Mus musculus
  siRNA target sequence for Pdlim2 (NM_145978.1,1039-1057).
gtgggcaatgagttgtact

SEQ ID NO: 681367 - DNA, 19 bp, Mus musculus
  siRNA target sequence for Pdzk1 (NM_021517.1,52-70).
cccagagagtgtaaattgt

SEQ ID NO: 681368 - DNA, 19 bp, Mus musculus
  siRNA target sequence for Pdzk1 (NM_021517.1,62-80).
gtaaattgtccaaacaaga

SEQ ID NO: 681369 - DNA, 19 bp, Mus musculus
  siRNA target sequence for Pdzk1 (NM_021517.1,192-210).
cagggtgctcaggatcaat

SEQ ID NO: 681370 - DNA, 19 bp, Mus musculus
  siRNA target sequence for Pdzk1 (NM_021517.1,203-221).
ggatcaatggtgtctttgt

SEQ ID NO: 681371 - DNA, 19 bp, Mus musculus
  siRNA target sequence for Pdzk1 (NM_021517.1,295-313).
gatggagactcctatgaga

SEQ ID NO: 681372 - DNA, 19 bp, Mus musculus
  siRNA target sequence for Pdzk1 (NM_021517.1,360-378).
gagggaggccgctctgaat

SEQ ID NO: 681373 - DNA, 19 bp, Mus musculus
  siRNA target sequence for Pdzk1 (NM_021517.1,362-380).
gggaggccgctctgaatga

SEQ ID NO: 681374 - DNA, 19 bp, Mus musculus
  siRNA target sequence for Pdzk1 (NM_021517.1,363-381).
ggaggccgctctgaatgat

SEQ ID NO: 681375 - DNA, 19 bp, Mus musculus
  siRNA target sequence for Pdzk1 (NM_021517.1,364-382).
gaggccgctctgaatgata

SEQ ID NO: 681376 - DNA, 19 bp, Mus musculus
  siRNA target sequence for Pdzk1 (NM_021517.1,367-385).
gccgctctgaatgataaga

SEQ ID NO: 681377 - DNA, 19 bp, Mus musculus
  siRNA target sequence for Pdzk1 (NM_021517.1,368-386).
ccgctctgaatgataagaa

SEQ ID NO: 681378 - DNA, 19 bp, Mus musculus
  siRNA target sequence for Pdzk1 (NM_021517.1,369-387).
cgctctgaatgataagaaa

SEQ ID NO: 681379 - DNA, 19 bp, Mus musculus
  siRNA target sequence for Pdzk1 (NM_021517.1,474-492).
ctctctgaaaactatccaa

SEQ ID NO: 681380 - DNA, 19 bp, Mus musculus
  siRNA target sequence for Pdzk1 (NM_021517.1,480-498).
gaaaactatccaaggtaaa

SEQ ID NO: 681381 - DNA, 19 bp, Mus musculus
  siRNA target sequence for Pdzk1 (NM_021517.1,558-576).
ggctgatgatcacttgatt

SEQ ID NO: 681382 - DNA, 19 bp, Mus musculus
  siRNA target sequence for Pdzk1 (NM_021517.1,560-578).
ctgatgatcacttgattga

SEQ ID NO: 681383 - DNA, 19 bp, Mus musculus
  siRNA target sequence for Pdzk1 (NM_021517.1,787-805).
ggctatggcttctatctga

SEQ ID NO: 681384 - DNA, 19 bp, Mus musculus
  siRNA target sequence for Pdzk1 (NM_021517.1,891-909).
cttggtagttgctgtcaat

SEQ ID NO: 681385 - DNA, 19 bp, Mus musculus
  siRNA target sequence for Pdzk1 (NM_021517.1,937-955).
gacggtgtggtggaaatga

SEQ ID NO: 681386 - DNA, 19 bp, Mus musculus
  siRNA target sequence for Pdzk1 (NM_021517.1,943-961).
gtggtggaaatgattagaa

SEQ ID NO: 681387 - DNA, 19 bp, Mus musculus
  siRNA target sequence for Pdzk1 (NM_021517.1,1415-1433).
gctacttccaagctaagaa

SEQ ID NO: 681388 - DNA, 19 bp, Mus musculus
  siRNA target sequence for Pdzk1 (NM_021517.1,1470-1488).
ggctggccctgatgaaaaa

SEQ ID NO: 681389 - DNA, 19 bp, Mus musculus
  siRNA target sequence for Pdzk1 (NM_021517.1,1557-1575).
gcactcttcgtctaactct

SEQ ID NO: 681390 - DNA, 19 bp, Mus musculus
  siRNA target sequence for Pdzk2 (NM_133226.1,27-45).
cgggacacggccttgttaa

SEQ ID NO: 681391 - DNA, 19 bp, Mus musculus
  siRNA target sequence for Pdzk2 (NM_133226.1,29-47).
ggacacggccttgttaact

SEQ ID NO: 681392 - DNA, 19 bp, Mus musculus
  siRNA target sequence for Pdzk2 (NM_133226.1,50-68).
gaagtttaagtttaatcca

SEQ ID NO: 681393 - DNA, 19 bp, Mus musculus
  siRNA target sequence for Pdzk2 (NM_133226.1,67-85).
caaggctgggcattgacaa

SEQ ID NO: 681394 - DNA, 19 bp, Mus musculus
  siRNA target sequence for Pdzk2 (NM_133226.1,137-155).
gcaccggcctcgcttttgt

SEQ ID NO: 681395 - DNA, 19 bp, Mus musculus
  siRNA target sequence for Pdzk2 (NM_133226.1,286-304).
ggatcctagcggtgaacaa

SEQ ID NO: 681396 - DNA, 19 bp, Mus musculus
  siRNA target sequence for Pdzk2 (NM_133226.1,287-305).
gatcctagcggtgaacaat

SEQ ID NO: 681397 - DNA, 19 bp, Mus musculus
  siRNA target sequence for Pdzk2 (NM_133226.1,290-308).
cctagcggtgaacaataat

SEQ ID NO: 681398 - DNA, 19 bp, Mus musculus
  siRNA target sequence for Pdzk2 (NM_133226.1,291-309).
ctagcggtgaacaataata

SEQ ID NO: 681399 - DNA, 19 bp, Mus musculus
  siRNA target sequence for Pdzk2 (NM_133226.1,388-406).
cacaacacgtgcatgatgt

SEQ ID NO: 681400 - DNA, 19 bp, Mus musculus
  siRNA target sequence for Pdzk2 (NM_133226.1,470-488).
ccggttgtgccatgtagta

SEQ ID NO: 681401 - DNA, 19 bp, Mus musculus
  siRNA target sequence for Pdzk2 (NM_133226.1,471-489).
cggttgtgccatgtagtaa

SEQ ID NO: 681402 - DNA, 19 bp, Mus musculus
  siRNA target sequence for Pdzk2 (NM_133226.1,472-490).
ggttgtgccatgtagtaaa

SEQ ID NO: 681403 - DNA, 19 bp, Mus musculus
  siRNA target sequence for Pdzk2 (NM_133226.1,473-491).
gttgtgccatgtagtaaaa

SEQ ID NO: 681404 - DNA, 19 bp, Mus musculus
  siRNA target sequence for Pdzk2 (NM_133226.1,476-494).
gtgccatgtagtaaaagat

SEQ ID NO: 681405 - DNA, 19 bp, Mus musculus
  siRNA target sequence for Pdzk2 (NM_133226.1,479-497).
ccatgtagtaaaagatgaa

SEQ ID NO: 681406 - DNA, 19 bp, Mus musculus
  siRNA target sequence for Pdzk2 (NM_133226.1,781-799).
ccaagccccgatgtctaaa

SEQ ID NO: 681407 - DNA, 19 bp, Mus musculus
  siRNA target sequence for Pdzk2 (NM_133226.1,785-803).
gccccgatgtctaaacata

SEQ ID NO: 681408 - DNA, 19 bp, Mus musculus
  siRNA target sequence for Pdzk2 (NM_133226.1,787-805).
cccgatgtctaaacataga

SEQ ID NO: 681409 - DNA, 19 bp, Mus musculus
  siRNA target sequence for Pdzk2 (NM_133226.1,789-807).
cgatgtctaaacatagaga

SEQ ID NO: 681410 - DNA, 19 bp, Mus musculus
  siRNA target sequence for Pdzk2 (NM_133226.1,790-808).
gatgtctaaacatagagaa

SEQ ID NO: 681411 - DNA, 19 bp, Mus musculus
  siRNA target sequence for Pdzk2 (NM_133226.1,861-879).
cgacttgggcagttcttgt

SEQ ID NO: 681412 - DNA, 19 bp, Mus musculus
  siRNA target sequence for Pdzk2 (NM_133226.1,1304-1322).
gctgcaagtgggagataca

SEQ ID NO: 681413 - DNA, 19 bp, Mus musculus
  siRNA target sequence for Pdzk2 (NM_133226.1,1328-1346).
ggaggtgaacggatatcct

SEQ ID NO: 681414 - DNA, 19 bp, Mus musculus
  siRNA target sequence for Pdzk2 (NM_133226.1,1427-1445).
gaatccgcagggcttagaa

SEQ ID NO: 681415 - DNA, 19 bp, Mus musculus
  siRNA target sequence for Pdzx (NM_018832.1,255-273).
gacagcgctagtacgaaaa

SEQ ID NO: 681416 - DNA, 19 bp, Mus musculus
  siRNA target sequence for Pdzx (NM_018832.1,379-397).
catcgaccccagcatcaaa

SEQ ID NO: 681417 - DNA, 19 bp, Mus musculus
  siRNA target sequence for Pdzx (NM_018832.1,475-493).
caagccactggccgatttt

SEQ ID NO: 681418 - DNA, 19 bp, Mus musculus
  siRNA target sequence for Pdzx (NM_018832.1,507-525).
ccgaggtccggcaggtttt

SEQ ID NO: 681419 - DNA, 19 bp, Mus musculus
  siRNA target sequence for Pdzx (NM_018832.1,631-649).
ggtgacctcgtgctctata

SEQ ID NO: 681420 - DNA, 19 bp, Mus musculus
  siRNA target sequence for Pdzx (NM_018832.1,632-650).
gtgacctcgtgctctatat

SEQ ID NO: 681421 - DNA, 19 bp, Mus musculus
  siRNA target sequence for Pdzx (NM_018832.1,636-654).
cctcgtgctctatatcaat

SEQ ID NO: 681422 - DNA, 19 bp, Mus musculus
  siRNA target sequence for Pdzx (NM_018832.1,720-738).
cctttgcctggtacttcaa

SEQ ID NO: 681423 - DNA, 19 bp, Mus musculus
  siRNA target sequence for Pdzx (NM_018832.1,829-847).
gagtctcgcagcaccattt

SEQ ID NO: 681424 - DNA, 19 bp, Mus musculus
  siRNA target sequence for Plek (NM_019549.1,119-137).
gatcagggagggatacctt

SEQ ID NO: 681425 - DNA, 19 bp, Mus musculus
  siRNA target sequence for Plek (NM_019549.1,124-142).
gggagggataccttgtgaa

SEQ ID NO: 681426 - DNA, 19 bp, Mus musculus
  siRNA target sequence for Plek (NM_019549.1,147-165).
ggaagtgtgtttaatacct

SEQ ID NO: 681427 - DNA, 19 bp, Mus musculus
  siRNA target sequence for Plek (NM_019549.1,172-190).
ccatgtgggttgtactgtt

SEQ ID NO: 681428 - DNA, 19 bp, Mus musculus
  siRNA target sequence for Plek (NM_019549.1,179-197).
ggttgtactgttagaagat

SEQ ID NO: 681429 - DNA, 19 bp, Mus musculus
  siRNA target sequence for Plek (NM_019549.1,248-266).
cccgctgaaaggaagtact

SEQ ID NO: 681430 - DNA, 19 bp, Mus musculus
  siRNA target sequence for Plek (NM_019549.1,271-289).
ctagcccttgtcaagactt

SEQ ID NO: 681431 - DNA, 19 bp, Mus musculus
  siRNA target sequence for Plek (NM_019549.1,297-315).
cggatgttcgtgttaaaaa

SEQ ID NO: 681432 - DNA, 19 bp, Mus musculus
  siRNA target sequence for Plek (NM_019549.1,298-316).
ggatgttcgtgttaaaaat

SEQ ID NO: 681433 - DNA, 19 bp, Mus musculus
  siRNA target sequence for Plek (NM_019549.1,375-393).
gcttgggttcgggatatca

SEQ ID NO: 681434 - DNA, 19 bp, Mus musculus
  siRNA target sequence for Plek (NM_019549.1,380-398).
ggttcgggatatcaagaaa

SEQ ID NO: 681435 - DNA, 19 bp, Mus musculus
  siRNA target sequence for Plek (NM_019549.1,462-480).
ctgccagagacaattgact

SEQ ID NO: 681436 - DNA, 19 bp, Mus musculus
  siRNA target sequence for Plek (NM_019549.1,572-590).
cacaggtagtggtgtcatt

SEQ ID NO: 681437 - DNA, 19 bp, Mus musculus
  siRNA target sequence for Plek (NM_019549.1,591-609).
gactggctggtttctaaca

SEQ ID NO: 681438 - DNA, 19 bp, Mus musculus
  siRNA target sequence for Plek (NM_019549.1,625-643).
gccaggaaggcctcatgat

SEQ ID NO: 681439 - DNA, 19 bp, Mus musculus
  siRNA target sequence for Plek (NM_019549.1,739-757).
gccctgatgctttctacta

SEQ ID NO: 681440 - DNA, 19 bp, Mus musculus
  siRNA target sequence for Plek (NM_019549.1,742-760).
ctgatgctttctactactt

SEQ ID NO: 681441 - DNA, 19 bp, Mus musculus
  siRNA target sequence for Plek (NM_019549.1,785-803).
ggagaactccagtgatgat

SEQ ID NO: 681442 - DNA, 19 bp, Mus musculus
  siRNA target sequence for Plek (NM_019549.1,822-840).
gaattcagaggggttatca

SEQ ID NO: 681443 - DNA, 19 bp, Mus musculus
  siRNA target sequence for Plek (NM_019549.1,1009-1027).
gcagtcacgatgttaagaa

SEQ ID NO: 681444 - DNA, 19 bp, Mus musculus
  siRNA target sequence for Plek (NM_019549.1,1106-1124).
gcgtactgagtggatcaaa

SEQ ID NO: 681445 - DNA, 19 bp, Mus musculus
  siRNA target sequence for Plek2 (NM_013738.1,106-124).
cagaacacgctcctgtatt

SEQ ID NO: 681446 - DNA, 19 bp, Mus musculus
  siRNA target sequence for Plek2 (NM_013738.1,198-216).
cccctgcctggagtatgaa

SEQ ID NO: 681447 - DNA, 19 bp, Mus musculus
  siRNA target sequence for Plek2 (NM_013738.1,223-241).
ccgctcctcattaaactga

SEQ ID NO: 681448 - DNA, 19 bp, Mus musculus
  siRNA target sequence for Plek2 (NM_013738.1,341-359).
cagggaagatccaacaact

SEQ ID NO: 681449 - DNA, 19 bp, Mus musculus
  siRNA target sequence for Plek2 (NM_013738.1,352-370).
caacaactccacatactga

SEQ ID NO: 681450 - DNA, 19 bp, Mus musculus
  siRNA target sequence for Plek2 (NM_013738.1,576-594).
gcttatggaagagaacttt

SEQ ID NO: 681451 - DNA, 19 bp, Mus musculus
  siRNA target sequence for Plek2 (NM_013738.1,612-630).
ccggagcatgggagctatt

SEQ ID NO: 681452 - DNA, 19 bp, Mus musculus
  siRNA target sequence for Plek2 (NM_013738.1,664-682).
gactccacagccctgtata

SEQ ID NO: 681453 - DNA, 19 bp, Mus musculus
  siRNA target sequence for Plek2 (NM_013738.1,733-751).
ctcagcaccatggagttaa

SEQ ID NO: 681454 - DNA, 19 bp, Mus musculus
  siRNA target sequence for Plek2 (NM_013738.1,735-753).
cagcaccatggagttaagt

SEQ ID NO: 681455 - DNA, 19 bp, Mus musculus
  siRNA target sequence for Plek2 (NM_013738.1,752-770).
gtggcacagtggtcaaaca

SEQ ID NO: 681456 - DNA, 19 bp, Mus musculus
  siRNA target sequence for Plek2 (NM_013738.1,763-781).
gtcaaacaaggctacctat

SEQ ID NO: 681457 - DNA, 19 bp, Mus musculus
  siRNA target sequence for Plek2 (NM_013738.1,807-825).
ctggaaggtgcgcagattt

SEQ ID NO: 681458 - DNA, 19 bp, Mus musculus
  siRNA target sequence for Plek2 (NM_013738.1,842-860).
cagctttcctgcactacta

SEQ ID NO: 681459 - DNA, 19 bp, Mus musculus
  siRNA target sequence for Plek2 (NM_013738.1,921-939).
gtctgctctggaggataat

SEQ ID NO: 681460 - DNA, 19 bp, Mus musculus
  siRNA target sequence for Plek2 (NM_013738.1,941-959).
gtgttcctactggagttaa

SEQ ID NO: 681461 - DNA, 19 bp, Mus musculus
  siRNA target sequence for Plek2 (NM_013738.1,979-997).
ctcttcaaagtgattacga

SEQ ID NO: 681462 - DNA, 19 bp, Mus musculus
  siRNA target sequence for Plek2 (NM_013738.1,1000-1018).
gatgacacacactattata

SEQ ID NO: 681463 - DNA, 19 bp, Mus musculus
  siRNA target sequence for Plek2 (NM_013738.1,1041-1059).
gcgagcagaatggattgaa

SEQ ID NO: 681464 - DNA, 19 bp, Mus musculus
  siRNA target sequence for Plek2 (NM_013738.1,1046-1064).
cagaatggattgaagctat

SEQ ID NO: 681465 - DNA, 19 bp, Mus musculus
  siRNA target sequence for Plek2 (NM_013738.1,1060-1078).
gctatcaagaagctaacat

SEQ ID NO: 681466 - DNA, 19 bp, Mus musculus
  siRNA target sequence for Ppp1r9b (NM_172261.1,540-558).
cagcctctgcggaatatga

SEQ ID NO: 681467 - DNA, 19 bp, Mus musculus
  siRNA target sequence for Ppp1r9b (NM_172261.1,549-567).
cggaatatgagctagagaa

SEQ ID NO: 681468 - DNA, 19 bp, Mus musculus
  siRNA target sequence for Ppp1r9b (NM_172261.1,827-845).
ggccgagtgcggttcatga

SEQ ID NO: 681469 - DNA, 19 bp, Mus musculus
  siRNA target sequence for Ppp1r9b (NM_172261.1,828-846).
gccgagtgcggttcatgat

SEQ ID NO: 681470 - DNA, 19 bp, Mus musculus
  siRNA target sequence for Ppp1r9b (NM_172261.1,829-847).
ccgagtgcggttcatgatt

SEQ ID NO: 681471 - DNA, 19 bp, Mus musculus
  siRNA target sequence for Ppp1r9b (NM_172261.1,873-891).
gtgaagtggcccagctaat

SEQ ID NO: 681472 - DNA, 19 bp, Mus musculus
  siRNA target sequence for Ppp1r9b (NM_172261.1,1017-1035).
cgttcccagggggtgaaat

SEQ ID NO: 681473 - DNA, 19 bp, Mus musculus
  siRNA target sequence for Ppp1r9b (NM_172261.1,1206-1224).
ggcgctggcgggtagagaa

SEQ ID NO: 681474 - DNA, 19 bp, Mus musculus
  siRNA target sequence for Ppp1r9b (NM_172261.1,1414-1432).
gatcgagttcctgaaaaaa

SEQ ID NO: 681475 - DNA, 19 bp, Mus musculus
  siRNA target sequence for Ppp1r9b (NM_172261.1,1538-1556).
ctgaggaactccaattcta

SEQ ID NO: 681476 - DNA, 19 bp, Mus musculus
  siRNA target sequence for Ppp1r9b (NM_172261.1,1540-1558).
gaggaactccaattctact

SEQ ID NO: 681477 - DNA, 19 bp, Mus musculus
  siRNA target sequence for Prx (NM_019412.1,324-342).
gcggagttggtggagatta

SEQ ID NO: 681478 - DNA, 19 bp, Mus musculus
  siRNA target sequence for Prx (NM_019412.1,397-415).
gcaaagaaggaatctttgt

SEQ ID NO: 681479 - DNA, 19 bp, Mus musculus
  siRNA target sequence for Prx (NM_198048.1,744-762).
gttgacgtcgagttctctt

SEQ ID NO: 681480 - DNA, 19 bp, Mus musculus
  siRNA target sequence for Prx (NM_198048.1,1046-1064).
caaggggaccccatcaaca

SEQ ID NO: 681481 - DNA, 19 bp, Mus musculus
  siRNA target sequence for Prx (NM_198048.1,1234-1252).
gagctgcagtggtaaaagt

SEQ ID NO: 681482 - DNA, 19 bp, Mus musculus
  siRNA target sequence for Prx (NM_198048.1,2249-2267).
cattcgcctcccagaagtt

SEQ ID NO: 681483 - DNA, 19 bp, Mus musculus
  siRNA target sequence for Prx (NM_198048.1,2275-2293).
ccaaagtgcctgacattaa

SEQ ID NO: 681484 - DNA, 19 bp, Mus musculus
  siRNA target sequence for Prx (NM_198048.1,2601-2619).
gaggttccagacaaactca

SEQ ID NO: 681485 - DNA, 19 bp, Mus musculus
  siRNA target sequence for Prx (NM_198048.1,2823-2841).
ccctctgtggagattgtca

SEQ ID NO: 681486 - DNA, 19 bp, Mus musculus
  siRNA target sequence for Prx (NM_198048.1,2849-2867).
gctgcccacagttgaagtt

SEQ ID NO: 681487 - DNA, 19 bp, Mus musculus
  siRNA target sequence for Prx (NM_198048.1,2888-2906).
ggtggagatgaaagtcaaa

SEQ ID NO: 681488 - DNA, 19 bp, Mus musculus
  siRNA target sequence for Prx (NM_198048.1,2927-2945).
gcccaaattcggactttca

SEQ ID NO: 681489 - DNA, 19 bp, Mus musculus
  siRNA target sequence for Prx (NM_198048.1,3156-3174).
gctgatagcaagcctaaat

SEQ ID NO: 681490 - DNA, 19 bp, Mus musculus
  siRNA target sequence for Prx (NM_198048.1,3159-3177).
gatagcaagcctaaatcgt

SEQ ID NO: 681491 - DNA, 19 bp, Mus musculus
  siRNA target sequence for Prx (NM_198048.1,3167-3185).
gcctaaatcgtccagattt

SEQ ID NO: 681492 - DNA, 19 bp, Mus musculus
  siRNA target sequence for Prx (NM_198048.1,3538-3556).
gggtgtccacactaggtat

SEQ ID NO: 681493 - DNA, 19 bp, Mus musculus
  siRNA target sequence for Prx (NM_198048.1,3542-3560).
gtccacactaggtatctct

SEQ ID NO: 681494 - DNA, 19 bp, Mus musculus
  siRNA target sequence for Prx (NM_198048.1,3544-3562).
ccacactaggtatctcttt

SEQ ID NO: 681495 - DNA, 19 bp, Mus musculus
  siRNA target sequence for Prx (NM_198048.1,3689-3707).
ggcagggggtgatctgtta

SEQ ID NO: 681496 - DNA, 19 bp, Mus musculus
  siRNA target sequence for Prx (NM_198048.1,3691-3709).
cagggggtgatctgttagt

SEQ ID NO: 681497 - DNA, 19 bp, Mus musculus
  siRNA target sequence for Prx (NM_198048.1,3711-3729).
ggtgagggcatcttcaaga

SEQ ID NO: 681498 - DNA, 19 bp, Mus musculus
  siRNA target sequence for Prx (NM_198048.1,3808-3826).
gtgagggtgggataaagtt

SEQ ID NO: 681499 - DNA, 19 bp, Mus musculus
  siRNA target sequence for Prx (NM_198048.1,3810-3828).
gagggtgggataaagttga

SEQ ID NO: 681500 - DNA, 19 bp, Mus musculus
  siRNA target sequence for Prx (NM_198048.1,3813-3831).
ggtgggataaagttgaagt

SEQ ID NO: 681501 - DNA, 19 bp, Mus musculus
  siRNA target sequence for Prx (NM_198048.1,3952-3970).
ctgagtaccaggtagttga

SEQ ID NO: 681502 - DNA, 19 bp, Mus musculus
  siRNA target sequence for Prx (NM_198048.1,3979-3997).
gggatggtgggcacaaact

SEQ ID NO: 681503 - DNA, 19 bp, Mus musculus
  siRNA target sequence for Prx (NM_198048.1,4219-4237).
gcttggcttccccttctaa

SEQ ID NO: 681504 - DNA, 19 bp, Mus musculus
  siRNA target sequence for Prx (NM_198048.1,4220-4238).
cttggcttccccttctaaa

SEQ ID NO: 681505 - DNA, 19 bp, Mus musculus
  siRNA target sequence for Prx (NM_198048.1,4228-4246).
ccccttctaaagtctctaa

SEQ ID NO: 681506 - DNA, 19 bp, Mus musculus
  siRNA target sequence for Prx (NM_198048.1,4385-4403).
gcccagtgtgggattttca

SEQ ID NO: 681507 - DNA, 19 bp, Mus musculus
  siRNA target sequence for Pscdbp (NM_139200.2,40-58).
gcagcaatggcaatttgga

SEQ ID NO: 681508 - DNA, 19 bp, Mus musculus
  siRNA target sequence for Pscdbp (NM_139200.2,116-134).
ggaagacaaccgaaggatt

SEQ ID NO: 681509 - DNA, 19 bp, Mus musculus
  siRNA target sequence for Pscdbp (NM_139200.2,213-231).
gatttttcctggtctcaaa

SEQ ID NO: 681510 - DNA, 19 bp, Mus musculus
  siRNA target sequence for Pscdbp (NM_139200.2,258-276).
gacaatggaacatttggat

SEQ ID NO: 681511 - DNA, 19 bp, Mus musculus
  siRNA target sequence for Pscdbp (NM_139200.2,395-413).
catctttgcaaatgtcaat

SEQ ID NO: 681512 - DNA, 19 bp, Mus musculus
  siRNA target sequence for Pscdbp (NM_139200.2,469-487).
caggaaatctgctaacgat

SEQ ID NO: 681513 - DNA, 19 bp, Mus musculus
  siRNA target sequence for Pscdbp (NM_139200.2,480-498).
ctaacgatagagactctta

SEQ ID NO: 681514 - DNA, 19 bp, Mus musculus
  siRNA target sequence for Pscdbp (NM_139200.2,540-558).
ctgcagactttaaagcaaa

SEQ ID NO: 681515 - DNA, 19 bp, Mus musculus
  siRNA target sequence for Pscdbp (NM_139200.2,631-649).
caaactccccaaatttgga

SEQ ID NO: 681516 - DNA, 19 bp, Mus musculus
  siRNA target sequence for Pscdbp (NM_139200.2,662-680).
cgacgagtcgtccttgttt

SEQ ID NO: 681517 - DNA, 19 bp, Mus musculus
  siRNA target sequence for Pscdbp (NM_139200.2,666-684).
gagtcgtccttgtttggaa

SEQ ID NO: 681518 - DNA, 19 bp, Mus musculus
  siRNA target sequence for Pscdbp (NM_139200.2,668-686).
gtcgtccttgtttggaaat

SEQ ID NO: 681519 - DNA, 19 bp, Mus musculus
  siRNA target sequence for Pscdbp (NM_139200.2,670-688).
cgtccttgtttggaaatct

SEQ ID NO: 681520 - DNA, 19 bp, Mus musculus
  siRNA target sequence for Pscdbp (NM_139200.2,735-753).
gagagcagttgtaagagtt

SEQ ID NO: 681521 - DNA, 19 bp, Mus musculus
  siRNA target sequence for Pscdbp (NM_139200.2,786-804).
ggctaccggagcagtatgt

SEQ ID NO: 681522 - DNA, 19 bp, Mus musculus
  siRNA target sequence for Pscdbp (NM_139200.2,849-867).
gacgatgagtgctttcact

SEQ ID NO: 681523 - DNA, 19 bp, Mus musculus
  siRNA target sequence for Pscdbp (NM_139200.2,920-938).
catcagtgtcactagtagt

SEQ ID NO: 681524 - DNA, 19 bp, Mus musculus
  siRNA target sequence for Pscdbp (NM_139200.2,951-969).
cccttgtgggagagcaatt

SEQ ID NO: 681525 - DNA, 19 bp, Mus musculus
  siRNA target sequence for Pscdbp (NM_139200.2,952-970).
ccttgtgggagagcaatta

SEQ ID NO: 681526 - DNA, 19 bp, Mus musculus
  siRNA target sequence for Psen2 (NM_011183.1,87-105).
gagcggacgtccttgatgt

SEQ ID NO: 681527 - DNA, 19 bp, Mus musculus
  siRNA target sequence for Psen2 (NM_011183.1,322-340).
ctgtcacgctgtgtatgat

SEQ ID NO: 681528 - DNA, 19 bp, Mus musculus
  siRNA target sequence for Psen2 (NM_011183.1,447-465).
ctcaactccgtgcttaaca

SEQ ID NO: 681529 - DNA, 19 bp, Mus musculus
  siRNA target sequence for Psen2 (NM_011183.1,507-525).
ctcgtggtactctacaagt

SEQ ID NO: 681530 - DNA, 19 bp, Mus musculus
  siRNA target sequence for Psen2 (NM_011183.1,509-527).
cgtggtactctacaagtat

SEQ ID NO: 681531 - DNA, 19 bp, Mus musculus
  siRNA target sequence for Psen2 (NM_011183.1,720-738).
ctgcagcaggcttacctta

SEQ ID NO: 681532 - DNA, 19 bp, Mus musculus
  siRNA target sequence for Psen2 (NM_011183.1,722-740).
gcagcaggcttaccttatt

SEQ ID NO: 681533 - DNA, 19 bp, Mus musculus
  siRNA target sequence for Psen2 (NM_011183.1,1303-1321).
cctttggactcatcttcta

SEQ ID NO: 681534 - DNA, 19 bp, Mus musculus
  siRNA target sequence for R75183 (NM_145470.1,393-411).
gattgactggctcattgaa

SEQ ID NO: 681535 - DNA, 19 bp, Mus musculus
  siRNA target sequence for R75183 (NM_145470.1,397-415).
gactggctcattgaacata

SEQ ID NO: 681536 - DNA, 19 bp, Mus musculus
  siRNA target sequence for R75183 (NM_145470.1,401-419).
ggctcattgaacataagga

SEQ ID NO: 681537 - DNA, 19 bp, Mus musculus
  siRNA target sequence for R75183 (NM_145470.1,429-447).
ccgagagacggcgataaaa

SEQ ID NO: 681538 - DNA, 19 bp, Mus musculus
  siRNA target sequence for R75183 (NM_145470.1,433-451).
gagacggcgataaaactca

SEQ ID NO: 681539 - DNA, 19 bp, Mus musculus
  siRNA target sequence for R75183 (NM_145470.1,599-617).
ggctctatgaaaaactgat

SEQ ID NO: 681540 - DNA, 19 bp, Mus musculus
  siRNA target sequence for R75183 (NM_145470.1,943-961).
cacgacagtcggaaatcta

SEQ ID NO: 681541 - DNA, 19 bp, Mus musculus
  siRNA target sequence for R75183 (NM_145470.1,952-970).
cggaaatctaccagcttta

SEQ ID NO: 681542 - DNA, 19 bp, Mus musculus
  siRNA target sequence for R75183 (NM_145470.1,953-971).
ggaaatctaccagctttat

SEQ ID NO: 681543 - DNA, 19 bp, Mus musculus
  siRNA target sequence for R75183 (NM_145470.1,1159-1177).
ccgtacgcaaggaagacat

SEQ ID NO: 681544 - DNA, 19 bp, Mus musculus
  siRNA target sequence for R75183 (NM_145470.1,1160-1178).
cgtacgcaaggaagacatt

SEQ ID NO: 681545 - DNA, 19 bp, Mus musculus
  siRNA target sequence for R75183 (NM_145470.1,1170-1188).
gaagacattcacgattgtt

SEQ ID NO: 681546 - DNA, 19 bp, Mus musculus
  siRNA target sequence for Racgap1 (NM_012025.3,375-393).
ccgaaagaagtatcaaaga

SEQ ID NO: 681547 - DNA, 19 bp, Mus musculus
  siRNA target sequence for Racgap1 (NM_012025.3,376-394).
cgaaagaagtatcaaagaa

SEQ ID NO: 681548 - DNA, 19 bp, Mus musculus
  siRNA target sequence for Racgap1 (NM_012025.3,471-489).
gaagcatgcccgtaatcaa

SEQ ID NO: 681549 - DNA, 19 bp, Mus musculus
  siRNA target sequence for Racgap1 (NM_012025.3,603-621).
gctgagcgaggaacaaaaa

SEQ ID NO: 681550 - DNA, 19 bp, Mus musculus
  siRNA target sequence for Racgap1 (NM_012025.3,604-622).
ctgagcgaggaacaaaaat

SEQ ID NO: 681551 - DNA, 19 bp, Mus musculus
  siRNA target sequence for Racgap1 (NM_012025.3,680-698).
gactgtcaacgattgatga

SEQ ID NO: 681552 - DNA, 19 bp, Mus musculus
  siRNA target sequence for Racgap1 (NM_012025.3,682-700).
ctgtcaacgattgatgaat

SEQ ID NO: 681553 - DNA, 19 bp, Mus musculus
  siRNA target sequence for Racgap1 (NM_012025.3,684-702).
gtcaacgattgatgaatct

SEQ ID NO: 681554 - DNA, 19 bp, Mus musculus
  siRNA target sequence for Racgap1 (NM_012025.3,701-719).
ctggttccattttatcaga

SEQ ID NO: 681555 - DNA, 19 bp, Mus musculus
  siRNA target sequence for Racgap1 (NM_012025.3,809-827).
ccaacagtagacagttcat

SEQ ID NO: 681556 - DNA, 19 bp, Mus musculus
  siRNA target sequence for Racgap1 (NM_012025.3,882-900).
ccaggcaaatgaatcaata

SEQ ID NO: 681557 - DNA, 19 bp, Mus musculus
  siRNA target sequence for Racgap1 (NM_012025.3,1047-1065).
gccactggagccaagaact

SEQ ID NO: 681558 - DNA, 19 bp, Mus musculus
  siRNA target sequence for Racgap1 (NM_012025.3,1122-1140).
cgtctcaaagacggttatt

SEQ ID NO: 681559 - DNA, 19 bp, Mus musculus
  siRNA target sequence for Racgap1 (NM_012025.3,1123-1141).
gtctcaaagacggttatta

SEQ ID NO: 681560 - DNA, 19 bp, Mus musculus
  siRNA target sequence for Racgap1 (NM_012025.3,1135-1153).
gttattaagcctgaatctt

SEQ ID NO: 681561 - DNA, 19 bp, Mus musculus
  siRNA target sequence for Racgap1 (NM_012025.3,1273-1291).
gtggggacaccggttaaga

SEQ ID NO: 681562 - DNA, 19 bp, Mus musculus
  siRNA target sequence for Racgap1 (NM_012025.3,1275-1293).
ggggacaccggttaagatt

SEQ ID NO: 681563 - DNA, 19 bp, Mus musculus
  siRNA target sequence for Racgap1 (NM_012025.3,1354-1372).
gtcagctgtgtcaatgaga

SEQ ID NO: 681564 - DNA, 19 bp, Mus musculus
  siRNA target sequence for Rasa1 (NM_145452.1,66-84).
cagtcacgtttcttgttta

SEQ ID NO: 681565 - DNA, 19 bp, Mus musculus
  siRNA target sequence for Rasa1 (NM_145452.1,70-88).
cacgtttcttgtttactta

SEQ ID NO: 681566 - DNA, 19 bp, Mus musculus
  siRNA target sequence for Rasa1 (NM_145452.1,175-193).
gtaccagacactgatgaaa

SEQ ID NO: 681567 - DNA, 19 bp, Mus musculus
  siRNA target sequence for Rasa1 (NM_145452.1,219-237).
cattgttcacaatgagtta

SEQ ID NO: 681568 - DNA, 19 bp, Mus musculus
  siRNA target sequence for Rasa1 (NM_145452.1,249-267).
gatgtgggttaccaatcta

SEQ ID NO: 681569 - DNA, 19 bp, Mus musculus
  siRNA target sequence for Rasa1 (NM_145452.1,252-270).
gtgggttaccaatctaaga

SEQ ID NO: 681570 - DNA, 19 bp, Mus musculus
  siRNA target sequence for Rasa1 (NM_145452.1,279-297).
gcaaggccttattgttgaa

SEQ ID NO: 681571 - DNA, 19 bp, Mus musculus
  siRNA target sequence for Rasa1 (NM_145452.1,331-349).
ccacacgaaggcaaaatat

SEQ ID NO: 681572 - DNA, 19 bp, Mus musculus
  siRNA target sequence for Rasa1 (NM_145452.1,334-352).
cacgaaggcaaaatatggt

SEQ ID NO: 681573 - DNA, 19 bp, Mus musculus
  siRNA target sequence for Rasa1 (NM_145452.1,357-375).
cgggaaaatttccaaacaa

SEQ ID NO: 681574 - DNA, 19 bp, Mus musculus
  siRNA target sequence for Rasa1 (NM_145452.1,421-439).
cttgtgaggccctcagata

SEQ ID NO: 681575 - DNA, 19 bp, Mus musculus
  siRNA target sequence for Rasa1 (NM_145452.1,424-442).
gtgaggccctcagataata

SEQ ID NO: 681576 - DNA, 19 bp, Mus musculus
  siRNA target sequence for Rasa1 (NM_145452.1,426-444).
gaggccctcagataatact

SEQ ID NO: 681577 - DNA, 19 bp, Mus musculus
  siRNA target sequence for Rasa1 (NM_145452.1,478-496).
gaaaatattcagcgattta

SEQ ID NO: 681578 - DNA, 19 bp, Mus musculus
  siRNA target sequence for Rasa1 (NM_145452.1,511-529).
cctaacaaccagtttatga

SEQ ID NO: 681579 - DNA, 19 bp, Mus musculus
  siRNA target sequence for Rasa1 (NM_145452.1,512-530).
ctaacaaccagtttatgat

SEQ ID NO: 681580 - DNA, 19 bp, Mus musculus
  siRNA target sequence for Rasa1 (NM_145452.1,528-546).
gatgggaggccgctattat

SEQ ID NO: 681581 - DNA, 19 bp, Mus musculus
  siRNA target sequence for Rasa1 (NM_145452.1,536-554).
gccgctattataacagtat

SEQ ID NO: 681582 - DNA, 19 bp, Mus musculus
  siRNA target sequence for Rasa1 (NM_145452.1,551-569).
gtatcggggacatcataga

SEQ ID NO: 681583 - DNA, 19 bp, Mus musculus
  siRNA target sequence for Rasa1 (NM_145452.1,557-575).
gggacatcatagaccatta

SEQ ID NO: 681584 - DNA, 19 bp, Mus musculus
  siRNA target sequence for Rasa1 (NM_145452.1,664-682).
gggaaggagatctataaca

SEQ ID NO: 681585 - DNA, 19 bp, Mus musculus
  siRNA target sequence for Rasa1 (NM_145452.1,672-690).
gatctataacacaattcgt

SEQ ID NO: 681586 - DNA, 19 bp, Mus musculus
  siRNA target sequence for Rasa1 (NM_145452.1,757-775).
ggaaaacgttggaaaaatt

SEQ ID NO: 681587 - DNA, 19 bp, Mus musculus
  siRNA target sequence for Rasa1 (NM_145452.1,758-776).
gaaaacgttggaaaaattt

SEQ ID NO: 681588 - DNA, 19 bp, Mus musculus
  siRNA target sequence for Rasa1 (NM_145452.1,797-815).
gtgatgctcaacttattta

SEQ ID NO: 681589 - DNA, 19 bp, Mus musculus
  siRNA target sequence for Rasa1 (NM_145452.1,851-869).
ggctaatagaccttagtgt

SEQ ID NO: 681590 - DNA, 19 bp, Mus musculus
  siRNA target sequence for Rasa1 (NM_145452.1,903-921).
cggcaggccaaactgtttt

SEQ ID NO: 681591 - DNA, 19 bp, Mus musculus
  siRNA target sequence for Rasa1 (NM_145452.1,905-923).
gcaggccaaactgttttca

SEQ ID NO: 681592 - DNA, 19 bp, Mus musculus
  siRNA target sequence for Rasa1 (NM_145452.1,911-929).
caaactgttttcagatagt

SEQ ID NO: 681593 - DNA, 19 bp, Mus musculus
  siRNA target sequence for Rasa1 (NM_145452.1,946-964).
gaagaacattacatctttt

SEQ ID NO: 681594 - DNA, 19 bp, Mus musculus
  siRNA target sequence for Rasa1 (NM_145452.1,1040-1058).
gtagcccagggacatctaa

SEQ ID NO: 681595 - DNA, 19 bp, Mus musculus
  siRNA target sequence for Rasa1 (NM_145452.1,1106-1124).
cccataaactaccagtaaa

SEQ ID NO: 681596 - DNA, 19 bp, Mus musculus
  siRNA target sequence for Rasa1 (NM_145452.1,1107-1125).
ccataaactaccagtaaaa

SEQ ID NO: 681597 - DNA, 19 bp, Mus musculus
  siRNA target sequence for Rasa1 (NM_145452.1,1118-1136).
cagtaaaacactttactaa

SEQ ID NO: 681598 - DNA, 19 bp, Mus musculus
  siRNA target sequence for Rasa1 (NM_145452.1,1126-1144).
cactttactaatccatatt

SEQ ID NO: 681599 - DNA, 19 bp, Mus musculus
  siRNA target sequence for Rasa1 (NM_145452.1,1128-1146).
ctttactaatccatattgt

SEQ ID NO: 681600 - DNA, 19 bp, Mus musculus
  siRNA target sequence for Rasa1 (NM_145452.1,1164-1182).
cgtccaagtagcaaaaact

SEQ ID NO: 681601 - DNA, 19 bp, Mus musculus
  siRNA target sequence for Rasa1 (NM_145452.1,1167-1185).
ccaagtagcaaaaactcat

SEQ ID NO: 681602 - DNA, 19 bp, Mus musculus
  siRNA target sequence for Rasa1 (NM_145452.1,1218-1236).
ggagtttgtctttgatgat

SEQ ID NO: 681603 - DNA, 19 bp, Mus musculus
  siRNA target sequence for Rasa1 (NM_145452.1,1240-1258).
cctcctgacatcaatagat

SEQ ID NO: 681604 - DNA, 19 bp, Mus musculus
  siRNA target sequence for Rasa1 (NM_145452.1,1261-1279).
gaaatcacacttagtaata

SEQ ID NO: 681605 - DNA, 19 bp, Mus musculus
  siRNA target sequence for Rasa1 (NM_145452.1,1357-1375).
gatgaatggtttctactaa

SEQ ID NO: 681606 - DNA, 19 bp, Mus musculus
  siRNA target sequence for Rasa1 (NM_145452.1,1376-1394).
gttcccatataccactaaa

SEQ ID NO: 681607 - DNA, 19 bp, Mus musculus
  siRNA target sequence for Rasa1 (NM_145452.1,1380-1398).
ccatataccactaaaaggt

SEQ ID NO: 681608 - DNA, 19 bp, Mus musculus
  siRNA target sequence for Rasa1 (NM_145452.1,1426-1444).
gcacgatactccatggaaa

SEQ ID NO: 681609 - DNA, 19 bp, Mus musculus
  siRNA target sequence for Rasa1 (NM_145452.1,1427-1445).
cacgatactccatggaaaa

SEQ ID NO: 681610 - DNA, 19 bp, Mus musculus
  siRNA target sequence for Rasa1 (NM_145452.1,1504-1522).
catgtcgtctatgctttat

SEQ ID NO: 681611 - DNA, 19 bp, Mus musculus
  siRNA target sequence for Rasa1 (NM_145452.1,1509-1527).
cgtctatgctttatcacat

SEQ ID NO: 681612 - DNA, 19 bp, Mus musculus
  siRNA target sequence for Rasa1 (NM_145452.1,1629-1647).
gataagtatggaagatgaa

SEQ ID NO: 681613 - DNA, 19 bp, Mus musculus
  siRNA target sequence for Rasa1 (NM_145452.1,1656-1674).
cctatttcgagctacaaca

SEQ ID NO: 681614 - DNA, 19 bp, Mus musculus
  siRNA target sequence for Rasa1 (NM_145452.1,1685-1703).
ccttgatggagcagtatat

SEQ ID NO: 681615 - DNA, 19 bp, Mus musculus
  siRNA target sequence for Rasa1 (NM_145452.1,1716-1734).
cacacagtttgttcatcat

SEQ ID NO: 681616 - DNA, 19 bp, Mus musculus
  siRNA target sequence for Rasa1 (NM_145452.1,1744-1762).
gactccattttaaagatta

SEQ ID NO: 681617 - DNA, 19 bp, Mus musculus
  siRNA target sequence for Rasa1 (NM_145452.1,1783-1801).
gagttaagtccgtcaaagt

SEQ ID NO: 681618 - DNA, 19 bp, Mus musculus
  siRNA target sequence for Rasa1 (NM_145452.1,1785-1803).
gttaagtccgtcaaagtta

SEQ ID NO: 681619 - DNA, 19 bp, Mus musculus
  siRNA target sequence for Rasa1 (NM_145452.1,1790-1808).
gtccgtcaaagttagaaaa

SEQ ID NO: 681620 - DNA, 19 bp, Mus musculus
  siRNA target sequence for Rasa1 (NM_145452.1,1813-1831).
gaagatgtgaacactaatt

SEQ ID NO: 681621 - DNA, 19 bp, Mus musculus
  siRNA target sequence for Rasa1 (NM_145452.1,1826-1844).
ctaatttagcacacctatt

SEQ ID NO: 681622 - DNA, 19 bp, Mus musculus
  siRNA target sequence for Rasa1 (NM_145452.1,1861-1879).
cttgtggagaaaatattca

SEQ ID NO: 681623 - DNA, 19 bp, Mus musculus
  siRNA target sequence for Rasa1 (NM_145452.1,1878-1896).
catggcttcagaaatactt

SEQ ID NO: 681624 - DNA, 19 bp, Mus musculus
  siRNA target sequence for Rasa1 (NM_145452.1,1897-1915).
ccaccgacactgagatata

SEQ ID NO: 681625 - DNA, 19 bp, Mus musculus
  siRNA target sequence for Rasa1 (NM_145452.1,1898-1916).
caccgacactgagatatat

SEQ ID NO: 681626 - DNA, 19 bp, Mus musculus
  siRNA target sequence for Rasa1 (NM_145452.1,1900-1918).
ccgacactgagatatatct

SEQ ID NO: 681627 - DNA, 19 bp, Mus musculus
  siRNA target sequence for Rasa1 (NM_145452.1,1901-1919).
cgacactgagatatatcta

SEQ ID NO: 681628 - DNA, 19 bp, Mus musculus
  siRNA target sequence for Rasa1 (NM_145452.1,1902-1920).
gacactgagatatatctat

SEQ ID NO: 681629 - DNA, 19 bp, Mus musculus
  siRNA target sequence for Rasa1 (NM_145452.1,1945-1963).
cataagtggcctacaaata

SEQ ID NO: 681630 - DNA, 19 bp, Mus musculus
  siRNA target sequence for Rasa1 (NM_145452.1,1979-1997).
gagtcgttagtggttttgt

SEQ ID NO: 681631 - DNA, 19 bp, Mus musculus
  siRNA target sequence for Rasa1 (NM_145452.1,2026-2044).
ctgaatccacggatgttta

SEQ ID NO: 681632 - DNA, 19 bp, Mus musculus
  siRNA target sequence for Rasa1 (NM_145452.1,2028-2046).
gaatccacggatgtttaat

SEQ ID NO: 681633 - DNA, 19 bp, Mus musculus
  siRNA target sequence for Rasa1 (NM_145452.1,2032-2050).
ccacggatgtttaatatca

SEQ ID NO: 681634 - DNA, 19 bp, Mus musculus
  siRNA target sequence for Rasa1 (NM_145452.1,2033-2051).
cacggatgtttaatatcat

SEQ ID NO: 681635 - DNA, 19 bp, Mus musculus
  siRNA target sequence for Rasa1 (NM_145452.1,2035-2053).
cggatgtttaatatcatct

SEQ ID NO: 681636 - DNA, 19 bp, Mus musculus
  siRNA target sequence for Rasa1 (NM_145452.1,2088-2106).
gacattagtggctaaatct

SEQ ID NO: 681637 - DNA, 19 bp, Mus musculus
  siRNA target sequence for Rasa1 (NM_145452.1,2137-2155).
ggagctaaggagccttata

SEQ ID NO: 681638 - DNA, 19 bp, Mus musculus
  siRNA target sequence for Rasa1 (NM_145452.1,2138-2156).
gagctaaggagccttatat

SEQ ID NO: 681639 - DNA, 19 bp, Mus musculus
  siRNA target sequence for Rasa1 (NM_145452.1,2141-2159).
ctaaggagccttatatgga

SEQ ID NO: 681640 - DNA, 19 bp, Mus musculus
  siRNA target sequence for Rasa1 (NM_145452.1,2157-2175).
ggaaggtgtcaatccattt

SEQ ID NO: 681641 - DNA, 19 bp, Mus musculus
  siRNA target sequence for Rasa1 (NM_145452.1,2158-2176).
gaaggtgtcaatccattta

SEQ ID NO: 681642 - DNA, 19 bp, Mus musculus
  siRNA target sequence for Rasa1 (NM_145452.1,2191-2209).
catcgcatgatcatgtttt

SEQ ID NO: 681643 - DNA, 19 bp, Mus musculus
  siRNA target sequence for Rasa1 (NM_145452.1,2298-2316).
gatttgtgtagctcattca

SEQ ID NO: 681644 - DNA, 19 bp, Mus musculus
  siRNA target sequence for Rgnef (NM_012026.1,118-136).
gcagtgaagtgcctcttta

SEQ ID NO: 681645 - DNA, 19 bp, Mus musculus
  siRNA target sequence for Rgnef (NM_012026.1,119-137).
cagtgaagtgcctctttat

SEQ ID NO: 681646 - DNA, 19 bp, Mus musculus
  siRNA target sequence for Rgnef (NM_012026.1,146-164).
gacggtctatgcaaagttt

SEQ ID NO: 681647 - DNA, 19 bp, Mus musculus
  siRNA target sequence for Rgnef (NM_012026.1,183-201).
cccgaagatgcggagtttt

SEQ ID NO: 681648 - DNA, 19 bp, Mus musculus
  siRNA target sequence for Rgnef (NM_012026.1,184-202).
ccgaagatgcggagtttta

SEQ ID NO: 681649 - DNA, 19 bp, Mus musculus
  siRNA target sequence for Rgnef (NM_012026.1,186-204).
gaagatgcggagttttact

SEQ ID NO: 681650 - DNA, 19 bp, Mus musculus
  siRNA target sequence for Rgnef (NM_012026.1,560-578).
gggaaattcctcacttgaa

SEQ ID NO: 681651 - DNA, 19 bp, Mus musculus
  siRNA target sequence for Rgnef (NM_012026.1,562-580).
gaaattcctcacttgaagt

SEQ ID NO: 681652 - DNA, 19 bp, Mus musculus
  siRNA target sequence for Rgnef (NM_012026.1,674-692).
ggccttgaagctacctaat

SEQ ID NO: 681653 - DNA, 19 bp, Mus musculus
  siRNA target sequence for Rgnef (NM_012026.1,699-717).
gccaccacaccattagact

SEQ ID NO: 681654 - DNA, 19 bp, Mus musculus
  siRNA target sequence for Rgnef (NM_012026.1,700-718).
ccaccacaccattagactt

SEQ ID NO: 681655 - DNA, 19 bp, Mus musculus
  siRNA target sequence for Rgnef (NM_012026.1,701-719).
caccacaccattagactta

SEQ ID NO: 681656 - DNA, 19 bp, Mus musculus
  siRNA target sequence for Rgnef (NM_012026.1,793-811).
cccgactgcgtcttaacga

SEQ ID NO: 681657 - DNA, 19 bp, Mus musculus
  siRNA target sequence for Rgnef (NM_012026.1,794-812).
ccgactgcgtcttaacgaa

SEQ ID NO: 681658 - DNA, 19 bp, Mus musculus
  siRNA target sequence for Rgnef (NM_012026.1,834-852).
cattcatcggaaacattga

SEQ ID NO: 681659 - DNA, 19 bp, Mus musculus
  siRNA target sequence for Rgnef (NM_012026.1,899-917).
caaactcttccggaaatat

SEQ ID NO: 681660 - DNA, 19 bp, Mus musculus
  siRNA target sequence for Rgnef (NM_012026.1,1136-1154).
ctttgatggcctcaaaaaa

SEQ ID NO: 681661 - DNA, 19 bp, Mus musculus
  siRNA target sequence for Rgnef (NM_012026.1,1218-1236).
gaagtctacgctaactgta

SEQ ID NO: 681662 - DNA, 19 bp, Mus musculus
  siRNA target sequence for Rgnef (NM_012026.1,1247-1265).
ccaggttggcgatttggat

SEQ ID NO: 681663 - DNA, 19 bp, Mus musculus
  siRNA target sequence for Rgnef (NM_012026.1,1248-1266).
caggttggcgatttggata

SEQ ID NO: 681664 - DNA, 19 bp, Mus musculus
  siRNA target sequence for Rgnef (NM_012026.1,1251-1269).
gttggcgatttggatatca

SEQ ID NO: 681665 - DNA, 19 bp, Mus musculus
  siRNA target sequence for Rgnef (NM_012026.1,1254-1272).
ggcgatttggatatcaact

SEQ ID NO: 681666 - DNA, 19 bp, Mus musculus
  siRNA target sequence for Rgnef (NM_012026.1,1255-1273).
gcgatttggatatcaacta

SEQ ID NO: 681667 - DNA, 19 bp, Mus musculus
  siRNA target sequence for Rgnef (NM_012026.1,1256-1274).
cgatttggatatcaactat

SEQ ID NO: 681668 - DNA, 19 bp, Mus musculus
  siRNA target sequence for Rgnef (NM_012026.1,1257-1275).
gatttggatatcaactata

SEQ ID NO: 681669 - DNA, 19 bp, Mus musculus
  siRNA target sequence for Rgnef (NM_012026.1,1420-1438).
ctgcagcttcgcagtcttt

SEQ ID NO: 681670 - DNA, 19 bp, Mus musculus
  siRNA target sequence for Rgnef (NM_012026.1,1485-1503).
ggtctccatggatttgaaa

SEQ ID NO: 681671 - DNA, 19 bp, Mus musculus
  siRNA target sequence for Rgnef (NM_012026.1,1670-1688).
cactgaaccagactgtaat

SEQ ID NO: 681672 - DNA, 19 bp, Mus musculus
  siRNA target sequence for Rgnef (NM_012026.1,1717-1735).
ccagtactctgcattcaaa

SEQ ID NO: 681673 - DNA, 19 bp, Mus musculus
  siRNA target sequence for Rgnef (NM_012026.1,1843-1861).
gcgaagaacagagatcata

SEQ ID NO: 681674 - DNA, 19 bp, Mus musculus
  siRNA target sequence for Rgnef (NM_012026.1,1844-1862).
cgaagaacagagatcatat

SEQ ID NO: 681675 - DNA, 19 bp, Mus musculus
  siRNA target sequence for Rgnef (NM_012026.1,1930-1948).
ccaaatccgagtctgaaaa

SEQ ID NO: 681676 - DNA, 19 bp, Mus musculus
  siRNA target sequence for Rgnef (NM_012026.1,1936-1954).
ccgagtctgaaaagtacaa

SEQ ID NO: 681677 - DNA, 19 bp, Mus musculus
  siRNA target sequence for Rgnef (NM_012026.1,1937-1955).
cgagtctgaaaagtacaaa

SEQ ID NO: 681678 - DNA, 19 bp, Mus musculus
  siRNA target sequence for Rgnef (NM_012026.1,1966-1984).
ctttcagcttcctcatgaa

SEQ ID NO: 681679 - DNA, 19 bp, Mus musculus
  siRNA target sequence for Rgnef (NM_012026.1,1991-2009).
gaccagcccacggaacaaa

SEQ ID NO: 681680 - DNA, 19 bp, Mus musculus
  siRNA target sequence for Rgnef (NM_012026.1,1996-2014).
gcccacggaacaaatctaa

SEQ ID NO: 681681 - DNA, 19 bp, Mus musculus
  siRNA target sequence for Rgnef (NM_012026.1,1998-2016).
ccacggaacaaatctaaga

SEQ ID NO: 681682 - DNA, 19 bp, Mus musculus
  siRNA target sequence for Rgnef (NM_012026.1,1999-2017).
cacggaacaaatctaagat

SEQ ID NO: 681683 - DNA, 19 bp, Mus musculus
  siRNA target sequence for Rgnef (NM_012026.1,2001-2019).
cggaacaaatctaagatga

SEQ ID NO: 681684 - DNA, 19 bp, Mus musculus
  siRNA target sequence for Rgnef (NM_012026.1,2002-2020).
ggaacaaatctaagatgaa

SEQ ID NO: 681685 - DNA, 19 bp, Mus musculus
  siRNA target sequence for Rgnef (NM_012026.1,2093-2111).
gcagtgctccggttgtgat

SEQ ID NO: 681686 - DNA, 19 bp, Mus musculus
  siRNA target sequence for Rgnef (NM_012026.1,2094-2112).
cagtgctccggttgtgata

SEQ ID NO: 681687 - DNA, 19 bp, Mus musculus
  siRNA target sequence for Rgnef (NM_012026.1,2096-2114).
gtgctccggttgtgataaa

SEQ ID NO: 681688 - DNA, 19 bp, Mus musculus
  siRNA target sequence for Rgnef (NM_012026.1,2099-2117).
ctccggttgtgataaaaca

SEQ ID NO: 681689 - DNA, 19 bp, Mus musculus
  siRNA target sequence for Rgnef (NM_012026.1,2189-2207).
gcctccgtgtaccaagaaa

SEQ ID NO: 681690 - DNA, 19 bp, Mus musculus
  siRNA target sequence for Rgnef (NM_012026.1,2405-2423).
gagggcagtgacatcgtta

SEQ ID NO: 681691 - DNA, 19 bp, Mus musculus
  siRNA target sequence for Rgnef (NM_012026.1,2409-2427).
gcagtgacatcgttagagt

SEQ ID NO: 681692 - DNA, 19 bp, Mus musculus
  siRNA target sequence for Rgnef (NM_012026.1,2491-2509).
ctccttccacggagtcatt

SEQ ID NO: 681693 - DNA, 19 bp, Mus musculus
  siRNA target sequence for Rgnef (NM_012026.1,2594-2612).
cgtggtggacccttccttt

SEQ ID NO: 681694 - DNA, 19 bp, Mus musculus
  siRNA target sequence for Rgnef (NM_012026.1,2595-2613).
gtggtggacccttcctttt

SEQ ID NO: 681695 - DNA, 19 bp, Mus musculus
  siRNA target sequence for Rgnef (NM_012026.1,2630-2648).
ggatgtcatcaaaagacaa

SEQ ID NO: 681696 - DNA, 19 bp, Mus musculus
  siRNA target sequence for Rgnef (NM_012026.1,2758-2776).
gcacggtggacaagatctt

SEQ ID NO: 681697 - DNA, 19 bp, Mus musculus
  siRNA target sequence for Rgnef (NM_012026.1,2771-2789).
gatcttcccctgcttagat

SEQ ID NO: 681698 - DNA, 19 bp, Mus musculus
  siRNA target sequence for Rgnef (NM_012026.1,2803-2821).
ctcaccggcacttcttctt

SEQ ID NO: 681699 - DNA, 19 bp, Mus musculus
  siRNA target sequence for Rgnef (NM_012026.1,3090-3108).
gttacccagcgcatcacaa

SEQ ID NO: 681700 - DNA, 19 bp, Mus musculus
  siRNA target sequence for Rgnef (NM_012026.1,3094-3112).
cccagcgcatcacaaagta

SEQ ID NO: 681701 - DNA, 19 bp, Mus musculus
  siRNA target sequence for Rgnef (NM_012026.1,3178-3196).
gcaaagctctcggcttaat

SEQ ID NO: 681702 - DNA, 19 bp, Mus musculus
  siRNA target sequence for Rgnef (NM_012026.1,3179-3197).
caaagctctcggcttaatt

SEQ ID NO: 681703 - DNA, 19 bp, Mus musculus
  siRNA target sequence for Rgnef (NM_012026.1,3184-3202).
ctctcggcttaattaaaga

SEQ ID NO: 681704 - DNA, 19 bp, Mus musculus
  siRNA target sequence for Rgnef (NM_012026.1,3186-3204).
ctcggcttaattaaagaca

SEQ ID NO: 681705 - DNA, 19 bp, Mus musculus
  siRNA target sequence for Rgnef (NM_012026.1,3256-3274).
ggctcgagatcctaaataa

SEQ ID NO: 681706 - DNA, 19 bp, Mus musculus
  siRNA target sequence for Rgnef (NM_012026.1,3386-3404).
cgctacgggtcgcttcaaa

SEQ ID NO: 681707 - DNA, 19 bp, Mus musculus
  siRNA target sequence for Rgnef (NM_012026.1,3431-3449).
cgtgctgctcttcttacaa

SEQ ID NO: 681708 - DNA, 19 bp, Mus musculus
  siRNA target sequence for Rgnef (NM_012026.1,3507-3525).
ctccagaagctgattgcta

SEQ ID NO: 681709 - DNA, 19 bp, Mus musculus
  siRNA target sequence for Rgnef (NM_012026.1,3512-3530).
gaagctgattgctagagaa

SEQ ID NO: 681710 - DNA, 19 bp, Mus musculus
  siRNA target sequence for Rgnef (NM_012026.1,3543-3561).
gagagaggcatgtttctga

SEQ ID NO: 681711 - DNA, 19 bp, Mus musculus
  siRNA target sequence for Rgnef (NM_012026.1,3583-3601).
ccgagatgtacgaaatcca

SEQ ID NO: 681712 - DNA, 19 bp, Mus musculus
  siRNA target sequence for Rgnef (NM_012026.1,3644-3662).
ccagcaggcagtagaaagt

SEQ ID NO: 681713 - DNA, 19 bp, Mus musculus
  siRNA target sequence for Rgnef (NM_012026.1,3688-3706).
cgagcgagtcggatgaaga

SEQ ID NO: 681714 - DNA, 19 bp, Mus musculus
  siRNA target sequence for Rgnef (NM_012026.1,3806-3824).
gcatatctacgctgaactt

SEQ ID NO: 681715 - DNA, 19 bp, Mus musculus
  siRNA target sequence for Rgnef (NM_012026.1,4059-4077).
ccaactgcttcattagtca

SEQ ID NO: 681716 - DNA, 19 bp, Mus musculus
  siRNA target sequence for Rgnef (NM_012026.1,4163-4181).
ggagaaggtggaatataga

SEQ ID NO: 681717 - DNA, 19 bp, Mus musculus
  siRNA target sequence for Rgnef (NM_012026.1,4204-4222).
cagagattatacaagcaat

SEQ ID NO: 681718 - DNA, 19 bp, Mus musculus
  siRNA target sequence for Rgnef (NM_012026.1,4733-4751).
gagcaaggaggtaacagaa

SEQ ID NO: 681719 - DNA, 19 bp, Mus musculus
  siRNA target sequence for Rgnef (NM_012026.1,4757-4775).
ccgagctgagagtttgtgt

SEQ ID NO: 681720 - DNA, 19 bp, Mus musculus
  siRNA target sequence for Rgnef (NM_012026.1,4874-4892).
cctggaggggtctcatttt

SEQ ID NO: 681721 - DNA, 19 bp, Mus musculus
  siRNA target sequence for Rgnef (NM_012026.1,4877-4895).
ggaggggtctcattttgat

SEQ ID NO: 681722 - DNA, 19 bp, Mus musculus
  siRNA target sequence for Rgnef (NM_012026.1,5015-5033).
cagcaaggagtcttataaa

SEQ ID NO: 681723 - DNA, 19 bp, Mus musculus
  siRNA target sequence for Rgnef (NM_012026.1,5123-5141).
cagaagcaaaactaagtct

SEQ ID NO: 681724 - DNA, 19 bp, Mus musculus
  siRNA target sequence for Rgs19ip3 (NM_148951.1,131-149).
ccaatgtccgcgagcttta

SEQ ID NO: 681725 - DNA, 19 bp, Mus musculus
  siRNA target sequence for Rgs19ip3 (NM_148951.1,179-197).
ctcctaccgagatcctatt

SEQ ID NO: 681726 - DNA, 19 bp, Mus musculus
  siRNA target sequence for Rgs19ip3 (NM_148951.1,181-199).
cctaccgagatcctattct

SEQ ID NO: 681727 - DNA, 19 bp, Mus musculus
  siRNA target sequence for Rgs19ip3 (NM_148951.1,440-458).
ccatcaatgaccactctat

SEQ ID NO: 681728 - DNA, 19 bp, Mus musculus
  siRNA target sequence for Rgs19ip3 (NM_148951.1,441-459).
catcaatgaccactctatt

SEQ ID NO: 681729 - DNA, 19 bp, Mus musculus
  siRNA target sequence for Rgs19ip3 (NM_148951.1,472-490).
cactacgaggtggctaaaa

SEQ ID NO: 681730 - DNA, 19 bp, Mus musculus
  siRNA target sequence for Rgs19ip3 (NM_148951.1,544-562).
cggagagcttttgatatga

SEQ ID NO: 681731 - DNA, 19 bp, Mus musculus
  siRNA target sequence for Rgs19ip3 (NM_148951.1,612-630).
cagcgggagggaaacatta

SEQ ID NO: 681732 - DNA, 19 bp, Mus musculus
  siRNA target sequence for Rhpn2 (NM_027897.2,69-87).
ggtgacgactactttcgaa

SEQ ID NO: 681733 - DNA, 19 bp, Mus musculus
  siRNA target sequence for Rhpn2 (NM_027897.2,70-88).
gtgacgactactttcgaaa

SEQ ID NO: 681734 - DNA, 19 bp, Mus musculus
  siRNA target sequence for Rhpn2 (NM_027897.2,80-98).
ctttcgaaagggttgtaat

SEQ ID NO: 681735 - DNA, 19 bp, Mus musculus
  siRNA target sequence for Rhpn2 (NM_027897.2,119-137).
gagcaagctgcagaatcaa

SEQ ID NO: 681736 - DNA, 19 bp, Mus musculus
  siRNA target sequence for Rhpn2 (NM_027897.2,398-416).
catcgtcttcaaggatttt

SEQ ID NO: 681737 - DNA, 19 bp, Mus musculus
  siRNA target sequence for Rhpn2 (NM_027897.2,423-441).
gaacactacagtgaagata

SEQ ID NO: 681738 - DNA, 19 bp, Mus musculus
  siRNA target sequence for Rhpn2 (NM_027897.2,591-609).
cacatggggctcctgttta

SEQ ID NO: 681739 - DNA, 19 bp, Mus musculus
  siRNA target sequence for Rhpn2 (NM_027897.2,603-621).
ctgtttacctggtatgact

SEQ ID NO: 681740 - DNA, 19 bp, Mus musculus
  siRNA target sequence for Rhpn2 (NM_027897.2,637-655).
cggtcagccagcagacttt

SEQ ID NO: 681741 - DNA, 19 bp, Mus musculus
  siRNA target sequence for Rhpn2 (NM_027897.2,670-688).
ccagcgttctcttcaacat

SEQ ID NO: 681742 - DNA, 19 bp, Mus musculus
  siRNA target sequence for Rhpn2 (NM_027897.2,916-934).
ggatccagaacgagttctt

SEQ ID NO: 681743 - DNA, 19 bp, Mus musculus
  siRNA target sequence for Rhpn2 (NM_027897.2,1023-1041).
gagaacatcccgtattcgt

SEQ ID NO: 681744 - DNA, 19 bp, Mus musculus
  siRNA target sequence for Rhpn2 (NM_027897.2,1452-1470).
cgagaggtcaaaataacct

SEQ ID NO: 681745 - DNA, 19 bp, Mus musculus
  siRNA target sequence for Rhpn2 (NM_027897.2,1680-1698).
gaaggagattacattgttt

SEQ ID NO: 681746 - DNA, 19 bp, Mus musculus
  siRNA target sequence for Rhpn2 (NM_027897.2,1729-1747).
cagtgagtgaggttatgaa

SEQ ID NO: 681747 - DNA, 19 bp, Mus musculus
  siRNA target sequence for Rhpn2 (NM_027897.2,1807-1825).
ccacatcgtccatgcataa

SEQ ID NO: 681748 - DNA, 19 bp, Mus musculus
  siRNA target sequence for Rhpn2 (NM_027897.2,1808-1826).
cacatcgtccatgcataat

SEQ ID NO: 681749 - DNA, 19 bp, Mus musculus
  siRNA target sequence for Rhpn2 (NM_027897.2,1814-1832).
gtccatgcataataagtgt

SEQ ID NO: 681750 - DNA, 19 bp, Mus musculus
  siRNA target sequence for Rhpn2 (NM_027897.2,1848-1866).
gggatgcagaaaacttact

SEQ ID NO: 681751 - DNA, 19 bp, Mus musculus
  siRNA target sequence for Rhpn2 (NM_027897.2,1856-1874).
gaaaacttactccatgata

SEQ ID NO: 681752 - DNA, 19 bp, Mus musculus
  siRNA target sequence for Rhpn2 (NM_027897.2,1943-1961).
gagttggggcactagtaaa

SEQ ID NO: 681753 - DNA, 19 bp, Mus musculus
  siRNA target sequence for Rhpn2 (NM_027897.2,2010-2028).
gcgaggtcgcaaaacaaga

SEQ ID NO: 681754 - DNA, 19 bp, Mus musculus
  siRNA target sequence for Rhpn2 (NM_027897.2,2011-2029).
cgaggtcgcaaaacaagaa

SEQ ID NO: 681755 - DNA, 19 bp, Mus musculus
  siRNA target sequence for Ril (NM_019417.1,228-246).
ggcccagaaccgcattaaa

SEQ ID NO: 681756 - DNA, 19 bp, Mus musculus
  siRNA target sequence for Ril (NM_019417.1,247-265).
ggctgccacgatcatctta

SEQ ID NO: 681757 - DNA, 19 bp, Mus musculus
  siRNA target sequence for Ril (NM_019417.1,429-447).
cctgggatctccatatggt

SEQ ID NO: 681758 - DNA, 19 bp, Mus musculus
  siRNA target sequence for Ril (NM_019417.1,601-619).
gaggtatacaggatgttaa

SEQ ID NO: 681759 - DNA, 19 bp, Mus musculus
  siRNA target sequence for Ril (NM_019417.1,640-658).
gcctcggagccgaaacagt

SEQ ID NO: 681760 - DNA, 19 bp, Mus musculus
  siRNA target sequence for Ril (NM_019417.1,816-834).
cgggatcgtgggaaccatt

SEQ ID NO: 681761 - DNA, 19 bp, Mus musculus
  siRNA target sequence for Ril (NM_019417.1,881-899).
gcgactgcggcctgaatct

SEQ ID NO: 681762 - DNA, 19 bp, Mus musculus
  siRNA target sequence for Ril (NM_019417.1,883-901).
gactgcggcctgaatctca

SEQ ID NO: 681763 - DNA, 19 bp, Mus musculus
  siRNA target sequence for Ril (NM_019417.1,885-903).
ctgcggcctgaatctcaaa

SEQ ID NO: 681764 - DNA, 19 bp, Mus musculus
  siRNA target sequence for Ril (NM_019417.1,887-905).
gcggcctgaatctcaaaca

SEQ ID NO: 681765 - DNA, 19 bp, Mus musculus
  siRNA target sequence for Ril (NM_019417.1,932-950).
ggctgtactgtgagaatca

SEQ ID NO: 681766 - DNA, 19 bp, Mus musculus
  siRNA target sequence for Ril (NM_019417.1,994-1012).
gctgtataccccaatgcta

SEQ ID NO: 681767 - DNA, 19 bp, Mus musculus
  siRNA target sequence for Ril (NM_019417.1,995-1013).
ctgtataccccaatgctaa

SEQ ID NO: 681768 - DNA, 19 bp, Mus musculus
  siRNA target sequence for Sdcbp2 (NM_145535.1,210-228).
ctttcagagttgtatccaa

SEQ ID NO: 681769 - DNA, 19 bp, Mus musculus
  siRNA target sequence for Sdcbp2 (NM_145535.1,233-251).
ggcagaactggaaagttat

SEQ ID NO: 681770 - DNA, 19 bp, Mus musculus
  siRNA target sequence for Sdcbp2 (NM_145535.1,234-252).
gcagaactggaaagttata

SEQ ID NO: 681771 - DNA, 19 bp, Mus musculus
  siRNA target sequence for Sdcbp2 (NM_145535.1,293-311).
gactcagattccagatagt

SEQ ID NO: 681772 - DNA, 19 bp, Mus musculus
  siRNA target sequence for Sdcbp2 (NM_145535.1,295-313).
ctcagattccagatagtga

SEQ ID NO: 681773 - DNA, 19 bp, Mus musculus
  siRNA target sequence for Sdcbp2 (NM_145535.1,347-365).
ggtggtagctccagtatct

SEQ ID NO: 681774 - DNA, 19 bp, Mus musculus
  siRNA target sequence for Sdcbp2 (NM_145535.1,367-385).
ggaacaacctgggtatact

SEQ ID NO: 681775 - DNA, 19 bp, Mus musculus
  siRNA target sequence for Sdcbp2 (NM_145535.1,595-613).
ctcacaaggtgttgaagaa

SEQ ID NO: 681776 - DNA, 19 bp, Mus musculus
  siRNA target sequence for Sdcbp2 (NM_145535.1,614-632).
ggcatcagcggagaagatt

SEQ ID NO: 681777 - DNA, 19 bp, Mus musculus
  siRNA target sequence for Sdcbp2 (NM_145535.1,616-634).
catcagcggagaagattgt

SEQ ID NO: 681778 - DNA, 19 bp, Mus musculus
  siRNA target sequence for Sdcbp2 (NM_145535.1,626-644).
gaagattgtcatggttatt

SEQ ID NO: 681779 - DNA, 19 bp, Mus musculus
  siRNA target sequence for Sdcbp2 (NM_145535.1,760-778).
gcaatggacttctaaccaa

SEQ ID NO: 681780 - DNA, 19 bp, Mus musculus
  siRNA target sequence for Sdcbp2 (NM_145535.1,866-884).
catcacactgaccattatt

SEQ ID NO: 681781 - DNA, 19 bp, Mus musculus
  siRNA target sequence for Sdcbp2 (NM_145535.1,889-907).
ctgtgatctacgagcatat

SEQ ID NO: 681782 - DNA, 19 bp, Mus musculus
  siRNA target sequence for Sh2d1a (NM_011364.2,130-148).
ctgtgtaccacggcaaaat

SEQ ID NO: 681783 - DNA, 19 bp, Mus musculus
  siRNA target sequence for Sh2d1a (NM_011364.2,132-150).
gtgtaccacggcaaaatca

SEQ ID NO: 681784 - DNA, 19 bp, Mus musculus
  siRNA target sequence for Sh2d1a (NM_011364.2,317-335).
gacagcacctggagtacat

SEQ ID NO: 681785 - DNA, 19 bp, Mus musculus
  siRNA target sequence for Sh2d1a (NM_011364.2,319-337).
cagcacctggagtacataa

SEQ ID NO: 681786 - DNA, 19 bp, Mus musculus
  siRNA target sequence for Sh2d1a (NM_011364.2,321-339).
gcacctggagtacataaaa

SEQ ID NO: 681787 - DNA, 19 bp, Mus musculus
  siRNA target sequence for Sh2d1a (NM_011364.2,325-343).
ctggagtacataaaagatt

SEQ ID NO: 681788 - DNA, 19 bp, Mus musculus
  siRNA target sequence for Sh3md1 (NM_008018.1,324-342).
gcggaggagcccctctaaa

SEQ ID NO: 681789 - DNA, 19 bp, Mus musculus
  siRNA target sequence for Sh3md1 (NM_008018.1,326-344).
ggaggagcccctctaaaca

SEQ ID NO: 681790 - DNA, 19 bp, Mus musculus
  siRNA target sequence for Sh3md1 (NM_008018.1,334-352).
ccctctaaacactatgtat

SEQ ID NO: 681791 - DNA, 19 bp, Mus musculus
  siRNA target sequence for Sh3md1 (NM_008018.1,338-356).
ctaaacactatgtatacat

SEQ ID NO: 681792 - DNA, 19 bp, Mus musculus
  siRNA target sequence for Sh3md1 (NM_008018.1,441-459).
ggataagtttcctattgaa

SEQ ID NO: 681793 - DNA, 19 bp, Mus musculus
  siRNA target sequence for Sh3md1 (NM_008018.1,471-489).
ggatccgaagcaaaggatt

SEQ ID NO: 681794 - DNA, 19 bp, Mus musculus
  siRNA target sequence for Sh3md1 (NM_008018.1,472-490).
gatccgaagcaaaggatta

SEQ ID NO: 681795 - DNA, 19 bp, Mus musculus
  siRNA target sequence for Sh3md1 (NM_008018.1,556-574).
ctaaagcccatcgatgaat

SEQ ID NO: 681796 - DNA, 19 bp, Mus musculus
  siRNA target sequence for Sh3md1 (NM_008018.1,621-639).
cgaagtcttccggttcttt

SEQ ID NO: 681797 - DNA, 19 bp, Mus musculus
  siRNA target sequence for Sh3md1 (NM_008018.1,644-662).
cacggcctgaggatgtcaa

SEQ ID NO: 681798 - DNA, 19 bp, Mus musculus
  siRNA target sequence for Sh3md1 (NM_008018.1,654-672).
ggatgtcaaccctccaaaa

SEQ ID NO: 681799 - DNA, 19 bp, Mus musculus
  siRNA target sequence for Sh3md1 (NM_008018.1,663-681).
ccctccaaaagaagactat

SEQ ID NO: 681800 - DNA, 19 bp, Mus musculus
  siRNA target sequence for Sh3md1 (NM_008018.1,956-974).
gagacgactcggacatcaa

SEQ ID NO: 681801 - DNA, 19 bp, Mus musculus
  siRNA target sequence for Sh3md1 (NM_008018.1,958-976).
gacgactcggacatcaaca

SEQ ID NO: 681802 - DNA, 19 bp, Mus musculus
  siRNA target sequence for Sh3md1 (NM_008018.1,1071-1089).
cagccgagaagagaagtat

SEQ ID NO: 681803 - DNA, 19 bp, Mus musculus
  siRNA target sequence for Sh3md1 (NM_008018.1,1073-1091).
gccgagaagagaagtatgt

SEQ ID NO: 681804 - DNA, 19 bp, Mus musculus
  siRNA target sequence for Sh3md1 (NM_008018.1,1766-1784).
cagcctcatacattgacaa

SEQ ID NO: 681805 - DNA, 19 bp, Mus musculus
  siRNA target sequence for Sh3md1 (NM_008018.1,1910-1928).
gctccccactgaaggttaa

SEQ ID NO: 681806 - DNA, 19 bp, Mus musculus
  siRNA target sequence for Sh3md1 (NM_008018.1,1911-1929).
ctccccactgaaggttaaa

SEQ ID NO: 681807 - DNA, 19 bp, Mus musculus
  siRNA target sequence for Sh3md1 (NM_008018.1,1913-1931).
ccccactgaaggttaaata

SEQ ID NO: 681808 - DNA, 19 bp, Mus musculus
  siRNA target sequence for Sh3md1 (NM_008018.1,1916-1934).
cactgaaggttaaatacga

SEQ ID NO: 681809 - DNA, 19 bp, Mus musculus
  siRNA target sequence for Sh3md1 (NM_008018.1,2206-2224).
cctgggagctcctctttgt

SEQ ID NO: 681810 - DNA, 19 bp, Mus musculus
  siRNA target sequence for Sh3md1 (NM_008018.1,2233-2251).
gtgaaaaactcccctaaat

SEQ ID NO: 681811 - DNA, 19 bp, Mus musculus
  siRNA target sequence for Sh3md1 (NM_008018.1,2235-2253).
gaaaaactcccctaaatca

SEQ ID NO: 681812 - DNA, 19 bp, Mus musculus
  siRNA target sequence for Sh3md1 (NM_008018.1,2451-2469).
ccgtgacacccctaaggtt

SEQ ID NO: 681813 - DNA, 19 bp, Mus musculus
  siRNA target sequence for Sh3md1 (NM_008018.1,2583-2601).
gatggatattagttcctta

SEQ ID NO: 681814 - DNA, 19 bp, Mus musculus
  siRNA target sequence for Sh3md1 (NM_008018.1,2705-2723).
gaggttctgcggacatcat

SEQ ID NO: 681815 - DNA, 19 bp, Mus musculus
  siRNA target sequence for Sh3md1 (NM_008018.1,2795-2813).
cgtgcagcgcctatcagaa

SEQ ID NO: 681816 - DNA, 19 bp, Mus musculus
  siRNA target sequence for Sh3md1 (NM_008018.1,3176-3194).
ccgtcaggccccaatctgt

SEQ ID NO: 681817 - DNA, 19 bp, Mus musculus
  siRNA target sequence for Sh3md1 (NM_008018.1,3206-3224).
cgccacccaaggacaacaa

SEQ ID NO: 681818 - DNA, 19 bp, Mus musculus
  siRNA target sequence for Sh3md1 (NM_008018.1,3286-3304).
cgcaggaactcctccttta

SEQ ID NO: 681819 - DNA, 19 bp, Mus musculus
  siRNA target sequence for Sh3md1 (NM_008018.1,3424-3442).
cgtcccaagcccatagaga

SEQ ID NO: 681820 - DNA, 19 bp, Mus musculus
  siRNA target sequence for Sh3md1 (NM_008018.1,3480-3498).
catctcgattgcagactat

SEQ ID NO: 681821 - DNA, 19 bp, Mus musculus
  siRNA target sequence for Shank3 (NM_021423.1,99-117).
ccaccttttctttatctga

SEQ ID NO: 681822 - DNA, 19 bp, Mus musculus
  siRNA target sequence for Shank3 (NM_021423.1,126-144).
gatacaagcggagagttta

SEQ ID NO: 681823 - DNA, 19 bp, Mus musculus
  siRNA target sequence for Shank3 (NM_021423.1,166-184).
caagcagtttgcaaagcta

SEQ ID NO: 681824 - DNA, 19 bp, Mus musculus
  siRNA target sequence for Shank3 (NM_021423.1,268-286).
gctggaccccaatttccat

SEQ ID NO: 681825 - DNA, 19 bp, Mus musculus
  siRNA target sequence for Shank3 (NM_021423.1,471-489).
gggcttcgcctgactacaa

SEQ ID NO: 681826 - DNA, 19 bp, Mus musculus
  siRNA target sequence for Shank3 (NM_021423.1,503-521).
ctgacgcccctgtaccata

SEQ ID NO: 681827 - DNA, 19 bp, Mus musculus
  siRNA target sequence for Shank3 (NM_021423.1,583-601).
ggggaccactgatgagaat

SEQ ID NO: 681828 - DNA, 19 bp, Mus musculus
  siRNA target sequence for Shank3 (NM_021423.1,782-800).
gacgtccgcaattacaaca

SEQ ID NO: 681829 - DNA, 19 bp, Mus musculus
  siRNA target sequence for Shank3 (NM_021423.1,842-860).
gagcttgccgaggtaatca

SEQ ID NO: 681830 - DNA, 19 bp, Mus musculus
  siRNA target sequence for Shank3 (NM_021423.1,1035-1053).
gcctccctcatcaactctt

SEQ ID NO: 681831 - DNA, 19 bp, Mus musculus
  siRNA target sequence for Shank3 (NM_021423.1,1131-1149).
gcaggggtggccacaacaa

SEQ ID NO: 681832 - DNA, 19 bp, Mus musculus
  siRNA target sequence for Shank3 (NM_021423.1,1134-1152).
ggggtggccacaacaagat

SEQ ID NO: 681833 - DNA, 19 bp, Mus musculus
  siRNA target sequence for Shank3 (NM_021423.1,1238-1256).
ccgaagcggaaactttaca

SEQ ID NO: 681834 - DNA, 19 bp, Mus musculus
  siRNA target sequence for Shank3 (NM_021423.1,1240-1258).
gaagcggaaactttacagt

SEQ ID NO: 681835 - DNA, 19 bp, Mus musculus
  siRNA target sequence for Shank3 (NM_021423.1,1528-1546).
cacttcacacagcgattat

SEQ ID NO: 681836 - DNA, 19 bp, Mus musculus
  siRNA target sequence for Shank3 (NM_021423.1,1530-1548).
cttcacacagcgattatgt

SEQ ID NO: 681837 - DNA, 19 bp, Mus musculus
  siRNA target sequence for Shank3 (NM_021423.1,1541-1559).
gattatgtcatcgatgata

SEQ ID NO: 681838 - DNA, 19 bp, Mus musculus
  siRNA target sequence for Shank3 (NM_021423.1,1663-1681).
ccctgcactccaatacctt

SEQ ID NO: 681839 - DNA, 19 bp, Mus musculus
  siRNA target sequence for Shank3 (NM_021423.1,2153-2171).
gggattccacggaccaaat

SEQ ID NO: 681840 - DNA, 19 bp, Mus musculus
  siRNA target sequence for Shd (NM_009168.1,296-314).
ggctccgagactatctgaa

SEQ ID NO: 681841 - DNA, 19 bp, Mus musculus
  siRNA target sequence for Shd (NM_009168.1,417-435).
cccctatgaggattccaat

SEQ ID NO: 681842 - DNA, 19 bp, Mus musculus
  siRNA target sequence for Shd (NM_009168.1,464-482).
ccggtgaccccaagtacaa

SEQ ID NO: 681843 - DNA, 19 bp, Mus musculus
  siRNA target sequence for Shd (NM_009168.1,466-484).
ggtgaccccaagtacaact

SEQ ID NO: 681844 - DNA, 19 bp, Mus musculus
  siRNA target sequence for Shd (NM_009168.1,488-506).
ctaggcaccggctgatcaa

SEQ ID NO: 681845 - DNA, 19 bp, Mus musculus
  siRNA target sequence for Shd (NM_009168.1,582-600).
gtactcagacccttttgat

SEQ ID NO: 681846 - DNA, 19 bp, Mus musculus
  siRNA target sequence for Shd (NM_009168.1,683-701).
gagctgtccagctttacga

SEQ ID NO: 681847 - DNA, 19 bp, Mus musculus
  siRNA target sequence for Shd (NM_009168.1,693-711).
gctttacgatactccatat

SEQ ID NO: 681848 - DNA, 19 bp, Mus musculus
  siRNA target sequence for Shd (NM_009168.1,720-738).
ggctacgaaaccagaagat

SEQ ID NO: 681849 - DNA, 19 bp, Mus musculus
  siRNA target sequence for Shd (NM_009168.1,782-800).
ggccagcagatgaatacga

SEQ ID NO: 681850 - DNA, 19 bp, Mus musculus
  siRNA target sequence for Shd (NM_009168.1,836-854).
gggctttcgcagtgcaatt

SEQ ID NO: 681851 - DNA, 19 bp, Mus musculus
  siRNA target sequence for Shd (NM_009168.1,837-855).
ggctttcgcagtgcaattt

SEQ ID NO: 681852 - DNA, 19 bp, Mus musculus
  siRNA target sequence for Sla (NM_009192.1,22-40).
gggaatagcatgaaatcca

SEQ ID NO: 681853 - DNA, 19 bp, Mus musculus
  siRNA target sequence for Sla (NM_009192.1,74-92).
gtgagggacttgaaagtga

SEQ ID NO: 681854 - DNA, 19 bp, Mus musculus
  siRNA target sequence for Sla (NM_009192.1,165-183).
gcgtgtaatttctgatgaa

SEQ ID NO: 681855 - DNA, 19 bp, Mus musculus
  siRNA target sequence for Sla (NM_009192.1,309-327).
gctgcagctgccagataca

SEQ ID NO: 681856 - DNA, 19 bp, Mus musculus
  siRNA target sequence for Sla (NM_009192.1,345-363).
gattcgagagagtgaaaca

SEQ ID NO: 681857 - DNA, 19 bp, Mus musculus
  siRNA target sequence for Sla (NM_009192.1,430-448).
cccaacaactggtactaca

SEQ ID NO: 681858 - DNA, 19 bp, Mus musculus
  siRNA target sequence for Sla (NM_009192.1,486-504).
ggtgactcattattctgaa

SEQ ID NO: 681859 - DNA, 19 bp, Mus musculus
  siRNA target sequence for Sla (NM_009192.1,540-558).
ctgtctggcacagaacata

SEQ ID NO: 681860 - DNA, 19 bp, Mus musculus
  siRNA target sequence for Sla (NM_009192.1,616-634).
cgccagaagacctttgact

SEQ ID NO: 681861 - DNA, 19 bp, Mus musculus
  siRNA target sequence for Sla (NM_009192.1,639-657).
gagggtatccagattgcaa

SEQ ID NO: 681862 - DNA, 19 bp, Mus musculus
  siRNA target sequence for Sla (NM_009192.1,691-709).
gtggacgaatcccttttca

SEQ ID NO: 681863 - DNA, 19 bp, Mus musculus
  siRNA target sequence for Sla (NM_009192.1,811-829).
ggcagcaaacgcaagagtt

SEQ ID NO: 681864 - DNA, 19 bp, Mus musculus
  siRNA target sequence for Sla (NM_009192.1,816-834).
caaacgcaagagttccttt

SEQ ID NO: 681865 - DNA, 19 bp, Mus musculus
  siRNA target sequence for Sla (NM_009192.1,839-857).
cagcaccccagtactttga

SEQ ID NO: 681866 - DNA, 19 bp, Mus musculus
  siRNA target sequence for Slc9a3r2 (NM_023055.1,812-830).
cgatcctgagactgatgaa

SEQ ID NO: 681867 - DNA, 19 bp, Mus musculus
  siRNA target sequence for Slc9a3r2 (NM_023055.1,1069-1087).
gagctactcgggtcaacaa

SEQ ID NO: 681868 - DNA, 19 bp, Mus musculus
  siRNA target sequence for Slc9a3r2 (NM_023055.1,1113-1131).
cggaagcgagagatcttca

SEQ ID NO: 681869 - DNA, 19 bp, Mus musculus
  siRNA target sequence for Slc9a3r2 (NM_023449.1,121-139).
ctcaactggggcttactca

SEQ ID NO: 681870 - DNA, 19 bp, Mus musculus
  siRNA target sequence for Slc9a3r2 (NM_023449.1,131-149).
gcttactcaggatgtcaat

SEQ ID NO: 681871 - DNA, 19 bp, Mus musculus
  siRNA target sequence for Snx10 (NM_028035.2,337-355).
cttatatcgactatgagat

SEQ ID NO: 681872 - DNA, 19 bp, Mus musculus
  siRNA target sequence for Snx10 (NM_028035.2,455-473).
cgcgttgctggtacaatta

SEQ ID NO: 681873 - DNA, 19 bp, Mus musculus
  siRNA target sequence for Snx10 (NM_028035.2,464-482).
ggtacaattaccagaactt

SEQ ID NO: 681874 - DNA, 19 bp, Mus musculus
  siRNA target sequence for Snx10 (NM_028035.2,483-501).
ccgtctaaaaacctgtttt

SEQ ID NO: 681875 - DNA, 19 bp, Mus musculus
  siRNA target sequence for Snx10 (NM_028035.2,484-502).
cgtctaaaaacctgttttt

SEQ ID NO: 681876 - DNA, 19 bp, Mus musculus
  siRNA target sequence for Snx10 (NM_028035.2,537-555).
cgccagggcttggaagatt

SEQ ID NO: 681877 - DNA, 19 bp, Mus musculus
  siRNA target sequence for Snx10 (NM_028035.2,573-591).
cagaatgcactcttgcttt

SEQ ID NO: 681878 - DNA, 19 bp, Mus musculus
  siRNA target sequence for Snx10 (NM_028035.2,689-707).
cattcacaagtttgcttta

SEQ ID NO: 681879 - DNA, 19 bp, Mus musculus
  siRNA target sequence for Snx10 (NM_028035.2,695-713).
caagtttgctttaatgaat

SEQ ID NO: 681880 - DNA, 19 bp, Mus musculus
  siRNA target sequence for Snx10 (NM_028035.2,759-777).
gtagagtatgattcagaaa

SEQ ID NO: 681881 - DNA, 19 bp, Mus musculus
  siRNA target sequence for Snx10 (NM_028035.2,764-782).
gtatgattcagaaagttca

SEQ ID NO: 681882 - DNA, 19 bp, Mus musculus
  siRNA target sequence for Snx10 (NM_028035.2,814-832).
gcagttctcatggatgtaa

SEQ ID NO: 681883 - DNA, 19 bp, Mus musculus
  siRNA target sequence for Snx10 (NM_028035.2,815-833).
cagttctcatggatgtaaa

SEQ ID NO: 681884 - DNA, 19 bp, Mus musculus
  siRNA target sequence for Snx11 (NM_028965.2,345-363).
cttacgtggactataagat

SEQ ID NO: 681885 - DNA, 19 bp, Mus musculus
  siRNA target sequence for Snx11 (NM_028965.2,419-437).
cgctaccgtgagtttgtgt

SEQ ID NO: 681886 - DNA, 19 bp, Mus musculus
  siRNA target sequence for Snx11 (NM_028965.2,513-531).
gcggctccgatgagttcat

SEQ ID NO: 681887 - DNA, 19 bp, Mus musculus
  siRNA target sequence for Snx11 (NM_028965.2,514-532).
cggctccgatgagttcatt

SEQ ID NO: 681888 - DNA, 19 bp, Mus musculus
  siRNA target sequence for Snx11 (NM_028965.2,516-534).
gctccgatgagttcattga

SEQ ID NO: 681889 - DNA, 19 bp, Mus musculus
  siRNA target sequence for Snx11 (NM_028965.2,634-652).
ctcggtgcccgagattgaa

SEQ ID NO: 681890 - DNA, 19 bp, Mus musculus
  siRNA target sequence for Snx11 (NM_028965.2,682-700).
ggtgtccgatgccattctt

SEQ ID NO: 681891 - DNA, 19 bp, Mus musculus
  siRNA target sequence for Snx11 (NM_028965.2,683-701).
gtgtccgatgccattcttt

SEQ ID NO: 681892 - DNA, 19 bp, Mus musculus
  siRNA target sequence for Snx11 (NM_028965.2,688-706).
cgatgccattctttcctat

SEQ ID NO: 681893 - DNA, 19 bp, Mus musculus
  siRNA target sequence for Snx11 (NM_028965.2,693-711).
ccattctttcctatgctat

SEQ ID NO: 681894 - DNA, 19 bp, Mus musculus
  siRNA target sequence for Snx15 (NM_026912.1,76-94).
gccaagcgaaggatgactt

SEQ ID NO: 681895 - DNA, 19 bp, Mus musculus
  siRNA target sequence for Snx15 (NM_026912.1,139-157).
gttacacagagtacaaagt

SEQ ID NO: 681896 - DNA, 19 bp, Mus musculus
  siRNA target sequence for Snx15 (NM_026912.1,162-180).
gctcagttcatctcaaaga

SEQ ID NO: 681897 - DNA, 19 bp, Mus musculus
  siRNA target sequence for Snx15 (NM_026912.1,245-263).
cggggacttggcctatact

SEQ ID NO: 681898 - DNA, 19 bp, Mus musculus
  siRNA target sequence for Snx15 (NM_026912.1,247-265).
gggacttggcctatactca

SEQ ID NO: 681899 - DNA, 19 bp, Mus musculus
  siRNA target sequence for Snx15 (NM_026912.1,317-335).
ggtgtttgggcggtttgaa

SEQ ID NO: 681900 - DNA, 19 bp, Mus musculus
  siRNA target sequence for Snx15 (NM_026912.1,394-412).
ccatccctgcactcaacaa

SEQ ID NO: 681901 - DNA, 19 bp, Mus musculus
  siRNA target sequence for Snx15 (NM_026912.1,417-435).
ccccaactcaaggagtttt

SEQ ID NO: 681902 - DNA, 19 bp, Mus musculus
  siRNA target sequence for Snx15 (NM_026912.1,418-436).
cccaactcaaggagttttt

SEQ ID NO: 681903 - DNA, 19 bp, Mus musculus
  siRNA target sequence for Snx15 (NM_026912.1,697-715).
ctgaacttgcccttttcga

SEQ ID NO: 681904 - DNA, 19 bp, Mus musculus
  siRNA target sequence for Snx16 (NM_029068.2,283-301).
cgtatgtcccagttccaat

SEQ ID NO: 681905 - DNA, 19 bp, Mus musculus
  siRNA target sequence for Snx16 (NM_029068.2,316-334).
ccgcttccagctttacaaa

SEQ ID NO: 681906 - DNA, 19 bp, Mus musculus
  siRNA target sequence for Snx16 (NM_029068.2,477-495).
ggtagtcctctcattagga

SEQ ID NO: 681907 - DNA, 19 bp, Mus musculus
  siRNA target sequence for Snx16 (NM_029068.2,483-501).
cctctcattaggactaaat

SEQ ID NO: 681908 - DNA, 19 bp, Mus musculus
  siRNA target sequence for Snx16 (NM_029068.2,484-502).
ctctcattaggactaaatt

SEQ ID NO: 681909 - DNA, 19 bp, Mus musculus
  siRNA target sequence for Snx16 (NM_029068.2,486-504).
ctcattaggactaaattta

SEQ ID NO: 681910 - DNA, 19 bp, Mus musculus
  siRNA target sequence for Snx16 (NM_029068.2,488-506).
cattaggactaaatttaca

SEQ ID NO: 681911 - DNA, 19 bp, Mus musculus
  siRNA target sequence for Snx16 (NM_029068.2,513-531).
gattcatccattgagtatt

SEQ ID NO: 681912 - DNA, 19 bp, Mus musculus
  siRNA target sequence for Snx16 (NM_029068.2,598-616).
cacctacaattctaggtta

SEQ ID NO: 681913 - DNA, 19 bp, Mus musculus
  siRNA target sequence for Snx16 (NM_029068.2,635-653).
ggccaaattcactgtatat

SEQ ID NO: 681914 - DNA, 19 bp, Mus musculus
  siRNA target sequence for Snx16 (NM_029068.2,637-655).
ccaaattcactgtatataa

SEQ ID NO: 681915 - DNA, 19 bp, Mus musculus
  siRNA target sequence for Snx16 (NM_029068.2,719-737).
caggcttaatgacaaatta

SEQ ID NO: 681916 - DNA, 19 bp, Mus musculus
  siRNA target sequence for Snx16 (NM_029068.2,721-739).
ggcttaatgacaaattaaa

SEQ ID NO: 681917 - DNA, 19 bp, Mus musculus
  siRNA target sequence for Snx16 (NM_029068.2,746-764).
gtttccaggctttcgatta

SEQ ID NO: 681918 - DNA, 19 bp, Mus musculus
  siRNA target sequence for Snx16 (NM_029068.2,771-789).
cctccaaaacgctggttta

SEQ ID NO: 681919 - DNA, 19 bp, Mus musculus
  siRNA target sequence for Snx16 (NM_029068.2,772-790).
ctccaaaacgctggtttaa

SEQ ID NO: 681920 - DNA, 19 bp, Mus musculus
  siRNA target sequence for Snx16 (NM_029068.2,775-793).
caaaacgctggtttaaaga

SEQ ID NO: 681921 - DNA, 19 bp, Mus musculus
  siRNA target sequence for Snx16 (NM_029068.2,918-936).
ccaccaggtccatttgata

SEQ ID NO: 681922 - DNA, 19 bp, Mus musculus
  siRNA target sequence for Snx16 (NM_029068.2,967-985).
ctttagaagagactaacta

SEQ ID NO: 681923 - DNA, 19 bp, Mus musculus
  siRNA target sequence for Snx16 (NM_029068.2,972-990).
gaagagactaactaccatt

SEQ ID NO: 681924 - DNA, 19 bp, Mus musculus
  siRNA target sequence for Snx16 (NM_029068.2,1062-1080).
cacatagatgctttagaga

SEQ ID NO: 681925 - DNA, 19 bp, Mus musculus
  siRNA target sequence for Snx16 (NM_029068.2,1071-1089).
gctttagagaccagaatca

SEQ ID NO: 681926 - DNA, 19 bp, Mus musculus
  siRNA target sequence for Snx16 (NM_029068.2,1157-1175).
ggtggagccctctgtactt

SEQ ID NO: 681927 - DNA, 19 bp, Mus musculus
  siRNA target sequence for Snx16 (NM_029068.2,1160-1178).
ggagccctctgtacttcaa

SEQ ID NO: 681928 - DNA, 19 bp, Mus musculus
  siRNA target sequence for Snx16 (NM_029068.2,1165-1183).
cctctgtacttcaagtcaa

SEQ ID NO: 681929 - DNA, 19 bp, Mus musculus
  siRNA target sequence for Snx16 (NM_029068.2,1272-1290).
gtcgcacagttggcatata

SEQ ID NO: 681930 - DNA, 19 bp, Mus musculus
  siRNA target sequence for Snx16 (NM_029068.2,1285-1303).
catataatgctgaagatga

SEQ ID NO: 681931 - DNA, 19 bp, Mus musculus
  siRNA target sequence for Snx19 (NM_028874.1,261-279).
cctacccaggggactatct

SEQ ID NO: 681932 - DNA, 19 bp, Mus musculus
  siRNA target sequence for Snx19 (NM_028874.1,313-331).
gtagccggaagctaatgat

SEQ ID NO: 681933 - DNA, 19 bp, Mus musculus
  siRNA target sequence for Snx19 (NM_028874.1,386-404).
gcttctgatccttctatgt

SEQ ID NO: 681934 - DNA, 19 bp, Mus musculus
  siRNA target sequence for Snx19 (NM_028874.1,454-472).
gggcttcaggtcaattgca

SEQ ID NO: 681935 - DNA, 19 bp, Mus musculus
  siRNA target sequence for Snx19 (NM_028874.1,470-488).
gcacctggaacgattcatt

SEQ ID NO: 681936 - DNA, 19 bp, Mus musculus
  siRNA target sequence for Snx19 (NM_028874.1,474-492).
ctggaacgattcattacca

SEQ ID NO: 681937 - DNA, 19 bp, Mus musculus
  siRNA target sequence for Snx19 (NM_028874.1,548-566).
ccgcactatccagatgatt

SEQ ID NO: 681938 - DNA, 19 bp, Mus musculus
  siRNA target sequence for Snx19 (NM_028874.1,549-567).
cgcactatccagatgatta

SEQ ID NO: 681939 - DNA, 19 bp, Mus musculus
  siRNA target sequence for Snx19 (NM_028874.1,550-568).
gcactatccagatgattat

SEQ ID NO: 681940 - DNA, 19 bp, Mus musculus
  siRNA target sequence for Snx19 (NM_028874.1,570-588).
cgagacttcgtgttatcct

SEQ ID NO: 681941 - DNA, 19 bp, Mus musculus
  siRNA target sequence for Snx19 (NM_028874.1,579-597).
gtgttatcctggtatcgtt

SEQ ID NO: 681942 - DNA, 19 bp, Mus musculus
  siRNA target sequence for Snx19 (NM_028874.1,730-748).
gtcacctgcagagctatat

SEQ ID NO: 681943 - DNA, 19 bp, Mus musculus
  siRNA target sequence for Snx19 (NM_028874.1,856-874).
ccaccacggaggtcactta

SEQ ID NO: 681944 - DNA, 19 bp, Mus musculus
  siRNA target sequence for Snx19 (NM_028874.1,857-875).
caccacggaggtcacttat

SEQ ID NO: 681945 - DNA, 19 bp, Mus musculus
  siRNA target sequence for Snx19 (NM_028874.1,860-878).
cacggaggtcacttatgca

SEQ ID NO: 681946 - DNA, 19 bp, Mus musculus
  siRNA target sequence for Snx19 (NM_028874.1,946-964).
gccacgttgtggttgaagt

SEQ ID NO: 681947 - DNA, 19 bp, Mus musculus
  siRNA target sequence for Snx19 (NM_028874.1,950-968).
cgttgtggttgaagttatt

SEQ ID NO: 681948 - DNA, 19 bp, Mus musculus
  siRNA target sequence for Snx19 (NM_028874.1,951-969).
gttgtggttgaagttatta

SEQ ID NO: 681949 - DNA, 19 bp, Mus musculus
  siRNA target sequence for Snx19 (NM_028874.1,963-981).
gttattacttgcaatgtca

SEQ ID NO: 681950 - DNA, 19 bp, Mus musculus
  siRNA target sequence for Snx19 (NM_028874.1,987-1005).
ccactgatcagcaagctat

SEQ ID NO: 681951 - DNA, 19 bp, Mus musculus
  siRNA target sequence for Snx19 (NM_028874.1,1032-1050).
cttgtgagtatcttttcca

SEQ ID NO: 681952 - DNA, 19 bp, Mus musculus
  siRNA target sequence for Snx19 (NM_028874.1,1126-1144).
catctctgccattgattgt

SEQ ID NO: 681953 - DNA, 19 bp, Mus musculus
  siRNA target sequence for Snx19 (NM_028874.1,1133-1151).
gccattgattgttgaagta

SEQ ID NO: 681954 - DNA, 19 bp, Mus musculus
  siRNA target sequence for Snx19 (NM_028874.1,1154-1172).
gagtctgccagtaggaaaa

SEQ ID NO: 681955 - DNA, 19 bp, Mus musculus
  siRNA target sequence for Snx19 (NM_028874.1,1186-1204).
caacagccccagtacactt

SEQ ID NO: 681956 - DNA, 19 bp, Mus musculus
  siRNA target sequence for Snx19 (NM_028874.1,1223-1241).
cccttccccagagattgaa

SEQ ID NO: 681957 - DNA, 19 bp, Mus musculus
  siRNA target sequence for Snx19 (NM_028874.1,1275-1293).
gggatgctcgaagaaaaaa

SEQ ID NO: 681958 - DNA, 19 bp, Mus musculus
  siRNA target sequence for Snx19 (NM_028874.1,1335-1353).
cgaggccccttgttcttat

SEQ ID NO: 681959 - DNA, 19 bp, Mus musculus
  siRNA target sequence for Snx19 (NM_028874.1,1339-1357).
gccccttgttcttatgtga

SEQ ID NO: 681960 - DNA, 19 bp, Mus musculus
  siRNA target sequence for Snx19 (NM_028874.1,1493-1511).
ggatggcgagggatctgaa

SEQ ID NO: 681961 - DNA, 19 bp, Mus musculus
  siRNA target sequence for Snx19 (NM_028874.1,1494-1512).
gatggcgagggatctgaat

SEQ ID NO: 681962 - DNA, 19 bp, Mus musculus
  siRNA target sequence for Snx19 (NM_028874.1,1497-1515).
ggcgagggatctgaatgta

SEQ ID NO: 681963 - DNA, 19 bp, Mus musculus
  siRNA target sequence for Snx19 (NM_028874.1,1498-1516).
gcgagggatctgaatgtat

SEQ ID NO: 681964 - DNA, 19 bp, Mus musculus
  siRNA target sequence for Snx19 (NM_028874.1,1502-1520).
gggatctgaatgtatggaa

SEQ ID NO: 681965 - DNA, 19 bp, Mus musculus
  siRNA target sequence for Snx19 (NM_028874.1,1590-1608).
ccagagatccagattgaca

SEQ ID NO: 681966 - DNA, 19 bp, Mus musculus
  siRNA target sequence for Snx19 (NM_028874.1,1632-1650).
ggagatgacacctctctta

SEQ ID NO: 681967 - DNA, 19 bp, Mus musculus
  siRNA target sequence for Snx19 (NM_028874.1,1683-1701).
cccctacggccctcatgtt

SEQ ID NO: 681968 - DNA, 19 bp, Mus musculus
  siRNA target sequence for Snx19 (NM_028874.1,1684-1702).
ccctacggccctcatgttt

SEQ ID NO: 681969 - DNA, 19 bp, Mus musculus
  siRNA target sequence for Snx19 (NM_028874.1,1685-1703).
cctacggccctcatgttta

SEQ ID NO: 681970 - DNA, 19 bp, Mus musculus
  siRNA target sequence for Snx19 (NM_028874.1,1689-1707).
cggccctcatgtttagaca

SEQ ID NO: 681971 - DNA, 19 bp, Mus musculus
  siRNA target sequence for Snx19 (NM_028874.1,1696-1714).
catgtttagacaaagatct

SEQ ID NO: 681972 - DNA, 19 bp, Mus musculus
  siRNA target sequence for Snx19 (NM_028874.1,1928-1946).
gtacgagactgtccttaat

SEQ ID NO: 681973 - DNA, 19 bp, Mus musculus
  siRNA target sequence for Snx19 (NM_028874.1,2043-2061).
ccagatctacgaaagttta

SEQ ID NO: 681974 - DNA, 19 bp, Mus musculus
  siRNA target sequence for Snx19 (NM_028874.1,2044-2062).
cagatctacgaaagtttat

SEQ ID NO: 681975 - DNA, 19 bp, Mus musculus
  siRNA target sequence for Snx19 (NM_028874.1,2046-2064).
gatctacgaaagtttatca

SEQ ID NO: 681976 - DNA, 19 bp, Mus musculus
  siRNA target sequence for Snx19 (NM_028874.1,2049-2067).
ctacgaaagtttatcaaaa

SEQ ID NO: 681977 - DNA, 19 bp, Mus musculus
  siRNA target sequence for Snx19 (NM_028874.1,2117-2135).
ggatagtgacagagtagaa

SEQ ID NO: 681978 - DNA, 19 bp, Mus musculus
  siRNA target sequence for Snx19 (NM_028874.1,2174-2192).
ctgcgccattcctgagatt

SEQ ID NO: 681979 - DNA, 19 bp, Mus musculus
  siRNA target sequence for Snx19 (NM_028874.1,2420-2438).
gtccagactgaggttttca

SEQ ID NO: 681980 - DNA, 19 bp, Mus musculus
  siRNA target sequence for Snx19 (NM_028874.1,2429-2447).
gaggttttcatccagtaaa

SEQ ID NO: 681981 - DNA, 19 bp, Mus musculus
  siRNA target sequence for Snx19 (NM_028874.1,2470-2488).
ccgaggcacaggacaagat

SEQ ID NO: 681982 - DNA, 19 bp, Mus musculus
  siRNA target sequence for Snx19 (NM_028874.1,2476-2494).
cacaggacaagattctgta

SEQ ID NO: 681983 - DNA, 19 bp, Mus musculus
  siRNA target sequence for Snx19 (NM_028874.1,2776-2794).
ctgaaagcatgcagaagtt

SEQ ID NO: 681984 - DNA, 19 bp, Mus musculus
  siRNA target sequence for Snx19 (NM_028874.1,2841-2859).
caggtggctaatctaacat

SEQ ID NO: 681985 - DNA, 19 bp, Mus musculus
  siRNA target sequence for Snx19 (NM_028874.1,2843-2861).
ggtggctaatctaacatgt

SEQ ID NO: 681986 - DNA, 19 bp, Mus musculus
  siRNA target sequence for Snx19 (NM_028874.1,2886-2904).
catcttcttcgggaatcta

SEQ ID NO: 681987 - DNA, 19 bp, Mus musculus
  siRNA target sequence for Snx19 (NM_028874.1,3009-3027).
ccagattttttggtagaaa

SEQ ID NO: 681988 - DNA, 19 bp, Mus musculus
  siRNA target sequence for Snx19 (NM_028874.1,3087-3105).
cccctcatcaacagacatt

SEQ ID NO: 681989 - DNA, 19 bp, Mus musculus
  siRNA target sequence for Snx19 (NM_028874.1,3088-3106).
ccctcatcaacagacattt

SEQ ID NO: 681990 - DNA, 19 bp, Mus musculus
  siRNA target sequence for Snx19 (NM_028874.1,3090-3108).
ctcatcaacagacatttga

SEQ ID NO: 681991 - DNA, 19 bp, Mus musculus
  siRNA target sequence for Snx19 (NM_028874.1,3177-3195).
gctacctctgcctcagatt

SEQ ID NO: 681992 - DNA, 19 bp, Mus musculus
  siRNA target sequence for Snx24 (NM_029394.2,185-203).
cggctacacggtgtttaaa

SEQ ID NO: 681993 - DNA, 19 bp, Mus musculus
  siRNA target sequence for Snx24 (NM_029394.2,187-205).
gctacacggtgtttaaaat

SEQ ID NO: 681994 - DNA, 19 bp, Mus musculus
  siRNA target sequence for Snx24 (NM_029394.2,188-206).
ctacacggtgtttaaaata

SEQ ID NO: 681995 - DNA, 19 bp, Mus musculus
  siRNA target sequence for Snx24 (NM_029394.2,191-209).
cacggtgtttaaaatagaa

SEQ ID NO: 681996 - DNA, 19 bp, Mus musculus
  siRNA target sequence for Snx24 (NM_029394.2,193-211).
cggtgtttaaaatagaagt

SEQ ID NO: 681997 - DNA, 19 bp, Mus musculus
  siRNA target sequence for Snx24 (NM_029394.2,359-377).
gcaaggcctggaaacgtat

SEQ ID NO: 681998 - DNA, 19 bp, Mus musculus
  siRNA target sequence for Snx24 (NM_029394.2,360-378).
caaggcctggaaacgtatt

SEQ ID NO: 681999 - DNA, 19 bp, Mus musculus
  siRNA target sequence for Snx24 (NM_029394.2,364-382).
gcctggaaacgtatttaca

SEQ ID NO: 682000 - DNA, 19 bp, Mus musculus
  siRNA target sequence for Snx24 (NM_029394.2,385-403).
ccgtcattttggagaatga

SEQ ID NO: 682001 - DNA, 19 bp, Mus musculus
  siRNA target sequence for Snx24 (NM_029394.2,567-585).
gcagccagcgattttccaa

SEQ ID NO: 682002 - DNA, 19 bp, Mus musculus
  siRNA target sequence for Snx24 (NM_029394.2,568-586).
cagccagcgattttccaaa

SEQ ID NO: 682003 - DNA, 19 bp, Mus musculus
  siRNA target sequence for Snx24 (NM_029394.2,571-589).
ccagcgattttccaaatgt

SEQ ID NO: 682004 - DNA, 19 bp, Mus musculus
  siRNA target sequence for Snx24 (NM_029394.2,590-608).
ggtcatcgaaggagttctt

SEQ ID NO: 682005 - DNA, 19 bp, Mus musculus
  siRNA target sequence for Snx4 (NM_080557.1,214-232).
gaaggaacgccgtgaacat

SEQ ID NO: 682006 - DNA, 19 bp, Mus musculus
  siRNA target sequence for Snx4 (NM_080557.1,222-240).
gccgtgaacatgcaagaaa

SEQ ID NO: 682007 - DNA, 19 bp, Mus musculus
  siRNA target sequence for Snx4 (NM_080557.1,346-364).
gaaactaccttctagtgta

SEQ ID NO: 682008 - DNA, 19 bp, Mus musculus
  siRNA target sequence for Snx6 (NM_026998.2,52-70).
ggaagaccgcggacttaaa

SEQ ID NO: 682009 - DNA, 19 bp, Mus musculus
  siRNA target sequence for Snx6 (NM_026998.2,56-74).
gaccgcggacttaaagcaa

SEQ ID NO: 682010 - DNA, 19 bp, Mus musculus
  siRNA target sequence for Snx6 (NM_026998.2,58-76).
ccgcggacttaaagcaata

SEQ ID NO: 682011 - DNA, 19 bp, Mus musculus
  siRNA target sequence for Snx6 (NM_026998.2,59-77).
cgcggacttaaagcaataa

SEQ ID NO: 682012 - DNA, 19 bp, Mus musculus
  siRNA target sequence for Snx6 (NM_026998.2,60-78).
gcggacttaaagcaataaa

SEQ ID NO: 682013 - DNA, 19 bp, Mus musculus
  siRNA target sequence for Snx6 (NM_026998.2,61-79).
cggacttaaagcaataaat

SEQ ID NO: 682014 - DNA, 19 bp, Mus musculus
  siRNA target sequence for Snx6 (NM_026998.2,154-172).
caccgttcacacaaagagt

SEQ ID NO: 682015 - DNA, 19 bp, Mus musculus
  siRNA target sequence for Snx6 (NM_026998.2,169-187).
gagttcattgccaaatttt

SEQ ID NO: 682016 - DNA, 19 bp, Mus musculus
  siRNA target sequence for Snx6 (NM_026998.2,204-222).
cagtcgttcgacaacatga

SEQ ID NO: 682017 - DNA, 19 bp, Mus musculus
  siRNA target sequence for Snx6 (NM_026998.2,404-422).
gaatacctggcgatcttca

SEQ ID NO: 682018 - DNA, 19 bp, Mus musculus
  siRNA target sequence for Snx6 (NM_026998.2,459-477).
gggttgcagcgcatcctat

SEQ ID NO: 682019 - DNA, 19 bp, Mus musculus
  siRNA target sequence for Snx6 (NM_026998.2,460-478).
ggttgcagcgcatcctatt

SEQ ID NO: 682020 - DNA, 19 bp, Mus musculus
  siRNA target sequence for Snx6 (NM_026998.2,461-479).
gttgcagcgcatcctattt

SEQ ID NO: 682021 - DNA, 19 bp, Mus musculus
  siRNA target sequence for Snx6 (NM_026998.2,464-482).
gcagcgcatcctattttga

SEQ ID NO: 682022 - DNA, 19 bp, Mus musculus
  siRNA target sequence for Snx6 (NM_026998.2,467-485).
gcgcatcctattttgagaa

SEQ ID NO: 682023 - DNA, 19 bp, Mus musculus
  siRNA target sequence for Snx6 (NM_026998.2,473-491).
cctattttgagaaaagatt

SEQ ID NO: 682024 - DNA, 19 bp, Mus musculus
  siRNA target sequence for Snx6 (NM_026998.2,483-501).
gaaaagatttaaatttcca

SEQ ID NO: 682025 - DNA, 19 bp, Mus musculus
  siRNA target sequence for Snx6 (NM_026998.2,505-523).
cttcttggaatacaatcaa

SEQ ID NO: 682026 - DNA, 19 bp, Mus musculus
  siRNA target sequence for Snx6 (NM_026998.2,529-547).
gagtgttcgaggaaaaaat

SEQ ID NO: 682027 - DNA, 19 bp, Mus musculus
  siRNA target sequence for Snx6 (NM_026998.2,531-549).
gtgttcgaggaaaaaataa

SEQ ID NO: 682028 - DNA, 19 bp, Mus musculus
  siRNA target sequence for Snx6 (NM_026998.2,643-661).
gcacgaacgaacattcctt

SEQ ID NO: 682029 - DNA, 19 bp, Mus musculus
  siRNA target sequence for Snx6 (NM_026998.2,646-664).
cgaacgaacattcctttta

SEQ ID NO: 682030 - DNA, 19 bp, Mus musculus
  siRNA target sequence for Snx6 (NM_026998.2,695-713).
gctaagtcggacagaatga

SEQ ID NO: 682031 - DNA, 19 bp, Mus musculus
  siRNA target sequence for Snx6 (NM_026998.2,724-742).
caaaagtgctgctgatgat

SEQ ID NO: 682032 - DNA, 19 bp, Mus musculus
  siRNA target sequence for Snx6 (NM_026998.2,785-803).
gactctacagatatatgca

SEQ ID NO: 682033 - DNA, 19 bp, Mus musculus
  siRNA target sequence for Snx6 (NM_026998.2,888-906).
ctgacctattaaagtacta

SEQ ID NO: 682034 - DNA, 19 bp, Mus musculus
  siRNA target sequence for Snx6 (NM_026998.2,890-908).
gacctattaaagtactact

SEQ ID NO: 682035 - DNA, 19 bp, Mus musculus
  siRNA target sequence for Snx6 (NM_026998.2,926-944).
gctaaggacctcctctata

SEQ ID NO: 682036 - DNA, 19 bp, Mus musculus
  siRNA target sequence for Snx6 (NM_026998.2,954-972).
ggtcgctggtagactatga

SEQ ID NO: 682037 - DNA, 19 bp, Mus musculus
  siRNA target sequence for Snx6 (NM_026998.2,957-975).
cgctggtagactatgaaaa

SEQ ID NO: 682038 - DNA, 19 bp, Mus musculus
  siRNA target sequence for Snx6 (NM_026998.2,997-1015).
ggcaagagcgaaaaacaaa

SEQ ID NO: 682039 - DNA, 19 bp, Mus musculus
  siRNA target sequence for Snx6 (NM_026998.2,1019-1037).
gttctacaggctgaaactt

SEQ ID NO: 682040 - DNA, 19 bp, Mus musculus
  siRNA target sequence for Snx6 (NM_026998.2,1045-1063).
gttgtgctgtcagaagttt

SEQ ID NO: 682041 - DNA, 19 bp, Mus musculus
  siRNA target sequence for Snx6 (NM_026998.2,1091-1109).
gaactgatagattttaaga

SEQ ID NO: 682042 - DNA, 19 bp, Mus musculus
  siRNA target sequence for Snx6 (NM_026998.2,1204-1222).
ccttgcggttttaaatgga

SEQ ID NO: 682043 - DNA, 19 bp, Mus musculus
  siRNA target sequence for Ssb4 (NM_145134.2,497-515).
gctccctcaatgtctttgt

SEQ ID NO: 682044 - DNA, 19 bp, Mus musculus
  siRNA target sequence for Ssb4 (NM_145134.2,607-625).
cacgcatggcagatccatt

SEQ ID NO: 682045 - DNA, 19 bp, Mus musculus
  siRNA target sequence for Ssb4 (NM_145134.2,979-997).
gtcaccatgcgctacatca

SEQ ID NO: 682046 - DNA, 19 bp, Mus musculus
  siRNA target sequence for Stac (NM_016853.1,607-625).
ggatttcggcgttactaca

SEQ ID NO: 682047 - DNA, 19 bp, Mus musculus
  siRNA target sequence for Stac (NM_016853.1,636-654).
gctcattcacgaacagttt

SEQ ID NO: 682048 - DNA, 19 bp, Mus musculus
  siRNA target sequence for Stac (NM_016853.1,645-663).
cgaacagtttggatgcatt

SEQ ID NO: 682049 - DNA, 19 bp, Mus musculus
  siRNA target sequence for Stac (NM_016853.1,646-664).
gaacagtttggatgcatta

SEQ ID NO: 682050 - DNA, 19 bp, Mus musculus
  siRNA target sequence for Stac (NM_016853.1,655-673).
ggatgcattaaagaagtta

SEQ ID NO: 682051 - DNA, 19 bp, Mus musculus
  siRNA target sequence for Stac (NM_016853.1,656-674).
gatgcattaaagaagttat

SEQ ID NO: 682052 - DNA, 19 bp, Mus musculus
  siRNA target sequence for Stac (NM_016853.1,677-695).
ccattgcgtgtggcaataa

SEQ ID NO: 682053 - DNA, 19 bp, Mus musculus
  siRNA target sequence for Stac (NM_016853.1,678-696).
cattgcgtgtggcaataaa

SEQ ID NO: 682054 - DNA, 19 bp, Mus musculus
  siRNA target sequence for Stac (NM_016853.1,797-815).
cgacttcagagcttgtaga

SEQ ID NO: 682055 - DNA, 19 bp, Mus musculus
  siRNA target sequence for Stac (NM_016853.1,903-921).
ggatgacttcagagatcaa

SEQ ID NO: 682056 - DNA, 19 bp, Mus musculus
  siRNA target sequence for Stac (NM_016853.1,981-999).
cgttgccttgtacagattt

SEQ ID NO: 682057 - DNA, 19 bp, Mus musculus
  siRNA target sequence for Stac (NM_016853.1,982-1000).
gttgccttgtacagattta

SEQ ID NO: 682058 - DNA, 19 bp, Mus musculus
  siRNA target sequence for Stac (NM_016853.1,987-1005).
cttgtacagatttatacca

SEQ ID NO: 682059 - DNA, 19 bp, Mus musculus
  siRNA target sequence for Stac (NM_016853.1,1161-1179).
gtgtgttcgaaccttcatt

SEQ ID NO: 682060 - DNA, 19 bp, Mus musculus
  siRNA target sequence for Stac (NM_016853.1,1188-1206).
ggaccaggggcagataaca

SEQ ID NO: 682061 - DNA, 19 bp, Mus musculus
  siRNA target sequence for Stac (NM_016853.1,1194-1212).
ggggcagataacactgaaa

SEQ ID NO: 682062 - DNA, 19 bp, Mus musculus
  siRNA target sequence for Stac (NM_016853.1,1196-1214).
ggcagataacactgaaaga

SEQ ID NO: 682063 - DNA, 19 bp, Mus musculus
  siRNA target sequence for Stmn2 (NM_025285.1,99-117).
caatggcctacaaggaaaa

SEQ ID NO: 682064 - DNA, 19 bp, Mus musculus
  siRNA target sequence for Stmn2 (NM_025285.1,242-260).
gcttttgagctgatcttga

SEQ ID NO: 682065 - DNA, 19 bp, Mus musculus
  siRNA target sequence for Stmn3 (NM_009133.2,643-661).
gcacaaggcgcttgaagaa

SEQ ID NO: 682066 - DNA, 19 bp, Mus musculus
  siRNA target sequence for Stmn3 (NM_009133.2,649-667).
ggcgcttgaagaaaacaat

SEQ ID NO: 682067 - DNA, 19 bp, Mus musculus
  siRNA target sequence for Stmn3 (NM_009133.2,684-702).
cggaggagaagctcaacta

SEQ ID NO: 682068 - DNA, 19 bp, Mus musculus
  siRNA target sequence for Stmn4 (NM_019675.2,247-265).
ggtgcgtcatctctgatat

SEQ ID NO: 682069 - DNA, 19 bp, Mus musculus
  siRNA target sequence for Stmn4 (NM_019675.2,251-269).
cgtcatctctgatatggaa

SEQ ID NO: 682070 - DNA, 19 bp, Mus musculus
  siRNA target sequence for Stmn4 (NM_019675.2,270-288).
gtcatcgagctgaacaagt

SEQ ID NO: 682071 - DNA, 19 bp, Mus musculus
  siRNA target sequence for Stmn4 (NM_019675.2,295-313).
cgggccagtcctttgaagt

SEQ ID NO: 682072 - DNA, 19 bp, Mus musculus
  siRNA target sequence for Stmn4 (NM_019675.2,338-356).
cggggtgcctgagtttaat

SEQ ID NO: 682073 - DNA, 19 bp, Mus musculus
  siRNA target sequence for Stmn4 (NM_019675.2,370-388).
gacggcgagacccatcatt

SEQ ID NO: 682074 - DNA, 19 bp, Mus musculus
  siRNA target sequence for Stmn4 (NM_019675.2,373-391).
ggcgagacccatcattaga

SEQ ID NO: 682075 - DNA, 19 bp, Mus musculus
  siRNA target sequence for Stmn4 (NM_019675.2,374-392).
gcgagacccatcattagaa

SEQ ID NO: 682076 - DNA, 19 bp, Mus musculus
  siRNA target sequence for Tce1 (NM_027141.1,205-223).
ctggcaggcagctctaact

SEQ ID NO: 682077 - DNA, 19 bp, Mus musculus
  siRNA target sequence for Tce1 (NM_027141.1,468-486).
cttgctgagctgtgataat

SEQ ID NO: 682078 - DNA, 19 bp, Mus musculus
  siRNA target sequence for Tce1 (NM_027141.1,488-506).
gcaaggtcagctttcacat

SEQ ID NO: 682079 - DNA, 19 bp, Mus musculus
  siRNA target sequence for Tce1 (NM_027141.1,582-600).
gatgacctctccagtgtat

SEQ ID NO: 682080 - DNA, 19 bp, Mus musculus
  siRNA target sequence for Tce1 (NM_027141.1,765-783).
ccagggctccattattggt

SEQ ID NO: 682081 - DNA, 19 bp, Mus musculus
  siRNA target sequence for Tce1 (NM_027141.1,976-994).
cgccaactgcggccaaatt

SEQ ID NO: 682082 - DNA, 19 bp, Mus musculus
  siRNA target sequence for Tjp2 (NM_011597.1,80-98).
ctgcagaaggattccaaaa

SEQ ID NO: 682083 - DNA, 19 bp, Mus musculus
  siRNA target sequence for Tjp2 (NM_011597.1,93-111).
ccaaaagaggatttggaat

SEQ ID NO: 682084 - DNA, 19 bp, Mus musculus
  siRNA target sequence for Tjp2 (NM_011597.1,129-147).
gagacaacccccactttga

SEQ ID NO: 682085 - DNA, 19 bp, Mus musculus
  siRNA target sequence for Tjp2 (NM_011597.1,131-149).
gacaacccccactttgaaa

SEQ ID NO: 682086 - DNA, 19 bp, Mus musculus
  siRNA target sequence for Tjp2 (NM_011597.1,133-151).
caacccccactttgaaaat

SEQ ID NO: 682087 - DNA, 19 bp, Mus musculus
  siRNA target sequence for Tjp2 (NM_011597.1,277-295).
cgttcagcagcttaggaaa

SEQ ID NO: 682088 - DNA, 19 bp, Mus musculus
  siRNA target sequence for Tjp2 (NM_011597.1,574-592).
cctggaccaggaagactat

SEQ ID NO: 682089 - DNA, 19 bp, Mus musculus
  siRNA target sequence for Tjp2 (NM_011597.1,638-656).
ctggaccgcgactttgtgt

SEQ ID NO: 682090 - DNA, 19 bp, Mus musculus
  siRNA target sequence for Tjp2 (NM_011597.1,691-709).
ggactacgaccgagactat

SEQ ID NO: 682091 - DNA, 19 bp, Mus musculus
  siRNA target sequence for Tjp2 (NM_011597.1,714-732).
gctcctatcacgaagctta

SEQ ID NO: 682092 - DNA, 19 bp, Mus musculus
  siRNA target sequence for Tjp2 (NM_011597.1,715-733).
ctcctatcacgaagcttat

SEQ ID NO: 682093 - DNA, 19 bp, Mus musculus
  siRNA target sequence for Tjp2 (NM_011597.1,717-735).
cctatcacgaagcttatga

SEQ ID NO: 682094 - DNA, 19 bp, Mus musculus
  siRNA target sequence for Tjp2 (NM_011597.1,852-870).
ctaggtcacggcatgaaca

SEQ ID NO: 682095 - DNA, 19 bp, Mus musculus
  siRNA target sequence for Tjp2 (NM_011597.1,855-873).
ggtcacggcatgaacacaa

SEQ ID NO: 682096 - DNA, 19 bp, Mus musculus
  siRNA target sequence for Tjp2 (NM_011597.1,896-914).
cccatcggggtccttctaa

SEQ ID NO: 682097 - DNA, 19 bp, Mus musculus
  siRNA target sequence for Tjp2 (NM_011597.1,954-972).
ggagtcagatcttcatcaa

SEQ ID NO: 682098 - DNA, 19 bp, Mus musculus
  siRNA target sequence for Tjp2 (NM_011597.1,957-975).
gtcagatcttcatcaaaga

SEQ ID NO: 682099 - DNA, 19 bp, Mus musculus
  siRNA target sequence for Tjp2 (NM_011597.1,1013-1031).
cttcatgagggggacataa

SEQ ID NO: 682100 - DNA, 19 bp, Mus musculus
  siRNA target sequence for Tjp2 (NM_011597.1,1023-1041).
gggacataattctcaagat

SEQ ID NO: 682101 - DNA, 19 bp, Mus musculus
  siRNA target sequence for Tjp2 (NM_011597.1,1039-1057).
gatcaacggcactgttact

SEQ ID NO: 682102 - DNA, 19 bp, Mus musculus
  siRNA target sequence for Tjp2 (NM_011597.1,1074-1092).
cggatgctcggaagttaat

SEQ ID NO: 682103 - DNA, 19 bp, Mus musculus
  siRNA target sequence for Tjp2 (NM_011597.1,1079-1097).
gctcggaagttaatagaaa

SEQ ID NO: 682104 - DNA, 19 bp, Mus musculus
  siRNA target sequence for Tjp2 (NM_011597.1,1235-1253).
gagagacgccagcagtatt

SEQ ID NO: 682105 - DNA, 19 bp, Mus musculus
  siRNA target sequence for Tjp2 (NM_011597.1,1237-1255).
gagacgccagcagtattct

SEQ ID NO: 682106 - DNA, 19 bp, Mus musculus
  siRNA target sequence for Tjp2 (NM_011597.1,1473-1491).
gtcctagtcccgaagatga

SEQ ID NO: 682107 - DNA, 19 bp, Mus musculus
  siRNA target sequence for Tjp2 (NM_011597.1,1503-1521).
gccctaacaccaaaatggt

SEQ ID NO: 682108 - DNA, 19 bp, Mus musculus
  siRNA target sequence for Tjp2 (NM_011597.1,1566-1584).
gaaacgacgttgggatatt

SEQ ID NO: 682109 - DNA, 19 bp, Mus musculus
  siRNA target sequence for Tjp2 (NM_011597.1,1697-1715).
gtcctctacctgctagaaa

SEQ ID NO: 682110 - DNA, 19 bp, Mus musculus
  siRNA target sequence for Tjp2 (NM_011597.1,1757-1775).
gcagacgtgtacagagata

SEQ ID NO: 682111 - DNA, 19 bp, Mus musculus
  siRNA target sequence for Tjp2 (NM_011597.1,1758-1776).
cagacgtgtacagagatat

SEQ ID NO: 682112 - DNA, 19 bp, Mus musculus
  siRNA target sequence for Tjp2 (NM_011597.1,1785-1803).
gtggcaggggagattcgtt

SEQ ID NO: 682113 - DNA, 19 bp, Mus musculus
  siRNA target sequence for Tjp2 (NM_011597.1,1787-1805).
ggcaggggagattcgtttt

SEQ ID NO: 682114 - DNA, 19 bp, Mus musculus
  siRNA target sequence for Tjp2 (NM_011597.1,1788-1806).
gcaggggagattcgttttt

SEQ ID NO: 682115 - DNA, 19 bp, Mus musculus
  siRNA target sequence for Tjp2 (NM_011597.1,1791-1809).
ggggagattcgtttttcat

SEQ ID NO: 682116 - DNA, 19 bp, Mus musculus
  siRNA target sequence for Tjp2 (NM_011597.1,1792-1810).
gggagattcgtttttcata

SEQ ID NO: 682117 - DNA, 19 bp, Mus musculus
  siRNA target sequence for Tjp2 (NM_011597.1,1793-1811).
ggagattcgtttttcataa

SEQ ID NO: 682118 - DNA, 19 bp, Mus musculus
  siRNA target sequence for Tjp2 (NM_011597.1,1924-1942).
cgtgaggatcgggaatgat

SEQ ID NO: 682119 - DNA, 19 bp, Mus musculus
  siRNA target sequence for Tjp2 (NM_011597.1,2102-2120).
gacctggcgcgttctgtat

SEQ ID NO: 682120 - DNA, 19 bp, Mus musculus
  siRNA target sequence for Tjp2 (NM_011597.1,2200-2218).
ccccatagcagatatagca

SEQ ID NO: 682121 - DNA, 19 bp, Mus musculus
  siRNA target sequence for Tjp2 (NM_011597.1,2201-2219).
cccatagcagatatagcaa

SEQ ID NO: 682122 - DNA, 19 bp, Mus musculus
  siRNA target sequence for Tjp2 (NM_011597.1,2202-2220).
ccatagcagatatagcaat

SEQ ID NO: 682123 - DNA, 19 bp, Mus musculus
  siRNA target sequence for Tjp2 (NM_011597.1,2222-2240).
gaaaggttggcaaatgagt

SEQ ID NO: 682124 - DNA, 19 bp, Mus musculus
  siRNA target sequence for Tjp2 (NM_011597.1,2279-2297).
gatgccggatctgagaaat

SEQ ID NO: 682125 - DNA, 19 bp, Mus musculus
  siRNA target sequence for Tjp2 (NM_011597.1,2303-2321).
ggagtggttcggttgaata

SEQ ID NO: 682126 - DNA, 19 bp, Mus musculus
  siRNA target sequence for Tjp2 (NM_011597.1,2322-2340).
ccgtgaggcaaattattga

SEQ ID NO: 682127 - DNA, 19 bp, Mus musculus
  siRNA target sequence for Tjp2 (NM_011597.1,2379-2397).
ctgtggacctgctcaatta

SEQ ID NO: 682128 - DNA, 19 bp, Mus musculus
  siRNA target sequence for Tjp2 (NM_011597.1,2470-2488).
gttgagtccaacatccaat

SEQ ID NO: 682129 - DNA, 19 bp, Mus musculus
  siRNA target sequence for Tjp2 (NM_011597.1,2473-2491).
gagtccaacatccaataaa

SEQ ID NO: 682130 - DNA, 19 bp, Mus musculus
  siRNA target sequence for Tjp2 (NM_011597.1,2477-2495).
ccaacatccaataaaagtt

SEQ ID NO: 682131 - DNA, 19 bp, Mus musculus
  siRNA target sequence for Tjp2 (NM_011597.1,2493-2511).
gttctcgcaagttatttga

SEQ ID NO: 682132 - DNA, 19 bp, Mus musculus
  siRNA target sequence for Tjp2 (NM_011597.1,2496-2514).
ctcgcaagttatttgatca

SEQ ID NO: 682133 - DNA, 19 bp, Mus musculus
  siRNA target sequence for Tjp2 (NM_011597.1,2533-2551).
gacctgttctcatcttttt

SEQ ID NO: 682134 - DNA, 19 bp, Mus musculus
  siRNA target sequence for Tjp2 (NM_011597.1,2546-2564).
ctttttacagccacaatca

SEQ ID NO: 682135 - DNA, 19 bp, Mus musculus
  siRNA target sequence for Tjp2 (NM_011597.1,2684-2702).
gaccgcatgtcctacttaa

SEQ ID NO: 682136 - DNA, 19 bp, Mus musculus
  siRNA target sequence for Tjp2 (NM_011597.1,2737-2755).
ccgtctcatcagtgacttt

SEQ ID NO: 682137 - DNA, 19 bp, Mus musculus
  siRNA target sequence for Tjp2 (NM_011597.1,2778-2796).
gcgcctacactgacaatga

SEQ ID NO: 682138 - DNA, 19 bp, Mus musculus
  siRNA target sequence for Tjp2 (NM_011597.1,2857-2875).
gcagcacgaggagaacata

SEQ ID NO: 682139 - DNA, 19 bp, Mus musculus
  siRNA target sequence for Tjp2 (NM_011597.1,2918-2936).
gctagcagagaccaactta

SEQ ID NO: 682140 - DNA, 19 bp, Mus musculus
  siRNA target sequence for Tjp2 (NM_011597.1,3133-3151).
cactccagtccctattcct

SEQ ID NO: 682141 - DNA, 19 bp, Mus musculus
  siRNA target sequence for Tjp2 (NM_011597.1,3213-3231).
gcagagtgaaaatattcga

SEQ ID NO: 682142 - DNA, 19 bp, Mus musculus
  siRNA target sequence for Tjp2 (NM_011597.1,3284-3302).
cagaatgcgaggatcgaaa

SEQ ID NO: 682143 - DNA, 19 bp, Mus musculus
  siRNA target sequence for Tjp2 (NM_011597.1,3286-3304).
gaatgcgaggatcgaaata

SEQ ID NO: 682144 - DNA, 19 bp, Mus musculus
  siRNA target sequence for Tjp3 (NM_013769.1,724-742).
cgaagcaggatgtgctaat

SEQ ID NO: 682145 - DNA, 19 bp, Mus musculus
  siRNA target sequence for Tjp3 (NM_013769.1,800-818).
gctaggcagtcagatcttt

SEQ ID NO: 682146 - DNA, 19 bp, Mus musculus
  siRNA target sequence for Tjp3 (NM_013769.1,896-914).
cggggtgtccagtgctaat

SEQ ID NO: 682147 - DNA, 19 bp, Mus musculus
  siRNA target sequence for Tjp3 (NM_013769.1,898-916).
gggtgtccagtgctaatct

SEQ ID NO: 682148 - DNA, 19 bp, Mus musculus
  siRNA target sequence for Tjp3 (NM_013769.1,900-918).
gtgtccagtgctaatctgt

SEQ ID NO: 682149 - DNA, 19 bp, Mus musculus
  siRNA target sequence for Tjp3 (NM_013769.1,931-949).
cacgaaggctcattgagaa

SEQ ID NO: 682150 - DNA, 19 bp, Mus musculus
  siRNA target sequence for Tjp3 (NM_013769.1,1030-1048).
gcgacagctccctaatgga

SEQ ID NO: 682151 - DNA, 19 bp, Mus musculus
  siRNA target sequence for Tjp3 (NM_013769.1,1181-1199).
gcgggaacggtcagtgaat

SEQ ID NO: 682152 - DNA, 19 bp, Mus musculus
  siRNA target sequence for Tjp3 (NM_013769.1,1182-1200).
cgggaacggtcagtgaatt

SEQ ID NO: 682153 - DNA, 19 bp, Mus musculus
  siRNA target sequence for Tjp3 (NM_013769.1,1185-1203).
gaacggtcagtgaattcaa

SEQ ID NO: 682154 - DNA, 19 bp, Mus musculus
  siRNA target sequence for Tjp3 (NM_013769.1,1233-1251).
gaaagccgctatgacattt

SEQ ID NO: 682155 - DNA, 19 bp, Mus musculus
  siRNA target sequence for Tjp3 (NM_013769.1,1598-1616).
ctacatccgcacacacttt

SEQ ID NO: 682156 - DNA, 19 bp, Mus musculus
  siRNA target sequence for Tjp3 (NM_013769.1,2009-2027).
gctcagagaagccagtttt

SEQ ID NO: 682157 - DNA, 19 bp, Mus musculus
  siRNA target sequence for Tjp3 (NM_013769.1,2138-2156).
cccatccaagatcatcaaa

SEQ ID NO: 682158 - DNA, 19 bp, Mus musculus
  siRNA target sequence for Tjp3 (NM_013769.1,2221-2239).
ccatcgagcgcctcaacta

SEQ ID NO: 682159 - DNA, 19 bp, Mus musculus
  siRNA target sequence for Tjp3 (NM_013769.1,2695-2713).
ccgtatgggtagatgatca

SEQ ID NO: 682160 - DNA, 19 bp, Mus musculus
  siRNA target sequence for Tjp3 (NM_013769.1,2735-2753).
gacaactatcacagacaaa

SEQ ID NO: 682161 - DNA, 19 bp, Mus musculus
  siRNA target sequence for Tjp3 (NM_013769.1,2874-2892).
gatgacgagggctatgact

SEQ ID NO: 682162 - DNA, 19 bp, Mus musculus
  siRNA target sequence for Tulp4 (NM_054040.1,266-284).
gtgcagaaggcgctactat

SEQ ID NO: 682163 - DNA, 19 bp, Mus musculus
  siRNA target sequence for Tulp4 (NM_054040.1,268-286).
gcagaaggcgctactatga

SEQ ID NO: 682164 - DNA, 19 bp, Mus musculus
  siRNA target sequence for Tulp4 (NM_054040.1,269-287).
cagaaggcgctactatgaa

SEQ ID NO: 682165 - DNA, 19 bp, Mus musculus
  siRNA target sequence for Tulp4 (NM_054040.1,271-289).
gaaggcgctactatgaaga

SEQ ID NO: 682166 - DNA, 19 bp, Mus musculus
  siRNA target sequence for Tulp4 (NM_054040.1,367-385).
gtacaccacagagaataaa

SEQ ID NO: 682167 - DNA, 19 bp, Mus musculus
  siRNA target sequence for Tulp4 (NM_054040.1,466-484).
cagacggaggaatctttgt

SEQ ID NO: 682168 - DNA, 19 bp, Mus musculus
  siRNA target sequence for Tulp4 (NM_054040.1,468-486).
gacggaggaatctttgtgt

SEQ ID NO: 682169 - DNA, 19 bp, Mus musculus
  siRNA target sequence for Tulp4 (NM_054040.1,537-555).
gctcaggtgagtgatttca

SEQ ID NO: 682170 - DNA, 19 bp, Mus musculus
  siRNA target sequence for Tulp4 (NM_054040.1,666-684).
cagatcacctgtggtatat

SEQ ID NO: 682171 - DNA, 19 bp, Mus musculus
  siRNA target sequence for Tulp4 (NM_054040.1,746-764).
ctgccacggcagaatgcta

SEQ ID NO: 682172 - DNA, 19 bp, Mus musculus
  siRNA target sequence for Tulp4 (NM_054040.1,768-786).
catgtcctcctgcatgaat

SEQ ID NO: 682173 - DNA, 19 bp, Mus musculus
  siRNA target sequence for Tulp4 (NM_054040.1,852-870).
gacactgactcggatgatt

SEQ ID NO: 682174 - DNA, 19 bp, Mus musculus
  siRNA target sequence for Tulp4 (NM_054040.1,854-872).
cactgactcggatgattat

SEQ ID NO: 682175 - DNA, 19 bp, Mus musculus
  siRNA target sequence for Tulp4 (NM_054040.1,952-970).
ccggagacatcagcttaat

SEQ ID NO: 682176 - DNA, 19 bp, Mus musculus
  siRNA target sequence for Tulp4 (NM_054040.1,962-980).
cagcttaatgaacaactat

SEQ ID NO: 682177 - DNA, 19 bp, Mus musculus
  siRNA target sequence for Tulp4 (NM_054040.1,1037-1055).
gtgtacgcagggagactta

SEQ ID NO: 682178 - DNA, 19 bp, Mus musculus
  siRNA target sequence for Tulp4 (NM_054040.1,1039-1057).
gtacgcagggagacttact

SEQ ID NO: 682179 - DNA, 19 bp, Mus musculus
  siRNA target sequence for Tulp4 (NM_054040.1,1102-1120).
ccaatggtcctcttctgaa

SEQ ID NO: 682180 - DNA, 19 bp, Mus musculus
  siRNA target sequence for Tulp4 (NM_054040.1,1123-1141).
gtgccatggtcaagttcta

SEQ ID NO: 682181 - DNA, 19 bp, Mus musculus
  siRNA target sequence for Tulp4 (NM_054040.1,1131-1149).
gtcaagttctacaatgtta

SEQ ID NO: 682182 - DNA, 19 bp, Mus musculus
  siRNA target sequence for Tulp4 (NM_054040.1,1166-1184).
cactctggatacacttgta

SEQ ID NO: 682183 - DNA, 19 bp, Mus musculus
  siRNA target sequence for Tulp4 (NM_054040.1,1182-1200).
gtacagcgccctatcatct

SEQ ID NO: 682184 - DNA, 19 bp, Mus musculus
  siRNA target sequence for Tulp4 (NM_054040.1,1185-1203).
cagcgccctatcatctcta

SEQ ID NO: 682185 - DNA, 19 bp, Mus musculus
  siRNA target sequence for Tulp4 (NM_054040.1,1188-1206).
cgccctatcatctctatct

SEQ ID NO: 682186 - DNA, 19 bp, Mus musculus
  siRNA target sequence for Tulp4 (NM_054040.1,1191-1209).
cctatcatctctatctgtt

SEQ ID NO: 682187 - DNA, 19 bp, Mus musculus
  siRNA target sequence for Tulp4 (NM_054040.1,1329-1347).
cgagaagacaaggatgtta

SEQ ID NO: 682188 - DNA, 19 bp, Mus musculus
  siRNA target sequence for Tulp4 (NM_054040.1,1330-1348).
gagaagacaaggatgttaa

SEQ ID NO: 682189 - DNA, 19 bp, Mus musculus
  siRNA target sequence for Tulp4 (NM_054040.1,1393-1411).
ccttcattcccactattaa

SEQ ID NO: 682190 - DNA, 19 bp, Mus musculus
  siRNA target sequence for Tulp4 (NM_054040.1,1430-1448).
caacaacatgcgagacttt

SEQ ID NO: 682191 - DNA, 19 bp, Mus musculus
  siRNA target sequence for Tulp4 (NM_054040.1,1528-1546).
cctgctacacactctactt

SEQ ID NO: 682192 - DNA, 19 bp, Mus musculus
  siRNA target sequence for Tulp4 (NM_054040.1,1599-1617).
ctgcggccagagtttgtca

SEQ ID NO: 682193 - DNA, 19 bp, Mus musculus
  siRNA target sequence for Tulp4 (NM_054040.1,1601-1619).
gcggccagagtttgtcatt

SEQ ID NO: 682194 - DNA, 19 bp, Mus musculus
  siRNA target sequence for Tulp4 (NM_054040.1,1602-1620).
cggccagagtttgtcatta

SEQ ID NO: 682195 - DNA, 19 bp, Mus musculus
  siRNA target sequence for Tulp4 (NM_054040.1,1603-1621).
ggccagagtttgtcattat

SEQ ID NO: 682196 - DNA, 19 bp, Mus musculus
  siRNA target sequence for Tulp4 (NM_054040.1,1626-1644).
cctcggacagacagcaaat

SEQ ID NO: 682197 - DNA, 19 bp, Mus musculus
  siRNA target sequence for Tulp4 (NM_054040.1,1639-1657).
gcaaatcagatgagatcta

SEQ ID NO: 682198 - DNA, 19 bp, Mus musculus
  siRNA target sequence for Tulp4 (NM_054040.1,1640-1658).
caaatcagatgagatctat

SEQ ID NO: 682199 - DNA, 19 bp, Mus musculus
  siRNA target sequence for Tulp4 (NM_054040.1,1655-1673).
ctatgggaacagcttaatt

SEQ ID NO: 682200 - DNA, 19 bp, Mus musculus
  siRNA target sequence for Tulp4 (NM_054040.1,1832-1850).
ggctgctcaagagatttct

SEQ ID NO: 682201 - DNA, 19 bp, Mus musculus
  siRNA target sequence for Tulp4 (NM_054040.1,1898-1916).
cctgacacggagagagttt

SEQ ID NO: 682202 - DNA, 19 bp, Mus musculus
  siRNA target sequence for Tulp4 (NM_054040.1,1903-1921).
cacggagagagtttccttt

SEQ ID NO: 682203 - DNA, 19 bp, Mus musculus
  siRNA target sequence for Tulp4 (NM_054040.1,1972-1990).
ggggaaccaagtttaagat

SEQ ID NO: 682204 - DNA, 19 bp, Mus musculus
  siRNA target sequence for Tulp4 (NM_054040.1,2017-2035).
ccaacctcggtgcagtaat

SEQ ID NO: 682205 - DNA, 19 bp, Mus musculus
  siRNA target sequence for Tulp4 (NM_054040.1,2021-2039).
cctcggtgcagtaatctat

SEQ ID NO: 682206 - DNA, 19 bp, Mus musculus
  siRNA target sequence for Tulp4 (NM_054040.1,2022-2040).
ctcggtgcagtaatctata

SEQ ID NO: 682207 - DNA, 19 bp, Mus musculus
  siRNA target sequence for Tulp4 (NM_054040.1,2025-2043).
ggtgcagtaatctataaaa

SEQ ID NO: 682208 - DNA, 19 bp, Mus musculus
  siRNA target sequence for Tulp4 (NM_054040.1,2064-2082).
cctcggcagatgaccattt

SEQ ID NO: 682209 - DNA, 19 bp, Mus musculus
  siRNA target sequence for Tulp4 (NM_054040.1,2065-2083).
ctcggcagatgaccattta

SEQ ID NO: 682210 - DNA, 19 bp, Mus musculus
  siRNA target sequence for Tulp4 (NM_054040.1,2068-2086).
ggcagatgaccatttatct

SEQ ID NO: 682211 - DNA, 19 bp, Mus musculus
  siRNA target sequence for Tulp4 (NM_054040.1,2087-2105).
cccggaagttaggaagatt

SEQ ID NO: 682212 - DNA, 19 bp, Mus musculus
  siRNA target sequence for Tulp4 (NM_054040.1,2088-2106).
ccggaagttaggaagattt

SEQ ID NO: 682213 - DNA, 19 bp, Mus musculus
  siRNA target sequence for Tulp4 (NM_054040.1,2091-2109).
gaagttaggaagatttcca

SEQ ID NO: 682214 - DNA, 19 bp, Mus musculus
  siRNA target sequence for Tulp4 (NM_054040.1,2107-2125).
ccatggactatattaacct

SEQ ID NO: 682215 - DNA, 19 bp, Mus musculus
  siRNA target sequence for Tulp4 (NM_054040.1,2130-2148).
gtcttcaacccaaacgttt

SEQ ID NO: 682216 - DNA, 19 bp, Mus musculus
  siRNA target sequence for Tulp4 (NM_054040.1,2162-2180).
ggatgacttaccagttaca

SEQ ID NO: 682217 - DNA, 19 bp, Mus musculus
  siRNA target sequence for Tulp4 (NM_054040.1,2618-2636).
ggatgcggtagttttcagt

SEQ ID NO: 682218 - DNA, 19 bp, Mus musculus
  siRNA target sequence for Tulp4 (NM_054040.1,2677-2695).
ccccgtatccaggaactat

SEQ ID NO: 682219 - DNA, 19 bp, Mus musculus
  siRNA target sequence for Tulp4 (NM_054040.1,2820-2838).
ctaggctatgagaggatta

SEQ ID NO: 682220 - DNA, 19 bp, Mus musculus
  siRNA target sequence for Tulp4 (NM_054040.1,2823-2841).
ggctatgagaggattacca

SEQ ID NO: 682221 - DNA, 19 bp, Mus musculus
  siRNA target sequence for Tulp4 (NM_054040.1,2996-3014).
gactctgaaccgactaact

SEQ ID NO: 682222 - DNA, 19 bp, Mus musculus
  siRNA target sequence for Tulp4 (NM_054040.1,2998-3016).
ctctgaaccgactaactgt

SEQ ID NO: 682223 - DNA, 19 bp, Mus musculus
  siRNA target sequence for Tulp4 (NM_054040.1,3147-3165).
cgagaggtggcacttaaga

SEQ ID NO: 682224 - DNA, 19 bp, Mus musculus
  siRNA target sequence for Tulp4 (NM_054040.1,3404-3422).
ccgtgatcgtactgactat

SEQ ID NO: 682225 - DNA, 19 bp, Mus musculus
  siRNA target sequence for Tulp4 (NM_054040.1,3406-3424).
gtgatcgtactgactatgt

SEQ ID NO: 682226 - DNA, 19 bp, Mus musculus
  siRNA target sequence for Tulp4 (NM_054040.1,3408-3426).
gatcgtactgactatgtca

SEQ ID NO: 682227 - DNA, 19 bp, Mus musculus
  siRNA target sequence for Tulp4 (NM_054040.1,3767-3785).
ctctttgcctggagtacaa

SEQ ID NO: 682228 - DNA, 19 bp, Mus musculus
  siRNA target sequence for Tulp4 (NM_054040.1,4152-4170).
ccgcagagaacggaaaaat

SEQ ID NO: 682229 - DNA, 19 bp, Mus musculus
  siRNA target sequence for Tulp4 (NM_054040.1,4153-4171).
cgcagagaacggaaaaatt

SEQ ID NO: 682230 - DNA, 19 bp, Mus musculus
  siRNA target sequence for Tulp4 (NM_054040.1,4162-4180).
cggaaaaattcggaaagaa

SEQ ID NO: 682231 - DNA, 19 bp, Mus musculus
  siRNA target sequence for Tulp4 (NM_054040.1,4164-4182).
gaaaaattcggaaagaaga

SEQ ID NO: 682232 - DNA, 19 bp, Mus musculus
  siRNA target sequence for Tulp4 (NM_054040.1,4232-4250).
cactgagggcaaagtgaaa

SEQ ID NO: 682233 - DNA, 19 bp, Mus musculus
  siRNA target sequence for Tulp4 (NM_054040.1,4396-4414).
gtgagcccgagctgttcat

SEQ ID NO: 682234 - DNA, 19 bp, Mus musculus
  siRNA target sequence for Tulp4 (NM_054040.1,4398-4416).
gagcccgagctgttcatca

SEQ ID NO: 682235 - DNA, 19 bp, Mus musculus
  siRNA target sequence for Tulp4 (NM_054040.1,4417-4435).
gcggggatgagctgatgaa

SEQ ID NO: 682236 - DNA, 19 bp, Mus musculus
  siRNA target sequence for Tulp4 (NM_054040.1,4694-4712).
gcagtttggacggattgat

SEQ ID NO: 682237 - DNA, 19 bp, Mus musculus
  siRNA target sequence for Tulp4 (NM_054040.1,4785-4803).
gtgactcagcgcctaaaat

SEQ ID NO: 682238 - DNA, 19 bp, Mus musculus
  siRNA target sequence for 2510009H09Rik (NM_152823.1,208-226).
gcttggaaaccaaatacgt

SEQ ID NO: 682239 - DNA, 19 bp, Mus musculus
  siRNA target sequence for 2510009H09Rik (NM_152823.1,398-416).
gggtctctgtggcatgaaa

SEQ ID NO: 682240 - DNA, 19 bp, Mus musculus
  siRNA target sequence for 2610311B09Rik (NM_026012.1,21-39).
caaaggtgtggtctattca

SEQ ID NO: 682241 - DNA, 19 bp, Mus musculus
  siRNA target sequence for 2610311B09Rik (NM_026012.1,100-118).
gccctagcccccaatacct

SEQ ID NO: 682242 - DNA, 19 bp, Mus musculus
  siRNA target sequence for 2610311B09Rik (NM_026012.1,145-163).
ggggcctcgagcaacatca

SEQ ID NO: 682243 - DNA, 19 bp, Mus musculus
  siRNA target sequence for 2610311B09Rik (NM_026012.1,146-164).
gggcctcgagcaacatcat

SEQ ID NO: 682244 - DNA, 19 bp, Mus musculus
  siRNA target sequence for 2610311B09Rik (NM_026012.1,230-248).
gctggcgctcacataagca

SEQ ID NO: 682245 - DNA, 19 bp, Mus musculus
  siRNA target sequence for 2610311B09Rik (NM_026012.1,231-249).
ctggcgctcacataagcaa

SEQ ID NO: 682246 - DNA, 19 bp, Mus musculus
  siRNA target sequence for 2610311B09Rik (NM_026012.1,626-644).
ccataggccgagaagatgt

SEQ ID NO: 682247 - DNA, 19 bp, Mus musculus
  siRNA target sequence for Alcam (NM_009655.1,1790-1808).
ccgatgggtccccagtatt

SEQ ID NO: 682248 - DNA, 19 bp, Mus musculus
  siRNA target sequence for Alcam (NM_009655.1,1791-1809).
cgatgggtccccagtattt

SEQ ID NO: 682249 - DNA, 19 bp, Mus musculus
  siRNA target sequence for Alcam (NM_009655.1,1792-1810).
gatgggtccccagtattta

SEQ ID NO: 682250 - DNA, 19 bp, Mus musculus
  siRNA target sequence for Alcam (NM_009655.1,1797-1815).
gtccccagtatttattgca

SEQ ID NO: 682251 - DNA, 19 bp, Mus musculus
  siRNA target sequence for Alcam (NM_009655.1,1818-1836).
ccgatcttctacgaagaaa

SEQ ID NO: 682252 - DNA, 19 bp, Mus musculus
  siRNA target sequence for Alcam (NM_009655.1,1819-1837).
cgatcttctacgaagaaaa

SEQ ID NO: 682253 - DNA, 19 bp, Mus musculus
  siRNA target sequence for Alcam (NM_009655.1,1888-1906).
gaaaactacactttgtcta

SEQ ID NO: 682254 - DNA, 19 bp, Mus musculus
  siRNA target sequence for Alcam (NM_009655.1,1904-1922).
ctatcgccaatgctaagat

SEQ ID NO: 682255 - DNA, 19 bp, Mus musculus
  siRNA target sequence for Alcam (NM_009655.1,1925-1943).
gtgatgagaagagatttgt

SEQ ID NO: 682256 - DNA, 19 bp, Mus musculus
  siRNA target sequence for Alcam (NM_009655.1,1959-1977).
cgaggacaatgtgtttgaa

SEQ ID NO: 682257 - DNA, 19 bp, Mus musculus
  siRNA target sequence for Alcam (NM_009655.1,1998-2016).
gttcaagcaaccatctaaa

SEQ ID NO: 682258 - DNA, 19 bp, Mus musculus
  siRNA target sequence for Alcam (NM_009655.1,2067-2085).
gttaggtgactgcatttca

SEQ ID NO: 682259 - DNA, 19 bp, Mus musculus
  siRNA target sequence for Alcam (NM_009655.1,2152-2170).
ggagaggtggccatacttt

SEQ ID NO: 682260 - DNA, 19 bp, Mus musculus
  siRNA target sequence for Alcam (NM_009655.1,2153-2171).
gagaggtggccatactttt

SEQ ID NO: 682261 - DNA, 19 bp, Mus musculus
  siRNA target sequence for Alcam (NM_009655.1,2158-2176).
gtggccatactttttaaaa

SEQ ID NO: 682262 - DNA, 19 bp, Mus musculus
  siRNA target sequence for Alcam (NM_009655.1,2188-2206).
ccaggaactcagttgtata

SEQ ID NO: 682263 - DNA, 19 bp, Mus musculus
  siRNA target sequence for Alcam (NM_009655.1,2232-2250).
gacaaccagatctgacata

SEQ ID NO: 682264 - DNA, 19 bp, Mus musculus
  siRNA target sequence for Alcam (NM_009655.1,2264-2282).
cctgttctgtgacatatta

SEQ ID NO: 682265 - DNA, 19 bp, Mus musculus
  siRNA target sequence for Alcam (NM_009655.1,2284-2302).
ggaccctccggccagaaaa

SEQ ID NO: 682266 - DNA, 19 bp, Mus musculus
  siRNA target sequence for Alcam (NM_009655.1,2287-2305).
ccctccggccagaaaacaa

SEQ ID NO: 682267 - DNA, 19 bp, Mus musculus
  siRNA target sequence for Alcam (NM_009655.1,2289-2307).
ctccggccagaaaacaatt

SEQ ID NO: 682268 - DNA, 19 bp, Mus musculus
  siRNA target sequence for Alcam (NM_009655.1,2312-2330).
ccgaacaagaaatctttga

SEQ ID NO: 682269 - DNA, 19 bp, Mus musculus
  siRNA target sequence for Alcam (NM_009655.1,2320-2338).
gaaatctttgatatttact

SEQ ID NO: 682270 - DNA, 19 bp, Mus musculus
  siRNA target sequence for Alcam (NM_009655.1,2435-2453).
cacctcctgaggagttcat

SEQ ID NO: 682271 - DNA, 19 bp, Mus musculus
  siRNA target sequence for Alcam (NM_009655.1,2437-2455).
cctcctgaggagttcatgt

SEQ ID NO: 682272 - DNA, 19 bp, Mus musculus
  siRNA target sequence for Alcam (NM_009655.1,2479-2497).
ggcataagaagctcaaaca

SEQ ID NO: 682273 - DNA, 19 bp, Mus musculus
  siRNA target sequence for Alcam (NM_009655.1,2527-2545).
gccacaggggactacaaat

SEQ ID NO: 682274 - DNA, 19 bp, Mus musculus
  siRNA target sequence for Alcam (NM_009655.1,2538-2556).
ctacaaatgctcactcatt

SEQ ID NO: 682275 - DNA, 19 bp, Mus musculus
  siRNA target sequence for Alcam (NM_009655.1,2582-2600).
cgaccatcacagttcacta

SEQ ID NO: 682276 - DNA, 19 bp, Mus musculus
  siRNA target sequence for Alcam (NM_009655.1,2591-2609).
cagttcactacttggattt

SEQ ID NO: 682277 - DNA, 19 bp, Mus musculus
  siRNA target sequence for Alcam (NM_009655.1,2598-2616).
ctacttggatttatcctta

SEQ ID NO: 682278 - DNA, 19 bp, Mus musculus
  siRNA target sequence for Alcam (NM_009655.1,2742-2760).
cttttccagtcttcattat

SEQ ID NO: 682279 - DNA, 19 bp, Mus musculus
  siRNA target sequence for Alcam (NM_009655.1,2770-2788).
gggaactatgtctgtgaaa

SEQ ID NO: 682280 - DNA, 19 bp, Mus musculus
  siRNA target sequence for Alcam (NM_009655.1,2826-2844).
gtcgctgaccctcattgta

SEQ ID NO: 682281 - DNA, 19 bp, Mus musculus
  siRNA target sequence for Alcam (NM_009655.1,2828-2846).
cgctgaccctcattgtaga

SEQ ID NO: 682282 - DNA, 19 bp, Mus musculus
  siRNA target sequence for Alcam (NM_009655.1,2848-2866).
gggaaacctcaaatcaaaa

SEQ ID NO: 682283 - DNA, 19 bp, Mus musculus
  siRNA target sequence for Alcam (NM_009655.1,2855-2873).
ctcaaatcaaaatgactaa

SEQ ID NO: 682284 - DNA, 19 bp, Mus musculus
  siRNA target sequence for Alcam (NM_009655.1,2883-2901).
ccccagtggactgtctaaa

SEQ ID NO: 682285 - DNA, 19 bp, Mus musculus
  siRNA target sequence for Alcam (NM_009655.1,2884-2902).
cccagtggactgtctaaaa

SEQ ID NO: 682286 - DNA, 19 bp, Mus musculus
  siRNA target sequence for Alcam (NM_009655.1,2886-2904).
cagtggactgtctaaaact

SEQ ID NO: 682287 - DNA, 19 bp, Mus musculus
  siRNA target sequence for Alcam (NM_009655.1,2891-2909).
gactgtctaaaactataat

SEQ ID NO: 682288 - DNA, 19 bp, Mus musculus
  siRNA target sequence for Alcam (NM_009655.1,2893-2911).
ctgtctaaaactataatct

SEQ ID NO: 682289 - DNA, 19 bp, Mus musculus
  siRNA target sequence for Alcam (NM_009655.1,2938-2956).
gctatacattggaccatta

SEQ ID NO: 682290 - DNA, 19 bp, Mus musculus
  siRNA target sequence for Alcam (NM_009655.1,2959-2977).
ggcagtgggagcgtcataa

SEQ ID NO: 682291 - DNA, 19 bp, Mus musculus
  siRNA target sequence for Alcam (NM_009655.1,2960-2978).
gcagtgggagcgtcataaa

SEQ ID NO: 682292 - DNA, 19 bp, Mus musculus
  siRNA target sequence for Alcam (NM_009655.1,2963-2981).
gtgggagcgtcataaacca

SEQ ID NO: 682293 - DNA, 19 bp, Mus musculus
  siRNA target sequence for Alcam (NM_009655.1,2965-2983).
gggagcgtcataaaccaaa

SEQ ID NO: 682294 - DNA, 19 bp, Mus musculus
  siRNA target sequence for Alcam (NM_009655.1,2969-2987).
gcgtcataaaccaaacaga

SEQ ID NO: 682295 - DNA, 19 bp, Mus musculus
  siRNA target sequence for Alcam (NM_009655.1,2986-3004).
gaggagtctccttatatta

SEQ ID NO: 682296 - DNA, 19 bp, Mus musculus
  siRNA target sequence for Alcam (NM_009655.1,3007-3025).
ggcaggtattatagtaaaa

SEQ ID NO: 682297 - DNA, 19 bp, Mus musculus
  siRNA target sequence for Alcam (NM_009655.1,3008-3026).
gcaggtattatagtaaaat

SEQ ID NO: 682298 - DNA, 19 bp, Mus musculus
  siRNA target sequence for Alcam (NM_009655.1,3011-3029).
ggtattatagtaaaattat

SEQ ID NO: 682299 - DNA, 19 bp, Mus musculus
  siRNA target sequence for Alcam (NM_009655.1,3037-3055).
cctgaggagaatgtaacat

SEQ ID NO: 682300 - DNA, 19 bp, Mus musculus
  siRNA target sequence for Alcam (NM_009655.1,3038-3056).
ctgaggagaatgtaacatt

SEQ ID NO: 682301 - DNA, 19 bp, Mus musculus
  siRNA target sequence for Alcam (NM_009655.1,3040-3058).
gaggagaatgtaacattaa

SEQ ID NO: 682302 - DNA, 19 bp, Mus musculus
  siRNA target sequence for Alcam (NM_009655.1,3042-3060).
ggagaatgtaacattaact

SEQ ID NO: 682303 - DNA, 19 bp, Mus musculus
  siRNA target sequence for Alcam (NM_009655.1,3076-3094).
caactggagagaacagtaa

SEQ ID NO: 682304 - DNA, 19 bp, Mus musculus
  siRNA target sequence for Alcam (NM_009655.1,3089-3107).
cagtaaactccctgaatgt

SEQ ID NO: 682305 - DNA, 19 bp, Mus musculus
  siRNA target sequence for Alcam (NM_009655.1,3102-3120).
gaatgtctctgcgataagt

SEQ ID NO: 682306 - DNA, 19 bp, Mus musculus
  siRNA target sequence for Alcam (NM_009655.1,3132-3150).
cgatgaggcagacgatata

SEQ ID NO: 682307 - DNA, 19 bp, Mus musculus
  siRNA target sequence for Alcam (NM_009655.1,3133-3151).
gatgaggcagacgatataa

SEQ ID NO: 682308 - DNA, 19 bp, Mus musculus
  siRNA target sequence for Alcam (NM_009655.1,3142-3160).
gacgatataagtgatgaaa

SEQ ID NO: 682309 - DNA, 19 bp, Mus musculus
  siRNA target sequence for Alcam (NM_009655.1,3145-3163).
gatataagtgatgaaaaca

SEQ ID NO: 682310 - DNA, 19 bp, Mus musculus
  siRNA target sequence for Alcam (NM_009655.1,3275-3293).
ctgcatcaaaacatgtaaa

SEQ ID NO: 682311 - DNA, 19 bp, Mus musculus
  siRNA target sequence for Alcam (NM_009655.1,3277-3295).
gcatcaaaacatgtaaaca

SEQ ID NO: 682312 - DNA, 19 bp, Mus musculus
  siRNA target sequence for Alcam (NM_009655.1,3278-3296).
catcaaaacatgtaaacaa

SEQ ID NO: 682313 - DNA, 19 bp, Mus musculus
  siRNA target sequence for Ank1 (NM_031158.1,666-684).
ctatggagccaatgtcaat

SEQ ID NO: 682314 - DNA, 19 bp, Mus musculus
  siRNA target sequence for Ank1 (NM_031158.1,701-719).
gctttactcccctgtacat

SEQ ID NO: 682315 - DNA, 19 bp, Mus musculus
  siRNA target sequence for Ank1 (NM_031158.1,938-956).
cagtccttctgcagaatga

SEQ ID NO: 682316 - DNA, 19 bp, Mus musculus
  siRNA target sequence for Ank1 (NM_031158.1,1052-1070).
ggggagccagcgtcaactt

SEQ ID NO: 682317 - DNA, 19 bp, Mus musculus
  siRNA target sequence for Ank1 (NM_031158.1,1065-1083).
caacttcacacctcagaat

SEQ ID NO: 682318 - DNA, 19 bp, Mus musculus
  siRNA target sequence for Ank1 (NM_031158.1,1146-1164).
ggaccgaggggctcagata

SEQ ID NO: 682319 - DNA, 19 bp, Mus musculus
  siRNA target sequence for Ank1 (NM_031158.1,1173-1191).
gaccaaggatgaattgaca

SEQ ID NO: 682320 - DNA, 19 bp, Mus musculus
  siRNA target sequence for Ank1 (NM_031158.1,1323-1341).
cgactgtgtccgacttcta

SEQ ID NO: 682321 - DNA, 19 bp, Mus musculus
  siRNA target sequence for Ank1 (NM_031158.1,1324-1342).
gactgtgtccgacttctat

SEQ ID NO: 682322 - DNA, 19 bp, Mus musculus
  siRNA target sequence for Ank1 (NM_031158.1,1330-1348).
gtccgacttctattgcaat

SEQ ID NO: 682323 - DNA, 19 bp, Mus musculus
  siRNA target sequence for Ank1 (NM_031158.1,1333-1351).
cgacttctattgcaataca

SEQ ID NO: 682324 - DNA, 19 bp, Mus musculus
  siRNA target sequence for Ank1 (NM_031158.1,1334-1352).
gacttctattgcaatacaa

SEQ ID NO: 682325 - DNA, 19 bp, Mus musculus
  siRNA target sequence for Ank1 (NM_031158.1,1344-1362).
gcaatacaatgcagagata

SEQ ID NO: 682326 - DNA, 19 bp, Mus musculus
  siRNA target sequence for Ank1 (NM_031158.1,1419-1437).
ccaccgggtggctaaggtt

SEQ ID NO: 682327 - DNA, 19 bp, Mus musculus
  siRNA target sequence for Ank1 (NM_031158.1,1423-1441).
cgggtggctaaggttcttt

SEQ ID NO: 682328 - DNA, 19 bp, Mus musculus
  siRNA target sequence for Ank1 (NM_031158.1,1480-1498).
ggttttaccccgttacaca

SEQ ID NO: 682329 - DNA, 19 bp, Mus musculus
  siRNA target sequence for Ank1 (NM_031158.1,1481-1499).
gttttaccccgttacacat

SEQ ID NO: 682330 - DNA, 19 bp, Mus musculus
  siRNA target sequence for Ank1 (NM_031158.1,1612-1630).
ggacaccttcctattgtga

SEQ ID NO: 682331 - DNA, 19 bp, Mus musculus
  siRNA target sequence for Ank1 (NM_031158.1,1613-1631).
gacaccttcctattgtgaa

SEQ ID NO: 682332 - DNA, 19 bp, Mus musculus
  siRNA target sequence for Ank1 (NM_031158.1,1618-1636).
cttcctattgtgaagaact

SEQ ID NO: 682333 - DNA, 19 bp, Mus musculus
  siRNA target sequence for Ank1 (NM_031158.1,1648-1666).
ggagcgtcacccaatgtct

SEQ ID NO: 682334 - DNA, 19 bp, Mus musculus
  siRNA target sequence for Ank1 (NM_031158.1,1961-1979).
gcatgaccaagaaaggatt

SEQ ID NO: 682335 - DNA, 19 bp, Mus musculus
  siRNA target sequence for Ank1 (NM_031158.1,2115-2133).
ggacattgtcaaacttctt

SEQ ID NO: 682336 - DNA, 19 bp, Mus musculus
  siRNA target sequence for Ank1 (NM_031158.1,2484-2502).
ccatgtggccagtcattat

SEQ ID NO: 682337 - DNA, 19 bp, Mus musculus
  siRNA target sequence for Ank1 (NM_031158.1,2619-2637).
gacattgctcctgaagaat

SEQ ID NO: 682338 - DNA, 19 bp, Mus musculus
  siRNA target sequence for Ank1 (NM_031158.1,2680-2698).
ctggcaatagccaaacgtt

SEQ ID NO: 682339 - DNA, 19 bp, Mus musculus
  siRNA target sequence for Ank1 (NM_031158.1,2702-2720).
gctacatctctgtaacaga

SEQ ID NO: 682340 - DNA, 19 bp, Mus musculus
  siRNA target sequence for Ank1 (NM_031158.1,2808-2826).
cctggacgtgtctgaagat

SEQ ID NO: 682341 - DNA, 19 bp, Mus musculus
  siRNA target sequence for Ank1 (NM_031158.1,2990-3008).
cacctgagaccgttgtgat

SEQ ID NO: 682342 - DNA, 19 bp, Mus musculus
  siRNA target sequence for Ank1 (NM_031158.1,3000-3018).
cgttgtgatccgatctgaa

SEQ ID NO: 682343 - DNA, 19 bp, Mus musculus
  siRNA target sequence for Ank1 (NM_031158.1,3447-3465).
ggagcacaagagtcgttat

SEQ ID NO: 682344 - DNA, 19 bp, Mus musculus
  siRNA target sequence for Ank1 (NM_031158.1,3541-3559).
cgtgtgtgccgcatcatca

SEQ ID NO: 682345 - DNA, 19 bp, Mus musculus
  siRNA target sequence for Ank1 (NM_031158.1,3563-3581).
ccgacttccctctgtactt

SEQ ID NO: 682346 - DNA, 19 bp, Mus musculus
  siRNA target sequence for Ank1 (NM_031158.1,3564-3582).
cgacttccctctgtacttt

SEQ ID NO: 682347 - DNA, 19 bp, Mus musculus
  siRNA target sequence for Ank1 (NM_031158.1,3689-3707).
ctgtgaccaacaaagtgaa

SEQ ID NO: 682348 - DNA, 19 bp, Mus musculus
  siRNA target sequence for Ank1 (NM_031158.1,3937-3955).
caagcccagtgggaagata

SEQ ID NO: 682349 - DNA, 19 bp, Mus musculus
  siRNA target sequence for Ank1 (NM_031158.1,3960-3978).
gggaacaaccaaacttata

SEQ ID NO: 682350 - DNA, 19 bp, Mus musculus
  siRNA target sequence for Ank1 (NM_031158.1,3961-3979).
ggaacaaccaaacttatat

SEQ ID NO: 682351 - DNA, 19 bp, Mus musculus
  siRNA target sequence for Ank1 (NM_031158.1,3973-3991).
cttatatacgccaatgagt

SEQ ID NO: 682352 - DNA, 19 bp, Mus musculus
  siRNA target sequence for Ank1 (NM_031158.1,4318-4336).
caacagcggagcttccatt

SEQ ID NO: 682353 - DNA, 19 bp, Mus musculus
  siRNA target sequence for Ank1 (NM_031158.1,4338-4356).
ccagtcgtttcgagagaat

SEQ ID NO: 682354 - DNA, 19 bp, Mus musculus
  siRNA target sequence for Ank1 (NM_031158.1,4396-4414).
gagccaggagggttcttgt

SEQ ID NO: 682355 - DNA, 19 bp, Mus musculus
  siRNA target sequence for Ank1 (NM_031158.1,4413-4431).
gtcgttcctacgaaagaca

SEQ ID NO: 682356 - DNA, 19 bp, Mus musculus
  siRNA target sequence for Ank1 (NM_031158.1,4415-4433).
cgttcctacgaaagacaat

SEQ ID NO: 682357 - DNA, 19 bp, Mus musculus
  siRNA target sequence for Ank1 (NM_031158.1,4543-4561).
cttcgatacagcattctca

SEQ ID NO: 682358 - DNA, 19 bp, Mus musculus
  siRNA target sequence for Ank1 (NM_031158.1,4689-4707).
caaccggatccgtgtagaa

SEQ ID NO: 682359 - DNA, 19 bp, Mus musculus
  siRNA target sequence for Ank1 (NM_031158.1,4762-4780).
cgtgaaggcgaaaatgcaa

SEQ ID NO: 682360 - DNA, 19 bp, Mus musculus
  siRNA target sequence for Ank1 (NM_031158.1,4763-4781).
gtgaaggcgaaaatgcaaa

SEQ ID NO: 682361 - DNA, 19 bp, Mus musculus
  siRNA target sequence for Ank1 (NM_031158.1,4815-4833).
cgacaggagtgagattgtt

SEQ ID NO: 682362 - DNA, 19 bp, Mus musculus
  siRNA target sequence for Ank1 (NM_031158.1,4820-4838).
ggagtgagattgttaacat

SEQ ID NO: 682363 - DNA, 19 bp, Mus musculus
  siRNA target sequence for Ank1 (NM_031158.1,4891-4909).
ggggaccgggagtactcat

SEQ ID NO: 682364 - DNA, 19 bp, Mus musculus
  siRNA target sequence for Ank1 (NM_031158.1,4892-4910).
gggaccgggagtactcatt

SEQ ID NO: 682365 - DNA, 19 bp, Mus musculus
  siRNA target sequence for Ank1 (NM_031158.1,4894-4912).
gaccgggagtactcattgt

SEQ ID NO: 682366 - DNA, 19 bp, Mus musculus
  siRNA target sequence for Ank1 (NM_031158.1,4915-4933).
ccctcccaggtgaatggtt

SEQ ID NO: 682367 - DNA, 19 bp, Mus musculus
  siRNA target sequence for Ank1 (NM_031158.1,4916-4934).
cctcccaggtgaatggtta

SEQ ID NO: 682368 - DNA, 19 bp, Mus musculus
  siRNA target sequence for Ank1 (NM_031158.1,5259-5277).
cgacacagtggattcagat

SEQ ID NO: 682369 - DNA, 19 bp, Mus musculus
  siRNA target sequence for Ank1 (NM_031158.1,5268-5286).
ggattcagatgccacaaat

SEQ ID NO: 682370 - DNA, 19 bp, Mus musculus
  siRNA target sequence for Ank1 (NM_031158.1,5381-5399).
cactggactgggataaaca

SEQ ID NO: 682371 - DNA, 19 bp, Mus musculus
  siRNA target sequence for Ank1 (NM_031158.1,5513-5531).
ctggtgcgcttcaggaata

SEQ ID NO: 682372 - DNA, 19 bp, Mus musculus
  siRNA target sequence for Ank1 (NM_031158.1,5516-5534).
gtgcgcttcaggaatacga

SEQ ID NO: 682373 - DNA, 19 bp, Mus musculus
  siRNA target sequence for Ank1 (NM_031158.1,5656-5674).
ggggatgagcttcagaata

SEQ ID NO: 682374 - DNA, 19 bp, Mus musculus
  siRNA target sequence for Ank1 (NM_031158.1,5713-5731).
gaacagggcaacattgtta

SEQ ID NO: 682375 - DNA, 19 bp, Mus musculus
  siRNA target sequence for Ank1 (NM_031158.1,5852-5870).
ggaagggggctcagatagt

SEQ ID NO: 682376 - DNA, 19 bp, Mus musculus
  siRNA target sequence for Ank2 (NM_178655.2,270-288).
gacggaggtccttgatgtt

SEQ ID NO: 682377 - DNA, 19 bp, Mus musculus
  siRNA target sequence for Ank2 (NM_178655.2,601-619).
ggcactgagaacttagaca

SEQ ID NO: 682378 - DNA, 19 bp, Mus musculus
  siRNA target sequence for Ank2 (NM_178655.2,602-620).
gcactgagaacttagacaa

SEQ ID NO: 682379 - DNA, 19 bp, Mus musculus
  siRNA target sequence for Ank2 (NM_178655.2,616-634).
gacaacgtggctctttctt

SEQ ID NO: 682380 - DNA, 19 bp, Mus musculus
  siRNA target sequence for Ank2 (NM_178655.2,650-668).
caggtttcctagtcagttt

SEQ ID NO: 682381 - DNA, 19 bp, Mus musculus
  siRNA target sequence for Ank2 (NM_178655.2,785-803).
gccatcgactggcaacaat

SEQ ID NO: 682382 - DNA, 19 bp, Mus musculus
  siRNA target sequence for Ank2 (NM_178655.2,833-851).
ccagccgcctgattgaagt

SEQ ID NO: 682383 - DNA, 19 bp, Mus musculus
  siRNA target sequence for Ank2 (NM_178655.2,994-1012).
gaggatgaattgaacgaaa

SEQ ID NO: 682384 - DNA, 19 bp, Mus musculus
  siRNA target sequence for Ank2 (NM_178655.2,1000-1018).
gaattgaacgaaatcctta

SEQ ID NO: 682385 - DNA, 19 bp, Mus musculus
  siRNA target sequence for Ank2 (NM_178655.2,1238-1256).
gcctacaggctcaacctat

SEQ ID NO: 682386 - DNA, 19 bp, Mus musculus
  siRNA target sequence for Ank2 (NM_178655.2,1243-1261).
caggctcaacctatgcata

SEQ ID NO: 682387 - DNA, 19 bp, Mus musculus
  siRNA target sequence for Ank2 (NM_178655.2,1249-1267).
caacctatgcatagtgaat

SEQ ID NO: 682388 - DNA, 19 bp, Mus musculus
  siRNA target sequence for Ank2 (NM_178655.2,1258-1276).
catagtgaattggtaaaga

SEQ ID NO: 682389 - DNA, 19 bp, Mus musculus
  siRNA target sequence for Ank2 (NM_178655.2,1262-1280).
gtgaattggtaaagaagat

SEQ ID NO: 682390 - DNA, 19 bp, Mus musculus
  siRNA target sequence for Ank2 (NM_178655.2,1275-1293).
gaagatcttaggcaacaaa

SEQ ID NO: 682391 - DNA, 19 bp, Mus musculus
  siRNA target sequence for Ank2 (NM_178655.2,1342-1360).
cacaagccaattactatga

SEQ ID NO: 682392 - DNA, 19 bp, Mus musculus
  siRNA target sequence for Ank2 (NM_178655.2,1347-1365).
gccaattactatgactatt

SEQ ID NO: 682393 - DNA, 19 bp, Mus musculus
  siRNA target sequence for Ank2 (NM_178655.2,1387-1405).
gatgtcatgctgaatggtt

SEQ ID NO: 682394 - DNA, 19 bp, Mus musculus
  siRNA target sequence for Ank2 (NM_178655.2,1410-1428).
gggagacgcaccaacctta

SEQ ID NO: 682395 - DNA, 19 bp, Mus musculus
  siRNA target sequence for Ank2 (NM_178655.2,1411-1429).
ggagacgcaccaaccttaa

SEQ ID NO: 682396 - DNA, 19 bp, Mus musculus
  siRNA target sequence for Ank2 (NM_178655.2,1414-1432).
gacgcaccaaccttaagat

SEQ ID NO: 682397 - DNA, 19 bp, Mus musculus
  siRNA target sequence for Ank2 (NM_178655.2,1487-1505).
gaacaacgccactaacatt

SEQ ID NO: 682398 - DNA, 19 bp, Mus musculus
  siRNA target sequence for Ank2 (NM_178655.2,1493-1511).
cgccactaacatttgtcaa

SEQ ID NO: 682399 - DNA, 19 bp, Mus musculus
  siRNA target sequence for Ank2 (NM_178655.2,1494-1512).
gccactaacatttgtcaat

SEQ ID NO: 682400 - DNA, 19 bp, Mus musculus
  siRNA target sequence for Ank2 (NM_178655.2,1496-1514).
cactaacatttgtcaatga

SEQ ID NO: 682401 - DNA, 19 bp, Mus musculus
  siRNA target sequence for Ank2 (NM_178655.2,1557-1575).
gatagactgtcgacagatt

SEQ ID NO: 682402 - DNA, 19 bp, Mus musculus
  siRNA target sequence for Ank2 (NM_178655.2,1605-1623).
gtatagagaaattatctgt

SEQ ID NO: 682403 - DNA, 19 bp, Mus musculus
  siRNA target sequence for Ank2 (NM_178655.2,1626-1644).
gccatatatggccaaattt

SEQ ID NO: 682404 - DNA, 19 bp, Mus musculus
  siRNA target sequence for Ank2 (NM_178655.2,1659-1677).
gtcacatgaccccattgaa

SEQ ID NO: 682405 - DNA, 19 bp, Mus musculus
  siRNA target sequence for Ank2 (NM_178655.2,1678-1696).
gccaggttgcggtgtttct

SEQ ID NO: 682406 - DNA, 19 bp, Mus musculus
  siRNA target sequence for Ank2 (NM_178655.2,1766-1784).
gggatgtggaggtattgga

SEQ ID NO: 682407 - DNA, 19 bp, Mus musculus
  siRNA target sequence for Ank2 (NM_178655.2,1776-1794).
ggtattggaaggaaaacct

SEQ ID NO: 682408 - DNA, 19 bp, Mus musculus
  siRNA target sequence for Ank2 (NM_178655.2,1777-1795).
gtattggaaggaaaaccta

SEQ ID NO: 682409 - DNA, 19 bp, Mus musculus
  siRNA target sequence for Ank2 (NM_178655.2,1782-1800).
ggaaggaaaacctatttat

SEQ ID NO: 682410 - DNA, 19 bp, Mus musculus
  siRNA target sequence for Ank2 (NM_178655.2,1792-1810).
cctatttatgttgattgtt

SEQ ID NO: 682411 - DNA, 19 bp, Mus musculus
  siRNA target sequence for Ank2 (NM_178655.2,1793-1811).
ctatttatgttgattgttt

SEQ ID NO: 682412 - DNA, 19 bp, Mus musculus
  siRNA target sequence for Ank2 (NM_178655.2,1833-1851).
caagagtggccaacatcat

SEQ ID NO: 682413 - DNA, 19 bp, Mus musculus
  siRNA target sequence for Ank2 (NM_178655.2,1836-1854).
gagtggccaacatcatata

SEQ ID NO: 682414 - DNA, 19 bp, Mus musculus
  siRNA target sequence for Ank2 (NM_178655.2,1838-1856).
gtggccaacatcatatatt

SEQ ID NO: 682415 - DNA, 19 bp, Mus musculus
  siRNA target sequence for Ank2 (NM_178655.2,1840-1858).
ggccaacatcatatattca

SEQ ID NO: 682416 - DNA, 19 bp, Mus musculus
  siRNA target sequence for Ank2 (NM_178655.2,1883-1901).
gacttcctctctttgtcaa

SEQ ID NO: 682417 - DNA, 19 bp, Mus musculus
  siRNA target sequence for Ank2 (NM_178655.2,1931-1949).
ggcgactctcatttatgaa

SEQ ID NO: 682418 - DNA, 19 bp, Mus musculus
  siRNA target sequence for Ank2 (NM_178655.2,1975-1993).
gtgcatcaagctatttgca

SEQ ID NO: 682419 - DNA, 19 bp, Mus musculus
  siRNA target sequence for Ank2 (NM_178655.2,1981-1999).
caagctatttgcaacttaa

SEQ ID NO: 682420 - DNA, 19 bp, Mus musculus
  siRNA target sequence for Ank2 (NM_178655.2,2052-2070).
ggaagagatcggtatgaca

SEQ ID NO: 682421 - DNA, 19 bp, Mus musculus
  siRNA target sequence for Ank2 (NM_178655.2,2053-2071).
gaagagatcggtatgacat

SEQ ID NO: 682422 - DNA, 19 bp, Mus musculus
  siRNA target sequence for Ank2 (NM_178655.2,2061-2079).
cggtatgacatccgaaaaa

SEQ ID NO: 682423 - DNA, 19 bp, Mus musculus
  siRNA target sequence for Ank2 (NM_178655.2,2062-2080).
ggtatgacatccgaaaaaa

SEQ ID NO: 682424 - DNA, 19 bp, Mus musculus
  siRNA target sequence for Ank2 (NM_178655.2,2141-2159).
gcttcagctggacagaatt

SEQ ID NO: 682425 - DNA, 19 bp, Mus musculus
  siRNA target sequence for Ank2 (NM_178655.2,2145-2163).
cagctggacagaattagca

SEQ ID NO: 682426 - DNA, 19 bp, Mus musculus
  siRNA target sequence for Ank2 (NM_178655.2,2161-2179).
gcaagagaactggatttca

SEQ ID NO: 682427 - DNA, 19 bp, Mus musculus
  siRNA target sequence for Ank2 (NM_178655.2,2214-2232).
ccccaactcccttcaagat

SEQ ID NO: 682428 - DNA, 19 bp, Mus musculus
  siRNA target sequence for Ank2 (NM_178655.2,2272-2290).
gggaagcatgccacagata

SEQ ID NO: 682429 - DNA, 19 bp, Mus musculus
  siRNA target sequence for Ank2 (NM_178655.2,2322-2340).
caggatggacattgtacat

SEQ ID NO: 682430 - DNA, 19 bp, Mus musculus
  siRNA target sequence for Ank2 (NM_178655.2,2324-2342).
ggatggacattgtacatct

SEQ ID NO: 682431 - DNA, 19 bp, Mus musculus
  siRNA target sequence for Ank2 (NM_178655.2,2531-2549).
ccgaagaagacatatctgt

SEQ ID NO: 682432 - DNA, 19 bp, Mus musculus
  siRNA target sequence for Ank2 (NM_178655.2,2539-2557).
gacatatctgtcggttatt

SEQ ID NO: 682433 - DNA, 19 bp, Mus musculus
  siRNA target sequence for Ank2 (NM_178655.2,2625-2643).
gcaccaggagccagttcaa

SEQ ID NO: 682434 - DNA, 19 bp, Mus musculus
  siRNA target sequence for Ank2 (NM_178655.2,2670-2688).
ccagcaggaatattatgta

SEQ ID NO: 682435 - DNA, 19 bp, Mus musculus
  siRNA target sequence for Ank2 (NM_178655.2,2737-2755).
cctgactctctctgtaaga

SEQ ID NO: 682436 - DNA, 19 bp, Mus musculus
  siRNA target sequence for Ank2 (NM_178655.2,2894-2912).
ctagcctggtcattgttga

SEQ ID NO: 682437 - DNA, 19 bp, Mus musculus
  siRNA target sequence for Ank2 (NM_178655.2,2954-2972).
gtgatgccgcttttcaaaa

SEQ ID NO: 682438 - DNA, 19 bp, Mus musculus
  siRNA target sequence for Ank2 (NM_178655.2,3005-3023).
cggtcacagaggaagaata

SEQ ID NO: 682439 - DNA, 19 bp, Mus musculus
  siRNA target sequence for Ank2 (NM_178655.2,3006-3024).
ggtcacagaggaagaatat

SEQ ID NO: 682440 - DNA, 19 bp, Mus musculus
  siRNA target sequence for Ank2 (NM_178655.2,3038-3056).
gacacaccgtggtgaagaa

SEQ ID NO: 682441 - DNA, 19 bp, Mus musculus
  siRNA target sequence for Ank2 (NM_178655.2,3057-3075).
ggttacccggaaaatcatt

SEQ ID NO: 682442 - DNA, 19 bp, Mus musculus
  siRNA target sequence for Ank2 (NM_178655.2,3058-3076).
gttacccggaaaatcatta

SEQ ID NO: 682443 - DNA, 19 bp, Mus musculus
  siRNA target sequence for Ank2 (NM_178655.2,3216-3234).
gtcagaggtgactttgtct

SEQ ID NO: 682444 - DNA, 19 bp, Mus musculus
  siRNA target sequence for Ank2 (NM_178655.2,3251-3269).
ccagtacctcacagtttca

SEQ ID NO: 682445 - DNA, 19 bp, Mus musculus
  siRNA target sequence for Ank2 (NM_178655.2,3288-3306).
ccgtagagtcagcaaagtt

SEQ ID NO: 682446 - DNA, 19 bp, Mus musculus
  siRNA target sequence for Lat (NM_010689.2,806-824).
gtgaagattacgtgaatgt

SEQ ID NO: 682447 - DNA, 19 bp, Mus musculus
  siRNA target sequence for Lat (NM_010689.2,866-884).
gccgggagtatgtgaatgt

SEQ ID NO: 682448 - DNA, 19 bp, Mus musculus
  siRNA target sequence for Lrdd (NM_022654.1,924-942).
cctgcctgctgagttacta

SEQ ID NO: 682449 - DNA, 19 bp, Mus musculus
  siRNA target sequence for Lrdd (NM_022654.1,999-1017).
cccaagtcccccagacata

SEQ ID NO: 682450 - DNA, 19 bp, Mus musculus
  siRNA target sequence for Lrdd (NM_022654.1,1000-1018).
ccaagtcccccagacatat

SEQ ID NO: 682451 - DNA, 19 bp, Mus musculus
  siRNA target sequence for Lrdd (NM_022654.1,1109-1127).
gtggtgtccgcctacagtt

SEQ ID NO: 682452 - DNA, 19 bp, Mus musculus
  siRNA target sequence for Lrdd (NM_022654.1,1313-1331).
gctgtcgtgaggtagttgt

SEQ ID NO: 682453 - DNA, 19 bp, Mus musculus
  siRNA target sequence for Lrdd (NM_022654.1,1926-1944).
gcgactgcaccgtgtgaat

SEQ ID NO: 682454 - DNA, 19 bp, Mus musculus
  siRNA target sequence for Lrdd (NM_022654.1,2259-2277).
cttttatcggggttcactt

SEQ ID NO: 682455 - DNA, 19 bp, Mus musculus
  siRNA target sequence for Lrdd (NM_022654.1,2525-2543).
gcatgccctaccataagct

SEQ ID NO: 682456 - DNA, 19 bp, Mus musculus
  siRNA target sequence for Lrdd (NM_022654.1,2545-2563).
cagcgtatccggcatgaat

SEQ ID NO: 682457 - DNA, 19 bp, Mus musculus
  siRNA target sequence for Lrdd (NM_022654.1,2590-2608).
cgacacatgctcttctctt

SEQ ID NO: 682458 - DNA, 19 bp, Mus musculus
  siRNA target sequence for Lrdd (NM_022654.1,2760-2778).
ggcccctgaggattctact

SEQ ID NO: 682459 - DNA, 19 bp, Mus musculus
  siRNA target sequence for Prkcl1 (NM_177262.3,378-396).
ccgctcgacgcctagactt

SEQ ID NO: 682460 - DNA, 19 bp, Mus musculus
  siRNA target sequence for Prkcl1 (NM_177262.3,379-397).
cgctcgacgcctagactta

SEQ ID NO: 682461 - DNA, 19 bp, Mus musculus
  siRNA target sequence for Prkcl1 (NM_177262.3,381-399).
ctcgacgcctagacttact

SEQ ID NO: 682462 - DNA, 19 bp, Mus musculus
  siRNA target sequence for Prkcl1 (NM_177262.3,583-601).
gatccagacctatagcaat

SEQ ID NO: 682463 - DNA, 19 bp, Mus musculus
  siRNA target sequence for Prkcl1 (NM_177262.3,652-670).
ggacagtaagaccaagatt

SEQ ID NO: 682464 - DNA, 19 bp, Mus musculus
  siRNA target sequence for Prkcl1 (NM_177262.3,799-817).
gctacgacaccattttcga

SEQ ID NO: 682465 - DNA, 19 bp, Mus musculus
  siRNA target sequence for Prkcl1 (NM_177262.3,900-918).
gcgaggctcaggagaaatt

SEQ ID NO: 682466 - DNA, 19 bp, Mus musculus
  siRNA target sequence for Prkcl1 (NM_177262.3,942-960).
gcttgctgcgggaatcact

SEQ ID NO: 682467 - DNA, 19 bp, Mus musculus
  siRNA target sequence for Prkcl1 (NM_177262.3,1291-1309).
cagaggggaggcagagaat

SEQ ID NO: 682468 - DNA, 19 bp, Mus musculus
  siRNA target sequence for Prkcl1 (NM_177262.3,1466-1484).
ggtctgtgtgctctcaaat

SEQ ID NO: 682469 - DNA, 19 bp, Mus musculus
  siRNA target sequence for Prkcl1 (NM_177262.3,1467-1485).
gtctgtgtgctctcaaatt

SEQ ID NO: 682470 - DNA, 19 bp, Mus musculus
  siRNA target sequence for Prkcl1 (NM_177262.3,1473-1491).
gtgctctcaaatttctgaa

SEQ ID NO: 682471 - DNA, 19 bp, Mus musculus
  siRNA target sequence for Prkcl1 (NM_177262.3,1663-1681).
cagacagatgaacatagat

SEQ ID NO: 682472 - DNA, 19 bp, Mus musculus
  siRNA target sequence for Prkcl1 (NM_177262.3,1774-1792).
ccggcacactggagacata

SEQ ID NO: 682473 - DNA, 19 bp, Mus musculus
  siRNA target sequence for Prkcl1 (NM_177262.3,1775-1793).
cggcacactggagacatat

SEQ ID NO: 682474 - DNA, 19 bp, Mus musculus
  siRNA target sequence for Prkcl1 (NM_177262.3,1787-1805).
gacatatccatggagaaat

SEQ ID NO: 682475 - DNA, 19 bp, Mus musculus
  siRNA target sequence for Prkcl1 (NM_177262.3,1826-1844).
gacagctcgtcccaaaaga

SEQ ID NO: 682476 - DNA, 19 bp, Mus musculus
  siRNA target sequence for Prkcl1 (NM_177262.3,1983-2001).
cacttgaggacttcaagtt

SEQ ID NO: 682477 - DNA, 19 bp, Mus musculus
  siRNA target sequence for Prkcl1 (NM_177262.3,2293-2311).
gcctcgggctgtcttctat

SEQ ID NO: 682478 - DNA, 19 bp, Mus musculus
  siRNA target sequence for Prkcl1 (NM_177262.3,2294-2312).
cctcgggctgtcttctatt

SEQ ID NO: 682479 - DNA, 19 bp, Mus musculus
  siRNA target sequence for Prkcl1 (NM_177262.3,2821-2839).
cttcgtgcctacactttca

SEQ ID NO: 682480 - DNA, 19 bp, Mus musculus
  siRNA target sequence for Rtkn (NM_009106.1,679-697).
ggaaactagatcatgagat

SEQ ID NO: 682481 - DNA, 19 bp, Mus musculus
  siRNA target sequence for Rtkn (NM_009106.1,944-962).
gtggaaggatacagagtat

SEQ ID NO: 682482 - DNA, 19 bp, Mus musculus
  siRNA target sequence for Rtkn (NM_009106.1,1336-1354).
ccactcttaccctagaaga

SEQ ID NO: 682483 - DNA, 19 bp, Mus musculus
  siRNA target sequence for Rtkn (NM_009106.1,1339-1357).
ctcttaccctagaagaagt

SEQ ID NO: 682484 - DNA, 19 bp, Mus musculus
  siRNA target sequence for Rtkn (NM_009106.1,1557-1575).
ggcacaaacctcttttgtt

SEQ ID NO: 682485 - DNA, 19 bp, Mus musculus
  siRNA target sequence for Rtkn (NM_009106.1,1558-1576).
gcacaaacctcttttgtta

SEQ ID NO: 682486 - DNA, 19 bp, Mus musculus
  siRNA target sequence for Rtkn (NM_009106.1,1814-1832).
gaggcactgttgtgatgaa

SEQ ID NO: 682487 - DNA, 19 bp, Mus musculus
  siRNA target sequence for Rtkn (NM_009106.1,1816-1834).
ggcactgttgtgatgaagt

SEQ ID NO: 682488 - DNA, 19 bp, Mus musculus
  siRNA target sequence for Thoc1 (NM_153552.2,53-71).
gcggacgcgatttacgaaa

SEQ ID NO: 682489 - DNA, 19 bp, Mus musculus
  siRNA target sequence for Thoc1 (NM_153552.2,54-72).
cggacgcgatttacgaaat

SEQ ID NO: 682490 - DNA, 19 bp, Mus musculus
  siRNA target sequence for Thoc1 (NM_153552.2,56-74).
gacgcgatttacgaaatct

SEQ ID NO: 682491 - DNA, 19 bp, Mus musculus
  siRNA target sequence for Thoc1 (NM_153552.2,76-94).
ccagagaagccttgaataa

SEQ ID NO: 682492 - DNA, 19 bp, Mus musculus
  siRNA target sequence for Thoc1 (NM_153552.2,160-178).
gtacccttgaccaagcttt

SEQ ID NO: 682493 - DNA, 19 bp, Mus musculus
  siRNA target sequence for Thoc1 (NM_153552.2,214-232).
ccgcatgtgagaacgtttt

SEQ ID NO: 682494 - DNA, 19 bp, Mus musculus
  siRNA target sequence for Thoc1 (NM_153552.2,215-233).
cgcatgtgagaacgtttta

SEQ ID NO: 682495 - DNA, 19 bp, Mus musculus
  siRNA target sequence for Thoc1 (NM_153552.2,220-238).
gtgagaacgttttagctat

SEQ ID NO: 682496 - DNA, 19 bp, Mus musculus
  siRNA target sequence for Thoc1 (NM_153552.2,222-240).
gagaacgttttagctatta

SEQ ID NO: 682497 - DNA, 19 bp, Mus musculus
  siRNA target sequence for Thoc1 (NM_153552.2,227-245).
cgttttagctattatttct

SEQ ID NO: 682498 - DNA, 19 bp, Mus musculus
  siRNA target sequence for Thoc1 (NM_153552.2,256-274).
ggggagtgaccgaaagtgt

SEQ ID NO: 682499 - DNA, 19 bp, Mus musculus
  siRNA target sequence for Thoc1 (NM_153552.2,257-275).
gggagtgaccgaaagtgtt

SEQ ID NO: 682500 - DNA, 19 bp, Mus musculus
  siRNA target sequence for Thoc1 (NM_153552.2,261-279).
gtgaccgaaagtgtttgta

SEQ ID NO: 682501 - DNA, 19 bp, Mus musculus
  siRNA target sequence for Thoc1 (NM_153552.2,263-281).
gaccgaaagtgtttgtact

SEQ ID NO: 682502 - DNA, 19 bp, Mus musculus
  siRNA target sequence for Thoc1 (NM_153552.2,299-317).
gctattgggagatgtctta

SEQ ID NO: 682503 - DNA, 19 bp, Mus musculus
  siRNA target sequence for Thoc1 (NM_153552.2,338-356).
gtgtgacacaatattcact

SEQ ID NO: 682504 - DNA, 19 bp, Mus musculus
  siRNA target sequence for Thoc1 (NM_153552.2,340-358).
gtgacacaatattcacttt

SEQ ID NO: 682505 - DNA, 19 bp, Mus musculus
  siRNA target sequence for Thoc1 (NM_153552.2,346-364).
caatattcacttttgttga

SEQ ID NO: 682506 - DNA, 19 bp, Mus musculus
  siRNA target sequence for Thoc1 (NM_153552.2,375-393).
gctacttggaagtcaaata

SEQ ID NO: 682507 - DNA, 19 bp, Mus musculus
  siRNA target sequence for Thoc1 (NM_153552.2,386-404).
gtcaaatacattctattct

SEQ ID NO: 682508 - DNA, 19 bp, Mus musculus
  siRNA target sequence for Thoc1 (NM_153552.2,398-416).
ctattctgctggcaaaaat

SEQ ID NO: 682509 - DNA, 19 bp, Mus musculus
  siRNA target sequence for Thoc1 (NM_153552.2,406-424).
ctggcaaaaattatttact

SEQ ID NO: 682510 - DNA, 19 bp, Mus musculus
  siRNA target sequence for Thoc1 (NM_153552.2,441-459).
ctcctcagaagattgtcta

SEQ ID NO: 682511 - DNA, 19 bp, Mus musculus
  siRNA target sequence for Thoc1 (NM_153552.2,443-461).
cctcagaagattgtctaaa

SEQ ID NO: 682512 - DNA, 19 bp, Mus musculus
  siRNA target sequence for Thoc1 (NM_153552.2,448-466).
gaagattgtctaaatctca

SEQ ID NO: 682513 - DNA, 19 bp, Mus musculus
  siRNA target sequence for Thoc1 (NM_153552.2,525-543).
gagaaatcaggtcttaatt

SEQ ID NO: 682514 - DNA, 19 bp, Mus musculus
  siRNA target sequence for Thoc1 (NM_153552.2,561-579).
ctggaaaacgtcactgttt

SEQ ID NO: 682515 - DNA, 19 bp, Mus musculus
  siRNA target sequence for Thoc1 (NM_153552.2,569-587).
cgtcactgttttcaataca

SEQ ID NO: 682516 - DNA, 19 bp, Mus musculus
  siRNA target sequence for Thoc1 (NM_153552.2,675-693).
gaagccccgacaacttgtt

SEQ ID NO: 682517 - DNA, 19 bp, Mus musculus
  siRNA target sequence for Thoc1 (NM_153552.2,678-696).
gccccgacaacttgttcta

SEQ ID NO: 682518 - DNA, 19 bp, Mus musculus
  siRNA target sequence for Thoc1 (NM_153552.2,679-697).
ccccgacaacttgttctat

SEQ ID NO: 682519 - DNA, 19 bp, Mus musculus
  siRNA target sequence for Thoc1 (NM_153552.2,680-698).
cccgacaacttgttctatt

SEQ ID NO: 682520 - DNA, 19 bp, Mus musculus
  siRNA target sequence for Thoc1 (NM_153552.2,683-701).
gacaacttgttctattcca

SEQ ID NO: 682521 - DNA, 19 bp, Mus musculus
  siRNA target sequence for Thoc1 (NM_153552.2,691-709).
gttctattccaattgatta

SEQ ID NO: 682522 - DNA, 19 bp, Mus musculus
  siRNA target sequence for Thoc1 (NM_153552.2,694-712).
ctattccaattgattacaa

SEQ ID NO: 682523 - DNA, 19 bp, Mus musculus
  siRNA target sequence for Thoc1 (NM_153552.2,751-769).
ggaacccagtgcaatgcta

SEQ ID NO: 682524 - DNA, 19 bp, Mus musculus
  siRNA target sequence for Thoc1 (NM_153552.2,752-770).
gaacccagtgcaatgctat

SEQ ID NO: 682525 - DNA, 19 bp, Mus musculus
  siRNA target sequence for Thoc1 (NM_153552.2,762-780).
caatgctatgagaagattt

SEQ ID NO: 682526 - DNA, 19 bp, Mus musculus
  siRNA target sequence for Thoc1 (NM_153552.2,776-794).
gatttcttggaaaacgttt

SEQ ID NO: 682527 - DNA, 19 bp, Mus musculus
  siRNA target sequence for Thoc1 (NM_153552.2,781-799).
cttggaaaacgtttctcaa

SEQ ID NO: 682528 - DNA, 19 bp, Mus musculus
  siRNA target sequence for Thoc1 (NM_153552.2,790-808).
cgtttctcaagtattctga

SEQ ID NO: 682529 - DNA, 19 bp, Mus musculus
  siRNA target sequence for Thoc1 (NM_153552.2,810-828).
gaagttttagctgttttta

SEQ ID NO: 682530 - DNA, 19 bp, Mus musculus
  siRNA target sequence for Thoc1 (NM_153552.2,888-906).
ggaggagagcatgtatact

SEQ ID NO: 682531 - DNA, 19 bp, Mus musculus
  siRNA target sequence for Thoc1 (NM_153552.2,918-936).
ctaacaagtgaaaagttga

SEQ ID NO: 682532 - DNA, 19 bp, Mus musculus
  siRNA target sequence for Thoc1 (NM_153552.2,1014-1032).
ggacaggtcaaattcaaaa

SEQ ID NO: 682533 - DNA, 19 bp, Mus musculus
  siRNA target sequence for Thoc1 (NM_153552.2,1036-1054).
caaattatgttttaactga

SEQ ID NO: 682534 - DNA, 19 bp, Mus musculus
  siRNA target sequence for Thoc1 (NM_153552.2,1058-1076).
gcaatcactctggattgaa

SEQ ID NO: 682535 - DNA, 19 bp, Mus musculus
  siRNA target sequence for Thoc1 (NM_153552.2,1069-1087).
ggattgaagatactacaaa

SEQ ID NO: 682536 - DNA, 19 bp, Mus musculus
  siRNA target sequence for Thoc1 (NM_153552.2,1097-1115).
ccaactgctatctgaaaat

SEQ ID NO: 682537 - DNA, 19 bp, Mus musculus
  siRNA target sequence for Thoc1 (NM_153552.2,1142-1160).
gatggtagagcatatatta

SEQ ID NO: 682538 - DNA, 19 bp, Mus musculus
  siRNA target sequence for Thoc1 (NM_153552.2,1167-1185).
gaggaaaattggaactcat

SEQ ID NO: 682539 - DNA, 19 bp, Mus musculus
  siRNA target sequence for Thoc1 (NM_153552.2,1197-1215).
ggttgcccaagttttgtta

SEQ ID NO: 682540 - DNA, 19 bp, Mus musculus
  siRNA target sequence for Thoc1 (NM_153552.2,1198-1216).
gttgcccaagttttgttaa

SEQ ID NO: 682541 - DNA, 19 bp, Mus musculus
  siRNA target sequence for Thoc1 (NM_153552.2,1284-1302).
ggcaaagggcccaacaaga

SEQ ID NO: 682542 - DNA, 19 bp, Mus musculus
  siRNA target sequence for Thoc1 (NM_153552.2,1301-1319).
gaaaatcctcattggaaat

SEQ ID NO: 682543 - DNA, 19 bp, Mus musculus
  siRNA target sequence for Thoc1 (NM_153552.2,1325-1343).
gctcacaaggctttggaat

SEQ ID NO: 682544 - DNA, 19 bp, Mus musculus
  siRNA target sequence for Thoc1 (NM_153552.2,1340-1358).
gaatctctgtcctgataat

SEQ ID NO: 682545 - DNA, 19 bp, Mus musculus
  siRNA target sequence for Thoc1 (NM_153552.2,1384-1402).
gagaatacatgccaacttt

SEQ ID NO: 682546 - DNA, 19 bp, Mus musculus
  siRNA target sequence for Thoc1 (NM_153552.2,1470-1488).
gccgtaaataattcaaatt

SEQ ID NO: 682547 - DNA, 19 bp, Mus musculus
  siRNA target sequence for Thoc1 (NM_153552.2,1471-1489).
ccgtaaataattcaaatta

SEQ ID NO: 682548 - DNA, 19 bp, Mus musculus
  siRNA target sequence for Thoc1 (NM_153552.2,1519-1537).
ggagaagccctcacttctt

SEQ ID NO: 682549 - DNA, 19 bp, Mus musculus
  siRNA target sequence for Thoc1 (NM_153552.2,1520-1538).
gagaagccctcacttcttt

SEQ ID NO: 682550 - DNA, 19 bp, Mus musculus
  siRNA target sequence for Thoc1 (NM_153552.2,1543-1561).
caaccaaccagcagtttaa

SEQ ID NO: 682551 - DNA, 19 bp, Mus musculus
  siRNA target sequence for Thoc1 (NM_153552.2,1547-1565).
caaccagcagtttaagagt

SEQ ID NO: 682552 - DNA, 19 bp, Mus musculus
  siRNA target sequence for Thoc1 (NM_153552.2,1696-1714).
cagatgttcggcgagataa

SEQ ID NO: 682553 - DNA, 19 bp, Mus musculus
  siRNA target sequence for Thoc1 (NM_153552.2,1701-1719).
gttcggcgagataaaccta

SEQ ID NO: 682554 - DNA, 19 bp, Mus musculus
  siRNA target sequence for Thoc1 (NM_153552.2,1704-1722).
cggcgagataaacctataa

SEQ ID NO: 682555 - DNA, 19 bp, Mus musculus
  siRNA target sequence for Thoc1 (NM_153552.2,1706-1724).
gcgagataaacctataaca

SEQ ID NO: 682556 - DNA, 19 bp, Mus musculus
  siRNA target sequence for Thoc1 (NM_153552.2,1726-1744).
gggagcagatagagtcatt

SEQ ID NO: 682557 - DNA, 19 bp, Mus musculus
  siRNA target sequence for Thoc1 (NM_153552.2,1791-1809).
gaaattaaagactctgata

SEQ ID NO: 682558 - DNA, 19 bp, Mus musculus
  siRNA target sequence for Thoc1 (NM_153552.2,1890-1908).
gttcatgcaacaactgata

SEQ ID NO: 682559 - DNA, 19 bp, Mus musculus
  siRNA target sequence for Thoc1 (NM_153552.2,1911-1929).
ctgattagtgcactaaaca

SEQ ID NO: 682560 - DNA, 19 bp, Mus musculus
  siRNA target sequence for Thoc1 (NM_153552.2,1953-1971).
gaaagtctaactaatgaca

SEQ ID NO: 682561 - DNA, 19 bp, Mus musculus
  siRNA target sequence for Esam1 (NM_027102.1,149-167).
gcttgctgcgggttttgtt

SEQ ID NO: 682562 - DNA, 19 bp, Mus musculus
  siRNA target sequence for Esam1 (NM_027102.1,367-385).
ccaaaccaggtgttgtctt

SEQ ID NO: 682563 - DNA, 19 bp, Mus musculus
  siRNA target sequence for Esam1 (NM_027102.1,373-391).
caggtgttgtcttacatta

SEQ ID NO: 682564 - DNA, 19 bp, Mus musculus
  siRNA target sequence for Esam1 (NM_027102.1,375-393).
ggtgttgtcttacattaat

SEQ ID NO: 682565 - DNA, 19 bp, Mus musculus
  siRNA target sequence for Esam1 (NM_027102.1,419-437).
cagccctggtccactctat

SEQ ID NO: 682566 - DNA, 19 bp, Mus musculus
  siRNA target sequence for Esam1 (NM_027102.1,421-439).
gccctggtccactctatct

SEQ ID NO: 682567 - DNA, 19 bp, Mus musculus
  siRNA target sequence for Esam1 (NM_027102.1,717-735).
ctttggaccagccttagat

SEQ ID NO: 682568 - DNA, 19 bp, Mus musculus
  siRNA target sequence for Esam1 (NM_027102.1,736-754).
gctgttcgtggatctttaa

SEQ ID NO: 682569 - DNA, 19 bp, Mus musculus
  siRNA target sequence for Esam1 (NM_027102.1,746-764).
gatctttaaagctcactaa

SEQ ID NO: 682570 - DNA, 19 bp, Mus musculus
  siRNA target sequence for Esam1 (NM_027102.1,756-774).
gctcactaacctttccatt

SEQ ID NO: 682571 - DNA, 19 bp, Mus musculus
  siRNA target sequence for Esam1 (NM_027102.1,920-938).
ctgggctggtcctgttgta

SEQ ID NO: 682572 - DNA, 19 bp, Mus musculus
  siRNA target sequence for Esam1 (NM_027102.1,1166-1184).
gactgcccagggtagatga

SEQ ID NO: 682573 - DNA, 19 bp, Mus musculus
  siRNA target sequence for A830029E02Rik (NM_178721.2,675-693).
gcggttctccgcttctaca

SEQ ID NO: 682574 - DNA, 19 bp, Mus musculus
  siRNA target sequence for A830029E02Rik (NM_178721.2,698-716).
ctgcgggctcctgttacaa

SEQ ID NO: 682575 - DNA, 19 bp, Mus musculus
  siRNA target sequence for A830029E02Rik (NM_178721.2,754-772).
ggcagtttccactaactca

SEQ ID NO: 682576 - DNA, 19 bp, Mus musculus
  siRNA target sequence for A830029E02Rik (NM_178721.2,758-776).
gtttccactaactcagaat

SEQ ID NO: 682577 - DNA, 19 bp, Mus musculus
  siRNA target sequence for A830029E02Rik (NM_178721.2,773-791).
gaatgtcacggttgttgaa

SEQ ID NO: 682578 - DNA, 19 bp, Mus musculus
  siRNA target sequence for A830029E02Rik (NM_178721.2,809-827).
gacctgcagagttgatcaa

SEQ ID NO: 682579 - DNA, 19 bp, Mus musculus
  siRNA target sequence for A830029E02Rik (NM_178721.2,812-830).
ctgcagagttgatcaaaat

SEQ ID NO: 682580 - DNA, 19 bp, Mus musculus
  siRNA target sequence for A830029E02Rik (NM_178721.2,814-832).
gcagagttgatcaaaatga

SEQ ID NO: 682581 - DNA, 19 bp, Mus musculus
  siRNA target sequence for A830029E02Rik (NM_178721.2,871-889).
ctctgtacttcgatgacaa

SEQ ID NO: 682582 - DNA, 19 bp, Mus musculus
  siRNA target sequence for A830029E02Rik (NM_178721.2,875-893).
gtacttcgatgacaagaaa

SEQ ID NO: 682583 - DNA, 19 bp, Mus musculus
  siRNA target sequence for A830029E02Rik (NM_178721.2,984-1002).
cagtacacctgctccttat

SEQ ID NO: 682584 - DNA, 19 bp, Mus musculus
  siRNA target sequence for A830029E02Rik (NM_178721.2,991-1009).
cctgctccttatttacaat

SEQ ID NO: 682585 - DNA, 19 bp, Mus musculus
  siRNA target sequence for A830029E02Rik (NM_178721.2,1053-1071).
ccggagaagcctcagatta

SEQ ID NO: 682586 - DNA, 19 bp, Mus musculus
  siRNA target sequence for A830029E02Rik (NM_178721.2,1055-1073).
ggagaagcctcagattagt

SEQ ID NO: 682587 - DNA, 19 bp, Mus musculus
  siRNA target sequence for A830029E02Rik (NM_178721.2,1061-1079).
gcctcagattagtggattt

SEQ ID NO: 682588 - DNA, 19 bp, Mus musculus
  siRNA target sequence for A830029E02Rik (NM_178721.2,1062-1080).
cctcagattagtggatttt

SEQ ID NO: 682589 - DNA, 19 bp, Mus musculus
  siRNA target sequence for A830029E02Rik (NM_178721.2,1065-1083).
cagattagtggattttcgt

SEQ ID NO: 682590 - DNA, 19 bp, Mus musculus
  siRNA target sequence for A830029E02Rik (NM_178721.2,1135-1153).
gtaagcctgcggctgatat

SEQ ID NO: 682591 - DNA, 19 bp, Mus musculus
  siRNA target sequence for A830029E02Rik (NM_178721.2,1341-1359).
gtgctagaaattcactata

SEQ ID NO: 682592 - DNA, 19 bp, Mus musculus
  siRNA target sequence for A830029E02Rik (NM_178721.2,1353-1371).
cactatacaccatcagtta

SEQ ID NO: 682593 - DNA, 19 bp, Mus musculus
  siRNA target sequence for A830029E02Rik (NM_178721.2,1360-1378).
caccatcagttaagattat

SEQ ID NO: 682594 - DNA, 19 bp, Mus musculus
  siRNA target sequence for A830029E02Rik (NM_178721.2,1398-1416).
caagaagggcaggctttaa

SEQ ID NO: 682595 - DNA, 19 bp, Mus musculus
  siRNA target sequence for A830029E02Rik (NM_178721.2,1401-1419).
gaagggcaggctttaacgt

SEQ ID NO: 682596 - DNA, 19 bp, Mus musculus
  siRNA target sequence for A830029E02Rik (NM_178721.2,1417-1435).
cgttgacctgtgaatctaa

SEQ ID NO: 682597 - DNA, 19 bp, Mus musculus
  siRNA target sequence for A830029E02Rik (NM_178721.2,1418-1436).
gttgacctgtgaatctaaa

SEQ ID NO: 682598 - DNA, 19 bp, Mus musculus
  siRNA target sequence for A830029E02Rik (NM_178721.2,1444-1462).
cactgccagaacctgtttt

SEQ ID NO: 682599 - DNA, 19 bp, Mus musculus
  siRNA target sequence for A830029E02Rik (NM_178721.2,1469-1487).
gaaagatggtgccgaatta

SEQ ID NO: 682600 - DNA, 19 bp, Mus musculus
  siRNA target sequence for A830029E02Rik (NM_178721.2,1516-1534).
gtagggaactcaacattct

SEQ ID NO: 682601 - DNA, 19 bp, Mus musculus
  siRNA target sequence for A830029E02Rik (NM_178721.2,1603-1621).
ccgagtatgtcctcattgt

SEQ ID NO: 682602 - DNA, 19 bp, Mus musculus
  siRNA target sequence for A830029E02Rik (NM_178721.2,1604-1622).
cgagtatgtcctcattgtt

SEQ ID NO: 682603 - DNA, 19 bp, Mus musculus
  siRNA target sequence for A830029E02Rik (NM_178721.2,1666-1684).
ctctcatcggaggaatagt

SEQ ID NO: 682604 - DNA, 19 bp, Mus musculus
  siRNA target sequence for A830029E02Rik (NM_178721.2,1701-1719).
gttacactgtgctccatat

SEQ ID NO: 682605 - DNA, 19 bp, Mus musculus
  siRNA target sequence for A830029E02Rik (NM_178721.2,1730-1748).
ccgatatctggcaagacat

SEQ ID NO: 682606 - DNA, 19 bp, Mus musculus
  siRNA target sequence for A830029E02Rik (NM_178721.2,1731-1749).
cgatatctggcaagacata

SEQ ID NO: 682607 - DNA, 19 bp, Mus musculus
  siRNA target sequence for A830029E02Rik (NM_178721.2,1737-1755).
ctggcaagacataaaggaa

SEQ ID NO: 682608 - DNA, 19 bp, Mus musculus
  siRNA target sequence for A830029E02Rik (NM_178721.2,1838-1856).
caatgccgaagagaaaaaa

SEQ ID NO: 682609 - DNA, 19 bp, Mus musculus
  siRNA target sequence for Icam1 (NM_010493.2,385-403).
gctaccatcaccgtgtatt

SEQ ID NO: 682610 - DNA, 19 bp, Mus musculus
  siRNA target sequence for Icam1 (NM_010493.2,390-408).
catcaccgtgtattcgttt

SEQ ID NO: 682611 - DNA, 19 bp, Mus musculus
  siRNA target sequence for Icam1 (NM_010493.2,526-544).
cgtggggaggagatactga

SEQ ID NO: 682612 - DNA, 19 bp, Mus musculus
  siRNA target sequence for Icam1 (NM_010493.2,574-592).
gaccccaaggagatcacat

SEQ ID NO: 682613 - DNA, 19 bp, Mus musculus
  siRNA target sequence for Icam1 (NM_010493.2,662-680).
cgcaagggctggcattgtt

SEQ ID NO: 682614 - DNA, 19 bp, Mus musculus
  siRNA target sequence for Icam1 (NM_010493.2,702-720).
gagcctccggactttcgat

SEQ ID NO: 682615 - DNA, 19 bp, Mus musculus
  siRNA target sequence for Icam1 (NM_010493.2,815-833).
cctctgaagctcggatata

SEQ ID NO: 682616 - DNA, 19 bp, Mus musculus
  siRNA target sequence for Icam1 (NM_010493.2,818-836).
ctgaagctcggatatacct

SEQ ID NO: 682617 - DNA, 19 bp, Mus musculus
  siRNA target sequence for Icam1 (NM_010493.2,979-997).
gagacgcagaggaccttaa

SEQ ID NO: 682618 - DNA, 19 bp, Mus musculus
  siRNA target sequence for Icam1 (NM_010493.2,981-999).
gacgcagaggaccttaaca

SEQ ID NO: 682619 - DNA, 19 bp, Mus musculus
  siRNA target sequence for Icam1 (NM_010493.2,983-1001).
cgcagaggaccttaacagt

SEQ ID NO: 682620 - DNA, 19 bp, Mus musculus
  siRNA target sequence for Icam1 (NM_010493.2,1091-1109).
ggtcgaaggtggttcttct

SEQ ID NO: 682621 - DNA, 19 bp, Mus musculus
  siRNA target sequence for Icam1 (NM_010493.2,1133-1151).
ccaccccgcaggtccaatt

SEQ ID NO: 682622 - DNA, 19 bp, Mus musculus
  siRNA target sequence for Icam1 (NM_010493.2,1163-1181).
ccagctcggaggatcacaa

SEQ ID NO: 682623 - DNA, 19 bp, Mus musculus
  siRNA target sequence for Icam1 (NM_010493.2,1164-1182).
cagctcggaggatcacaaa

SEQ ID NO: 682624 - DNA, 19 bp, Mus musculus
  siRNA target sequence for Icam1 (NM_010493.2,1352-1370).
ggaacccatctcctaagat

SEQ ID NO: 682625 - DNA, 19 bp, Mus musculus
  siRNA target sequence for Icam1 (NM_010493.2,1413-1431).
ggtggtgaagtctgtcaaa

SEQ ID NO: 682626 - DNA, 19 bp, Mus musculus
  siRNA target sequence for Icam1 (NM_010493.2,1453-1471).
gtgtgccatgcctttagct

SEQ ID NO: 682627 - DNA, 19 bp, Mus musculus
  siRNA target sequence for Icam1 (NM_010493.2,1507-1525).
gtactgtaccactctcaaa

SEQ ID NO: 682628 - DNA, 19 bp, Mus musculus
  siRNA target sequence for Icam1 (NM_010493.2,1522-1540).
caaaataactggactataa

SEQ ID NO: 682629 - DNA, 19 bp, Mus musculus
  siRNA target sequence for Icam1 (NM_010493.2,1581-1599).
gatggcagcctcttatgtt

SEQ ID NO: 682630 - DNA, 19 bp, Mus musculus
  siRNA target sequence for Icam1 (NM_010493.2,1586-1604).
cagcctcttatgtttataa

SEQ ID NO: 682631 - DNA, 19 bp, Mus musculus
  siRNA target sequence for Icam1 (NM_010493.2,1613-1631).
gaaagatcaggatatacaa

SEQ ID NO: 682632 - DNA, 19 bp, Mus musculus
  siRNA target sequence for Icam2 (NM_010494.1,177-195).
ggagcctgtctcttcttat

SEQ ID NO: 682633 - DNA, 19 bp, Mus musculus
  siRNA target sequence for Icam2 (NM_010494.1,186-204).
ctcttcttatcctgttcta

SEQ ID NO: 682634 - DNA, 19 bp, Mus musculus
  siRNA target sequence for Icam2 (NM_010494.1,247-265).
gtccgagaagcagatagta

SEQ ID NO: 682635 - DNA, 19 bp, Mus musculus
  siRNA target sequence for Icam2 (NM_010494.1,249-267).
ccgagaagcagatagtaga

SEQ ID NO: 682636 - DNA, 19 bp, Mus musculus
  siRNA target sequence for Icam2 (NM_010494.1,329-347).
ctggagacgcccacgaata

SEQ ID NO: 682637 - DNA, 19 bp, Mus musculus
  siRNA target sequence for Icam2 (NM_010494.1,331-349).
ggagacgcccacgaataaa

SEQ ID NO: 682638 - DNA, 19 bp, Mus musculus
  siRNA target sequence for Icam2 (NM_010494.1,332-350).
gagacgcccacgaataaaa

SEQ ID NO: 682639 - DNA, 19 bp, Mus musculus
  siRNA target sequence for Icam2 (NM_010494.1,334-352).
gacgcccacgaataaaata

SEQ ID NO: 682640 - DNA, 19 bp, Mus musculus
  siRNA target sequence for Icam2 (NM_010494.1,637-655).
ctttgggggagcagaaact

SEQ ID NO: 682641 - DNA, 19 bp, Mus musculus
  siRNA target sequence for Icam2 (NM_010494.1,668-686).
gccacagccacgttcaaca

SEQ ID NO: 682642 - DNA, 19 bp, Mus musculus
  siRNA target sequence for Icam2 (NM_010494.1,682-700).
caacagcacagctctgaaa

SEQ ID NO: 682643 - DNA, 19 bp, Mus musculus
  siRNA target sequence for Icam2 (NM_010494.1,704-722).
gacggtctcaacttttcct

SEQ ID NO: 682644 - DNA, 19 bp, Mus musculus
  siRNA target sequence for Icam2 (NM_010494.1,747-765).
cccatggtgggtatatcat

SEQ ID NO: 682645 - DNA, 19 bp, Mus musculus
  siRNA target sequence for Icam2 (NM_010494.1,806-824).
ccgatgcaggacaaccaaa

SEQ ID NO: 682646 - DNA, 19 bp, Mus musculus
  siRNA target sequence for Icam2 (NM_010494.1,873-891).
catctgtcctgctatgctt

SEQ ID NO: 682647 - DNA, 19 bp, Mus musculus
  siRNA target sequence for Icam2 (NM_010494.1,876-894).
ctgtcctgctatgctttat

SEQ ID NO: 682648 - DNA, 19 bp, Mus musculus
  siRNA target sequence for Icam4 (NM_023892.1,67-85).
cagcaagagtggatgcaaa

SEQ ID NO: 682649 - DNA, 19 bp, Mus musculus
  siRNA target sequence for Icam4 (NM_023892.1,120-138).
ctgggtgcgtcttaatcca

SEQ ID NO: 682650 - DNA, 19 bp, Mus musculus
  siRNA target sequence for Icam4 (NM_023892.1,163-181).
ggctcagcgtggcttaact

SEQ ID NO: 682651 - DNA, 19 bp, Mus musculus
  siRNA target sequence for Icam4 (NM_023892.1,232-250).
cggcagggaaagatagtta

SEQ ID NO: 682652 - DNA, 19 bp, Mus musculus
  siRNA target sequence for Icam4 (NM_023892.1,237-255).
gggaaagatagttaatgga

SEQ ID NO: 682653 - DNA, 19 bp, Mus musculus
  siRNA target sequence for Icam4 (NM_023892.1,253-271).
ggatccggctgggtatctt

SEQ ID NO: 682654 - DNA, 19 bp, Mus musculus
  siRNA target sequence for Icam4 (NM_023892.1,254-272).
gatccggctgggtatctta

SEQ ID NO: 682655 - DNA, 19 bp, Mus musculus
  siRNA target sequence for Icam4 (NM_023892.1,406-424).
ctagtgggccacaagtaca

SEQ ID NO: 682656 - DNA, 19 bp, Mus musculus
  siRNA target sequence for Icam4 (NM_023892.1,420-438).
gtacactctgcgatgctat

SEQ ID NO: 682657 - DNA, 19 bp, Mus musculus
  siRNA target sequence for Icam4 (NM_023892.1,492-510).
ccgagtgatttatcatgaa

SEQ ID NO: 682658 - DNA, 19 bp, Mus musculus
  siRNA target sequence for Icam4 (NM_023892.1,493-511).
cgagtgatttatcatgaaa

SEQ ID NO: 682659 - DNA, 19 bp, Mus musculus
  siRNA target sequence for Icam4 (NM_023892.1,519-537).
gcgcttcaccggttcagat

SEQ ID NO: 682660 - DNA, 19 bp, Mus musculus
  siRNA target sequence for Icam4 (NM_023892.1,520-538).
cgcttcaccggttcagatt

SEQ ID NO: 682661 - DNA, 19 bp, Mus musculus
  siRNA target sequence for Icam4 (NM_023892.1,521-539).
gcttcaccggttcagattt

SEQ ID NO: 682662 - DNA, 19 bp, Mus musculus
  siRNA target sequence for Icam4 (NM_023892.1,530-548).
gttcagatttggctaatgt

SEQ ID NO: 682663 - DNA, 19 bp, Mus musculus
  siRNA target sequence for Icam4 (NM_023892.1,647-665).
gctcggcacctgttatgtt

SEQ ID NO: 682664 - DNA, 19 bp, Mus musculus
  siRNA target sequence for Icam5 (NM_008319.1,123-141).
cggtcgcgctagaaccttt

SEQ ID NO: 682665 - DNA, 19 bp, Mus musculus
  siRNA target sequence for Icam5 (NM_008319.1,488-506).
cgagcgagcctcacattga

SEQ ID NO: 682666 - DNA, 19 bp, Mus musculus
  siRNA target sequence for Icam5 (NM_008319.1,532-550).
gattcgccgcagtttcgta

SEQ ID NO: 682667 - DNA, 19 bp, Mus musculus
  siRNA target sequence for Icam5 (NM_008319.1,611-629).
gaccacagggtcaatttct

SEQ ID NO: 682668 - DNA, 19 bp, Mus musculus
  siRNA target sequence for Icam5 (NM_008319.1,614-632).
cacagggtcaatttctcat

SEQ ID NO: 682669 - DNA, 19 bp, Mus musculus
  siRNA target sequence for Icam5 (NM_008319.1,662-680).
ggcttgggactgtttgcaa

SEQ ID NO: 682670 - DNA, 19 bp, Mus musculus
  siRNA target sequence for Icam5 (NM_008319.1,663-681).
gcttgggactgtttgcaaa

SEQ ID NO: 682671 - DNA, 19 bp, Mus musculus
  siRNA target sequence for Icam5 (NM_008319.1,664-682).
cttgggactgtttgcaaat

SEQ ID NO: 682672 - DNA, 19 bp, Mus musculus
  siRNA target sequence for Icam5 (NM_008319.1,722-740).
ccacattccccgagtctta

SEQ ID NO: 682673 - DNA, 19 bp, Mus musculus
  siRNA target sequence for Icam5 (NM_008319.1,723-741).
cacattccccgagtcttat

SEQ ID NO: 682674 - DNA, 19 bp, Mus musculus
  siRNA target sequence for Icam5 (NM_008319.1,744-762).
ctccccgagtcttagaagt

SEQ ID NO: 682675 - DNA, 19 bp, Mus musculus
  siRNA target sequence for Icam5 (NM_008319.1,787-805).
cacgttggatggactgttt

SEQ ID NO: 682676 - DNA, 19 bp, Mus musculus
  siRNA target sequence for Icam5 (NM_008319.1,980-998).
caggaaaacctgactgttt

SEQ ID NO: 682677 - DNA, 19 bp, Mus musculus
  siRNA target sequence for Icam5 (NM_008319.1,1139-1157).
gagctccagttaaatgtta

SEQ ID NO: 682678 - DNA, 19 bp, Mus musculus
  siRNA target sequence for Icam5 (NM_008319.1,1210-1228).
cggggaaactctaagaaaa

SEQ ID NO: 682679 - DNA, 19 bp, Mus musculus
  siRNA target sequence for Icam5 (NM_008319.1,1265-1283).
cgcctggatgacttggatt

SEQ ID NO: 682680 - DNA, 19 bp, Mus musculus
  siRNA target sequence for Icam5 (NM_008319.1,1444-1462).
ccgatgcacagcagtcaat

SEQ ID NO: 682681 - DNA, 19 bp, Mus musculus
  siRNA target sequence for Icam5 (NM_008319.1,1470-1488).
gccaggcggtcaaagatgt

SEQ ID NO: 682682 - DNA, 19 bp, Mus musculus
  siRNA target sequence for Icam5 (NM_008319.1,1489-1507).
gaccctgaccgtggaatat

SEQ ID NO: 682683 - DNA, 19 bp, Mus musculus
  siRNA target sequence for Icam5 (NM_008319.1,1713-1731).
gatcagcggccaaaaatgt

SEQ ID NO: 682684 - DNA, 19 bp, Mus musculus
  siRNA target sequence for Icam5 (NM_008319.1,1732-1750).
ggccgtcacggtggaatat

SEQ ID NO: 682685 - DNA, 19 bp, Mus musculus
  siRNA target sequence for Icam5 (NM_008319.1,1877-1895).
gcaagcgaagggatagtgt

SEQ ID NO: 682686 - DNA, 19 bp, Mus musculus
  siRNA target sequence for Icam5 (NM_008319.1,1878-1896).
caagcgaagggatagtgtt

SEQ ID NO: 682687 - DNA, 19 bp, Mus musculus
  siRNA target sequence for Icam5 (NM_008319.1,1987-2005).
gcacggctccacagtcaaa

SEQ ID NO: 682688 - DNA, 19 bp, Mus musculus
  siRNA target sequence for Icam5 (NM_008319.1,1988-2006).
cacggctccacagtcaaaa

SEQ ID NO: 682689 - DNA, 19 bp, Mus musculus
  siRNA target sequence for Icam5 (NM_008319.1,2671-2689).
cgaggccgtgtgtctcaat

SEQ ID NO: 682690 - DNA, 19 bp, Mus musculus
  siRNA target sequence for Icam5 (NM_008319.1,2751-2769).
ctgcagatggcgaggtttt

SEQ ID NO: 682691 - DNA, 19 bp, Mus musculus
  siRNA target sequence for Tcam1 (NM_029467.1,172-190).
ggtatctgtccatccaaat

SEQ ID NO: 682692 - DNA, 19 bp, Mus musculus
  siRNA target sequence for Tcam1 (NM_029467.1,263-281).
ggaatcgagaccttcttaa

SEQ ID NO: 682693 - DNA, 19 bp, Mus musculus
  siRNA target sequence for Tcam1 (NM_029467.1,264-282).
gaatcgagaccttcttaaa

SEQ ID NO: 682694 - DNA, 19 bp, Mus musculus
  siRNA target sequence for Tcam1 (NM_029467.1,566-584).
gacttcctaagtttatctt

SEQ ID NO: 682695 - DNA, 19 bp, Mus musculus
  siRNA target sequence for Tcam1 (NM_029467.1,621-639).
gagcccaccgggacaatga

SEQ ID NO: 682696 - DNA, 19 bp, Mus musculus
  siRNA target sequence for Tcam1 (NM_029467.1,632-650).
gacaatgacaggcgtaatt

SEQ ID NO: 682697 - DNA, 19 bp, Mus musculus
  siRNA target sequence for Tcam1 (NM_029467.1,721-739).
gcaactccggatctttgaa

SEQ ID NO: 682698 - DNA, 19 bp, Mus musculus
  siRNA target sequence for Tcam1 (NM_029467.1,722-740).
caactccggatctttgaat

SEQ ID NO: 682699 - DNA, 19 bp, Mus musculus
  siRNA target sequence for Tcam1 (NM_029467.1,725-743).
ctccggatctttgaattct

SEQ ID NO: 682700 - DNA, 19 bp, Mus musculus
  siRNA target sequence for Tcam1 (NM_029467.1,727-745).
ccggatctttgaattctct

SEQ ID NO: 682701 - DNA, 19 bp, Mus musculus
  siRNA target sequence for Tcam1 (NM_029467.1,1001-1019).
ccagtttatgtctacagtt

SEQ ID NO: 682702 - DNA, 19 bp, Mus musculus
  siRNA target sequence for Tcam1 (NM_029467.1,1026-1044).
caccaatcctggagataga

SEQ ID NO: 682703 - DNA, 19 bp, Mus musculus
  siRNA target sequence for Tcam1 (NM_029467.1,1060-1078).
ggcagggacggacgttaat

SEQ ID NO: 682704 - DNA, 19 bp, Mus musculus
  siRNA target sequence for Tcam1 (NM_029467.1,1062-1080).
cagggacggacgttaatgt

SEQ ID NO: 682705 - DNA, 19 bp, Mus musculus
  siRNA target sequence for Tcam1 (NM_029467.1,1064-1082).
gggacggacgttaatgtga

SEQ ID NO: 682706 - DNA, 19 bp, Mus musculus
  siRNA target sequence for Tcam1 (NM_029467.1,1087-1105).
ctcaggtcacgtgttaaca

SEQ ID NO: 682707 - DNA, 19 bp, Mus musculus
  siRNA target sequence for Tcam1 (NM_029467.1,1267-1285).
gagccagcttcatgtctta

SEQ ID NO: 682708 - DNA, 19 bp, Mus musculus
  siRNA target sequence for Vcam1 (NM_011693.2,349-367).
ggagcctcaacggtacttt

SEQ ID NO: 682709 - DNA, 19 bp, Mus musculus
  siRNA target sequence for Vcam1 (NM_011693.2,353-371).
cctcaacggtactttggat

SEQ ID NO: 682710 - DNA, 19 bp, Mus musculus
  siRNA target sequence for Vcam1 (NM_011693.2,354-372).
ctcaacggtactttggata

SEQ ID NO: 682711 - DNA, 19 bp, Mus musculus
  siRNA target sequence for Vcam1 (NM_011693.2,410-428).
cccctgaatacaaaacgat

SEQ ID NO: 682712 - DNA, 19 bp, Mus musculus
  siRNA target sequence for Vcam1 (NM_011693.2,570-588).
gcctgtcagttttgagaat

SEQ ID NO: 682713 - DNA, 19 bp, Mus musculus
  siRNA target sequence for Vcam1 (NM_011693.2,740-758).
cagacatttacccagttta

SEQ ID NO: 682714 - DNA, 19 bp, Mus musculus
  siRNA target sequence for Vcam1 (NM_011693.2,742-760).
gacatttacccagtttaca

SEQ ID NO: 682715 - DNA, 19 bp, Mus musculus
  siRNA target sequence for Vcam1 (NM_011693.2,863-881).
cctttactcccgtcattga

SEQ ID NO: 682716 - DNA, 19 bp, Mus musculus
  siRNA target sequence for Vcam1 (NM_011693.2,869-887).
ctcccgtcattgaggatat

SEQ ID NO: 682717 - DNA, 19 bp, Mus musculus
  siRNA target sequence for Vcam1 (NM_011693.2,898-916).
cttgtttgccgagctaaat

SEQ ID NO: 682718 - DNA, 19 bp, Mus musculus
  siRNA target sequence for Vcam1 (NM_011693.2,905-923).
gccgagctaaattacacat

SEQ ID NO: 682719 - DNA, 19 bp, Mus musculus
  siRNA target sequence for Vcam1 (NM_011693.2,906-924).
ccgagctaaattacacatt

SEQ ID NO: 682720 - DNA, 19 bp, Mus musculus
  siRNA target sequence for Vcam1 (NM_011693.2,908-926).
gagctaaattacacattga

SEQ ID NO: 682721 - DNA, 19 bp, Mus musculus
  siRNA target sequence for Vcam1 (NM_011693.2,919-937).
cacattgaccaaattgatt

SEQ ID NO: 682722 - DNA, 19 bp, Mus musculus
  siRNA target sequence for Vcam1 (NM_011693.2,934-952).
gattctacactcaaagaaa

SEQ ID NO: 682723 - DNA, 19 bp, Mus musculus
  siRNA target sequence for Vcam1 (NM_011693.2,953-971).
gggagactgtcaaagaact

SEQ ID NO: 682724 - DNA, 19 bp, Mus musculus
  siRNA target sequence for Vcam1 (NM_011693.2,954-972).
ggagactgtcaaagaacta

SEQ ID NO: 682725 - DNA, 19 bp, Mus musculus
  siRNA target sequence for Vcam1 (NM_011693.2,957-975).
gactgtcaaagaactacaa

SEQ ID NO: 682726 - DNA, 19 bp, Mus musculus
  siRNA target sequence for Vcam1 (NM_011693.2,1226-1244).
cagaagtggaattagttgt

SEQ ID NO: 682727 - DNA, 19 bp, Mus musculus
  siRNA target sequence for Vcam1 (NM_011693.2,1342-1360).
gactccccttctttttctt

SEQ ID NO: 682728 - DNA, 19 bp, Mus musculus
  siRNA target sequence for Vcam1 (NM_011693.2,1386-1404).
caatggggtggtaaggaat

SEQ ID NO: 682729 - DNA, 19 bp, Mus musculus
  siRNA target sequence for Vcam1 (NM_011693.2,1510-1528).
caggtggaggtctactcat

SEQ ID NO: 682730 - DNA, 19 bp, Mus musculus
  siRNA target sequence for Vcam1 (NM_011693.2,1530-1548).
ccctgaagatccagtaatt

SEQ ID NO: 682731 - DNA, 19 bp, Mus musculus
  siRNA target sequence for Vcam1 (NM_011693.2,1531-1549).
cctgaagatccagtaatta

SEQ ID NO: 682732 - DNA, 19 bp, Mus musculus
  siRNA target sequence for Vcam1 (NM_011693.2,1534-1552).
gaagatccagtaattaaaa

SEQ ID NO: 682733 - DNA, 19 bp, Mus musculus
  siRNA target sequence for Vcam1 (NM_011693.2,1537-1555).
gatccagtaattaaaatga

SEQ ID NO: 682734 - DNA, 19 bp, Mus musculus
  siRNA target sequence for Vcam1 (NM_011693.2,1623-1641).
ccatctggagattgaatta

SEQ ID NO: 682735 - DNA, 19 bp, Mus musculus
  siRNA target sequence for Vcam1 (NM_011693.2,1778-1796).
ggttacacagtggtgaaat

SEQ ID NO: 682736 - DNA, 19 bp, Mus musculus
  siRNA target sequence for Vcam1 (NM_011693.2,1825-1843).
gtacagcctctttatgtca

SEQ ID NO: 682737 - DNA, 19 bp, Mus musculus
  siRNA target sequence for Vcam1 (NM_011693.2,1872-1890).
ggtcagcccctctcctata

SEQ ID NO: 682738 - DNA, 19 bp, Mus musculus
  siRNA target sequence for Vcam1 (NM_011693.2,1875-1893).
cagcccctctcctatacta

SEQ ID NO: 682739 - DNA, 19 bp, Mus musculus
  siRNA target sequence for Vcam1 (NM_011693.2,1877-1895).
gcccctctcctatactaga

SEQ ID NO: 682740 - DNA, 19 bp, Mus musculus
  siRNA target sequence for Vcam1 (NM_011693.2,1934-1952).
ggataccagctcccaaaat

SEQ ID NO: 682741 - DNA, 19 bp, Mus musculus
  siRNA target sequence for Vcam1 (NM_011693.2,2033-2051).
gggacgattccggcattta

SEQ ID NO: 682742 - DNA, 19 bp, Mus musculus
  siRNA target sequence for Vcam1 (NM_011693.2,2034-2052).
ggacgattccggcatttat

SEQ ID NO: 682743 - DNA, 19 bp, Mus musculus
  siRNA target sequence for Vcam1 (NM_011693.2,2064-2082).
gattaacgaggctggaatt

SEQ ID NO: 682744 - DNA, 19 bp, Mus musculus
  siRNA target sequence for Vcam1 (NM_011693.2,2084-2102).
gcagaaaatcagttgaact

SEQ ID NO: 682745 - DNA, 19 bp, Mus musculus
  siRNA target sequence for Vcam1 (NM_011693.2,2087-2105).
gaaaatcagttgaactgat

SEQ ID NO: 682746 - DNA, 19 bp, Mus musculus
  siRNA target sequence for Vcam1 (NM_011693.2,2093-2111).
cagttgaactgattatcca

SEQ ID NO: 682747 - DNA, 19 bp, Mus musculus
  siRNA target sequence for Vcam1 (NM_011693.2,2147-2165).
catctaagagtgtcaaaga

SEQ ID NO: 682748 - DNA, 19 bp, Mus musculus
  siRNA target sequence for Vcam1 (NM_011693.2,2167-2185).
ggagacaccgtcattatct

SEQ ID NO: 682749 - DNA, 19 bp, Mus musculus
  siRNA target sequence for Vcam1 (NM_011693.2,2197-2215).
ggaaatgtgcccgaaacat

SEQ ID NO: 682750 - DNA, 19 bp, Mus musculus
  siRNA target sequence for Vcam1 (NM_011693.2,2203-2221).
gtgcccgaaacatggataa

SEQ ID NO: 682751 - DNA, 19 bp, Mus musculus
  siRNA target sequence for Vcam1 (NM_011693.2,2207-2225).
ccgaaacatggataatcct

SEQ ID NO: 682752 - DNA, 19 bp, Mus musculus
  siRNA target sequence for Vcam1 (NM_011693.2,2241-2259).
gacaggagacatggtatta

SEQ ID NO: 682753 - DNA, 19 bp, Mus musculus
  siRNA target sequence for Vcam1 (NM_011693.2,2245-2263).
ggagacatggtattaaagt

SEQ ID NO: 682754 - DNA, 19 bp, Mus musculus
  siRNA target sequence for Vcam1 (NM_011693.2,2313-2331).
catatacgagtgtgaatct

SEQ ID NO: 682755 - DNA, 19 bp, Mus musculus
  siRNA target sequence for Vcam1 (NM_011693.2,2319-2337).
cgagtgtgaatctaagact

SEQ ID NO: 682756 - DNA, 19 bp, Mus musculus
  siRNA target sequence for Vcam1 (NM_011693.2,2344-2362).
ggctcacaattaagaagtt

SEQ ID NO: 682757 - DNA, 19 bp, Mus musculus
  siRNA target sequence for Vcam1 (NM_011693.2,2346-2364).
ctcacaattaagaagttta

SEQ ID NO: 682758 - DNA, 19 bp, Mus musculus
  siRNA target sequence for Vcam1 (NM_011693.2,2432-2450).
gcgcatcttccttggtaat

SEQ ID NO: 682759 - DNA, 19 bp, Mus musculus
  siRNA target sequence for Vcam1 (NM_011693.2,2433-2451).
cgcatcttccttggtaata

SEQ ID NO: 682760 - DNA, 19 bp, Mus musculus
  siRNA target sequence for Vcam1 (NM_011693.2,2455-2473).
gccatcgggatgatcgttt

SEQ ID NO: 682761 - DNA, 19 bp, Mus musculus
  siRNA target sequence for Vcam1 (NM_011693.2,2456-2474).
ccatcgggatgatcgttta

SEQ ID NO: 682762 - DNA, 19 bp, Mus musculus
  siRNA target sequence for Vcam1 (NM_011693.2,2460-2478).
cgggatgatcgtttatttt

SEQ ID NO: 682763 - DNA, 19 bp, Mus musculus
  siRNA target sequence for Vcam1 (NM_011693.2,2463-2481).
gatgatcgtttattttgca

SEQ ID NO: 682764 - DNA, 19 bp, Mus musculus
  siRNA target sequence for Vcam1 (NM_011693.2,2479-2497).
gcaagaaaagctaacatga

SEQ ID NO: 682765 - DNA, 19 bp, Mus musculus
  siRNA target sequence for 8430419L09Rik (NM_028982.2,476-494).
ggctgacgtgaatagagat

SEQ ID NO: 682766 - DNA, 19 bp, Mus musculus
  siRNA target sequence for 8430419L09Rik (NM_028982.2,647-665).
cacatgcttagatctgata

SEQ ID NO: 682767 - DNA, 19 bp, Mus musculus
  siRNA target sequence for 8430419L09Rik (NM_028982.2,713-731).
gatgctcagcgcattcaat

SEQ ID NO: 682768 - DNA, 19 bp, Mus musculus
  siRNA target sequence for 8430419L09Rik (NM_028982.2,920-938).
gggccgacctgtgaagtat

SEQ ID NO: 682769 - DNA, 19 bp, Mus musculus
  siRNA target sequence for 8430419L09Rik (NM_028982.2,921-939).
ggccgacctgtgaagtata

SEQ ID NO: 682770 - DNA, 19 bp, Mus musculus
  siRNA target sequence for 8430419L09Rik (NM_028982.2,922-940).
gccgacctgtgaagtataa

SEQ ID NO: 682771 - DNA, 19 bp, Mus musculus
  siRNA target sequence for 8430419L09Rik (NM_028982.2,924-942).
cgacctgtgaagtataaca

SEQ ID NO: 682772 - DNA, 19 bp, Mus musculus
  siRNA target sequence for 8430419L09Rik (NM_028982.2,945-963).
gtgggagtagggaatctga

SEQ ID NO: 682773 - DNA, 19 bp, Mus musculus
  siRNA target sequence for 8430419L09Rik (NM_028982.2,947-965).
gggagtagggaatctgatt

SEQ ID NO: 682774 - DNA, 19 bp, Mus musculus
  siRNA target sequence for 8430419L09Rik (NM_028982.2,988-1006).
ccagtggagctgtctacat

SEQ ID NO: 682775 - DNA, 19 bp, Mus musculus
  siRNA target sequence for 8430419L09Rik (NM_028982.2,1035-1053).
gtcgccctgcgggacattt

SEQ ID NO: 682776 - DNA, 19 bp, Mus musculus
  siRNA target sequence for 8430419L09Rik (NM_028982.2,1037-1055).
cgccctgcgggacattttt

SEQ ID NO: 682777 - DNA, 19 bp, Mus musculus
  siRNA target sequence for 8430419L09Rik (NM_028982.2,1039-1057).
ccctgcgggacatttttgt

SEQ ID NO: 682778 - DNA, 19 bp, Mus musculus
  siRNA target sequence for 8430419L09Rik (NM_028982.2,1040-1058).
cctgcgggacatttttgtt

SEQ ID NO: 682779 - DNA, 19 bp, Mus musculus
  siRNA target sequence for 8430419L09Rik (NM_028982.2,1084-1102).
caccctctctgcagataga

SEQ ID NO: 682780 - DNA, 19 bp, Mus musculus
  siRNA target sequence for 8430419L09Rik (NM_028982.2,1145-1163).
gctcatcgatgtttacagt

SEQ ID NO: 682781 - DNA, 19 bp, Mus musculus
  siRNA target sequence for 8430419L09Rik (NM_028982.2,1247-1265).
cctgcttagaggacaagat

SEQ ID NO: 682782 - DNA, 19 bp, Mus musculus
  siRNA target sequence for 8430419L09Rik (NM_028982.2,1250-1268).
gcttagaggacaagatctt

SEQ ID NO: 682783 - DNA, 19 bp, Mus musculus
  siRNA target sequence for 8430419L09Rik (NM_028982.2,1418-1436).
catcgtctggagttacagt

SEQ ID NO: 682784 - DNA, 19 bp, Mus musculus
  siRNA target sequence for 8430419L09Rik (NM_028982.2,1654-1672).
cttcggaggttggaatcaa

SEQ ID NO: 682785 - DNA, 19 bp, Mus musculus
  siRNA target sequence for 8430419L09Rik (NM_028982.2,1743-1761).
ctggtggtcagcaagctta

SEQ ID NO: 682786 - DNA, 19 bp, Mus musculus
  siRNA target sequence for 8430419L09Rik (NM_028982.2,1828-1846).
gtggggaactgcgaagatt

SEQ ID NO: 682787 - DNA, 19 bp, Mus musculus
  siRNA target sequence for 8430419L09Rik (NM_028982.2,1847-1865).
cctgtctaggataaagttt

SEQ ID NO: 682788 - DNA, 19 bp, Mus musculus
  siRNA target sequence for 8430419L09Rik (NM_028982.2,1850-1868).
gtctaggataaagtttgtt

SEQ ID NO: 682789 - DNA, 19 bp, Mus musculus
  siRNA target sequence for 8430419L09Rik (NM_028982.2,1852-1870).
ctaggataaagtttgttga

SEQ ID NO: 682790 - DNA, 19 bp, Mus musculus
  siRNA target sequence for AI646725 (NM_133927.1,168-186).
gcctcggagacgtggataa

SEQ ID NO: 682791 - DNA, 19 bp, Mus musculus
  siRNA target sequence for AI646725 (NM_133927.1,181-199).
ggataacgacgcgttaaat

SEQ ID NO: 682792 - DNA, 19 bp, Mus musculus
  siRNA target sequence for AI646725 (NM_133927.1,192-210).
cgttaaatgagctagttgt

SEQ ID NO: 682793 - DNA, 19 bp, Mus musculus
  siRNA target sequence for AI646725 (NM_133927.1,224-242).
gggaaactgtccgtgtata

SEQ ID NO: 682794 - DNA, 19 bp, Mus musculus
  siRNA target sequence for AI646725 (NM_133927.1,225-243).
ggaaactgtccgtgtataa

SEQ ID NO: 682795 - DNA, 19 bp, Mus musculus
  siRNA target sequence for AI646725 (NM_133927.1,303-321).
gggtcggagatgtctgtaa

SEQ ID NO: 682796 - DNA, 19 bp, Mus musculus
  siRNA target sequence for AI646725 (NM_133927.1,304-322).
ggtcggagatgtctgtaat

SEQ ID NO: 682797 - DNA, 19 bp, Mus musculus
  siRNA target sequence for AI646725 (NM_133927.1,305-323).
gtcggagatgtctgtaata

SEQ ID NO: 682798 - DNA, 19 bp, Mus musculus
  siRNA target sequence for AI646725 (NM_133927.1,307-325).
cggagatgtctgtaataaa

SEQ ID NO: 682799 - DNA, 19 bp, Mus musculus
  siRNA target sequence for AI646725 (NM_133927.1,798-816).
cagctgcccgagatgtagt

SEQ ID NO: 682800 - DNA, 19 bp, Mus musculus
  siRNA target sequence for AI646725 (NM_133927.1,831-849).
ctggccggatccacaacaa

SEQ ID NO: 682801 - DNA, 19 bp, Mus musculus
  siRNA target sequence for AI646725 (NM_133927.1,833-851).
ggccggatccacaacaaga

SEQ ID NO: 682802 - DNA, 19 bp, Mus musculus
  siRNA target sequence for AI646725 (NM_133927.1,853-871).
cgtctccactcacctaatt

SEQ ID NO: 682803 - DNA, 19 bp, Mus musculus
  siRNA target sequence for AI646725 (NM_133927.1,863-881).
cacctaattggcaacatca

SEQ ID NO: 682804 - DNA, 19 bp, Mus musculus
  siRNA target sequence for AI646725 (NM_133927.1,1080-1098).
catatatcatcgatcacaa

SEQ ID NO: 682805 - DNA, 19 bp, Mus musculus
  siRNA target sequence for AI646725 (NM_133927.1,1184-1202).
ccctgcttggtatatgtca

SEQ ID NO: 682806 - DNA, 19 bp, Mus musculus
  siRNA target sequence for AI646725 (NM_133927.1,1192-1210).
ggtatatgtcaccttcaat

SEQ ID NO: 682807 - DNA, 19 bp, Mus musculus
  siRNA target sequence for Bbs2 (NM_026116.2,563-581).
cccaagcgggcaaggtttt

SEQ ID NO: 682808 - DNA, 19 bp, Mus musculus
  siRNA target sequence for Bbs2 (NM_026116.2,565-583).
caagcgggcaaggttttca

SEQ ID NO: 682809 - DNA, 19 bp, Mus musculus
  siRNA target sequence for Bbs2 (NM_026116.2,569-587).
cgggcaaggttttcattca

SEQ ID NO: 682810 - DNA, 19 bp, Mus musculus
  siRNA target sequence for Bbs2 (NM_026116.2,570-588).
gggcaaggttttcattcat

SEQ ID NO: 682811 - DNA, 19 bp, Mus musculus
  siRNA target sequence for Bbs2 (NM_026116.2,718-736).
cttggctatgatactcttt

SEQ ID NO: 682812 - DNA, 19 bp, Mus musculus
  siRNA target sequence for Bbs2 (NM_026116.2,762-780).
ggcttacgacatctacaat

SEQ ID NO: 682813 - DNA, 19 bp, Mus musculus
  siRNA target sequence for Bbs2 (NM_026116.2,763-781).
gcttacgacatctacaata

SEQ ID NO: 682814 - DNA, 19 bp, Mus musculus
  siRNA target sequence for Bbs2 (NM_026116.2,764-782).
cttacgacatctacaataa

SEQ ID NO: 682815 - DNA, 19 bp, Mus musculus
  siRNA target sequence for Bbs2 (NM_026116.2,768-786).
cgacatctacaataattca

SEQ ID NO: 682816 - DNA, 19 bp, Mus musculus
  siRNA target sequence for Bbs2 (NM_026116.2,896-914).
gtttcgatcacgaaggaaa

SEQ ID NO: 682817 - DNA, 19 bp, Mus musculus
  siRNA target sequence for Bbs2 (NM_026116.2,900-918).
cgatcacgaaggaaatgat

SEQ ID NO: 682818 - DNA, 19 bp, Mus musculus
  siRNA target sequence for Bbs2 (NM_026116.2,1020-1038).
cattcgagtttttaaagaa

SEQ ID NO: 682819 - DNA, 19 bp, Mus musculus
  siRNA target sequence for Bbs2 (NM_026116.2,1080-1098).
ctctctgtgtcctatgtat

SEQ ID NO: 682820 - DNA, 19 bp, Mus musculus
  siRNA target sequence for Bbs2 (NM_026116.2,1156-1174).
gcccggtactggagaatta

SEQ ID NO: 682821 - DNA, 19 bp, Mus musculus
  siRNA target sequence for Bbs2 (NM_026116.2,1157-1175).
cccggtactggagaattaa

SEQ ID NO: 682822 - DNA, 19 bp, Mus musculus
  siRNA target sequence for Bbs2 (NM_026116.2,1158-1176).
ccggtactggagaattaaa

SEQ ID NO: 682823 - DNA, 19 bp, Mus musculus
  siRNA target sequence for Bbs2 (NM_026116.2,1196-1214).
gcatccatgcttttgacat

SEQ ID NO: 682824 - DNA, 19 bp, Mus musculus
  siRNA target sequence for Bbs2 (NM_026116.2,1200-1218).
ccatgcttttgacattaat

SEQ ID NO: 682825 - DNA, 19 bp, Mus musculus
  siRNA target sequence for Bbs2 (NM_026116.2,1225-1243).
ggagtgtgtgaactgataa

SEQ ID NO: 682826 - DNA, 19 bp, Mus musculus
  siRNA target sequence for Bbs2 (NM_026116.2,1239-1257).
gataaccgggtggtctaat

SEQ ID NO: 682827 - DNA, 19 bp, Mus musculus
  siRNA target sequence for Bbs2 (NM_026116.2,1282-1300).
cggactggagaggtcatat

SEQ ID NO: 682828 - DNA, 19 bp, Mus musculus
  siRNA target sequence for Bbs2 (NM_026116.2,1331-1349).
gtgtggtagagggagatta

SEQ ID NO: 682829 - DNA, 19 bp, Mus musculus
  siRNA target sequence for Bbs2 (NM_026116.2,1356-1374).
ggatggccacgtacagtta

SEQ ID NO: 682830 - DNA, 19 bp, Mus musculus
  siRNA target sequence for Bbs2 (NM_026116.2,1357-1375).
gatggccacgtacagttaa

SEQ ID NO: 682831 - DNA, 19 bp, Mus musculus
  siRNA target sequence for Bbs2 (NM_026116.2,1360-1378).
ggccacgtacagttaatct

SEQ ID NO: 682832 - DNA, 19 bp, Mus musculus
  siRNA target sequence for Bbs2 (NM_026116.2,1506-1524).
gctagaacttcgcaactat

SEQ ID NO: 682833 - DNA, 19 bp, Mus musculus
  siRNA target sequence for Bbs2 (NM_026116.2,1624-1642).
gtcaatatggggaatgact

SEQ ID NO: 682834 - DNA, 19 bp, Mus musculus
  siRNA target sequence for Bbs2 (NM_026116.2,1626-1644).
caatatggggaatgactta

SEQ ID NO: 682835 - DNA, 19 bp, Mus musculus
  siRNA target sequence for Bbs2 (NM_026116.2,1632-1650).
ggggaatgacttacaagat

SEQ ID NO: 682836 - DNA, 19 bp, Mus musculus
  siRNA target sequence for Bbs2 (NM_026116.2,1657-1675).
gcggaattaggcatttcca

SEQ ID NO: 682837 - DNA, 19 bp, Mus musculus
  siRNA target sequence for Bbs2 (NM_026116.2,1673-1691).
ccacttccaatgatactat

SEQ ID NO: 682838 - DNA, 19 bp, Mus musculus
  siRNA target sequence for Bbs2 (NM_026116.2,1692-1710).
catccgagcagtactaatt

SEQ ID NO: 682839 - DNA, 19 bp, Mus musculus
  siRNA target sequence for Bbs2 (NM_026116.2,1695-1713).
ccgagcagtactaattttt

SEQ ID NO: 682840 - DNA, 19 bp, Mus musculus
  siRNA target sequence for Bbs2 (NM_026116.2,1775-1793).
gctccctccgggtaccaat

SEQ ID NO: 682841 - DNA, 19 bp, Mus musculus
  siRNA target sequence for Bbs2 (NM_026116.2,1776-1794).
ctccctccgggtaccaatt

SEQ ID NO: 682842 - DNA, 19 bp, Mus musculus
  siRNA target sequence for Bbs2 (NM_026116.2,1779-1797).
cctccgggtaccaattaca

SEQ ID NO: 682843 - DNA, 19 bp, Mus musculus
  siRNA target sequence for Bbs2 (NM_026116.2,1856-1874).
gcacccagttccatgtgtt

SEQ ID NO: 682844 - DNA, 19 bp, Mus musculus
  siRNA target sequence for Bbs2 (NM_026116.2,1857-1875).
cacccagttccatgtgttt

SEQ ID NO: 682845 - DNA, 19 bp, Mus musculus
  siRNA target sequence for Bbs2 (NM_026116.2,1897-1915).
cgattcaccatgtatgcat

SEQ ID NO: 682846 - DNA, 19 bp, Mus musculus
  siRNA target sequence for Bbs2 (NM_026116.2,1943-1961).
ctgtcagctacgtgaactt

SEQ ID NO: 682847 - DNA, 19 bp, Mus musculus
  siRNA target sequence for Bbs2 (NM_026116.2,1994-2012).
cgtggctcaaccagaactt

SEQ ID NO: 682848 - DNA, 19 bp, Mus musculus
  siRNA target sequence for Bbs2 (NM_026116.2,1997-2015).
ggctcaaccagaactttct

SEQ ID NO: 682849 - DNA, 19 bp, Mus musculus
  siRNA target sequence for Bbs2 (NM_026116.2,1999-2017).
ctcaaccagaactttctgt

SEQ ID NO: 682850 - DNA, 19 bp, Mus musculus
  siRNA target sequence for Bbs2 (NM_026116.2,2019-2037).
gccagaagacagtaacgtt

SEQ ID NO: 682851 - DNA, 19 bp, Mus musculus
  siRNA target sequence for Bbs2 (NM_026116.2,2026-2044).
gacagtaacgttcagaatt

SEQ ID NO: 682852 - DNA, 19 bp, Mus musculus
  siRNA target sequence for Bbs2 (NM_026116.2,2045-2063).
ccccgtttcacgtctgttt

SEQ ID NO: 682853 - DNA, 19 bp, Mus musculus
  siRNA target sequence for Bbs2 (NM_026116.2,2047-2065).
ccgtttcacgtctgtttca

SEQ ID NO: 682854 - DNA, 19 bp, Mus musculus
  siRNA target sequence for Bbs2 (NM_026116.2,2049-2067).
gtttcacgtctgtttcaca

SEQ ID NO: 682855 - DNA, 19 bp, Mus musculus
  siRNA target sequence for Bbs2 (NM_026116.2,2055-2073).
cgtctgtttcacatcgtta

SEQ ID NO: 682856 - DNA, 19 bp, Mus musculus
  siRNA target sequence for Bbs2 (NM_026116.2,2081-2099).
gtggccagctctacataaa

SEQ ID NO: 682857 - DNA, 19 bp, Mus musculus
  siRNA target sequence for Bbs2 (NM_026116.2,2164-2182).
cagtcgatcgcgtcctttt

SEQ ID NO: 682858 - DNA, 19 bp, Mus musculus
  siRNA target sequence for Bbs2 (NM_026116.2,2166-2184).
gtcgatcgcgtcctttttt

SEQ ID NO: 682859 - DNA, 19 bp, Mus musculus
  siRNA target sequence for Bbs2 (NM_026116.2,2169-2187).
gatcgcgtccttttttgct

SEQ ID NO: 682860 - DNA, 19 bp, Mus musculus
  siRNA target sequence for Bbs2 (NM_026116.2,2174-2192).
cgtccttttttgctattga

SEQ ID NO: 682861 - DNA, 19 bp, Mus musculus
  siRNA target sequence for Bbs2 (NM_026116.2,2210-2228).
cagatttccctgtgtactt

SEQ ID NO: 682862 - DNA, 19 bp, Mus musculus
  siRNA target sequence for Bbs2 (NM_026116.2,2256-2274).
ggtggatgagtatcattca

SEQ ID NO: 682863 - DNA, 19 bp, Mus musculus
  siRNA target sequence for Bbs2 (NM_026116.2,2291-2309).
gcgccgacatggctgataa

SEQ ID NO: 682864 - DNA, 19 bp, Mus musculus
  siRNA target sequence for Bbs2 (NM_026116.2,2312-2330).
ctaacctcatccgaagttt

SEQ ID NO: 682865 - DNA, 19 bp, Mus musculus
  siRNA target sequence for Bbs2 (NM_026116.2,2375-2393).
caatgaagagtcgttacat

SEQ ID NO: 682866 - DNA, 19 bp, Mus musculus
  siRNA target sequence for Bbs2 (NM_026116.2,2394-2412).
ggagctctatgaccttaat

SEQ ID NO: 682867 - DNA, 19 bp, Mus musculus
  siRNA target sequence for Bbs2 (NM_026116.2,2395-2413).
gagctctatgaccttaata

SEQ ID NO: 682868 - DNA, 19 bp, Mus musculus
  siRNA target sequence for Bbs2 (NM_026116.2,2481-2499).
ggtgaaccaagcaatccaa

SEQ ID NO: 682869 - DNA, 19 bp, Mus musculus
  siRNA target sequence for Bbs2 (NM_026116.2,2507-2525).
gccgtctgcgcgttggaaa

SEQ ID NO: 682870 - DNA, 19 bp, Mus musculus
  siRNA target sequence for Bbs2 (NM_026116.2,2560-2578).
gcgattcgaagcaacaaca

SEQ ID NO: 682871 - DNA, 19 bp, Mus musculus
  siRNA target sequence for D8Wsu49e (NM_028007.1,198-216).
ctcaactccgacaaacaga

SEQ ID NO: 682872 - DNA, 19 bp, Mus musculus
  siRNA target sequence for D8Wsu49e (NM_028007.1,272-290).
gagtgcaccctattttaaa

SEQ ID NO: 682873 - DNA, 19 bp, Mus musculus
  siRNA target sequence for D8Wsu49e (NM_028007.1,320-338).
gagtgcgttggtaacaagt

SEQ ID NO: 682874 - DNA, 19 bp, Mus musculus
  siRNA target sequence for D8Wsu49e (NM_028007.1,415-433).
gtgaactaggagctgttat

SEQ ID NO: 682875 - DNA, 19 bp, Mus musculus
  siRNA target sequence for D8Wsu49e (NM_028007.1,417-435).
gaactaggagctgttatct

SEQ ID NO: 682876 - DNA, 19 bp, Mus musculus
  siRNA target sequence for D8Wsu49e (NM_028007.1,420-438).
ctaggagctgttatctttt

SEQ ID NO: 682877 - DNA, 19 bp, Mus musculus
  siRNA target sequence for D8Wsu49e (NM_028007.1,450-468).
caaacattagatcctaaaa

SEQ ID NO: 682878 - DNA, 19 bp, Mus musculus
  siRNA target sequence for D8Wsu49e (NM_028007.1,454-472).
cattagatcctaaaaacat

SEQ ID NO: 682879 - DNA, 19 bp, Mus musculus
  siRNA target sequence for D8Wsu49e (NM_028007.1,515-533).
ggacttcaatggtgatcta

SEQ ID NO: 682880 - DNA, 19 bp, Mus musculus
  siRNA target sequence for D8Wsu49e (NM_028007.1,516-534).
gacttcaatggtgatctaa

SEQ ID NO: 682881 - DNA, 19 bp, Mus musculus
  siRNA target sequence for D8Wsu49e (NM_028007.1,540-558).
gatgtgtttggtatcacaa

SEQ ID NO: 682882 - DNA, 19 bp, Mus musculus
  siRNA target sequence for D8Wsu49e (NM_028007.1,545-563).
gtttggtatcacaaatgaa

SEQ ID NO: 682883 - DNA, 19 bp, Mus musculus
  siRNA target sequence for D8Wsu49e (NM_028007.1,565-583).
ccagccaaccgcagatact

SEQ ID NO: 682884 - DNA, 19 bp, Mus musculus
  siRNA target sequence for D8Wsu49e (NM_028007.1,613-631).
ccttgaccactaagagtaa

SEQ ID NO: 682885 - DNA, 19 bp, Mus musculus
  siRNA target sequence for D8Wsu49e (NM_028007.1,614-632).
cttgaccactaagagtaaa

SEQ ID NO: 682886 - DNA, 19 bp, Mus musculus
  siRNA target sequence for D8Wsu49e (NM_028007.1,701-719).
gacattgactgcctctaat

SEQ ID NO: 682887 - DNA, 19 bp, Mus musculus
  siRNA target sequence for D8Wsu49e (NM_028007.1,753-771).
ggaaacttctctatccata

SEQ ID NO: 682888 - DNA, 19 bp, Mus musculus
  siRNA target sequence for D8Wsu49e (NM_028007.1,761-779).
ctctatccatagtgtcttt

SEQ ID NO: 682889 - DNA, 19 bp, Mus musculus
  siRNA target sequence for D8Wsu49e (NM_028007.1,857-875).
gctgccaggctgtgaagat

SEQ ID NO: 682890 - DNA, 19 bp, Mus musculus
  siRNA target sequence for D8Wsu49e (NM_028007.1,883-901).
gtcagaaaagtgccatata

SEQ ID NO: 682891 - DNA, 19 bp, Mus musculus
  siRNA target sequence for D8Wsu49e (NM_028007.1,970-988).
ggggctttgtgccatttgt

SEQ ID NO: 682892 - DNA, 19 bp, Mus musculus
  siRNA target sequence for D8Wsu49e (NM_028007.1,982-1000).
catttgtgcatgaagaaca

SEQ ID NO: 682893 - DNA, 19 bp, Mus musculus
  siRNA target sequence for D8Wsu49e (NM_028007.1,1019-1037).
cccactcacacttcacatt

SEQ ID NO: 682894 - DNA, 19 bp, Mus musculus
  siRNA target sequence for D8Wsu49e (NM_028007.1,1032-1050).
cacattggagactacaaca

SEQ ID NO: 682895 - DNA, 19 bp, Mus musculus
  siRNA target sequence for D8Wsu49e (NM_028007.1,1062-1080).
ccagatgctctggctatat

SEQ ID NO: 682896 - DNA, 19 bp, Mus musculus
  siRNA target sequence for D8Wsu49e (NM_028007.1,1065-1083).
gatgctctggctatattga

SEQ ID NO: 682897 - DNA, 19 bp, Mus musculus
  siRNA target sequence for D8Wsu49e (NM_028007.1,1085-1103).
gaatacatctggaagcaat

SEQ ID NO: 682898 - DNA, 19 bp, Mus musculus
  siRNA target sequence for D8Wsu49e (NM_028007.1,1121-1139).
ggagaacgtcccatgcaat

SEQ ID NO: 682899 - DNA, 19 bp, Mus musculus
  siRNA target sequence for D8Wsu49e (NM_028007.1,1124-1142).
gaacgtcccatgcaataat

SEQ ID NO: 682900 - DNA, 19 bp, Mus musculus
  siRNA target sequence for D8Wsu49e (NM_028007.1,1155-1173).
gaagtgcatcggatgttta

SEQ ID NO: 682901 - DNA, 19 bp, Mus musculus
  siRNA target sequence for D8Wsu49e (NM_028007.1,1184-1202).
ggacctagcaggcctaaat

SEQ ID NO: 682902 - DNA, 19 bp, Mus musculus
  siRNA target sequence for D8Wsu49e (NM_028007.1,1187-1205).
cctagcaggcctaaatcta

SEQ ID NO: 682903 - DNA, 19 bp, Mus musculus
  siRNA target sequence for D8Wsu49e (NM_028007.1,1188-1206).
ctagcaggcctaaatctaa

SEQ ID NO: 682904 - DNA, 19 bp, Mus musculus
  siRNA target sequence for D8Wsu49e (NM_028007.1,1252-1270).
gaatcttggacattatagt

SEQ ID NO: 682905 - DNA, 19 bp, Mus musculus
  siRNA target sequence for D8Wsu49e (NM_028007.1,1262-1280).
cattatagtcctcagtaaa

SEQ ID NO: 682906 - DNA, 19 bp, Mus musculus
  siRNA target sequence for D8Wsu49e (NM_028007.1,1282-1300).
gatacaccaagaatgatgt

SEQ ID NO: 682907 - DNA, 19 bp, Mus musculus
  siRNA target sequence for D8Wsu49e (NM_028007.1,1302-1320).
gccatccatacactcaaaa

SEQ ID NO: 682908 - DNA, 19 bp, Mus musculus
  siRNA target sequence for D8Wsu49e (NM_028007.1,1331-1349).
ggcagatgcttactttgtt

SEQ ID NO: 682909 - DNA, 19 bp, Mus musculus
  siRNA target sequence for D8Wsu49e (NM_028007.1,1332-1350).
gcagatgcttactttgtta

SEQ ID NO: 682910 - DNA, 19 bp, Mus musculus
  siRNA target sequence for D8Wsu49e (NM_028007.1,1347-1365).
gttaaagtcattgttctta

SEQ ID NO: 682911 - DNA, 19 bp, Mus musculus
  siRNA target sequence for D8Wsu49e (NM_028007.1,1368-1386).
ggtctatgttctaatgact

SEQ ID NO: 682912 - DNA, 19 bp, Mus musculus
  siRNA target sequence for D8Wsu49e (NM_028007.1,1520-1538).
gctaccttacaatgtactt

SEQ ID NO: 682913 - DNA, 19 bp, Mus musculus
  siRNA target sequence for D8Wsu49e (NM_028007.1,1546-1564).
gccgaagtgccaatttcct

SEQ ID NO: 682914 - DNA, 19 bp, Mus musculus
  siRNA target sequence for D8Wsu49e (NM_028007.1,1627-1645).
ggacagcaatcattccaaa

SEQ ID NO: 682915 - DNA, 19 bp, Mus musculus
  siRNA target sequence for D8Wsu49e (NM_028007.1,1642-1660).
caaattcccagctgattgt

SEQ ID NO: 682916 - DNA, 19 bp, Mus musculus
  siRNA target sequence for D8Wsu49e (NM_028007.1,1652-1670).
gctgattgtcattccatat

SEQ ID NO: 682917 - DNA, 19 bp, Mus musculus
  siRNA target sequence for D8Wsu49e (NM_028007.1,1661-1679).
cattccatatcctcacaat

SEQ ID NO: 682918 - DNA, 19 bp, Mus musculus
  siRNA target sequence for D8Wsu49e (NM_028007.1,1690-1708).
gctggagtgccaaattgta

SEQ ID NO: 682919 - DNA, 19 bp, Mus musculus
  siRNA target sequence for D8Wsu49e (NM_028007.1,1751-1769).
cattggagtctgcattttt

SEQ ID NO: 682920 - DNA, 19 bp, Mus musculus
  siRNA target sequence for D8Wsu49e (NM_028007.1,1775-1793).
ggcaataatcgccatttta

SEQ ID NO: 682921 - DNA, 19 bp, Mus musculus
  siRNA target sequence for D8Wsu49e (NM_028007.1,1777-1795).
caataatcgccattttaca

SEQ ID NO: 682922 - DNA, 19 bp, Mus musculus
  siRNA target sequence for D8Wsu49e (NM_028007.1,1814-1832).
cgatgacagagaaaaacga

SEQ ID NO: 682923 - DNA, 19 bp, Mus musculus
  siRNA target sequence for D8Wsu49e (NM_028007.1,1840-1858).
cacatcggtttcattttga

SEQ ID NO: 682924 - DNA, 19 bp, Mus musculus
  siRNA target sequence for Itga11 (NM_176922.4,143-161).
cggacaccttcaatatgga

SEQ ID NO: 682925 - DNA, 19 bp, Mus musculus
  siRNA target sequence for Itga11 (NM_176922.4,145-163).
gacaccttcaatatggata

SEQ ID NO: 682926 - DNA, 19 bp, Mus musculus
  siRNA target sequence for Itga11 (NM_176922.4,153-171).
caatatggataccagaaat

SEQ ID NO: 682927 - DNA, 19 bp, Mus musculus
  siRNA target sequence for Itga11 (NM_176922.4,229-247).
gatatcagtggcaagaagt

SEQ ID NO: 682928 - DNA, 19 bp, Mus musculus
  siRNA target sequence for Itga11 (NM_176922.4,260-278).
gtgccccaatggaaaccaa

SEQ ID NO: 682929 - DNA, 19 bp, Mus musculus
  siRNA target sequence for Itga11 (NM_176922.4,291-309).
gacaggagacgtatacaaa

SEQ ID NO: 682930 - DNA, 19 bp, Mus musculus
  siRNA target sequence for Itga11 (NM_176922.4,355-373).
gtcactctgtccaatgtgt

SEQ ID NO: 682931 - DNA, 19 bp, Mus musculus
  siRNA target sequence for Itga11 (NM_176922.4,374-392).
ctgagaggaaggacaacat

SEQ ID NO: 682932 - DNA, 19 bp, Mus musculus
  siRNA target sequence for Itga11 (NM_176922.4,508-526).
gccaactccaacttcagat

SEQ ID NO: 682933 - DNA, 19 bp, Mus musculus
  siRNA target sequence for Itga11 (NM_176922.4,515-533).
ccaacttcagattctctaa

SEQ ID NO: 682934 - DNA, 19 bp, Mus musculus
  siRNA target sequence for Itga11 (NM_176922.4,553-571).
cagaggtgccagacttaca

SEQ ID NO: 682935 - DNA, 19 bp, Mus musculus
  siRNA target sequence for Itga11 (NM_176922.4,573-591).
ggacatcgtcattgtctta

SEQ ID NO: 682936 - DNA, 19 bp, Mus musculus
  siRNA target sequence for Itga11 (NM_176922.4,576-594).
catcgtcattgtcttagat

SEQ ID NO: 682937 - DNA, 19 bp, Mus musculus
  siRNA target sequence for Itga11 (NM_176922.4,617-635).
gggtggaggtccaacactt

SEQ ID NO: 682938 - DNA, 19 bp, Mus musculus
  siRNA target sequence for Itga11 (NM_176922.4,627-645).
ccaacacttcctcatcaat

SEQ ID NO: 682939 - DNA, 19 bp, Mus musculus
  siRNA target sequence for Itga11 (NM_176922.4,628-646).
caacacttcctcatcaata

SEQ ID NO: 682940 - DNA, 19 bp, Mus musculus
  siRNA target sequence for Itga11 (NM_176922.4,738-756).
ctacaggtctgtaaaagat

SEQ ID NO: 682941 - DNA, 19 bp, Mus musculus
  siRNA target sequence for Itga11 (NM_176922.4,976-994).
gccgttttgggctactaca

SEQ ID NO: 682942 - DNA, 19 bp, Mus musculus
  siRNA target sequence for Itga11 (NM_176922.4,993-1011).
caaccgcagggggatcaat

SEQ ID NO: 682943 - DNA, 19 bp, Mus musculus
  siRNA target sequence for Itga11 (NM_176922.4,1004-1022).
ggatcaatccagagacttt

SEQ ID NO: 682944 - DNA, 19 bp, Mus musculus
  siRNA target sequence for Itga11 (NM_176922.4,1005-1023).
gatcaatccagagactttt

SEQ ID NO: 682945 - DNA, 19 bp, Mus musculus
  siRNA target sequence for Itga11 (NM_176922.4,1182-1200).
gtcgcagactggcttttct

SEQ ID NO: 682946 - DNA, 19 bp, Mus musculus
  siRNA target sequence for Itga11 (NM_176922.4,1300-1318).
caccgagagtcctacctta

SEQ ID NO: 682947 - DNA, 19 bp, Mus musculus
  siRNA target sequence for Itga11 (NM_176922.4,1304-1322).
gagagtcctaccttaagga

SEQ ID NO: 682948 - DNA, 19 bp, Mus musculus
  siRNA target sequence for Itga11 (NM_176922.4,1412-1430).
ctggagcccccagattcaa

SEQ ID NO: 682949 - DNA, 19 bp, Mus musculus
  siRNA target sequence for Itga11 (NM_176922.4,1438-1456).
ggcaaggtcattctattca

SEQ ID NO: 682950 - DNA, 19 bp, Mus musculus
  siRNA target sequence for Itga11 (NM_176922.4,1518-1536).
ctactttgggagtgagatt

SEQ ID NO: 682951 - DNA, 19 bp, Mus musculus
  siRNA target sequence for Itga11 (NM_176922.4,1538-1556).
cctcagtggacgtcaatga

SEQ ID NO: 682952 - DNA, 19 bp, Mus musculus
  siRNA target sequence for Itga11 (NM_176922.4,1585-1603).
ggtgcacccatgtacttca

SEQ ID NO: 682953 - DNA, 19 bp, Mus musculus
  siRNA target sequence for Itga11 (NM_176922.4,1618-1636).
cgaggcaaggtgtatgtct

SEQ ID NO: 682954 - DNA, 19 bp, Mus musculus
  siRNA target sequence for Itga11 (NM_176922.4,1646-1664).
gacagaaccggtttgttta

SEQ ID NO: 682955 - DNA, 19 bp, Mus musculus
  siRNA target sequence for Itga11 (NM_176922.4,1716-1734).
ctgcatcgcctctgttcaa

SEQ ID NO: 682956 - DNA, 19 bp, Mus musculus
  siRNA target sequence for Itga11 (NM_176922.4,1718-1736).
gcatcgcctctgttcaaga

SEQ ID NO: 682957 - DNA, 19 bp, Mus musculus
  siRNA target sequence for Itga11 (NM_176922.4,1792-1810).
cacagaggggccatctaca

SEQ ID NO: 682958 - DNA, 19 bp, Mus musculus
  siRNA target sequence for Itga11 (NM_176922.4,1815-1833).
ccatggcttccaaaccaat

SEQ ID NO: 682959 - DNA, 19 bp, Mus musculus
  siRNA target sequence for Itga11 (NM_176922.4,1816-1834).
catggcttccaaaccaata

SEQ ID NO: 682960 - DNA, 19 bp, Mus musculus
  siRNA target sequence for Itga11 (NM_176922.4,1820-1838).
gcttccaaaccaatatcct

SEQ ID NO: 682961 - DNA, 19 bp, Mus musculus
  siRNA target sequence for Itga11 (NM_176922.4,1913-1931).
gacaactggacctcaatga

SEQ ID NO: 682962 - DNA, 19 bp, Mus musculus
  siRNA target sequence for Itga11 (NM_176922.4,1966-1984).
ggcaacgctgtggttttgt

SEQ ID NO: 682963 - DNA, 19 bp, Mus musculus
  siRNA target sequence for Itga11 (NM_176922.4,1991-2009).
gccctgtagttcaaatcaa

SEQ ID NO: 682964 - DNA, 19 bp, Mus musculus
  siRNA target sequence for Itga11 (NM_176922.4,2152-2170).
ggcatcaggtacaatgcaa

SEQ ID NO: 682965 - DNA, 19 bp, Mus musculus
  siRNA target sequence for Itga11 (NM_176922.4,2266-2284).
cactgtcaaaggatcaact

SEQ ID NO: 682966 - DNA, 19 bp, Mus musculus
  siRNA target sequence for Itga11 (NM_176922.4,2423-2441).
gctgtaatgaggatgaaca

SEQ ID NO: 682967 - DNA, 19 bp, Mus musculus
  siRNA target sequence for Itga11 (NM_176922.4,2741-2759).
ggcggcttcacaagaaagt

SEQ ID NO: 682968 - DNA, 19 bp, Mus musculus
  siRNA target sequence for Itga11 (NM_176922.4,2804-2822).
ctttccgtctggatttcga

SEQ ID NO: 682969 - DNA, 19 bp, Mus musculus
  siRNA target sequence for Itga11 (NM_176922.4,2823-2841).
gttcagcaagtctgtgttt

SEQ ID NO: 682970 - DNA, 19 bp, Mus musculus
  siRNA target sequence for Itga11 (NM_176922.4,2925-2943).
gcgcttccacctcaaatat

SEQ ID NO: 682971 - DNA, 19 bp, Mus musculus
  siRNA target sequence for Itga11 (NM_176922.4,2927-2945).
gcttccacctcaaatatga

SEQ ID NO: 682972 - DNA, 19 bp, Mus musculus
  siRNA target sequence for Itga11 (NM_176922.4,2928-2946).
cttccacctcaaatatgaa

SEQ ID NO: 682973 - DNA, 19 bp, Mus musculus
  siRNA target sequence for Itga11 (NM_176922.4,2944-2962).
gaagcagacgtcctcttta

SEQ ID NO: 682974 - DNA, 19 bp, Mus musculus
  siRNA target sequence for Itga11 (NM_176922.4,2947-2965).
gcagacgtcctctttacca

SEQ ID NO: 682975 - DNA, 19 bp, Mus musculus
  siRNA target sequence for Itga11 (NM_176922.4,3035-3053).
ctccgttcaactgtgtttt

SEQ ID NO: 682976 - DNA, 19 bp, Mus musculus
  siRNA target sequence for Itga11 (NM_176922.4,3080-3098).
ccatccacggggtgatgat

SEQ ID NO: 682977 - DNA, 19 bp, Mus musculus
  siRNA target sequence for Itga11 (NM_176922.4,3131-3149).
gcaaccgcctgctgatgtt

SEQ ID NO: 682978 - DNA, 19 bp, Mus musculus
  siRNA target sequence for Itga11 (NM_176922.4,3247-3265).
gccccacagaggaatcaca

SEQ ID NO: 682979 - DNA, 19 bp, Mus musculus
  siRNA target sequence for Itga11 (NM_176922.4,3359-3377).
ctctgaaagcactcaagta

SEQ ID NO: 682980 - DNA, 19 bp, Mus musculus
  siRNA target sequence for Itga11 (NM_176922.4,3455-3473).
ctagccgccaggtcacatt

SEQ ID NO: 682981 - DNA, 19 bp, Mus musculus
  siRNA target sequence for Itga11 (NM_176922.4,3458-3476).
gccgccaggtcacatttga

SEQ ID NO: 682982 - DNA, 19 bp, Mus musculus
  siRNA target sequence for Itga11 (NM_176922.4,3460-3478).
cgccaggtcacatttgaga

SEQ ID NO: 682983 - DNA, 19 bp, Mus musculus
  siRNA target sequence for Itga11 (NM_176922.4,3461-3479).
gccaggtcacatttgagat

SEQ ID NO: 682984 - DNA, 19 bp, Mus musculus
  siRNA target sequence for Itga9 (NM_133721.1,424-442).
gcaccgaaggcagattcta

SEQ ID NO: 682985 - DNA, 19 bp, Mus musculus
  siRNA target sequence for Itga9 (NM_133721.1,428-446).
cgaaggcagattctaaata

SEQ ID NO: 682986 - DNA, 19 bp, Mus musculus
  siRNA target sequence for Itga9 (NM_133721.1,652-670).
gcccatcgttggaagaaca

SEQ ID NO: 682987 - DNA, 19 bp, Mus musculus
  siRNA target sequence for Itga9 (NM_133721.1,653-671).
cccatcgttggaagaacat

SEQ ID NO: 682988 - DNA, 19 bp, Mus musculus
  siRNA target sequence for Itga9 (NM_133721.1,655-673).
catcgttggaagaacatct

SEQ ID NO: 682989 - DNA, 19 bp, Mus musculus
  siRNA target sequence for Itga9 (NM_133721.1,658-676).
cgttggaagaacatctact

SEQ ID NO: 682990 - DNA, 19 bp, Mus musculus
  siRNA target sequence for Itga9 (NM_133721.1,757-775).
ccctgctacgaagagtata

SEQ ID NO: 682991 - DNA, 19 bp, Mus musculus
  siRNA target sequence for Itga9 (NM_133721.1,804-822).
ctgccaggccggaatagca

SEQ ID NO: 682992 - DNA, 19 bp, Mus musculus
  siRNA target sequence for Itga9 (NM_133721.1,853-871).
ggtgccccaggctcgtttt

SEQ ID NO: 682993 - DNA, 19 bp, Mus musculus
  siRNA target sequence for Itga9 (NM_133721.1,900-918).
cctcacggacaacacatat

SEQ ID NO: 682994 - DNA, 19 bp, Mus musculus
  siRNA target sequence for Itga9 (NM_133721.1,901-919).
ctcacggacaacacatatt

SEQ ID NO: 682995 - DNA, 19 bp, Mus musculus
  siRNA target sequence for Itga9 (NM_133721.1,945-963).
gaacagacggtatacttat

SEQ ID NO: 682996 - DNA, 19 bp, Mus musculus
  siRNA target sequence for Itga9 (NM_133721.1,1151-1169).
gtgcagtcgacctgaacat

SEQ ID NO: 682997 - DNA, 19 bp, Mus musculus
  siRNA target sequence for Itga9 (NM_133721.1,1196-1214).
gggctcccatgttttctga

SEQ ID NO: 682998 - DNA, 19 bp, Mus musculus
  siRNA target sequence for Itga9 (NM_133721.1,1406-1424).
gcgcagtctacatctatca

SEQ ID NO: 682999 - DNA, 19 bp, Mus musculus
  siRNA target sequence for Itga9 (NM_133721.1,1407-1425).
cgcagtctacatctatcat

SEQ ID NO: 683000 - DNA, 19 bp, Mus musculus
  siRNA target sequence for Itga9 (NM_133721.1,1485-1503).
cccgaccctgcggatgttt

SEQ ID NO: 683001 - DNA, 19 bp, Mus musculus
  siRNA target sequence for Itga9 (NM_133721.1,1500-1518).
gtttgggcagtccatatca

SEQ ID NO: 683002 - DNA, 19 bp, Mus musculus
  siRNA target sequence for Itga9 (NM_133721.1,1512-1530).
catatcagggggcattgat

SEQ ID NO: 683003 - DNA, 19 bp, Mus musculus
  siRNA target sequence for Itga9 (NM_133721.1,1719-1737).
ccggttccatggcaagaat

SEQ ID NO: 683004 - DNA, 19 bp, Mus musculus
  siRNA target sequence for Itga9 (NM_133721.1,1745-1763).
gagaaatcggtctgaacta

SEQ ID NO: 683005 - DNA, 19 bp, Mus musculus
  siRNA target sequence for Itga9 (NM_133721.1,1747-1765).
gaaatcggtctgaactaca

SEQ ID NO: 683006 - DNA, 19 bp, Mus musculus
  siRNA target sequence for Itga9 (NM_133721.1,1753-1771).
ggtctgaactacaatctga

SEQ ID NO: 683007 - DNA, 19 bp, Mus musculus
  siRNA target sequence for Itga9 (NM_133721.1,1935-1953).
cagccccattgtgtttgaa

SEQ ID NO: 683008 - DNA, 19 bp, Mus musculus
  siRNA target sequence for Itga9 (NM_133721.1,1964-1982).
gcctggatgagcatgtgat

SEQ ID NO: 683009 - DNA, 19 bp, Mus musculus
  siRNA target sequence for Itga9 (NM_133721.1,2053-2071).
cagaagaatcagacagttt

SEQ ID NO: 683010 - DNA, 19 bp, Mus musculus
  siRNA target sequence for Itga9 (NM_133721.1,2237-2255).
ccaacgtgtcctttaatgt

SEQ ID NO: 683011 - DNA, 19 bp, Mus musculus
  siRNA target sequence for Itga9 (NM_133721.1,2364-2382).
gaggtcaaagtctaagtat

SEQ ID NO: 683012 - DNA, 19 bp, Mus musculus
  siRNA target sequence for Itga9 (NM_133721.1,2367-2385).
gtcaaagtctaagtatgaa

SEQ ID NO: 683013 - DNA, 19 bp, Mus musculus
  siRNA target sequence for Itga9 (NM_133721.1,2535-2553).
cacgtccatcactggaatt

SEQ ID NO: 683014 - DNA, 19 bp, Mus musculus
  siRNA target sequence for Itga9 (NM_133721.1,2537-2555).
cgtccatcactggaattgt

SEQ ID NO: 683015 - DNA, 19 bp, Mus musculus
  siRNA target sequence for Itga9 (NM_133721.1,2614-2632).
gatgaccaggagtgtcatt

SEQ ID NO: 683016 - DNA, 19 bp, Mus musculus
  siRNA target sequence for Itga9 (NM_133721.1,2634-2652).
ccaaccagtcaacattact

SEQ ID NO: 683017 - DNA, 19 bp, Mus musculus
  siRNA target sequence for Itga9 (NM_133721.1,2651-2669).
ctctccaggtctacaacat

SEQ ID NO: 683018 - DNA, 19 bp, Mus musculus
  siRNA target sequence for Itga9 (NM_133721.1,2729-2747).
ctggtggcgcagagatgtt

SEQ ID NO: 683019 - DNA, 19 bp, Mus musculus
  siRNA target sequence for Itga9 (NM_133721.1,2732-2750).
gtggcgcagagatgtttca

SEQ ID NO: 683020 - DNA, 19 bp, Mus musculus
  siRNA target sequence for Itga9 (NM_133721.1,2781-2799).
gggtaactgctctctacaa

SEQ ID NO: 683021 - DNA, 19 bp, Mus musculus
  siRNA target sequence for Itga9 (NM_133721.1,2782-2800).
ggtaactgctctctacaaa

SEQ ID NO: 683022 - DNA, 19 bp, Mus musculus
  siRNA target sequence for Itga9 (NM_133721.1,2825-2843).
ctcaagaacaagagaacat

SEQ ID NO: 683023 - DNA, 19 bp, Mus musculus
  siRNA target sequence for Itga9 (NM_133721.1,2909-2927).
ggagcttctgcctaacgtt

SEQ ID NO: 683024 - DNA, 19 bp, Mus musculus
  siRNA target sequence for Itga9 (NM_133721.1,2963-2981).
gccgcaccatcaacctata

SEQ ID NO: 683025 - DNA, 19 bp, Mus musculus
  siRNA target sequence for Itga9 (NM_133721.1,2965-2983).
cgcaccatcaacctataca

SEQ ID NO: 683026 - DNA, 19 bp, Mus musculus
  siRNA target sequence for Itga9 (NM_133721.1,2966-2984).
gcaccatcaacctatacat

SEQ ID NO: 683027 - DNA, 19 bp, Mus musculus
  siRNA target sequence for Itga9 (NM_133721.1,3074-3092).
gagtggtggagatagctaa

SEQ ID NO: 683028 - DNA, 19 bp, Mus musculus
  siRNA target sequence for Itga9 (NM_133721.1,3189-3207).
ggtggggatcctcattttt

SEQ ID NO: 683029 - DNA, 19 bp, Mus musculus
  siRNA target sequence for 1700055P21Rik (NM_028523.2,565-583).
caactacccacatacctat

SEQ ID NO: 683030 - DNA, 19 bp, Mus musculus
  siRNA target sequence for 1700055P21Rik (NM_028523.2,619-637).
caggacgggagaaaggatt

SEQ ID NO: 683031 - DNA, 19 bp, Mus musculus
  siRNA target sequence for 1700055P21Rik (NM_028523.2,629-647).
gaaaggattcgcatcaaat

SEQ ID NO: 683032 - DNA, 19 bp, Mus musculus
  siRNA target sequence for 1700055P21Rik (NM_028523.2,694-712).
cctgaaaatctttaatgga

SEQ ID NO: 683033 - DNA, 19 bp, Mus musculus
  siRNA target sequence for 1700055P21Rik (NM_028523.2,955-973).
gccttttgctgaaatatct

SEQ ID NO: 683034 - DNA, 19 bp, Mus musculus
  siRNA target sequence for 1700055P21Rik (NM_028523.2,963-981).
ctgaaatatctggaacaat

SEQ ID NO: 683035 - DNA, 19 bp, Mus musculus
  siRNA target sequence for 1700055P21Rik (NM_028523.2,975-993).
gaacaattcctcatggata

SEQ ID NO: 683036 - DNA, 19 bp, Mus musculus
  siRNA target sequence for 1700055P21Rik (NM_028523.2,983-1001).
cctcatggatacagagatt

SEQ ID NO: 683037 - DNA, 19 bp, Mus musculus
  siRNA target sequence for 1700055P21Rik (NM_028523.2,998-1016).
gattcttcaccattgtgta

SEQ ID NO: 683038 - DNA, 19 bp, Mus musculus
  siRNA target sequence for 1700055P21Rik (NM_028523.2,1012-1030).
gtgtatggctggaatccat

SEQ ID NO: 683039 - DNA, 19 bp, Mus musculus
  siRNA target sequence for 1700055P21Rik (NM_028523.2,1058-1076).
ggccaaatcagcattgtga

SEQ ID NO: 683040 - DNA, 19 bp, Mus musculus
  siRNA target sequence for 1700055P21Rik (NM_028523.2,1080-1098).
gcaaagggaccccatatta

SEQ ID NO: 683041 - DNA, 19 bp, Mus musculus
  siRNA target sequence for 1700055P21Rik (NM_028523.2,1081-1099).
caaagggaccccatattat

SEQ ID NO: 683042 - DNA, 19 bp, Mus musculus
  siRNA target sequence for 1700055P21Rik (NM_028523.2,1085-1103).
gggaccccatattatgaaa

SEQ ID NO: 683043 - DNA, 19 bp, Mus musculus
  siRNA target sequence for 1700055P21Rik (NM_028523.2,1104-1122).
gctctttggccaacaatgt

SEQ ID NO: 683044 - DNA, 19 bp, Mus musculus
  siRNA target sequence for 1700055P21Rik (NM_028523.2,1125-1143).
cttccacggtgggatactt

SEQ ID NO: 683045 - DNA, 19 bp, Mus musculus
  siRNA target sequence for 1700055P21Rik (NM_028523.2,1129-1147).
cacggtgggatacttatct

SEQ ID NO: 683046 - DNA, 19 bp, Mus musculus
  siRNA target sequence for 1700055P21Rik (NM_028523.2,1148-1166).
gcaagtctgtttacattta

SEQ ID NO: 683047 - DNA, 19 bp, Mus musculus
  siRNA target sequence for 1700055P21Rik (NM_028523.2,1149-1167).
caagtctgtttacatttaa

SEQ ID NO: 683048 - DNA, 19 bp, Mus musculus
  siRNA target sequence for 1700055P21Rik (NM_028523.2,1195-1213).
gatggagtctggtgtgatt

SEQ ID NO: 683049 - DNA, 19 bp, Mus musculus
  siRNA target sequence for 1700055P21Rik (NM_028523.2,1353-1371).
ggctgcagatagaccttaa

SEQ ID NO: 683050 - DNA, 19 bp, Mus musculus
  siRNA target sequence for 1700055P21Rik (NM_028523.2,1355-1373).
ctgcagatagaccttaaca

SEQ ID NO: 683051 - DNA, 19 bp, Mus musculus
  siRNA target sequence for 1700055P21Rik (NM_028523.2,1381-1399).
gaagataacaggtatcgta

SEQ ID NO: 683052 - DNA, 19 bp, Mus musculus
  siRNA target sequence for 1700055P21Rik (NM_028523.2,1404-1422).
ctgggtctaccatgataga

SEQ ID NO: 683053 - DNA, 19 bp, Mus musculus
  siRNA target sequence for 1700055P21Rik (NM_028523.2,1502-1520).
gtggaccaggacaagatat

SEQ ID NO: 683054 - DNA, 19 bp, Mus musculus
  siRNA target sequence for 1700055P21Rik (NM_028523.2,1504-1522).
ggaccaggacaagatattt

SEQ ID NO: 683055 - DNA, 19 bp, Mus musculus
  siRNA target sequence for 1700055P21Rik (NM_028523.2,1507-1525).
ccaggacaagatatttcaa

SEQ ID NO: 683056 - DNA, 19 bp, Mus musculus
  siRNA target sequence for 1700055P21Rik (NM_028523.2,1546-1564).
ggatgttcgtaataacttt

SEQ ID NO: 683057 - DNA, 19 bp, Mus musculus
  siRNA target sequence for 1700055P21Rik (NM_028523.2,1547-1565).
gatgttcgtaataactttt

SEQ ID NO: 683058 - DNA, 19 bp, Mus musculus
  siRNA target sequence for 1700055P21Rik (NM_028523.2,1561-1579).
ctttttgccaccaattatt

SEQ ID NO: 683059 - DNA, 19 bp, Mus musculus
  siRNA target sequence for 1700055P21Rik (NM_028523.2,1642-1660).
gctcggatgtcagtttact

SEQ ID NO: 683060 - DNA, 19 bp, Mus musculus
  siRNA target sequence for 1700055P21Rik (NM_028523.2,1667-1685).
ggtcgccttccaaagctta

SEQ ID NO: 683061 - DNA, 19 bp, Mus musculus
  siRNA target sequence for 1700055P21Rik (NM_028523.2,1692-1710).
ctcctcggaacggcaataa

SEQ ID NO: 683062 - DNA, 19 bp, Mus musculus
  siRNA target sequence for 1700055P21Rik (NM_028523.2,1695-1713).
ctcggaacggcaataacct

SEQ ID NO: 683063 - DNA, 19 bp, Mus musculus
  siRNA target sequence for 1700055P21Rik (NM_028523.2,1702-1720).
cggcaataacctcagaaat

SEQ ID NO: 683064 - DNA, 19 bp, Mus musculus
  siRNA target sequence for 1700055P21Rik (NM_028523.2,1703-1721).
ggcaataacctcagaaata

SEQ ID NO: 683065 - DNA, 19 bp, Mus musculus
  siRNA target sequence for 1700055P21Rik (NM_028523.2,1705-1723).
caataacctcagaaatact

SEQ ID NO: 683066 - DNA, 19 bp, Mus musculus
  siRNA target sequence for 1700055P21Rik (NM_028523.2,1728-1746).
ctcgtcccaaactaggtaa

SEQ ID NO: 683067 - DNA, 19 bp, Mus musculus
  siRNA target sequence for 1700055P21Rik (NM_028523.2,1777-1795).
ccaacctcgaagtaggaat

SEQ ID NO: 683068 - DNA, 19 bp, Mus musculus
  siRNA target sequence for 1700055P21Rik (NM_028523.2,1782-1800).
ctcgaagtaggaatgaact

SEQ ID NO: 683069 - DNA, 19 bp, Mus musculus
  siRNA target sequence for 1700055P21Rik (NM_028523.2,1821-1839).
caactaccactcctgatat

SEQ ID NO: 683070 - DNA, 19 bp, Mus musculus
  siRNA target sequence for 1700055P21Rik (NM_028523.2,1824-1842).
ctaccactcctgatataaa

SEQ ID NO: 683071 - DNA, 19 bp, Mus musculus
  siRNA target sequence for 1700055P21Rik (NM_028523.2,1980-1998).
ctgaaggcgcctatgattt

SEQ ID NO: 683072 - DNA, 19 bp, Mus musculus
  siRNA target sequence for 1700055P21Rik (NM_028523.2,2015-2033).
gcaggttggtggaaaggaa

SEQ ID NO: 683073 - DNA, 19 bp, Mus musculus
  siRNA target sequence for 1700055P21Rik (NM_028523.2,2019-2037).
gttggtggaaaggaatgaa

SEQ ID NO: 683074 - DNA, 19 bp, Mus musculus
  siRNA target sequence for 1700055P21Rik (NM_028523.2,2083-2101).
gcgctacagcactagtgaa

SEQ ID NO: 683075 - DNA, 19 bp, Mus musculus
  siRNA target sequence for 1700055P21Rik (NM_028523.2,2146-2164).
cgactctgcagaatatgca

SEQ ID NO: 683076 - DNA, 19 bp, Mus musculus
  siRNA target sequence for 1700055P21Rik (NM_028523.2,2167-2185).
gcccctcgtgggaggaatt

SEQ ID NO: 683077 - DNA, 19 bp, Mus musculus
  siRNA target sequence for 1700055P21Rik (NM_028523.2,2198-2216).
catcagagatccaccttta

SEQ ID NO: 683078 - DNA, 19 bp, Mus musculus
  siRNA target sequence for 1700055P21Rik (NM_028523.2,2249-2267).
gacctcgatccttacaact

SEQ ID NO: 683079 - DNA, 19 bp, Mus musculus
  siRNA target sequence for 1700055P21Rik (NM_028523.2,2426-2444).
gctttagtgggaacttaca

SEQ ID NO: 683080 - DNA, 19 bp, Mus musculus
  siRNA target sequence for 1700055P21Rik (NM_028523.2,2427-2445).
ctttagtgggaacttacaa

SEQ ID NO: 683081 - DNA, 19 bp, Mus musculus
  siRNA target sequence for 1700055P21Rik (NM_028523.2,2491-2509).
gtatgacaccccaaaaggt

SEQ ID NO: 683082 - DNA, 19 bp, Mus musculus
  siRNA target sequence for 1700055P21Rik (NM_028523.2,2529-2547).
cagaggaactggtatacca

SEQ ID NO: 683083 - DNA, 19 bp, Mus musculus
  siRNA target sequence for Adrm1 (NM_019822.2,150-168).
ggggtcttctaccaaatat

SEQ ID NO: 683084 - DNA, 19 bp, Mus musculus
  siRNA target sequence for Adrm1 (NM_019822.2,151-169).
gggtcttctaccaaatatt

SEQ ID NO: 683085 - DNA, 19 bp, Mus musculus
  siRNA target sequence for Adrm1 (NM_019822.2,152-170).
ggtcttctaccaaatattt

SEQ ID NO: 683086 - DNA, 19 bp, Mus musculus
  siRNA target sequence for Adrm1 (NM_019822.2,155-173).
cttctaccaaatatttggt

SEQ ID NO: 683087 - DNA, 19 bp, Mus musculus
  siRNA target sequence for Adrm1 (NM_019822.2,174-192).
ggagttccgggcaggaaaa

SEQ ID NO: 683088 - DNA, 19 bp, Mus musculus
  siRNA target sequence for Adrm1 (NM_019822.2,175-193).
gagttccgggcaggaaaaa

SEQ ID NO: 683089 - DNA, 19 bp, Mus musculus
  siRNA target sequence for Adrm1 (NM_019822.2,181-199).
cgggcaggaaaaatgtcat

SEQ ID NO: 683090 - DNA, 19 bp, Mus musculus
  siRNA target sequence for Adrm1 (NM_019822.2,183-201).
ggcaggaaaaatgtcatta

SEQ ID NO: 683091 - DNA, 19 bp, Mus musculus
  siRNA target sequence for Adrm1 (NM_019822.2,209-227).
ctacggtcaccccagataa

SEQ ID NO: 683092 - DNA, 19 bp, Mus musculus
  siRNA target sequence for Adrm1 (NM_019822.2,230-248).
ggaaaggtctcgtgtacat

SEQ ID NO: 683093 - DNA, 19 bp, Mus musculus
  siRNA target sequence for Adrm1 (NM_019822.2,255-273).
gacggacgactcccttatt

SEQ ID NO: 683094 - DNA, 19 bp, Mus musculus
  siRNA target sequence for Adrm1 (NM_019822.2,257-275).
cggacgactcccttattca

SEQ ID NO: 683095 - DNA, 19 bp, Mus musculus
  siRNA target sequence for Adrm1 (NM_019822.2,259-277).
gacgactcccttattcact

SEQ ID NO: 683096 - DNA, 19 bp, Mus musculus
  siRNA target sequence for Adrm1 (NM_019822.2,377-395).
gggtctacgtgctcaagtt

SEQ ID NO: 683097 - DNA, 19 bp, Mus musculus
  siRNA target sequence for Adrm1 (NM_019822.2,378-396).
ggtctacgtgctcaagttt

SEQ ID NO: 683098 - DNA, 19 bp, Mus musculus
  siRNA target sequence for Adrm1 (NM_019822.2,379-397).
gtctacgtgctcaagttta

SEQ ID NO: 683099 - DNA, 19 bp, Mus musculus
  siRNA target sequence for Adrm1 (NM_019822.2,404-422).
ggtccaagcggctcttctt

SEQ ID NO: 683100 - DNA, 19 bp, Mus musculus
  siRNA target sequence for Adrm1 (NM_019822.2,437-455).
ccaagactgaccaagatga

SEQ ID NO: 683101 - DNA, 19 bp, Mus musculus
  siRNA target sequence for Adrm1 (NM_019822.2,1075-1093).
gatgagatccagaacacat

SEQ ID NO: 683102 - DNA, 19 bp, Mus musculus
  siRNA target sequence for AI747096 (NM_015784.1,80-98).
caaatgccaacagttacta

SEQ ID NO: 683103 - DNA, 19 bp, Mus musculus
  siRNA target sequence for AI747096 (NM_015784.1,85-103).
gccaacagttactatgaca

SEQ ID NO: 683104 - DNA, 19 bp, Mus musculus
  siRNA target sequence for AI747096 (NM_015784.1,155-173).
gtgccctccagcaaattct

SEQ ID NO: 683105 - DNA, 19 bp, Mus musculus
  siRNA target sequence for AI747096 (NM_015784.1,223-241).
gctatctgcgggaagaaaa

SEQ ID NO: 683106 - DNA, 19 bp, Mus musculus
  siRNA target sequence for AI747096 (NM_015784.1,261-279).
ctgccctggctatatgaga

SEQ ID NO: 683107 - DNA, 19 bp, Mus musculus
  siRNA target sequence for AI747096 (NM_015784.1,302-320).
ccgcagtgatgcctattga

SEQ ID NO: 683108 - DNA, 19 bp, Mus musculus
  siRNA target sequence for AI747096 (NM_015784.1,476-494).
gaggactggagaacaatgt

SEQ ID NO: 683109 - DNA, 19 bp, Mus musculus
  siRNA target sequence for AI747096 (NM_015784.1,495-513).
caatgttgagctactgaat

SEQ ID NO: 683110 - DNA, 19 bp, Mus musculus
  siRNA target sequence for AI747096 (NM_015784.1,559-577).
ctgaaacacggcatggtta

SEQ ID NO: 683111 - DNA, 19 bp, Mus musculus
  siRNA target sequence for AI747096 (NM_015784.1,591-609).
caacaatctggggcttttt

SEQ ID NO: 683112 - DNA, 19 bp, Mus musculus
  siRNA target sequence for AI747096 (NM_015784.1,666-684).
gaaccagattgccacaaat

SEQ ID NO: 683113 - DNA, 19 bp, Mus musculus
  siRNA target sequence for AI747096 (NM_015784.1,669-687).
ccagattgccacaaatggt

SEQ ID NO: 683114 - DNA, 19 bp, Mus musculus
  siRNA target sequence for AI747096 (NM_015784.1,686-704).
gtgtcgtccatgtcattga

SEQ ID NO: 683115 - DNA, 19 bp, Mus musculus
  siRNA target sequence for AI747096 (NM_015784.1,703-721).
gaccgtgtcctgacacaaa

SEQ ID NO: 683116 - DNA, 19 bp, Mus musculus
  siRNA target sequence for AI747096 (NM_015784.1,709-727).
gtcctgacacaaattggta

SEQ ID NO: 683117 - DNA, 19 bp, Mus musculus
  siRNA target sequence for AI747096 (NM_015784.1,754-772).
gaagacgacctttcatcat

SEQ ID NO: 683118 - DNA, 19 bp, Mus musculus
  siRNA target sequence for AI747096 (NM_015784.1,757-775).
gacgacctttcatcattta

SEQ ID NO: 683119 - DNA, 19 bp, Mus musculus
  siRNA target sequence for AI747096 (NM_015784.1,759-777).
cgacctttcatcatttaga

SEQ ID NO: 683120 - DNA, 19 bp, Mus musculus
  siRNA target sequence for AI747096 (NM_015784.1,871-889).
ccacgaggtgtcctagaaa

SEQ ID NO: 683121 - DNA, 19 bp, Mus musculus
  siRNA target sequence for AI747096 (NM_015784.1,914-932).
ctgaagctctcatgaagta

SEQ ID NO: 683122 - DNA, 19 bp, Mus musculus
  siRNA target sequence for AI747096 (NM_015784.1,971-989).
ctggaggagccgtgtttga

SEQ ID NO: 683123 - DNA, 19 bp, Mus musculus
  siRNA target sequence for AI747096 (NM_015784.1,992-1010).
ccatggaaggaaacactat

SEQ ID NO: 683124 - DNA, 19 bp, Mus musculus
  siRNA target sequence for AI747096 (NM_015784.1,1019-1037).
ggtgcgaaggggacagtat

SEQ ID NO: 683125 - DNA, 19 bp, Mus musculus
  siRNA target sequence for AI747096 (NM_015784.1,1027-1045).
ggggacagtatctccatta

SEQ ID NO: 683126 - DNA, 19 bp, Mus musculus
  siRNA target sequence for AI747096 (NM_015784.1,1028-1046).
gggacagtatctccattaa

SEQ ID NO: 683127 - DNA, 19 bp, Mus musculus
  siRNA target sequence for AI747096 (NM_015784.1,1091-1109).
gtgtcatccacctgattga

SEQ ID NO: 683128 - DNA, 19 bp, Mus musculus
  siRNA target sequence for AI747096 (NM_015784.1,1124-1142).
ctgattctgccaaacaagt

SEQ ID NO: 683129 - DNA, 19 bp, Mus musculus
  siRNA target sequence for AI747096 (NM_015784.1,1126-1144).
gattctgccaaacaagtta

SEQ ID NO: 683130 - DNA, 19 bp, Mus musculus
  siRNA target sequence for AI747096 (NM_015784.1,1179-1197).
cgacctggtagcccaatta

SEQ ID NO: 683131 - DNA, 19 bp, Mus musculus
  siRNA target sequence for AI747096 (NM_015784.1,1222-1240).
gatggagagtacaccttat

SEQ ID NO: 683132 - DNA, 19 bp, Mus musculus
  siRNA target sequence for AI747096 (NM_015784.1,1288-1306).
caacgccttcttaagctaa

SEQ ID NO: 683133 - DNA, 19 bp, Mus musculus
  siRNA target sequence for AI747096 (NM_015784.1,1292-1310).
gccttcttaagctaattct

SEQ ID NO: 683134 - DNA, 19 bp, Mus musculus
  siRNA target sequence for AI747096 (NM_015784.1,1309-1327).
ctgcaaaatcacatattga

SEQ ID NO: 683135 - DNA, 19 bp, Mus musculus
  siRNA target sequence for AI747096 (NM_015784.1,1311-1329).
gcaaaatcacatattgaaa

SEQ ID NO: 683136 - DNA, 19 bp, Mus musculus
  siRNA target sequence for AI747096 (NM_015784.1,1341-1359).
ccttagcgacctctacaat

SEQ ID NO: 683137 - DNA, 19 bp, Mus musculus
  siRNA target sequence for AI747096 (NM_015784.1,1376-1394).
ccattggaggcaaacaact

SEQ ID NO: 683138 - DNA, 19 bp, Mus musculus
  siRNA target sequence for AI747096 (NM_015784.1,1386-1404).
caaacaactccgagtcttt

SEQ ID NO: 683139 - DNA, 19 bp, Mus musculus
  siRNA target sequence for AI747096 (NM_015784.1,1413-1431).
gacggctatctgcatagaa

SEQ ID NO: 683140 - DNA, 19 bp, Mus musculus
  siRNA target sequence for AI747096 (NM_015784.1,1480-1498).
cacatattccgagaaatca

SEQ ID NO: 683141 - DNA, 19 bp, Mus musculus
  siRNA target sequence for AI747096 (NM_015784.1,1608-1626).
cggagattggaccttgttt

SEQ ID NO: 683142 - DNA, 19 bp, Mus musculus
  siRNA target sequence for AI747096 (NM_015784.1,1623-1641).
gtttgcaccaaccaatgat

SEQ ID NO: 683143 - DNA, 19 bp, Mus musculus
  siRNA target sequence for AI747096 (NM_015784.1,1699-1717).
ctccaaaacatcattcttt

SEQ ID NO: 683144 - DNA, 19 bp, Mus musculus
  siRNA target sequence for AI747096 (NM_015784.1,1722-1740).
cctgaccccaggggtttat

SEQ ID NO: 683145 - DNA, 19 bp, Mus musculus
  siRNA target sequence for AI747096 (NM_015784.1,1723-1741).
ctgaccccaggggtttata

SEQ ID NO: 683146 - DNA, 19 bp, Mus musculus
  siRNA target sequence for AI747096 (NM_015784.1,1725-1743).
gaccccaggggtttatatt

SEQ ID NO: 683147 - DNA, 19 bp, Mus musculus
  siRNA target sequence for AI747096 (NM_015784.1,1728-1746).
cccaggggtttatattgga

SEQ ID NO: 683148 - DNA, 19 bp, Mus musculus
  siRNA target sequence for AI747096 (NM_015784.1,1755-1773).
cgaacccggagtcactaat

SEQ ID NO: 683149 - DNA, 19 bp, Mus musculus
  siRNA target sequence for AI747096 (NM_015784.1,1782-1800).
gaccacacagggaagcaaa

SEQ ID NO: 683150 - DNA, 19 bp, Mus musculus
  siRNA target sequence for AI747096 (NM_015784.1,1787-1805).
cacagggaagcaaaatcta

SEQ ID NO: 683151 - DNA, 19 bp, Mus musculus
  siRNA target sequence for AI747096 (NM_015784.1,1807-1825).
ctgaaaggagtaaacgaaa

SEQ ID NO: 683152 - DNA, 19 bp, Mus musculus
  siRNA target sequence for AI747096 (NM_015784.1,1826-1844).
cgcttctagtgaatgagtt

SEQ ID NO: 683153 - DNA, 19 bp, Mus musculus
  siRNA target sequence for AI747096 (NM_015784.1,1831-1849).
ctagtgaatgagttgaagt

SEQ ID NO: 683154 - DNA, 19 bp, Mus musculus
  siRNA target sequence for AI747096 (NM_015784.1,1840-1858).
gagttgaagtccaaagaat

SEQ ID NO: 683155 - DNA, 19 bp, Mus musculus
  siRNA target sequence for AI747096 (NM_015784.1,1850-1868).
ccaaagaatctgacatcat

SEQ ID NO: 683156 - DNA, 19 bp, Mus musculus
  siRNA target sequence for AI747096 (NM_015784.1,1905-1923).
cctctatccagcagatatt

SEQ ID NO: 683157 - DNA, 19 bp, Mus musculus
  siRNA target sequence for AI747096 (NM_015784.1,1974-1992).
catccaaatcaagtttgtt

SEQ ID NO: 683158 - DNA, 19 bp, Mus musculus
  siRNA target sequence for AI747096 (NM_015784.1,2038-2056).
gcaatgacgaagatccaaa

SEQ ID NO: 683159 - DNA, 19 bp, Mus musculus
  siRNA target sequence for AI747096 (NM_015784.1,2043-2061).
gacgaagatccaaattgaa

SEQ ID NO: 683160 - DNA, 19 bp, Mus musculus
  siRNA target sequence for AI747096 (NM_015784.1,2068-2086).
cccgacttcaggctgatta

SEQ ID NO: 683161 - DNA, 19 bp, Mus musculus
  siRNA target sequence for AI747096 (NM_015784.1,2069-2087).
ccgacttcaggctgattaa

SEQ ID NO: 683162 - DNA, 19 bp, Mus musculus
  siRNA target sequence for AI747096 (NM_015784.1,2070-2088).
cgacttcaggctgattaaa

SEQ ID NO: 683163 - DNA, 19 bp, Mus musculus
  siRNA target sequence for AI747096 (NM_015784.1,2118-2136).
cggagagccagtcattaaa

SEQ ID NO: 683164 - DNA, 19 bp, Mus musculus
  siRNA target sequence for AI747096 (NM_015784.1,2191-2209).
cgggaagaacgaatcatta

SEQ ID NO: 683165 - DNA, 19 bp, Mus musculus
  siRNA target sequence for AI747096 (NM_015784.1,2193-2211).
ggaagaacgaatcattaca

SEQ ID NO: 683166 - DNA, 19 bp, Mus musculus
  siRNA target sequence for AI747096 (NM_015784.1,2205-2223).
cattacaggtcctgagata

SEQ ID NO: 683167 - DNA, 19 bp, Mus musculus
  siRNA target sequence for AI747096 (NM_015784.1,2301-2319).
ggtcacaaagttcattgaa

SEQ ID NO: 683168 - DNA, 19 bp, Mus musculus
  siRNA target sequence for AI747096 (NM_015784.1,2320-2338).
ggtggcgatggtcacttat

SEQ ID NO: 683169 - DNA, 19 bp, Mus musculus
  siRNA target sequence for AI747096 (NM_015784.1,2321-2339).
gtggcgatggtcacttatt

SEQ ID NO: 683170 - DNA, 19 bp, Mus musculus
  siRNA target sequence for AI747096 (NM_015784.1,2324-2342).
gcgatggtcacttatttga

SEQ ID NO: 683171 - DNA, 19 bp, Mus musculus
  siRNA target sequence for AI747096 (NM_015784.1,2388-2406).
gaagataccagccaacaaa

SEQ ID NO: 683172 - DNA, 19 bp, Mus musculus
  siRNA target sequence for AI747096 (NM_015784.1,2409-2427).
ggttcaagggcctagaaga

SEQ ID NO: 683173 - DNA, 19 bp, Mus musculus
  siRNA target sequence for AI747096 (NM_015784.1,2418-2436).
gcctagaagacgatcaaga

SEQ ID NO: 683174 - DNA, 19 bp, Mus musculus
  siRNA target sequence for Astn1 (NM_007495.1,1273-1291).
cttgtgaacaccaatgtga

SEQ ID NO: 683175 - DNA, 19 bp, Mus musculus
  siRNA target sequence for Astn1 (NM_007495.1,1377-1395).
cctttgcattcggaatgaa

SEQ ID NO: 683176 - DNA, 19 bp, Mus musculus
  siRNA target sequence for Astn1 (NM_007495.1,1378-1396).
ctttgcattcggaatgaat

SEQ ID NO: 683177 - DNA, 19 bp, Mus musculus
  siRNA target sequence for Astn1 (NM_007495.1,1414-1432).
ccttggccttacacgatat

SEQ ID NO: 683178 - DNA, 19 bp, Mus musculus
  siRNA target sequence for Astn1 (NM_007495.1,1415-1433).
cttggccttacacgatatt

SEQ ID NO: 683179 - DNA, 19 bp, Mus musculus
  siRNA target sequence for Astn1 (NM_007495.1,1418-1436).
ggccttacacgatatttca

SEQ ID NO: 683180 - DNA, 19 bp, Mus musculus
  siRNA target sequence for Astn1 (NM_007495.1,1462-1480).
gagcaaccctctgataaga

SEQ ID NO: 683181 - DNA, 19 bp, Mus musculus
  siRNA target sequence for Astn1 (NM_007495.1,1468-1486).
ccctctgataagatattca

SEQ ID NO: 683182 - DNA, 19 bp, Mus musculus
  siRNA target sequence for Astn1 (NM_007495.1,1555-1573).
gaactagccatcaatccat

SEQ ID NO: 683183 - DNA, 19 bp, Mus musculus
  siRNA target sequence for Astn1 (NM_007495.1,1656-1674).
cagcctggaggtcctatta

SEQ ID NO: 683184 - DNA, 19 bp, Mus musculus
  siRNA target sequence for Astn1 (NM_007495.1,1693-1711).
cgtgattgcagcaaagata

SEQ ID NO: 683185 - DNA, 19 bp, Mus musculus
  siRNA target sequence for Astn1 (NM_007495.1,1728-1746).
gaattttcgctgcatttca

SEQ ID NO: 683186 - DNA, 19 bp, Mus musculus
  siRNA target sequence for Astn1 (NM_007495.1,1906-1924).
gaggaccccaccttgtaca

SEQ ID NO: 683187 - DNA, 19 bp, Mus musculus
  siRNA target sequence for Astn1 (NM_007495.1,1935-1953).
gttctgcgggtgtatcgaa

SEQ ID NO: 683188 - DNA, 19 bp, Mus musculus
  siRNA target sequence for Astn1 (NM_007495.1,1940-1958).
gcgggtgtatcgaagacta

SEQ ID NO: 683189 - DNA, 19 bp, Mus musculus
  siRNA target sequence for Astn1 (NM_007495.1,1943-1961).
ggtgtatcgaagactacaa

SEQ ID NO: 683190 - DNA, 19 bp, Mus musculus
  siRNA target sequence for Astn1 (NM_007495.1,2145-2163).
caactttgctcgtggttta

SEQ ID NO: 683191 - DNA, 19 bp, Mus musculus
  siRNA target sequence for Astn1 (NM_007495.1,2405-2423).
ctacatctcgtgcagattt

SEQ ID NO: 683192 - DNA, 19 bp, Mus musculus
  siRNA target sequence for Astn1 (NM_007495.1,2408-2426).
catctcgtgcagattttgt

SEQ ID NO: 683193 - DNA, 19 bp, Mus musculus
  siRNA target sequence for Astn1 (NM_007495.1,2485-2503).
gaatcctgttctatatggt

SEQ ID NO: 683194 - DNA, 19 bp, Mus musculus
  siRNA target sequence for Astn1 (NM_007495.1,2495-2513).
ctatatggtacccaaacaa

SEQ ID NO: 683195 - DNA, 19 bp, Mus musculus
  siRNA target sequence for Astn1 (NM_007495.1,2525-2543).
ggagactctggctggaata

SEQ ID NO: 683196 - DNA, 19 bp, Mus musculus
  siRNA target sequence for Astn1 (NM_007495.1,2528-2546).
gactctggctggaatatga

SEQ ID NO: 683197 - DNA, 19 bp, Mus musculus
  siRNA target sequence for Astn1 (NM_007495.1,2786-2804).
catcccccatctatgaact

SEQ ID NO: 683198 - DNA, 19 bp, Mus musculus
  siRNA target sequence for Astn1 (NM_007495.1,2867-2885).
cagggaccggagatgtcat

SEQ ID NO: 683199 - DNA, 19 bp, Mus musculus
  siRNA target sequence for Astn1 (NM_007495.1,2870-2888).
ggaccggagatgtcattga

SEQ ID NO: 683200 - DNA, 19 bp, Mus musculus
  siRNA target sequence for Astn1 (NM_007495.1,2904-2922).
cgactcgactgcttttgga

SEQ ID NO: 683201 - DNA, 19 bp, Mus musculus
  siRNA target sequence for Astn1 (NM_007495.1,3035-3053).
caattggggtgcagattgt

SEQ ID NO: 683202 - DNA, 19 bp, Mus musculus
  siRNA target sequence for Astn1 (NM_007495.1,3041-3059).
gggtgcagattgtagacta

SEQ ID NO: 683203 - DNA, 19 bp, Mus musculus
  siRNA target sequence for Astn1 (NM_007495.1,3090-3108).
gatggaccactccaaagta

SEQ ID NO: 683204 - DNA, 19 bp, Mus musculus
  siRNA target sequence for Astn1 (NM_007495.1,3119-3137).
cagtgctgagctttgtaga

SEQ ID NO: 683205 - DNA, 19 bp, Mus musculus
  siRNA target sequence for Astn1 (NM_007495.1,3229-3247).
ctggaacctgacaccattt

SEQ ID NO: 683206 - DNA, 19 bp, Mus musculus
  siRNA target sequence for Astn1 (NM_007495.1,3235-3253).
cctgacaccatttacatgt

SEQ ID NO: 683207 - DNA, 19 bp, Mus musculus
  siRNA target sequence for Astn1 (NM_007495.1,3255-3273).
caccctctggggagtagat

SEQ ID NO: 683208 - DNA, 19 bp, Mus musculus
  siRNA target sequence for Astn1 (NM_007495.1,3257-3275).
ccctctggggagtagataa

SEQ ID NO: 683209 - DNA, 19 bp, Mus musculus
  siRNA target sequence for Astn1 (NM_007495.1,3290-3308).
ccaggccaagtgatgtgat

SEQ ID NO: 683210 - DNA, 19 bp, Mus musculus
  siRNA target sequence for Astn1 (NM_007495.1,3291-3309).
caggccaagtgatgtgatt

SEQ ID NO: 683211 - DNA, 19 bp, Mus musculus
  siRNA target sequence for Astn1 (NM_007495.1,3457-3475).
cgagtcctctaccactata

SEQ ID NO: 683212 - DNA, 19 bp, Mus musculus
  siRNA target sequence for Astn1 (NM_007495.1,3458-3476).
gagtcctctaccactataa

SEQ ID NO: 683213 - DNA, 19 bp, Mus musculus
  siRNA target sequence for Astn1 (NM_007495.1,3506-3524).
ggcggtgtgaagatgagtt

SEQ ID NO: 683214 - DNA, 19 bp, Mus musculus
  siRNA target sequence for Astn1 (NM_007495.1,3507-3525).
gcggtgtgaagatgagtta

SEQ ID NO: 683215 - DNA, 19 bp, Mus musculus
  siRNA target sequence for Astn1 (NM_007495.1,3617-3635).
ggcgtggttcactcaagta

SEQ ID NO: 683216 - DNA, 19 bp, Mus musculus
  siRNA target sequence for Astn1 (NM_007495.1,3694-3712).
cgggacctcaggaagacat

SEQ ID NO: 683217 - DNA, 19 bp, Mus musculus
  siRNA target sequence for Astn1 (NM_007495.1,3704-3722).
ggaagacatgtgaagaaca

SEQ ID NO: 683218 - DNA, 19 bp, Mus musculus
  siRNA target sequence for Astn1 (NM_007495.1,3726-3744).
cctgagtgtcccctacaat

SEQ ID NO: 683219 - DNA, 19 bp, Mus musculus
  siRNA target sequence for Astn1 (NM_007495.1,3731-3749).
gtgtcccctacaatgacta

SEQ ID NO: 683220 - DNA, 19 bp, Mus musculus
  siRNA target sequence for Bcar1 (NM_009954.2,276-294).
ctggtaaccgcctcaagat

SEQ ID NO: 683221 - DNA, 19 bp, Mus musculus
  siRNA target sequence for Bcar1 (NM_009954.2,296-314).
ctggttggcatgtatgata

SEQ ID NO: 683222 - DNA, 19 bp, Mus musculus
  siRNA target sequence for Bcar1 (NM_009954.2,597-615).
gcccagccacggaccttta

SEQ ID NO: 683223 - DNA, 19 bp, Mus musculus
  siRNA target sequence for Bcar1 (NM_009954.2,639-657).
gtccagcccaggacattta

SEQ ID NO: 683224 - DNA, 19 bp, Mus musculus
  siRNA target sequence for Bcar1 (NM_009954.2,723-741).
gcggatgggagggaacaaa

SEQ ID NO: 683225 - DNA, 19 bp, Mus musculus
  siRNA target sequence for Bcar1 (NM_009954.2,775-793).
gggacagggctatgtgtat

SEQ ID NO: 683226 - DNA, 19 bp, Mus musculus
  siRNA target sequence for Bcar1 (NM_009954.2,777-795).
gacagggctatgtgtatga

SEQ ID NO: 683227 - DNA, 19 bp, Mus musculus
  siRNA target sequence for Bcar1 (NM_009954.2,904-922).
gtatggccaggaggtatat

SEQ ID NO: 683228 - DNA, 19 bp, Mus musculus
  siRNA target sequence for Bcar1 (NM_009954.2,1023-1041).
gccatcattcggtgtatga

SEQ ID NO: 683229 - DNA, 19 bp, Mus musculus
  siRNA target sequence for Bcar1 (NM_009954.2,1024-1042).
ccatcattcggtgtatgat

SEQ ID NO: 683230 - DNA, 19 bp, Mus musculus
  siRNA target sequence for Bcar1 (NM_009954.2,1084-1102).
gctgcgtgaggaaacctat

SEQ ID NO: 683231 - DNA, 19 bp, Mus musculus
  siRNA target sequence for Bcar1 (NM_009954.2,1087-1105).
gcgtgaggaaacctatgat

SEQ ID NO: 683232 - DNA, 19 bp, Mus musculus
  siRNA target sequence for Bcar1 (NM_009954.2,1089-1107).
gtgaggaaacctatgatgt

SEQ ID NO: 683233 - DNA, 19 bp, Mus musculus
  siRNA target sequence for Bcar1 (NM_009954.2,1318-1336).
ggctgatgggagtgtagtt

SEQ ID NO: 683234 - DNA, 19 bp, Mus musculus
  siRNA target sequence for Bcar1 (NM_009954.2,1320-1338).
ctgatgggagtgtagttga

SEQ ID NO: 683235 - DNA, 19 bp, Mus musculus
  siRNA target sequence for Bcar1 (NM_009954.2,1746-1764).
gccggcaactacagaagat

SEQ ID NO: 683236 - DNA, 19 bp, Mus musculus
  siRNA target sequence for Bcar1 (NM_009954.2,2033-2051).
ccctcacctccaaagttca

SEQ ID NO: 683237 - DNA, 19 bp, Mus musculus
  siRNA target sequence for Bcar1 (NM_009954.2,2064-2082).
ctccagacggccagtatga

SEQ ID NO: 683238 - DNA, 19 bp, Mus musculus
  siRNA target sequence for Bcar1 (NM_009954.2,2067-2085).
cagacggccagtatgagaa

SEQ ID NO: 683239 - DNA, 19 bp, Mus musculus
  siRNA target sequence for Bcar1 (NM_009954.2,2248-2266).
ggaggtgtctcgtccaata

SEQ ID NO: 683240 - DNA, 19 bp, Mus musculus
  siRNA target sequence for Bcar1 (NM_009954.2,2484-2502).
gtgcccacaagcttgtgtt

SEQ ID NO: 683241 - DNA, 19 bp, Mus musculus
  siRNA target sequence for Bysl (NM_016859.1,187-205).
gagcagatcctctatgtca

SEQ ID NO: 683242 - DNA, 19 bp, Mus musculus
  siRNA target sequence for Bysl (NM_016859.1,222-240).
gactgcagccgccatgtat

SEQ ID NO: 683243 - DNA, 19 bp, Mus musculus
  siRNA target sequence for Bysl (NM_016859.1,224-242).
ctgcagccgccatgtatca

SEQ ID NO: 683244 - DNA, 19 bp, Mus musculus
  siRNA target sequence for Bysl (NM_016859.1,314-332).
cccgagtgcgagatgacat

SEQ ID NO: 683245 - DNA, 19 bp, Mus musculus
  siRNA target sequence for Bysl (NM_016859.1,315-333).
ccgagtgcgagatgacatt

SEQ ID NO: 683246 - DNA, 19 bp, Mus musculus
  siRNA target sequence for Bysl (NM_016859.1,323-341).
gagatgacattgctgaata

SEQ ID NO: 683247 - DNA, 19 bp, Mus musculus
  siRNA target sequence for Bysl (NM_016859.1,397-415).
ggagcctggttcaaaggaa

SEQ ID NO: 683248 - DNA, 19 bp, Mus musculus
  siRNA target sequence for Bysl (NM_016859.1,515-533).
gtgcggccatgctgaagat

SEQ ID NO: 683249 - DNA, 19 bp, Mus musculus
  siRNA target sequence for Bysl (NM_016859.1,574-592).
cgcctgctgctggataaga

SEQ ID NO: 683250 - DNA, 19 bp, Mus musculus
  siRNA target sequence for Bysl (NM_016859.1,623-641).
ctctggtcttccactttct

SEQ ID NO: 683251 - DNA, 19 bp, Mus musculus
  siRNA target sequence for Bysl (NM_016859.1,841-859).
ggtggtgtcaccatggaat

SEQ ID NO: 683252 - DNA, 19 bp, Mus musculus
  siRNA target sequence for Cd34 (NM_133654.1,134-152).
ctgctgcatctaaataact

SEQ ID NO: 683253 - DNA, 19 bp, Mus musculus
  siRNA target sequence for Cd34 (NM_133654.1,161-179).
gctaccacggagacttcta

SEQ ID NO: 683254 - DNA, 19 bp, Mus musculus
  siRNA target sequence for Cd34 (NM_133654.1,166-184).
cacggagacttctacacaa

SEQ ID NO: 683255 - DNA, 19 bp, Mus musculus
  siRNA target sequence for Cd34 (NM_133654.1,172-190).
gacttctacacaaggaata

SEQ ID NO: 683256 - DNA, 19 bp, Mus musculus
  siRNA target sequence for Cd34 (NM_133654.1,258-276).
gccactacttgatctatca

SEQ ID NO: 683257 - DNA, 19 bp, Mus musculus
  siRNA target sequence for Cd34 (NM_133654.1,306-324).
cagagactatggtcaactt

SEQ ID NO: 683258 - DNA, 19 bp, Mus musculus
  siRNA target sequence for Cd34 (NM_133654.1,308-326).
gagactatggtcaacttta

SEQ ID NO: 683259 - DNA, 19 bp, Mus musculus
  siRNA target sequence for Cd34 (NM_133654.1,310-328).
gactatggtcaactttaca

SEQ ID NO: 683260 - DNA, 19 bp, Mus musculus
  siRNA target sequence for Cd34 (NM_133654.1,312-330).
ctatggtcaactttacagt

SEQ ID NO: 683261 - DNA, 19 bp, Mus musculus
  siRNA target sequence for Cd34 (NM_133654.1,356-374).
ggaactccacacacttttt

SEQ ID NO: 683262 - DNA, 19 bp, Mus musculus
  siRNA target sequence for Cd34 (NM_133654.1,398-416).
ggcatactgcctactactt

SEQ ID NO: 683263 - DNA, 19 bp, Mus musculus
  siRNA target sequence for Cd34 (NM_133654.1,400-418).
catactgcctactacttca

SEQ ID NO: 683264 - DNA, 19 bp, Mus musculus
  siRNA target sequence for Cd34 (NM_133654.1,408-426).
ctactacttcagacagtat

SEQ ID NO: 683265 - DNA, 19 bp, Mus musculus
  siRNA target sequence for Cd34 (NM_133654.1,451-469).
gtccagcctgccatctata

SEQ ID NO: 683266 - DNA, 19 bp, Mus musculus
  siRNA target sequence for Cd34 (NM_133654.1,479-497).
gattattcgcctaataata

SEQ ID NO: 683267 - DNA, 19 bp, Mus musculus
  siRNA target sequence for Cd34 (NM_133654.1,519-537).
ccaccgagccatatgctta

SEQ ID NO: 683268 - DNA, 19 bp, Mus musculus
  siRNA target sequence for Cd34 (NM_133654.1,523-541).
cgagccatatgcttacaca

SEQ ID NO: 683269 - DNA, 19 bp, Mus musculus
  siRNA target sequence for Cd34 (NM_133654.1,527-545).
ccatatgcttacacatcat

SEQ ID NO: 683270 - DNA, 19 bp, Mus musculus
  siRNA target sequence for Cd34 (NM_133654.1,561-579).
ccattaagggagaaatcaa

SEQ ID NO: 683271 - DNA, 19 bp, Mus musculus
  siRNA target sequence for Cd34 (NM_133654.1,629-647).
ctaagtgaagcatctagtt

SEQ ID NO: 683272 - DNA, 19 bp, Mus musculus
  siRNA target sequence for Cd34 (NM_133654.1,642-660).
ctagttgtgaggagtttaa

SEQ ID NO: 683273 - DNA, 19 bp, Mus musculus
  siRNA target sequence for Cd34 (NM_133654.1,670-688).
gggagaagatctaattcaa

SEQ ID NO: 683274 - DNA, 19 bp, Mus musculus
  siRNA target sequence for Cd34 (NM_133654.1,677-695).
gatctaattcaaatactgt

SEQ ID NO: 683275 - DNA, 19 bp, Mus musculus
  siRNA target sequence for Cd34 (NM_133654.1,813-831).
ccagcaaactccagcttat

SEQ ID NO: 683276 - DNA, 19 bp, Mus musculus
  siRNA target sequence for Cd34 (NM_133654.1,839-857).
caccaatctgacttgagaa

SEQ ID NO: 683277 - DNA, 19 bp, Mus musculus
  siRNA target sequence for Cd34 (NM_133654.1,862-880).
ggggatccaaagcttcaat

SEQ ID NO: 683278 - DNA, 19 bp, Mus musculus
  siRNA target sequence for Cd34 (NM_133654.1,863-881).
gggatccaaagcttcaata

SEQ ID NO: 683279 - DNA, 19 bp, Mus musculus
  siRNA target sequence for Cd34 (NM_133654.1,864-882).
ggatccaaagcttcaataa

SEQ ID NO: 683280 - DNA, 19 bp, Mus musculus
  siRNA target sequence for Cd34 (NM_133654.1,868-886).
ccaaagcttcaataaacaa

SEQ ID NO: 683281 - DNA, 19 bp, Mus musculus
  siRNA target sequence for Cd34 (NM_133654.1,873-891).
gcttcaataaacaagatat

SEQ ID NO: 683282 - DNA, 19 bp, Mus musculus
  siRNA target sequence for Cd34 (NM_133654.1,893-911).
gggagccaccagagctatt

SEQ ID NO: 683283 - DNA, 19 bp, Mus musculus
  siRNA target sequence for Cd34 (NM_133654.1,904-922).
gagctattcccgaaagact

SEQ ID NO: 683284 - DNA, 19 bp, Mus musculus
  siRNA target sequence for Cd34 (NM_133654.1,913-931).
ccgaaagactcttattgca

SEQ ID NO: 683285 - DNA, 19 bp, Mus musculus
  siRNA target sequence for Cd34 (NM_133654.1,914-932).
cgaaagactcttattgcat

SEQ ID NO: 683286 - DNA, 19 bp, Mus musculus
  siRNA target sequence for Cd34 (NM_133654.1,915-933).
gaaagactcttattgcatt

SEQ ID NO: 683287 - DNA, 19 bp, Mus musculus
  siRNA target sequence for Cd34 (NM_133654.1,1165-1183).
cggccattcagcaagacaa

SEQ ID NO: 683288 - DNA, 19 bp, Mus musculus
  siRNA target sequence for Cntn1 (NM_007727.1,277-295).
ctcctgctaatctccttaa

SEQ ID NO: 683289 - DNA, 19 bp, Mus musculus
  siRNA target sequence for Cntn1 (NM_007727.1,280-298).
ctgctaatctccttaacat

SEQ ID NO: 683290 - DNA, 19 bp, Mus musculus
  siRNA target sequence for Cntn1 (NM_007727.1,362-380).
gatttgggcccatttttga

SEQ ID NO: 683291 - DNA, 19 bp, Mus musculus
  siRNA target sequence for Cntn1 (NM_007727.1,379-397).
gaagagcagccaatcaata

SEQ ID NO: 683292 - DNA, 19 bp, Mus musculus
  siRNA target sequence for Cntn1 (NM_007727.1,384-402).
gcagccaatcaataccatt

SEQ ID NO: 683293 - DNA, 19 bp, Mus musculus
  siRNA target sequence for Cntn1 (NM_007727.1,385-403).
cagccaatcaataccattt

SEQ ID NO: 683294 - DNA, 19 bp, Mus musculus
  siRNA target sequence for Cntn1 (NM_007727.1,498-516).
cgtggacctgacaaacgat

SEQ ID NO: 683295 - DNA, 19 bp, Mus musculus
  siRNA target sequence for Cntn1 (NM_007727.1,509-527).
caaacgatcggtacagtat

SEQ ID NO: 683296 - DNA, 19 bp, Mus musculus
  siRNA target sequence for Cntn1 (NM_007727.1,532-550).
ggaggaaaccttgttatca

SEQ ID NO: 683297 - DNA, 19 bp, Mus musculus
  siRNA target sequence for Cntn1 (NM_007727.1,552-570).
caacccggacaaacagaaa

SEQ ID NO: 683298 - DNA, 19 bp, Mus musculus
  siRNA target sequence for Cntn1 (NM_007727.1,571-589).
gacgctggggtgtactact

SEQ ID NO: 683299 - DNA, 19 bp, Mus musculus
  siRNA target sequence for Cntn1 (NM_007727.1,590-608).
gcctggcatccaacaacta

SEQ ID NO: 683300 - DNA, 19 bp, Mus musculus
  siRNA target sequence for Cntn1 (NM_007727.1,794-812).
ccatggataagcgaagatt

SEQ ID NO: 683301 - DNA, 19 bp, Mus musculus
  siRNA target sequence for Cntn1 (NM_007727.1,795-813).
catggataagcgaagattt

SEQ ID NO: 683302 - DNA, 19 bp, Mus musculus
  siRNA target sequence for Cntn1 (NM_007727.1,820-838).
cagaccaacggcaatctct

SEQ ID NO: 683303 - DNA, 19 bp, Mus musculus
  siRNA target sequence for Cntn1 (NM_007727.1,909-927).
gagtgtgttcagcaagttt

SEQ ID NO: 683304 - DNA, 19 bp, Mus musculus
  siRNA target sequence for Cntn1 (NM_007727.1,911-929).
gtgtgttcagcaagtttat

SEQ ID NO: 683305 - DNA, 19 bp, Mus musculus
  siRNA target sequence for Cntn1 (NM_007727.1,942-960).
gattcctgaacgaacaaca

SEQ ID NO: 683306 - DNA, 19 bp, Mus musculus
  siRNA target sequence for Cntn1 (NM_007727.1,963-981).
gccatatcctgctgatatt

SEQ ID NO: 683307 - DNA, 19 bp, Mus musculus
  siRNA target sequence for Cntn1 (NM_007727.1,965-983).
catatcctgctgatattgt

SEQ ID NO: 683308 - DNA, 19 bp, Mus musculus
  siRNA target sequence for Cntn1 (NM_007727.1,985-1003).
gtgcagttcaaggacatat

SEQ ID NO: 683309 - DNA, 19 bp, Mus musculus
  siRNA target sequence for Cntn1 (NM_007727.1,988-1006).
cagttcaaggacatataca

SEQ ID NO: 683310 - DNA, 19 bp, Mus musculus
  siRNA target sequence for Cntn1 (NM_007727.1,1005-1023).
caccatgatgggccaaaat

SEQ ID NO: 683311 - DNA, 19 bp, Mus musculus
  siRNA target sequence for Cntn1 (NM_007727.1,1014-1032).
gggccaaaatgtgacttta

SEQ ID NO: 683312 - DNA, 19 bp, Mus musculus
  siRNA target sequence for Cntn1 (NM_007727.1,1016-1034).
gccaaaatgtgactttaga

SEQ ID NO: 683313 - DNA, 19 bp, Mus musculus
  siRNA target sequence for Cntn1 (NM_007727.1,1076-1094).
ggaaggtgctagaaccaat

SEQ ID NO: 683314 - DNA, 19 bp, Mus musculus
  siRNA target sequence for Cntn1 (NM_007727.1,1212-1230).
ccaggcaagaatctatgtt

SEQ ID NO: 683315 - DNA, 19 bp, Mus musculus
  siRNA target sequence for Cntn1 (NM_007727.1,1241-1259).
ctgagtgggtagagcatat

SEQ ID NO: 683316 - DNA, 19 bp, Mus musculus
  siRNA target sequence for Cntn1 (NM_007727.1,1245-1263).
gtgggtagagcatatcaat

SEQ ID NO: 683317 - DNA, 19 bp, Mus musculus
  siRNA target sequence for Cntn1 (NM_007727.1,1247-1265).
gggtagagcatatcaatga

SEQ ID NO: 683318 - DNA, 19 bp, Mus musculus
  siRNA target sequence for Cntn1 (NM_007727.1,1290-1308).
cctctactggccttgcata

SEQ ID NO: 683319 - DNA, 19 bp, Mus musculus
  siRNA target sequence for Cntn1 (NM_007727.1,1434-1452).
cgcgtatgggtccatttat

SEQ ID NO: 683320 - DNA, 19 bp, Mus musculus
  siRNA target sequence for Cntn1 (NM_007727.1,1467-1485).
caagatcctggctttagct

SEQ ID NO: 683321 - DNA, 19 bp, Mus musculus
  siRNA target sequence for Cntn1 (NM_007727.1,1483-1501).
gctccaacttttgaaatga

SEQ ID NO: 683322 - DNA, 19 bp, Mus musculus
  siRNA target sequence for Cntn1 (NM_007727.1,1495-1513).
gaaatgaatcctatgaaga

SEQ ID NO: 683323 - DNA, 19 bp, Mus musculus
  siRNA target sequence for Cntn1 (NM_007727.1,1535-1553).
gtggaagggttatcattga

SEQ ID NO: 683324 - DNA, 19 bp, Mus musculus
  siRNA target sequence for Cntn1 (NM_007727.1,1537-1555).
ggaagggttatcattgaat

SEQ ID NO: 683325 - DNA, 19 bp, Mus musculus
  siRNA target sequence for Cntn1 (NM_007727.1,1541-1559).
gggttatcattgaatgtaa

SEQ ID NO: 683326 - DNA, 19 bp, Mus musculus
  siRNA target sequence for Cntn1 (NM_007727.1,1542-1560).
ggttatcattgaatgtaaa

SEQ ID NO: 683327 - DNA, 19 bp, Mus musculus
  siRNA target sequence for Cntn1 (NM_007727.1,1569-1587).
cgcaccaaaacccaagttt

SEQ ID NO: 683328 - DNA, 19 bp, Mus musculus
  siRNA target sequence for Cntn1 (NM_007727.1,1601-1619).
ggacggagtggctcgttaa

SEQ ID NO: 683329 - DNA, 19 bp, Mus musculus
  siRNA target sequence for Cntn1 (NM_007727.1,1645-1663).
gatggtagcttggaaatca

SEQ ID NO: 683330 - DNA, 19 bp, Mus musculus
  siRNA target sequence for Cntn1 (NM_007727.1,1653-1671).
cttggaaatcaataatatt

SEQ ID NO: 683331 - DNA, 19 bp, Mus musculus
  siRNA target sequence for Cntn1 (NM_007727.1,1656-1674).
ggaaatcaataatattaca

SEQ ID NO: 683332 - DNA, 19 bp, Mus musculus
  siRNA target sequence for Cntn1 (NM_007727.1,1681-1699).
gatggtggaatctatacat

SEQ ID NO: 683333 - DNA, 19 bp, Mus musculus
  siRNA target sequence for Cntn1 (NM_007727.1,1752-1770).
cacaaatcccacacgaatt

SEQ ID NO: 683334 - DNA, 19 bp, Mus musculus
  siRNA target sequence for Cntn1 (NM_007727.1,1754-1772).
caaatcccacacgaattat

SEQ ID NO: 683335 - DNA, 19 bp, Mus musculus
  siRNA target sequence for Cntn1 (NM_007727.1,1824-1842).
gtgtgctgcgtctttcgat

SEQ ID NO: 683336 - DNA, 19 bp, Mus musculus
  siRNA target sequence for Cntn1 (NM_007727.1,1879-1897).
ggctacgtgattgacttta

SEQ ID NO: 683337 - DNA, 19 bp, Mus musculus
  siRNA target sequence for Cntn1 (NM_007727.1,1880-1898).
gctacgtgattgactttaa

SEQ ID NO: 683338 - DNA, 19 bp, Mus musculus
  siRNA target sequence for Cntn1 (NM_007727.1,1902-1920).
ggaaattacgcatatccat

SEQ ID NO: 683339 - DNA, 19 bp, Mus musculus
  siRNA target sequence for Cntn1 (NM_007727.1,1903-1921).
gaaattacgcatatccatt

SEQ ID NO: 683340 - DNA, 19 bp, Mus musculus
  siRNA target sequence for Cntn1 (NM_007727.1,1967-1985).
gaaatgcgcagctgaaaca

SEQ ID NO: 683341 - DNA, 19 bp, Mus musculus
  siRNA target sequence for Cntn1 (NM_007727.1,2000-2018).
cgtgcacggcgcagacaat

SEQ ID NO: 683342 - DNA, 19 bp, Mus musculus
  siRNA target sequence for Cntn1 (NM_007727.1,2011-2029).
cagacaatcgtggacaatt

SEQ ID NO: 683343 - DNA, 19 bp, Mus musculus
  siRNA target sequence for Cntn1 (NM_007727.1,2129-2147).
gccgtggttccgacaatca

SEQ ID NO: 683344 - DNA, 19 bp, Mus musculus
  siRNA target sequence for Cntn1 (NM_007727.1,2142-2160).
caatcacagccctatctct

SEQ ID NO: 683345 - DNA, 19 bp, Mus musculus
  siRNA target sequence for Cntn1 (NM_007727.1,2216-2234).
cagatcccccaatcattga

SEQ ID NO: 683346 - DNA, 19 bp, Mus musculus
  siRNA target sequence for Cntn1 (NM_007727.1,2222-2240).
ccccaatcattgaaggaaa

SEQ ID NO: 683347 - DNA, 19 bp, Mus musculus
  siRNA target sequence for Cntn1 (NM_007727.1,2225-2243).
caatcattgaaggaaacat

SEQ ID NO: 683348 - DNA, 19 bp, Mus musculus
  siRNA target sequence for Cntn1 (NM_007727.1,2241-2259).
catggagtcagcaaaagca

SEQ ID NO: 683349 - DNA, 19 bp, Mus musculus
  siRNA target sequence for Cntn1 (NM_007727.1,2271-2289).
cccttggatggagtatgaa

SEQ ID NO: 683350 - DNA, 19 bp, Mus musculus
  siRNA target sequence for Cntn1 (NM_007727.1,2296-2314).
gtggtggcgaccaatactt

SEQ ID NO: 683351 - DNA, 19 bp, Mus musculus
  siRNA target sequence for Cntn1 (NM_007727.1,2298-2316).
ggtggcgaccaatacttta

SEQ ID NO: 683352 - DNA, 19 bp, Mus musculus
  siRNA target sequence for Cntn1 (NM_007727.1,2454-2472).
gtaccattacggtaacaat

SEQ ID NO: 683353 - DNA, 19 bp, Mus musculus
  siRNA target sequence for Cntn1 (NM_007727.1,2457-2475).
ccattacggtaacaatttt

SEQ ID NO: 683354 - DNA, 19 bp, Mus musculus
  siRNA target sequence for Cntn1 (NM_007727.1,2487-2505).
ggcgtttaagccatttgat

SEQ ID NO: 683355 - DNA, 19 bp, Mus musculus
  siRNA target sequence for Cntn1 (NM_007727.1,2549-2567).
gccgctacgtccacaaaga

SEQ ID NO: 683356 - DNA, 19 bp, Mus musculus
  siRNA target sequence for Cntn1 (NM_007727.1,2550-2568).
ccgctacgtccacaaagat

SEQ ID NO: 683357 - DNA, 19 bp, Mus musculus
  siRNA target sequence for Cntn1 (NM_007727.1,2552-2570).
gctacgtccacaaagatga

SEQ ID NO: 683358 - DNA, 19 bp, Mus musculus
  siRNA target sequence for Cntn1 (NM_007727.1,2580-2598).
cccctccaccgcgtttcaa

SEQ ID NO: 683359 - DNA, 19 bp, Mus musculus
  siRNA target sequence for Cntn1 (NM_007727.1,2582-2600).
cctccaccgcgtttcaagt

SEQ ID NO: 683360 - DNA, 19 bp, Mus musculus
  siRNA target sequence for Cntn1 (NM_007727.1,2585-2603).
ccaccgcgtttcaagtcaa

SEQ ID NO: 683361 - DNA, 19 bp, Mus musculus
  siRNA target sequence for Cntn1 (NM_007727.1,2586-2604).
caccgcgtttcaagtcaaa

SEQ ID NO: 683362 - DNA, 19 bp, Mus musculus
  siRNA target sequence for Cntn1 (NM_007727.1,2588-2606).
ccgcgtttcaagtcaaagt

SEQ ID NO: 683363 - DNA, 19 bp, Mus musculus
  siRNA target sequence for Cntn1 (NM_007727.1,2642-2660).
gcctcgtagctgtcatcaa

SEQ ID NO: 683364 - DNA, 19 bp, Mus musculus
  siRNA target sequence for Cntn1 (NM_007727.1,2655-2673).
catcaactctgcacaagat

SEQ ID NO: 683365 - DNA, 19 bp, Mus musculus
  siRNA target sequence for Cntn1 (NM_007727.1,2693-2711).
cagaggtaggggtcaaagt

SEQ ID NO: 683366 - DNA, 19 bp, Mus musculus
  siRNA target sequence for Cntn1 (NM_007727.1,2697-2715).
ggtaggggtcaaagtgtta

SEQ ID NO: 683367 - DNA, 19 bp, Mus musculus
  siRNA target sequence for Cntn1 (NM_007727.1,2701-2719).
ggggtcaaagtgttatcat

SEQ ID NO: 683368 - DNA, 19 bp, Mus musculus
  siRNA target sequence for Cntn1 (NM_007727.1,2712-2730).
gttatcatcctctgagata

SEQ ID NO: 683369 - DNA, 19 bp, Mus musculus
  siRNA target sequence for Cntn1 (NM_007727.1,2736-2754).
ccattggaagcatgtgtta

SEQ ID NO: 683370 - DNA, 19 bp, Mus musculus
  siRNA target sequence for Cntn1 (NM_007727.1,2873-2891).
ccgacacccagtacttcat

SEQ ID NO: 683371 - DNA, 19 bp, Mus musculus
  siRNA target sequence for Cntn1 (NM_007727.1,2874-2892).
cgacacccagtacttcatt

SEQ ID NO: 683372 - DNA, 19 bp, Mus musculus
  siRNA target sequence for Cntn1 (NM_007727.1,2877-2895).
cacccagtacttcattgaa

SEQ ID NO: 683373 - DNA, 19 bp, Mus musculus
  siRNA target sequence for Cntn1 (NM_007727.1,2974-2992).
caaccaccaaggatcatca

SEQ ID NO: 683374 - DNA, 19 bp, Mus musculus
  siRNA target sequence for Cntn1 (NM_007727.1,3002-3020).
gatctggctcacgatatat

SEQ ID NO: 683375 - DNA, 19 bp, Mus musculus
  siRNA target sequence for Cntn1 (NM_007727.1,3005-3023).
ctggctcacgatatataat

SEQ ID NO: 683376 - DNA, 19 bp, Mus musculus
  siRNA target sequence for Cntn1 (NM_007727.1,3007-3025).
ggctcacgatatataatca

SEQ ID NO: 683377 - DNA, 19 bp, Mus musculus
  siRNA target sequence for Cntn1 (NM_007727.1,3009-3027).
ctcacgatatataatcaca

SEQ ID NO: 683378 - DNA, 19 bp, Mus musculus
  siRNA target sequence for Cntn1 (NM_007727.1,3036-3054).
cgttgtggcactatccaat

SEQ ID NO: 683379 - DNA, 19 bp, Mus musculus
  siRNA target sequence for Cntn1 (NM_007727.1,3040-3058).
gtggcactatccaatgaat

SEQ ID NO: 683380 - DNA, 19 bp, Mus musculus
  siRNA target sequence for Cntn1 (NM_007727.1,3068-3086).
caggctacaagatactcta

SEQ ID NO: 683381 - DNA, 19 bp, Mus musculus
  siRNA target sequence for Cntn1 (NM_007727.1,3106-3124).
gacggcaagctgttctcaa

SEQ ID NO: 683382 - DNA, 19 bp, Mus musculus
  siRNA target sequence for Cntn1 (NM_007727.1,3114-3132).
gctgttctcaacccataaa

SEQ ID NO: 683383 - DNA, 19 bp, Mus musculus
  siRNA target sequence for Cntn1 (NM_007727.1,3209-3227).
gagtcgtgtctcaagtcaa

SEQ ID NO: 683384 - DNA, 19 bp, Mus musculus
  siRNA target sequence for Cntn1 (NM_007727.1,3211-3229).
gtcgtgtctcaagtcaaaa

SEQ ID NO: 683385 - DNA, 19 bp, Mus musculus
  siRNA target sequence for Cntn1 (NM_007727.1,3214-3232).
gtgtctcaagtcaaaattt

SEQ ID NO: 683386 - DNA, 19 bp, Mus musculus
  siRNA target sequence for Cntnap1 (NM_016782.1,214-232).
gggctactacggttgcaat

SEQ ID NO: 683387 - DNA, 19 bp, Mus musculus
  siRNA target sequence for Cntnap1 (NM_016782.1,268-286).
gggcgcttcttcctactat

SEQ ID NO: 683388 - DNA, 19 bp, Mus musculus
  siRNA target sequence for Cntnap1 (NM_016782.1,366-384).
ggctgcagatcgacttaat

SEQ ID NO: 683389 - DNA, 19 bp, Mus musculus
  siRNA target sequence for Cntnap1 (NM_016782.1,371-389).
cagatcgacttaatgaaga

SEQ ID NO: 683390 - DNA, 19 bp, Mus musculus
  siRNA target sequence for Cntnap1 (NM_016782.1,412-430).
cacacagggagcttttaat

SEQ ID NO: 683391 - DNA, 19 bp, Mus musculus
  siRNA target sequence for Cntnap1 (NM_016782.1,486-504).
ggacaccattctaccaaaa

SEQ ID NO: 683392 - DNA, 19 bp, Mus musculus
  siRNA target sequence for Cntnap1 (NM_016782.1,613-631).
gaacccacgcggcaagatt

SEQ ID NO: 683393 - DNA, 19 bp, Mus musculus
  siRNA target sequence for Cntnap1 (NM_016782.1,742-760).
ggacgtgttcgcttttagt

SEQ ID NO: 683394 - DNA, 19 bp, Mus musculus
  siRNA target sequence for Cntnap1 (NM_016782.1,743-761).
gacgtgttcgcttttagtt

SEQ ID NO: 683395 - DNA, 19 bp, Mus musculus
  siRNA target sequence for Cntnap1 (NM_016782.1,912-930).
gccttggtggcgttcttaa

SEQ ID NO: 683396 - DNA, 19 bp, Mus musculus
  siRNA target sequence for Cntnap1 (NM_016782.1,968-986).
ggccgagatgcaaatttca

SEQ ID NO: 683397 - DNA, 19 bp, Mus musculus
  siRNA target sequence for Cntnap1 (NM_016782.1,996-1014).
gttacgcccatcactttgt

SEQ ID NO: 683398 - DNA, 19 bp, Mus musculus
  siRNA target sequence for Cntnap1 (NM_016782.1,1015-1033).
gctcaacggcgactttgaa

SEQ ID NO: 683399 - DNA, 19 bp, Mus musculus
  siRNA target sequence for Cntnap1 (NM_016782.1,1016-1034).
ctcaacggcgactttgaaa

SEQ ID NO: 683400 - DNA, 19 bp, Mus musculus
  siRNA target sequence for Cntnap1 (NM_016782.1,1035-1053).
ggctgaatcttgaaaatga

SEQ ID NO: 683401 - DNA, 19 bp, Mus musculus
  siRNA target sequence for Cntnap1 (NM_016782.1,1116-1134).
gtggctgcatagaaaacgt

SEQ ID NO: 683402 - DNA, 19 bp, Mus musculus
  siRNA target sequence for Cntnap1 (NM_016782.1,1138-1156).
ctacaaccggatcaacatt

SEQ ID NO: 683403 - DNA, 19 bp, Mus musculus
  siRNA target sequence for Cntnap1 (NM_016782.1,1296-1314).
gacgcttagccgtctcttt

SEQ ID NO: 683404 - DNA, 19 bp, Mus musculus
  siRNA target sequence for Cntnap1 (NM_016782.1,1300-1318).
cttagccgtctcttttcgt

SEQ ID NO: 683405 - DNA, 19 bp, Mus musculus
  siRNA target sequence for Cntnap1 (NM_016782.1,1458-1476).
ctgggtaccgcctgaatga

SEQ ID NO: 683406 - DNA, 19 bp, Mus musculus
  siRNA target sequence for Cntnap1 (NM_016782.1,1516-1534).
ccatgcagtcatcagtatt

SEQ ID NO: 683407 - DNA, 19 bp, Mus musculus
  siRNA target sequence for Cntnap1 (NM_016782.1,1521-1539).
cagtcatcagtattgatga

SEQ ID NO: 683408 - DNA, 19 bp, Mus musculus
  siRNA target sequence for Cntnap1 (NM_016782.1,1583-1601).
cgcacagggacttcatact

SEQ ID NO: 683409 - DNA, 19 bp, Mus musculus
  siRNA target sequence for Cntnap1 (NM_016782.1,1587-1605).
cagggacttcatacttctt

SEQ ID NO: 683410 - DNA, 19 bp, Mus musculus
  siRNA target sequence for Cntnap1 (NM_016782.1,1708-1726).
cctcactctggtagagttt

SEQ ID NO: 683411 - DNA, 19 bp, Mus musculus
  siRNA target sequence for Cntnap1 (NM_016782.1,1878-1896).
cctgccacgaaccattgta

SEQ ID NO: 683412 - DNA, 19 bp, Mus musculus
  siRNA target sequence for Cntnap1 (NM_016782.1,1881-1899).
gccacgaaccattgtacaa

SEQ ID NO: 683413 - DNA, 19 bp, Mus musculus
  siRNA target sequence for Cntnap1 (NM_016782.1,1983-2001).
cgtttgtggtgtattgtga

SEQ ID NO: 683414 - DNA, 19 bp, Mus musculus
  siRNA target sequence for Cntnap1 (NM_016782.1,2162-2180).
gagcagtggatcgagtttt

SEQ ID NO: 683415 - DNA, 19 bp, Mus musculus
  siRNA target sequence for Cntnap1 (NM_016782.1,2165-2183).
cagtggatcgagttttcct

SEQ ID NO: 683416 - DNA, 19 bp, Mus musculus
  siRNA target sequence for Cntnap1 (NM_016782.1,2221-2239).
cccctacagcttttggatt

SEQ ID NO: 683417 - DNA, 19 bp, Mus musculus
  siRNA target sequence for Cntnap1 (NM_016782.1,2423-2441).
gtagtggtaggtgatacaa

SEQ ID NO: 683418 - DNA, 19 bp, Mus musculus
  siRNA target sequence for Cntnap1 (NM_016782.1,2439-2457).
caaaccgctcaaattctga

SEQ ID NO: 683419 - DNA, 19 bp, Mus musculus
  siRNA target sequence for Cntnap1 (NM_016782.1,2571-2589).
gcctcgatgtctcattcta

SEQ ID NO: 683420 - DNA, 19 bp, Mus musculus
  siRNA target sequence for Cntnap1 (NM_016782.1,2573-2591).
ctcgatgtctcattctact

SEQ ID NO: 683421 - DNA, 19 bp, Mus musculus
  siRNA target sequence for Cntnap1 (NM_016782.1,2610-2628).
cgggtgtcttcctagagaa

SEQ ID NO: 683422 - DNA, 19 bp, Mus musculus
  siRNA target sequence for Cntnap1 (NM_016782.1,2613-2631).
gtgtcttcctagagaacat

SEQ ID NO: 683423 - DNA, 19 bp, Mus musculus
  siRNA target sequence for Cntnap1 (NM_016782.1,2739-2757).
cagtgcactcggatgactt

SEQ ID NO: 683424 - DNA, 19 bp, Mus musculus
  siRNA target sequence for Cntnap1 (NM_016782.1,2744-2762).
cactcggatgactttgagt

SEQ ID NO: 683425 - DNA, 19 bp, Mus musculus
  siRNA target sequence for Cntnap1 (NM_016782.1,3080-3098).
gagcgatacagctactaca

SEQ ID NO: 683426 - DNA, 19 bp, Mus musculus
  siRNA target sequence for Cntnap1 (NM_016782.1,3083-3101).
cgatacagctactacacat

SEQ ID NO: 683427 - DNA, 19 bp, Mus musculus
  siRNA target sequence for Cntnap1 (NM_016782.1,3136-3154).
ctgcaatcacgatattggt

SEQ ID NO: 683428 - DNA, 19 bp, Mus musculus
  siRNA target sequence for Cntnap1 (NM_016782.1,3145-3163).
cgatattggtggattcttt

SEQ ID NO: 683429 - DNA, 19 bp, Mus musculus
  siRNA target sequence for Cntnap1 (NM_016782.1,3171-3189).
gcacatggatgcgctataa

SEQ ID NO: 683430 - DNA, 19 bp, Mus musculus
  siRNA target sequence for Cntnap1 (NM_016782.1,3174-3192).
catggatgcgctataacct

SEQ ID NO: 683431 - DNA, 19 bp, Mus musculus
  siRNA target sequence for Cntnap1 (NM_016782.1,3448-3466).
ctatgtcagctcctttgta

SEQ ID NO: 683432 - DNA, 19 bp, Mus musculus
  siRNA target sequence for Cntnap1 (NM_016782.1,3459-3477).
cctttgtacgtgactacat

SEQ ID NO: 683433 - DNA, 19 bp, Mus musculus
  siRNA target sequence for Cntnap1 (NM_016782.1,3506-3524).
ctacagcttcggtatcagt

SEQ ID NO: 683434 - DNA, 19 bp, Mus musculus
  siRNA target sequence for Cntnap1 (NM_016782.1,3690-3708).
cacccaaggccttgtatct

SEQ ID NO: 683435 - DNA, 19 bp, Mus musculus
  siRNA target sequence for Cntnap1 (NM_016782.1,3743-3761).
gagattcagcggtacaaca

SEQ ID NO: 683436 - DNA, 19 bp, Mus musculus
  siRNA target sequence for Cntnap1 (NM_016782.1,3786-3804).
ctggtgtccggttcaacaa

SEQ ID NO: 683437 - DNA, 19 bp, Mus musculus
  siRNA target sequence for Cntnap1 (NM_016782.1,3982-4000).
ccatgacgacggatggatt

SEQ ID NO: 683438 - DNA, 19 bp, Mus musculus
  siRNA target sequence for Cntnap1 (NM_016782.1,3992-4010).
ggatggattgccatactct

SEQ ID NO: 683439 - DNA, 19 bp, Mus musculus
  siRNA target sequence for Cntnap1 (NM_016782.1,3993-4011).
gatggattgccatactctt

SEQ ID NO: 683440 - DNA, 19 bp, Mus musculus
  siRNA target sequence for Cntnap1 (NM_016782.1,4002-4020).
ccatactcttaggtttttt

SEQ ID NO: 683441 - DNA, 19 bp, Mus musculus
  siRNA target sequence for Dpt (NM_019759.1,175-193).
gtgaggagcatctttagca

SEQ ID NO: 683442 - DNA, 19 bp, Mus musculus
  siRNA target sequence for Dpt (NM_019759.1,346-364).
cagagccgctacttcgaat

SEQ ID NO: 683443 - DNA, 19 bp, Mus musculus
  siRNA target sequence for Dpt (NM_019759.1,350-368).
gccgctacttcgaatcagt

SEQ ID NO: 683444 - DNA, 19 bp, Mus musculus
  siRNA target sequence for Dpt (NM_019759.1,372-390).
ggatcgtgagtggcaattt

SEQ ID NO: 683445 - DNA, 19 bp, Mus musculus
  siRNA target sequence for Dpt (NM_019759.1,373-391).
gatcgtgagtggcaatttt

SEQ ID NO: 683446 - DNA, 19 bp, Mus musculus
  siRNA target sequence for Dpt (NM_019759.1,376-394).
cgtgagtggcaattttact

SEQ ID NO: 683447 - DNA, 19 bp, Mus musculus
  siRNA target sequence for Dpt (NM_019759.1,482-500).
cctatgactacgattttta

SEQ ID NO: 683448 - DNA, 19 bp, Mus musculus
  siRNA target sequence for Dpt (NM_019759.1,544-562).
cgccagtggaagttcatca

SEQ ID NO: 683449 - DNA, 19 bp, Mus musculus
  siRNA target sequence for Dpt (NM_019759.1,547-565).
cagtggaagttcatcatgt

SEQ ID NO: 683450 - DNA, 19 bp, Mus musculus
  siRNA target sequence for Dpt (NM_019759.1,579-597).
ctacgactgcgaattcgaa

SEQ ID NO: 683451 - DNA, 19 bp, Mus musculus
  siRNA target sequence for Dpt (NM_019759.1,585-603).
ctgcgaattcgaaaacgtt

SEQ ID NO: 683452 - DNA, 19 bp, Mus musculus
  siRNA target sequence for Eng (NM_007932.1,431-449).
caggtctcgcagaaagagt

SEQ ID NO: 683453 - DNA, 19 bp, Mus musculus
  siRNA target sequence for Eng (NM_007932.1,446-464).
gagtcggctgtgatctaca

SEQ ID NO: 683454 - DNA, 19 bp, Mus musculus
  siRNA target sequence for Eng (NM_007932.1,484-502).
ggtgaggtgacgtttacca

SEQ ID NO: 683455 - DNA, 19 bp, Mus musculus
  siRNA target sequence for Eng (NM_007932.1,551-569).
gtgaagtccacgttctctt

SEQ ID NO: 683456 - DNA, 19 bp, Mus musculus
  siRNA target sequence for Eng (NM_007932.1,610-628).
cttcaggcatccaagcaaa

SEQ ID NO: 683457 - DNA, 19 bp, Mus musculus
  siRNA target sequence for Eng (NM_007932.1,657-675).
ggtcctcgtttcgaacaaa

SEQ ID NO: 683458 - DNA, 19 bp, Mus musculus
  siRNA target sequence for Eng (NM_007932.1,658-676).
gtcctcgtttcgaacaaaa

SEQ ID NO: 683459 - DNA, 19 bp, Mus musculus
  siRNA target sequence for Eng (NM_007932.1,660-678).
cctcgtttcgaacaaaaat

SEQ ID NO: 683460 - DNA, 19 bp, Mus musculus
  siRNA target sequence for Eng (NM_007932.1,1063-1081).
cggacggtgaccgtaatga

SEQ ID NO: 683461 - DNA, 19 bp, Mus musculus
  siRNA target sequence for Eng (NM_007932.1,1064-1082).
ggacggtgaccgtaatgat

SEQ ID NO: 683462 - DNA, 19 bp, Mus musculus
  siRNA target sequence for Eng (NM_007932.1,1142-1160).
cctggttcatcgacatcaa

SEQ ID NO: 683463 - DNA, 19 bp, Mus musculus
  siRNA target sequence for Eng (NM_007932.1,1187-1205).
gtgaatactccgtcaagat

SEQ ID NO: 683464 - DNA, 19 bp, Mus musculus
  siRNA target sequence for Eng (NM_007932.1,1189-1207).
gaatactccgtcaagatct

SEQ ID NO: 683465 - DNA, 19 bp, Mus musculus
  siRNA target sequence for Eng (NM_007932.1,1279-1297).
ctcaatgccagcattgtca

SEQ ID NO: 683466 - DNA, 19 bp, Mus musculus
  siRNA target sequence for Eng (NM_007932.1,1290-1308).
cattgtcacctcctttgta

SEQ ID NO: 683467 - DNA, 19 bp, Mus musculus
  siRNA target sequence for Eng (NM_007932.1,1412-1430).
gcagccccgtgctactcat

SEQ ID NO: 683468 - DNA, 19 bp, Mus musculus
  siRNA target sequence for Eng (NM_007932.1,1434-1452).
cctgatccagccaaagtgt

SEQ ID NO: 683469 - DNA, 19 bp, Mus musculus
  siRNA target sequence for Eng (NM_007932.1,1590-1608).
ctccagctgcggcatgaaa

SEQ ID NO: 683470 - DNA, 19 bp, Mus musculus
  siRNA target sequence for Eng (NM_007932.1,1661-1679).
caccaccacttcggaaaaa

SEQ ID NO: 683471 - DNA, 19 bp, Mus musculus
  siRNA target sequence for Eng (NM_007932.1,1664-1682).
caccacttcggaaaaaggt

SEQ ID NO: 683472 - DNA, 19 bp, Mus musculus
  siRNA target sequence for Eng (NM_007932.1,1865-1883).
gggacatggtggaactcat

SEQ ID NO: 683473 - DNA, 19 bp, Mus musculus
  siRNA target sequence for Eng (NM_007932.1,1998-2016).
caccctcagttgcaactta

SEQ ID NO: 683474 - DNA, 19 bp, Mus musculus
  siRNA target sequence for Eng (NM_007932.1,2085-2103).
ccctgacctgtctggtaaa

SEQ ID NO: 683475 - DNA, 19 bp, Mus musculus
  siRNA target sequence for Eng (NM_007932.1,2173-2191).
gcactctggtacatctatt

SEQ ID NO: 683476 - DNA, 19 bp, Mus musculus
  siRNA target sequence for Eva (NM_007962.2,338-356).
ggacagatgttcggttaaa

SEQ ID NO: 683477 - DNA, 19 bp, Mus musculus
  siRNA target sequence for Eva (NM_007962.2,339-357).
gacagatgttcggttaaaa

SEQ ID NO: 683478 - DNA, 19 bp, Mus musculus
  siRNA target sequence for Eva (NM_007962.2,394-412).
ctaactgtgacgtggaatt

SEQ ID NO: 683479 - DNA, 19 bp, Mus musculus
  siRNA target sequence for Eva (NM_007962.2,430-448).
ggtcgtgagcagtttgtat

SEQ ID NO: 683480 - DNA, 19 bp, Mus musculus
  siRNA target sequence for Eva (NM_007962.2,431-449).
gtcgtgagcagtttgtatt

SEQ ID NO: 683481 - DNA, 19 bp, Mus musculus
  siRNA target sequence for Eva (NM_007962.2,433-451).
cgtgagcagtttgtattct

SEQ ID NO: 683482 - DNA, 19 bp, Mus musculus
  siRNA target sequence for Eva (NM_007962.2,434-452).
gtgagcagtttgtattcta

SEQ ID NO: 683483 - DNA, 19 bp, Mus musculus
  siRNA target sequence for Eva (NM_007962.2,477-495).
catgagcggacggttcaaa

SEQ ID NO: 683484 - DNA, 19 bp, Mus musculus
  siRNA target sequence for Eva (NM_007962.2,515-533).
gaaaccccgagcgatatga

SEQ ID NO: 683485 - DNA, 19 bp, Mus musculus
  siRNA target sequence for Eva (NM_007962.2,565-583).
gacgacaatgggacataca

SEQ ID NO: 683486 - DNA, 19 bp, Mus musculus
  siRNA target sequence for Eva (NM_007962.2,594-612).
gaagaatccacctgatgtt

SEQ ID NO: 683487 - DNA, 19 bp, Mus musculus
  siRNA target sequence for Eva (NM_007962.2,597-615).
gaatccacctgatgttgat

SEQ ID NO: 683488 - DNA, 19 bp, Mus musculus
  siRNA target sequence for Eva (NM_007962.2,698-716).
ctgcgtgcgcactgatgat

SEQ ID NO: 683489 - DNA, 19 bp, Mus musculus
  siRNA target sequence for Eva (NM_007962.2,700-718).
gcgtgcgcactgatgatca

SEQ ID NO: 683490 - DNA, 19 bp, Mus musculus
  siRNA target sequence for Eva (NM_007962.2,701-719).
cgtgcgcactgatgatcat

SEQ ID NO: 683491 - DNA, 19 bp, Mus musculus
  siRNA target sequence for Eva (NM_007962.2,767-785).
gggcggacagtgctgataa

SEQ ID NO: 683492 - DNA, 19 bp, Mus musculus
  siRNA target sequence for Eva (NM_007962.2,768-786).
ggcggacagtgctgataaa

SEQ ID NO: 683493 - DNA, 19 bp, Mus musculus
  siRNA target sequence for Flot2 (NM_008028.1,266-284).
cggccgagggggtagcttt

SEQ ID NO: 683494 - DNA, 19 bp, Mus musculus
  siRNA target sequence for Flot2 (NM_008028.1,267-285).
ggccgagggggtagcttta

SEQ ID NO: 683495 - DNA, 19 bp, Mus musculus
  siRNA target sequence for Flot2 (NM_008028.1,268-286).
gccgagggggtagctttaa

SEQ ID NO: 683496 - DNA, 19 bp, Mus musculus
  siRNA target sequence for Flot2 (NM_008028.1,270-288).
cgagggggtagctttaact

SEQ ID NO: 683497 - DNA, 19 bp, Mus musculus
  siRNA target sequence for Flot2 (NM_008028.1,296-314).
gtgtcgcccaggtgaagat

SEQ ID NO: 683498 - DNA, 19 bp, Mus musculus
  siRNA target sequence for Flot2 (NM_008028.1,411-429).
gcatctacgctctatccta

SEQ ID NO: 683499 - DNA, 19 bp, Mus musculus
  siRNA target sequence for Flot2 (NM_008028.1,431-449).
ggactctgactgtagaaca

SEQ ID NO: 683500 - DNA, 19 bp, Mus musculus
  siRNA target sequence for Flot2 (NM_008028.1,713-731).
ccaagatcgctgactctaa

SEQ ID NO: 683501 - DNA, 19 bp, Mus musculus
  siRNA target sequence for Flot2 (NM_008028.1,717-735).
gatcgctgactctaagaga

SEQ ID NO: 683502 - DNA, 19 bp, Mus musculus
  siRNA target sequence for Flot2 (NM_008028.1,992-1010).
gcgaaaaggtgaaacaagt

SEQ ID NO: 683503 - DNA, 19 bp, Mus musculus
  siRNA target sequence for Flot2 (NM_008028.1,1031-1049).
ctgagaagattcgcaaaat

SEQ ID NO: 683504 - DNA, 19 bp, Mus musculus
  siRNA target sequence for Flot2 (NM_008028.1,1209-1227).
gactaaagtcgatgagatt

SEQ ID NO: 683505 - DNA, 19 bp, Mus musculus
  siRNA target sequence for Flot2 (NM_008028.1,1211-1229).
ctaaagtcgatgagattgt

SEQ ID NO: 683506 - DNA, 19 bp, Mus musculus
  siRNA target sequence for Flot2 (NM_008028.1,1251-1269).
caaggtgacatcagaagta

SEQ ID NO: 683507 - DNA, 19 bp, Mus musculus
  siRNA target sequence for Flot2 (NM_008028.1,1316-1334).
gtgtggacctttcaaagat

SEQ ID NO: 683508 - DNA, 19 bp, Mus musculus
  siRNA target sequence for Glycam1 (NM_008134.1,108-126).
gcctgggtccaaagatgaa

SEQ ID NO: 683509 - DNA, 19 bp, Mus musculus
  siRNA target sequence for Glycam1 (NM_008134.1,113-131).
ggtccaaagatgaacttca

SEQ ID NO: 683510 - DNA, 19 bp, Mus musculus
  siRNA target sequence for Glycam1 (NM_008134.1,457-475).
ggtgcagaagacataatct

SEQ ID NO: 683511 - DNA, 19 bp, Mus musculus
  siRNA target sequence for Hnt (NM_172290.2,218-236).
ggcaaaaatgcacaattct

SEQ ID NO: 683512 - DNA, 19 bp, Mus musculus
  siRNA target sequence for Hnt (NM_172290.2,235-253).
ctatctcgtgggcaatctt

SEQ ID NO: 683513 - DNA, 19 bp, Mus musculus
  siRNA target sequence for Hnt (NM_172290.2,364-382).
ccctcaggtgcacaattga

SEQ ID NO: 683514 - DNA, 19 bp, Mus musculus
  siRNA target sequence for Hnt (NM_172290.2,463-481).
gtgtggtcctcctgagtaa

SEQ ID NO: 683515 - DNA, 19 bp, Mus musculus
  siRNA target sequence for Hnt (NM_172290.2,528-546).
gatgagggcccttatacct

SEQ ID NO: 683516 - DNA, 19 bp, Mus musculus
  siRNA target sequence for Hnt (NM_172290.2,580-598).
ccagggtccacctcattgt

SEQ ID NO: 683517 - DNA, 19 bp, Mus musculus
  siRNA target sequence for Hnt (NM_172290.2,581-599).
cagggtccacctcattgta

SEQ ID NO: 683518 - DNA, 19 bp, Mus musculus
  siRNA target sequence for Hnt (NM_172290.2,583-601).
gggtccacctcattgtaca

SEQ ID NO: 683519 - DNA, 19 bp, Mus musculus
  siRNA target sequence for Hnt (NM_172290.2,584-602).
ggtccacctcattgtacaa

SEQ ID NO: 683520 - DNA, 19 bp, Mus musculus
  siRNA target sequence for Hnt (NM_172290.2,587-605).
ccacctcattgtacaagta

SEQ ID NO: 683521 - DNA, 19 bp, Mus musculus
  siRNA target sequence for Hnt (NM_172290.2,590-608).
cctcattgtacaagtatct

SEQ ID NO: 683522 - DNA, 19 bp, Mus musculus
  siRNA target sequence for Hnt (NM_172290.2,618-636).
gtagagatttcttcagata

SEQ ID NO: 683523 - DNA, 19 bp, Mus musculus
  siRNA target sequence for Hnt (NM_172290.2,628-646).
cttcagatatctccattaa

SEQ ID NO: 683524 - DNA, 19 bp, Mus musculus
  siRNA target sequence for Hnt (NM_172290.2,871-889).
catacatctcagaagctaa

SEQ ID NO: 683525 - DNA, 19 bp, Mus musculus
  siRNA target sequence for Hnt (NM_172290.2,948-966).
ccttcagcagaatttcaat

SEQ ID NO: 683526 - DNA, 19 bp, Mus musculus
  siRNA target sequence for Hnt (NM_172290.2,1121-1139).
cagcatcatgctatttggt

SEQ ID NO: 683527 - DNA, 19 bp, Mus musculus
  siRNA target sequence for Hnt (NM_172290.2,1158-1176).
gtcaacaatgggacatcaa

SEQ ID NO: 683528 - DNA, 19 bp, Mus musculus
  siRNA target sequence for Igfals (NM_008340.2,201-219).
gatgagctcagcgtctttt

SEQ ID NO: 683529 - DNA, 19 bp, Mus musculus
  siRNA target sequence for Igfals (NM_008340.2,204-222).
gagctcagcgtcttttgca

SEQ ID NO: 683530 - DNA, 19 bp, Mus musculus
  siRNA target sequence for Igfals (NM_008340.2,238-256).
ctcagctgcccgatagcat

SEQ ID NO: 683531 - DNA, 19 bp, Mus musculus
  siRNA target sequence for Igfals (NM_008340.2,642-660).
cttgctggcaacaaactga

SEQ ID NO: 683532 - DNA, 19 bp, Mus musculus
  siRNA target sequence for Igfals (NM_008340.2,736-754).
gcgtcaaagctaatgtctt

SEQ ID NO: 683533 - DNA, 19 bp, Mus musculus
  siRNA target sequence for Igfals (NM_008340.2,737-755).
cgtcaaagctaatgtcttt

SEQ ID NO: 683534 - DNA, 19 bp, Mus musculus
  siRNA target sequence for Igfals (NM_008340.2,740-758).
caaagctaatgtctttata

SEQ ID NO: 683535 - DNA, 19 bp, Mus musculus
  siRNA target sequence for Igfals (NM_008340.2,961-979).
cgcgtactttcaaagatct

SEQ ID NO: 683536 - DNA, 19 bp, Mus musculus
  siRNA target sequence for Igfals (NM_008340.2,962-980).
gcgtactttcaaagatcta

SEQ ID NO: 683537 - DNA, 19 bp, Mus musculus
  siRNA target sequence for Igfals (NM_008340.2,999-1017).
cagctcggccacaatcgta

SEQ ID NO: 683538 - DNA, 19 bp, Mus musculus
  siRNA target sequence for Igfals (NM_008340.2,1072-1090).
cgctcaatgacaatcagat

SEQ ID NO: 683539 - DNA, 19 bp, Mus musculus
  siRNA target sequence for Igfals (NM_008340.2,1168-1186).
gcctccccgagcatgtgtt

SEQ ID NO: 683540 - DNA, 19 bp, Mus musculus
  siRNA target sequence for Igfals (NM_008340.2,1240-1258).
gcatccgcctgcacacttt

SEQ ID NO: 683541 - DNA, 19 bp, Mus musculus
  siRNA target sequence for Igfals (NM_008340.2,1409-1427).
ccttggccagctggaatat

SEQ ID NO: 683542 - DNA, 19 bp, Mus musculus
  siRNA target sequence for Igfals (NM_008340.2,1670-1688).
caaggcgcttcgtgacttt

SEQ ID NO: 683543 - DNA, 19 bp, Mus musculus
  siRNA target sequence for Igfals (NM_008340.2,1750-1768).
gccagccggtgtacactta

SEQ ID NO: 683544 - DNA, 19 bp, Mus musculus
  siRNA target sequence for Igfals (NM_008340.2,1752-1770).
cagccggtgtacacttaca

SEQ ID NO: 683545 - DNA, 19 bp, Mus musculus
  siRNA target sequence for Igfals (NM_008340.2,1756-1774).
cggtgtacacttacaacaa

SEQ ID NO: 683546 - DNA, 19 bp, Mus musculus
  siRNA target sequence for Igfals (NM_008340.2,1819-1837).
gagacatcagtgaaacact

SEQ ID NO: 683547 - DNA, 19 bp, Mus musculus
  siRNA target sequence for Ly9 (NM_008534.1,179-197).
gcatatcatctggaattgt

SEQ ID NO: 683548 - DNA, 19 bp, Mus musculus
  siRNA target sequence for Ly9 (NM_008534.1,200-218).
cccaaaggctcttgcttta

SEQ ID NO: 683549 - DNA, 19 bp, Mus musculus
  siRNA target sequence for Ly9 (NM_008534.1,224-242).
ctacaaaaaagatataact

SEQ ID NO: 683550 - DNA, 19 bp, Mus musculus
  siRNA target sequence for Ly9 (NM_008534.1,227-245).
caaaaaagatataactatt

SEQ ID NO: 683551 - DNA, 19 bp, Mus musculus
  siRNA target sequence for Ly9 (NM_008534.1,288-306).
ggctactccttgtacatga

SEQ ID NO: 683552 - DNA, 19 bp, Mus musculus
  siRNA target sequence for Ly9 (NM_008534.1,307-325).
gcaacctaaccaaaagtga

SEQ ID NO: 683553 - DNA, 19 bp, Mus musculus
  siRNA target sequence for Ly9 (NM_008534.1,311-329).
cctaaccaaaagtgattca

SEQ ID NO: 683554 - DNA, 19 bp, Mus musculus
  siRNA target sequence for Ly9 (NM_008534.1,334-352).
cctaccatgctcagataaa

SEQ ID NO: 683555 - DNA, 19 bp, Mus musculus
  siRNA target sequence for Ly9 (NM_008534.1,475-493).
ccctaatctgcactgtaaa

SEQ ID NO: 683556 - DNA, 19 bp, Mus musculus
  siRNA target sequence for Ly9 (NM_008534.1,527-545).
ccgagaggacacccattta

SEQ ID NO: 683557 - DNA, 19 bp, Mus musculus
  siRNA target sequence for Ly9 (NM_008534.1,531-549).
gaggacacccatttaaata

SEQ ID NO: 683558 - DNA, 19 bp, Mus musculus
  siRNA target sequence for Ly9 (NM_008534.1,539-557).
ccatttaaatacatacgat

SEQ ID NO: 683559 - DNA, 19 bp, Mus musculus
  siRNA target sequence for Ly9 (NM_008534.1,597-615).
cccgacctaccctatacct

SEQ ID NO: 683560 - DNA, 19 bp, Mus musculus
  siRNA target sequence for Ly9 (NM_008534.1,657-675).
gtccgcatctggcaattct

SEQ ID NO: 683561 - DNA, 19 bp, Mus musculus
  siRNA target sequence for Ly9 (NM_008534.1,743-761).
gaccctgcccttggaattt

SEQ ID NO: 683562 - DNA, 19 bp, Mus musculus
  siRNA target sequence for Ly9 (NM_008534.1,765-783).
gccactcgggccacaaaga

SEQ ID NO: 683563 - DNA, 19 bp, Mus musculus
  siRNA target sequence for Ly9 (NM_008534.1,766-784).
ccactcgggccacaaagaa

SEQ ID NO: 683564 - DNA, 19 bp, Mus musculus
  siRNA target sequence for Ly9 (NM_008534.1,852-870).
cgccgtaagcccaaaggtt

SEQ ID NO: 683565 - DNA, 19 bp, Mus musculus
  siRNA target sequence for Ly9 (NM_008534.1,1103-1121).
ggacggtggtggaaacaat

SEQ ID NO: 683566 - DNA, 19 bp, Mus musculus
  siRNA target sequence for Ly9 (NM_008534.1,1130-1148).
cacatggatgcctctacaa

SEQ ID NO: 683567 - DNA, 19 bp, Mus musculus
  siRNA target sequence for Ly9 (NM_008534.1,1136-1154).
gatgcctctacaaaacaaa

SEQ ID NO: 683568 - DNA, 19 bp, Mus musculus
  siRNA target sequence for Ly9 (NM_008534.1,1290-1308).
ggccctgagagaaacaaga

SEQ ID NO: 683569 - DNA, 19 bp, Mus musculus
  siRNA target sequence for Ly9 (NM_008534.1,1420-1438).
cggaggtcccagctgaaat

SEQ ID NO: 683570 - DNA, 19 bp, Mus musculus
  siRNA target sequence for Ly9 (NM_008534.1,1424-1442).
ggtcccagctgaaatacca

SEQ ID NO: 683571 - DNA, 19 bp, Mus musculus
  siRNA target sequence for Ly9 (NM_008534.1,1450-1468).
caactggccatggacaatt

SEQ ID NO: 683572 - DNA, 19 bp, Mus musculus
  siRNA target sequence for Ly9 (NM_008534.1,1476-1494).
ctctcccaacggtatgaga

SEQ ID NO: 683573 - DNA, 19 bp, Mus musculus
  siRNA target sequence for Ly9 (NM_008534.1,1478-1496).
ctcccaacggtatgagaaa

SEQ ID NO: 683574 - DNA, 19 bp, Mus musculus
  siRNA target sequence for Ly9 (NM_008534.1,1481-1499).
ccaacggtatgagaaacta

SEQ ID NO: 683575 - DNA, 19 bp, Mus musculus
  siRNA target sequence for Ly9 (NM_008534.1,1486-1504).
ggtatgagaaactagacat

SEQ ID NO: 683576 - DNA, 19 bp, Mus musculus
  siRNA target sequence for Ly9 (NM_008534.1,1559-1577).
gagcagcgcaacaacagaa

SEQ ID NO: 683577 - DNA, 19 bp, Mus musculus
  siRNA target sequence for Ly9 (NM_008534.1,1601-1619).
gcacagcactgctaatagt

SEQ ID NO: 683578 - DNA, 19 bp, Mus musculus
  siRNA target sequence for Ly9 (NM_008534.1,1602-1620).
cacagcactgctaatagta

SEQ ID NO: 683579 - DNA, 19 bp, Mus musculus
  siRNA target sequence for Ly9 (NM_008534.1,1604-1622).
cagcactgctaatagtaga

SEQ ID NO: 683580 - DNA, 19 bp, Mus musculus
  siRNA target sequence for Ly9 (NM_008534.1,1606-1624).
gcactgctaatagtagaaa

SEQ ID NO: 683581 - DNA, 19 bp, Mus musculus
  siRNA target sequence for Ly9 (NM_008534.1,1607-1625).
cactgctaatagtagaaat

SEQ ID NO: 683582 - DNA, 19 bp, Mus musculus
  siRNA target sequence for Ly9 (NM_008534.1,1672-1690).
cctatgaggggcaagtaga

SEQ ID NO: 683583 - DNA, 19 bp, Mus musculus
  siRNA target sequence for Ly9 (NM_008534.1,1673-1691).
ctatgaggggcaagtagaa

SEQ ID NO: 683584 - DNA, 19 bp, Mus musculus
  siRNA target sequence for Ly9 (NM_008534.1,1679-1697).
ggggcaagtagaatatgaa

SEQ ID NO: 683585 - DNA, 19 bp, Mus musculus
  siRNA target sequence for Ly9 (NM_008534.1,1698-1716).
gcaatcactccatatgata

SEQ ID NO: 683586 - DNA, 19 bp, Mus musculus
  siRNA target sequence for Ly9 (NM_008534.1,1699-1717).
caatcactccatatgataa

SEQ ID NO: 683587 - DNA, 19 bp, Mus musculus
  siRNA target sequence for Ly9 (NM_008534.1,1742-1760).
ggacatggcatatatacaa

SEQ ID NO: 683588 - DNA, 19 bp, Mus musculus
  siRNA target sequence for Ly9 (NM_008534.1,1806-1824).
gaagactcaaatacaatct

SEQ ID NO: 683589 - DNA, 19 bp, Mus musculus
  siRNA target sequence for Ly9 (NM_008534.1,1809-1827).
gactcaaatacaatctact

SEQ ID NO: 683590 - DNA, 19 bp, Mus musculus
  siRNA target sequence for Mfge8 (NM_008594.1,161-179).
gcttgacgggccaagacaa

SEQ ID NO: 683591 - DNA, 19 bp, Mus musculus
  siRNA target sequence for Mfge8 (NM_008594.1,162-180).
cttgacgggccaagacaat

SEQ ID NO: 683592 - DNA, 19 bp, Mus musculus
  siRNA target sequence for Mfge8 (NM_008594.1,275-293).
ccaaatgtctggtgacttt

SEQ ID NO: 683593 - DNA, 19 bp, Mus musculus
  siRNA target sequence for Mfge8 (NM_008594.1,299-317).
cacagcgtggggacatctt

SEQ ID NO: 683594 - DNA, 19 bp, Mus musculus
  siRNA target sequence for Mfge8 (NM_008594.1,371-389).
ccgagaccaactactacaa

SEQ ID NO: 683595 - DNA, 19 bp, Mus musculus
  siRNA target sequence for Mfge8 (NM_008594.1,391-409).
ctggatggagaatacatgt

SEQ ID NO: 683596 - DNA, 19 bp, Mus musculus
  siRNA target sequence for Mfge8 (NM_008594.1,452-470).
ccacccccgatctttccaa

SEQ ID NO: 683597 - DNA, 19 bp, Mus musculus
  siRNA target sequence for Mfge8 (NM_008594.1,474-492).
cctagcctcccgttgttct

SEQ ID NO: 683598 - DNA, 19 bp, Mus musculus
  siRNA target sequence for Mfge8 (NM_008594.1,635-653).
ccagcaactatgatagcaa

SEQ ID NO: 683599 - DNA, 19 bp, Mus musculus
  siRNA target sequence for Mfge8 (NM_008594.1,768-786).
cctcgacggacgcaagttt

SEQ ID NO: 683600 - DNA, 19 bp, Mus musculus
  siRNA target sequence for Mfge8 (NM_008594.1,772-790).
gacggacgcaagtttgagt

SEQ ID NO: 683601 - DNA, 19 bp, Mus musculus
  siRNA target sequence for Mfge8 (NM_008594.1,776-794).
gacgcaagtttgagttcat

SEQ ID NO: 683602 - DNA, 19 bp, Mus musculus
  siRNA target sequence for Mfge8 (NM_008594.1,809-827).
gtggagacaaggagttttt

SEQ ID NO: 683603 - DNA, 19 bp, Mus musculus
  siRNA target sequence for Mfge8 (NM_008594.1,829-847).
ggtaacctggacaacaaca

SEQ ID NO: 683604 - DNA, 19 bp, Mus musculus
  siRNA target sequence for Mfge8 (NM_008594.1,848-866).
gcctgaaggttaacatgtt

SEQ ID NO: 683605 - DNA, 19 bp, Mus musculus
  siRNA target sequence for Mfge8 (NM_008594.1,875-893).
ctctggaggcacagtacat

SEQ ID NO: 683606 - DNA, 19 bp, Mus musculus
  siRNA target sequence for Mfge8 (NM_008594.1,1258-1276).
ggtgtgcagtggactgtat

SEQ ID NO: 683607 - DNA, 19 bp, Mus musculus
  siRNA target sequence for Mfge8 (NM_008594.1,1309-1327).
ggcaacttggacaacaact

SEQ ID NO: 683608 - DNA, 19 bp, Mus musculus
  siRNA target sequence for Ncam2 (NM_010954.2,188-206).
gagcgggcaagctcttctt

SEQ ID NO: 683609 - DNA, 19 bp, Mus musculus
  siRNA target sequence for Ncam2 (NM_010954.2,190-208).
gcgggcaagctcttcttca

SEQ ID NO: 683610 - DNA, 19 bp, Mus musculus
  siRNA target sequence for Ncam2 (NM_010954.2,212-230).
gacaatttcacttagcaaa

SEQ ID NO: 683611 - DNA, 19 bp, Mus musculus
  siRNA target sequence for Ncam2 (NM_010954.2,243-261).
gtgggtgagtctaaattct

SEQ ID NO: 683612 - DNA, 19 bp, Mus musculus
  siRNA target sequence for Ncam2 (NM_010954.2,331-349).
caacgcagagggttatgct

SEQ ID NO: 683613 - DNA, 19 bp, Mus musculus
  siRNA target sequence for Ncam2 (NM_010954.2,370-388).
cacgactcaccatctacaa

SEQ ID NO: 683614 - DNA, 19 bp, Mus musculus
  siRNA target sequence for Ncam2 (NM_010954.2,450-468).
caagaagctacagtagttt

SEQ ID NO: 683615 - DNA, 19 bp, Mus musculus
  siRNA target sequence for Ncam2 (NM_010954.2,457-475).
ctacagtagttttggaaat

SEQ ID NO: 683616 - DNA, 19 bp, Mus musculus
  siRNA target sequence for Ncam2 (NM_010954.2,583-601).
gctggttgtaccacaatga

SEQ ID NO: 683617 - DNA, 19 bp, Mus musculus
  siRNA target sequence for Ncam2 (NM_010954.2,634-652).
cagtgcttgcaaacaataa

SEQ ID NO: 683618 - DNA, 19 bp, Mus musculus
  siRNA target sequence for Ncam2 (NM_010954.2,636-654).
gtgcttgcaaacaataatt

SEQ ID NO: 683619 - DNA, 19 bp, Mus musculus
  siRNA target sequence for Ncam2 (NM_010954.2,659-677).
gatcctcaatatcaataaa

SEQ ID NO: 683620 - DNA, 19 bp, Mus musculus
  siRNA target sequence for Ncam2 (NM_010954.2,662-680).
cctcaatatcaataaaagt

SEQ ID NO: 683621 - DNA, 19 bp, Mus musculus
  siRNA target sequence for Ncam2 (NM_010954.2,681-699).
gatgaaggtatatacagat

SEQ ID NO: 683622 - DNA, 19 bp, Mus musculus
  siRNA target sequence for Ncam2 (NM_010954.2,717-735).
gcgaggggagagattgact

SEQ ID NO: 683623 - DNA, 19 bp, Mus musculus
  siRNA target sequence for Ncam2 (NM_010954.2,718-736).
cgaggggagagattgactt

SEQ ID NO: 683624 - DNA, 19 bp, Mus musculus
  siRNA target sequence for Ncam2 (NM_010954.2,737-755).
ccgggatatcattgttatt

SEQ ID NO: 683625 - DNA, 19 bp, Mus musculus
  siRNA target sequence for Ncam2 (NM_010954.2,746-764).
cattgttattgttaacgtt

SEQ ID NO: 683626 - DNA, 19 bp, Mus musculus
  siRNA target sequence for Ncam2 (NM_010954.2,878-896).
caggaacggcaaactcatt

SEQ ID NO: 683627 - DNA, 19 bp, Mus musculus
  siRNA target sequence for Ncam2 (NM_010954.2,880-898).
ggaacggcaaactcattga

SEQ ID NO: 683628 - DNA, 19 bp, Mus musculus
  siRNA target sequence for Ncam2 (NM_010954.2,1122-1140).
gagcctgttccagaaatca

SEQ ID NO: 683629 - DNA, 19 bp, Mus musculus
  siRNA target sequence for Ncam2 (NM_010954.2,1194-1212).
gatggccgcatcgaagtta

SEQ ID NO: 683630 - DNA, 19 bp, Mus musculus
  siRNA target sequence for Ncam2 (NM_010954.2,1259-1277).
gtcagattcggggagatat

SEQ ID NO: 683631 - DNA, 19 bp, Mus musculus
  siRNA target sequence for Ncam2 (NM_010954.2,1261-1279).
cagattcggggagatatga

SEQ ID NO: 683632 - DNA, 19 bp, Mus musculus
  siRNA target sequence for Ncam2 (NM_010954.2,1325-1343).
cctggacatcgaatatgct

SEQ ID NO: 683633 - DNA, 19 bp, Mus musculus
  siRNA target sequence for Ncam2 (NM_010954.2,1334-1352).
cgaatatgctcctaagttt

SEQ ID NO: 683634 - DNA, 19 bp, Mus musculus
  siRNA target sequence for Ncam2 (NM_010954.2,1341-1359).
gctcctaagtttgtttcaa

SEQ ID NO: 683635 - DNA, 19 bp, Mus musculus
  siRNA target sequence for Ncam2 (NM_010954.2,1342-1360).
ctcctaagtttgtttcaaa

SEQ ID NO: 683636 - DNA, 19 bp, Mus musculus
  siRNA target sequence for Ncam2 (NM_010954.2,1357-1375).
caaatcagacaatgtatta

SEQ ID NO: 683637 - DNA, 19 bp, Mus musculus
  siRNA target sequence for Ncam2 (NM_010954.2,1362-1380).
cagacaatgtattactctt

SEQ ID NO: 683638 - DNA, 19 bp, Mus musculus
  siRNA target sequence for Ncam2 (NM_010954.2,1378-1396).
cttgggaaggaaatccaat

SEQ ID NO: 683639 - DNA, 19 bp, Mus musculus
  siRNA target sequence for Ncam2 (NM_010954.2,1386-1404).
ggaaatccaatcaacataa

SEQ ID NO: 683640 - DNA, 19 bp, Mus musculus
  siRNA target sequence for Ncam2 (NM_010954.2,1461-1479).
ctcttaccagctaagaata

SEQ ID NO: 683641 - DNA, 19 bp, Mus musculus
  siRNA target sequence for Ncam2 (NM_010954.2,1470-1488).
gctaagaatacgactcatt

SEQ ID NO: 683642 - DNA, 19 bp, Mus musculus
  siRNA target sequence for Ncam2 (NM_010954.2,1471-1489).
ctaagaatacgactcattt

SEQ ID NO: 683643 - DNA, 19 bp, Mus musculus
  siRNA target sequence for Ncam2 (NM_010954.2,1475-1493).
gaatacgactcatttaaaa

SEQ ID NO: 683644 - DNA, 19 bp, Mus musculus
  siRNA target sequence for Ncam2 (NM_010954.2,1480-1498).
cgactcatttaaaaactca

SEQ ID NO: 683645 - DNA, 19 bp, Mus musculus
  siRNA target sequence for Ncam2 (NM_010954.2,1531-1549).
cccccacatcagacaatga

SEQ ID NO: 683646 - DNA, 19 bp, Mus musculus
  siRNA target sequence for Ncam2 (NM_010954.2,1534-1552).
ccacatcagacaatgactt

SEQ ID NO: 683647 - DNA, 19 bp, Mus musculus
  siRNA target sequence for Ncam2 (NM_010954.2,1580-1598).
ccgtataggcacaagattt

SEQ ID NO: 683648 - DNA, 19 bp, Mus musculus
  siRNA target sequence for Ncam2 (NM_010954.2,1589-1607).
cacaagatttcaggaatat

SEQ ID NO: 683649 - DNA, 19 bp, Mus musculus
  siRNA target sequence for Ncam2 (NM_010954.2,1640-1658).
ccatggagtgaagattata

SEQ ID NO: 683650 - DNA, 19 bp, Mus musculus
  siRNA target sequence for Ncam2 (NM_010954.2,1711-1729).
gaggtgtgcctattcatca

SEQ ID NO: 683651 - DNA, 19 bp, Mus musculus
  siRNA target sequence for Ncam2 (NM_010954.2,1718-1736).
gcctattcatcactatcaa

SEQ ID NO: 683652 - DNA, 19 bp, Mus musculus
  siRNA target sequence for Ncam2 (NM_010954.2,1730-1748).
ctatcaagtggatgtcaaa

SEQ ID NO: 683653 - DNA, 19 bp, Mus musculus
  siRNA target sequence for Ncam2 (NM_010954.2,1759-1777).
cagaaacctggaaaatagt

SEQ ID NO: 683654 - DNA, 19 bp, Mus musculus
  siRNA target sequence for Ncam2 (NM_010954.2,1783-1801).
cccatggagttcaaacgat

SEQ ID NO: 683655 - DNA, 19 bp, Mus musculus
  siRNA target sequence for Ncam2 (NM_010954.2,1824-1842).
ccaaatacgacttacgaaa

SEQ ID NO: 683656 - DNA, 19 bp, Mus musculus
  siRNA target sequence for Ncam2 (NM_010954.2,1825-1843).
caaatacgacttacgaaat

SEQ ID NO: 683657 - DNA, 19 bp, Mus musculus
  siRNA target sequence for Ncam2 (NM_010954.2,1872-1890).
caaggagactacagtaaaa

SEQ ID NO: 683658 - DNA, 19 bp, Mus musculus
  siRNA target sequence for Ncam2 (NM_010954.2,1876-1894).
gagactacagtaaaataga

SEQ ID NO: 683659 - DNA, 19 bp, Mus musculus
  siRNA target sequence for Ncam2 (NM_010954.2,1954-1972).
gcagtggcaagagttttaa

SEQ ID NO: 683660 - DNA, 19 bp, Mus musculus
  siRNA target sequence for Ncam2 (NM_010954.2,1979-1997).
catcaccaagcaagatgat

SEQ ID NO: 683661 - DNA, 19 bp, Mus musculus
  siRNA target sequence for Ncam2 (NM_010954.2,1999-2017).
gaggggctcctattttaga

SEQ ID NO: 683662 - DNA, 19 bp, Mus musculus
  siRNA target sequence for Ncam2 (NM_010954.2,2001-2019).
ggggctcctattttagaat

SEQ ID NO: 683663 - DNA, 19 bp, Mus musculus
  siRNA target sequence for Ncam2 (NM_010954.2,2002-2020).
gggctcctattttagaata

SEQ ID NO: 683664 - DNA, 19 bp, Mus musculus
  siRNA target sequence for Ncam2 (NM_010954.2,2124-2142).
ggctacgaagtgcaaatca

SEQ ID NO: 683665 - DNA, 19 bp, Mus musculus
  siRNA target sequence for Ncam2 (NM_010954.2,2126-2144).
ctacgaagtgcaaatcaca

SEQ ID NO: 683666 - DNA, 19 bp, Mus musculus
  siRNA target sequence for Ncam2 (NM_010954.2,2150-2168).
caacagactgggatattct

SEQ ID NO: 683667 - DNA, 19 bp, Mus musculus
  siRNA target sequence for Ncam2 (NM_010954.2,2167-2185).
ctgagcctactgtatatga

SEQ ID NO: 683668 - DNA, 19 bp, Mus musculus
  siRNA target sequence for Ncam2 (NM_010954.2,2169-2187).
gagcctactgtatatgagt

SEQ ID NO: 683669 - DNA, 19 bp, Mus musculus
  siRNA target sequence for Ncam2 (NM_010954.2,2228-2246).
ctgtgaagcgaataaaggt

SEQ ID NO: 683670 - DNA, 19 bp, Mus musculus
  siRNA target sequence for Ncam2 (NM_010954.2,2273-2291).
gaatgctgttgggtttact

SEQ ID NO: 683671 - DNA, 19 bp, Mus musculus
  siRNA target sequence for Ncam2 (NM_010954.2,2278-2296).
ctgttgggtttacttttgt

SEQ ID NO: 683672 - DNA, 19 bp, Mus musculus
  siRNA target sequence for Neo1 (NM_008684.1,348-366).
cagtgttcgaacattcact

SEQ ID NO: 683673 - DNA, 19 bp, Mus musculus
  siRNA target sequence for Neo1 (NM_008684.1,410-428).
gaggctcttctgttatatt

SEQ ID NO: 683674 - DNA, 19 bp, Mus musculus
  siRNA target sequence for Neo1 (NM_008684.1,414-432).
ctcttctgttatattaaat

SEQ ID NO: 683675 - DNA, 19 bp, Mus musculus
  siRNA target sequence for Neo1 (NM_008684.1,478-496).
gatgggacttttttaaact

SEQ ID NO: 683676 - DNA, 19 bp, Mus musculus
  siRNA target sequence for Neo1 (NM_008684.1,548-566).
gcaacgtggtgcattccaa

SEQ ID NO: 683677 - DNA, 19 bp, Mus musculus
  siRNA target sequence for Neo1 (NM_008684.1,549-567).
caacgtggtgcattccaaa

SEQ ID NO: 683678 - DNA, 19 bp, Mus musculus
  siRNA target sequence for Neo1 (NM_008684.1,555-573).
ggtgcattccaaacacaat

SEQ ID NO: 683679 - DNA, 19 bp, Mus musculus
  siRNA target sequence for Neo1 (NM_008684.1,556-574).
gtgcattccaaacacaata

SEQ ID NO: 683680 - DNA, 19 bp, Mus musculus
  siRNA target sequence for Neo1 (NM_008684.1,576-594).
gcctgacgaaggtttctat

SEQ ID NO: 683681 - DNA, 19 bp, Mus musculus
  siRNA target sequence for Neo1 (NM_008684.1,578-596).
ctgacgaaggtttctatca

SEQ ID NO: 683682 - DNA, 19 bp, Mus musculus
  siRNA target sequence for Neo1 (NM_008684.1,612-630).
ggataatcttggaaccatt

SEQ ID NO: 683683 - DNA, 19 bp, Mus musculus
  siRNA target sequence for Neo1 (NM_008684.1,658-676).
gcaggtcttccaagattta

SEQ ID NO: 683684 - DNA, 19 bp, Mus musculus
  siRNA target sequence for Neo1 (NM_008684.1,661-679).
ggtcttccaagatttacca

SEQ ID NO: 683685 - DNA, 19 bp, Mus musculus
  siRNA target sequence for Neo1 (NM_008684.1,709-727).
ggaaacagtgcaattctga

SEQ ID NO: 683686 - DNA, 19 bp, Mus musculus
  siRNA target sequence for Neo1 (NM_008684.1,716-734).
gtgcaattctgaattgtga

SEQ ID NO: 683687 - DNA, 19 bp, Mus musculus
  siRNA target sequence for Neo1 (NM_008684.1,743-761).
cagatttggtcccatttgt

SEQ ID NO: 683688 - DNA, 19 bp, Mus musculus
  siRNA target sequence for Neo1 (NM_008684.1,793-811).
ctagatgacaggattgtca

SEQ ID NO: 683689 - DNA, 19 bp, Mus musculus
  siRNA target sequence for Neo1 (NM_008684.1,818-836).
caagtggaacactggttat

SEQ ID NO: 683690 - DNA, 19 bp, Mus musculus
  siRNA target sequence for Neo1 (NM_008684.1,829-847).
ctggttatcagcaatgcta

SEQ ID NO: 683691 - DNA, 19 bp, Mus musculus
  siRNA target sequence for Neo1 (NM_008684.1,887-905).
gtggtgggccaccaaagtt

SEQ ID NO: 683692 - DNA, 19 bp, Mus musculus
  siRNA target sequence for Neo1 (NM_008684.1,889-907).
ggtgggccaccaaagttta

SEQ ID NO: 683693 - DNA, 19 bp, Mus musculus
  siRNA target sequence for Neo1 (NM_008684.1,893-911).
ggccaccaaagtttagtga

SEQ ID NO: 683694 - DNA, 19 bp, Mus musculus
  siRNA target sequence for Neo1 (NM_008684.1,908-926).
gtgacgaagctgaattgaa

SEQ ID NO: 683695 - DNA, 19 bp, Mus musculus
  siRNA target sequence for Neo1 (NM_008684.1,941-959).
ctgaggaaattgtagactt

SEQ ID NO: 683696 - DNA, 19 bp, Mus musculus
  siRNA target sequence for Neo1 (NM_008684.1,967-985).
ctgatgcgaccatcttcta

SEQ ID NO: 683697 - DNA, 19 bp, Mus musculus
  siRNA target sequence for Neo1 (NM_008684.1,1150-1168).
gatgatgctgggacttatt

SEQ ID NO: 683698 - DNA, 19 bp, Mus musculus
  siRNA target sequence for Neo1 (NM_008684.1,1156-1174).
gctgggacttatttttgca

SEQ ID NO: 683699 - DNA, 19 bp, Mus musculus
  siRNA target sequence for Neo1 (NM_008684.1,1272-1290).
cgaatccatggacattgta

SEQ ID NO: 683700 - DNA, 19 bp, Mus musculus
  siRNA target sequence for Neo1 (NM_008684.1,1273-1291).
gaatccatggacattgtat

SEQ ID NO: 683701 - DNA, 19 bp, Mus musculus
  siRNA target sequence for Neo1 (NM_008684.1,1325-1343).
ctgtgaagtgggtcaagaa

SEQ ID NO: 683702 - DNA, 19 bp, Mus musculus
  siRNA target sequence for Neo1 (NM_008684.1,1407-1425).
gggtctggtgaaatcagat

SEQ ID NO: 683703 - DNA, 19 bp, Mus musculus
  siRNA target sequence for Neo1 (NM_008684.1,1443-1461).
cattgctgagaatgatgtt

SEQ ID NO: 683704 - DNA, 19 bp, Mus musculus
  siRNA target sequence for Neo1 (NM_008684.1,1474-1492).
gctggagcccagctgataa

SEQ ID NO: 683705 - DNA, 19 bp, Mus musculus
  siRNA target sequence for Neo1 (NM_008684.1,1475-1493).
ctggagcccagctgataat

SEQ ID NO: 683706 - DNA, 19 bp, Mus musculus
  siRNA target sequence for Neo1 (NM_008684.1,1478-1496).
gagcccagctgataatcct

SEQ ID NO: 683707 - DNA, 19 bp, Mus musculus
  siRNA target sequence for Neo1 (NM_008684.1,1620-1638).
ggtctctactcgcttcatt

SEQ ID NO: 683708 - DNA, 19 bp, Mus musculus
  siRNA target sequence for Neo1 (NM_008684.1,1621-1639).
gtctctactcgcttcatta

SEQ ID NO: 683709 - DNA, 19 bp, Mus musculus
  siRNA target sequence for Neo1 (NM_008684.1,1625-1643).
ctactcgcttcattaaatt

SEQ ID NO: 683710 - DNA, 19 bp, Mus musculus
  siRNA target sequence for Neo1 (NM_008684.1,1669-1687).
cctcatggagacaatctca

SEQ ID NO: 683711 - DNA, 19 bp, Mus musculus
  siRNA target sequence for Neo1 (NM_008684.1,1786-1804).
ccagcaactgtgtacatct

SEQ ID NO: 683712 - DNA, 19 bp, Mus musculus
  siRNA target sequence for Neo1 (NM_008684.1,1790-1808).
caactgtgtacatcttcaa

SEQ ID NO: 683713 - DNA, 19 bp, Mus musculus
  siRNA target sequence for Neo1 (NM_008684.1,1806-1824).
caaagttatggctcaaaat

SEQ ID NO: 683714 - DNA, 19 bp, Mus musculus
  siRNA target sequence for Neo1 (NM_008684.1,1889-1907).
ctggcccagcacctaatat

SEQ ID NO: 683715 - DNA, 19 bp, Mus musculus
  siRNA target sequence for Neo1 (NM_008684.1,1923-1941).
gtcacctacttctatcact

SEQ ID NO: 683716 - DNA, 19 bp, Mus musculus
  siRNA target sequence for Neo1 (NM_008684.1,2073-2091).
gaaatacacagaatacagt

SEQ ID NO: 683717 - DNA, 19 bp, Mus musculus
  siRNA target sequence for Neo1 (NM_008684.1,2100-2118).
ggtggcctacaataaacat

SEQ ID NO: 683718 - DNA, 19 bp, Mus musculus
  siRNA target sequence for Neo1 (NM_008684.1,2143-2161).
gttgctgttcgaacattat

SEQ ID NO: 683719 - DNA, 19 bp, Mus musculus
  siRNA target sequence for Neo1 (NM_008684.1,2193-2211).
gtccttagaagtgagaaat

SEQ ID NO: 683720 - DNA, 19 bp, Mus musculus
  siRNA target sequence for Neo1 (NM_008684.1,2242-2260).
ccttcctcaaccacacaaa

SEQ ID NO: 683721 - DNA, 19 bp, Mus musculus
  siRNA target sequence for Neo1 (NM_008684.1,2273-2291).
ctggctacaagattcgata

SEQ ID NO: 683722 - DNA, 19 bp, Mus musculus
  siRNA target sequence for Neo1 (NM_008684.1,2277-2295).
ctacaagattcgatatcga

SEQ ID NO: 683723 - DNA, 19 bp, Mus musculus
  siRNA target sequence for Neo1 (NM_008684.1,2293-2311).
cgaaaggcctcccgaaaaa

SEQ ID NO: 683724 - DNA, 19 bp, Mus musculus
  siRNA target sequence for Neo1 (NM_008684.1,2298-2316).
ggcctcccgaaaaagtgat

SEQ ID NO: 683725 - DNA, 19 bp, Mus musculus
  siRNA target sequence for Neo1 (NM_008684.1,2368-2386).
cttgatcgggggacagaat

SEQ ID NO: 683726 - DNA, 19 bp, Mus musculus
  siRNA target sequence for Neo1 (NM_008684.1,2371-2389).
gatcgggggacagaatata

SEQ ID NO: 683727 - DNA, 19 bp, Mus musculus
  siRNA target sequence for Neo1 (NM_008684.1,2375-2393).
gggggacagaatataactt

SEQ ID NO: 683728 - DNA, 19 bp, Mus musculus
  siRNA target sequence for Neo1 (NM_008684.1,2441-2459).
ggctgtctgctgaaacttt

SEQ ID NO: 683729 - DNA, 19 bp, Mus musculus
  siRNA target sequence for Neo1 (NM_008684.1,2552-2570).
ctccagagaaccagaacat

SEQ ID NO: 683730 - DNA, 19 bp, Mus musculus
  siRNA target sequence for Neo1 (NM_008684.1,2624-2642).
ccatcaaagtggactataa

SEQ ID NO: 683731 - DNA, 19 bp, Mus musculus
  siRNA target sequence for Neo1 (NM_008684.1,2625-2643).
catcaaagtggactataaa

SEQ ID NO: 683732 - DNA, 19 bp, Mus musculus
  siRNA target sequence for Neo1 (NM_008684.1,2634-2652).
ggactataaacaacgttat

SEQ ID NO: 683733 - DNA, 19 bp, Mus musculus
  siRNA target sequence for Neo1 (NM_008684.1,2681-2699).
ctcattacgtgattacctt

SEQ ID NO: 683734 - DNA, 19 bp, Mus musculus
  siRNA target sequence for Neo1 (NM_008684.1,2721-2739).
cgaaggcatccccctttat

SEQ ID NO: 683735 - DNA, 19 bp, Mus musculus
  siRNA target sequence for Neo1 (NM_008684.1,2866-2884).
ctgagtcacgacaccataa

SEQ ID NO: 683736 - DNA, 19 bp, Mus musculus
  siRNA target sequence for Neo1 (NM_008684.1,2872-2890).
cacgacaccataaggatta

SEQ ID NO: 683737 - DNA, 19 bp, Mus musculus
  siRNA target sequence for Neo1 (NM_008684.1,2971-2989).
ccagcaaacacgaagtaca

SEQ ID NO: 683738 - DNA, 19 bp, Mus musculus
  siRNA target sequence for Neo1 (NM_008684.1,2972-2990).
cagcaaacacgaagtacaa

SEQ ID NO: 683739 - DNA, 19 bp, Mus musculus
  siRNA target sequence for Neo1 (NM_008684.1,2981-2999).
cgaagtacaagaatgcaaa

SEQ ID NO: 683740 - DNA, 19 bp, Mus musculus
  siRNA target sequence for Neo1 (NM_008684.1,2995-3013).
gcaaatgcaacgacgttaa

SEQ ID NO: 683741 - DNA, 19 bp, Mus musculus
  siRNA target sequence for Neo1 (NM_008684.1,3001-3019).
gcaacgacgttaagctatt

SEQ ID NO: 683742 - DNA, 19 bp, Mus musculus
  siRNA target sequence for Neo1 (NM_008684.1,3002-3020).
caacgacgttaagctattt

SEQ ID NO: 683743 - DNA, 19 bp, Mus musculus
  siRNA target sequence for Neo1 (NM_008684.1,3005-3023).
cgacgttaagctatttggt

SEQ ID NO: 683744 - DNA, 19 bp, Mus musculus
  siRNA target sequence for Neo1 (NM_008684.1,3006-3024).
gacgttaagctatttggtt

SEQ ID NO: 683745 - DNA, 19 bp, Mus musculus
  siRNA target sequence for Neo1 (NM_008684.1,3037-3055).
ccaaatacgctctatgagt

SEQ ID NO: 683746 - DNA, 19 bp, Mus musculus
  siRNA target sequence for Neo1 (NM_008684.1,3038-3056).
caaatacgctctatgagtt

SEQ ID NO: 683747 - DNA, 19 bp, Mus musculus
  siRNA target sequence for Neo1 (NM_008684.1,3109-3127).
catggcgctacctttgaat

SEQ ID NO: 683748 - DNA, 19 bp, Mus musculus
  siRNA target sequence for Neo1 (NM_008684.1,3217-3235).
gaagctaacggcaagatta

SEQ ID NO: 683749 - DNA, 19 bp, Mus musculus
  siRNA target sequence for Neo1 (NM_008684.1,3236-3254).
caggttacatcatctatta

SEQ ID NO: 683750 - DNA, 19 bp, Mus musculus
  siRNA target sequence for Neo1 (NM_008684.1,3238-3256).
ggttacatcatctattaca

SEQ ID NO: 683751 - DNA, 19 bp, Mus musculus
  siRNA target sequence for Neo1 (NM_008684.1,3276-3294).
gatacatgactgggttatt

SEQ ID NO: 683752 - DNA, 19 bp, Mus musculus
  siRNA target sequence for Neo1 (NM_008684.1,3314-3332).
gactgactcaccagattca

SEQ ID NO: 683753 - DNA, 19 bp, Mus musculus
  siRNA target sequence for Neo1 (NM_008684.1,3320-3338).
ctcaccagattcaagagtt

SEQ ID NO: 683754 - DNA, 19 bp, Mus musculus
  siRNA target sequence for Neo1 (NM_008684.1,3341-3359).
cacttgatacgccatacta

SEQ ID NO: 683755 - DNA, 19 bp, Mus musculus
  siRNA target sequence for Neo1 (NM_008684.1,3343-3361).
cttgatacgccatactact

SEQ ID NO: 683756 - DNA, 19 bp, Mus musculus
  siRNA target sequence for Neo1 (NM_008684.1,3346-3364).
gatacgccatactacttca

SEQ ID NO: 683757 - DNA, 19 bp, Mus musculus
  siRNA target sequence for Neo1 (NM_008684.1,3353-3371).
catactacttcaaaatcca

SEQ ID NO: 683758 - DNA, 19 bp, Mus musculus
  siRNA target sequence for Neo1 (NM_008684.1,3433-3451).
gcggactcctctgataaaa

SEQ ID NO: 683759 - DNA, 19 bp, Mus musculus
  siRNA target sequence for Neo1 (NM_008684.1,3434-3452).
cggactcctctgataaaat

SEQ ID NO: 683760 - DNA, 19 bp, Mus musculus
  siRNA target sequence for Neo1 (NM_008684.1,3468-3486).
cttagggtcagcaggaaaa

SEQ ID NO: 683761 - DNA, 19 bp, Mus musculus
  siRNA target sequence for Neo1 (NM_008684.1,3516-3534).
ctacaaacctccaatgagt

SEQ ID NO: 683762 - DNA, 19 bp, Mus musculus
  siRNA target sequence for Neo1 (NM_008684.1,3605-3623).
ctgttggcgtcatcactat

SEQ ID NO: 683763 - DNA, 19 bp, Mus musculus
  siRNA target sequence for Neo1 (NM_008684.1,3784-3802).
gagttgaagcctattgaca

SEQ ID NO: 683764 - DNA, 19 bp, Mus musculus
  siRNA target sequence for Neo1 (NM_008684.1,3819-3837).
ccctgtcatgactgatact

SEQ ID NO: 683765 - DNA, 19 bp, Mus musculus
  siRNA target sequence for Neo1 (NM_008684.1,3843-3861).
ccctcgaaactctcaagat

SEQ ID NO: 683766 - DNA, 19 bp, Mus musculus
  siRNA target sequence for Neo1 (NM_008684.1,3844-3862).
cctcgaaactctcaagata

SEQ ID NO: 683767 - DNA, 19 bp, Mus musculus
  siRNA target sequence for Neo1 (NM_008684.1,3847-3865).
cgaaactctcaagatatca

SEQ ID NO: 683768 - DNA, 19 bp, Mus musculus
  siRNA target sequence for Neo1 (NM_008684.1,3882-3900).
catggatagcaatatccat

SEQ ID NO: 683769 - DNA, 19 bp, Mus musculus
  siRNA target sequence for Neo1 (NM_008684.1,3897-3915).
ccatcaaaggcggaattca

SEQ ID NO: 683770 - DNA, 19 bp, Mus musculus
  siRNA target sequence for Neo1 (NM_008684.1,3898-3916).
catcaaaggcggaattcat

SEQ ID NO: 683771 - DNA, 19 bp, Mus musculus
  siRNA target sequence for Neo1 (NM_008684.1,3901-3919).
caaaggcggaattcataca

SEQ ID NO: 683772 - DNA, 19 bp, Mus musculus
  siRNA target sequence for Neo1 (NM_008684.1,4006-4024).
ccacctcagcctgtgatta

SEQ ID NO: 683773 - DNA, 19 bp, Mus musculus
  siRNA target sequence for Neo1 (NM_008684.1,4034-4052).
ccatccattccctcgataa

SEQ ID NO: 683774 - DNA, 19 bp, Mus musculus
  siRNA target sequence for Neo1 (NM_008684.1,4048-4066).
gataaccctcaccatcatt

SEQ ID NO: 683775 - DNA, 19 bp, Mus musculus
  siRNA target sequence for Neo1 (NM_008684.1,4169-4187).
ccacagaatctgttcgaaa

SEQ ID NO: 683776 - DNA, 19 bp, Mus musculus
  siRNA target sequence for Neo1 (NM_008684.1,4170-4188).
cacagaatctgttcgaaat

SEQ ID NO: 683777 - DNA, 19 bp, Mus musculus
  siRNA target sequence for Neo1 (NM_008684.1,4262-4280).
ctactagctcctcttactt

SEQ ID NO: 683778 - DNA, 19 bp, Mus musculus
  siRNA target sequence for Neo1 (NM_008684.1,4380-4398).
cccaggacctcctctctat

SEQ ID NO: 683779 - DNA, 19 bp, Mus musculus
  siRNA target sequence for Neo1 (NM_008684.1,4382-4400).
caggacctcctctctatga

SEQ ID NO: 683780 - DNA, 19 bp, Mus musculus
  siRNA target sequence for Neo1 (NM_008684.1,4411-4429).
ccaagcacaccattactgt

SEQ ID NO: 683781 - DNA, 19 bp, Mus musculus
  siRNA target sequence for Neo1 (NM_008684.1,4569-4587).
ctccgagagtagctatgaa

SEQ ID NO: 683782 - DNA, 19 bp, Mus musculus
  siRNA target sequence for Neo1 (NM_008684.1,4613-4631).
cccacctggaaggactaat

SEQ ID NO: 683783 - DNA, 19 bp, Mus musculus
  siRNA target sequence for Neo1 (NM_008684.1,4625-4643).
gactaatgaaggacctaaa

SEQ ID NO: 683784 - DNA, 19 bp, Mus musculus
  siRNA target sequence for Ninj1 (NM_013610.1,218-236).
gtggagcagggcaatgatt

SEQ ID NO: 683785 - DNA, 19 bp, Mus musculus
  siRNA target sequence for Ninj1 (NM_013610.1,352-370).
cgccaagctggactttctt

SEQ ID NO: 683786 - DNA, 19 bp, Mus musculus
  siRNA target sequence for Ninj1 (NM_013610.1,380-398).
gccacgggactggttttca

SEQ ID NO: 683787 - DNA, 19 bp, Mus musculus
  siRNA target sequence for Ninj1 (NM_013610.1,381-399).
ccacgggactggttttcat

SEQ ID NO: 683788 - DNA, 19 bp, Mus musculus
  siRNA target sequence for Ninj1 (NM_013610.1,384-402).
cgggactggttttcatcat

SEQ ID NO: 683789 - DNA, 19 bp, Mus musculus
  siRNA target sequence for Ninj2 (NM_016718.1,139-157).
gcgcatagacctgaacttt

SEQ ID NO: 683790 - DNA, 19 bp, Mus musculus
  siRNA target sequence for Ninj2 (NM_016718.1,140-158).
cgcatagacctgaactttt

SEQ ID NO: 683791 - DNA, 19 bp, Mus musculus
  siRNA target sequence for Ninj2 (NM_016718.1,194-212).
gacgtggcgctctttatgt

SEQ ID NO: 683792 - DNA, 19 bp, Mus musculus
  siRNA target sequence for Ninj2 (NM_016718.1,249-267).
ggccattcgcggagtacta

SEQ ID NO: 683793 - DNA, 19 bp, Mus musculus
  siRNA target sequence for Ninj2 (NM_016718.1,251-269).
ccattcgcggagtactaca

SEQ ID NO: 683794 - DNA, 19 bp, Mus musculus
  siRNA target sequence for Ninj2 (NM_016718.1,274-292).
cctagtcaccctcatcatt

SEQ ID NO: 683795 - DNA, 19 bp, Mus musculus
  siRNA target sequence for Ninj2 (NM_016718.1,367-385).
gaaccagaggcatttaaat

SEQ ID NO: 683796 - DNA, 19 bp, Mus musculus
  siRNA target sequence for Ninj2 (NM_016718.1,423-441).
ccgtggtcatcaacatttt

SEQ ID NO: 683797 - DNA, 19 bp, Mus musculus
  siRNA target sequence for Ninj2 (NM_016718.1,486-504).
ggacctccagcaatcctat

SEQ ID NO: 683798 - DNA, 19 bp, Mus musculus
  siRNA target sequence for Ninj2 (NM_016718.1,487-505).
gacctccagcaatcctatt

SEQ ID NO: 683799 - DNA, 19 bp, Mus musculus
  siRNA target sequence for Nrxn1 (NM_020252.1,223-241).
cagggaaatcagctgatta

SEQ ID NO: 683800 - DNA, 19 bp, Mus musculus
  siRNA target sequence for Nrxn1 (NM_020252.1,226-244).
ggaaatcagctgattatgt

SEQ ID NO: 683801 - DNA, 19 bp, Mus musculus
  siRNA target sequence for Nrxn1 (NM_020252.1,290-308).
gggatcaggggcctttgaa

SEQ ID NO: 683802 - DNA, 19 bp, Mus musculus
  siRNA target sequence for Nrxn1 (NM_020252.1,321-339).
cctgtgaatggaaagttta

SEQ ID NO: 683803 - DNA, 19 bp, Mus musculus
  siRNA target sequence for Nrxn1 (NM_020252.1,595-613).
ccaagcaaggagatcctaa

SEQ ID NO: 683804 - DNA, 19 bp, Mus musculus
  siRNA target sequence for Nrxn1 (NM_020252.1,604-622).
gagatcctaagatgaagat

SEQ ID NO: 683805 - DNA, 19 bp, Mus musculus
  siRNA target sequence for Nrxn1 (NM_020252.1,661-679).
ccttagacccaataacttt

SEQ ID NO: 683806 - DNA, 19 bp, Mus musculus
  siRNA target sequence for Nrxn1 (NM_020252.1,662-680).
cttagacccaataactttt

SEQ ID NO: 683807 - DNA, 19 bp, Mus musculus
  siRNA target sequence for Nrxn1 (NM_020252.1,666-684).
gacccaataacttttgaga

SEQ ID NO: 683808 - DNA, 19 bp, Mus musculus
  siRNA target sequence for Nrxn1 (NM_020252.1,681-699).
gagaccccggaatctttca

SEQ ID NO: 683809 - DNA, 19 bp, Mus musculus
  siRNA target sequence for Nrxn1 (NM_020252.1,686-704).
cccggaatctttcatttct

SEQ ID NO: 683810 - DNA, 19 bp, Mus musculus
  siRNA target sequence for Nrxn1 (NM_020252.1,687-705).
ccggaatctttcatttctt

SEQ ID NO: 683811 - DNA, 19 bp, Mus musculus
  siRNA target sequence for Nrxn1 (NM_020252.1,730-748).
caggctcaatatcatttga

SEQ ID NO: 683812 - DNA, 19 bp, Mus musculus
  siRNA target sequence for Nrxn1 (NM_020252.1,830-848).
gatgattaaggttgacttt

SEQ ID NO: 683813 - DNA, 19 bp, Mus musculus
  siRNA target sequence for Nrxn1 (NM_020252.1,833-851).
gattaaggttgactttttt

SEQ ID NO: 683814 - DNA, 19 bp, Mus musculus
  siRNA target sequence for Nrxn1 (NM_020252.1,893-911).
catgggatcaggtactata

SEQ ID NO: 683815 - DNA, 19 bp, Mus musculus
  siRNA target sequence for Nrxn1 (NM_020252.1,896-914).
gggatcaggtactataaaa

SEQ ID NO: 683816 - DNA, 19 bp, Mus musculus
  siRNA target sequence for Nrxn1 (NM_020252.1,897-915).
ggatcaggtactataaaaa

SEQ ID NO: 683817 - DNA, 19 bp, Mus musculus
  siRNA target sequence for Nrxn1 (NM_020252.1,901-919).
caggtactataaaaatcaa

SEQ ID NO: 683818 - DNA, 19 bp, Mus musculus
  siRNA target sequence for Nrxn1 (NM_020252.1,978-996).
ggacggtcaggtaccattt

SEQ ID NO: 683819 - DNA, 19 bp, Mus musculus
  siRNA target sequence for Nrxn1 (NM_020252.1,1075-1093).
gtggcttgccagaaaataa

SEQ ID NO: 683820 - DNA, 19 bp, Mus musculus
  siRNA target sequence for Nrxn1 (NM_020252.1,1154-1172).
ctgcatccgggacctattt

SEQ ID NO: 683821 - DNA, 19 bp, Mus musculus
  siRNA target sequence for Nrxn1 (NM_020252.1,1156-1174).
gcatccgggacctatttat

SEQ ID NO: 683822 - DNA, 19 bp, Mus musculus
  siRNA target sequence for Nrxn1 (NM_020252.1,1160-1178).
ccgggacctatttattgat

SEQ ID NO: 683823 - DNA, 19 bp, Mus musculus
  siRNA target sequence for Nrxn1 (NM_020252.1,1196-1214).
ccggcagatggcggaaatt

SEQ ID NO: 683824 - DNA, 19 bp, Mus musculus
  siRNA target sequence for Nrxn1 (NM_020252.1,1232-1250).
gaagccatcctgctcaaaa

SEQ ID NO: 683825 - DNA, 19 bp, Mus musculus
  siRNA target sequence for Nrxn1 (NM_020252.1,1263-1281).
ccgtgccttagcaatcctt

SEQ ID NO: 683826 - DNA, 19 bp, Mus musculus
  siRNA target sequence for Nrxn1 (NM_020252.1,1394-1412).
cgggagcatgttcatgaaa

SEQ ID NO: 683827 - DNA, 19 bp, Mus musculus
  siRNA target sequence for Nrxn1 (NM_020252.1,1399-1417).
gcatgttcatgaaaatcca

SEQ ID NO: 683828 - DNA, 19 bp, Mus musculus
  siRNA target sequence for Nrxn1 (NM_020252.1,1466-1484).
ccgatcccagcgtgcatat

SEQ ID NO: 683829 - DNA, 19 bp, Mus musculus
  siRNA target sequence for Nrxn1 (NM_020252.1,1491-1509).
ctgatggcgaccacttcta

SEQ ID NO: 683830 - DNA, 19 bp, Mus musculus
  siRNA target sequence for Nrxn1 (NM_020252.1,1493-1511).
gatggcgaccacttctaga

SEQ ID NO: 683831 - DNA, 19 bp, Mus musculus
  siRNA target sequence for Nrxn1 (NM_020252.1,1516-1534).
ctgcagacacccttcgatt

SEQ ID NO: 683832 - DNA, 19 bp, Mus musculus
  siRNA target sequence for Nrxn1 (NM_020252.1,1545-1563).
gcaggacgtgtgaaactca

SEQ ID NO: 683833 - DNA, 19 bp, Mus musculus
  siRNA target sequence for Nrxn1 (NM_020252.1,1556-1574).
gaaactcacggtcaatcta

SEQ ID NO: 683834 - DNA, 19 bp, Mus musculus
  siRNA target sequence for Nrxn1 (NM_020252.1,1560-1578).
ctcacggtcaatctagatt

SEQ ID NO: 683835 - DNA, 19 bp, Mus musculus
  siRNA target sequence for Nrxn1 (NM_020252.1,1562-1580).
cacggtcaatctagattgt

SEQ ID NO: 683836 - DNA, 19 bp, Mus musculus
  siRNA target sequence for Nrxn1 (NM_020252.1,1566-1584).
gtcaatctagattgtatca

SEQ ID NO: 683837 - DNA, 19 bp, Mus musculus
  siRNA target sequence for Nrxn1 (NM_020252.1,1629-1647).
ggctataacctcaatgata

SEQ ID NO: 683838 - DNA, 19 bp, Mus musculus
  siRNA target sequence for Nrxn1 (NM_020252.1,1630-1648).
gctataacctcaatgataa

SEQ ID NO: 683839 - DNA, 19 bp, Mus musculus
  siRNA target sequence for Nrxn1 (NM_020252.1,1631-1649).
ctataacctcaatgataat

SEQ ID NO: 683840 - DNA, 19 bp, Mus musculus
  siRNA target sequence for Nrxn1 (NM_020252.1,1668-1686).
gtggttcggcgaggaaaaa

SEQ ID NO: 683841 - DNA, 19 bp, Mus musculus
  siRNA target sequence for Nrxn1 (NM_020252.1,1670-1688).
ggttcggcgaggaaaaagt

SEQ ID NO: 683842 - DNA, 19 bp, Mus musculus
  siRNA target sequence for Nrxn1 (NM_020252.1,1671-1689).
gttcggcgaggaaaaagtt

SEQ ID NO: 683843 - DNA, 19 bp, Mus musculus
  siRNA target sequence for Nrxn1 (NM_020252.1,1675-1693).
ggcgaggaaaaagtttaaa

SEQ ID NO: 683844 - DNA, 19 bp, Mus musculus
  siRNA target sequence for Nrxn1 (NM_020252.1,1694-1712).
gctaaccgtggatgatcaa

SEQ ID NO: 683845 - DNA, 19 bp, Mus musculus
  siRNA target sequence for Nrxn1 (NM_020252.1,1728-1746).
caaatggcaggtgatcata

SEQ ID NO: 683846 - DNA, 19 bp, Mus musculus
  siRNA target sequence for Nrxn1 (NM_020252.1,1755-1773).
gagtttcataacatagaga

SEQ ID NO: 683847 - DNA, 19 bp, Mus musculus
  siRNA target sequence for Nrxn1 (NM_020252.1,1855-1873).
gaatggcatacatagactt

SEQ ID NO: 683848 - DNA, 19 bp, Mus musculus
  siRNA target sequence for Nrxn1 (NM_020252.1,1874-1892).
gtgcaaaaatggtgatata

SEQ ID NO: 683849 - DNA, 19 bp, Mus musculus
  siRNA target sequence for Nrxn1 (NM_020252.1,1877-1895).
caaaaatggtgatatagat

SEQ ID NO: 683850 - DNA, 19 bp, Mus musculus
  siRNA target sequence for Nrxn1 (NM_020252.1,1905-1923).
ctcaatgccaggtttggat

SEQ ID NO: 683851 - DNA, 19 bp, Mus musculus
  siRNA target sequence for Nrxn1 (NM_020252.1,1958-1976).
gaccaaatcgagctatgtt

SEQ ID NO: 683852 - DNA, 19 bp, Mus musculus
  siRNA target sequence for Nrxn1 (NM_020252.1,2000-2018).
cacctctatgcatctattt

SEQ ID NO: 683853 - DNA, 19 bp, Mus musculus
  siRNA target sequence for Nrxn1 (NM_020252.1,2005-2023).
ctatgcatctatttttcca

SEQ ID NO: 683854 - DNA, 19 bp, Mus musculus
  siRNA target sequence for Nrxn1 (NM_020252.1,2027-2045).
caagacaacatctctagat

SEQ ID NO: 683855 - DNA, 19 bp, Mus musculus
  siRNA target sequence for Nrxn1 (NM_020252.1,2035-2053).
catctctagatggactaat

SEQ ID NO: 683856 - DNA, 19 bp, Mus musculus
  siRNA target sequence for Nrxn1 (NM_020252.1,2038-2056).
ctctagatggactaattct

SEQ ID NO: 683857 - DNA, 19 bp, Mus musculus
  siRNA target sequence for Nrxn1 (NM_020252.1,2040-2058).
ctagatggactaattctgt

SEQ ID NO: 683858 - DNA, 19 bp, Mus musculus
  siRNA target sequence for Nrxn1 (NM_020252.1,2043-2061).
gatggactaattctgtata

SEQ ID NO: 683859 - DNA, 19 bp, Mus musculus
  siRNA target sequence for Nrxn1 (NM_020252.1,2046-2064).
ggactaattctgtataaca

SEQ ID NO: 683860 - DNA, 19 bp, Mus musculus
  siRNA target sequence for Nrxn1 (NM_020252.1,2065-2083).
gtggggatggaaatgactt

SEQ ID NO: 683861 - DNA, 19 bp, Mus musculus
  siRNA target sequence for Nrxn1 (NM_020252.1,2079-2097).
gactttattgtggttgaat

SEQ ID NO: 683862 - DNA, 19 bp, Mus musculus
  siRNA target sequence for Nrxn1 (NM_020252.1,2081-2099).
ctttattgtggttgaatta

SEQ ID NO: 683863 - DNA, 19 bp, Mus musculus
  siRNA target sequence for Nrxn1 (NM_020252.1,2221-2239).
gcaatctccacacagtaaa

SEQ ID NO: 683864 - DNA, 19 bp, Mus musculus
  siRNA target sequence for Nrxn1 (NM_020252.1,2233-2251).
cagtaaagatcgacacaaa

SEQ ID NO: 683865 - DNA, 19 bp, Mus musculus
  siRNA target sequence for Nrxn1 (NM_020252.1,2235-2253).
gtaaagatcgacacaaaaa

SEQ ID NO: 683866 - DNA, 19 bp, Mus musculus
  siRNA target sequence for Nrxn1 (NM_020252.1,2240-2258).
gatcgacacaaaaatcaca

SEQ ID NO: 683867 - DNA, 19 bp, Mus musculus
  siRNA target sequence for Nrxn1 (NM_020252.1,2272-2290).
cgggagccagaaatctaga

SEQ ID NO: 683868 - DNA, 19 bp, Mus musculus
  siRNA target sequence for Nrxn1 (NM_020252.1,2495-2513).
ggattcatgttcaaatcaa

SEQ ID NO: 683869 - DNA, 19 bp, Mus musculus
  siRNA target sequence for Nrxn1 (NM_020252.1,2506-2524).
caaatcaaggcgtttgctt

SEQ ID NO: 683870 - DNA, 19 bp, Mus musculus
  siRNA target sequence for Nrxn1 (NM_020252.1,2595-2613).
gggacaacatatatcttta

SEQ ID NO: 683871 - DNA, 19 bp, Mus musculus
  siRNA target sequence for Nrxn1 (NM_020252.1,2619-2637).
ggtggtggacagattacat

SEQ ID NO: 683872 - DNA, 19 bp, Mus musculus
  siRNA target sequence for Nrxn1 (NM_020252.1,2620-2638).
gtggtggacagattacata

SEQ ID NO: 683873 - DNA, 19 bp, Mus musculus
  siRNA target sequence for Nrxn1 (NM_020252.1,2623-2641).
gtggacagattacatataa

SEQ ID NO: 683874 - DNA, 19 bp, Mus musculus
  siRNA target sequence for Nrxn1 (NM_020252.1,2682-2700).
ctggccatcggatttagca

SEQ ID NO: 683875 - DNA, 19 bp, Mus musculus
  siRNA target sequence for Nrxn1 (NM_020252.1,2771-2789).
catacaccaaggaaaaatt

SEQ ID NO: 683876 - DNA, 19 bp, Mus musculus
  siRNA target sequence for Nrxn1 (NM_020252.1,2822-2840).
cgccatcgaagagtctaat

SEQ ID NO: 683877 - DNA, 19 bp, Mus musculus
  siRNA target sequence for Nrxn1 (NM_020252.1,2832-2850).
gagtctaatgcaatcatta

SEQ ID NO: 683878 - DNA, 19 bp, Mus musculus
  siRNA target sequence for Nrxn1 (NM_020252.1,2834-2852).
gtctaatgcaatcattaat

SEQ ID NO: 683879 - DNA, 19 bp, Mus musculus
  siRNA target sequence for Nrxn1 (NM_020252.1,2864-2882).
ccatgtagtacgtttcaca

SEQ ID NO: 683880 - DNA, 19 bp, Mus musculus
  siRNA target sequence for Nrxn1 (NM_020252.1,2865-2883).
catgtagtacgtttcacaa

SEQ ID NO: 683881 - DNA, 19 bp, Mus musculus
  siRNA target sequence for Nrxn1 (NM_020252.1,2915-2933).
cagctggccagttatcgaa

SEQ ID NO: 683882 - DNA, 19 bp, Mus musculus
  siRNA target sequence for Nrxn1 (NM_020252.1,2976-2994).
gctagacagcgaattccat

SEQ ID NO: 683883 - DNA, 19 bp, Mus musculus
  siRNA target sequence for Nrxn1 (NM_020252.1,2977-2995).
ctagacagcgaattccata

SEQ ID NO: 683884 - DNA, 19 bp, Mus musculus
  siRNA target sequence for Nrxn1 (NM_020252.1,3037-3055).
ggcgtcagctcacaatctt

SEQ ID NO: 683885 - DNA, 19 bp, Mus musculus
  siRNA target sequence for Nrxn1 (NM_020252.1,3138-3156).
ggcttgaaagttctgaata

SEQ ID NO: 683886 - DNA, 19 bp, Mus musculus
  siRNA target sequence for Nrxn1 (NM_020252.1,3216-3234).
gtgccttcctctatgacaa

SEQ ID NO: 683887 - DNA, 19 bp, Mus musculus
  siRNA target sequence for Nrxn1 (NM_020252.1,3618-3636).
gagagtcgaaactacatca

SEQ ID NO: 683888 - DNA, 19 bp, Mus musculus
  siRNA target sequence for Nrxn1 (NM_020252.1,3622-3640).
gtcgaaactacatcagtaa

SEQ ID NO: 683889 - DNA, 19 bp, Mus musculus
  siRNA target sequence for Nrxn1 (NM_020252.1,3691-3709).
ctaaaagcgccaacaaaaa

SEQ ID NO: 683890 - DNA, 19 bp, Mus musculus
  siRNA target sequence for Nrxn1 (NM_020252.1,3697-3715).
gcgccaacaaaaacaagaa

SEQ ID NO: 683891 - DNA, 19 bp, Mus musculus
  siRNA target sequence for Omd (NM_012050.1,266-284).
ggctttttaagtccaatat

SEQ ID NO: 683892 - DNA, 19 bp, Mus musculus
  siRNA target sequence for Omd (NM_012050.1,267-285).
gctttttaagtccaatata

SEQ ID NO: 683893 - DNA, 19 bp, Mus musculus
  siRNA target sequence for Omd (NM_012050.1,295-313).
cttctgttttggagttaga

SEQ ID NO: 683894 - DNA, 19 bp, Mus musculus
  siRNA target sequence for Omd (NM_012050.1,312-330).
gagtatactgccaatatga

SEQ ID NO: 683895 - DNA, 19 bp, Mus musculus
  siRNA target sequence for Omd (NM_012050.1,337-355).
ccgatgggatgacgattat

SEQ ID NO: 683896 - DNA, 19 bp, Mus musculus
  siRNA target sequence for Omd (NM_012050.1,471-489).
ctaactttccaacatcaat

SEQ ID NO: 683897 - DNA, 19 bp, Mus musculus
  siRNA target sequence for Omd (NM_012050.1,490-508).
gtactgtgacaatcgtaaa

SEQ ID NO: 683898 - DNA, 19 bp, Mus musculus
  siRNA target sequence for Omd (NM_012050.1,495-513).
gtgacaatcgtaaactcaa

SEQ ID NO: 683899 - DNA, 19 bp, Mus musculus
  siRNA target sequence for Omd (NM_012050.1,511-529).
caagactatcccaattatt

SEQ ID NO: 683900 - DNA, 19 bp, Mus musculus
  siRNA target sequence for Omd (NM_012050.1,574-592).
ggctgtgactgcaaattca

SEQ ID NO: 683901 - DNA, 19 bp, Mus musculus
  siRNA target sequence for Omd (NM_012050.1,578-596).
gtgactgcaaattcattca

SEQ ID NO: 683902 - DNA, 19 bp, Mus musculus
  siRNA target sequence for Omd (NM_012050.1,602-620).
gcaactcatcttaaagaaa

SEQ ID NO: 683903 - DNA, 19 bp, Mus musculus
  siRNA target sequence for Omd (NM_012050.1,603-621).
caactcatcttaaagaaat

SEQ ID NO: 683904 - DNA, 19 bp, Mus musculus
  siRNA target sequence for Omd (NM_012050.1,665-683).
ggtgtattcgctaaacttt

SEQ ID NO: 683905 - DNA, 19 bp, Mus musculus
  siRNA target sequence for Omd (NM_012050.1,668-686).
gtattcgctaaactttcaa

SEQ ID NO: 683906 - DNA, 19 bp, Mus musculus
  siRNA target sequence for Omd (NM_012050.1,673-691).
cgctaaactttcaaatcta

SEQ ID NO: 683907 - DNA, 19 bp, Mus musculus
  siRNA target sequence for Omd (NM_012050.1,710-728).
cacaataacctagaagaat

SEQ ID NO: 683908 - DNA, 19 bp, Mus musculus
  siRNA target sequence for Omd (NM_012050.1,744-762).
caaaatctttggaaagact

SEQ ID NO: 683909 - DNA, 19 bp, Mus musculus
  siRNA target sequence for Omd (NM_012050.1,759-777).
gactccttcttggttataa

SEQ ID NO: 683910 - DNA, 19 bp, Mus musculus
  siRNA target sequence for Omd (NM_012050.1,763-781).
ccttcttggttataatgaa

SEQ ID NO: 683911 - DNA, 19 bp, Mus musculus
  siRNA target sequence for Omd (NM_012050.1,784-802).
ctccatacttccaacaaat

SEQ ID NO: 683912 - DNA, 19 bp, Mus musculus
  siRNA target sequence for Omd (NM_012050.1,817-835).
ggtgaatgtgactatgctt

SEQ ID NO: 683913 - DNA, 19 bp, Mus musculus
  siRNA target sequence for Omd (NM_012050.1,843-861).
gctataatcatctttctga

SEQ ID NO: 683914 - DNA, 19 bp, Mus musculus
  siRNA target sequence for Omd (NM_012050.1,844-862).
ctataatcatctttctgat

SEQ ID NO: 683915 - DNA, 19 bp, Mus musculus
  siRNA target sequence for Omd (NM_012050.1,854-872).
ctttctgattcgatgttaa

SEQ ID NO: 683916 - DNA, 19 bp, Mus musculus
  siRNA target sequence for Omd (NM_012050.1,860-878).
gattcgatgttaaaagaaa

SEQ ID NO: 683917 - DNA, 19 bp, Mus musculus
  siRNA target sequence for Omd (NM_012050.1,907-925).
gcagctcaacctatgtaat

SEQ ID NO: 683918 - DNA, 19 bp, Mus musculus
  siRNA target sequence for Omd (NM_012050.1,913-931).
caacctatgtaataacaga

SEQ ID NO: 683919 - DNA, 19 bp, Mus musculus
  siRNA target sequence for Omd (NM_012050.1,916-934).
cctatgtaataacagatta

SEQ ID NO: 683920 - DNA, 19 bp, Mus musculus
  siRNA target sequence for Omd (NM_012050.1,999-1017).
catctataccagacaatta

SEQ ID NO: 683921 - DNA, 19 bp, Mus musculus
  siRNA target sequence for Omd (NM_012050.1,1002-1020).
ctataccagacaattattt

SEQ ID NO: 683922 - DNA, 19 bp, Mus musculus
  siRNA target sequence for Omd (NM_012050.1,1037-1055).
cttcatgctctaagaatat

SEQ ID NO: 683923 - DNA, 19 bp, Mus musculus
  siRNA target sequence for Omd (NM_012050.1,1075-1093).
cattccatatgacatcttt

SEQ ID NO: 683924 - DNA, 19 bp, Mus musculus
  siRNA target sequence for Omd (NM_012050.1,1101-1119).
ccaatcttatagaactcaa

SEQ ID NO: 683925 - DNA, 19 bp, Mus musculus
  siRNA target sequence for Omd (NM_012050.1,1115-1133).
ctcaacgttggacacaata

SEQ ID NO: 683926 - DNA, 19 bp, Mus musculus
  siRNA target sequence for Omd (NM_012050.1,1117-1135).
caacgttggacacaataaa

SEQ ID NO: 683927 - DNA, 19 bp, Mus musculus
  siRNA target sequence for Omd (NM_012050.1,1121-1139).
gttggacacaataaattga

SEQ ID NO: 683928 - DNA, 19 bp, Mus musculus
  siRNA target sequence for Omd (NM_012050.1,1161-1179).
ggaatttggaacatctata

SEQ ID NO: 683929 - DNA, 19 bp, Mus musculus
  siRNA target sequence for Omd (NM_012050.1,1169-1187).
gaacatctatacctacaaa

SEQ ID NO: 683930 - DNA, 19 bp, Mus musculus
  siRNA target sequence for Omd (NM_012050.1,1203-1221).
gcatcaatgtgacaatgat

SEQ ID NO: 683931 - DNA, 19 bp, Mus musculus
  siRNA target sequence for Omd (NM_012050.1,1241-1259).
gtacaccatcaccatttaa

SEQ ID NO: 683932 - DNA, 19 bp, Mus musculus
  siRNA target sequence for Omd (NM_012050.1,1244-1262).
caccatcaccatttaacat

SEQ ID NO: 683933 - DNA, 19 bp, Mus musculus
  siRNA target sequence for Omd (NM_012050.1,1295-1313).
ccaataagttcatacatct

SEQ ID NO: 683934 - DNA, 19 bp, Mus musculus
  siRNA target sequence for Omd (NM_012050.1,1296-1314).
caataagttcatacatctt

SEQ ID NO: 683935 - DNA, 19 bp, Mus musculus
  siRNA target sequence for Omd (NM_012050.1,1315-1333).
cttctgcttccctcgtata

SEQ ID NO: 683936 - DNA, 19 bp, Mus musculus
  siRNA target sequence for Omd (NM_012050.1,1324-1342).
ccctcgtatacacagtatt

SEQ ID NO: 683937 - DNA, 19 bp, Mus musculus
  siRNA target sequence for Omd (NM_012050.1,1325-1343).
cctcgtatacacagtattt

SEQ ID NO: 683938 - DNA, 19 bp, Mus musculus
  siRNA target sequence for Omd (NM_012050.1,1326-1344).
ctcgtatacacagtattta

SEQ ID NO: 683939 - DNA, 19 bp, Mus musculus
  siRNA target sequence for Omd (NM_012050.1,1349-1367).
ggtgagcagaggagtacta

SEQ ID NO: 683940 - DNA, 19 bp, Mus musculus
  siRNA target sequence for Omd (NM_012050.1,1350-1368).
gtgagcagaggagtactaa

SEQ ID NO: 683941 - DNA, 19 bp, Mus musculus
  siRNA target sequence for Omd (NM_012050.1,1360-1378).
gagtactaacggtgaaaca

SEQ ID NO: 683942 - DNA, 19 bp, Mus musculus
  siRNA target sequence for Omd (NM_012050.1,1362-1380).
gtactaacggtgaaacaat

SEQ ID NO: 683943 - DNA, 19 bp, Mus musculus
  siRNA target sequence for Omd (NM_012050.1,1382-1400).
caactgaagacccaagttt

SEQ ID NO: 683944 - DNA, 19 bp, Mus musculus
  siRNA target sequence for Omd (NM_012050.1,1481-1499).
gagcactataattctcatt

SEQ ID NO: 683945 - DNA, 19 bp, Mus musculus
  siRNA target sequence for Omd (NM_012050.1,1511-1529).
caagagtggcaagatacta

SEQ ID NO: 683946 - DNA, 19 bp, Mus musculus
  siRNA target sequence for Omg (NM_019409.1,176-194).
ctcacgcctggcatcttat

SEQ ID NO: 683947 - DNA, 19 bp, Mus musculus
  siRNA target sequence for Omg (NM_019409.1,180-198).
cgcctggcatcttatgcat

SEQ ID NO: 683948 - DNA, 19 bp, Mus musculus
  siRNA target sequence for Omg (NM_019409.1,181-199).
gcctggcatcttatgcatt

SEQ ID NO: 683949 - DNA, 19 bp, Mus musculus
  siRNA target sequence for Omg (NM_019409.1,252-270).
gcagaaacttgactacatt

SEQ ID NO: 683950 - DNA, 19 bp, Mus musculus
  siRNA target sequence for Omg (NM_019409.1,253-271).
cagaaacttgactacatta

SEQ ID NO: 683951 - DNA, 19 bp, Mus musculus
  siRNA target sequence for Omg (NM_019409.1,310-328).
gtcttataaccactttact

SEQ ID NO: 683952 - DNA, 19 bp, Mus musculus
  siRNA target sequence for Omg (NM_019409.1,312-330).
cttataaccactttactga

SEQ ID NO: 683953 - DNA, 19 bp, Mus musculus
  siRNA target sequence for Omg (NM_019409.1,329-347).
gatctgcataaccagttaa

SEQ ID NO: 683954 - DNA, 19 bp, Mus musculus
  siRNA target sequence for Omg (NM_019409.1,341-359).
cagttaaccccatatacca

SEQ ID NO: 683955 - DNA, 19 bp, Mus musculus
  siRNA target sequence for Omg (NM_019409.1,343-361).
gttaaccccatataccaat

SEQ ID NO: 683956 - DNA, 19 bp, Mus musculus
  siRNA target sequence for Omg (NM_019409.1,364-382).
gagaaccctggatatttca

SEQ ID NO: 683957 - DNA, 19 bp, Mus musculus
  siRNA target sequence for Omg (NM_019409.1,366-384).
gaaccctggatatttcaaa

SEQ ID NO: 683958 - DNA, 19 bp, Mus musculus
  siRNA target sequence for Omg (NM_019409.1,419-437).
cggtctctctggaacatgt

SEQ ID NO: 683959 - DNA, 19 bp, Mus musculus
  siRNA target sequence for Omg (NM_019409.1,440-458).
gctgctaacaacaatatta

SEQ ID NO: 683960 - DNA, 19 bp, Mus musculus
  siRNA target sequence for Omg (NM_019409.1,441-459).
ctgctaacaacaatattaa

SEQ ID NO: 683961 - DNA, 19 bp, Mus musculus
  siRNA target sequence for Omg (NM_019409.1,482-500).
gcttatcagtggaacctta

SEQ ID NO: 683962 - DNA, 19 bp, Mus musculus
  siRNA target sequence for Omg (NM_019409.1,516-534).
ctaagaatatgctggaaaa

SEQ ID NO: 683963 - DNA, 19 bp, Mus musculus
  siRNA target sequence for Omg (NM_019409.1,638-656).
gtggacctgtctaataact

SEQ ID NO: 683964 - DNA, 19 bp, Mus musculus
  siRNA target sequence for Omg (NM_019409.1,640-658).
ggacctgtctaataactca

SEQ ID NO: 683965 - DNA, 19 bp, Mus musculus
  siRNA target sequence for Omg (NM_019409.1,670-688).
ccttccagggacattaata

SEQ ID NO: 683966 - DNA, 19 bp, Mus musculus
  siRNA target sequence for Omg (NM_019409.1,719-737).
cacaacaataaattcacat

SEQ ID NO: 683967 - DNA, 19 bp, Mus musculus
  siRNA target sequence for Omg (NM_019409.1,772-790).
gttgcaagagataactctt

SEQ ID NO: 683968 - DNA, 19 bp, Mus musculus
  siRNA target sequence for Omg (NM_019409.1,775-793).
gcaagagataactcttcat

SEQ ID NO: 683969 - DNA, 19 bp, Mus musculus
  siRNA target sequence for Omg (NM_019409.1,821-839).
caaaacattacttacttat

SEQ ID NO: 683970 - DNA, 19 bp, Mus musculus
  siRNA target sequence for Omg (NM_019409.1,877-895).
gactccttgttctaagcaa

SEQ ID NO: 683971 - DNA, 19 bp, Mus musculus
  siRNA target sequence for Omg (NM_019409.1,881-899).
ccttgttctaagcaagtat

SEQ ID NO: 683972 - DNA, 19 bp, Mus musculus
  siRNA target sequence for Omg (NM_019409.1,939-957).
ggtttacctcaagcttatt

SEQ ID NO: 683973 - DNA, 19 bp, Mus musculus
  siRNA target sequence for Omg (NM_019409.1,996-1014).
ctttgagtatggtaactca

SEQ ID NO: 683974 - DNA, 19 bp, Mus musculus
  siRNA target sequence for Omg (NM_019409.1,1040-1058).
caatatcgaggaaaggaaa

SEQ ID NO: 683975 - DNA, 19 bp, Mus musculus
  siRNA target sequence for Omg (NM_019409.1,1070-1088).
gtcactctaagcaaagata

SEQ ID NO: 683976 - DNA, 19 bp, Mus musculus
  siRNA target sequence for Omg (NM_019409.1,1139-1157).
cccacagaaatgaccaatt

SEQ ID NO: 683977 - DNA, 19 bp, Mus musculus
  siRNA target sequence for Omg (NM_019409.1,1169-1187).
gcagctgcaactctaacta

SEQ ID NO: 683978 - DNA, 19 bp, Mus musculus
  siRNA target sequence for Omg (NM_019409.1,1173-1191).
ctgcaactctaactattca

SEQ ID NO: 683979 - DNA, 19 bp, Mus musculus
  siRNA target sequence for Omg (NM_019409.1,1271-1289).
gctcgtggcatgccaaata

SEQ ID NO: 683980 - DNA, 19 bp, Mus musculus
  siRNA target sequence for Omg (NM_019409.1,1272-1290).
ctcgtggcatgccaaataa

SEQ ID NO: 683981 - DNA, 19 bp, Mus musculus
  siRNA target sequence for Omg (NM_019409.1,1274-1292).
cgtggcatgccaaataact

SEQ ID NO: 683982 - DNA, 19 bp, Mus musculus
  siRNA target sequence for Omg (NM_019409.1,1275-1293).
gtggcatgccaaataactt

SEQ ID NO: 683983 - DNA, 19 bp, Mus musculus
  siRNA target sequence for Omg (NM_019409.1,1336-1354).
ggaagaaaccactgcaaat

SEQ ID NO: 683984 - DNA, 19 bp, Mus musculus
  siRNA target sequence for Omg (NM_019409.1,1378-1396).
ggctagtgcttggaaagta

SEQ ID NO: 683985 - DNA, 19 bp, Mus musculus
  siRNA target sequence for Omg (NM_019409.1,1379-1397).
gctagtgcttggaaagtaa

SEQ ID NO: 683986 - DNA, 19 bp, Mus musculus
  siRNA target sequence for Omg (NM_019409.1,1380-1398).
ctagtgcttggaaagtaaa

SEQ ID NO: 683987 - DNA, 19 bp, Mus musculus
  siRNA target sequence for Omg (NM_019409.1,1401-1419).
cctcgctccttttaatgct

SEQ ID NO: 683988 - DNA, 19 bp, Mus musculus
  siRNA target sequence for Pecam (NM_008816.1,507-525).
gtcgtgacggtcaattgtt

SEQ ID NO: 683989 - DNA, 19 bp, Mus musculus
  siRNA target sequence for Pecam (NM_008816.1,537-555).
gaaaagccaccgatctttt

SEQ ID NO: 683990 - DNA, 19 bp, Mus musculus
  siRNA target sequence for Pecam (NM_008816.1,542-560).
gccaccgatcttttttaaa

SEQ ID NO: 683991 - DNA, 19 bp, Mus musculus
  siRNA target sequence for Pecam (NM_008816.1,543-561).
ccaccgatcttttttaaaa

SEQ ID NO: 683992 - DNA, 19 bp, Mus musculus
  siRNA target sequence for Pecam (NM_008816.1,544-562).
caccgatcttttttaaaat

SEQ ID NO: 683993 - DNA, 19 bp, Mus musculus
  siRNA target sequence for Pecam (NM_008816.1,611-629).
gacctccaacgagaacttt

SEQ ID NO: 683994 - DNA, 19 bp, Mus musculus
  siRNA target sequence for Pecam (NM_008816.1,655-673).
cgcaggaccacgtgttagt

SEQ ID NO: 683995 - DNA, 19 bp, Mus musculus
  siRNA target sequence for Pecam (NM_008816.1,657-675).
caggaccacgtgttagtgt

SEQ ID NO: 683996 - DNA, 19 bp, Mus musculus
  siRNA target sequence for Pecam (NM_008816.1,691-709).
ggatcctgtccggattcaa

SEQ ID NO: 683997 - DNA, 19 bp, Mus musculus
  siRNA target sequence for Pecam (NM_008816.1,692-710).
gatcctgtccggattcaaa

SEQ ID NO: 683998 - DNA, 19 bp, Mus musculus
  siRNA target sequence for Pecam (NM_008816.1,727-745).
ccatcaggagtgaatacgt

SEQ ID NO: 683999 - DNA, 19 bp, Mus musculus
  siRNA target sequence for Pecam (NM_008816.1,761-779).
cttctccactcccaagttt

SEQ ID NO: 684000 - DNA, 19 bp, Mus musculus
  siRNA target sequence for Pecam (NM_008816.1,766-784).
ccactcccaagtttgaaat

SEQ ID NO: 684001 - DNA, 19 bp, Mus musculus
  siRNA target sequence for Pecam (NM_008816.1,788-806).
gccccctgggatgatcata

SEQ ID NO: 684002 - DNA, 19 bp, Mus musculus
  siRNA target sequence for Pecam (NM_008816.1,791-809).
ccctgggatgatcatagaa

SEQ ID NO: 684003 - DNA, 19 bp, Mus musculus
  siRNA target sequence for Pecam (NM_008816.1,810-828).
ggggaccagctgcacatta

SEQ ID NO: 684004 - DNA, 19 bp, Mus musculus
  siRNA target sequence for Pecam (NM_008816.1,813-831).
gaccagctgcacattaggt

SEQ ID NO: 684005 - DNA, 19 bp, Mus musculus
  siRNA target sequence for Pecam (NM_008816.1,821-839).
gcacattaggtgcatagtt

SEQ ID NO: 684006 - DNA, 19 bp, Mus musculus
  siRNA target sequence for Pecam (NM_008816.1,849-867).
cacttggtccaggagttta

SEQ ID NO: 684007 - DNA, 19 bp, Mus musculus
  siRNA target sequence for Pecam (NM_008816.1,854-872).
ggtccaggagtttacagaa

SEQ ID NO: 684008 - DNA, 19 bp, Mus musculus
  siRNA target sequence for Pecam (NM_008816.1,973-991).
cctgcaaagtggaatcaaa

SEQ ID NO: 684009 - DNA, 19 bp, Mus musculus
  siRNA target sequence for Pecam (NM_008816.1,1037-1055).
gtttcccaagccgaagtta

SEQ ID NO: 684010 - DNA, 19 bp, Mus musculus
  siRNA target sequence for Pecam (NM_008816.1,1156-1174).
cggtcttgtcgcagtatca

SEQ ID NO: 684011 - DNA, 19 bp, Mus musculus
  siRNA target sequence for Pecam (NM_008816.1,1158-1176).
gtcttgtcgcagtatcaga

SEQ ID NO: 684012 - DNA, 19 bp, Mus musculus
  siRNA target sequence for Pecam (NM_008816.1,1291-1309).
cgaagcccagtatttttca

SEQ ID NO: 684013 - DNA, 19 bp, Mus musculus
  siRNA target sequence for Pecam (NM_008816.1,1292-1310).
gaagcccagtatttttcat

SEQ ID NO: 684014 - DNA, 19 bp, Mus musculus
  siRNA target sequence for Pecam (NM_008816.1,1316-1334).
caagtctgagatcataaaa

SEQ ID NO: 684015 - DNA, 19 bp, Mus musculus
  siRNA target sequence for Pecam (NM_008816.1,1319-1337).
gtctgagatcataaaagga

SEQ ID NO: 684016 - DNA, 19 bp, Mus musculus
  siRNA target sequence for Pecam (NM_008816.1,1352-1370).
cagctgccagtccgaaaat

SEQ ID NO: 684017 - DNA, 19 bp, Mus musculus
  siRNA target sequence for Pecam (NM_008816.1,1355-1373).
ctgccagtccgaaaatgga

SEQ ID NO: 684018 - DNA, 19 bp, Mus musculus
  siRNA target sequence for Pecam (NM_008816.1,1371-1389).
ggaactgcacccatcactt

SEQ ID NO: 684019 - DNA, 19 bp, Mus musculus
  siRNA target sequence for Pecam (NM_008816.1,1372-1390).
gaactgcacccatcactta

SEQ ID NO: 684020 - DNA, 19 bp, Mus musculus
  siRNA target sequence for Pecam (NM_008816.1,1385-1403).
cacttaccaccttatgaaa

SEQ ID NO: 684021 - DNA, 19 bp, Mus musculus
  siRNA target sequence for Pecam (NM_008816.1,1438-1456).
ccaatgacccagcaacatt

SEQ ID NO: 684022 - DNA, 19 bp, Mus musculus
  siRNA target sequence for Pecam (NM_008816.1,1467-1485).
cccaccagagacatggaat

SEQ ID NO: 684023 - DNA, 19 bp, Mus musculus
  siRNA target sequence for Pecam (NM_008816.1,1487-1505).
ccagtgcagagcggataat

SEQ ID NO: 684024 - DNA, 19 bp, Mus musculus
  siRNA target sequence for Pecam (NM_008816.1,1488-1506).
cagtgcagagcggataatt

SEQ ID NO: 684025 - DNA, 19 bp, Mus musculus
  siRNA target sequence for Pecam (NM_008816.1,1656-1674).
ccaatcacgtttcagtttt

SEQ ID NO: 684026 - DNA, 19 bp, Mus musculus
  siRNA target sequence for Pecam (NM_008816.1,1657-1675).
caatcacgtttcagtttta

SEQ ID NO: 684027 - DNA, 19 bp, Mus musculus
  siRNA target sequence for Pecam (NM_008816.1,1704-1722).
caagcggtcgtgaatgaca

SEQ ID NO: 684028 - DNA, 19 bp, Mus musculus
  siRNA target sequence for Pecam (NM_008816.1,1898-1916).
ggtcatcgccaccttaata

SEQ ID NO: 684029 - DNA, 19 bp, Mus musculus
  siRNA target sequence for Pecam (NM_008816.1,2003-2021).
ctccaacagcgagaagatt

SEQ ID NO: 684030 - DNA, 19 bp, Mus musculus
  siRNA target sequence for Pecam (NM_008816.1,2045-2063).
cagccattacggttatgat

SEQ ID NO: 684031 - DNA, 19 bp, Mus musculus
  siRNA target sequence for Pecam (NM_008816.1,2047-2065).
gccattacggttatgatga

SEQ ID NO: 684032 - DNA, 19 bp, Mus musculus
  siRNA target sequence for Pecam (NM_008816.1,2048-2066).
ccattacggttatgatgat

SEQ ID NO: 684033 - DNA, 19 bp, Mus musculus
  siRNA target sequence for Pecam (NM_008816.1,2071-2089).
ctggaaatgatgcagtaaa

SEQ ID NO: 684034 - DNA, 19 bp, Mus musculus
  siRNA target sequence for Pecam (NM_008816.1,2120-2138).
catggatgtagaatacaca

SEQ ID NO: 684035 - DNA, 19 bp, Mus musculus
  siRNA target sequence for Pecam (NM_008816.1,2215-2233).
ggaaggtcgaccctaatct

SEQ ID NO: 684036 - DNA, 19 bp, Mus musculus
  siRNA target sequence for Pecam (NM_008816.1,2226-2244).
cctaatctcatggaaaaca

SEQ ID NO: 684037 - DNA, 19 bp, Mus musculus
  siRNA target sequence for Pecam (NM_008816.1,2259-2277).
gaaggctcccttaatggaa

SEQ ID NO: 684038 - DNA, 19 bp, Mus musculus
  siRNA target sequence for Rs1h (NM_011302.2,197-215).
ctacctccttagactgtat

SEQ ID NO: 684039 - DNA, 19 bp, Mus musculus
  siRNA target sequence for Rs1h (NM_011302.2,201-219).
ctccttagactgtattcca

SEQ ID NO: 684040 - DNA, 19 bp, Mus musculus
  siRNA target sequence for Rs1h (NM_011302.2,298-316).
cagtatgtgggctggtatt

SEQ ID NO: 684041 - DNA, 19 bp, Mus musculus
  siRNA target sequence for Rs1h (NM_011302.2,392-410).
gcagccagtggttacagat

SEQ ID NO: 684042 - DNA, 19 bp, Mus musculus
  siRNA target sequence for Rs1h (NM_011302.2,395-413).
gccagtggttacagataga

SEQ ID NO: 684043 - DNA, 19 bp, Mus musculus
  siRNA target sequence for Rs1h (NM_011302.2,396-414).
ccagtggttacagatagat

SEQ ID NO: 684044 - DNA, 19 bp, Mus musculus
  siRNA target sequence for Rs1h (NM_011302.2,514-532).
cgcctgaactggatctact

SEQ ID NO: 684045 - DNA, 19 bp, Mus musculus
  siRNA target sequence for Rs1h (NM_011302.2,537-555).
ggatcagaccggaaacaat

SEQ ID NO: 684046 - DNA, 19 bp, Mus musculus
  siRNA target sequence for Rs1h (NM_011302.2,548-566).
gaaacaatcgggtcttcta

SEQ ID NO: 684047 - DNA, 19 bp, Mus musculus
  siRNA target sequence for Tgfbi (NM_009369.1,273-291).
gtcgacagtcatcagttat

SEQ ID NO: 684048 - DNA, 19 bp, Mus musculus
  siRNA target sequence for Tgfbi (NM_009369.1,344-362).
ctcttccgctctcaaatct

SEQ ID NO: 684049 - DNA, 19 bp, Mus musculus
  siRNA target sequence for Tgfbi (NM_009369.1,346-364).
cttccgctctcaaatctgt

SEQ ID NO: 684050 - DNA, 19 bp, Mus musculus
  siRNA target sequence for Tgfbi (NM_009369.1,350-368).
cgctctcaaatctgtatga

SEQ ID NO: 684051 - DNA, 19 bp, Mus musculus
  siRNA target sequence for Tgfbi (NM_009369.1,352-370).
ctctcaaatctgtatgaga

SEQ ID NO: 684052 - DNA, 19 bp, Mus musculus
  siRNA target sequence for Tgfbi (NM_009369.1,450-468).
cggaagcttcaccatcttt

SEQ ID NO: 684053 - DNA, 19 bp, Mus musculus
  siRNA target sequence for Tgfbi (NM_009369.1,623-641).
ccatgtaccagaattccaa

SEQ ID NO: 684054 - DNA, 19 bp, Mus musculus
  siRNA target sequence for Tgfbi (NM_009369.1,642-660).
catccagatccatcactat

SEQ ID NO: 684055 - DNA, 19 bp, Mus musculus
  siRNA target sequence for Tgfbi (NM_009369.1,657-675).
ctatcccaatgggattgta

SEQ ID NO: 684056 - DNA, 19 bp, Mus musculus
  siRNA target sequence for Tgfbi (NM_009369.1,669-687).
gattgtaactgttaactgt

SEQ ID NO: 684057 - DNA, 19 bp, Mus musculus
  siRNA target sequence for Tgfbi (NM_009369.1,723-741).
cggcgtggtgcatctcatt

SEQ ID NO: 684058 - DNA, 19 bp, Mus musculus
  siRNA target sequence for Tgfbi (NM_009369.1,725-743).
gcgtggtgcatctcattga

SEQ ID NO: 684059 - DNA, 19 bp, Mus musculus
  siRNA target sequence for Tgfbi (NM_009369.1,825-843).
ggctgcatcaggactcaat

SEQ ID NO: 684060 - DNA, 19 bp, Mus musculus
  siRNA target sequence for Tgfbi (NM_009369.1,826-844).
gctgcatcaggactcaata

SEQ ID NO: 684061 - DNA, 19 bp, Mus musculus
  siRNA target sequence for Tgfbi (NM_009369.1,950-968).
cactgagagacctgctaaa

SEQ ID NO: 684062 - DNA, 19 bp, Mus musculus
  siRNA target sequence for Tgfbi (NM_009369.1,993-1011).
gtgtgctgaggccattgta

SEQ ID NO: 684063 - DNA, 19 bp, Mus musculus
  siRNA target sequence for Tgfbi (NM_009369.1,1124-1142).
ccaacggtgtcattcattt

SEQ ID NO: 684064 - DNA, 19 bp, Mus musculus
  siRNA target sequence for Tgfbi (NM_009369.1,1152-1170).
gctgcttatcccagattca

SEQ ID NO: 684065 - DNA, 19 bp, Mus musculus
  siRNA target sequence for Tgfbi (NM_009369.1,1327-1345).
gacgcccagatgaagactt

SEQ ID NO: 684066 - DNA, 19 bp, Mus musculus
  siRNA target sequence for Tgfbi (NM_009369.1,1415-1433).
cgctgggtggcaaaaagct

SEQ ID NO: 684067 - DNA, 19 bp, Mus musculus
  siRNA target sequence for Tgfbi (NM_009369.1,1425-1443).
caaaaagctgcgagtcttt

SEQ ID NO: 684068 - DNA, 19 bp, Mus musculus
  siRNA target sequence for Tgfbi (NM_009369.1,1434-1452).
gcgagtctttgtttatcga

SEQ ID NO: 684069 - DNA, 19 bp, Mus musculus
  siRNA target sequence for Tgfbi (NM_009369.1,1438-1456).
gtctttgtttatcgaaata

SEQ ID NO: 684070 - DNA, 19 bp, Mus musculus
  siRNA target sequence for Tgfbi (NM_009369.1,1543-1561).
cccccaatggggacagtta

SEQ ID NO: 684071 - DNA, 19 bp, Mus musculus
  siRNA target sequence for Tgfbi (NM_009369.1,1570-1588).
ctgaagggagacaatcgtt

SEQ ID NO: 684072 - DNA, 19 bp, Mus musculus
  siRNA target sequence for Tgfbi (NM_009369.1,1572-1590).
gaagggagacaatcgtttt

SEQ ID NO: 684073 - DNA, 19 bp, Mus musculus
  siRNA target sequence for Tgfbi (NM_009369.1,1576-1594).
ggagacaatcgttttagca

SEQ ID NO: 684074 - DNA, 19 bp, Mus musculus
  siRNA target sequence for Tgfbi (NM_009369.1,1577-1595).
gagacaatcgttttagcat

SEQ ID NO: 684075 - DNA, 19 bp, Mus musculus
  siRNA target sequence for Tgfbi (NM_009369.1,1842-1860).
cagctcgaaaaacaatgta

SEQ ID NO: 684076 - DNA, 19 bp, Mus musculus
  siRNA target sequence for Tgfbi (NM_009369.1,1844-1862).
gctcgaaaaacaatgtagt

SEQ ID NO: 684077 - DNA, 19 bp, Mus musculus
  siRNA target sequence for Tgfbi (NM_009369.1,1854-1872).
caatgtagtgagtgtcaat

SEQ ID NO: 684078 - DNA, 19 bp, Mus musculus
  siRNA target sequence for Tgfbi (NM_009369.1,1984-2002).
gcagactctgcccttgaaa

SEQ ID NO: 684079 - DNA, 19 bp, Mus musculus
  siRNA target sequence for Tgfbi (NM_009369.1,2011-2029).
caggcgtcagcgtattcca

SEQ ID NO: 684080 - DNA, 19 bp, Mus musculus
  siRNA target sequence for Tgfbi (NM_009369.1,2049-2067).
gcgacttgcccctgtctat

SEQ ID NO: 684081 - DNA, 19 bp, Mus musculus
  siRNA target sequence for Zan (NM_011741.1,3990-4008).
cagtgtgagccctatggta

SEQ ID NO: 684082 - DNA, 19 bp, Mus musculus
  siRNA target sequence for Zan (NM_011741.1,3992-4010).
gtgtgagccctatggtaaa

SEQ ID NO: 684083 - DNA, 19 bp, Mus musculus
  siRNA target sequence for Zan (NM_011741.1,4078-4096).
ggacatgtacctacatctt

SEQ ID NO: 684084 - DNA, 19 bp, Mus musculus
  siRNA target sequence for Zan (NM_011741.1,4122-4140).
gaccacttctttaggataa

SEQ ID NO: 684085 - DNA, 19 bp, Mus musculus
  siRNA target sequence for Zan (NM_011741.1,4207-4225).
cagagactaccgttaccat

SEQ ID NO: 684086 - DNA, 19 bp, Mus musculus
  siRNA target sequence for Zan (NM_011741.1,4265-4283).
caccctcccagccatactt

SEQ ID NO: 684087 - DNA, 19 bp, Mus musculus
  siRNA target sequence for Zan (NM_011741.1,4303-4321).
gtctgagtgggagatttgt

SEQ ID NO: 684088 - DNA, 19 bp, Mus musculus
  siRNA target sequence for Zan (NM_011741.1,4326-4344).
ctgaggacaacatttggtt

SEQ ID NO: 684089 - DNA, 19 bp, Mus musculus
  siRNA target sequence for Zan (NM_011741.1,4363-4381).
gtgaccagcagctttttgt

SEQ ID NO: 684090 - DNA, 19 bp, Mus musculus
  siRNA target sequence for Zan (NM_011741.1,4565-4583).
gaagaatcccccatcttgt

SEQ ID NO: 684091 - DNA, 19 bp, Mus musculus
  siRNA target sequence for Zan (NM_011741.1,4607-4625).
gtcgggacccaagttatgt

SEQ ID NO: 684092 - DNA, 19 bp, Mus musculus
  siRNA target sequence for Zan (NM_011741.1,4879-4897).
cggaaacctgccatcctat

SEQ ID NO: 684093 - DNA, 19 bp, Mus musculus
  siRNA target sequence for Zan (NM_011741.1,4880-4898).
ggaaacctgccatcctata

SEQ ID NO: 684094 - DNA, 19 bp, Mus musculus
  siRNA target sequence for Zan (NM_011741.1,5463-5481).
ggacgggtgaccattaggt

SEQ ID NO: 684095 - DNA, 19 bp, Mus musculus
  siRNA target sequence for Zan (NM_011741.1,5464-5482).
gacgggtgaccattaggtt

SEQ ID NO: 684096 - DNA, 19 bp, Mus musculus
  siRNA target sequence for Zan (NM_011741.1,5498-5516).
cctgctctacacgaacttt

SEQ ID NO: 684097 - DNA, 19 bp, Mus musculus
  siRNA target sequence for Zan (NM_011741.1,5519-5537).
gcttcaagttcgatacgat

SEQ ID NO: 684098 - DNA, 19 bp, Mus musculus
  siRNA target sequence for Zan (NM_011741.1,5609-5627).
caacaataacagtatggat

SEQ ID NO: 684099 - DNA, 19 bp, Mus musculus
  siRNA target sequence for Zan (NM_011741.1,5766-5784).
gatgtctggactaagaaat

SEQ ID NO: 684100 - DNA, 19 bp, Mus musculus
  siRNA target sequence for Zan (NM_011741.1,5805-5823).
cttgggcctttctccaatt

SEQ ID NO: 684101 - DNA, 19 bp, Mus musculus
  siRNA target sequence for Zan (NM_011741.1,5882-5900).
gaccaacggagacaactta

SEQ ID NO: 684102 - DNA, 19 bp, Mus musculus
  siRNA target sequence for Zan (NM_011741.1,6365-6383).
ccagatcgtgagctttgat

SEQ ID NO: 684103 - DNA, 19 bp, Mus musculus
  siRNA target sequence for Zan (NM_011741.1,6368-6386).
gatcgtgagctttgatgat

SEQ ID NO: 684104 - DNA, 19 bp, Mus musculus
  siRNA target sequence for Zan (NM_011741.1,6396-6414).
cctatccaagacacatgta

SEQ ID NO: 684105 - DNA, 19 bp, Mus musculus
  siRNA target sequence for Zan (NM_011741.1,6415-6433).
cttacatcttggtcaaagt

SEQ ID NO: 684106 - DNA, 19 bp, Mus musculus
  siRNA target sequence for Zan (NM_011741.1,6448-6466).
cgaacatgcctttcttcat

SEQ ID NO: 684107 - DNA, 19 bp, Mus musculus
  siRNA target sequence for Zan (NM_011741.1,6570-6588).
gaccatttagtcctcataa

SEQ ID NO: 684108 - DNA, 19 bp, Mus musculus
  siRNA target sequence for Zan (NM_011741.1,6579-6597).
gtcctcataagcttgatca

SEQ ID NO: 684109 - DNA, 19 bp, Mus musculus
  siRNA target sequence for Zan (NM_011741.1,6581-6599).
cctcataagcttgatcaat

SEQ ID NO: 684110 - DNA, 19 bp, Mus musculus
  siRNA target sequence for Zan (NM_011741.1,6589-6607).
gcttgatcaatgactcaat

SEQ ID NO: 684111 - DNA, 19 bp, Mus musculus
  siRNA target sequence for Zan (NM_011741.1,6701-6719).
caagtttgagagcaataat

SEQ ID NO: 684112 - DNA, 19 bp, Mus musculus
  siRNA target sequence for Zan (NM_011741.1,6710-6728).
gagcaataatttcttagat

SEQ ID NO: 684113 - DNA, 19 bp, Mus musculus
  siRNA target sequence for Zan (NM_011741.1,6763-6781).
gcggtgtgtgtggcaattt

SEQ ID NO: 684114 - DNA, 19 bp, Mus musculus
  siRNA target sequence for Zan (NM_011741.1,7194-7212).
ccagctcacagtcactata

SEQ ID NO: 684115 - DNA, 19 bp, Mus musculus
  siRNA target sequence for Zan (NM_011741.1,7197-7215).
gctcacagtcactatacaa

SEQ ID NO: 684116 - DNA, 19 bp, Mus musculus
  siRNA target sequence for Zan (NM_011741.1,7198-7216).
ctcacagtcactatacaaa

SEQ ID NO: 684117 - DNA, 19 bp, Mus musculus
  siRNA target sequence for Zan (NM_011741.1,7818-7836).
gtcattcgatgccagaatt

SEQ ID NO: 684118 - DNA, 19 bp, Mus musculus
  siRNA target sequence for Zan (NM_011741.1,8390-8408).
cgtttgtgaccctgactat

SEQ ID NO: 684119 - DNA, 19 bp, Mus musculus
  siRNA target sequence for Zan (NM_011741.1,8603-8621).
cagcaactgcaccagtatt

SEQ ID NO: 684120 - DNA, 19 bp, Mus musculus
  siRNA target sequence for Zan (NM_011741.1,8606-8624).
caactgcaccagtattcct

SEQ ID NO: 684121 - DNA, 19 bp, Mus musculus
  siRNA target sequence for Zan (NM_011741.1,9484-9502).
gctacgtgttgcataatga

SEQ ID NO: 684122 - DNA, 19 bp, Mus musculus
  siRNA target sequence for Zan (NM_011741.1,9503-9521).
caagtgtatactcagaaat

SEQ ID NO: 684123 - DNA, 19 bp, Mus musculus
  siRNA target sequence for Zan (NM_011741.1,9843-9861).
ggctacctgatgcataaaa

SEQ ID NO: 684124 - DNA, 19 bp, Mus musculus
  siRNA target sequence for Zan (NM_011741.1,9978-9996).
gccatccactgcagaaatt

SEQ ID NO: 684125 - DNA, 19 bp, Mus musculus
  siRNA target sequence for Zan (NM_011741.1,9979-9997).
ccatccactgcagaaattt

SEQ ID NO: 684126 - DNA, 19 bp, Mus musculus
  siRNA target sequence for Zan (NM_011741.1,10032-10050).
gataatggcagctctaact

SEQ ID NO: 684127 - DNA, 19 bp, Mus musculus
  siRNA target sequence for Zan (NM_011741.1,10052-10070).
caccgaaatcactctacaa

SEQ ID NO: 684128 - DNA, 19 bp, Mus musculus
  siRNA target sequence for Zan (NM_011741.1,10074-10092).
ccaaccaacagccaattca

SEQ ID NO: 684129 - DNA, 19 bp, Mus musculus
  siRNA target sequence for Zan (NM_011741.1,10914-10932).
ggctacgtgctgagtaaca

SEQ ID NO: 684130 - DNA, 19 bp, Mus musculus
  siRNA target sequence for Zan (NM_011741.1,10915-10933).
gctacgtgctgagtaacaa

SEQ ID NO: 684131 - DNA, 19 bp, Mus musculus
  siRNA target sequence for Zan (NM_011741.1,10981-10999).
cgctcatcccagaagacaa

SEQ ID NO: 684132 - DNA, 19 bp, Mus musculus
  siRNA target sequence for Zan (NM_011741.1,11645-11663).
ggataaagacaagtgtatt

SEQ ID NO: 684133 - DNA, 19 bp, Mus musculus
  siRNA target sequence for Zan (NM_011741.1,11760-11778).
gtggaagggaccattcagt

SEQ ID NO: 684134 - DNA, 19 bp, Mus musculus
  siRNA target sequence for Zan (NM_011741.1,11806-11824).
cgtactgcaaccacaacaa

SEQ ID NO: 684135 - DNA, 19 bp, Mus musculus
  siRNA target sequence for Zan (NM_011741.1,11807-11825).
gtactgcaaccacaacaat

SEQ ID NO: 684136 - DNA, 19 bp, Mus musculus
  siRNA target sequence for Zan (NM_011741.1,11976-11994).
caacctggctacttcttga

SEQ ID NO: 684137 - DNA, 19 bp, Mus musculus
  siRNA target sequence for Zan (NM_011741.1,11979-11997).
cctggctacttcttgaata

SEQ ID NO: 684138 - DNA, 19 bp, Mus musculus
  siRNA target sequence for Zan (NM_011741.1,11980-11998).
ctggctacttcttgaataa

SEQ ID NO: 684139 - DNA, 19 bp, Mus musculus
  siRNA target sequence for Zan (NM_011741.1,12184-12202).
gcaactgcaccaaaatcca

SEQ ID NO: 684140 - DNA, 19 bp, Mus musculus
  siRNA target sequence for Zan (NM_011741.1,12325-12343).
gcagctgcgtggaatccaa

SEQ ID NO: 684141 - DNA, 19 bp, Mus musculus
  siRNA target sequence for Zan (NM_011741.1,12331-12349).
gcgtggaatccaacttcaa

SEQ ID NO: 684142 - DNA, 19 bp, Mus musculus
  siRNA target sequence for Zan (NM_011741.1,12387-12405).
cccggctacttgttaaata

SEQ ID NO: 684143 - DNA, 19 bp, Mus musculus
  siRNA target sequence for Zan (NM_011741.1,12388-12406).
ccggctacttgttaaataa

SEQ ID NO: 684144 - DNA, 19 bp, Mus musculus
  siRNA target sequence for Zan (NM_011741.1,12391-12409).
gctacttgttaaataacga

SEQ ID NO: 684145 - DNA, 19 bp, Mus musculus
  siRNA target sequence for Zan (NM_011741.1,12392-12410).
ctacttgttaaataacgat

SEQ ID NO: 684146 - DNA, 19 bp, Mus musculus
  siRNA target sequence for Zan (NM_011741.1,12398-12416).
gttaaataacgataagtgt

SEQ ID NO: 684147 - DNA, 19 bp, Mus musculus
  siRNA target sequence for Zan (NM_011741.1,12751-12769).
gctatgtggtgcataatca

SEQ ID NO: 684148 - DNA, 19 bp, Mus musculus
  siRNA target sequence for Zan (NM_011741.1,13287-13305).
gatggaggcagtaactgta

SEQ ID NO: 684149 - DNA, 19 bp, Mus musculus
  siRNA target sequence for Zan (NM_011741.1,13293-13311).
ggcagtaactgtaccaaaa

SEQ ID NO: 684150 - DNA, 19 bp, Mus musculus
  siRNA target sequence for Zan (NM_011741.1,13372-13390).
cctgctccaacgtgaatga

SEQ ID NO: 684151 - DNA, 19 bp, Mus musculus
  siRNA target sequence for Zan (NM_011741.1,13447-13465).
gccactcgggctttgtgtt

SEQ ID NO: 684152 - DNA, 19 bp, Mus musculus
  siRNA target sequence for Zan (NM_011741.1,13453-13471).
cgggctttgtgttcagtaa

SEQ ID NO: 684153 - DNA, 19 bp, Mus musculus
  siRNA target sequence for Zan (NM_011741.1,13533-13551).
gcaggtaagaactggatta

SEQ ID NO: 684154 - DNA, 19 bp, Mus musculus
  siRNA target sequence for Zan (NM_011741.1,13652-13670).
caacagtaactgtgttgaa

SEQ ID NO: 684155 - DNA, 19 bp, Mus musculus
  siRNA target sequence for Zan (NM_011741.1,13886-13904).
catcccggaaagtaagaca

SEQ ID NO: 684156 - DNA, 19 bp, Mus musculus
  siRNA target sequence for Zan (NM_011741.1,13945-13963).
gagggactgttcaatgtca

SEQ ID NO: 684157 - DNA, 19 bp, Mus musculus
  siRNA target sequence for Zan (NM_011741.1,13956-13974).
caatgtcacgacttcagtt

SEQ ID NO: 684158 - DNA, 19 bp, Mus musculus
  siRNA target sequence for Zan (NM_011741.1,13988-14006).
ccgttgcctggacaataat

SEQ ID NO: 684159 - DNA, 19 bp, Mus musculus
  siRNA target sequence for Zan (NM_011741.1,13990-14008).
gttgcctggacaataatga

SEQ ID NO: 684160 - DNA, 19 bp, Mus musculus
  siRNA target sequence for Zan (NM_011741.1,14025-14043).
gtcacctatgctctgaaat

SEQ ID NO: 684161 - DNA, 19 bp, Mus musculus
  siRNA target sequence for Zan (NM_011741.1,14049-14067).
gcccacagcctctatacca

SEQ ID NO: 684162 - DNA, 19 bp, Mus musculus
  siRNA target sequence for Zan (NM_011741.1,14050-14068).
cccacagcctctataccaa

SEQ ID NO: 684163 - DNA, 19 bp, Mus musculus
  siRNA target sequence for Zan (NM_011741.1,14175-14193).
ggctatgtgttgcataaaa

SEQ ID NO: 684164 - DNA, 19 bp, Mus musculus
  siRNA target sequence for Zan (NM_011741.1,14277-14295).
gggtgttccaagatctgta

SEQ ID NO: 684165 - DNA, 19 bp, Mus musculus
  siRNA target sequence for Zan (NM_011741.1,14553-14571).
gacacgtgtgtgcacaaaa

SEQ ID NO: 684166 - DNA, 19 bp, Mus musculus
  siRNA target sequence for Zan (NM_011741.1,14557-14575).
cgtgtgtgcacaaaaacca

SEQ ID NO: 684167 - DNA, 19 bp, Mus musculus
  siRNA target sequence for Zan (NM_011741.1,14589-14607).
gatatcaggggcaacatca

SEQ ID NO: 684168 - DNA, 19 bp, Mus musculus
  siRNA target sequence for Zan (NM_011741.1,14786-14804).
ctattacctcacgtttgat

SEQ ID NO: 684169 - DNA, 19 bp, Mus musculus
  siRNA target sequence for Zan (NM_011741.1,14823-14841).
ctgggtcgtatgaactact

SEQ ID NO: 684170 - DNA, 19 bp, Mus musculus
  siRNA target sequence for Zan (NM_011741.1,14825-14843).
gggtcgtatgaactactat

SEQ ID NO: 684171 - DNA, 19 bp, Mus musculus
  siRNA target sequence for Zan (NM_011741.1,14827-14845).
gtcgtatgaactactatct

SEQ ID NO: 684172 - DNA, 19 bp, Mus musculus
  siRNA target sequence for Zan (NM_011741.1,14829-14847).
cgtatgaactactatctca

SEQ ID NO: 684173 - DNA, 19 bp, Mus musculus
  siRNA target sequence for Zan (NM_011741.1,14830-14848).
gtatgaactactatctcat

SEQ ID NO: 684174 - DNA, 19 bp, Mus musculus
  siRNA target sequence for Zan (NM_011741.1,14894-14912).
ggagggacgcaacaaaata

SEQ ID NO: 684175 - DNA, 19 bp, Mus musculus
  siRNA target sequence for Zan (NM_011741.1,14950-14968).
ccatcgtctatggctataa

SEQ ID NO: 684176 - DNA, 19 bp, Mus musculus
  siRNA target sequence for Zan (NM_011741.1,14994-15012).
gttttggtcaacgatgaaa

SEQ ID NO: 684177 - DNA, 19 bp, Mus musculus
  siRNA target sequence for Zan (NM_011741.1,15018-15036).
gcggtcccctacaatccaa

SEQ ID NO: 684178 - DNA, 19 bp, Mus musculus
  siRNA target sequence for Zan (NM_011741.1,15019-15037).
cggtcccctacaatccaaa

SEQ ID NO: 684179 - DNA, 19 bp, Mus musculus
  siRNA target sequence for Zan (NM_011741.1,15078-15096).
ctcgtcacagacttcgaaa

SEQ ID NO: 684180 - DNA, 19 bp, Mus musculus
  siRNA target sequence for Zan (NM_011741.1,15092-15110).
cgaaatggtgctggatttt

SEQ ID NO: 684181 - DNA, 19 bp, Mus musculus
  siRNA target sequence for Zan (NM_011741.1,15190-15208).
gggaccagtccaatgaact

SEQ ID NO: 684182 - DNA, 19 bp, Mus musculus
  siRNA target sequence for Zan (NM_011741.1,15232-15250).
cctcgaatgtccatgtctt

SEQ ID NO: 684183 - DNA, 19 bp, Mus musculus
  siRNA target sequence for Zan (NM_011741.1,15233-15251).
ctcgaatgtccatgtcttt

SEQ ID NO: 684184 - DNA, 19 bp, Mus musculus
  siRNA target sequence for Zan (NM_011741.1,15243-15261).
catgtctttggcaacagtt

SEQ ID NO: 684185 - DNA, 19 bp, Mus musculus
  siRNA target sequence for Zan (NM_011741.1,15339-15357).
gaccttctccaatcagaat

SEQ ID NO: 684186 - DNA, 19 bp, Mus musculus
  siRNA target sequence for Zan (NM_011741.1,15433-15451).
ctgcatgtcaccagatcat

SEQ ID NO: 684187 - DNA, 19 bp, Mus musculus
  siRNA target sequence for Zan (NM_011741.1,15471-15489).
cagcgctgtatgttggata

SEQ ID NO: 684188 - DNA, 19 bp, Mus musculus
  siRNA target sequence for Zan (NM_011741.1,15617-15635).
gacatgtcctgccaatact

SEQ ID NO: 684189 - DNA, 19 bp, Mus musculus
  siRNA target sequence for Zan (NM_011741.1,15619-15637).
catgtcctgccaatactgt

SEQ ID NO: 684190 - DNA, 19 bp, Mus musculus
  siRNA target sequence for Zan (NM_011741.1,15665-15683).
ggcgtcctgtgccaaattt

SEQ ID NO: 684191 - DNA, 19 bp, Mus musculus
  siRNA target sequence for Zan (NM_011741.1,15667-15685).
cgtcctgtgccaaatttgt

SEQ ID NO: 684192 - DNA, 19 bp, Mus musculus
  siRNA target sequence for Zan (NM_011741.1,15788-15806).
caccgccgatggcatctat

SEQ ID NO: 684193 - DNA, 19 bp, Mus musculus
  siRNA target sequence for Zan (NM_011741.1,15790-15808).
ccgccgatggcatctatta

SEQ ID NO: 684194 - DNA, 19 bp, Mus musculus
  siRNA target sequence for Zan (NM_011741.1,15792-15810).
gccgatggcatctattaca

SEQ ID NO: 684195 - DNA, 19 bp, Mus musculus
  siRNA target sequence for Zan (NM_011741.1,16025-16043).
ctgtgacttcggttatgga

SEQ ID NO: 684196 - DNA, 19 bp, Mus musculus
  siRNA target sequence for Zan (NM_011741.1,16136-16154).
ggtgttagtccctgtctta

SEQ ID NO: 684197 - DNA, 19 bp, Mus musculus
  siRNA target sequence for Zan (NM_011741.1,16151-16169).
cttactgcccagagtgtat

SEQ ID NO: 684198 - DNA, 19 bp, Mus musculus
  siRNA target sequence for Zan (NM_011741.1,16158-16176).
cccagagtgtatgtttaca

SEQ ID NO: 684199 - DNA, 19 bp, Mus musculus
  siRNA target sequence for Zyx (NM_011777.1,308-326).
cgatgatcgaggaaccatt

SEQ ID NO: 684200 - DNA, 19 bp, Mus musculus
  siRNA target sequence for Zyx (NM_011777.1,419-437).
cgcagcccagggagaaagt

SEQ ID NO: 684201 - DNA, 19 bp, Mus musculus
  siRNA target sequence for Zyx (NM_011777.1,429-447).
ggagaaagtgtgcagtatt

SEQ ID NO: 684202 - DNA, 19 bp, Mus musculus
  siRNA target sequence for Zyx (NM_011777.1,492-510).
caagaacgatcccttcaaa

SEQ ID NO: 684203 - DNA, 19 bp, Mus musculus
  siRNA target sequence for Zyx (NM_011777.1,785-803).
ctccagtggctcctaaatt

SEQ ID NO: 684204 - DNA, 19 bp, Mus musculus
  siRNA target sequence for Zyx (NM_011777.1,787-805).
ccagtggctcctaaattta

SEQ ID NO: 684205 - DNA, 19 bp, Mus musculus
  siRNA target sequence for Zyx (NM_011777.1,808-826).
cccgtggtttccaagttca

SEQ ID NO: 684206 - DNA, 19 bp, Mus musculus
  siRNA target sequence for Zyx (NM_011777.1,850-868).
gggccacagcccaatcaaa

SEQ ID NO: 684207 - DNA, 19 bp, Mus musculus
  siRNA target sequence for Zyx (NM_011777.1,948-966).
ggagaagcccctagttcaa

SEQ ID NO: 684208 - DNA, 19 bp, Mus musculus
  siRNA target sequence for Zyx (NM_011777.1,1134-1152).
gtcctgtggcaaatgcaat

SEQ ID NO: 684209 - DNA, 19 bp, Mus musculus
  siRNA target sequence for Zyx (NM_011777.1,1204-1222).
cacatcacctgcttcactt

SEQ ID NO: 684210 - DNA, 19 bp, Mus musculus
  siRNA target sequence for Zyx (NM_011777.1,1267-1285).
ctggagggagcaccatatt

SEQ ID NO: 684211 - DNA, 19 bp, Mus musculus
  siRNA target sequence for Zyx (NM_011777.1,1269-1287).
ggagggagcaccatattgt

SEQ ID NO: 684212 - DNA, 19 bp, Mus musculus
  siRNA target sequence for Zyx (NM_011777.1,1553-1571).
gagtagtggcgctggataa

SEQ ID NO: 684213 - DNA, 19 bp, Mus musculus
  siRNA target sequence for Zyx (NM_011777.1,1562-1580).
cgctggataagaactttca

SEQ ID NO: 684214 - DNA, 19 bp, Mus musculus
  siRNA target sequence for BB075781 (NM_177639.2,822-840).
gcggaccatccctactaca

SEQ ID NO: 684215 - DNA, 19 bp, Mus musculus
  siRNA target sequence for BB075781 (NM_177639.2,836-854).
ctacacccagcggaattct

SEQ ID NO: 684216 - DNA, 19 bp, Mus musculus
  siRNA target sequence for BB075781 (NM_177639.2,1131-1149).
gtccagaagctctttacta

SEQ ID NO: 684217 - DNA, 19 bp, Mus musculus
  siRNA target sequence for BB075781 (NM_177639.2,1160-1178).
cctggaggggccatccaaa

SEQ ID NO: 684218 - DNA, 19 bp, Mus musculus
  siRNA target sequence for BB075781 (NM_177639.2,1207-1225).
ctgacgagtcgcaaactct

SEQ ID NO: 684219 - DNA, 19 bp, Mus musculus
  siRNA target sequence for BB075781 (NM_177639.2,1214-1232).
gtcgcaaactctgagatat

SEQ ID NO: 684220 - DNA, 19 bp, Mus musculus
  siRNA target sequence for BB075781 (NM_177639.2,1313-1331).
cagttggtggagttcagat

SEQ ID NO: 684221 - DNA, 19 bp, Mus musculus
  siRNA target sequence for BB075781 (NM_177639.2,1405-1423).
gctccgcttcgcagtactt

SEQ ID NO: 684222 - DNA, 19 bp, Mus musculus
  siRNA target sequence for BB075781 (NM_177639.2,1408-1426).
ccgcttcgcagtacttcat

SEQ ID NO: 684223 - DNA, 19 bp, Mus musculus
  siRNA target sequence for BB075781 (NM_177639.2,1463-1481).
ggcttcccggagtaacaat

SEQ ID NO: 684224 - DNA, 19 bp, Mus musculus
  siRNA target sequence for BB075781 (NM_177639.2,1471-1489).
ggagtaacaatgacatcaa

SEQ ID NO: 684225 - DNA, 19 bp, Mus musculus
  siRNA target sequence for BB075781 (NM_177639.2,1579-1597).
cccgagaggtttatcagaa

SEQ ID NO: 684226 - DNA, 19 bp, Mus musculus
  siRNA target sequence for BB075781 (NM_177639.2,1580-1598).
ccgagaggtttatcagaaa

SEQ ID NO: 684227 - DNA, 19 bp, Mus musculus
  siRNA target sequence for BB075781 (NM_177639.2,1633-1651).
ccgaagcttgtcaacaaga

SEQ ID NO: 684228 - DNA, 19 bp, Mus musculus
  siRNA target sequence for BB075781 (NM_177639.2,1652-1670).
gcggtcctgccagtactta

SEQ ID NO: 684229 - DNA, 19 bp, Mus musculus
  siRNA target sequence for BB075781 (NM_177639.2,1855-1873).
cgcagccgtcccttacaga

SEQ ID NO: 684230 - DNA, 19 bp, Mus musculus
  siRNA target sequence for Fhl1 (NM_010211.1,172-190).
cccttgcaggggaagaagt

SEQ ID NO: 684231 - DNA, 19 bp, Mus musculus
  siRNA target sequence for Fhl1 (NM_010211.1,173-191).
ccttgcaggggaagaagta

SEQ ID NO: 684232 - DNA, 19 bp, Mus musculus
  siRNA target sequence for Fhl1 (NM_010211.1,286-304).
gccaaggaggtgcattata

SEQ ID NO: 684233 - DNA, 19 bp, Mus musculus
  siRNA target sequence for Fhl1 (NM_010211.1,489-507).
gggcaccgtctggcataaa

SEQ ID NO: 684234 - DNA, 19 bp, Mus musculus
  siRNA target sequence for Fhl1 (NM_010211.1,491-509).
gcaccgtctggcataaaga

SEQ ID NO: 684235 - DNA, 19 bp, Mus musculus
  siRNA target sequence for Fhl1 (NM_010211.1,524-542).
gcaactgcaagcaagtcat

SEQ ID NO: 684236 - DNA, 19 bp, Mus musculus
  siRNA target sequence for Mlf1 (NM_010801.1,96-114).
ccccttcttcgctgattct

SEQ ID NO: 684237 - DNA, 19 bp, Mus musculus
  siRNA target sequence for Mlf1 (NM_010801.1,97-115).
cccttcttcgctgattctt

SEQ ID NO: 684238 - DNA, 19 bp, Mus musculus
  siRNA target sequence for Mlf1 (NM_010801.1,118-136).
cttgcacaccgagaaagta

SEQ ID NO: 684239 - DNA, 19 bp, Mus musculus
  siRNA target sequence for Mlf1 (NM_010801.1,130-148).
gaaagtatgcgcaacatga

SEQ ID NO: 684240 - DNA, 19 bp, Mus musculus
  siRNA target sequence for Mlf1 (NM_010801.1,239-257).
gcgaagattccttaactca

SEQ ID NO: 684241 - DNA, 19 bp, Mus musculus
  siRNA target sequence for Mlf1 (NM_010801.1,240-258).
cgaagattccttaactcat

SEQ ID NO: 684242 - DNA, 19 bp, Mus musculus
  siRNA target sequence for Mlf1 (NM_010801.1,262-280).
gatgtcaacccttttcaga

SEQ ID NO: 684243 - DNA, 19 bp, Mus musculus
  siRNA target sequence for Mlf1 (NM_010801.1,270-288).
cccttttcagacaatggat

SEQ ID NO: 684244 - DNA, 19 bp, Mus musculus
  siRNA target sequence for Mlf1 (NM_010801.1,311-329).
gtggtatacaggagttaca

SEQ ID NO: 684245 - DNA, 19 bp, Mus musculus
  siRNA target sequence for Mlf1 (NM_010801.1,313-331).
ggtatacaggagttacaaa

SEQ ID NO: 684246 - DNA, 19 bp, Mus musculus
  siRNA target sequence for Mlf1 (NM_010801.1,429-447).
gttccaggcctcaactcaa

SEQ ID NO: 684247 - DNA, 19 bp, Mus musculus
  siRNA target sequence for Mlf1 (NM_010801.1,456-474).
ggctccaggaggagtaaaa

SEQ ID NO: 684248 - DNA, 19 bp, Mus musculus
  siRNA target sequence for Mlf1 (NM_010801.1,544-562).
gaccgaggtcatgtcatta

SEQ ID NO: 684249 - DNA, 19 bp, Mus musculus
  siRNA target sequence for Mlf1 (NM_010801.1,547-565).
cgaggtcatgtcattagga

SEQ ID NO: 684250 - DNA, 19 bp, Mus musculus
  siRNA target sequence for Mlf1 (NM_010801.1,548-566).
gaggtcatgtcattaggaa

SEQ ID NO: 684251 - DNA, 19 bp, Mus musculus
  siRNA target sequence for Mlf1 (NM_010801.1,553-571).
catgtcattaggaagtcaa

SEQ ID NO: 684252 - DNA, 19 bp, Mus musculus
  siRNA target sequence for Mlf1 (NM_010801.1,556-574).
gtcattaggaagtcaaagt

SEQ ID NO: 684253 - DNA, 19 bp, Mus musculus
  siRNA target sequence for Mlf1 (NM_010801.1,600-618).
caaccaagagttcatcaat

SEQ ID NO: 684254 - DNA, 19 bp, Mus musculus
  siRNA target sequence for Mlf1 (NM_010801.1,629-647).
gtgacgctcatgcttttga

SEQ ID NO: 684255 - DNA, 19 bp, Mus musculus
  siRNA target sequence for Mlf1 (NM_010801.1,633-651).
cgctcatgcttttgatgat

SEQ ID NO: 684256 - DNA, 19 bp, Mus musculus
  siRNA target sequence for Mlf1 (NM_010801.1,734-752).
cagggtcacgggaactcaa

SEQ ID NO: 684257 - DNA, 19 bp, Mus musculus
  siRNA target sequence for Mlf1 (NM_010801.1,736-754).
gggtcacgggaactcaaaa

SEQ ID NO: 684258 - DNA, 19 bp, Mus musculus
  siRNA target sequence for Mlf1 (NM_010801.1,760-778).
gagaaaattcatcgaaatt

SEQ ID NO: 684259 - DNA, 19 bp, Mus musculus
  siRNA target sequence for Mlf1 (NM_010801.1,808-826).
gtttttgtggacaaactca

SEQ ID NO: 684260 - DNA, 19 bp, Mus musculus
  siRNA target sequence for Mlf1 (NM_010801.1,816-834).
ggacaaactcaatgtgaaa

SEQ ID NO: 684261 - DNA, 19 bp, Mus musculus
  siRNA target sequence for Myd116 (NM_008654.1,266-284).
ggagggacgcccacaactt

SEQ ID NO: 684262 - DNA, 19 bp, Mus musculus
  siRNA target sequence for Myd116 (NM_008654.1,269-287).
gggacgcccacaacttcta

SEQ ID NO: 684263 - DNA, 19 bp, Mus musculus
  siRNA target sequence for Myd116 (NM_008654.1,270-288).
ggacgcccacaacttctat

SEQ ID NO: 684264 - DNA, 19 bp, Mus musculus
  siRNA target sequence for Myd116 (NM_008654.1,556-574).
gttgatgagtacaatgcaa

SEQ ID NO: 684265 - DNA, 19 bp, Mus musculus
  siRNA target sequence for Myd116 (NM_008654.1,735-753).
gggtggtccagctgagaat

SEQ ID NO: 684266 - DNA, 19 bp, Mus musculus
  siRNA target sequence for Myd116 (NM_008654.1,737-755).
gtggtccagctgagaatga

SEQ ID NO: 684267 - DNA, 19 bp, Mus musculus
  siRNA target sequence for Myd116 (NM_008654.1,764-782).
gagaaacagtgaagactta

SEQ ID NO: 684268 - DNA, 19 bp, Mus musculus
  siRNA target sequence for Myd116 (NM_008654.1,1046-1064).
gacctgagacaacttttgt

SEQ ID NO: 684269 - DNA, 19 bp, Mus musculus
  siRNA target sequence for Myd116 (NM_008654.1,1618-1636).
gccccaggtgactcagaaa

SEQ ID NO: 684270 - DNA, 19 bp, Mus musculus
  siRNA target sequence for Myd116 (NM_008654.1,1806-1824).
gcggctcagattgttcaaa

SEQ ID NO: 684271 - DNA, 19 bp, Mus musculus
  siRNA target sequence for Myd116 (NM_008654.1,1845-1863).
ccccgagattcctctaaaa

SEQ ID NO: 684272 - DNA, 19 bp, Mus musculus
  siRNA target sequence for Myd116 (NM_008654.1,1848-1866).
cgagattcctctaaaagct

SEQ ID NO: 684273 - DNA, 19 bp, Mus musculus
  siRNA target sequence for Myd116 (NM_008654.1,2050-2068).
gcatgggcacgccttagaa

SEQ ID NO: 684274 - DNA, 19 bp, Mus musculus
  siRNA target sequence for Myd116 (NM_008654.1,2051-2069).
catgggcacgccttagaaa

SEQ ID NO: 684275 - DNA, 19 bp, Mus musculus
  siRNA target sequence for Myd116 (NM_008654.1,2114-2132).
ctcccttgacccaagatgt

SEQ ID NO: 684276 - DNA, 19 bp, Mus musculus
  siRNA target sequence for Myd116 (NM_008654.1,2165-2183).
cttcgcccagcctgtactt

SEQ ID NO: 684277 - DNA, 19 bp, Mus musculus
  siRNA target sequence for Ndr2 (NM_013864.1,172-190).
cttatggctcggtcacttt

SEQ ID NO: 684278 - DNA, 19 bp, Mus musculus
  siRNA target sequence for Ndr2 (NM_013864.1,243-261).
gatgtaggcctcaactata

SEQ ID NO: 684279 - DNA, 19 bp, Mus musculus
  siRNA target sequence for Ndr2 (NM_013864.1,246-264).
gtaggcctcaactataagt

SEQ ID NO: 684280 - DNA, 19 bp, Mus musculus
  siRNA target sequence for Ndr2 (NM_013864.1,424-442).
gcatcctgcagtacctaaa

SEQ ID NO: 684281 - DNA, 19 bp, Mus musculus
  siRNA target sequence for Ndr2 (NM_013864.1,429-447).
ctgcagtacctaaatttct

SEQ ID NO: 684282 - DNA, 19 bp, Mus musculus
  siRNA target sequence for Ndr2 (NM_013864.1,431-449).
gcagtacctaaatttctct

SEQ ID NO: 684283 - DNA, 19 bp, Mus musculus
  siRNA target sequence for Ndr2 (NM_013864.1,432-450).
cagtacctaaatttctcta

SEQ ID NO: 684284 - DNA, 19 bp, Mus musculus
  siRNA target sequence for Ndr2 (NM_013864.1,474-492).
gccggagcctacattctgt

SEQ ID NO: 684285 - DNA, 19 bp, Mus musculus
  siRNA target sequence for Ndr2 (NM_013864.1,485-503).
cattctgtcgcgatatgct

SEQ ID NO: 684286 - DNA, 19 bp, Mus musculus
  siRNA target sequence for Ndr2 (NM_013864.1,509-527).
ccacccggacacagttgaa

SEQ ID NO: 684287 - DNA, 19 bp, Mus musculus
  siRNA target sequence for Ndr2 (NM_013864.1,575-593).
ctgggcagcccacaagtta

SEQ ID NO: 684288 - DNA, 19 bp, Mus musculus
  siRNA target sequence for Ndr2 (NM_013864.1,578-596).
ggcagcccacaagttaact

SEQ ID NO: 684289 - DNA, 19 bp, Mus musculus
  siRNA target sequence for Ndr2 (NM_013864.1,607-625).
cttccattccggacatgat

SEQ ID NO: 684290 - DNA, 19 bp, Mus musculus
  siRNA target sequence for Ndr2 (NM_013864.1,610-628).
ccattccggacatgattct

SEQ ID NO: 684291 - DNA, 19 bp, Mus musculus
  siRNA target sequence for Ndr2 (NM_013864.1,611-629).
cattccggacatgattctt

SEQ ID NO: 684292 - DNA, 19 bp, Mus musculus
  siRNA target sequence for Ndr2 (NM_013864.1,667-685).
ctgaattgatacaaaagta

SEQ ID NO: 684293 - DNA, 19 bp, Mus musculus
  siRNA target sequence for Ndr2 (NM_013864.1,754-772).
gccgagacctgaactttga

SEQ ID NO: 684294 - DNA, 19 bp, Mus musculus
  siRNA target sequence for Ndr2 (NM_013864.1,843-861).
gccgtggtggaatgtaact

SEQ ID NO: 684295 - DNA, 19 bp, Mus musculus
  siRNA target sequence for Ndr2 (NM_013864.1,845-863).
cgtggtggaatgtaactca

SEQ ID NO: 684296 - DNA, 19 bp, Mus musculus
  siRNA target sequence for Ndr2 (NM_013864.1,846-864).
gtggtggaatgtaactcaa

SEQ ID NO: 684297 - DNA, 19 bp, Mus musculus
  siRNA target sequence for Ndr4 (NM_145602.1,124-142).
catcgagacgccttatgga

SEQ ID NO: 684298 - DNA, 19 bp, Mus musculus
  siRNA target sequence for Ndr4 (NM_145602.1,488-506).
gaggggctggtgttgatga

SEQ ID NO: 684299 - DNA, 19 bp, Mus musculus
  siRNA target sequence for Ndr4 (NM_145602.1,716-734).
cgcagagaccttgatatta

SEQ ID NO: 684300 - DNA, 19 bp, Mus musculus
  siRNA target sequence for Ndr4 (NM_145602.1,784-802).
gctggtagtcggagataat

SEQ ID NO: 684301 - DNA, 19 bp, Mus musculus
  siRNA target sequence for Ndr4 (NM_145602.1,787-805).
ggtagtcggagataatgca

SEQ ID NO: 684302 - DNA, 19 bp, Mus musculus
  siRNA target sequence for Ndr4 (NM_145602.1,818-836).
ggggtggttgagtgtaact

SEQ ID NO: 684303 - DNA, 19 bp, Mus musculus
  siRNA target sequence for Ndr4 (NM_145602.1,855-873).
ctacgaccttcctgaagat

SEQ ID NO: 684304 - DNA, 19 bp, Mus musculus
  siRNA target sequence for Chrd (NM_009893.1,399-417).
gcaggagcgcagcaatcta

SEQ ID NO: 684305 - DNA, 19 bp, Mus musculus
  siRNA target sequence for Chrd (NM_009893.1,402-420).
ggagcgcagcaatctagat

SEQ ID NO: 684306 - DNA, 19 bp, Mus musculus
  siRNA target sequence for Chrd (NM_009893.1,575-593).
ctcgtgctcgagtctcttt

SEQ ID NO: 684307 - DNA, 19 bp, Mus musculus
  siRNA target sequence for Chrd (NM_009893.1,645-663).
cagcagggttcgtttcaca

SEQ ID NO: 684308 - DNA, 19 bp, Mus musculus
  siRNA target sequence for Chrd (NM_009893.1,938-956).
gtgacacagaagattcctt

SEQ ID NO: 684309 - DNA, 19 bp, Mus musculus
  siRNA target sequence for Chrd (NM_009893.1,1068-1086).
cgctcaggagccaggtttt

SEQ ID NO: 684310 - DNA, 19 bp, Mus musculus
  siRNA target sequence for Chrd (NM_009893.1,1103-1121).
gccttacagaccaagagat

SEQ ID NO: 684311 - DNA, 19 bp, Mus musculus
  siRNA target sequence for Chrd (NM_009893.1,1215-1233).
ctgtgatgtccttcaaagt

SEQ ID NO: 684312 - DNA, 19 bp, Mus musculus
  siRNA target sequence for Chrd (NM_009893.1,1282-1300).
gggtcagccagcttcatat

SEQ ID NO: 684313 - DNA, 19 bp, Mus musculus
  siRNA target sequence for Chrd (NM_009893.1,1283-1301).
ggtcagccagcttcatatt

SEQ ID NO: 684314 - DNA, 19 bp, Mus musculus
  siRNA target sequence for Chrd (NM_009893.1,1286-1304).
cagccagcttcatattgct

SEQ ID NO: 684315 - DNA, 19 bp, Mus musculus
  siRNA target sequence for Chrd (NM_009893.1,1478-1496).
cccgaggggctcatatgct

SEQ ID NO: 684316 - DNA, 19 bp, Mus musculus
  siRNA target sequence for Chrd (NM_009893.1,1506-1524).
cgagctgttcctgaatgtt

SEQ ID NO: 684317 - DNA, 19 bp, Mus musculus
  siRNA target sequence for Chrd (NM_009893.1,1588-1606).
cacagtgcccgctatgaca

SEQ ID NO: 684318 - DNA, 19 bp, Mus musculus
  siRNA target sequence for Chrd (NM_009893.1,1592-1610).
gtgcccgctatgacagatt

SEQ ID NO: 684319 - DNA, 19 bp, Mus musculus
  siRNA target sequence for Chrd (NM_009893.1,1701-1719).
cttacactatgaagttcta

SEQ ID NO: 684320 - DNA, 19 bp, Mus musculus
  siRNA target sequence for Chrd (NM_009893.1,1827-1845).
ggctcagggcgtggtaaaa

SEQ ID NO: 684321 - DNA, 19 bp, Mus musculus
  siRNA target sequence for Chrd (NM_009893.1,1829-1847).
ctcagggcgtggtaaaaga

SEQ ID NO: 684322 - DNA, 19 bp, Mus musculus
  siRNA target sequence for Chrd (NM_009893.1,2099-2117).
ggagaccccgagatcctaa

SEQ ID NO: 684323 - DNA, 19 bp, Mus musculus
  siRNA target sequence for Chrd (NM_009893.1,2107-2125).
cgagatcctaacacatgtt

SEQ ID NO: 684324 - DNA, 19 bp, Mus musculus
  siRNA target sequence for Chrd (NM_009893.1,2108-2126).
gagatcctaacacatgttt

SEQ ID NO: 684325 - DNA, 19 bp, Mus musculus
  siRNA target sequence for Chrd (NM_009893.1,2110-2128).
gatcctaacacatgtttct

SEQ ID NO: 684326 - DNA, 19 bp, Mus musculus
  siRNA target sequence for Chrd (NM_009893.1,2159-2177).
gctgggcacccaactatga

SEQ ID NO: 684327 - DNA, 19 bp, Mus musculus
  siRNA target sequence for Chrd (NM_009893.1,2421-2439).
ctttggcctaattaagtgt

SEQ ID NO: 684328 - DNA, 19 bp, Mus musculus
  siRNA target sequence for Nog (NM_008711.1,80-98).
gccagcactatctacacat

SEQ ID NO: 684329 - DNA, 19 bp, Mus musculus
  siRNA target sequence for Nog (NM_008711.1,560-578).
ccgagggcatggtgtgtaa

SEQ ID NO: 684330 - DNA, 19 bp, Mus musculus
  siRNA target sequence for Nog (NM_008711.1,657-675).
catccagtaccccatcatt

SEQ ID NO: 684331 - DNA, 19 bp, Mus musculus
  siRNA target sequence for Nog (NM_008711.1,668-686).
ccatcatttccgagtgtaa

SEQ ID NO: 684332 - DNA, 19 bp, Mus musculus
  siRNA target sequence for Numb (NM_010949.1,27-45).
gagaaagaaagacgtttat

SEQ ID NO: 684333 - DNA, 19 bp, Mus musculus
  siRNA target sequence for Numb (NM_010949.1,110-128).
gtagcttcccagttaagta

SEQ ID NO: 684334 - DNA, 19 bp, Mus musculus
  siRNA target sequence for Numb (NM_010949.1,132-150).
cggccacgtagaagttgat

SEQ ID NO: 684335 - DNA, 19 bp, Mus musculus
  siRNA target sequence for Numb (NM_010949.1,175-193).
gaagatgccgtaaagagat

SEQ ID NO: 684336 - DNA, 19 bp, Mus musculus
  siRNA target sequence for Numb (NM_010949.1,178-196).
gatgccgtaaagagattga

SEQ ID NO: 684337 - DNA, 19 bp, Mus musculus
  siRNA target sequence for Numb (NM_010949.1,191-209).
gattgaaagctgaaaggaa

SEQ ID NO: 684338 - DNA, 19 bp, Mus musculus
  siRNA target sequence for Numb (NM_010949.1,200-218).
ctgaaaggaagttcttcaa

SEQ ID NO: 684339 - DNA, 19 bp, Mus musculus
  siRNA target sequence for Numb (NM_010949.1,289-307).
gttgtggacgagaaaacta

SEQ ID NO: 684340 - DNA, 19 bp, Mus musculus
  siRNA target sequence for Numb (NM_010949.1,315-333).
catagttgaccagacaata

SEQ ID NO: 684341 - DNA, 19 bp, Mus musculus
  siRNA target sequence for Numb (NM_010949.1,355-373).
ccagataggaactttgaca
